United States Patent Application Publication US 2025/0327063 A1 - sequence listing, part 8

SEQ ID NO: 106654 - DNA, 80 bp, synthetic construct
  misc_feature 1..80: note = Artificially Synthesized Probe
  source 1..80: mol_type = other DNA
gtcccacctacttgtgaggctgaagcagggaaatcgcttgaacccaggaagtggaggttgcagtaagccgagattgcacc

SEQ ID NO: 106655 - DNA, 80 bp, synthetic construct
  misc_feature 1..80: note = Artificially Synthesized Probe
  source 1..80: mol_type = other DNA
agaccatcctcgctaacatggtgaaaccccgtatctactaaaaatacaaaaaaattagctgggcgtggtggcgggcgcct

SEQ ID NO: 106656 - DNA, 80 bp, synthetic construct; identical to SEQ ID NO: 36856
  misc_feature 1..80: note = Artificially Synthesized Probe
  source 1..80: mol_type = other DNA

SEQ ID NO: 106657 - DNA, 80 bp, synthetic construct
  misc_feature 1..80: note = Artificially Synthesized Probe
  source 1..80: mol_type = other DNA
ttcatttatttacttatttatttttatttttttgggacagggtctggctctgtctctgtccaggctggagttccgtggtg

SEQ ID NO: 106658 - DNA, 80 bp, synthetic construct
  misc_feature 1..80: note = Artificially Synthesized Probe
  source 1..80: mol_type = other DNA
cttcctcctcctagaaattatgcaaagtgatagggagatatggtggtgagggggggaatgaggcagaaatcccatattca

SEQ ID NO: 106659 - DNA, 80 bp, synthetic construct
  misc_feature 1..80: note = Artificially Synthesized Probe
  source 1..80: mol_type = other DNA
ctacttgggaggctaaggtgggagaatcacttgagcccagagggcggaggttgcagtgagctgagagcacaccactgcac

SEQ ID NO: 106660 - DNA, 80 bp, synthetic construct; identical to SEQ ID NO: 36857
  misc_feature 1..80: note = Artificially Synthesized Probe
  source 1..80: mol_type = other DNA

SEQ ID NO: 106661 - DNA, 80 bp, synthetic construct
  misc_feature 1..80: note = Artificially Synthesized Probe
  source 1..80: mol_type = other DNA
gctcacgcctgtaatccaaacactttgggaggccaaggcgagaggattgcttgagcccaggaatgcaagaccagcttgat

SEQ ID NO: 106662 - DNA, 80 bp, synthetic construct
  misc_feature 1..80: note = Artificially Synthesized Probe
  source 1..80: mol_type = other DNA
ccaaatagctgggaccacaggtgcctgccaccatgcccagctaatttttgtatttttagtagagatggggtttcaccatg

SEQ ID NO: 106663 - DNA, 80 bp, synthetic construct
  misc_feature 1..80: note = Artificially Synthesized Probe
  source 1..80: mol_type = other DNA
atgtgaccggtgtccttgtaagaagagaaaatttggacatggagagacattagaaacgtgtgagtgcgccgggcacggtg

SEQ ID NO: 106664 - DNA, 80 bp, synthetic construct; identical to SEQ ID NO: 36858
  misc_feature 1..80: note = Artificially Synthesized Probe
  source 1..80: mol_type = other DNA

SEQ ID NO: 106665 - DNA, 80 bp, synthetic construct
  misc_feature 1..80: note = Artificially Synthesized Probe
  source 1..80: mol_type = other DNA
ctactaaaactacaaaaattaccagggtgtggtgtcgtgcacctgtaatcccagctacttgggaggctgaagcaggagaa

SEQ ID NO: 106666 - DNA, 80 bp, synthetic construct
  misc_feature 1..80: note = Artificially Synthesized Probe
  source 1..80: mol_type = other DNA
atagagattcatggaaaacatgacaaaataaggcaagacaaaactgacaaaatccaggaaagaagcagaagggagccggg

SEQ ID NO: 106667 - DNA, 80 bp, synthetic construct
  misc_feature 1..80: note = Artificially Synthesized Probe
  source 1..80: mol_type = other DNA
aggaggttgaggctgcagtgagacatgttcgtgccactgcactccagcttcggcaacagagtgggaccctgtctcagaag

SEQ ID NO: 106668 - DNA, 80 bp, synthetic construct; identical to SEQ ID NO: 36859
  misc_feature 1..80: note = Artificially Synthesized Probe
  source 1..80: mol_type = other DNA

SEQ ID NO: 106669 - DNA, 80 bp, synthetic construct
  misc_feature 1..80: note = Artificially Synthesized Probe
  source 1..80: mol_type = other DNA
tcgggagttcaagaccaccctggccaacatggtgaaacctgtctctactaaaaatacaaaaattagaatttgtgaggcga

SEQ ID NO: 106670 - DNA, 80 bp, synthetic construct
  misc_feature 1..80: note = Artificially Synthesized Probe
  source 1..80: mol_type = other DNA
ggtattatttggggaaatgaaatcaacttattgagcacacacctaggctaaaaggtggtgcccatcctacggggataagg

SEQ ID NO: 106671 - DNA, 80 bp, synthetic construct
  misc_feature 1..80: note = Artificially Synthesized Probe
  source 1..80: mol_type = other DNA
agaccaaagaaagccaacatgcacaattgaaattttcaacgaagataacccaaacattagaacaaataagtatttaactg

SEQ ID NO: 106672 - DNA, 80 bp, synthetic construct
  misc_feature 1..80: note = Artificially Synthesized Probe
  source 1..80: mol_type = other DNA
gctgggcgtggtggctcatgcctgtaatcctagcactttgggaggccaaggtaggaggatcactggaggtcaggagttcg

SEQ ID NO: 106673 - DNA, 80 bp, synthetic construct
  misc_feature 1..80: note = Artificially Synthesized Probe
  source 1..80: mol_type = other DNA
tgtgatcatgccactgcactccagcctgagcaacagagcaagaccctgtctcaaaaaaacaaatgaataaagttatgagc

SEQ ID NO: 106674 - DNA, 80 bp, synthetic construct; identical to SEQ ID NO: 36860
  misc_feature 1..80: note = Artificially Synthesized Probe
  source 1..80: mol_type = other DNA

SEQ ID NO: 106675 - DNA, 80 bp, synthetic construct
  misc_feature 1..80: note = Artificially Synthesized Probe
  source 1..80: mol_type = other DNA
ttttcttgaggacactgctaatgaataaacattactcaccaatggatagcaaagggaacttcagcaaagggacaagcaag

SEQ ID NO: 106676 - DNA, 80 bp, synthetic construct
  misc_feature 1..80: note = Artificially Synthesized Probe
  source 1..80: mol_type = other DNA
gaggacaaagattatggaataaatgaagtagggtgagtttttgcaggctgtttcatctataataaccgagagttaaaaga

SEQ ID NO: 106677 - DNA, 80 bp, synthetic construct; identical to SEQ ID NO: 36861
  misc_feature 1..80: note = Artificially Synthesized Probe
  source 1..80: mol_type = other DNA

SEQ ID NO: 106678 - DNA, 80 bp, synthetic construct
  misc_feature 1..80: note = Artificially Synthesized Probe
  source 1..80: mol_type = other DNA
aaaccccatctctactaaaatacaaaattagctgggcatgctggtgcatgcctgtaatcccagctactcgggaggctgag

SEQ ID NO: 106679 - DNA, 80 bp, synthetic construct
  misc_feature 1..80: note = Artificially Synthesized Probe
  source 1..80: mol_type = other DNA
agtcattcatggaggagaagggaaagttcttccttacagcagaatttcaaccaataaatgtataatgaatgatgaaagca

SEQ ID NO: 106680 - DNA, 80 bp, synthetic construct
  misc_feature 1..80: note = Artificially Synthesized Probe
  source 1..80: mol_type = other DNA
acttgtctctgcaaaaaaattagccaggcatgatggtggatcacttgagcccagaaggtcgaggttgcagtaagcagtga

SEQ ID NO: 106681 - DNA, 80 bp, synthetic construct
  misc_feature 1..80: note = Artificially Synthesized Probe
  source 1..80: mol_type = other DNA
cgaaatcagctgtttttattttattttatttatttattttgtagagatggggtctcactatgttgaccaggctggtctca

SEQ ID NO: 106682 - DNA, 80 bp, synthetic construct; identical to SEQ ID NO: 36862
  misc_feature 1..80: note = Artificially Synthesized Probe
  source 1..80: mol_type = other DNA

SEQ ID NO: 106683 - DNA, 80 bp, synthetic construct
  misc_feature 1..80: note = Artificially Synthesized Probe
  source 1..80: mol_type = other DNA
attagctgggtgtggtggtgcatgcctatagtcccagctactcaggaggttgaggcaaggagaatcgcttaaacccagga

SEQ ID NO: 106684 - DNA, 80 bp, synthetic construct
  misc_feature 1..80: note = Artificially Synthesized Probe
  source 1..80: mol_type = other DNA
agaactttattgcttacagcacagcaagcagtgtgggcagtaggatatttgcatcagttcccctttccctccaacttcca

SEQ ID NO: 106685 - DNA, 80 bp, synthetic construct
  misc_feature 1..80: note = Artificially Synthesized Probe
  source 1..80: mol_type = other DNA
gcccaggctggagtgcaatggcgctattttggcccactgcaacctctgcttcctgggttcaagctattctcctgcctcag

SEQ ID NO: 106686 - DNA, 80 bp, synthetic construct
  misc_feature 1..80: note = Artificially Synthesized Probe
  source 1..80: mol_type = other DNA
agatggggtctcaccatgttgtctaggctggtcttgaactcctggcctcaaaggatcctcccacgttggccttccaaagt

SEQ ID NO: 106687 - DNA, 80 bp, synthetic construct; identical to SEQ ID NO: 36863
  misc_feature 1..80: note = Artificially Synthesized Probe
  source 1..80: mol_type = other DNA

SEQ ID NO: 106688 - DNA, 80 bp, synthetic construct
  misc_feature 1..80: note = Artificially Synthesized Probe
  source 1..80: mol_type = other DNA
tgctctttgtccaggaagaaacattaacttgtctctgaagattagcaactgtataaacaaccctgagaaaagccccagat

SEQ ID NO: 106689 - DNA, 80 bp, synthetic construct
  misc_feature 1..80: note = Artificially Synthesized Probe
  source 1..80: mol_type = other DNA
cactttgggaggctgaggcaggaggactgcttgagcccagaagtttgaaactcacccagacaacatagcatgaccttctc

SEQ ID NO: 106690 - DNA, 80 bp, synthetic construct
  misc_feature 1..80: note = Artificially Synthesized Probe
  source 1..80: mol_type = other DNA
gagaccctgtctcaaaaaaaaaaaaagaaaaaatggatgcttaaattagtaggcattgttatgatgaaaaacagaacagt

SEQ ID NO: 106691 - DNA, 80 bp, synthetic construct; identical to SEQ ID NO: 36864
  misc_feature 1..80: note = Artificially Synthesized Probe
  source 1..80: mol_type = other DNA

SEQ ID NO: 106692 - DNA, 80 bp, synthetic construct
  misc_feature 1..80: note = Artificially Synthesized Probe
  source 1..80: mol_type = other DNA
cggtgttgcaccatgttggccaggatggtcttgatctcttgacctcacgatccgccggccttggcctcccaaagtgctgg

SEQ ID NO: 106693 - DNA, 80 bp, synthetic construct; identical to SEQ ID NO: 36829
  misc_feature 1..80: note = Artificially Synthesized Probe
  source 1..80: mol_type = other DNA

SEQ ID NO: 106694 - DNA, 80 bp, synthetic construct
  misc_feature 1..80: note = Artificially Synthesized Probe
  source 1..80: mol_type = other DNA
tggtgaaaccccatttctactaaaagtacaaaaattagcccggcatggtggtgggtgcctgtaatcccagctactctgga

SEQ ID NO: 106695 - DNA, 80 bp, synthetic construct
  misc_feature 1..80: note = Artificially Synthesized Probe
  source 1..80: mol_type = other DNA
taagggacagtctgtaaaataactggccagtattcaaaaaaatgccaagatcattaaagactgaaaaattgcagaactgt

SEQ ID NO: 106696 - DNA, 80 bp, synthetic construct; identical to SEQ ID NO: 36865
  misc_feature 1..80: note = Artificially Synthesized Probe
  source 1..80: mol_type = other DNA

SEQ ID NO: 106697 - DNA, 80 bp, synthetic construct
  misc_feature 1..80: note = Artificially Synthesized Probe
  source 1..80: mol_type = other DNA
taagttcagggatatatgtgcagaatgagcagttttgttagataggtatacatatcccatggtggtttgctgcacccttc

SEQ ID NO: 106698 - DNA, 80 bp, synthetic construct
  misc_feature 1..80: note = Artificially Synthesized Probe
  source 1..80: mol_type = other DNA
actacacgcacccgccaccatgcccagctaatttttttttttgtatttttagtagagacgaggtttcaccgtgttagcca

SEQ ID NO: 106699 - DNA, 80 bp, synthetic construct; identical to SEQ ID NO: 36866
  misc_feature 1..80: note = Artificially Synthesized Probe
  source 1..80: mol_type = other DNA

SEQ ID NO: 106700 - DNA, 80 bp, synthetic construct
  misc_feature 1..80: note = Artificially Synthesized Probe
  source 1..80: mol_type = other DNA
ttaagtgattctcccgcctcagcctcccgaggaactgggattacaggcagccgccaccatgcccagctaatttttgtatt

SEQ ID NO: 106701 - DNA, 80 bp, synthetic construct
  misc_feature 1..80: note = Artificially Synthesized Probe
  source 1..80: mol_type = other DNA
tgttgcccaggctggagtgcagtgacatgatctcggctcactgcaacctctgcttcctgagttcaagcaattctcatgcc

SEQ ID NO: 106702 - DNA, 80 bp, synthetic construct
  misc_feature 1..80: note = Artificially Synthesized Probe
  source 1..80: mol_type = other DNA
gtgcgccaccatgcttggcctcctcataacatttttaacagcagttataataaatccgcatgcacaccgtgtaatgccta

SEQ ID NO: 106703 - DNA, 80 bp, synthetic construct
  misc_feature 1..80: note = Artificially Synthesized Probe
  source 1..80: mol_type = other DNA
ctgaatagcagactgtgaacaacttaaacatcagtcagtaggtgaccggttagttgtgtcattctttttgagaaagggtc

SEQ ID NO: 106704 - DNA, 80 bp, synthetic construct
  misc_feature 1..80: note = Artificially Synthesized Probe
  source 1..80: mol_type = other DNA
aaaacaaaagtacaacctgaaaaaaaattagcacccttaatacatacagcaggaggacaggcttccatatctgtggcacc

SEQ ID NO: 106705 - DNA, 80 bp, synthetic construct; identical to SEQ ID NO: 36867
  misc_feature 1..80: note = Artificially Synthesized Probe
  source 1..80: mol_type = other DNA

SEQ ID NO: 106706 - DNA, 80 bp, synthetic construct
  misc_feature 1..80: note = Artificially Synthesized Probe
  source 1..80: mol_type = other DNA
cttcccattagtcttgatatggcacaatctccaagacacttaaagtataacacaccctgcagtgtgtattatgaattgcc

SEQ ID NO: 106707 - DNA, 80 bp, synthetic construct
  misc_feature 1..80: note = Artificially Synthesized Probe
  source 1..80: mol_type = other DNA
ggtaactttgcttgtctctagtgttgaactagaagtgggaggaagatttaattttcactacatgccctttggtgcctttt

SEQ ID NO: 106708 - DNA, 80 bp, synthetic construct; identical to SEQ ID NO: 36868
  misc_feature 1..80: note = Artificially Synthesized Probe
  source 1..80: mol_type = other DNA

SEQ ID NO: 106709 - DNA, 80 bp, synthetic construct
  misc_feature 1..80: note = Artificially Synthesized Probe
  source 1..80: mol_type = other DNA
gtctcaactcccatcgcaccagtcctgcagctttctaaaggtatccagcactttctaccttgcattctatcttcatcttc

SEQ ID NO: 106710 - DNA, 80 bp, synthetic construct
  misc_feature 1..80: note = Artificially Synthesized Probe
  source 1..80: mol_type = other DNA
ctgcccccgcggagcacaagccccgcctgcgtcccgagctcccgggtccgcaaagctgggccccaaagagctccaacgcc

SEQ ID NO: 106711 - DNA, 80 bp, synthetic construct
  misc_feature 1..80: note = Artificially Synthesized Probe
  source 1..80: mol_type = other DNA
ctgaccaatgccagctttctgcatagatgatatcttcacttaaatgtcactgagaaggctaaaaatggccgtcggtaaag

SEQ ID NO: 106712 - DNA, 80 bp, synthetic construct; identical to SEQ ID NO: 36830
  misc_feature 1..80: note = Artificially Synthesized Probe
  source 1..80: mol_type = other DNA

SEQ ID NO: 106713 - DNA, 80 bp, synthetic construct
  misc_feature 1..80: note = Artificially Synthesized Probe
  source 1..80: mol_type = other DNA
ttgcccaggctggagtgcagtggtgtgatctcggctcactgcaatatccgcctcccaggttcaaaccattctcgtgtctc

SEQ ID NO: 106714 - DNA, 80 bp, synthetic construct
  misc_feature 1..80: note = Artificially Synthesized Probe
  source 1..80: mol_type = other DNA
aaaaaaacctctccaggaaatcaatagtcatcatataatactggaactacagttaaaaaaaaaaaaaaagcaatcttcta

SEQ ID NO: 106715 - DNA, 80 bp, synthetic construct
  misc_feature 1..80: note = Artificially Synthesized Probe
  source 1..80: mol_type = other DNA
ggcgtgagccaccacacccagccttaatatattaaatttaaaatgttaatatattatgtcacccaagaggaaattccagc

SEQ ID NO: 106716 - DNA, 80 bp, synthetic construct
  misc_feature 1..80: note = Artificially Synthesized Probe
  source 1..80: mol_type = other DNA
atcatctcaggccaggagtttgagaccagcgtgaccaacatgatgaaaccccgactctactaaaaaaaaaatacaaaaat

SEQ ID NO: 106717 - DNA, 80 bp, synthetic construct; identical to SEQ ID NO: 36831
  misc_feature 1..80: note = Artificially Synthesized Probe
  source 1..80: mol_type = other DNA

SEQ ID NO: 106718 - DNA, 80 bp, synthetic construct
  misc_feature 1..80: note = Artificially Synthesized Probe
  source 1..80: mol_type = other DNA
cgcctcccagcttcaagtgattctcctccctcagcctcccaagtagctgggactataggcatgtgccaccatgcccagct

SEQ ID NO: 106719 - DNA, 80 bp, synthetic construct
  misc_feature 1..80: note = Artificially Synthesized Probe
  source 1..80: mol_type = other DNA
ctaaattgcttcaaatgcatagaagctcccataaagttgaaatataacatatagcaaagtaagtcatagggggcttcgta

SEQ ID NO: 106720 - DNA, 80 bp, synthetic construct
  misc_feature 1..80: note = Artificially Synthesized Probe
  source 1..80: mol_type = other DNA
tctgatgtgactgttcaagttgcattccaaagacattacccagaatactgaacaatggaactgctaagaaagggaacatg

SEQ ID NO: 106721 - DNA, 80 bp, synthetic construct; identical to SEQ ID NO: 36832
  misc_feature 1..80: note = Artificially Synthesized Probe
  source 1..80: mol_type = other DNA

SEQ ID NO: 106722 - DNA, 80 bp, synthetic construct
  misc_feature 1..80: note = Artificially Synthesized Probe
  source 1..80: mol_type = other DNA
gaaataagatacattttcttctcctgaatgcatttgcctgaggtatgtttgacaaggtatactgcctggggtgttaatgt

SEQ ID NO: 106723 - DNA, 80 bp, synthetic construct
  misc_feature 1..80: note = Artificially Synthesized Probe
  source 1..80: mol_type = other DNA
cctgccaccacacccagttactttttttttttttttttttgagatggagtctccctctgtctctgtcatcaggctggagt

SEQ ID NO: 106724 - DNA, 80 bp, synthetic construct
  misc_feature 1..80: note = Artificially Synthesized Probe
  source 1..80: mol_type = other DNA
tggtcttgaactcctgacctcaggtgatctgcctgtcttggcctcccaaagtgctgggattacatgcatgagccaccatg

SEQ ID NO: 106725 - DNA, 80 bp, synthetic construct
  misc_feature 1..80: note = Artificially Synthesized Probe
  source 1..80: mol_type = other DNA
tctactaaaaatacaaaaattagctgggcatgttggcacatgcctgtaatcccagctacctgggaggctgaggcaggaga

SEQ ID NO: 106726 - DNA, 80 bp, synthetic construct
  misc_feature 1..80: note = Artificially Synthesized Probe
  source 1..80: mol_type = other DNA
ctcccagcagctctacaaaatcagtgatataccatttggcgttatccttgacttgttgcctgatcacatttcctccaaat

SEQ ID NO: 106727 - DNA, 80 bp, synthetic construct; identical to SEQ ID NO: 36833
  misc_feature 1..80: note = Artificially Synthesized Probe
  source 1..80: mol_type = other DNA

SEQ ID NO: 106728 - DNA, 80 bp, synthetic construct
  misc_feature 1..80: note = Artificially Synthesized Probe
  source 1..80: mol_type = other DNA
catctctacaaaaaatattttaaaggctgggtatagtggctcaaacctataattccaacactttgggaggctgaggtggg

SEQ ID NO: 106729 - DNA, 80 bp, synthetic construct
  misc_feature 1..80: note = Artificially Synthesized Probe
  source 1..80: mol_type = other DNA
gaaggctgatgctgcagtgagctctattcatgccactgcactccagcctgggtgacaaagtgagaccctgtctctcaaaa

SEQ ID NO: 106730 - DNA, 80 bp, synthetic construct; identical to SEQ ID NO: 36834
  misc_feature 1..80: note = Artificially Synthesized Probe
  source 1..80: mol_type = other DNA

SEQ ID NO: 106731 - DNA, 80 bp, synthetic construct
  misc_feature 1..80: note = Artificially Synthesized Probe
  source 1..80: mol_type = other DNA
ctgcagtgagctgacatttcaccactgcactccagcctgagtgacagagtgagacttcatctcgaaaaaatacaatttaa

SEQ ID NO: 106732 - DNA, 80 bp, synthetic construct
  misc_feature 1..80: note = Artificially Synthesized Probe
  source 1..80: mol_type = other DNA
ggtgtgggggttgctctgctatgagtctctgcacctgctccctggagggctggatgagggctaagcgctctgtgagagca

SEQ ID NO: 106733 - DNA, 80 bp, synthetic construct
  misc_feature 1..80: note = Artificially Synthesized Probe
  source 1..80: mol_type = other DNA
caacagacaggctttgctactaggagagcaaggccttggaataaacttttgaaggattgcttgaaaataacattaacagg

SEQ ID NO: 106734 - DNA, 80 bp, synthetic construct
  misc_feature 1..80: note = Artificially Synthesized Probe
  source 1..80: mol_type = other DNA
aaaaaatgcaaaaattagccaggtgtggtggtgcacgcctgtaatcccagctacttaggaggctgaggcaggagaattgc

SEQ ID NO: 106735 - DNA, 80 bp, synthetic construct; identical to SEQ ID NO: 36835
  misc_feature 1..80: note = Artificially Synthesized Probe
  source 1..80: mol_type = other DNA

SEQ ID NO: 106736 - DNA, 80 bp, synthetic construct
  misc_feature 1..80: note = Artificially Synthesized Probe
  source 1..80: mol_type = other DNA
gcgcctgtaatcccagctactcaaaaggctgaggcaggagaattgcttgaatctgggaggcagaggttgcagtgagctga

SEQ ID NO: 106737 - DNA, 80 bp, synthetic construct; identical to SEQ ID NO: 36826
  misc_feature 1..80: note = Artificially Synthesized Probe
  source 1..80: mol_type = other DNA

SEQ ID NO: 106738 - DNA, 80 bp, synthetic construct
  misc_feature 1..80: note = Artificially Synthesized Probe
  source 1..80: mol_type = other DNA
ggatccaccaagagactctgaacctttccagggaaccactaaggtcacactttcaaccatgacacaaagccactggacac

SEQ ID NO: 106739 - DNA, 80 bp, synthetic construct; identical to SEQ ID NO: 36836
  misc_feature 1..80: note = Artificially Synthesized Probe
  source 1..80: mol_type = other DNA

SEQ ID NO: 106740 - DNA, 80 bp, synthetic construct; identical to SEQ ID NO: 36869
  misc_feature 1..80: note = Artificially Synthesized Probe
  source 1..80: mol_type = other DNA

SEQ ID NO: 106741 - DNA, 80 bp, synthetic construct
  misc_feature 1..80: note = Artificially Synthesized Probe
  source 1..80: mol_type = other DNA
gtatgcagtgtgtgatgatcaaatcaggataattagcatatggatcacctcaaacatttgtcatttctttgtgttaggaa

SEQ ID NO: 106742 - DNA, 80 bp, synthetic construct; identical to SEQ ID NO: 36977
  misc_feature 1..80: note = Artificially Synthesized Probe
  source 1..80: mol_type = other DNA

SEQ ID NO: 106743 - DNA, 80 bp, synthetic construct
  misc_feature 1..80: note = Artificially Synthesized Probe
  source 1..80: mol_type = other DNA
ttccctttagttttattgttttctattttaatattgcaagatgttttatatttgtgattacaaataaaaactccattatt

SEQ ID NO: 106744 - DNA, 80 bp, synthetic construct
  misc_feature 1..80: note = Artificially Synthesized Probe
  source 1..80: mol_type = other DNA
gttatacaaatatctgggaaaagagttaagagtacagatgcaaaagcccttagacaagagaatgagcttggtatatctga

SEQ ID NO: 106745 - DNA, 80 bp, synthetic construct
  misc_feature 1..80: note = Artificially Synthesized Probe
  source 1..80: mol_type = other DNA
tgtgttcatgctttcaaaatacagatgagtgaggaaagtagggagaaggggtaataaaggaagctgagagatcagttaag

SEQ ID NO: 106746 - DNA, 80 bp, synthetic construct; identical to SEQ ID NO: 36978
  misc_feature 1..80: note = Artificially Synthesized Probe
  source 1..80: mol_type = other DNA

SEQ ID NO: 106747 - DNA, 80 bp, synthetic construct
  misc_feature 1..80: note = Artificially Synthesized Probe
  source 1..80: mol_type = other DNA
tatagaccactgtattatgttaatgtccctctccttcctccctttaggtaaagtttttagggctaataaatcccaaatat

SEQ ID NO: 106748 - DNA, 80 bp, synthetic construct
  misc_feature 1..80: note = Artificially Synthesized Probe
  source 1..80: mol_type = other DNA
ttatactcctttaggttattagaatttatacatgcattatttcatttgacctgtaaactctaagtaactttgcatggaaa

SEQ ID NO: 106749 - DNA, 80 bp, synthetic construct
  misc_feature 1..80: note = Artificially Synthesized Probe
  source 1..80: mol_type = other DNA
gtgaaatcccatctctacaaaaaatataaaagctagctgggtgtggtggcatgcacctgtagtcctagctacttgggagg

SEQ ID NO: 106750 - DNA, 80 bp, synthetic construct
  misc_feature 1..80: note = Artificially Synthesized Probe
  source 1..80: mol_type = other DNA
attctttttgaactcagctgtttgtgaattgaattttgtaattcaaatgctatattatgtaaactattgatgactttcaa

SEQ ID NO: 106751 - DNA, 80 bp, synthetic construct; identical to SEQ ID NO: 36979
  misc_feature 1..80: note = Artificially Synthesized Probe
  source 1..80: mol_type = other DNA

SEQ ID NO: 106752 - DNA, 80 bp, synthetic construct
  misc_feature 1..80: note = Artificially Synthesized Probe
  source 1..80: mol_type = other DNA
agtacctagcaagaaagaaaatgttgaacatcttaagaagagggtcatttaaaaggcctcttaaagatcatgtttgttac

SEQ ID NO: 106753 - DNA, 80 bp, synthetic construct
  misc_feature 1..80: note = Artificially Synthesized Probe
  source 1..80: mol_type = other DNA
tcaaatccagaggctagcagttcaacttctgtaacaccagatgttagtgacaatgaacctgatcattatagatattctga

SEQ ID NO: 106754 - DNA, 80 bp, synthetic construct
  misc_feature 1..80: note = Artificially Synthesized Probe
  source 1..80: mol_type = other DNA
actgaaaatggacctttttttttttaatggcaataggacattgtgtcagattaccagttataggaacaattctcttttcc

SEQ ID NO: 106755 - DNA, 80 bp, synthetic construct
  misc_feature 1..80: note = Artificially Synthesized Probe
  source 1..80: mol_type = other DNA
cagttttataaaaagtggagacagactgatgtgtatacgtaggaattttttccttttgtgttctgtcaccaactgaagtg

SEQ ID NO: 106756 - DNA, 80 bp, synthetic construct; identical to SEQ ID NO: 36980
  misc_feature 1..80: note = Artificially Synthesized Probe
  source 1..80: mol_type = other DNA

SEQ ID NO: 106757 - DNA, 80 bp, synthetic construct
  misc_feature 1..80: note = Artificially Synthesized Probe
  source 1..80: mol_type = other DNA
aaaaataatgtcataggtaagaaacacagcaacaatgacttaaccatataaatgtggaggctatcaacaaagaatgggct

SEQ ID NO: 106758 - DNA, 80 bp, synthetic construct
  misc_feature 1..80: note = Artificially Synthesized Probe
  source 1..80: mol_type = other DNA
atacctgctgtggatgcttcatgtgctgcctgcaagcttcttttttctcattaaatataaaatattttgtaatgctgcac

SEQ ID NO: 106759 - DNA, 80 bp, synthetic construct
  misc_feature 1..80: note = Artificially Synthesized Probe
  source 1..80: mol_type = other DNA
agcgttggcagattgcttgagtctggaagttcgagaccagtctgggcaacataggcagaccctgtctctacaaaaaaaaa

SEQ ID NO: 106760 - DNA, 80 bp, synthetic construct
  misc_feature 1..80: note = Artificially Synthesized Probe
  source 1..80: mol_type = other DNA
tagggaattttacttgaatactgaatacatataatgtttatattaaaaaggacatttgtgttaaaaaggaaattagagtt

SEQ ID NO: 106761 - DNA, 80 bp, synthetic construct; identical to SEQ ID NO: 36981
  misc_feature 1..80: note = Artificially Synthesized Probe
  source 1..80: mol_type = other DNA

SEQ ID NO: 106762 - DNA, 80 bp, synthetic construct
  misc_feature 1..80: note = Artificially Synthesized Probe
  source 1..80: mol_type = other DNA
aataacttattggtgctgaaattgttcactagctgtggtctgacctagttaatttacaaatacagattgaataggaccta

SEQ ID NO: 106763 - DNA, 80 bp, synthetic construct
  misc_feature 1..80: note = Artificially Synthesized Probe
  source 1..80: mol_type = other DNA
taaacattgatatatagagtattgattgattgctcataagttaaattggtaaagttagagacaactattctaacacctca

SEQ ID NO: 106764 - DNA, 80 bp, synthetic construct
  misc_feature 1..80: note = Artificially Synthesized Probe
  source 1..80: mol_type = other DNA
catggagggccaggtcataaataatgacattataatgggcttttgcactgttattatttttcctttggaatgtgaaggtc

SEQ ID NO: 106765 - DNA, 80 bp, synthetic construct
  misc_feature 1..80: note = Artificially Synthesized Probe
  source 1..80: mol_type = other DNA
tatacatactctccttactttatttcagttaccatccccatagaatttgacaagaattgctatgactgaaaggttttcga

SEQ ID NO: 106766 - DNA, 80 bp, synthetic construct; identical to SEQ ID NO: 36982
  misc_feature 1..80: note = Artificially Synthesized Probe
  source 1..80: mol_type = other DNA

SEQ ID NO: 106767 - DNA, 80 bp, synthetic construct
  misc_feature 1..80: note = Artificially Synthesized Probe
  source 1..80: mol_type = other DNA
gaaattttgtgcaatatgttcataacgatggctgtggttgccacaaagtgcctcgtttacctttaaatactgttaatgtg

SEQ ID NO: 106768 - DNA, 80 bp, synthetic construct
  misc_feature 1..80: note = Artificially Synthesized Probe
  source 1..80: mol_type = other DNA
tatatactaaaaaatttcagtctgttaaacagccttactctgattcagcctcttcagatactcttgtgctgtgcagcagt

SEQ ID NO: 106769 - DNA, 80 bp, synthetic construct
  misc_feature 1..80: note = Artificially Synthesized Probe
  source 1..80: mol_type = other DNA
tctcttagtgttataaactccacttaaaactgattaaagtctcattcttgtcattgtgtgggtgttttattaaatgagag

SEQ ID NO: 106770 - DNA, 80 bp, synthetic construct; identical to SEQ ID NO: 36983
  misc_feature 1..80: note = Artificially Synthesized Probe
  source 1..80: mol_type = other DNA

SEQ ID NO: 106771 - DNA, 80 bp, synthetic construct; identical to SEQ ID NO: 36880
  misc_feature 1..80: note = Artificially Synthesized Probe
  source 1..80: mol_type = other DNA

SEQ ID NO: 106772 - DNA, 80 bp, synthetic construct
  misc_feature 1..80: note = Artificially Synthesized Probe
  source 1..80: mol_type = other DNA
ttgtctattattctgtactctgccatcagcatatggaaagcttcatttactcatcatgacttgtgccatataaaaattga

SEQ ID NO: 106773 - DNA, 80 bp, synthetic construct
  misc_feature 1..80: note = Artificially Synthesized Probe
  source 1..80: mol_type = other DNA
tgttacagtgggacttattatttcaagtttacattttctccatgtaattttttaaaaagtaaatgaaaaaatgtgcaata

SEQ ID NO: 106774 - DNA, 80 bp, synthetic construct; identical to SEQ ID NO: 36984
  misc_feature 1..80: note = Artificially Synthesized Probe
  source 1..80: mol_type = other DNA

SEQ ID NO: 106775 - DNA, 80 bp, synthetic construct
  misc_feature 1..80: note = Artificially Synthesized Probe
  source 1..80: mol_type = other DNA
ttgattagtgctgttgctagttcagaaagaaatgtttgtgaatggaaacaagaatattcagtccaaactgttgtaaggac

SEQ ID NO: 106776 - DNA, 80 bp, synthetic construct
  misc_feature 1..80: note = Artificially Synthesized Probe
  source 1..80: mol_type = other DNA
tgtttttccatcttccaaaagatcttccttctaatatgtatatcagaatgtgggtagccagtcagacaaattcatattgg

SEQ ID NO: 106777 - DNA, 80 bp, synthetic construct
  misc_feature 1..80: note = Artificially Synthesized Probe
  source 1..80: mol_type = other DNA
agctaggtattttgagactacttccccatcacaacaacaataaaataatcactcataatcctatcacctggagacatagc

SEQ ID NO: 106778 - DNA, 80 bp, synthetic construct; identical to SEQ ID NO: 36985
  misc_feature 1..80: note = Artificially Synthesized Probe
  source 1..80: mol_type = other DNA

SEQ ID NO: 106779 - DNA, 80 bp, synthetic construct
  misc_feature 1..80: note = Artificially Synthesized Probe
  source 1..80: mol_type = other DNA
tagtaaacttcatcacctttctacttccttatagtttgaacttttcagtttttgtagttcccaaacagttgctcaattta

SEQ ID NO: 106780 - DNA, 80 bp, synthetic construct
  misc_feature 1..80: note = Artificially Synthesized Probe
  source 1..80: mol_type = other DNA
tataaaaacatgcaactctttttgatagttatttgagaattttggtgaaaaatatttagctgagggcagtatagaactta

SEQ ID NO: 106781 - DNA, 80 bp, synthetic construct
  misc_feature 1..80: note = Artificially Synthesized Probe
  source 1..80: mol_type = other DNA
ctctgttgcatgaggattctcatctgtgcttataatggttagagattttatttgtgtggaatgaagtgaggcttgtagtc

SEQ ID NO: 106782 - DNA, 80 bp, synthetic construct; identical to SEQ ID NO: 36986
  misc_feature 1..80: note = Artificially Synthesized Probe
  source 1..80: mol_type = other DNA

SEQ ID NO: 106783 - DNA, 80 bp, synthetic construct
  misc_feature 1..80: note = Artificially Synthesized Probe
  source 1..80: mol_type = other DNA
tcacagctggggtggtagagtgtgctattggctaggggcttgaagccagtgatgctgcttaacatcctatatggcacaag

SEQ ID NO: 106784 - DNA, 80 bp, synthetic construct
  misc_feature 1..80: note = Artificially Synthesized Probe
  source 1..80: mol_type = other DNA
caggcaaacatttttcattggaatttcacagttcattgtaatgaaaatgttaatcctggatgacctttgacatacagtaa

SEQ ID NO: 106785 - DNA, 80 bp, synthetic construct
  misc_feature 1..80: note = Artificially Synthesized Probe
  source 1..80: mol_type = other DNA
ttggctactgatggacaaaaaatagaaatgccttcctatggagagtatttttcctttaaaaaattaaaaaggttaattat

SEQ ID NO: 106786 - DNA, 80 bp, synthetic construct
  misc_feature 1..80: note = Artificially Synthesized Probe
  source 1..80: mol_type = other DNA
ctgggtgttctgactgctgctaggccagtattctttatatgataataagaactttgtccacagaagatatccctaataac

SEQ ID NO: 106787 - DNA, 80 bp, synthetic construct
  misc_feature 1..80: note = Artificially Synthesized Probe
  source 1..80: mol_type = other DNA
gtagtttttaaagtaatcctttttcctttaattatgtagttgttgaactgttgggagttacttttctcttactattttgt

SEQ ID NO: 106788 - DNA, 80 bp, synthetic construct; identical to SEQ ID NO: 36881
  misc_feature 1..80: note = Artificially Synthesized Probe
  source 1..80: mol_type = other DNA

SEQ ID NO: 106789 - DNA, 80 bp, synthetic construct
  misc_feature 1..80: note = Artificially Synthesized Probe
  source 1..80: mol_type = other DNA
ggcggcagcggcggcgtttctcgcctcctcttcgtcttttctaaccgtgcagcctcttcctcggcttctcctgaaaggga

SEQ ID NO: 106790 - DNA, 80 bp, synthetic construct
  misc_feature 1..80: note = Artificially Synthesized Probe
  source 1..80: mol_type = other DNA
ttacaaaagggttctaggaatagattgctgtgattttttttctgtttgcatgattttacagtttgctttgcctctcactt

SEQ ID NO: 106791 - DNA, 80 bp, synthetic construct
  misc_feature 1..80: note = Artificially Synthesized Probe
  source 1..80: mol_type = other DNA
ataggactcattgttacaattcagttgaataaggcttatgatgtttatttcagtatatgaatgaaaactatgtgcttatt

SEQ ID NO: 106792 - DNA, 80 bp, synthetic construct; identical to SEQ ID NO: 36882
  misc_feature 1..80: note = Artificially Synthesized Probe
  source 1..80: mol_type = other DNA

SEQ ID NO: 106793 - DNA, 80 bp, synthetic construct
  misc_feature 1..80: note = Artificially Synthesized Probe
  source 1..80: mol_type = other DNA
ttatacaaacctaactgaagtgttagagccttgaagatttttcccccgaattacatatagtaactctacttgtatttaat

SEQ ID NO: 106794 - DNA, 80 bp, synthetic construct
  misc_feature 1..80: note = Artificially Synthesized Probe
  source 1..80: mol_type = other DNA
taaagtggtaataacactattgctttctgtttttttaatcagaaggagtatgggcttataatgatgttactgttccctga

SEQ ID NO: 106795 - DNA, 80 bp, synthetic construct
  misc_feature 1..80: note = Artificially Synthesized Probe
  source 1..80: mol_type = other DNA
gatactaaaacaaataaccttaactttattaaattataattttttatcatgaggtggtattcatttattcatatagttag

SEQ ID NO: 106796 - DNA, 80 bp, synthetic construct
  misc_feature 1..80: note = Artificially Synthesized Probe
  source 1..80: mol_type = other DNA
ggggtgctaatgaaaacagggatggcaaaaatattttgtttgtgagtgtatgcatttatgctttttgacaacctaagaaa

SEQ ID NO: 106797 - DNA, 80 bp, synthetic construct; identical to SEQ ID NO: 36883
  misc_feature 1..80: note = Artificially Synthesized Probe
  source 1..80: mol_type = other DNA

SEQ ID NO: 106798 - DNA, 80 bp, synthetic construct
  misc_feature 1..80: note = Artificially Synthesized Probe
  source 1..80: mol_type = other DNA
tattacaatacagatactggctgagaactaaagattgtgtaataaacgcctggccttcagtcatttggttttttttttcc

SEQ ID NO: 106799 - DNA, 80 bp, synthetic construct
  misc_feature 1..80: note = Artificially Synthesized Probe
  source 1..80: mol_type = other DNA
aaaaatttgtttaaatatttttcaagttcttttcttcatcttctacaacttaattcttgtctgtatgcaaatgagcttcc

SEQ ID NO: 106800 - DNA, 80 bp, synthetic construct
  misc_feature 1..80: note = Artificially Synthesized Probe
  source 1..80: mol_type = other DNA
gggaacgccggagagttggtctctccccttctactgcctccaacacggcggcggcggcggctggcacatccagggacccg

SEQ ID NO: 106801 - DNA, 80 bp, synthetic construct
  misc_feature 1..80: note = Artificially Synthesized Probe
  source 1..80: mol_type = other DNA
tattatagaatctgattgatttaatctaccttgtttcatttagtatgttgacattttcttgagaaatttgttatgccaaa

SEQ ID NO: 106802 - DNA, 80 bp, synthetic construct; identical to SEQ ID NO: 36884
  misc_feature 1..80: note = Artificially Synthesized Probe
  source 1..80: mol_type = other DNA

SEQ ID NO: 106803 - DNA, 80 bp, synthetic construct
  misc_feature 1..80: note = Artificially Synthesized Probe
  source 1..80: mol_type = other DNA
ctcccatctaactgttggtactcttatcttcccaggtattaaacttgtatgttttaaaagcttatttacttgttgaaatg

SEQ ID NO: 106804 - DNA, 80 bp, synthetic construct
  misc_feature 1..80: note = Artificially Synthesized Probe
  source 1..80: mol_type = other DNA
taacaagcatttatagtagtttattaaaactaagggtgttatctattcaaaccaagcaatgcagacttactgttgactct

SEQ ID NO: 106805 - DNA, 80 bp, synthetic construct
  misc_feature 1..80: note = Artificially Synthesized Probe
  source 1..80: mol_type = other DNA
aggaatcatttaatattgttagatatttgtattattagaacaatctcctatgattcttactaatatagtaatgaatgaca

SEQ ID NO: 106806 - DNA, 80 bp, synthetic construct; identical to SEQ ID NO: 36885
  misc_feature 1..80: note = Artificially Synthesized Probe
  source 1..80: mol_type = other DNA

SEQ ID NO: 106807 - DNA, 80 bp, synthetic construct
  misc_feature 1..80: note = Artificially Synthesized Probe
  source 1..80: mol_type = other DNA
gctgggactacaggcgcctaccacggtggcgcccggctaattttttgtatttttagtagagacggggtttcaccgtgtta

SEQ ID NO: 106808 - DNA, 80 bp, synthetic construct
  misc_feature 1..80: note = Artificially Synthesized Probe
  source 1..80: mol_type = other DNA
tgtattagaactttgttttctgagtaccttacctatagtaggtttcaaatattggtgaattagttgatggttaggtctgc

SEQ ID NO: 106809 - DNA, 80 bp, synthetic construct
  misc_feature 1..80: note = Artificially Synthesized Probe
  source 1..80: mol_type = other DNA
aaattagtggccttatgtctttctgcataattatagagtagccaaaacctgttttaggttaatcacctctggcaaaataa

SEQ ID NO: 106810 - DNA, 80 bp, synthetic construct
  misc_feature 1..80: note = Artificially Synthesized Probe
  source 1..80: mol_type = other DNA
tagaaaattaacagttggcatttggcttagttcaagtataatgctgttgacaagtatatctgacacgtcattgaactaat

SEQ ID NO: 106811 - DNA, 80 bp, synthetic construct
  misc_feature 1..80: note = Artificially Synthesized Probe
  source 1..80: mol_type = other DNA
gctgcaaccatccagcagccgccgcagcagccattacccggctgcggtccagagccaagcggcggcagagcgaggggcat

SEQ ID NO: 106812 - DNA, 80 bp, synthetic construct; identical to SEQ ID NO: 36886
  misc_feature 1..80: note = Artificially Synthesized Probe
  source 1..80: mol_type = other DNA

SEQ ID NO: 106813 - DNA, 80 bp, synthetic construct
  misc_feature 1..80: note = Artificially Synthesized Probe
  source 1..80: mol_type = other DNA
gcaacctctgcctcccaggttcaggcgtttctcctgtctcagcctcctgagtagctgggattacaggcgcatgctgccat

SEQ ID NO: 106814 - DNA, 80 bp, synthetic construct
  misc_feature 1..80: note = Artificially Synthesized Probe
  source 1..80: mol_type = other DNA
ggcgtgagccaccgtgtctggcgatagattatttcataattaacacctgctatgaagaaaaattgattaaaatagttgag

SEQ ID NO: 106815 - DNA, 80 bp, synthetic construct
  misc_feature 1..80: note = Artificially Synthesized Probe
  source 1..80: mol_type = other DNA
tgtaaaactgtgtgtaattttcctgtatctggtttggatagctttaaaaatggttcttaagtttaatgagttcaactggg

SEQ ID NO: 106816 - DNA, 80 bp, synthetic construct; identical to SEQ ID NO: 36887
  misc_feature 1..80: note = Artificially Synthesized Probe
  source 1..80: mol_type = other DNA

SEQ ID NO: 106817 - DNA, 80 bp, synthetic construct
  misc_feature 1..80: note = Artificially Synthesized Probe
  source 1..80: mol_type = other DNA
cgagtttgtagtattgctaacaaggagaagaattactagcaagtcttgatgttacttttgaagagtgtgatgattgcatt

SEQ ID NO: 106818 - DNA, 80 bp, synthetic construct
  misc_feature 1..80: note = Artificially Synthesized Probe
  source 1..80: mol_type = other DNA
aacatgaaagttgtgaggtcaggttgtttggagaagtagaaaacttcagtagagtttatagataggcagtcttcctttct

SEQ ID NO: 106819 - DNA, 80 bp, synthetic construct
  misc_feature 1..80: note = Artificially Synthesized Probe
  source 1..80: mol_type = other DNA
caccatattgagttgccttgtaatgagacatttaaactaaatttaaataacagaattcatgcaccatctaataacaaccc

SEQ ID NO: 106820 - DNA, 80 bp, synthetic construct; identical to SEQ ID NO: 36888
  misc_feature 1..80: note = Artificially Synthesized Probe
  source 1..80: mol_type = other DNA

SEQ ID NO: 106821 - DNA, 80 bp, synthetic construct
  misc_feature 1..80: note = Artificially Synthesized Probe
  source 1..80: mol_type = other DNA
ttgtacctatgtacctttttctctttagaaaataagatttcaggctgcattaatttgatctgtacaggaatgattatatg

SEQ ID NO: 106822 - DNA, 80 bp, synthetic construct
  misc_feature 1..80: note = Artificially Synthesized Probe
  source 1..80: mol_type = other DNA
ctcccccctccccataccccatgacaggccctggtgtgtgatgttccccaccctgtgtccaagtgttctcattgttcagt

SEQ ID NO: 106823 - DNA, 80 bp, synthetic construct
  misc_feature 1..80: note = Artificially Synthesized Probe
  source 1..80: mol_type = other DNA
ggatggattcgacttagacttgacctgtatccatttctgcggctgctcctctttacctttctgtcactctcttagaacgt

SEQ ID NO: 106824 - DNA, 80 bp, synthetic construct
  misc_feature 1..80: note = Artificially Synthesized Probe
  source 1..80: mol_type = other DNA
tcttaatccagtctatcattgatggacatttgggttggttccaagtctttgctattgtgaatagtgctgcagtaaacata

SEQ ID NO: 106825 - DNA, 80 bp, synthetic construct; identical to SEQ ID NO: 36889
  misc_feature 1..80: note = Artificially Synthesized Probe
  source 1..80: mol_type = other DNA

SEQ ID NO: 106826 - DNA, 80 bp, synthetic construct
  misc_feature 1..80: note = Artificially Synthesized Probe
  source 1..80: mol_type = other DNA
ttaagttctttgtagattctggatattagccctttgtcagatgggtagattgtaaaagttttctcccattctctaggttg

SEQ ID NO: 106827 - DNA, 80 bp, synthetic construct
  misc_feature 1..80: note = Artificially Synthesized Probe
  source 1..80: mol_type = other DNA
catcattaacaattcaacatagcttattaataggaaaaaaaaacctagtaacaaatgtaaaatctttgattaaatgagaa

SEQ ID NO: 106828 - DNA, 80 bp, synthetic construct; identical to SEQ ID NO: 36890
  misc_feature 1..80: note = Artificially Synthesized Probe
  source 1..80: mol_type = other DNA

SEQ ID NO: 106829 - DNA, 80 bp, synthetic construct
  misc_feature 1..80: note = Artificially Synthesized Probe
  source 1..80: mol_type = other DNA
caatagcaggttgctctttgtgctaagactgacaccatgaggacacagatttgggggaagggggaatctctaggcaaagg

SEQ ID NO: 106830 - DNA, 80 bp, synthetic construct
  misc_feature 1..80: note = Artificially Synthesized Probe
  source 1..80: mol_type = other DNA
gttttatgagccaggcagcttcagactttgcttttgatgctctttgttcattacctctaaagctgtattatcactttcat

SEQ ID NO: 106831 - DNA, 80 bp, synthetic construct
  misc_feature 1..80: note = Artificially Synthesized Probe
  source 1..80: mol_type = other DNA
tacctatatattaagcactacaaagaaacttttacaatggctttatttttagcaaaccatcatagttaaaataagattta

SEQ ID NO: 106832 - DNA, 80 bp, synthetic construct
  misc_feature 1..80: note = Artificially Synthesized Probe
  source 1..80: mol_type = other DNA
aactcggaagttgttcaagaaaagatattttgttatttagatgtaacttggaacatatttctagtgtttcaagtcatgat

SEQ ID NO: 106833 - DNA, 80 bp, synthetic construct; identical to SEQ ID NO: 36891
  misc_feature 1..80: note = Artificially Synthesized Probe
  source 1..80: mol_type = other DNA

SEQ ID NO: 106834 - DNA, 80 bp, synthetic construct
  misc_feature 1..80: note = Artificially Synthesized Probe
  source 1..80: mol_type = other DNA
tggggtgaccatccaacttaggcaagatagctagtaccatgtatgcatttcttttacctttcttattgtatatacagtaa

SEQ ID NO: 106835 - DNA, 80 bp, synthetic construct; identical to SEQ ID NO: 36871
  misc_feature 1..80: note = Artificially Synthesized Probe
  source 1..80: mol_type = other DNA

SEQ ID NO: 106836 - DNA, 80 bp, synthetic construct
  misc_feature 1..80: note = Artificially Synthesized Probe
  source 1..80: mol_type = other DNA
aaccctatgtagttcatactagaattattcccatttaaagatggggaaagtgatgtttagagaggctaagtgacttgccc

SEQ ID NO: 106837 - DNA, 80 bp, synthetic construct
  misc_feature 1..80: note = Artificially Synthesized Probe
  source 1..80: mol_type = other DNA
ggttcattaaccatggtacacccatcaatataatgttatattgtcatttaaaattgtattcccaagtttcgtatcaggaa

SEQ ID NO: 106838 - DNA, 80 bp, synthetic construct
  misc_feature 1..80: note = Artificially Synthesized Probe
  source 1..80: mol_type = other DNA
gtatcttttatatttatctctctcatttcctatattggccatgtttacttttaaaatagtaaaagtcataagctctattt

SEQ ID NO: 106839 - DNA, 80 bp, synthetic construct; identical to SEQ ID NO: 36892
  misc_feature 1..80: note = Artificially Synthesized Probe
  source 1..80: mol_type = other DNA

SEQ ID NO: 106840 - DNA, 80 bp, synthetic construct
  misc_feature 1..80: note = Artificially Synthesized Probe
  source 1..80: mol_type = other DNA
ttagattattccacaagtcactgtcgttgaaagaaaagtagttacagtggggtcttatgggataaggcattaccatttgt

SEQ ID NO: 106841 - DNA, 80 bp, synthetic construct
  misc_feature 1..80: note = Artificially Synthesized Probe
  source 1..80: mol_type = other DNA
agaaagagtatgtattttgcctaaggttgcacaataagttaagctggggttccaattctagcaagttggttctagagtgt

SEQ ID NO: 106842 - DNA, 80 bp, synthetic construct
  misc_feature 1..80: note = Artificially Synthesized Probe
  source 1..80: mol_type = other DNA
gtaaatttcgtattaaacactcaacttattcagaagaatatcaggtaagtgtaggttaaggctgttttctatcagaaatc

SEQ ID NO: 106843 - DNA, 80 bp, synthetic construct; identical to SEQ ID NO: 36893
  misc_feature 1..80: note = Artificially Synthesized Probe
  source 1..80: mol_type = other DNA

SEQ ID NO: 106844 - DNA, 80 bp, synthetic construct
  misc_feature 1..80: note = Artificially Synthesized Probe
  source 1..80: mol_type = other DNA
agaaaaaccttaatttcctctcgttgggcagtatggtgtcaaaagcttgggctttggagcttcgtatataatctgggttc

SEQ ID NO: 106845 - DNA, 80 bp, synthetic construct
  misc_feature 1..80: note = Artificially Synthesized Probe
  source 1..80: mol_type = other DNA
tctacatctttctaacttaggatggatgccgatgtcttgggtaacatctcaaactttatcagtaaggaaggtgagaatct

SEQ ID NO: 106846 - DNA, 80 bp, synthetic construct
  misc_feature 1..80: note = Artificially Synthesized Probe
  source 1..80: mol_type = other DNA
aaaatgaaaattagtgttgcacgtacgcatattgcatcagaatcttgcagtgattgttttagtttcctgagttgcattga

SEQ ID NO: 106847 - DNA, 80 bp, synthetic construct; identical to SEQ ID NO: 36894
  misc_feature 1..80: note = Artificially Synthesized Probe
  source 1..80: mol_type = other DNA

SEQ ID NO: 106848 - DNA, 80 bp, synthetic construct
  misc_feature 1..80: note = Artificially Synthesized Probe
  source 1..80: mol_type = other DNA
ttacctacttggtgaaggtttatctgtgtccccacagaattaatccttccctctttaactcttaagctatcttatttttt

SEQ ID NO: 106849 - DNA, 80 bp, synthetic construct
  misc_feature 1..80: note = Artificially Synthesized Probe
  source 1..80: mol_type = other DNA
ggagggggccagctgaatttactttaatgattatgtaacacccatttatgtatagttatagacttgtctgaaatgagtta

SEQ ID NO: 106850 - DNA, 80 bp, synthetic construct
  misc_feature 1..80: note = Artificially Synthesized Probe
  source 1..80: mol_type = other DNA
atctctatccttatgaatggattaatgctgtttgaatggtagtggatgagttatcttgggagtttggcctcctccgtctc

SEQ ID NO: 106851 - DNA, 80 bp, synthetic construct
  misc_feature 1..80: note = Artificially Synthesized Probe
  source 1..80: mol_type = other DNA
tctaaactacctgttttgtggtattctagtaaagcaacataaaatttactaagaaaactggtaccaagagtgtgattgtt

SEQ ID NO: 106852 - DNA, 80 bp, synthetic construct; identical to SEQ ID NO: 36895
  misc_feature 1..80: note = Artificially Synthesized Probe
  source 1..80: mol_type = other DNA

SEQ ID NO: 106853 - DNA, 80 bp, synthetic construct
  misc_feature 1..80: note = Artificially Synthesized Probe
  source 1..80: mol_type = other DNA
ggatatgctgcagaagaaataactcagcagcagagcatttaggttactggatggctacttttaaccacttaaactaagct

SEQ ID NO: 106854 - DNA, 80 bp, synthetic construct
  misc_feature 1..80: note = Artificially Synthesized Probe
  source 1..80: mol_type = other DNA
atattcctagaggagacccaagggctatttatcaagacagtggaaaaagaccccagaggcattttggagatctttgaggc

SEQ ID NO: 106855 - DNA, 80 bp, synthetic construct; identical to SEQ ID NO: 36896
  misc_feature 1..80: note = Artificially Synthesized Probe
  source 1..80: mol_type = other DNA

SEQ ID NO: 106856 - DNA, 80 bp, synthetic construct
  misc_feature 1..80: note = Artificially Synthesized Probe
  source 1..80: mol_type = other DNA
cagcaggcccaccaccaaagcttcagaactgtagagctacaagtatacagtgccagcctgggagaacttcaggcttgaga

SEQ ID NO: 106857 - DNA, 80 bp, synthetic construct
  misc_feature 1..80: note = Artificially Synthesized Probe
  source 1..80: mol_type = other DNA
atagtgccataatataccttataaggcgttcttactagatctttgttatatttacctttttctctccctatggggtgatg

SEQ ID NO: 106858 - DNA, 80 bp, synthetic construct
  misc_feature 1..80: note = Artificially Synthesized Probe
  source 1..80: mol_type = other DNA
ctcatgttgaaacttcattgccatgtggcattattatgaggtggaacctttcagaagtggttacattataagggctttgc

SEQ ID NO: 106859 - DNA, 80 bp, synthetic construct
  misc_feature 1..80: note = Artificially Synthesized Probe
  source 1..80: mol_type = other DNA
tatgatgcatccagaagactctcaccacatgcagccccttgatcttagacttctcagcttctagaactgtgagtgaaata

SEQ ID NO: 106860 - DNA, 80 bp, synthetic construct
  misc_feature 1..80: note = Artificially Synthesized Probe
  source 1..80: mol_type = other DNA
atttcaagggaggggctttgtacttctgtgcatatctgtaaggataaaaatcttaatactattctcactgaaattaatgg

SEQ ID NO: 106861 - DNA, 80 bp, synthetic construct; identical to SEQ ID NO: 36897
  misc_feature 1..80: note = Artificially Synthesized Probe
  source 1..80: mol_type = other DNA

SEQ ID NO: 106862 - DNA, 80 bp, synthetic construct
  misc_feature 1..80: note = Artificially Synthesized Probe
  source 1..80: mol_type = other DNA
ttttctcagtttttaaaaaaaatgtcagattggctaagagttggggcagctttcttatgtgagagtagtagatgacagca

SEQ ID NO: 106863 - DNA, 80 bp, synthetic construct
  misc_feature 1..80: note = Artificially Synthesized Probe
  source 1..80: mol_type = other DNA
tttttggtagaaatttggcattaaaaaatgcatacagagctttttctacatacagggcaagacagcattttgtcatggca

SEQ ID NO: 106864 - DNA, 80 bp, synthetic construct
  misc_feature 1..80: note = Artificially Synthesized Probe
  source 1..80: mol_type = other DNA
tgtctatatatgtctatatggatatatacgtattctttttatccaaatggtattacattgtacattctgttttgaaacct

SEQ ID NO: 106865 - DNA, 80 bp, synthetic construct; identical to SEQ ID NO: 36898
  misc_feature 1..80: note = Artificially Synthesized Probe
  source 1..80: mol_type = other DNA

SEQ ID NO: 106866 - DNA, 80 bp, synthetic construct
  misc_feature 1..80: note = Artificially Synthesized Probe
  source 1..80: mol_type = other DNA
tttcctgcaaattaaaatttgtatctgaatccttggtggatttgagttgaagatccttaaccatcatagatgatgctgtg

SEQ ID NO: 106867 - DNA, 80 bp, synthetic construct
  misc_feature 1..80: note = Artificially Synthesized Probe
  source 1..80: mol_type = other DNA
acattagaaagtattttgggtagtagtattttggtgctgtaagaaagttcattttctcatcaaccactcacctattggtt

SEQ ID NO: 106868 - DNA, 80 bp, synthetic construct; identical to SEQ ID NO: 36899
  misc_feature 1..80: note = Artificially Synthesized Probe
  source 1..80: mol_type = other DNA

SEQ ID NO: 106869 - DNA, 80 bp, synthetic construct
  misc_feature 1..80: note = Artificially Synthesized Probe
  source 1..80: mol_type = other DNA
ttcatgcttgaaatttaagtattgttgtgatgccagaattgctgctcaccgtttttaggtttcaggtcctctgacacctt

SEQ ID NO: 106870 - DNA, 80 bp, synthetic construct
  misc_feature 1..80: note = Artificially Synthesized Probe
  source 1..80: mol_type = other DNA
taaaggtgtacaccaccatggccagccaatttttttgtattttttgtagagatggggttttgccatattgcccagcctag

SEQ ID NO: 106871 - DNA, 80 bp, synthetic construct
  misc_feature 1..80: note = Artificially Synthesized Probe
  source 1..80: mol_type = other DNA
ttttctttgatgctcagattatcacagctagtcatttggacctttataccacctcctatgtccatttgatataggccatt

SEQ ID NO: 106872 - DNA, 80 bp, synthetic construct
  misc_feature 1..80: note = Artificially Synthesized Probe
  source 1..80: mol_type = other DNA
ttattactgctagagtgatgttgcttttaggccatttcagagaaaagacctagaaaacagatttttacaaacatgaattc

SEQ ID NO: 106873 - DNA, 80 bp, synthetic construct
  misc_feature 1..80: note = Artificially Synthesized Probe
  source 1..80: mol_type = other DNA
cagcactttgggagattgaggcaggtggattgcttgagctcaggagttcaagaccaacctgggcaacatgatgaaacctt

SEQ ID NO: 106874 - DNA, 80 bp, synthetic construct; identical to SEQ ID NO: 36900
  misc_feature 1..80: note = Artificially Synthesized Probe
  source 1..80: mol_type = other DNA

SEQ ID NO: 106875 - DNA, 80 bp, synthetic construct
  misc_feature 1..80: note = Artificially Synthesized Probe
  source 1..80: mol_type = other DNA
tttcttcctagtgtttttttgttcttagaatacttcctaccaagaagtgcagtaaaagtgcagtgtccaaatagcccttg

SEQ ID NO: 106876 - DNA, 80 bp, synthetic construct
  misc_feature 1..80: note = Artificially Synthesized Probe
  source 1..80: mol_type = other DNA
aatatataaagatatacacaggagtcctgctgctacctgttcttgctatgcttttccccttttcttccctttctctgtga

SEQ ID NO: 106877 - DNA, 80 bp, synthetic construct
  misc_feature 1..80: note = Artificially Synthesized Probe
  source 1..80: mol_type = other DNA
tacccagtatactctattgggtgggtttttttccttaaaatattcagtagatctctccagttagcacatagttatcttat

SEQ ID NO: 106878 - DNA, 80 bp, synthetic construct; identical to SEQ ID NO: 36901
  misc_feature 1..80: note = Artificially Synthesized Probe
  source 1..80: mol_type = other DNA

SEQ ID NO: 106879 - DNA, 80 bp, synthetic construct
  misc_feature 1..80: note = Artificially Synthesized Probe
  source 1..80: mol_type = other DNA
gtgtagagttttgtttttatgctagctatagtctgtaacataattcactataatgggcatgctaaatatccatgacagtt

SEQ ID NO: 106880 - DNA, 80 bp, synthetic construct; identical to SEQ ID NO: 36872
  misc_feature 1..80: note = Artificially Synthesized Probe
  source 1..80: mol_type = other DNA

SEQ ID NO: 106881 - DNA, 80 bp, synthetic construct
  misc_feature 1..80: note = Artificially Synthesized Probe
  source 1..80: mol_type = other DNA
gacataatgttcgttaatacatattttatatatgtgtcagatagcatatttgtataataaagtaagctgcaggaaaaata

SEQ ID NO: 106882 - DNA, 80 bp, synthetic construct; identical to SEQ ID NO: 36902
  misc_feature 1..80: note = Artificially Synthesized Probe
  source 1..80: mol_type = other DNA

SEQ ID NO: 106883 - DNA, 80 bp, synthetic construct
  misc_feature 1..80: note = Artificially Synthesized Probe
  source 1..80: mol_type = other DNA
acatagccagctcttaaatctgacttccagattttcactgtgtcttcttttttctgtaacgtgttgccttttttagccat

SEQ ID NO: 106884 - DNA, 80 bp, synthetic construct
  misc_feature 1..80: note = Artificially Synthesized Probe
  source 1..80: mol_type = other DNA
gtttttctcatatacctgaatactgtccatgtggaagttaccttttatctttaccagtattaacacataaatggttatac

SEQ ID NO: 106885 - DNA, 80 bp, synthetic construct
  misc_feature 1..80: note = Artificially Synthesized Probe
  source 1..80: mol_type = other DNA
ttgctatgggatttcctgcagaaagacttgaaggcgtatacaggaacaatattgatgatgtagtaaggtaagaatgcttt

SEQ ID NO: 106886 - DNA, 80 bp, synthetic construct
  misc_feature 1..80: note = Artificially Synthesized Probe
  source 1..80: mol_type = other DNA
agttcatttgataagaactgaccttatacattacataatcaggtacttatgtgatatcatttcctggactccataaaatg

SEQ ID NO: 106887 - DNA, 80 bp, synthetic construct; identical to SEQ ID NO: 36903
  misc_feature 1..80: note = Artificially Synthesized Probe
  source 1..80: mol_type = other DNA

SEQ ID NO: 106888 - DNA, 80 bp, synthetic construct
  misc_feature 1..80: note = Artificially Synthesized Probe
  source 1..80: mol_type = other DNA
gtcttaagaattcatggcatattttatgaaaggaggaattcatgtctgatgtgcaaatagtcttaacatattttctaatt

SEQ ID NO: 106889 - DNA, 80 bp, synthetic construct
  misc_feature 1..80: note = Artificially Synthesized Probe
  source 1..80: mol_type = other DNA
tcaactgtaaattgtcagtaagaaccttaatggctttaaaagttaaaatttcaggtcaagcattgtggtgtgctcctgta

SEQ ID NO: 106890 - DNA, 80 bp, synthetic construct
  misc_feature 1..80: note = Artificially Synthesized Probe
  source 1..80: mol_type = other DNA
gtggattatttcctttacactctttcattagtatctttcctggagactttcaatttaaatacttggtgcttatgacaatt

SEQ ID NO: 106891 - DNA, 80 bp, synthetic construct; identical to SEQ ID NO: 36904
  misc_feature 1..80: note = Artificially Synthesized Probe
  source 1..80: mol_type = other DNA

SEQ ID NO: 106892 - DNA, 80 bp, synthetic construct
  misc_feature 1..80: note = Artificially Synthesized Probe
  source 1..80: mol_type = other DNA
attggtctgaagtgactgaagcatttaggctctatcaaggcctaaaatttggtaatatgagtttggtaatgcgaattgtg

SEQ ID NO: 106893 - DNA, 80 bp, synthetic construct
  misc_feature 1..80: note = Artificially Synthesized Probe
  source 1..80: mol_type = other DNA
agctgaaaatagagaaatgaatttatcttctcatagttaggcagggcacagtagaaggatgcttaacattgcaagctgat

SEQ ID NO: 106894 - DNA, 80 bp, synthetic construct
  misc_feature 1..80: note = Artificially Synthesized Probe
  source 1..80: mol_type = other DNA
acagtcaccagacgtgtatcctctcctatggtacagaagtgtttattgggtctctttatggcctgcatgatatatcccac

SEQ ID NO: 106895 - DNA, 80 bp, synthetic construct; identical to SEQ ID NO: 36905
  misc_feature 1..80: note = Artificially Synthesized Probe
  source 1..80: mol_type = other DNA

SEQ ID NO: 106896 - DNA, 80 bp, synthetic construct
  misc_feature 1..80: note = Artificially Synthesized Probe
  source 1..80: mol_type = other DNA
ggtttagtctatctagcttcacaatctatctagtttgttttgtctagccatatgatttcttcaaatatgccatttcttaa

SEQ ID NO: 106897 - DNA, 80 bp, synthetic construct
  misc_feature 1..80: note = Artificially Synthesized Probe
  source 1..80: mol_type = other DNA
ttttgattgggggataattggccaataaagctttgatagcctctattgcccaggcccctcctcttcttttatgagagaaa

SEQ ID NO: 106898 - DNA, 80 bp, synthetic construct
  misc_feature 1..80: note = Artificially Synthesized Probe
  source 1..80: mol_type = other DNA
tacctaagtgattaatttccttgattggttcacattatattgaggatattagtaatcagtagtgattccttttttggttc

SEQ ID NO: 106899 - DNA, 80 bp, synthetic construct; identical to SEQ ID NO: 36906
  misc_feature 1..80: note = Artificially Synthesized Probe
  source 1..80: mol_type = other DNA

SEQ ID NO: 106900 - DNA, 80 bp, synthetic construct
  misc_feature 1..80: note = Artificially Synthesized Probe
  source 1..80: mol_type = other DNA
tgcctcagcctgcggagcagctgggattatagatgcccgcccccacgcccagctgatttttgtatttgtagtagagatgg

SEQ ID NO: 106901 - DNA, 80 bp, synthetic construct
  misc_feature 1..80: note = Artificially Synthesized Probe
  source 1..80: mol_type = other DNA
tacttgaggtactcagagtccttttgagacaaatatttaacttctccttttgaggttaccgcctacgattgggaattaat

SEQ ID NO: 106902 - DNA, 80 bp, synthetic construct
  misc_feature 1..80: note = Artificially Synthesized Probe
  source 1..80: mol_type = other DNA
tctcatagaagctaactattcccaaattgtttttttcttcttttcctcttactactgctgttttcctcctttcttgctgc

SEQ ID NO: 106903 - DNA, 80 bp, synthetic construct
  misc_feature 1..80: note = Artificially Synthesized Probe
  source 1..80: mol_type = other DNA
tttttaagacagcgtttatatcgggagaggttttattccgttggattatgttagctgcatataaatgtgcacagttaatt

SEQ ID NO: 106904 - DNA, 80 bp, synthetic construct
  misc_feature 1..80: note = Artificially Synthesized Probe
  source 1..80: mol_type = other DNA
ggtttgctgcacccattaactcgtcatttacattaggtatttctcctaatgttatccctctcccaaccccccaccccagg

SEQ ID NO: 106905 - DNA, 80 bp, synthetic construct; identical to SEQ ID NO: 36907
  misc_feature 1..80: note = Artificially Synthesized Probe
  source 1..80: mol_type = other DNA

SEQ ID NO: 106906 - DNA, 80 bp, synthetic construct
  misc_feature 1..80: note = Artificially Synthesized Probe
  source 1..80: mol_type = other DNA
ggaattgccacactgtcttccacaatggttgaactagtttacagtcccaccaacagtgtaaaaatgttcctgttcctcca

SEQ ID NO: 106907 - DNA, 80 bp, synthetic construct
  misc_feature 1..80: note = Artificially Synthesized Probe
  source 1..80: mol_type = other DNA
tcttcttttggaaagtgtctgttcatatcctttgcccactttttgatggggttgtttgatttttttcctgtaaatttgtt

SEQ ID NO: 106908 - DNA, 80 bp, synthetic construct
  misc_feature 1..80: note = Artificially Synthesized Probe
  source 1..80: mol_type = other DNA
tgttgccattgcttttggtgttttagtcatgaagtccttgcccatgcctatgtcctgaatggtattgcctaggtttgctt

SEQ ID NO: 106909 - DNA, 80 bp, synthetic construct; identical to SEQ ID NO: 36908
  misc_feature 1..80: note = Artificially Synthesized Probe
  source 1..80: mol_type = other DNA

SEQ ID NO: 106910 - DNA, 80 bp, synthetic construct
  misc_feature 1..80: note = Artificially Synthesized Probe
  source 1..80: mol_type = other DNA
catatgaactttaaagtagttttttccaattctgtgaagaaatttattggtagcttgatggggatggcattgtttctata

SEQ ID NO: 106911 - DNA, 80 bp, synthetic construct
  misc_feature 1..80: note = Artificially Synthesized Probe
  source 1..80: mol_type = other DNA
tattttattctctttgtagcagttgtgagtgggagttcactcatgatttggctctctgtctgtctgttattggtgtataa

SEQ ID NO: 106912 - DNA, 80 bp, synthetic construct
  misc_feature 1..80: note = Artificially Synthesized Probe
  source 1..80: mol_type = other DNA
ataccctttatttctttctcttgcctgattgccctggccagaacttccaacactgtgttgaataggagtggtgagagagg

SEQ ID NO: 106913 - DNA, 80 bp, synthetic construct; identical to SEQ ID NO: 36909
  misc_feature 1..80: note = Artificially Synthesized Probe
  source 1..80: mol_type = other DNA

SEQ ID NO: 106914 - DNA, 80 bp, synthetic construct
  misc_feature 1..80: note = Artificially Synthesized Probe
  source 1..80: mol_type = other DNA
cttgcccagaagataattatggaaaaattcttttgtgacttccaaagcagtctactattagcatgaattactgacagtca

SEQ ID NO: 106915 - DNA, 80 bp, synthetic construct
  misc_feature 1..80: note = Artificially Synthesized Probe
  source 1..80: mol_type = other DNA
ctctttttttgttgtgtctctgccaggctttggtatcgggatggtgctggcctcctaaaatgagttagggaggattccct

SEQ ID NO: 106916 - DNA, 80 bp, synthetic construct
  misc_feature 1..80: note = Artificially Synthesized Probe
  source 1..80: mol_type = other DNA
ggattcaacttcttcctggtttagtcttgggagggtgtatatgtccaggaatttatccatttcttctagattttctagtt

SEQ ID NO: 106917 - DNA, 80 bp, synthetic construct; identical to SEQ ID NO: 36910
  misc_feature 1..80: note = Artificially Synthesized Probe
  source 1..80: mol_type = other DNA

SEQ ID NO: 106918 - DNA, 80 bp, synthetic construct
  misc_feature 1..80: note = Artificially Synthesized Probe
  source 1..80: mol_type = other DNA
cagagattctggtacgttgtgtctttgttctcattggtttcaaagaacatctttatttctgccttcattttgttatttac

SEQ ID NO: 106919 - DNA, 80 bp, synthetic construct
  misc_feature 1..80: note = Artificially Synthesized Probe
  source 1..80: mol_type = other DNA
tccaactatgtggtcaattttggaataagtgtgatgtggtgctgataagaatgtatattctgttgatttgggatggagag

SEQ ID NO: 106920 - DNA, 80 bp, synthetic construct
  misc_feature 1..80: note = Artificially Synthesized Probe
  source 1..80: mol_type = other DNA
tcaggacttgctttatgaatctaggtgctcctgtattgggtgtatatatatttaggatagttagctcttcttgttgaatt

SEQ ID NO: 106921 - DNA, 80 bp, synthetic construct; identical to SEQ ID NO: 36911
  misc_feature 1..80: note = Artificially Synthesized Probe
  source 1..80: mol_type = other DNA

SEQ ID NO: 106922 - DNA, 80 bp, synthetic construct
  misc_feature 1..80: note = Artificially Synthesized Probe
  source 1..80: mol_type = other DNA
gataccagttgttcctttccatgtttagtgcttccttcaggagctcttgtaaggcaggcctggtagtgacaaaatctctc

SEQ ID NO: 106923 - DNA, 80 bp, synthetic construct; identical to SEQ ID NO: 28364
  misc_feature 1..80: note = Artificially Synthesized Probe
  source 1..80: mol_type = other DNA

SEQ ID NO: 106924 - DNA, 80 bp, synthetic construct
  misc_feature 1..80: note = Artificially Synthesized Probe
  source 1..80: mol_type = other DNA
tctccccgtcactgtcaagtacaccaatcaaacgtagatttggtcttttcacatagtcccatatttcttggaggctttgt

SEQ ID NO: 106925 - DNA, 80 bp, synthetic construct
  misc_feature 1..80: note = Artificially Synthesized Probe
  source 1..80: mol_type = other DNA
gttattaagaccttaaaattattttaccaggtttttacatgtgagctgtgacatgactggcattttctttgatttcagcg

SEQ ID NO: 106926 - DNA, 80 bp, synthetic construct; identical to SEQ ID NO: 36912
  misc_feature 1..80: note = Artificially Synthesized Probe
  source 1..80: mol_type = other DNA

SEQ ID NO: 106927 - DNA, 80 bp, synthetic construct
  misc_feature 1..80: note = Artificially Synthesized Probe
  source 1..80: mol_type = other DNA
tagaattttcagcttttctgctctgttttctccccatctttgtggttttatctacctttggtctttgattatggtgacct

SEQ ID NO: 106928 - DNA, 80 bp, synthetic construct
  misc_feature 1..80: note = Artificially Synthesized Probe
  source 1..80: mol_type = other DNA
tgcagaacagcaaatattgcagaacagcaaatattgctgccggagccttcctctggaagcttcgtcttgggggcacccgg

SEQ ID NO: 106929 - DNA, 80 bp, synthetic construct
  misc_feature 1..80: note = Artificially Synthesized Probe
  source 1..80: mol_type = other DNA
aagtctgaggaagtttctgctgccttttgttcagctatgccctgcctccagaggtggagtctacagaggcaggcaggcct

SEQ ID NO: 106930 - DNA, 80 bp, synthetic construct
  misc_feature 1..80: note = Artificially Synthesized Probe
  source 1..80: mol_type = other DNA
cctgctgagccaggcacgggatataatctcctgttgtgccatttgctaagaccgttggaaaagcgcagtatttgggtggc

SEQ ID NO: 106931 - DNA, 80 bp, synthetic construct; identical to SEQ ID NO: 36913
  misc_feature 1..80: note = Artificially Synthesized Probe
  source 1..80: mol_type = other DNA

SEQ ID NO: 106932 - DNA, 80 bp, synthetic construct
  misc_feature 1..80: note = Artificially Synthesized Probe
  source 1..80: mol_type = other DNA
tgctgggaccacagccacgcatcaccaggcctggctaatttttgtgttttttgtagagatagggtttcgctgtgtttccc

SEQ ID NO: 106933 - DNA, 80 bp, synthetic construct
  misc_feature 1..80: note = Artificially Synthesized Probe
  source 1..80: mol_type = other DNA
ctaggcagtctttaacaaaattggtgcttcatgtgtttaagaggcataacttaagaattgtttgtttcttataaatcagg

SEQ ID NO: 106934 - DNA, 80 bp, synthetic construct; identical to SEQ ID NO: 36914
  misc_feature 1..80: note = Artificially Synthesized Probe
  source 1..80: mol_type = other DNA

SEQ ID NO: 106935 - DNA, 80 bp, synthetic construct
  misc_feature 1..80: note = Artificially Synthesized Probe
  source 1..80: mol_type = other DNA
ctgggctccagcgatcctcccacctcatcctctcaagtagctgggaccacaggcgtgtgtcaccgtacatggctaatttt

SEQ ID NO: 106936 - DNA, 80 bp, synthetic construct; identical to SEQ ID NO: 36873
  misc_feature 1..80: note = Artificially Synthesized Probe
  source 1..80: mol_type = other DNA

SEQ ID NO: 106937 - DNA, 80 bp, synthetic construct
  misc_feature 1..80: note = Artificially Synthesized Probe
  source 1..80: mol_type = other DNA
ttgatctctcagtctttcaaccttagttgtatgttgattttcaataaaaaggaagtatttgttgccctaacatcagtatt

SEQ ID NO: 106938 - DNA, 80 bp, synthetic construct
  misc_feature 1..80: note = Artificially Synthesized Probe
  source 1..80: mol_type = other DNA
cacataacagctaaccattttaaccacggaaagtgtacattccgtggcatttattaccttcacagtgttacctctacctt

SEQ ID NO: 106939 - DNA, 80 bp, synthetic construct
  misc_feature 1..80: note = Artificially Synthesized Probe
  source 1..80: mol_type = other DNA
tgcctcccgagttcaagcaattctcctgcctcagcctcccgtagctgggactacaggcacgcgccacatgcctggctaat

SEQ ID NO: 106940 - DNA, 80 bp, synthetic construct; identical to SEQ ID NO: 36915
  misc_feature 1..80: note = Artificially Synthesized Probe
  source 1..80: mol_type = other DNA

SEQ ID NO: 106941 - DNA, 80 bp, synthetic construct
  misc_feature 1..80: note = Artificially Synthesized Probe
  source 1..80: mol_type = other DNA
ttgagttctggtctgtcagattccgaagttgtttccttaggaaccatattatcttgtgtacaactcttgggctaatcttg

SEQ ID NO: 106942 - DNA, 80 bp, synthetic construct
  misc_feature 1..80: note = Artificially Synthesized Probe
  source 1..80: mol_type = other DNA
tgacaaaaatcagctggagctgtgtaatgtccgacctgtctctgtcaatgaacagattattcattgtcatttctcatctg

SEQ ID NO: 106943 - DNA, 80 bp, synthetic construct
  misc_feature 1..80: note = Artificially Synthesized Probe
  source 1..80: mol_type = other DNA
tagagatcttgtctctaattaacaggattcataaagagaaaacaaaggagagaaacatccagattgaaaagacctacata

SEQ ID NO: 106944 - DNA, 80 bp, synthetic construct
  misc_feature 1..80: note = Artificially Synthesized Probe
  source 1..80: mol_type = other DNA
tggtcacctggtccttttcacctgtgcacaggtaacctcagactcgagtcagtgacactgctcaacgcacccatctcagc

SEQ ID NO: 106945 - DNA, 80 bp, synthetic construct; identical to SEQ ID NO: 36916
  misc_feature 1..80: note = Artificially Synthesized Probe
  source 1..80: mol_type = other DNA

SEQ ID NO: 106946 - DNA, 80 bp, synthetic construct
  misc_feature 1..80: note = Artificially Synthesized Probe
  source 1..80: mol_type = other DNA
gagcttcagtaaacagagaatcccactcagaagcaacaaagaagaaagtcccaggatgacagctgtgacacaagctgaaa

SEQ ID NO: 106947 - DNA, 80 bp, synthetic construct
  misc_feature 1..80: note = Artificially Synthesized Probe
  source 1..80: mol_type = other DNA
cccaaaattgtgatgttgctattttaggggaattaagataagtgaaacacgtatggaatactgctagttttgtaagtctc

SEQ ID NO: 106948 - DNA, 80 bp, synthetic construct
  misc_feature 1..80: note = Artificially Synthesized Probe
  source 1..80: mol_type = other DNA
tctggggagaagcaggaataaaggtttgaagataaatagggccagagatgagtaattttgttactgtgataatatatttt

SEQ ID NO: 106949 - DNA, 80 bp, synthetic construct
  misc_feature 1..80: note = Artificially Synthesized Probe
  source 1..80: mol_type = other DNA
tttttatctgataaagaaagattaataatgaagccatttctccgaggaaaattgaggacaataattcagttttaaaatat

SEQ ID NO: 106950 - DNA, 80 bp, synthetic construct; identical to SEQ ID NO: 36917
  misc_feature 1..80: note = Artificially Synthesized Probe
  source 1..80: mol_type = other DNA

SEQ ID NO: 106951 - DNA, 80 bp, synthetic construct
  misc_feature 1..80: note = Artificially Synthesized Probe
  source 1..80: mol_type = other DNA
catttccttccttttaaaaggccgaataatattccattgttatgtatataccatattttgtttatccatttattcatcaa

SEQ ID NO: 106952 - DNA, 80 bp, synthetic construct
  misc_feature 1..80: note = Artificially Synthesized Probe
  source 1..80: mol_type = other DNA
ttgatatactggctgcccaattttacattaccaccagcaatacactagggttccgaatttgccacatcctcaccatcgtg

SEQ ID NO: 106953 - DNA, 80 bp, synthetic construct; identical to SEQ ID NO: 36918
  misc_feature 1..80: note = Artificially Synthesized Probe
  source 1..80: mol_type = other DNA

SEQ ID NO: 106954 - DNA, 80 bp, synthetic construct
  misc_feature 1..80: note = Artificially Synthesized Probe
  source 1..80: mol_type = other DNA
ggggaggctgaggcaggagacttgcttgaacccggaaggtgggggggttgcagtgagctgagattgtgccactgcactca

SEQ ID NO: 106955 - DNA, 80 bp, synthetic construct
  misc_feature 1..80: note = Artificially Synthesized Probe
  source 1..80: mol_type = other DNA
aggagctatttagcttgaaaaaatccaacttgtctgttttcttttgttgcctgtacctttggtgtcacattcaagaaata

SEQ ID NO: 106956 - DNA, 80 bp, synthetic construct
  misc_feature 1..80: note = Artificially Synthesized Probe
  source 1..80: mol_type = other DNA
tttcccagcattatttgttgaaaagagtgtctttttccccattgaatagtcttggcactcttgttgaaaattatttgaca

SEQ ID NO: 106957 - DNA, 80 bp, synthetic construct
  misc_feature 1..80: note = Artificially Synthesized Probe
  source 1..80: mol_type = other DNA
aatagcatctggctctgttgcccaggctggagtgcagtggcacaatcttagctcactgcaacctccacatctgaggttca

SEQ ID NO: 106958 - DNA, 80 bp, synthetic construct; identical to SEQ ID NO: 36919
  misc_feature 1..80: note = Artificially Synthesized Probe
  source 1..80: mol_type = other DNA

SEQ ID NO: 106959 - DNA, 80 bp, synthetic construct
  misc_feature 1..80: note = Artificially Synthesized Probe
  source 1..80: mol_type = other DNA
gctcgcctcctcccacctggatttttttttttatttctaccagaaacattgttgggattttggtagggattgtattagtc

SEQ ID NO: 106960 - DNA, 80 bp, synthetic construct
  misc_feature 1..80: note = Artificially Synthesized Probe
  source 1..80: mol_type = other DNA
gcctcttttcaaataaatgttcacagggaatacttttaacttgtagagagtacagtgactattgaagttacctaaattac

SEQ ID NO: 106961 - DNA, 80 bp, synthetic construct
  misc_feature 1..80: note = Artificially Synthesized Probe
  source 1..80: mol_type = other DNA
tcctaagtattttattcattctgatgatcttataaatctgttttcttaatttcctttcctaattgttcattcttagggta

SEQ ID NO: 106962 - DNA, 80 bp, synthetic construct; identical to SEQ ID NO: 36920
  misc_feature 1..80: note = Artificially Synthesized Probe
  source 1..80: mol_type = other DNA

SEQ ID NO: 106963 - DNA, 80 bp, synthetic construct
  misc_feature 1..80: note = Artificially Synthesized Probe
  source 1..80: mol_type = other DNA
ttcaagtgattctcctgcttcagcctcccaagtagctgggattacaggtgtccaccactatgcccagctaattttcgtat

SEQ ID NO: 106964 - DNA, 80 bp, synthetic construct
  misc_feature 1..80: note = Artificially Synthesized Probe
  source 1..80: mol_type = other DNA
cactgtgggatttttatatatggccttcattatgttgtggtaatttctttttattcttagtttattgagtgtttttatca

SEQ ID NO: 106965 - DNA, 80 bp, synthetic construct
  misc_feature 1..80: note = Artificially Synthesized Probe
  source 1..80: mol_type = other DNA
tttaataagctgtggaattcagtttgttggttctgtgttgaggactttatatcaatgttcctaagggctactggtctata

SEQ ID NO: 106966 - DNA, 80 bp, synthetic construct
  misc_feature 1..80: note = Artificially Synthesized Probe
  source 1..80: mol_type = other DNA
atgtttgatagaattcacagataaaaaaatcacatctagggcttttgtctggaatttttttattgttattattgattcag

SEQ ID NO: 106967 - DNA, 80 bp, synthetic construct; identical to SEQ ID NO: 36921
  misc_feature 1..80: note = Artificially Synthesized Probe
  source 1..80: mol_type = other DNA

SEQ ID NO: 106968 - DNA, 80 bp, synthetic construct
  misc_feature 1..80: note = Artificially Synthesized Probe
  source 1..80: mol_type = other DNA
tgggtttattagtttgttctttttctagttccttaagatttgaagttggattattgatttgagatcgttttcaattaaat

SEQ ID NO: 106969 - DNA, 80 bp, synthetic construct
  misc_feature 1..80: note = Artificially Synthesized Probe
  source 1..80: mol_type = other DNA
attttctactttttcttcagttattgattttattgattttcagtggcatcctgttgtgatagaagatactttatttggtt

SEQ ID NO: 106970 - DNA, 80 bp, synthetic construct
  misc_feature 1..80: note = Artificially Synthesized Probe
  source 1..80: mol_type = other DNA
ccccagtaggtaggattacaggcacatgccaccatgcccagctaatttttgtatttttagtagagacagggtttcgccat

SEQ ID NO: 106971 - DNA, 80 bp, synthetic construct; identical to SEQ ID NO: 36922
  misc_feature 1..80: note = Artificially Synthesized Probe
  source 1..80: mol_type = other DNA

SEQ ID NO: 106972 - DNA, 80 bp, synthetic construct; identical to SEQ ID NO: 36874
  misc_feature 1..80: note = Artificially Synthesized Probe
  source 1..80: mol_type = other DNA

SEQ ID NO: 106973 - DNA, 80 bp, synthetic construct
  misc_feature 1..80: note = Artificially Synthesized Probe
  source 1..80: mol_type = other DNA
atgtagctacctgcactctcatttggttattacttgtatagaatgtctttttacatcccttatttgtgtctttggatctg

SEQ ID NO: 106974 - DNA, 80 bp, synthetic construct
  misc_feature 1..80: note = Artificially Synthesized Probe
  source 1..80: mol_type = other DNA
tatgccttacagcttttttgtccctcatttcctgccttactggcacttgtgtttagttgatattttgtggtgaagtgttt

SEQ ID NO: 106975 - DNA, 80 bp, synthetic construct
  misc_feature 1..80: note = Artificially Synthesized Probe
  source 1..80: mol_type = other DNA
accaatttactttcaatagcatacaaaaattcagctcataagattcagtccctgctcccttccagttattgatgtcataa

SEQ ID NO: 106976 - DNA, 80 bp, synthetic construct; identical to SEQ ID NO: 36923
  misc_feature 1..80: note = Artificially Synthesized Probe
  source 1..80: mol_type = other DNA

SEQ ID NO: 106977 - DNA, 80 bp, synthetic construct
  misc_feature 1..80: note = Artificially Synthesized Probe
  source 1..80: mol_type = other DNA
cccactgccttctgtccttcaagagttctgatgagaaatctgctgatattgaggatccctttgtatgttacaagttgctt

SEQ ID NO: 106978 - DNA, 80 bp, synthetic construct
  misc_feature 1..80: note = Artificially Synthesized Probe
  source 1..80: mol_type = other DNA
tttcttcacataatcttttttgccccttttctctctttttattctgggattcccagagtgtgtatgtgttggtccacttg

SEQ ID NO: 106979 - DNA, 80 bp, synthetic construct; identical to SEQ ID NO: 36924
  misc_feature 1..80: note = Artificially Synthesized Probe
  source 1..80: mol_type = other DNA

SEQ ID NO: 106980 - DNA, 80 bp, synthetic construct
  misc_feature 1..80: note = Artificially Synthesized Probe
  source 1..80: mol_type = other DNA
gtgtctgccatctgatcttctcaggcacagtttctgttaatttatttttttccttttggcctatacttaatgttttgctt

SEQ ID NO: 106981 - DNA, 80 bp, synthetic construct
  misc_feature 1..80: note = Artificially Synthesized Probe
  source 1..80: mol_type = other DNA
atgctgggtgtaatcttaagatcttctcggcctgtgtttttccctgggcatgtgtagtgactttctaaattgccctatgt

SEQ ID NO: 106982 - DNA, 80 bp, synthetic construct
  misc_feature 1..80: note = Artificially Synthesized Probe
  source 1..80: mol_type = other DNA
taaataatgatagtctgcctctgtgtcacattttgatcagaagcagcaattagcaatcagaacacagattcctgatattt

SEQ ID NO: 106983 - DNA, 80 bp, synthetic construct
  misc_feature 1..80: note = Artificially Synthesized Probe
  source 1..80: mol_type = other DNA
tattacctttttagaattttatttttaataacatgggaaaggcaactggtgatattttaatttttgtatggaacagtgca

SEQ ID NO: 106984 - DNA, 80 bp, synthetic construct; identical to SEQ ID NO: 36925
  misc_feature 1..80: note = Artificially Synthesized Probe
  source 1..80: mol_type = other DNA

SEQ ID NO: 106985 - DNA, 80 bp, synthetic construct
  misc_feature 1..80: note = Artificially Synthesized Probe
  source 1..80: mol_type = other DNA
tgcctcagcttcccaagtagctggaattacaggcgtgcaccaccatgcctggctaattttttgtatttttagtagagaca

SEQ ID NO: 106986 - DNA, 80 bp, synthetic construct
  misc_feature 1..80: note = Artificially Synthesized Probe
  source 1..80: mol_type = other DNA
tatatgtttattattttgtcaaaaataattttaaaacgtattcttgaagcttatttagatctgtttcataggaactgtga

SEQ ID NO: 106987 - DNA, 80 bp, synthetic construct
  misc_feature 1..80: note = Artificially Synthesized Probe
  source 1..80: mol_type = other DNA
gcagcaacctgtatacctgaaagccatctctgctggggcaggtacctagtgtccccacctacctgggtcgtagtcaggcc

SEQ ID NO: 106988 - DNA, 80 bp, synthetic construct; identical to SEQ ID NO: 36926
  misc_feature 1..80: note = Artificially Synthesized Probe
  source 1..80: mol_type = other DNA

SEQ ID NO: 106989 - DNA, 80 bp, synthetic construct
  misc_feature 1..80: note = Artificially Synthesized Probe
  source 1..80: mol_type = other DNA
ttgaaattattggaagtaaggtatgtttatattagaaagatttgtagtctagattatccaagttttgggagtattacctc

SEQ ID NO: 106990 - DNA, 80 bp, synthetic construct
  misc_feature 1..80: note = Artificially Synthesized Probe
  source 1..80: mol_type = other DNA
gggaggaaagagaaggaagtgggaggggcagccatggtgaatgtttccctaagttatagtcaagttctttgagagaacat

SEQ ID NO: 106991 - DNA, 80 bp, synthetic construct
  misc_feature 1..80: note = Artificially Synthesized Probe
  source 1..80: mol_type = other DNA
ggagctcacaaaagagcatggtttcaccagccctcactaaaaacaaaattatgggaaaatgctgtaaaagaaaccagaat

SEQ ID NO: 106992 - DNA, 80 bp, synthetic construct; identical to SEQ ID NO: 36927
  misc_feature 1..80: note = Artificially Synthesized Probe
  source 1..80: mol_type = other DNA

SEQ ID NO: 106993 - DNA, 80 bp, synthetic construct
  misc_feature 1..80: note = Artificially Synthesized Probe
  source 1..80: mol_type = other DNA
tgaaattatctccaaattgaaatggtattttggttgcctaacagcctgaagatgacaaatatcccctacaaatttctcct

SEQ ID NO: 106994 - DNA, 80 bp, synthetic construct
  misc_feature 1..80: note = Artificially Synthesized Probe
  source 1..80: mol_type = other DNA
aaaatattttaagccgcttctgaagtaatcacttcagtgacttttaatggaggagtatttgttatgggaaattcacttca

SEQ ID NO: 106995 - DNA, 80 bp, synthetic construct
  misc_feature 1..80: note = Artificially Synthesized Probe
  source 1..80: mol_type = other DNA
cccctttcaaaaattttatatctgaggaatcttccatattgttgtggacatctacctacctgattcttttattaactacc

SEQ ID NO: 106996 - DNA, 80 bp, synthetic construct
  misc_feature 1..80: note = Artificially Synthesized Probe
  source 1..80: mol_type = other DNA
aggtccattgcgtctatggtttaaactagtgccttcaaaaatggtattttatatactcactgtttaagagtgcttcttcc

SEQ ID NO: 106997 - DNA, 80 bp, synthetic construct
  misc_feature 1..80: note = Artificially Synthesized Probe
  source 1..80: mol_type = other DNA
tatgtatatactgaccctattttcaacttatttttcttttagtttgtttgtattttccttaatgattttcaggaaaccaa

SEQ ID NO: 106998 - DNA, 80 bp, synthetic construct; identical to SEQ ID NO: 36928
  misc_feature 1..80: note = Artificially Synthesized Probe
  source 1..80: mol_type = other DNA

SEQ ID NO: 106999 - DNA, 80 bp, synthetic construct
  misc_feature 1..80: note = Artificially Synthesized Probe
  source 1..80: mol_type = other DNA
cagtggcacagtcttggctcactgcaacctctgcctcccaggttcaagcaattctcctgccttagcctcctgagtagctg

SEQ ID NO: 107000 - DNA, 80 bp, synthetic construct
  misc_feature 1..80: note = Artificially Synthesized Probe
  source 1..80: mol_type = other DNA
ctggcctaatttttttattgttctttttggtgtgaacattctcccctcctccaagccttttgtttttactattttcatgt

SEQ ID NO: 107001 - DNA, 80 bp, synthetic construct
  misc_feature 1..80: note = Artificially Synthesized Probe
  source 1..80: mol_type = other DNA
cgttttgaatctgagctttgaaggtaaattcactgcagctgtgttggttgattttagataatttgtgtatttcctccttt

SEQ ID NO: 107002 - DNA, 80 bp, synthetic construct; identical to SEQ ID NO: 36929
  misc_feature 1..80: note = Artificially Synthesized Probe
  source 1..80: mol_type = other DNA

SEQ ID NO: 107003 - DNA, 80 bp, synthetic construct
  misc_feature 1..80: note = Artificially Synthesized Probe
  source 1..80: mol_type = other DNA
tttactgtaccttttctctgttccaattttatgctctattctaaggatgtacccatttctactacctgactagggagcat

SEQ ID NO: 107004 - DNA, 80 bp, synthetic construct
  misc_feature 1..80: note = Artificially Synthesized Probe
  source 1..80: mol_type = other DNA
aaaataaatttactgagttgtttttgctagctacatttcttgtgctcagtagctacatgtggcttgtgattactgtatta

SEQ ID NO: 107005 - DNA, 80 bp, synthetic construct
  misc_feature 1..80: note = Artificially Synthesized Probe
  source 1..80: mol_type = other DNA
tttctgttgctgtcctctagcttaatcaaaataaatttgagtctttttaaaggtaggttgcattttacatactgatattt

SEQ ID NO: 107006 - DNA, 80 bp, synthetic construct
  misc_feature 1..80: note = Artificially Synthesized Probe
  source 1..80: mol_type = other DNA
gacaattttctgcttaattgaaatgtgaggcctctgccatactacaaggatttagcttccagaaaatgtaatattaacat

SEQ ID NO: 107007 - DNA, 80 bp, synthetic construct; identical to SEQ ID NO: 36930
  misc_feature 1..80: note = Artificially Synthesized Probe
  source 1..80: mol_type = other DNA

SEQ ID NO: 107008 - DNA, 80 bp, synthetic construct
  misc_feature 1..80: note = Artificially Synthesized Probe
  source 1..80: mol_type = other DNA
ttactagtatcaataatttgttcttttttattgctgactaatattacattgtatggatatgacatttctttattagtgtg

SEQ ID NO: 107009 - DNA, 80 bp, synthetic construct
  misc_feature 1..80: note = Artificially Synthesized Probe
  source 1..80: mol_type = other DNA
aattgttgggtcacatgatgtagatcagttgaacagagtagattccagaaaagttcacatacacatttcttgacaaaggt

SEQ ID NO: 107010 - DNA, 80 bp, synthetic construct
  misc_feature 1..80: note = Artificially Synthesized Probe
  source 1..80: mol_type = other DNA
acttctagatgaaaacataggagaaaatctctgtgacttttggtttaaagatttcttagacagtacatataaaattaact

SEQ ID NO: 107011 - DNA, 80 bp, synthetic construct; identical to SEQ ID NO: 36931
  misc_feature 1..80: note = Artificially Synthesized Probe
  source 1..80: mol_type = other DNA

SEQ ID NO: 107012 - DNA, 80 bp, synthetic construct
  misc_feature 1..80: note = Artificially Synthesized Probe
  source 1..80: mol_type = other DNA
aggatagcttgagcctgggaggcggaggctgcagtgagctgtgatcgcaccgctgcacgcttgcctgagcaacacagtga

SEQ ID NO: 107013 - DNA, 80 bp, synthetic construct
  misc_feature 1..80: note = Artificially Synthesized Probe
  source 1..80: mol_type = other DNA
ctggaatggctcaaaaagggcttacaggaattggcaaagacatagattaactggaactcttatgcatgttggttagagca

SEQ ID NO: 107014 - DNA, 80 bp, synthetic construct; identical to SEQ ID NO: 36932
  misc_feature 1..80: note = Artificially Synthesized Probe
  source 1..80: mol_type = other DNA

SEQ ID NO: 107015 - DNA, 80 bp, synthetic construct
  misc_feature 1..80: note = Artificially Synthesized Probe
  source 1..80: mol_type = other DNA
aattttggcagaggcagggtttcactgtgttggccaggctagtctcgaacacctgacctcaagtgatctgcccgccttgg

SEQ ID NO: 107016 - DNA, 80 bp, synthetic construct
  misc_feature 1..80: note = Artificially Synthesized Probe
  source 1..80: mol_type = other DNA
tttctttaacttgaggcaatgtaggagaaagcagtactgtgcaggtgaaagttacaaacaagaacattttaaacaagata

SEQ ID NO: 107017 - DNA, 80 bp, synthetic construct; identical to SEQ ID NO: 36875
  misc_feature 1..80: note = Artificially Synthesized Probe
  source 1..80: mol_type = other DNA

SEQ ID NO: 107018 - DNA, 80 bp, synthetic construct
  misc_feature 1..80: note = Artificially Synthesized Probe
  source 1..80: mol_type = other DNA
gcagggatgatttatgtgtaaatttatgcgttagtaacagcagtaaccgctgtagttacactagggttctaagagcaaat

SEQ ID NO: 107019 - DNA, 80 bp, synthetic construct; identical to SEQ ID NO: 36933
  misc_feature 1..80: note = Artificially Synthesized Probe
  source 1..80: mol_type = other DNA

SEQ ID NO: 107020 - DNA, 80 bp, synthetic construct
  misc_feature 1..80: note = Artificially Synthesized Probe
  source 1..80: mol_type = other DNA
acctttcttcttctaaaagattacccagtctcaggtagttctttatagcagtgtgagaatggactaatacaaggggaaat

SEQ ID NO: 107021 - DNA, 80 bp, synthetic construct
  misc_feature 1..80: note = Artificially Synthesized Probe
  source 1..80: mol_type = other DNA
tgtccttaggctgttttccaaatgagataccaaaagctagttctccatcgggtttctcaggctgctagaagcattcatta

SEQ ID NO: 107022 - DNA, 80 bp, synthetic construct
  misc_feature 1..80: note = Artificially Synthesized Probe
  source 1..80: mol_type = other DNA
agattttttttcttagatattgtacttttgaggcctcaaattgctgtcttttgtattttctatgtctgcagagactttcc

SEQ ID NO: 107023 - DNA, 80 bp, synthetic construct; identical to SEQ ID NO: 36934
  misc_feature 1..80: note = Artificially Synthesized Probe
  source 1..80: mol_type = other DNA

SEQ ID NO: 107024 - DNA, 80 bp, synthetic construct
  misc_feature 1..80: note = Artificially Synthesized Probe
  source 1..80: mol_type = other DNA
tgaggtctcttccactttgcctaggccagaactccagcttctcccagtattatatttcgttacctctggcgtcatctccg

SEQ ID NO: 107025 - DNA, 80 bp, synthetic construct
  misc_feature 1..80: note = Artificially Synthesized Probe
  source 1..80: mol_type = other DNA
cttcctgtttacctcagtgaaatctgtgttccacttgagttccatttccttctgtatcagagaagagccaccatgctgaa

SEQ ID NO: 107026 - DNA, 80 bp, synthetic construct
  misc_feature 1..80: note = Artificially Synthesized Probe
  source 1..80: mol_type = other DNA
tttccacatcaccacacacatattttcagacttcctcctcatccttcttcttgccagtagttgtattataattcctgcca

SEQ ID NO: 107027 - DNA, 80 bp, synthetic construct
  misc_feature 1..80: note = Artificially Synthesized Probe
  source 1..80: mol_type = other DNA
attagttttcaatgttcttagctttaattcataaactcacccctaattgtataaatctctcaacatgtttaagcacattt

SEQ ID NO: 107028 - DNA, 80 bp, synthetic construct; identical to SEQ ID NO: 36935
  misc_feature 1..80: note = Artificially Synthesized Probe
  source 1..80: mol_type = other DNA

SEQ ID NO: 107029 - DNA, 80 bp, synthetic construct
  misc_feature 1..80: note = Artificially Synthesized Probe
  source 1..80: mol_type = other DNA
acatatacgttcttccataggtggttaaaagtatattggtctgtgtttggtgattctctttgtacatattgagtatatgc

SEQ ID NO: 107030 - DNA, 80 bp, synthetic construct
  misc_feature 1..80: note = Artificially Synthesized Probe
  source 1..80: mol_type = other DNA
tctaggctgagaagagttttccctcaaaatcagaaggttttgcccaattgttttttagctgctagtattgctgttaaaaa

SEQ ID NO: 107031 - DNA, 80 bp, synthetic construct
  misc_feature 1..80: note = Artificially Synthesized Probe
  source 1..80: mol_type = other DNA
tccagtttgaaaactcacatccttcacttttgagtatttttcttgagttatgtcttcggtttcttctcagtgttctctgt

SEQ ID NO: 107032 - DNA, 80 bp, synthetic construct; identical to SEQ ID NO: 36936
  misc_feature 1..80: note = Artificially Synthesized Probe
  source 1..80: mol_type = other DNA

SEQ ID NO: 107033 - DNA, 80 bp, synthetic construct
  misc_feature 1..80: note = Artificially Synthesized Probe
  source 1..80: mol_type = other DNA
ctctagctctcagatgtttgtgagggtcgaatggagtatatatgtgaaaatgtttaatacctttgtacagaattaatagt

SEQ ID NO: 107034 - DNA, 80 bp, synthetic construct
  misc_feature 1..80: note = Artificially Synthesized Probe
  source 1..80: mol_type = other DNA
atgtcttaatattcagtctcattatgttaggttgaagatagaagattatgaaaatattctctgaaaagctctggttttac

SEQ ID NO: 107035 - DNA, 80 bp, synthetic construct
  misc_feature 1..80: note = Artificially Synthesized Probe
  source 1..80: mol_type = other DNA
attaatgtaatttcaaatgttagctcatttttgttaatggtggctttttgtttgtttgttttgttttaaggtttttggat

SEQ ID NO: 107036 - DNA, 80 bp, synthetic construct
  misc_feature 1..80: note = Artificially Synthesized Probe
  source 1..80: mol_type = other DNA
cgattaagtcaagaagtccaagagcattgttagatcatttagaaagtgtagtgatgaggtaaaacattgttggcacagat

SEQ ID NO: 107037 - DNA, 80 bp, synthetic construct; identical to SEQ ID NO: 36937
  misc_feature 1..80: note = Artificially Synthesized Probe
  source 1..80: mol_type = other DNA

SEQ ID NO: 107038 - DNA, 80 bp, synthetic construct
  misc_feature 1..80: note = Artificially Synthesized Probe
  source 1..80: mol_type = other DNA
gaaaaggtaaaaaggaaggaaggaagagaaaacttaactctttttgcccatgaagactgtttttccttctcaaaatattg

SEQ ID NO: 107039 - DNA, 80 bp, synthetic construct
  misc_feature 1..80: note = Artificially Synthesized Probe
  source 1..80: mol_type = other DNA
gtggacattgatattgttactctcagtaagttttcactgatttttctcagagtcatgaaggaacaaacgtttgttaagtc

SEQ ID NO: 107040 - DNA, 80 bp, synthetic construct; identical to SEQ ID NO: 36938
  misc_feature 1..80: note = Artificially Synthesized Probe
  source 1..80: mol_type = other DNA

SEQ ID NO: 107041 - DNA, 80 bp, synthetic construct
  misc_feature 1..80: note = Artificially Synthesized Probe
  source 1..80: mol_type = other DNA
cggcaaatataagaagagtaacataatttaagggtgaattaattttatttgggaagttttagttctgtatagttaaggca

SEQ ID NO: 107042 - DNA, 80 bp, synthetic construct
  misc_feature 1..80: note = Artificially Synthesized Probe
  source 1..80: mol_type = other DNA
gtggcaataggcaacaagataaaagaaagtaaaaggtgttatggaaacttaatgggtccagcttacaaatgatctatgca

SEQ ID NO: 107043 - DNA, 80 bp, synthetic construct
  misc_feature 1..80: note = Artificially Synthesized Probe
  source 1..80: mol_type = other DNA
aagctagaagccattaaactgagtcacttcagggttagactatcagaactggggatttagaaagtctcagaatggaaatc

SEQ ID NO: 107044 - DNA, 80 bp, synthetic construct
  misc_feature 1..80: note = Artificially Synthesized Probe
  source 1..80: mol_type = other DNA
attattatggttaaagttggcattggagagagcctaggaacctaactgcctgtttgtttttatatttccaaccattggat

SEQ ID NO: 107045 - DNA, 80 bp, synthetic construct; identical to SEQ ID NO: 36939
  misc_feature 1..80: note = Artificially Synthesized Probe
  source 1..80: mol_type = other DNA

SEQ ID NO: 107046 - DNA, 80 bp, synthetic construct
  misc_feature 1..80: note = Artificially Synthesized Probe
  source 1..80: mol_type = other DNA
accttttttctacctctgtttgtatttctggttctggttaagtgagtctggtaagcagcaggtgttctattttatttctt

SEQ ID NO: 107047 - DNA, 80 bp, synthetic construct
  misc_feature 1..80: note = Artificially Synthesized Probe
  source 1..80: mol_type = other DNA
gcctttctgattaactgtatctgtttatatctgtgttttcttcaggcattcataacattaagcaaattcaggtgtactgt

SEQ ID NO: 107048 - DNA, 80 bp, synthetic construct
  misc_feature 1..80: note = Artificially Synthesized Probe
  source 1..80: mol_type = other DNA
tttatttttgttccttgttgtataatctggtaggaatggggaaggggagatagtgaataaagagatgtatacttcttgcc

SEQ ID NO: 107049 - DNA, 80 bp, synthetic construct; identical to SEQ ID NO: 36940
  misc_feature 1..80: note = Artificially Synthesized Probe
  source 1..80: mol_type = other DNA

SEQ ID NO: 107050 - DNA, 80 bp, synthetic construct
  misc_feature 1..80: note = Artificially Synthesized Probe
  source 1..80: mol_type = other DNA
aggaagcataaatggttaaatttaaatggctaaaccccatttgccatttgtgtatctttaattttagtttgttgagagac

SEQ ID NO: 107051 - DNA, 80 bp, synthetic construct
  misc_feature 1..80: note = Artificially Synthesized Probe
  source 1..80: mol_type = other DNA
cattccctgagcatatttatcattactagtcccagcatatttgctcccatatttcctatgcttacctgtgaagattttca

SEQ ID NO: 107052 - DNA, 80 bp, synthetic construct
  misc_feature 1..80: note = Artificially Synthesized Probe
  source 1..80: mol_type = other DNA
ttgacttttgtaatcagagatactgagcttgagttctggctctttcatttgtatactgttatttggggcaagttttttaa

SEQ ID NO: 107053 - DNA, 80 bp, synthetic construct
  misc_feature 1..80: note = Artificially Synthesized Probe
  source 1..80: mol_type = other DNA
tggcaggatctcggctcactggaacctctgcctcccaggttcaggcgattctcctgcctgaacctcccaagcagctggga

SEQ ID NO: 107054 - DNA, 80 bp, synthetic construct; identical to SEQ ID NO: 36941
  misc_feature 1..80: note = Artificially Synthesized Probe
  source 1..80: mol_type = other DNA

SEQ ID NO: 107055 - DNA, 80 bp, synthetic construct
  misc_feature 1..80: note = Artificially Synthesized Probe
  source 1..80: mol_type = other DNA
tccccttttatcttaaaagtaccaaagaaagtgtaaaatgtgactgtcttgtcagtcctctttttcctgtttttcatgtc

SEQ ID NO: 107056 - DNA, 80 bp, synthetic construct
  misc_feature 1..80: note = Artificially Synthesized Probe
  source 1..80: mol_type = other DNA
cagttagaaaccaatggattgtagtttatttataattagttaaaccttcatgtgaatttggttttgaattacctttaagg

SEQ ID NO: 107057 - DNA, 80 bp, synthetic construct
  misc_feature 1..80: note = Artificially Synthesized Probe
  source 1..80: mol_type = other DNA
agtggggtgtgggtcagtacctgaaatgaaatgttttactcttcgctctaagtgtattaaatattatgtacaatcttatt

SEQ ID NO: 107058 - DNA, 80 bp, synthetic construct; identical to SEQ ID NO: 36942
  misc_feature 1..80: note = Artificially Synthesized Probe
  source 1..80: mol_type = other DNA

SEQ ID NO: 107059 - DNA, 80 bp, synthetic construct
  misc_feature 1..80: note = Artificially Synthesized Probe
  source 1..80: mol_type = other DNA
acttgcaatctgagagactgttgaaaaaggtgatcgttggcttttcaacagggagtaaggtctggtttaaaaaaaaatta

SEQ ID NO: 107060 - DNA, 80 bp, synthetic construct
  misc_feature 1..80: note = Artificially Synthesized Probe
  source 1..80: mol_type = other DNA
tacttgtaaaattaaaaatatattccaatagcatgcagatttttcatagaggaaatttgaaagcatggaagcacctgaat

SEQ ID NO: 107061 - DNA, 80 bp, synthetic construct
  misc_feature 1..80: note = Artificially Synthesized Probe
  source 1..80: mol_type = other DNA
caagccccaggcagctacactgggcatgctcagtagagcctgcggcttggggactctgcgctcgcacccagagctaccgc

SEQ ID NO: 107062 - DNA, 80 bp, synthetic construct
  misc_feature 1..80: note = Artificially Synthesized Probe
  source 1..80: mol_type = other DNA
gttaaacacagcataatatgtgtcacattataaagattcaggcaatgtttgttagtattagtacttttttttcttcctaa

SEQ ID NO: 107063 - DNA, 80 bp, synthetic construct
  misc_feature 1..80: note = Artificially Synthesized Probe
  source 1..80: mol_type = other DNA
cttaaacccgatagactgtatcttactgtcataacaataatgagtcatccagattatcgagtgagatacatatttaagaa

SEQ ID NO: 107064 - DNA, 80 bp, synthetic construct; identical to SEQ ID NO: 36943
  misc_feature 1..80: note = Artificially Synthesized Probe
  source 1..80: mol_type = other DNA

SEQ ID NO: 107065 - DNA, 80 bp, synthetic construct; identical to SEQ ID NO: 36876
  misc_feature 1..80: note = Artificially Synthesized Probe
  source 1..80: mol_type = other DNA

SEQ ID NO: 107066 - DNA, 80 bp, synthetic construct
  misc_feature 1..80: note = Artificially Synthesized Probe
  source 1..80: mol_type = other DNA
cttaacactttaaaccatgagaaaactgaagagttgagaagcttggcagatgctgctgtgatagtcaaaaagaaagtggg

SEQ ID NO: 107067 - DNA, 80 bp, synthetic construct
  misc_feature 1..80: note = Artificially Synthesized Probe
  source 1..80: mol_type = other DNA
ggctgttgcttactaagcaaagcaggctttagttgaggtttatcttgctttaaacagatatttaacagattttcctggag

SEQ ID NO: 107068 - DNA, 80 bp, synthetic construct; identical to SEQ ID NO: 36944
  misc_feature 1..80: note = Artificially Synthesized Probe
  source 1..80: mol_type = other DNA

SEQ ID NO: 107069 - DNA, 80 bp, synthetic construct
  misc_feature 1..80: note = Artificially Synthesized Probe
  source 1..80: mol_type = other DNA
tttaaaaacctcaactctgactatagtgaacagagaagtcttggactcttacaattcatgtgagaagacctgaaactttg

SEQ ID NO: 107070 - DNA, 80 bp, synthetic construct
  misc_feature 1..80: note = Artificially Synthesized Probe
  source 1..80: mol_type = other DNA
ccattgagcatagattcccagaatgtattctcctgcagaaaatggaggaaaataatacttggcttccctaatgattacat

SEQ ID NO: 107071 - DNA, 80 bp, synthetic construct
  misc_feature 1..80: note = Artificially Synthesized Probe
  source 1..80: mol_type = other DNA
agtattattccttttgcattgagagtcctgacgaaatgtccatgtgacagttcattttgggtttagctctacctctaata

SEQ ID NO: 107072 - DNA, 80 bp, synthetic construct
  misc_feature 1..80: note = Artificially Synthesized Probe
  source 1..80: mol_type = other DNA
tacacataattattatcagtactcaccacttcaaatatgaacagtgaatctaaccagtgtttgatttctctgtgtgtgta

SEQ ID NO: 107073 - DNA, 80 bp, synthetic construct; identical to SEQ ID NO: 36945
  misc_feature 1..80: note = Artificially Synthesized Probe
  source 1..80: mol_type = other DNA

SEQ ID NO: 107074 - DNA, 80 bp, synthetic construct
  misc_feature 1..80: note = Artificially Synthesized Probe
  source 1..80: mol_type = other DNA
attcactgtaaagctggaaagggacgaactggtgtaatgatatgtgcatatttattacatcggggcaaatttttaaaggc

SEQ ID NO: 107075 - DNA, 80 bp, synthetic construct
  misc_feature 1..80: note = Artificially Synthesized Probe
  source 1..80: mol_type = other DNA
agtaaaaattatatataaatacaatgtataatatgatgttttgatgtatgtgtatatacattgtgaaatgattactacag

SEQ ID NO: 107076 - DNA, 80 bp, synthetic construct
  misc_feature 1..80: note = Artificially Synthesized Probe
  source 1..80: mol_type = other DNA
ttcctccctccccaccctcagtccctggaaaacaggttttaaagatagttgctaatccttatttcttctaaatttttaaa

SEQ ID NO: 107077 - DNA, 80 bp, synthetic construct
  misc_feature 1..80: note = Artificially Synthesized Probe
  source 1..80: mol_type = other DNA
taatcaaaaataagctttatatttctgaagcttgtttgagcatagaatgcctttggataaaataccattacctagtaaag

SEQ ID NO: 107078 - DNA, 80 bp, synthetic construct; identical to SEQ ID NO: 36946
  misc_feature 1..80: note = Artificially Synthesized Probe
  source 1..80: mol_type = other DNA

SEQ ID NO: 107079 - DNA, 80 bp, synthetic construct
  misc_feature 1..80: note = Artificially Synthesized Probe
  source 1..80: mol_type = other DNA
attaatcatttaaagctgtgtaattgcatagattccttgttcctttaccccctcttatatcttgtttcctatcctttgtg

SEQ ID NO: 107080 - DNA, 80 bp, synthetic construct
  misc_feature 1..80: note = Artificially Synthesized Probe
  source 1..80: mol_type = other DNA
ggcatgaattatagagctgaggatctaaagatttttactttgatttatcccattatcatctgcagggaaacaattgcttt

SEQ ID NO: 107081 - DNA, 80 bp, synthetic construct
  misc_feature 1..80: note = Artificially Synthesized Probe
  source 1..80: mol_type = other DNA
gtgtggtggcgcgtgcctgtaatcccagctactcaggatgctgaggcaggagaatcgcttgaacccgggaggtggaggtt

SEQ ID NO: 107082 - DNA, 80 bp, synthetic construct; identical to SEQ ID NO: 36947
  misc_feature 1..80: note = Artificially Synthesized Probe
  source 1..80: mol_type = other DNA

SEQ ID NO: 107083 - DNA, 80 bp, synthetic construct
  misc_feature 1..80: note = Artificially Synthesized Probe
  source 1..80: mol_type = other DNA
ctatacttttaagcatatatacattgtttcattttagattttagggaggcagtgtgggctctggagccagactgcttgtt

SEQ ID NO: 107084 - DNA, 80 bp, synthetic construct
  misc_feature 1..80: note = Artificially Synthesized Probe
  source 1..80: mol_type = other DNA
ccagtggctactacatgagagcaatgaataaatctaagtggtacaaattaaccaaaattaagctttagttctgttcaata

SEQ ID NO: 107085 - DNA, 80 bp, synthetic construct
  misc_feature 1..80: note = Artificially Synthesized Probe
  source 1..80: mol_type = other DNA
gtaaatggaatctgtagattctattgcctgatgaaagtagacgtgtcaagaaataagaattctccaaggctcttcagata

SEQ ID NO: 107086 - DNA, 80 bp, synthetic construct
  misc_feature 1..80: note = Artificially Synthesized Probe
  source 1..80: mol_type = other DNA
taaacagcagtatcaggctgtagaatttgtcttctgaaagcagggaacttatatatagcaaagaacttcatagtgctccc

SEQ ID NO: 107087 - DNA, 80 bp, synthetic construct; identical to SEQ ID NO: 36948
  misc_feature 1..80: note = Artificially Synthesized Probe
  source 1..80: mol_type = other DNA

SEQ ID NO: 107088 - DNA, 80 bp, synthetic construct
  misc_feature 1..80: note = Artificially Synthesized Probe
  source 1..80: mol_type = other DNA
gattccaaaatgggaatgtttccttgattgtgtcaccatgcttgcatttgatgaaaacttgtagccggctatactgagaa

SEQ ID NO: 107089 - DNA, 80 bp, synthetic construct
  misc_feature 1..80: note = Artificially Synthesized Probe
  source 1..80: mol_type = other DNA
cttattcttcttcatgctacaagtatatttgactctttctaagatacttgccttcactgttcaactgtgtgactttttgt

SEQ ID NO: 107090 - DNA, 80 bp, synthetic construct; identical to SEQ ID NO: 36949
  misc_feature 1..80: note = Artificially Synthesized Probe
  source 1..80: mol_type = other DNA

SEQ ID NO: 107091 - DNA, 80 bp, synthetic construct
  misc_feature 1..80: note = Artificially Synthesized Probe
  source 1..80: mol_type = other DNA
atttgccaatgggaagatattctagtcattacagtctggtaatactatcaattctgtttctcttcagaggtgaggggaga

SEQ ID NO: 107092 - DNA, 80 bp, synthetic construct
  misc_feature 1..80: note = Artificially Synthesized Probe
  source 1..80: mol_type = other DNA
tattctccatccttgcataggttggaatatcccccaagtgaaaagagattgatgggctaatagttaatagaaaatggaga

SEQ ID NO: 107093 - DNA, 80 bp, synthetic construct
  misc_feature 1..80: note = Artificially Synthesized Probe
  source 1..80: mol_type = other DNA
aattaatatacttagaccatatttcggatgaattattcacagaatctaaaggagtatcctcgtgttcttaccttctttat

SEQ ID NO: 107094 - DNA, 80 bp, synthetic construct
  misc_feature 1..80: note = Artificially Synthesized Probe
  source 1..80: mol_type = other DNA
atagtacctgccacattgtaaatacttaaatggtagctactgctctgaaaaactgtaatttcaggttatgtatgtaggga

SEQ ID NO: 107095 - DNA, 80 bp, synthetic construct; identical to SEQ ID NO: 36950
  misc_feature 1..80: note = Artificially Synthesized Probe
  source 1..80: mol_type = other DNA

SEQ ID NO: 107096 - DNA, 80 bp, synthetic construct
  misc_feature 1..80: note = Artificially Synthesized Probe
  source 1..80: mol_type = other DNA
tattttgaaaggctcctcagcttatacctttccttacaaatgcttccttacaaatgctaaagcatttaatgactcctgac

SEQ ID NO: 107097 - DNA, 80 bp, synthetic construct
  misc_feature 1..80: note = Artificially Synthesized Probe
  source 1..80: mol_type = other DNA
ataactaatttcatcataagaaaacttagctaagcatggtaaagctgttgttatacaactgtggaattcttcctgaggag

SEQ ID NO: 107098 - DNA, 80 bp, synthetic construct
  misc_feature 1..80: note = Artificially Synthesized Probe
  source 1..80: mol_type = other DNA
ttgtcagtatttccttgtagattgagcctgtggatttgcatttttgtaattgtgaatcaccattataggagatacatgca

SEQ ID NO: 107099 - DNA, 80 bp, synthetic construct
  misc_feature 1..80: note = Artificially Synthesized Probe
  source 1..80: mol_type = other DNA
ctagtgacatttatatagaagaagaatcttttttccccctttcttttttgaagggagatgaggcagtcatattttggtaa

SEQ ID NO: 107100 - DNA, 80 bp, synthetic construct; identical to SEQ ID NO: 36951
  misc_feature 1..80: note = Artificially Synthesized Probe
  source 1..80: mol_type = other DNA

SEQ ID NO: 107101 - DNA, 80 bp, synthetic construct
  misc_feature 1..80: note = Artificially Synthesized Probe
  source 1..80: mol_type = other DNA
aaagtaagctgttggtgatttttttcttccaagaaagcatgccacagggcaacttctagggttggttctcatctagtcct

SEQ ID NO: 107102 - DNA, 80 bp, synthetic construct
  misc_feature 1..80: note = Artificially Synthesized Probe
  source 1..80: mol_type = other DNA
cttccaaaatttgagtttaaagaggtaaactccttttacatgacaaagttacttagaaacactactgctgtttccctctc

SEQ ID NO: 107103 - DNA, 80 bp, synthetic construct; identical to SEQ ID NO: 36952
  misc_feature 1..80: note = Artificially Synthesized Probe
  source 1..80: mol_type = other DNA

SEQ ID NO: 107104 - DNA, 80 bp, synthetic construct; identical to SEQ ID NO: 36877
  misc_feature 1..80: note = Artificially Synthesized Probe
  source 1..80: mol_type = other DNA

SEQ ID NO: 107105 - DNA, 80 bp, synthetic construct
  misc_feature 1..80: note = Artificially Synthesized Probe
  source 1..80: mol_type = other DNA
atccgcccacctcggcctcccaaagtgctgagattacaggcatgagtcactgtgcctggcctcttattttttctttggtt

SEQ ID NO: 107106 - DNA, 80 bp, synthetic construct
  misc_feature 1..80: note = Artificially Synthesized Probe
  source 1..80: mol_type = other DNA
gatctcaaggaaaatgtttggtttctctggggaatgaattttcatgacctaatcttaaatcaggttattttttctagcct

SEQ ID NO: 107107 - DNA, 80 bp, synthetic construct
  misc_feature 1..80: note = Artificially Synthesized Probe
  source 1..80: mol_type = other DNA
acatttgaattttcctgggccaaaccatgttactatgatacacattatttaaggctgttatataatacagtaaaattgta

SEQ ID NO: 107108 - DNA, 80 bp, synthetic construct; identical to SEQ ID NO: 36953
  misc_feature 1..80: note = Artificially Synthesized Probe
  source 1..80: mol_type = other DNA

SEQ ID NO: 107109 - DNA, 80 bp, synthetic construct
  misc_feature 1..80: note = Artificially Synthesized Probe
  source 1..80: mol_type = other DNA
acaaaacgaacagatctgcaaagatcaacctgtcctaagtcatataatctctttgtgtaataataaaaaccccatcttct

SEQ ID NO: 107110 - DNA, 80 bp, synthetic construct
  misc_feature 1..80: note = Artificially Synthesized Probe
  source 1..80: mol_type = other DNA
ccaactcaaagtagcttaaataaaaggagacattttttgacttacataacctaaaagctctggcctggatctaggtgctc

SEQ ID NO: 107111 - DNA, 80 bp, synthetic construct
  misc_feature 1..80: note = Artificially Synthesized Probe
  source 1..80: mol_type = other DNA
tatgatgagaagagagctacaatttgagcaaaaatttgtagggtgagttctgatttccctggattgaggcacatgcctat

SEQ ID NO: 107112 - DNA, 80 bp, synthetic construct
  misc_feature 1..80: note = Artificially Synthesized Probe
  source 1..80: mol_type = other DNA
cttcacatttgttctcaataattagtttcatagaagtgaaatactgtgtaacaccctaaactttagagattcttcgtaga

SEQ ID NO: 107113 - DNA, 80 bp, synthetic construct; identical to SEQ ID NO: 36954
  misc_feature 1..80: note = Artificially Synthesized Probe
  source 1..80: mol_type = other DNA

SEQ ID NO: 107114 - DNA, 80 bp, synthetic construct
  misc_feature 1..80: note = Artificially Synthesized Probe
  source 1..80: mol_type = other DNA
agatttccgagcttcaagcaaacactattatgttgaaaaatctacattatttctaagtttagcagtgccagtggaaagtt

SEQ ID NO: 107115 - DNA, 80 bp, synthetic construct
  misc_feature 1..80: note = Artificially Synthesized Probe
  source 1..80: mol_type = other DNA
acataaagtaaactctgcctcaaatgtaataaacttaatatgagttatgtaaactttggtcaatagaggtatatttttta

SEQ ID NO: 107116 - DNA, 80 bp, synthetic construct
  misc_feature 1..80: note = Artificially Synthesized Probe
  source 1..80: mol_type = other DNA
tggtagtagtatggcagtattttaggtctgaaagatgtacataatctgtactttgaagtctgttttttaagagattaatc

SEQ ID NO: 107117 - DNA, 80 bp, synthetic construct
  misc_feature 1..80: note = Artificially Synthesized Probe
  source 1..80: mol_type = other DNA
acacagggtacactccaggtaaagacttaacagttatgaacgaatgtgctaaacatcaaaatgtattaagtaaaagctga

SEQ ID NO: 107118 - DNA, 80 bp, synthetic construct; identical to SEQ ID NO: 36955
  misc_feature 1..80: note = Artificially Synthesized Probe
  source 1..80: mol_type = other DNA

SEQ ID NO: 107119 - DNA, 80 bp, synthetic construct
  misc_feature 1..80: note = Artificially Synthesized Probe
  source 1..80: mol_type = other DNA
atctttaggcagatcctacaggaggtattccagataaaggcattattgtcataggagatggcagctccatggatgttatt

SEQ ID NO: 107120 - DNA, 80 bp, synthetic construct
  misc_feature 1..80: note = Artificially Synthesized Probe
  source 1..80: mol_type = other DNA
ttaataaggatacaaagaaaaaatgtttttgtgtagctgtgtaatatgtttttgttttaagttaaatgttacaaaagagt

SEQ ID NO: 107121 - DNA, 80 bp, synthetic construct
  misc_feature 1..80: note = Artificially Synthesized Probe
  source 1..80: mol_type = other DNA
ctcacccactgactcacccagagcagcttccaatcctgtaagctccattcgtggtaagtgccctatacaggtgtacaatt

SEQ ID NO: 107122 - DNA, 80 bp, synthetic construct; identical to SEQ ID NO: 36956
  misc_feature 1..80: note = Artificially Synthesized Probe
  source 1..80: mol_type = other DNA

SEQ ID NO: 107123 - DNA, 80 bp, synthetic construct
  misc_feature 1..80: note = Artificially Synthesized Probe
  source 1..80: mol_type = other DNA
attcattagaactggagatttttaaaaatgtttaaatttatatggaaatataaaatcatgttttaaataatttttgattc

SEQ ID NO: 107124 - DNA, 80 bp, synthetic construct
  misc_feature 1..80: note = Artificially Synthesized Probe
  source 1..80: mol_type = other DNA
ggataaaagaaaagagggaaactaaaagtgagacattaagtatgagaaaggagataaaactaaagtgtggaggtgatgtt

SEQ ID NO: 107125 - DNA, 80 bp, synthetic construct
  misc_feature 1..80: note = Artificially Synthesized Probe
  source 1..80: mol_type = other DNA
taaattgcatttcaggtggctggttatcacaccttgaagtatcaagtaattatgttatctaaattggaccaggtgttaga

SEQ ID NO: 107126 - DNA, 80 bp, synthetic construct
  misc_feature 1..80: note = Artificially Synthesized Probe
  source 1..80: mol_type = other DNA
ccacatttggccaggattctcaatatgatttaggcccaagacgtgggaagaaagaagtaaagaactaaaggatttttttc

SEQ ID NO: 107127 - DNA, 80 bp, synthetic construct; identical to SEQ ID NO: 36957
  misc_feature 1..80: note = Artificially Synthesized Probe
  source 1..80: mol_type = other DNA

SEQ ID NO: 107128 - DNA, 80 bp, synthetic construct
  misc_feature 1..80: note = Artificially Synthesized Probe
  source 1..80: mol_type = other DNA
ataggccacagaaaactgaaactgacattttgagtagtatttcagaatcaagatctggattttggcaactgaatagatgc

SEQ ID NO: 107129 - DNA, 80 bp, synthetic construct
  misc_feature 1..80: note = Artificially Synthesized Probe
  source 1..80: mol_type = other DNA
gctggagttccctcacttctcttttctgtaaccctattatattactgctgtctctcagctgtgtttcattcctcaagcag

SEQ ID NO: 107130 - DNA, 80 bp, synthetic construct
  misc_feature 1..80: note = Artificially Synthesized Probe
  source 1..80: mol_type = other DNA
tgagtattaaattatgtatttctaaagacatttagaacaatacaaagaatatagtgtgggctcaataagtgacgatggtg

SEQ ID NO: 107131 - DNA, 80 bp, synthetic construct; identical to SEQ ID NO: 36958
  misc_feature 1..80: note = Artificially Synthesized Probe
  source 1..80: mol_type = other DNA

SEQ ID NO: 107132 - DNA, 80 bp, synthetic construct
  misc_feature 1..80: note = Artificially Synthesized Probe
  source 1..80: mol_type = other DNA
tgaaagaaaccttgagagagtaagtcctatgacagaagcagggaagtttcagaatgattgcagaaagatcagccaggctc

SEQ ID NO: 107133 - DNA, 80 bp, synthetic construct
  misc_feature 1..80: note = Artificially Synthesized Probe
  source 1..80: mol_type = other DNA
tgttttccaaagctagatatactgttagcgcctttggcaacagaagaaatgaaaagactgttgtctgctgcacagttcga

SEQ ID NO: 107134 - DNA, 80 bp, synthetic construct
  misc_feature 1..80: note = Artificially Synthesized Probe
  source 1..80: mol_type = other DNA
acttctatgtggtgctggaaaagccaggtttcatcattgcaggtaagaagtgcgggacaggcttcattggtgccaaatag

SEQ ID NO: 107135 - DNA, 80 bp, synthetic construct; identical to SEQ ID NO: 36959
  misc_feature 1..80: note = Artificially Synthesized Probe
  source 1..80: mol_type = other DNA

SEQ ID NO: 107136 - DNA, 80 bp, synthetic construct
  misc_feature 1..80: note = Artificially Synthesized Probe
  source 1..80: mol_type = other DNA
gtaccacagcactcttagtagtgaagcacttgacttctagtgagtggattttttgtgtgtgtgttttatattgcagagtg

SEQ ID NO: 107137 - DNA, 80 bp, synthetic construct
  misc_feature 1..80: note = Artificially Synthesized Probe
  source 1..80: mol_type = other DNA
cctgtactcctagctactcgggaggctgagggggttgaacctgggaggcaaaggttgcagtgagccaagattgcactact

SEQ ID NO: 107138 - DNA, 80 bp, synthetic construct
  misc_feature 1..80: note = Artificially Synthesized Probe
  source 1..80: mol_type = other DNA
agggagagtgtgggtttttggtctttcagttgtttgccagccttggataaagaatgaagattacttgagcatattattta

SEQ ID NO: 107139 - DNA, 80 bp, synthetic construct; identical to SEQ ID NO: 36960
  misc_feature 1..80: note = Artificially Synthesized Probe
  source 1..80: mol_type = other DNA

SEQ ID NO: 107140 - DNA, 80 bp, synthetic construct
  misc_feature 1..80: note = Artificially Synthesized Probe
  source 1..80: mol_type = other DNA
aatatacttctgaggtctacctcctggtctgtgaacataaaggagctgaaagagtaatggctgaagttctttagtttagc

SEQ ID NO: 107141 - DNA, 80 bp, synthetic construct
  misc_feature 1..80: note = Artificially Synthesized Probe
  source 1..80: mol_type = other DNA
tatattcttaacaataaagtaaactagagaaaagaacatgtatcaagaaaatcataaggaagagaaaacacatttacagt

SEQ ID NO: 107142 - DNA, 80 bp, synthetic construct
  misc_feature 1..80: note = Artificially Synthesized Probe
  source 1..80: mol_type = other DNA
tccatcatcactgttggcacttcatatgggtctcatggtgttaaggtttacggcattgcactagacacaatgaaaactac

SEQ ID NO: 107143 - DNA, 80 bp, synthetic construct
  misc_feature 1..80: note = Artificially Synthesized Probe
  source 1..80: mol_type = other DNA
gcctgtaatcccagctaatcgggaggctgaggcaggagaatcgctttttcccagaaggcgtaggttgcagtgagccgaga

SEQ ID NO: 107144 - DNA, 80 bp, synthetic construct; identical to SEQ ID NO: 36961
  misc_feature 1..80: note = Artificially Synthesized Probe
  source 1..80: mol_type = other DNA

SEQ ID NO: 107145 - DNA, 80 bp, synthetic construct
  misc_feature 1..80: note = Artificially Synthesized Probe
  source 1..80: mol_type = other DNA
taggtttgtgtatattttatggcagtaaatgataaaacagactaatctacatatattttatgtagtcatgacataaacct

SEQ ID NO: 107146 - DNA, 80 bp, synthetic construct; identical to SEQ ID NO: 36878
  misc_feature 1..80: note = Artificially Synthesized Probe
  source 1..80: mol_type = other DNA

SEQ ID NO: 107147 - DNA, 80 bp, synthetic construct
  misc_feature 1..80: note = Artificially Synthesized Probe
  source 1..80: mol_type = other DNA
ttttcctcaaaattaaagtggaaaaggagagttactactagtagaaagtagaactgtacccttgggcaggggtgtgtgtg

SEQ ID NO: 107148 - DNA, 80 bp, synthetic construct; identical to SEQ ID NO: 36962
  misc_feature 1..80: note = Artificially Synthesized Probe
  source 1..80: mol_type = other DNA

SEQ ID NO: 107149 - DNA, 80 bp, synthetic construct
  misc_feature 1..80: note = Artificially Synthesized Probe
  source 1..80: mol_type = other DNA
ttgaaaacagagtattttttaatctgcaagagctttacagccttttattcatatgtataagcttttaaagatgactaaaa

SEQ ID NO: 107150 - DNA, 80 bp, synthetic construct
  misc_feature 1..80: note = Artificially Synthesized Probe
  source 1..80: mol_type = other DNA
tgttaatctagaagtgttgaattttgggtgctgacaaggcagcaggtagataagaattgcaaagttaagaaaatagactg

SEQ ID NO: 107151 - DNA, 80 bp, synthetic construct
  misc_feature 1..80: note = Artificially Synthesized Probe
  source 1..80: mol_type = other DNA
ttttgggtaaggattaacagaatgtataatcacctacattataggtacactactaatcacttgctacttgaaaaaaccta

SEQ ID NO: 107152 - DNA, 80 bp, synthetic construct
  misc_feature 1..80: note = Artificially Synthesized Probe
  source 1..80: mol_type = other DNA
ctagataataaatgcatatggttaaaaaattcacatggttcaaaaaagtacacctcccactcatcttccatgtgatattt

SEQ ID NO: 107153 - DNA, 80 bp, synthetic construct; identical to SEQ ID NO: 36963
  misc_feature 1..80: note = Artificially Synthesized Probe
  source 1..80: mol_type = other DNA

SEQ ID NO: 107154 - DNA, 80 bp, synthetic construct
  misc_feature 1..80: note = Artificially Synthesized Probe
  source 1..80: mol_type = other DNA
ggcaggagaatggcgtgaacccgggaggcagagcttgcagtgagccgagatcgcaccactgcactccagcctgggcgaca

SEQ ID NO: 107155 - DNA, 80 bp, synthetic construct
  misc_feature 1..80: note = Artificially Synthesized Probe
  source 1..80: mol_type = other DNA
tctggtgtttgatcctcatgagagccctgttaaggaagggtacatattattgtcctcattttccttcgaaaacacatcag

SEQ ID NO: 107156 - DNA, 80 bp, synthetic construct; identical to SEQ ID NO: 36964
  misc_feature 1..80: note = Artificially Synthesized Probe
  source 1..80: mol_type = other DNA

SEQ ID NO: 107157 - DNA, 80 bp, synthetic construct
  misc_feature 1..80: note = Artificially Synthesized Probe
  source 1..80: mol_type = other DNA
tcttttgaagaggatgtaattatttaaggtattatgaaatgcattgtgatttgaattagatactctttggagatggagtt

SEQ ID NO: 107158 - DNA, 80 bp, synthetic construct
  misc_feature 1..80: note = Artificially Synthesized Probe
  source 1..80: mol_type = other DNA
cccagctaattttttgtatttttggtagagacggggtttcaccatgttggccaggctggtctccaactcctgacctcaag

SEQ ID NO: 107159 - DNA, 80 bp, synthetic construct
  misc_feature 1..80: note = Artificially Synthesized Probe
  source 1..80: mol_type = other DNA
tgtctacaatttttaagacattggggagatttagatgccagtagtaacttaaaagagaaataattgcaaattctttttcc

SEQ ID NO: 107160 - DNA, 80 bp, synthetic construct
  misc_feature 1..80: note = Artificially Synthesized Probe
  source 1..80: mol_type = other DNA
cgttagtgaatgcattgttgtacatattagatttttctctttagataactcagcttcccctattaagtgccacatgtatt

SEQ ID NO: 107161 - DNA, 80 bp, synthetic construct; identical to SEQ ID NO: 36965
  misc_feature 1..80: note = Artificially Synthesized Probe
  source 1..80: mol_type = other DNA

SEQ ID NO: 107162 - DNA, 80 bp, synthetic construct
  misc_feature 1..80: note = Artificially Synthesized Probe
  source 1..80: mol_type = other DNA
gcctttgacacttattctggatatgcagtggcctttgcctatggggttcatgggtcagagcgctgttgtgacctttgaat

SEQ ID NO: 107163 - DNA, 80 bp, synthetic construct
  misc_feature 1..80: note = Artificially Synthesized Probe
  source 1..80: mol_type = other DNA
catagcaatttagtgaaataactataatggaacattttttttcaatttggcttctcttttttttctgtccaccagggagt

SEQ ID NO: 107164 - DNA, 80 bp, synthetic construct
  misc_feature 1..80: note = Artificially Synthesized Probe
  source 1..80: mol_type = other DNA
cagtggcggaacttgcagtaagtgcttgaaattctcatccttccatgtattggaacagttttcttaaccatatctagaag

SEQ ID NO: 107165 - DNA, 80 bp, synthetic construct; identical to SEQ ID NO: 36966
  misc_feature 1..80: note = Artificially Synthesized Probe
  source 1..80: mol_type = other DNA

SEQ ID NO: 107166 - DNA, 80 bp, synthetic construct
  misc_feature 1..80: note = Artificially Synthesized Probe
  source 1..80: mol_type = other DNA
caagctgaagtatgatgagtaaagaataggaatcaaagtatgtggagtgttagagaaaacctggatttagatccagattc

SEQ ID NO: 107167 - DNA, 80 bp, synthetic construct
  misc_feature 1..80: note = Artificially Synthesized Probe
  source 1..80: mol_type = other DNA
ctcccttttaccctaatctctataagtctacctcagtcatcctgatcctattctacttctctgatgttgttgtcagatag

SEQ ID NO: 107168 - DNA, 80 bp, synthetic construct
  misc_feature 1..80: note = Artificially Synthesized Probe
  source 1..80: mol_type = other DNA
agagatggggggtttctccatgttggtcaggctggcctcgaactcttgacctcaggtaatctgcctgtctcagcctgcta

SEQ ID NO: 107169 - DNA, 80 bp, synthetic construct
  misc_feature 1..80: note = Artificially Synthesized Probe
  source 1..80: mol_type = other DNA
tgagctgttggaagtgactgacagatgaatgtaacagattcatagagaaggaaaaaggaagaaaaactcatgctcttcct

SEQ ID NO: 107170 - DNA, 80 bp, synthetic construct; identical to SEQ ID NO: 36967
  misc_feature 1..80: note = Artificially Synthesized Probe
  source 1..80: mol_type = other DNA

SEQ ID NO: 107171 - DNA, 80 bp, synthetic construct
  misc_feature 1..80: note = Artificially Synthesized Probe
  source 1..80: mol_type = other DNA
tgggaggctgaggcaggagaatcgcttgaatccaggaggcagaggttgcagttagccgagatcatgccactgcactgcag

SEQ ID NO: 107172 - DNA, 80 bp, synthetic construct
  misc_feature 1..80: note = Artificially Synthesized Probe
  source 1..80: mol_type = other DNA
cattgaagaaaacatacagtttagactggcattaaaactgaaagaagtggccagacgcagtggtagacgcagtggttcac

SEQ ID NO: 107173 - DNA, 80 bp, synthetic construct
  misc_feature 1..80: note = Artificially Synthesized Probe
  source 1..80: mol_type = other DNA
gctgaggcaggagaattgcttgaagccgaaggtggaggttgcagtgagccgagattgcgtcattgcactccagccagggc

SEQ ID NO: 107174 - DNA, 80 bp, synthetic construct; identical to SEQ ID NO: 36968
  misc_feature 1..80: note = Artificially Synthesized Probe
  source 1..80: mol_type = other DNA

SEQ ID NO: 107175 - DNA, 80 bp, synthetic construct
  misc_feature 1..80: note = Artificially Synthesized Probe
  source 1..80: mol_type = other DNA
gtaaaagttttgagcccagtcaggtgaaatagtctcagaaagaaagaaaagtgaatctgagacttggagacattaatgtt

SEQ ID NO: 107176 - DNA, 80 bp, synthetic construct; identical to SEQ ID NO: 36870
  misc_feature 1..80: note = Artificially Synthesized Probe
  source 1..80: mol_type = other DNA

SEQ ID NO: 107177 - DNA, 80 bp, synthetic construct
  misc_feature 1..80: note = Artificially Synthesized Probe
  source 1..80: mol_type = other DNA
gcatcatcaggaaagggagagtagttaagcctttcatataaataatggtgtggcgtttgggcatgggaagtcttggagga

SEQ ID NO: 107178 - DNA, 80 bp, synthetic construct
  misc_feature 1..80: note = Artificially Synthesized Probe
  source 1..80: mol_type = other DNA
gatggaaaaagctactatattctagacatttaacagggttaaaaatgttactaaaagatgatcaatgtggttttcattca

SEQ ID NO: 107179 - DNA, 80 bp, synthetic construct; identical to SEQ ID NO: 36969
  misc_feature 1..80: note = Artificially Synthesized Probe
  source 1..80: mol_type = other DNA

SEQ ID NO: 107180 - DNA, 80 bp, synthetic construct
  misc_feature 1..80: note = Artificially Synthesized Probe
  source 1..80: mol_type = other DNA
ttatttcaaaatgcaggattcttttccatttaaaattccctctctttgtgagacttctttttgagtattctggttactct

SEQ ID NO: 107181 - DNA, 80 bp, synthetic construct
  misc_feature 1..80: note = Artificially Synthesized Probe
  source 1..80: mol_type = other DNA
tggggaggcctcaggaagcctccaatcatggctgaaggcaaaaggggagcatggtgagaatgggagcaagaaagagaagg

SEQ ID NO: 107182 - DNA, 80 bp, synthetic construct
  misc_feature 1..80: note = Artificially Synthesized Probe
  source 1..80: mol_type = other DNA
agggaaagatatccaaactatatcactaggtctggatcttgttatttattttttggaacatagtcatatatatccaagga

SEQ ID NO: 107183 - DNA, 80 bp, synthetic construct
  misc_feature 1..80: note = Artificially Synthesized Probe
  source 1..80: mol_type = other DNA
atttgaagatgcacattttagatgtagtttaattgaaacctggaaatactattaatttgctttttaaagtcctaaaatca

SEQ ID NO: 107184 - DNA, 80 bp, synthetic construct; identical to SEQ ID NO: 36970
  misc_feature 1..80: note = Artificially Synthesized Probe
  source 1..80: mol_type = other DNA

SEQ ID NO: 107185 - DNA, 80 bp, synthetic construct
  misc_feature 1..80: note = Artificially Synthesized Probe
  source 1..80: mol_type = other DNA
gaaatagtagtaggtgtttactaaactggaaatttcatttaacttggtttagctttgccttgttctcagtcacattgata

SEQ ID NO: 107186 - DNA, 80 bp, synthetic construct
  misc_feature 1..80: note = Artificially Synthesized Probe
  source 1..80: mol_type = other DNA
ttctctattatcttggcatgttttcttcaaatggcacttcttaacctcctaaggttaataaatttctttgtaatggactt

SEQ ID NO: 107187 - DNA, 80 bp, synthetic construct
  misc_feature 1..80: note = Artificially Synthesized Probe
  source 1..80: mol_type = other DNA
aataaaacatacaatccttcccttaacacactttcccaccatttggttcaactgctagtgtaaaagcatgatgaattttg

SEQ ID NO: 107188 - DNA, 80 bp, synthetic construct
  misc_feature 1..80: note = Artificially Synthesized Probe
  source 1..80: mol_type = other DNA
tgaaaatgaggtgttttggaggaaaggaaggttgtgctgcagtttttacttgaaatctgttacatttctttacagaaatt

SEQ ID NO: 107189 - DNA, 80 bp, synthetic construct; identical to SEQ ID NO: 36971
  misc_feature 1..80: note = Artificially Synthesized Probe
  source 1..80: mol_type = other DNA

SEQ ID NO: 107190 - DNA, 80 bp, synthetic construct
  misc_feature 1..80: note = Artificially Synthesized Probe
  source 1..80: mol_type = other DNA
acactgattgtcagcgataaaatggaatgcctgggattttttaaaatttattttattcatttttataaggtaaaaacagt

SEQ ID NO: 107191 - DNA, 80 bp, synthetic construct
  misc_feature 1..80: note = Artificially Synthesized Probe
  source 1..80: mol_type = other DNA
agttactctgccactagaagtctaattttgggacttactattcatgaaataggaattgacttttatataagtaataggac

SEQ ID NO: 107192 - DNA, 80 bp, synthetic construct
  misc_feature 1..80: note = Artificially Synthesized Probe
  source 1..80: mol_type = other DNA
gttaaaggcatttcctgtgaaataatactggtatgtatttaaccatgcagatcctcagtttgtggtctgccagctaaagg

SEQ ID NO: 107193 - DNA, 80 bp, synthetic construct
  misc_feature 1..80: note = Artificially Synthesized Probe
  source 1..80: mol_type = other DNA
agaaatatccaaaataaggacagattaaaagctatattttattttatgacatgtaaggaactataatttgttttctatta

SEQ ID NO: 107194 - DNA, 80 bp, synthetic construct; identical to SEQ ID NO: 36972
  misc_feature 1..80: note = Artificially Synthesized Probe
  source 1..80: mol_type = other DNA

SEQ ID NO: 107195 - DNA, 80 bp, synthetic construct
  misc_feature 1..80: note = Artificially Synthesized Probe
  source 1..80: mol_type = other DNA
gcccaggctggtctcaaactcctgggcacaagcagtcctcacgctttggcatcccaaagagttggaattacaggtgtgcg

SEQ ID NO: 107196 - DNA, 80 bp, synthetic construct
  misc_feature 1..80: note = Artificially Synthesized Probe
  source 1..80: mol_type = other DNA
tgaagtttgaatttgattgatctgtatttagagaaggcaacgtcttattattttaaaaccaactatccgccctgtgcggt

SEQ ID NO: 107197 - DNA, 80 bp, synthetic construct
  misc_feature 1..80: note = Artificially Synthesized Probe
  source 1..80: mol_type = other DNA
actcaggaggcttgaggcaggataattgctgaacccgagaggcggaggttgcagtaagccaagaatgcaccattgtactc

SEQ ID NO: 107198 - DNA, 80 bp, synthetic construct; identical to SEQ ID NO: 36973
  misc_feature 1..80: note = Artificially Synthesized Probe
  source 1..80: mol_type = other DNA

SEQ ID NO: 107199 - DNA, 80 bp, synthetic construct; identical to SEQ ID NO: 36879
  misc_feature 1..80: note = Artificially Synthesized Probe
  source 1..80: mol_type = other DNA

SEQ ID NO: 107200 - DNA, 80 bp, synthetic construct
  misc_feature 1..80: note = Artificially Synthesized Probe
  source 1..80: mol_type = other DNA
aacccatttcctatcgtctgtacaaataaaagttaaatatatctcaataacttagaaaaattattttttgataatccagg

SEQ ID NO: 107201 - DNA, 80 bp, synthetic construct
  misc_feature 1..80: note = Artificially Synthesized Probe
  source 1..80: mol_type = other DNA
aatatttatgatttatttgtttatccttgactacataaatttccattttattgattttccctgccttatttaagaatatg

SEQ ID NO: 107202 - DNA, 80 bp, synthetic construct
  misc_feature 1..80: note = Artificially Synthesized Probe
  source 1..80: mol_type = other DNA
caagattactttgccaggtactgttaaaagatgcaatgacatttaagacgtaacatccttaaggatcttattttctgggg

SEQ ID NO: 107203 - DNA, 80 bp, synthetic construct
  misc_feature 1..80: note = Artificially Synthesized Probe
  source 1..80: mol_type = other DNA
gatttctttgttggtcaatagaggtttaaagtgatgaacttctgttgtgtttttttattaagaaggtattatcttattag

SEQ ID NO: 107204 - DNA, 80 bp, synthetic construct; identical to SEQ ID NO: 36974
  misc_feature 1..80: note = Artificially Synthesized Probe
  source 1..80: mol_type = other DNA

SEQ ID NO: 107205 - DNA, 80 bp, synthetic construct
  misc_feature 1..80: note = Artificially Synthesized Probe
  source 1..80: mol_type = other DNA
gtatttttggtttaaaatttgagaatttgagtgaagaaaaatcatgtgaatgaaaatgcaacagataactcagattgcct

SEQ ID NO: 107206 - DNA, 80 bp, synthetic construct
  misc_feature 1..80: note = Artificially Synthesized Probe
  source 1..80: mol_type = other DNA
tttttttttaggacaaaatgtttcacttttgggtaaatacattcttcataccaggaccagaggaaacctcagaaaaagta

SEQ ID NO: 107207 - DNA, 80 bp, synthetic construct
  misc_feature 1..80: note = Artificially Synthesized Probe
  source 1..80: mol_type = other DNA
gttaaattaaacattttgtgggggttgttgacttgtatgtatgtgatgtgtgtttaattctaggagtacagctgatgaag

SEQ ID NO: 107208 - DNA, 80 bp, synthetic construct; identical to SEQ ID NO: 36975
  misc_feature 1..80: note = Artificially Synthesized Probe
  source 1..80: mol_type = other DNA

SEQ ID NO: 107209 - DNA, 80 bp, synthetic construct
  misc_feature 1..80: note = Artificially Synthesized Probe
  source 1..80: mol_type = other DNA
aaggaccttgtgtttttttttttaccatgacctacaaggcccagcataatttagcacagggctacctcctacatcagcac

SEQ ID NO: 107210 - DNA, 80 bp, synthetic construct
  misc_feature 1..80: note = Artificially Synthesized Probe
  source 1..80: mol_type = other DNA
catatttccagccttagcttcaatctcatattctctgaagtcctttgattgtcctcccgttattctttttttaaaaatcc

SEQ ID NO: 107211 - DNA, 80 bp, synthetic construct
  misc_feature 1..80: note = Artificially Synthesized Probe
  source 1..80: mol_type = other DNA
ttcccattatgttacatgagtggttcttaaacttcagtgtgttagaacaacctgaagggcttattaagctatggattgct

SEQ ID NO: 107212 - DNA, 80 bp, synthetic construct; identical to SEQ ID NO: 36976
  misc_feature 1..80: note = Artificially Synthesized Probe
  source 1..80: mol_type = other DNA

SEQ ID NO: 107213 - DNA, 80 bp, synthetic construct
  misc_feature 1..80: note = Artificially Synthesized Probe
  source 1..80: mol_type = other DNA
cggccaatatggcgaaaccctatctgcactacaaatacaaaaattagctgggcatggtgtcgcacacctgtaatcccagc

SEQ ID NO: 107214 - DNA, 80 bp, synthetic construct
  misc_feature 1..80: note = Artificially Synthesized Probe
  source 1..80: mol_type = other DNA
cacacacacacacacacacactattactaccaatatacatacatatatgtatgtatgtatgtatgtatattggtagtaat

SEQ ID NO: 107215 - DNA, 80 bp, synthetic construct
  misc_feature 1..80: note = Artificially Synthesized Probe
  source 1..80: mol_type = other DNA
atctgatgagagtttattatattcgtgacacggttggcaaggaaacttggttatttctgtggcatgcagcattttaatgt

SEQ ID NO: 107216 - DNA, 80 bp, synthetic construct
  misc_feature 1..80: note = Artificially Synthesized Probe
  source 1..80: mol_type = other DNA
ccaccaagctgaactgggaagagcaggaacaaggcgtgtttgcctcccaccctcagccgggcactgcagacagacagcca

SEQ ID NO: 107217 - DNA, 80 bp, synthetic construct; identical to SEQ ID NO: 36988
  misc_feature 1..80: note = Artificially Synthesized Probe
  source 1..80: mol_type = other DNA

SEQ ID NO: 107218 - DNA, 80 bp, synthetic construct
  misc_feature 1..80: note = Artificially Synthesized Probe
  source 1..80: mol_type = other DNA
tgtcagcatcagcttgtgcacgctgggcgggcactccagagggcagggcatgcggtagccggcgtccaccctcaggaagg

SEQ ID NO: 107219 - DNA, 80 bp, synthetic construct
  misc_feature 1..80: note = Artificially Synthesized Probe
  source 1..80: mol_type = other DNA
cacactgtccactgctaacacctccctctggacagggctccaacaggcagctccaggcaccagcctgggtgctcagagaa

SEQ ID NO: 107220 - DNA, 80 bp, synthetic construct; identical to SEQ ID NO: 36989
  misc_feature 1..80: note = Artificially Synthesized Probe
  source 1..80: mol_type = other DNA

SEQ ID NO: 107221 - DNA, 80 bp, synthetic construct; identical to SEQ ID NO: 36987
  misc_feature 1..80: note = Artificially Synthesized Probe
  source 1..80: mol_type = other DNA

SEQ ID NO: 107222 - DNA, 80 bp, synthetic construct
  misc_feature 1..80: note = Artificially Synthesized Probe
  source 1..80: mol_type = other DNA
ccccagcagtgggacggtgatgaccccactgtctgacccacgcacggccgctgcagctaaggccacactggggcctgacc

SEQ ID NO: 107223 - DNA, 80 bp, synthetic construct
  misc_feature 1..80: note = Artificially Synthesized Probe
  source 1..80: mol_type = other DNA
gggccctgctgtgcgtgccattcagaatgggggccccaccggactcacggtggcttcccacctccctgcccagcctgggc

SEQ ID NO: 107224 - DNA, 80 bp, synthetic construct
  misc_feature 1..80: note = Artificially Synthesized Probe
  source 1..80: mol_type = other DNA
aactttgcagagggtgttttccccgacgaggatgttcctggcggccaggtcccggtggatgtaattctgcgactccaggt

SEQ ID NO: 107225 - DNA, 80 bp, synthetic construct; identical to SEQ ID NO: 36990
  misc_feature 1..80: note = Artificially Synthesized Probe
  source 1..80: mol_type = other DNA

SEQ ID NO: 107226 - DNA, 80 bp, synthetic construct
  misc_feature 1..80: note = Artificially Synthesized Probe
  source 1..80: mol_type = other DNA
acggtgaaaccccatctctactaaaaatacaaaaaattagccgggcgtggtggcgggcgcctgtagtcccagctactcgg

SEQ ID NO: 107227 - DNA, 80 bp, synthetic construct
  misc_feature 1..80: note = Artificially Synthesized Probe
  source 1..80: mol_type = other DNA
gtggtgacaggtgcctgtaatctcagctactcaggtggctgaggcaggagaatcatttgaacccaggaggtggaggttac

SEQ ID NO: 107228 - DNA, 80 bp, synthetic construct
  misc_feature 1..80: note = Artificially Synthesized Probe
  source 1..80: mol_type = other DNA
acgcagaaggaccagcgaagaggctcatgactgcgtgatgtaggcagtgggaactcgaacaggagaatggctgtcagcgg

SEQ ID NO: 107229 - DNA, 80 bp, synthetic construct; identical to SEQ ID NO: 36991
  misc_feature 1..80: note = Artificially Synthesized Probe
  source 1..80: mol_type = other DNA

SEQ ID NO: 107230 - DNA, 80 bp, synthetic construct
  misc_feature 1..80: note = Artificially Synthesized Probe
  source 1..80: mol_type = other DNA
tctgtgtgtgtccgtgtgatctgtgtgtgtgtctgtgtgtgtccgtgtgatctgttttgtgtgtctctgtgtgtgtgtct

SEQ ID NO: 107231 - DNA, 80 bp, synthetic construct
  misc_feature 1..80: note = Artificially Synthesized Probe
  source 1..80: mol_type = other DNA
tgtctgtgtgtctacgtgtgtgtgtgtgtagacgtggggggggggtgtgcactttatttcctcacgtgcccccgctgcct

SEQ ID NO: 107232 - DNA, 80 bp, synthetic construct
  misc_feature 1..80: note = Artificially Synthesized Probe
  source 1..80: mol_type = other DNA
gcgcgatctcggctcactgcaagctccacctcccgggttcacaccagtctgctgcctcagcctcccacgtagctgggact

SEQ ID NO: 107233 - DNA, 80 bp, synthetic construct
  misc_feature 1..80: note = Artificially Synthesized Probe
  source 1..80: mol_type = other DNA
cgactgcagcatctgctggtgcaggaggttgtctgcggggacgggtggcctcggtggatgcagcccctgaccccccaggc

SEQ ID NO: 107234 - DNA, 80 bp, synthetic construct; identical to SEQ ID NO: 36992
  misc_feature 1..80: note = Artificially Synthesized Probe
  source 1..80: mol_type = other DNA

SEQ ID NO: 107235 - DNA, 80 bp, synthetic construct
  misc_feature 1..80: note = Artificially Synthesized Probe
  source 1..80: mol_type = other DNA
cagctcactgcaatctccgcctcctgggttgaagcgattctcctgcctcagcctcccgagtagctgggactacaggcaca

SEQ ID NO: 107236 - DNA, 80 bp, synthetic construct
  misc_feature 1..80: note = Artificially Synthesized Probe
  source 1..80: mol_type = other DNA
ttttataataaatgtatttaggtaaaaacataggtgcaattgaaagggaaccactctcgcatggacgctgtgggtgctgc

SEQ ID NO: 107237 - DNA, 80 bp, synthetic construct
  misc_feature 1..80: note = Artificially Synthesized Probe
  source 1..80: mol_type = other DNA
gacctccccaaagtagccggaccccagcttcctgcagagcgtgaactcctccctcggcctctcccagtcatcccaatggg

SEQ ID NO: 107238 - DNA, 80 bp, synthetic construct; identical to SEQ ID NO: 36993
  misc_feature 1..80: note = Artificially Synthesized Probe
  source 1..80: mol_type = other DNA

SEQ ID NO: 107239 - DNA, 80 bp, synthetic construct
  misc_feature 1..80: note = Artificially Synthesized Probe
  source 1..80: mol_type = other DNA
gcccggccaacctctcccagtaggaaatgccagcctgtgaccccccagcctgaccccgcgtgaccaagtcagggcggagc

SEQ ID NO: 107240 - DNA, 80 bp, synthetic construct
  misc_feature 1..80: note = Artificially Synthesized Probe
  source 1..80: mol_type = other DNA
cacagcctgcgtgtcccgcactgggagggagagcgtgagctgtgtggccaccccaactccgacgcctccctgcgtcccca

SEQ ID NO: 107241 - DNA, 80 bp, synthetic construct
  misc_feature 1..80: note = Artificially Synthesized Probe
  source 1..80: mol_type = other DNA
ccaggcagccagtggcctccgcctggatggcagctgcctaaaatcccagccatgctgagatcctcaggggcagggatggg

SEQ ID NO: 107242 - DNA, 80 bp, synthetic construct
  misc_feature 1..80: note = Artificially Synthesized Probe
  source 1..80: mol_type = other DNA
gcagccagtgacccaggccccagggaggagcgggccaggtgggcggaggggatgggagctccctggagaggagcccatgt

SEQ ID NO: 107243 - DNA, 80 bp, synthetic construct
  misc_feature 1..80: note = Artificially Synthesized Probe
  source 1..80: mol_type = other DNA
agccaccgtgccccgcctattcttcttttaaaccaaaaaaactttcaggtgagtcaaaaccaaaaccaataagcttttta

SEQ ID NO: 107244 - DNA, 80 bp, synthetic construct; identical to SEQ ID NO: 36994
  misc_feature 1..80: note = Artificially Synthesized Probe
  source 1..80: mol_type = other DNA

SEQ ID NO: 107245 - DNA, 80 bp, synthetic construct
  misc_feature 1..80: note = Artificially Synthesized Probe
  source 1..80: mol_type = other DNA
cagacgccctgaatgtcccgaaaggccaggacaggcccctgaggacccggcgggggcaggggcaggcgctaccacaccct

SEQ ID NO: 107246 - DNA, 80 bp, synthetic construct
  misc_feature 1..80: note = Artificially Synthesized Probe
  source 1..80: mol_type = other DNA
ttcacccgcacacctgaacacacacgcgcatgtgtgctcacttgcccacacgctcacacgcacgcacacacagccactcg

SEQ ID NO: 107247 - DNA, 80 bp, synthetic construct; identical to SEQ ID NO: 36995
  misc_feature 1..80: note = Artificially Synthesized Probe
  source 1..80: mol_type = other DNA

SEQ ID NO: 107248 - DNA, 80 bp, synthetic construct
  misc_feature 1..80: note = Artificially Synthesized Probe
  source 1..80: mol_type = other DNA
ccccccctcacctggcctcccaccccgtcctcacctggcctcccgcacccccctcacctggcctcccgcccccccctcac

SEQ ID NO: 107249 - DNA, 80 bp, synthetic construct
  misc_feature 1..80: note = Artificially Synthesized Probe
  source 1..80: mol_type = other DNA
ccccacctagcctcccgctcccccccccacctggcctcccaccccctcctcacctggcctcctccccacttctcacctgg

SEQ ID NO: 107250 - DNA, 80 bp, synthetic construct
  misc_feature 1..80: note = Artificially Synthesized Probe
  source 1..80: mol_type = other DNA
ccaccatgggcccctgcccgacggcctctttacagcctcccctgcttgttgcttgggtcccccgggagctaaccctacac

SEQ ID NO: 107251 - DNA, 80 bp, synthetic construct; identical to SEQ ID NO: 36996
  misc_feature 1..80: note = Artificially Synthesized Probe
  source 1..80: mol_type = other DNA

SEQ ID NO: 107252 - DNA, 80 bp, synthetic construct
  misc_feature 1..80: note = Artificially Synthesized Probe
  source 1..80: mol_type = other DNA
atgagcccaaggcaggggccgtgccctctgacccccgtgctccaactcccgcagggacagtcctgggcactcctgggcgc

SEQ ID NO: 107253 - DNA, 80 bp, synthetic construct
  misc_feature 1..80: note = Artificially Synthesized Probe
  source 1..80: mol_type = other DNA
caaagctcccagcagcctaggacacgcacggttccgactccaccgtctccctctcggccaggtagttgtggggcacatag

SEQ ID NO: 107254 - DNA, 80 bp, synthetic construct
  misc_feature 1..80: note = Artificially Synthesized Probe
  source 1..80: mol_type = other DNA
tgaaggtgggaaaagccccttgtggacgtggacggtgaaactgagctggcgcctcgggcagtgatgcttgggctggcaga

SEQ ID NO: 107255 - DNA, 80 bp, synthetic construct
  misc_feature 1..80: note = Artificially Synthesized Probe
  source 1..80: mol_type = other DNA
cccaggtgagcctggtcccgggacaccatggcgggcgggcgcagcggcaggaccaggctgtggcccagctggagcaccca

SEQ ID NO: 107256 - DNA, 80 bp, synthetic construct
  misc_feature 1..80: note = Artificially Synthesized Probe
  source 1..80: mol_type = other DNA
agggtttgctgtaactatagtagaaatgacattctgattccactcctagcttcacaaggatatctgtgaaagatttgggg

SEQ ID NO: 107257 - DNA, 80 bp, synthetic construct; identical to SEQ ID NO: 37103
  misc_feature 1..80: note = Artificially Synthesized Probe
  source 1..80: mol_type = other DNA

SEQ ID NO: 107258 - DNA, 80 bp, synthetic construct
  misc_feature 1..80: note = Artificially Synthesized Probe
  source 1..80: mol_type = other DNA
aatggcaacaacaacttttcaagacatggagagcaaaataacacatgaattgaaacaagaaaatggcaaaatgtggagga

SEQ ID NO: 107259 - DNA, 80 bp, synthetic construct
  misc_feature 1..80: note = Artificially Synthesized Probe
  source 1..80: mol_type = other DNA
aaacagaccaccagagaaaatcaccttcacttaaaggaagacaggaagaaaagaaagaaggaagaggaggccacaaaaca

SEQ ID NO: 107260 - DNA, 80 bp, synthetic construct; identical to SEQ ID NO: 37007
  misc_feature 1..80: note = Artificially Synthesized Probe
  source 1..80: mol_type = other DNA

SEQ ID NO: 107261 - DNA, 80 bp, synthetic construct
  misc_feature 1..80: note = Artificially Synthesized Probe
  source 1..80: mol_type = other DNA
cacctgtaaagacacaaatagacttaaaataagagatggaaaattatattctttgtaaatggaaacctaaaaagagaagg

SEQ ID NO: 107262 - DNA, 80 bp, synthetic construct; identical to SEQ ID NO: 37104
  misc_feature 1..80: note = Artificially Synthesized Probe
  source 1..80: mol_type = other DNA

SEQ ID NO: 107263 - DNA, 80 bp, synthetic construct
  misc_feature 1..80: note = Artificially Synthesized Probe
  source 1..80: mol_type = other DNA
tgttatgctacaaaacaagtcttacaaaattaaaaaaaaattatataaacttttctttgactacagtagaactagaaatc

SEQ ID NO: 107264 - DNA, 80 bp, synthetic construct
  misc_feature 1..80: note = Artificially Synthesized Probe
  source 1..80: mol_type = other DNA
tgaaagcagtactaagagaaaagtttgtaagagtaagcacctacattaaaaaagaaaaatttcaaataaacaacataatg

SEQ ID NO: 107265 - DNA, 80 bp, synthetic construct
  misc_feature 1..80: note = Artificially Synthesized Probe
  source 1..80: mol_type = other DNA
gtgcagtggctcatgcctgtaatcccagtactttaagaggacaagtcgggtgtatcatttgaggtcaggagtttgagacc

SEQ ID NO: 107266 - DNA, 80 bp, synthetic construct; identical to SEQ ID NO: 37105
  misc_feature 1..80: note = Artificially Synthesized Probe
  source 1..80: mol_type = other DNA

SEQ ID NO: 107267 - DNA, 80 bp, synthetic construct
  misc_feature 1..80: note = Artificially Synthesized Probe
  source 1..80: mol_type = other DNA
tgcaacctatcaagattgtaaaatgtctcttgatagagctgtttaaaaaactacaagtctttacatgggggttaagattt

SEQ ID NO: 107268 - DNA, 80 bp, synthetic construct
  misc_feature 1..80: note = Artificially Synthesized Probe
  source 1..80: mol_type = other DNA
tgaaacaatcctatcaatagtttctggccaaacacttgtttgactaagccacaaaggcacctgctccatagatatgagga

SEQ ID NO: 107269 - DNA, 80 bp, synthetic construct
  misc_feature 1..80: note = Artificially Synthesized Probe
  source 1..80: mol_type = other DNA
aattagaacaaacctgagctctaatctggggctgactttcctcagtcgtctctctacattctgtgttgacaatgctacca

SEQ ID NO: 107270 - DNA, 80 bp, synthetic construct
  misc_feature 1..80: note = Artificially Synthesized Probe
  source 1..80: mol_type = other DNA
tatgaatactgatgtgatgtgttacaatcatcctgaaaaggaggctaacaaaggacaggactgagtctgtcttgaggtga

SEQ ID NO: 107271 - DNA, 80 bp, synthetic construct; identical to SEQ ID NO: 37106
  misc_feature 1..80: note = Artificially Synthesized Probe
  source 1..80: mol_type = other DNA

SEQ ID NO: 107272 - DNA, 80 bp, synthetic construct
  misc_feature 1..80: note = Artificially Synthesized Probe
  source 1..80: mol_type = other DNA
caaccatggttgagaaaatatataagacacctgaggaaactatgaactcttttgagtagtttatgtttacacgaggagac

SEQ ID NO: 107273 - DNA, 80 bp, synthetic construct
  misc_feature 1..80: note = Artificially Synthesized Probe
  source 1..80: mol_type = other DNA
aggatcctcacttgctcctcaaactgagaaggagagtgaatgccttcagcaatttcttcagtggtcccattgtggtgcac

SEQ ID NO: 107274 - DNA, 80 bp, synthetic construct
  misc_feature 1..80: note = Artificially Synthesized Probe
  source 1..80: mol_type = other DNA
gacatctttccctttggcaattgctattttgggaaacaacctatgggagaagcttagattcttatattggcttcacacct

SEQ ID NO: 107275 - DNA, 80 bp, synthetic construct; identical to SEQ ID NO: 37107
  misc_feature 1..80: note = Artificially Synthesized Probe
  source 1..80: mol_type = other DNA

SEQ ID NO: 107276 - DNA, 80 bp, synthetic construct
  misc_feature 1..80: note = Artificially Synthesized Probe
  source 1..80: mol_type = other DNA
aaacgtggtaatcaccagaaatacttagaagcatttttcattagtgcctaaaagtactgtggaagaaagatgaccacaaa

SEQ ID NO: 107277 - DNA, 80 bp, synthetic construct
  misc_feature 1..80: note = Artificially Synthesized Probe
  source 1..80: mol_type = other DNA
atagtaatcaacagctggttttagaaactacacttacaggtttcaaatcttgcttttaattattaatacgagggtgagtg

SEQ ID NO: 107278 - DNA, 80 bp, synthetic construct
  misc_feature 1..80: note = Artificially Synthesized Probe
  source 1..80: mol_type = other DNA
tgatggtaattactgaaaatgtctgtatttgacccagcaaaatcacatatatgcatatacccaagagaagcatcaactag

SEQ ID NO: 107279 - DNA, 80 bp, synthetic construct
  misc_feature 1..80: note = Artificially Synthesized Probe
  source 1..80: mol_type = other DNA
caacaaatgctatgttgtggtagaaagcaatgatctaggtttgtgtctgtctgtttggagagatgctcagatgaaaacaa

SEQ ID NO: 107280 - DNA, 80 bp, synthetic construct; identical to SEQ ID NO: 37108
  misc_feature 1..80: note = Artificially Synthesized Probe
  source 1..80: mol_type = other DNA

SEQ ID NO: 107281 - DNA, 80 bp, synthetic construct
  misc_feature 1..80: note = Artificially Synthesized Probe
  source 1..80: mol_type = other DNA
aacttgcttttttatctcttgaatatactgtgaaatttattatagttttacattcagtaatttggcttactgacccaata

SEQ ID NO: 107282 - DNA, 80 bp, synthetic construct
  misc_feature 1..80: note = Artificially Synthesized Probe
  source 1..80: mol_type = other DNA
aacacataaggttctcatcttattccaggaagtgtagacactagataatcttttcatagtcatccaaaaagcatattaag

SEQ ID NO: 107283 - DNA, 80 bp, synthetic construct
  misc_feature 1..80: note = Artificially Synthesized Probe
  source 1..80: mol_type = other DNA
agaatttgctcatattccagaaaactctgagagtgaacttccagaatatttaaatattatagatatcaatttactttgcc

SEQ ID NO: 107284 - DNA, 80 bp, synthetic construct; identical to SEQ ID NO: 37109
  misc_feature 1..80: note = Artificially Synthesized Probe
  source 1..80: mol_type = other DNA

SEQ ID NO: 107285 - DNA, 80 bp, synthetic construct
  misc_feature 1..80: note = Artificially Synthesized Probe
  source 1..80: mol_type = other DNA
tttagtcttcaccagaaccaaaggagcacagatgagaaaactaggacacagtgagttaagagaaatgcctgaatctacac

SEQ ID NO: 107286 - DNA, 80 bp, synthetic construct
  misc_feature 1..80: note = Artificially Synthesized Probe
  source 1..80: mol_type = other DNA
atcgtatctggttttggtttgtaaaggaaatcattagaagagtttatgactgcttaggaagttgaactggctggagctgg

SEQ ID NO: 107287 - DNA, 80 bp, synthetic construct
  misc_feature 1..80: note = Artificially Synthesized Probe
  source 1..80: mol_type = other DNA
ccacctatgatttccaggttactgagtcattccataatctaccaaactggtaaattcagagtttctaaagaccaggagtg

SEQ ID NO: 107288 - DNA, 80 bp, synthetic construct
  misc_feature 1..80: note = Artificially Synthesized Probe
  source 1..80: mol_type = other DNA
gtagtgttttattgttgttttcttgcttttctagctgataaattaaccttattcaatatacctgccctactaatccacat

SEQ ID NO: 107289 - DNA, 80 bp, synthetic construct; identical to SEQ ID NO: 37110
  misc_feature 1..80: note = Artificially Synthesized Probe
  source 1..80: mol_type = other DNA

SEQ ID NO: 107290 - DNA, 80 bp, synthetic construct
  misc_feature 1..80: note = Artificially Synthesized Probe
  source 1..80: mol_type = other DNA
gaagagctcaatgcttgaagggtataaactagttacctcaaagtataaaaacaatctccctaggcagaggcagtaagatt

SEQ ID NO: 107291 - DNA, 80 bp, synthetic construct
  misc_feature 1..80: note = Artificially Synthesized Probe
  source 1..80: mol_type = other DNA
actatttgaaaatagtgaggcaaacgagttgagggtgtttacaaatgaatgatgactgaggtggaaaataaaaagcaaat

SEQ ID NO: 107292 - DNA, 80 bp, synthetic construct; identical to SEQ ID NO: 37111
  misc_feature 1..80: note = Artificially Synthesized Probe
  source 1..80: mol_type = other DNA

SEQ ID NO: 107293 - DNA, 80 bp, synthetic construct
  misc_feature 1..80: note = Artificially Synthesized Probe
  source 1..80: mol_type = other DNA
gacttagatttccagatagtctggtttataaaataagattttaactatgcttactaaactctatgtatttctactttcca

SEQ ID NO: 107294 - DNA, 80 bp, synthetic construct
  misc_feature 1..80: note = Artificially Synthesized Probe
  source 1..80: mol_type = other DNA
tcccagtgaagccggtggatagaagctagtatagtatgatggcaggaatatcaaagtgcttggttgatttgaaagcaaat

SEQ ID NO: 107295 - DNA, 80 bp, synthetic construct
  misc_feature 1..80: note = Artificially Synthesized Probe
  source 1..80: mol_type = other DNA
gtggaaagaaaaaaaaaagggtgaagtgactgttgggagaagatgattaagataaatgggagttcacagatgacagacga

SEQ ID NO: 107296 - DNA, 80 bp, synthetic construct
  misc_feature 1..80: note = Artificially Synthesized Probe
  source 1..80: mol_type = other DNA
agagtgacagatcctttgtgtcttagatgaaggtgagccattaattccacctataatcctgagtattgctacagggcata

SEQ ID NO: 107297 - DNA, 80 bp, synthetic construct
  misc_feature 1..80: note = Artificially Synthesized Probe
  source 1..80: mol_type = other DNA
ctttcactcaattacgtagcaaagaatgaggtttgaaacagggtgccataattagtttgaatgagggtactatgctgaaa

SEQ ID NO: 107298 - DNA, 80 bp, synthetic construct; identical to SEQ ID NO: 37112
  misc_feature 1..80: note = Artificially Synthesized Probe
  source 1..80: mol_type = other DNA

SEQ ID NO: 107299 - DNA, 80 bp, synthetic construct
  misc_feature 1..80: note = Artificially Synthesized Probe
  source 1..80: mol_type = other DNA
gggcgtatcaataaagactttttatgctattttgaggaggtttgttgtcctcttatagtgatggaaagctgttcatcttc

SEQ ID NO: 107300 - DNA, 80 bp, synthetic construct
  misc_feature 1..80: note = Artificially Synthesized Probe
  source 1..80: mol_type = other DNA
gatggatcttttctgactaattaggaactgtgggtgagaggaaagcaatctggaaggtgtaaacaaattaagaatgaact

SEQ ID NO: 107301 - DNA, 80 bp, synthetic construct; identical to SEQ ID NO: 37113
  misc_feature 1..80: note = Artificially Synthesized Probe
  source 1..80: mol_type = other DNA

SEQ ID NO: 107302 - DNA, 80 bp, synthetic construct
  misc_feature 1..80: note = Artificially Synthesized Probe
  source 1..80: mol_type = other DNA
ttttcagagacttccttcatataggagctggaggacacagcacattggaaatcaagaagaaaataaaagtaaaaacagga

SEQ ID NO: 107303 - DNA, 80 bp, synthetic construct
  misc_feature 1..80: note = Artificially Synthesized Probe
  source 1..80: mol_type = other DNA
attaaaatactagttattgcaagaacttataatcctgaacatttacaatgggctttggagggtagactgtattcagtgtt

SEQ ID NO: 107304 - DNA, 80 bp, synthetic construct
  misc_feature 1..80: note = Artificially Synthesized Probe
  source 1..80: mol_type = other DNA
ggaaaaggtcagggagctgataaaagtaacttgaagaaactttagtgcaaatgttggattcagacaatcgctacttttaa

SEQ ID NO: 107305 - DNA, 80 bp, synthetic construct
  misc_feature 1..80: note = Artificially Synthesized Probe
  source 1..80: mol_type = other DNA
ttgttctctatatgtttcctttttatcccttataactgggaggttgaaagtaaggggaaaatactctataaattctaaat

SEQ ID NO: 107306 - DNA, 80 bp, synthetic construct; identical to SEQ ID NO: 37114
  misc_feature 1..80: note = Artificially Synthesized Probe
  source 1..80: mol_type = other DNA

SEQ ID NO: 107307 - DNA, 80 bp, synthetic construct
  misc_feature 1..80: note = Artificially Synthesized Probe
  source 1..80: mol_type = other DNA
aatctacgctatgtattttgtaaacttatatcaagcagaattataatagtccatgggaaattaaagtatatgtatcaaag

SEQ ID NO: 107308 - DNA, 80 bp, synthetic construct
  misc_feature 1..80: note = Artificially Synthesized Probe
  source 1..80: mol_type = other DNA
gtactgaattttatataggatcttatttcatgtagatcagtaagttttcataatacaatctgtccctttttaaatacttt

SEQ ID NO: 107309 - DNA, 80 bp, synthetic construct
  misc_feature 1..80: note = Artificially Synthesized Probe
  source 1..80: mol_type = other DNA
agagagtgagcatgattcagatgaatcctctgatgatgacagtgattcagaggaaccaagcaaatacatcaatgcatctt

SEQ ID NO: 107310 - DNA, 80 bp, synthetic construct
  misc_feature 1..80: note = Artificially Synthesized Probe
  source 1..80: mol_type = other DNA
aatttaacttaatgaaagatttaaaaatactataacctaataacctgagacaaaataagataatgctattggttatattt

SEQ ID NO: 107311 - DNA, 80 bp, synthetic construct; identical to SEQ ID NO: 37115
  misc_feature 1..80: note = Artificially Synthesized Probe
  source 1..80: mol_type = other DNA

SEQ ID NO: 107312 - DNA, 80 bp, synthetic construct
  misc_feature 1..80: note = Artificially Synthesized Probe
  source 1..80: mol_type = other DNA
gtaattcctttttacaatcacattaacctttatagagaaacaaaaatgtgtgtcttttgtggaaaggaaaatttgtttcg

SEQ ID NO: 107313 - DNA, 80 bp, synthetic construct
  misc_feature 1..80: note = Artificially Synthesized Probe
  source 1..80: mol_type = other DNA
tggttactttaagaatctactgagctctcttctgtagtaacgaagtcccaccctttttttgtctaaaaagagctactgga

SEQ ID NO: 107314 - DNA, 80 bp, synthetic construct
  misc_feature 1..80: note = Artificially Synthesized Probe
  source 1..80: mol_type = other DNA
tgtcataaaacgtcattctctagtcttggattgcttgcttcatcgccatacccacgtctttttttatccctccatcacat

SEQ ID NO: 107315 - DNA, 80 bp, synthetic construct; identical to SEQ ID NO: 37008
  misc_feature 1..80: note = Artificially Synthesized Probe
  source 1..80: mol_type = other DNA

SEQ ID NO: 107316 - DNA, 80 bp, synthetic construct; identical to SEQ ID NO: 37116
  misc_feature 1..80: note = Artificially Synthesized Probe
  source 1..80: mol_type = other DNA

SEQ ID NO: 107317 - DNA, 80 bp, synthetic construct
  misc_feature 1..80: note = Artificially Synthesized Probe
  source 1..80: mol_type = other DNA
gttttgaccctattcttttaacaagaccaaactcctgaaaaatgtatctatatcatcctttctttattcccatataatat

SEQ ID NO: 107318 - DNA, 80 bp, synthetic construct
  misc_feature 1..80: note = Artificially Synthesized Probe
  source 1..80: mol_type = other DNA
tatctgacatatgttcaagcctattcagtgaataaccttataagtatgcaaaagatttatgcttttttatgcccctctct

SEQ ID NO: 107319 - DNA, 80 bp, synthetic construct
  misc_feature 1..80: note = Artificially Synthesized Probe
  source 1..80: mol_type = other DNA
caggatggaagtaccggcaggactccctgtctttgtcagaaattgtggggttgtagttggtagacaacagtttgtagtaa

SEQ ID NO: 107320 - DNA, 80 bp, synthetic construct; identical to SEQ ID NO: 37117
  misc_feature 1..80: note = Artificially Synthesized Probe
  source 1..80: mol_type = other DNA

SEQ ID NO: 107321 - DNA, 80 bp, synthetic construct
  misc_feature 1..80: note = Artificially Synthesized Probe
  source 1..80: mol_type = other DNA
tataagtaggtttcaattttagaacacaataattttcatttaatagaaaagaggcacagacagagaaagaaagggagaaa

SEQ ID NO: 107322 - DNA, 80 bp, synthetic construct
  misc_feature 1..80: note = Artificially Synthesized Probe
  source 1..80: mol_type = other DNA
cttcgtgtctttgaactgagacattccaaggtatggaaacaatttggggagtatatttctttgatataatggatctggta

SEQ ID NO: 107323 - DNA, 80 bp, synthetic construct
  misc_feature 1..80: note = Artificially Synthesized Probe
  source 1..80: mol_type = other DNA
ttctgattttagaggaaagactctcgaactgtgtaccagtaccaatatacaaactggagtgtggagcagcttcctgcaga

SEQ ID NO: 107324 - DNA, 80 bp, synthetic construct; identical to SEQ ID NO: 37118
  misc_feature 1..80: note = Artificially Synthesized Probe
  source 1..80: mol_type = other DNA

SEQ ID NO: 107325 - DNA, 80 bp, synthetic construct
  misc_feature 1..80: note = Artificially Synthesized Probe
  source 1..80: mol_type = other DNA
atgaattaatgaatggaagggtgtgtgaacagataggtagatgggtatcaccttacacatatacccatatacattgatct

SEQ ID NO: 107326 - DNA, 80 bp, synthetic construct
  misc_feature 1..80: note = Artificially Synthesized Probe
  source 1..80: mol_type = other DNA
ttaggggtgaatgcacttttagacagagtgatcggggaagatccttatgaagaagaatcattgagctacctgttggctga

SEQ ID NO: 107327 - DNA, 80 bp, synthetic construct
  misc_feature 1..80: note = Artificially Synthesized Probe
  source 1..80: mol_type = other DNA
taatatcaataatactactagattttattagtttcttcatctgtgataggtgcttacatattcaccttaaataagcaata

SEQ ID NO: 107328 - DNA, 80 bp, synthetic construct
  misc_feature 1..80: note = Artificially Synthesized Probe
  source 1..80: mol_type = other DNA
ctagaatcaagccttaagaaatatatgaattttcagcatttatgtggaaagaaagctgaggaagggaagtttacactgta

SEQ ID NO: 107329 - DNA, 80 bp, synthetic construct; identical to SEQ ID NO: 37119
  misc_feature 1..80: note = Artificially Synthesized Probe
  source 1..80: mol_type = other DNA

SEQ ID NO: 107330 - DNA, 80 bp, synthetic construct
  misc_feature 1..80: note = Artificially Synthesized Probe
  source 1..80: mol_type = other DNA
aagaaaatatatttgtaaagtcgaagacaaataagttttcaattccaggattatcacactcttaaattgaaaaatttgcc

SEQ ID NO: 107331 - DNA, 80 bp, synthetic construct
  misc_feature 1..80: note = Artificially Synthesized Probe
  source 1..80: mol_type = other DNA
tttatagggatggatctcagcaaacgggaatattttgtgctttgttaaatctcttagaaagtgcggaaacagaagaggta

SEQ ID NO: 107332 - DNA, 80 bp, synthetic construct
  misc_feature 1..80: note = Artificially Synthesized Probe
  source 1..80: mol_type = other DNA
agcaacattattacttaacttccaaagtgacaataacacacatttataaaagcctgagaattttttaatgataaaataag

SEQ ID NO: 107333 - DNA, 80 bp, synthetic construct
  misc_feature 1..80: note = Artificially Synthesized Probe
  source 1..80: mol_type = other DNA
gttcttttttcccctttccttttctcttctctattttctttcctattcttttagcttttctacttttacatgataattca

SEQ ID NO: 107334 - DNA, 80 bp, synthetic construct; identical to SEQ ID NO: 37120
  misc_feature 1..80: note = Artificially Synthesized Probe
  source 1..80: mol_type = other DNA

SEQ ID NO: 107335 - DNA, 80 bp, synthetic construct
  misc_feature 1..80: note = Artificially Synthesized Probe
  source 1..80: mol_type = other DNA
aagactagcccaggcctattcacattaaagcagcaagttccacaagggaaagaagacttgtgtgagaccacttgaggccc

SEQ ID NO: 107336 - DNA, 80 bp, synthetic construct
  misc_feature 1..80: note = Artificially Synthesized Probe
  source 1..80: mol_type = other DNA
agttttatattcttgtaatcgatctatcgtgtataccctctatgtggtagtaactgtagatggtcatctgggaattaatc

SEQ ID NO: 107337 - DNA, 80 bp, synthetic construct
  misc_feature 1..80: note = Artificially Synthesized Probe
  source 1..80: mol_type = other DNA
ctataaagagctaattggtatgagggaaagccaggtatttactaatcaatgtagtgagtaaaatgacagaaaaattataa

SEQ ID NO: 107338 - DNA, 80 bp, synthetic construct
  misc_feature 1..80: note = Artificially Synthesized Probe
  source 1..80: mol_type = other DNA
agcggagtgaacactggtttggggttgctccaaggtaaagttcaaaaagtatcctgcagtcaaccctttagcaccataaa

SEQ ID NO: 107339 - DNA, 80 bp, synthetic construct
  misc_feature 1..80: note = Artificially Synthesized Probe
  source 1..80: mol_type = other DNA
gcaggtcccacagggccttgatggaaatggaaagagcttgaattttacctgaagtataaagggaaggaaccattttaagt

SEQ ID NO: 107340 - DNA, 80 bp, synthetic construct; identical to SEQ ID NO: 37121
  misc_feature 1..80: note = Artificially Synthesized Probe
  source 1..80: mol_type = other DNA

SEQ ID NO: 107341 - DNA, 80 bp, synthetic construct
  misc_feature 1..80: note = Artificially Synthesized Probe
  source 1..80: mol_type = other DNA
caatggtcctgcaagtccagctttaaatcaaggttcataggaaaagacataaatgaggaaactccaaacctcctgttagc

SEQ ID NO: 107342 - DNA, 80 bp, synthetic construct
  misc_feature 1..80: note = Artificially Synthesized Probe
  source 1..80: mol_type = other DNA
taaaattttatctcttattcagtaaaaaacaacttctttgtaatcgttatgtgtgtatatgtatgtgtgtatgggtgtgt

SEQ ID NO: 107343 - DNA, 80 bp, synthetic construct
  misc_feature 1..80: note = Artificially Synthesized Probe
  source 1..80: mol_type = other DNA
aataaaatcatgtacatttctgaaatgacctcaagatgtcctccttgttctactcatatatatctatcttatatagttta

SEQ ID NO: 107344 - DNA, 80 bp, synthetic construct; identical to SEQ ID NO: 37122
  misc_feature 1..80: note = Artificially Synthesized Probe
  source 1..80: mol_type = other DNA

SEQ ID NO: 107345 - DNA, 80 bp, synthetic construct
  misc_feature 1..80: note = Artificially Synthesized Probe
  source 1..80: mol_type = other DNA
tggaatttttcattgatatgaaaaatatgatattgcatatgcatagttcccatgttaaatcccattcataactttcatta

SEQ ID NO: 107346 - DNA, 80 bp, synthetic construct
  misc_feature 1..80: note = Artificially Synthesized Probe
  source 1..80: mol_type = other DNA
tgcatttattaacatttgcaggacacttttacaggccccaattatccaatagtctaataattgtttaagatctagaaaaa

SEQ ID NO: 107347 - DNA, 80 bp, synthetic construct
  misc_feature 1..80: note = Artificially Synthesized Probe
  source 1..80: mol_type = other DNA
cagtgcaggtggaaagaaaggaaagactgacatagaattaagagaagtggctgcatggaaaagacaaagacattttagag

SEQ ID NO: 107348 - DNA, 80 bp, synthetic construct; identical to SEQ ID NO: 37009
  misc_feature 1..80: note = Artificially Synthesized Probe
  source 1..80: mol_type = other DNA

SEQ ID NO: 107349 - DNA, 80 bp, synthetic construct
  misc_feature 1..80: note = Artificially Synthesized Probe
  source 1..80: mol_type = other DNA
ttatagtgagaattcagtaaattccacataaaaatctgaatttatgtctcccctagaaaggttggttgtgaacatgcaat

SEQ ID NO: 107350 - DNA, 80 bp, synthetic construct
  misc_feature 1..80: note = Artificially Synthesized Probe
  source 1..80: mol_type = other DNA
ctacagaatatattgagagactaaagaattagaaatttaactgaaaatttcatgcaaaggtaatgctctgttgaaccatt

SEQ ID NO: 107351 - DNA, 80 bp, synthetic construct
  misc_feature 1..80: note = Artificially Synthesized Probe
  source 1..80: mol_type = other DNA
aatttaaaaagtagttgttatcaatgtggcagatattaggtagaatctaatatcgtgaaaattaaactgcacataaatag

SEQ ID NO: 107352 - DNA, 80 bp, synthetic construct; identical to SEQ ID NO: 37010
  misc_feature 1..80: note = Artificially Synthesized Probe
  source 1..80: mol_type = other DNA

SEQ ID NO: 107353 - DNA, 80 bp, synthetic construct
  misc_feature 1..80: note = Artificially Synthesized Probe
  source 1..80: mol_type = other DNA
attgagtgtctcgtgtgcctggcactccatatgatgcttcaatgcacaccaggctattcagcctcagatttgtttctaca

SEQ ID NO: 107354 - DNA, 80 bp, synthetic construct
  misc_feature 1..80: note = Artificially Synthesized Probe
  source 1..80: mol_type = other DNA
ggcgcatcaggtgttttggcagtttactgtgatctcaatagtgagaatgtattgaaaaatctcagtacaggagaaagctg

SEQ ID NO: 107355 - DNA, 80 bp, synthetic construct; identical to SEQ ID NO: 37011
  misc_feature 1..80: note = Artificially Synthesized Probe
  source 1..80: mol_type = other DNA

SEQ ID NO: 107356 - DNA, 80 bp, synthetic construct
  misc_feature 1..80: note = Artificially Synthesized Probe
  source 1..80: mol_type = other DNA
aaatatattgagatatttagtaaaatattaactttctgcaatttttatcacagaatgtattttaaatcaagtttttagtt

SEQ ID NO: 107357 - DNA, 80 bp, synthetic construct
  misc_feature 1..80: note = Artificially Synthesized Probe
  source 1..80: mol_type = other DNA
gtcattgtttcaaggataaagtgtaaatgaaagaaatagcattccatctaggtaaaagaggaatcagcatcattgaaatg

SEQ ID NO: 107358 - DNA, 80 bp, synthetic construct
  misc_feature 1..80: note = Artificially Synthesized Probe
  source 1..80: mol_type = other DNA
aaagattttcccttttctaagaataaaagatggtgttatgtcaagggcggctcgatggtgtggatgaaagaactattggg

SEQ ID NO: 107359 - DNA, 80 bp, synthetic construct
  misc_feature 1..80: note = Artificially Synthesized Probe
  source 1..80: mol_type = other DNA
ttgtcaaatgtaaaatttgtgccagttttgtcacattccatttttcaggaacactgtaaaggtattttctattaatatca

SEQ ID NO: 107360 - DNA, 80 bp, synthetic construct
  misc_feature 1..80: note = Artificially Synthesized Probe
  source 1..80: mol_type = other DNA
tatagaaaatgaatgtaaaatcacttcattaagtgtaacaaaacaaaataatatgaggaattgttatactgtttaagcat

SEQ ID NO: 107361 - DNA, 80 bp, synthetic construct; identical to SEQ ID NO: 37012
  misc_feature 1..80: note = Artificially Synthesized Probe
  source 1..80: mol_type = other DNA

SEQ ID NO: 107362 - DNA, 80 bp, synthetic construct
  misc_feature 1..80: note = Artificially Synthesized Probe
  source 1..80: mol_type = other DNA
atttacataaaggtgtttgtggaaaaggaaattatgtgccttttattttaattcacccattattctattccacatgtaaa

SEQ ID NO: 107363 - DNA, 80 bp, synthetic construct
  misc_feature 1..80: note = Artificially Synthesized Probe
  source 1..80: mol_type = other DNA
ggcaagaaaacatttccttccgctggcttttctaataactccctcttacagatatgcatgcctcatgtttgttaataaaa

SEQ ID NO: 107364 - DNA, 80 bp, synthetic construct
  misc_feature 1..80: note = Artificially Synthesized Probe
  source 1..80: mol_type = other DNA
gatttaaggtccatcaaaatgctgttaaaatgtctagaggttaacaataacagtggcacatgggtcagattaaaattctt

SEQ ID NO: 107365 - DNA, 80 bp, synthetic construct
  misc_feature 1..80: note = Artificially Synthesized Probe
  source 1..80: mol_type = other DNA
tatacacagattacaagtactagtttttttagtgaagaaaagacaactatatattttctctttttatctgttgtcctatt

SEQ ID NO: 107366 - DNA, 80 bp, synthetic construct; identical to SEQ ID NO: 37013
  misc_feature 1..80: note = Artificially Synthesized Probe
  source 1..80: mol_type = other DNA

SEQ ID NO: 107367 - DNA, 80 bp, synthetic construct
  misc_feature 1..80: note = Artificially Synthesized Probe
  source 1..80: mol_type = other DNA
gacttccagtgcctattaaagtttgaaatctttgcacatttatggtctattcaatggatagttcttgagcggcgtcaata

SEQ ID NO: 107368 - DNA, 80 bp, synthetic construct
  misc_feature 1..80: note = Artificially Synthesized Probe
  source 1..80: mol_type = other DNA
ttttatctcaggaaatatatcagtggactgaaaatgtcaaatcaattcaattaaatcagtaataacactttgctgtttat

SEQ ID NO: 107369 - DNA, 80 bp, synthetic construct
  misc_feature 1..80: note = Artificially Synthesized Probe
  source 1..80: mol_type = other DNA
tgagagacaagtattgttcaagttgccggttttttttaattagctgacatatttcctgcttttatttgagttagaattcc

SEQ ID NO: 107370 - DNA, 80 bp, synthetic construct
  misc_feature 1..80: note = Artificially Synthesized Probe
  source 1..80: mol_type = other DNA
aaaattgaaactcatagatatttagtgacttgtcctttgttacaccaaaaatgagggaacttggtctagaattcctccag

SEQ ID NO: 107371 - DNA, 80 bp, synthetic construct; identical to SEQ ID NO: 37014
  misc_feature 1..80: note = Artificially Synthesized Probe
  source 1..80: mol_type = other DNA

SEQ ID NO: 107372 - DNA, 80 bp, synthetic construct
  misc_feature 1..80: note = Artificially Synthesized Probe
  source 1..80: mol_type = other DNA
aactgaaaactacaaacttcattgaaataatttctttatggctcccagcagtaacactgtgctattctagaccagttggt

SEQ ID NO: 107373 - DNA, 80 bp, synthetic construct
  misc_feature 1..80: note = Artificially Synthesized Probe
  source 1..80: mol_type = other DNA
taaactactggatgcttcatcagaaagcacccactaagcatcactcaccatgaagttcgttgggtactctatacaatgaa

SEQ ID NO: 107374 - DNA, 80 bp, synthetic construct
  misc_feature 1..80: note = Artificially Synthesized Probe
  source 1..80: mol_type = other DNA
gagttatccatgtatttacgaattgtacctaccagaggttacaaaaatttggtcattatttgaaagattaacagggactt

SEQ ID NO: 107375 - DNA, 80 bp, synthetic construct; identical to SEQ ID NO: 37015
  misc_feature 1..80: note = Artificially Synthesized Probe
  source 1..80: mol_type = other DNA

SEQ ID NO: 107376 - DNA, 80 bp, synthetic construct
  misc_feature 1..80: note = Artificially Synthesized Probe
  source 1..80: mol_type = other DNA
ttttttgtcatacattactgcaagttccctgaggaagtttactgatctgtagttttacgagaaatgcacgtcatggaggt

SEQ ID NO: 107377 - DNA, 80 bp, synthetic construct
  misc_feature 1..80: note = Artificially Synthesized Probe
  source 1..80: mol_type = other DNA
ctagaaattgtttaagtaggcagacctgttggaggactaaagaacattaggcaaggagattaaattagtgtaggaaaaaa

SEQ ID NO: 107378 - DNA, 80 bp, synthetic construct
  misc_feature 1..80: note = Artificially Synthesized Probe
  source 1..80: mol_type = other DNA
atattttgatttacctctttctagtaaagcaaagttcattctgaaatccaaaatattcacttactagagcagaaaaaaat

SEQ ID NO: 107379 - DNA, 80 bp, synthetic construct
  misc_feature 1..80: note = Artificially Synthesized Probe
  source 1..80: mol_type = other DNA
ttcactttgaagtctttttttgacttttaccgttcttctttcctctgaaagtcagggaagtagctacctcttgagcatgt

SEQ ID NO: 107380 - DNA, 80 bp, synthetic construct; identical to SEQ ID NO: 37016
  misc_feature 1..80: note = Artificially Synthesized Probe
  source 1..80: mol_type = other DNA

SEQ ID NO: 107381 - DNA, 80 bp, synthetic construct
  misc_feature 1..80: note = Artificially Synthesized Probe
  source 1..80: mol_type = other DNA
caaaaaaaatgttcagtgttttcattttacttctcttgctgcttttgggctctgactgggcccggaagcagaagttgcaa

SEQ ID NO: 107382 - DNA, 80 bp, synthetic construct
  misc_feature 1..80: note = Artificially Synthesized Probe
  source 1..80: mol_type = other DNA
gcaggtcttctatgacgttttacagctggcctctttccattcagaattgctgttcatctttgaatgtctctgctttactc

SEQ ID NO: 107383 - DNA, 80 bp, synthetic construct; identical to SEQ ID NO: 37017
  misc_feature 1..80: note = Artificially Synthesized Probe
  source 1..80: mol_type = other DNA

SEQ ID NO: 107384 - DNA, 80 bp, synthetic construct
  misc_feature 1..80: note = Artificially Synthesized Probe
  source 1..80: mol_type = other DNA
agtgcctatcgttacagagtagcctttaaatacatatttgttgaattaataatgatacacatgaactgatgaggctctat

SEQ ID NO: 107385 - DNA, 80 bp, synthetic construct
  misc_feature 1..80: note = Artificially Synthesized Probe
  source 1..80: mol_type = other DNA
gtgatgtggactgtaattgtgctcatgaaagacacaatgtatacatacctccttgagacggaatgataaggataacgtag

SEQ ID NO: 107386 - DNA, 80 bp, synthetic construct
  misc_feature 1..80: note = Artificially Synthesized Probe
  source 1..80: mol_type = other DNA
gttaaaagtttggcatttgttacccagaatactaaatgtaacacatatgtggcaagatttgatggaattgcacttctgtt

SEQ ID NO: 107387 - DNA, 80 bp, synthetic construct; identical to SEQ ID NO: 37018
  misc_feature 1..80: note = Artificially Synthesized Probe
  source 1..80: mol_type = other DNA

SEQ ID NO: 107388 - DNA, 80 bp, synthetic construct
  misc_feature 1..80: note = Artificially Synthesized Probe
  source 1..80: mol_type = other DNA
gagagataagagaatatactttttttaaggttagaactcagaggccattatgacaattaatgggctagtggagacacctg

SEQ ID NO: 107389 - DNA, 80 bp, synthetic construct
  misc_feature 1..80: note = Artificially Synthesized Probe
  source 1..80: mol_type = other DNA
ctatgccaaggaacagaagacaaatttgtggaaaagatacatgtggcccctccccaggtgggatttcttgtgtaggcccc

SEQ ID NO: 107390 - DNA, 80 bp, synthetic construct
  misc_feature 1..80: note = Artificially Synthesized Probe
  source 1..80: mol_type = other DNA
tggagttcaatggcatgatctcagctcactgcaacctacgcttcccaggttcaaagaattctcctgcctcggacttctga

SEQ ID NO: 107391 - DNA, 80 bp, synthetic construct
  misc_feature 1..80: note = Artificially Synthesized Probe
  source 1..80: mol_type = other DNA
caagttaccatccctttaaagcttatgataataaaaagtaaattataaagaataataatctcaatgaagtgatatatgta

SEQ ID NO: 107392 - DNA, 80 bp, synthetic construct; identical to SEQ ID NO: 37019
  misc_feature 1..80: note = Artificially Synthesized Probe
  source 1..80: mol_type = other DNA

SEQ ID NO: 107393 - DNA, 80 bp, synthetic construct
  misc_feature 1..80: note = Artificially Synthesized Probe
  source 1..80: mol_type = other DNA
tatatatgatcttttttttgatatagtgtcctagacctggaattcctgtgttaaaaaatgaaaacattttcagtctcttc

SEQ ID NO: 107394 - DNA, 80 bp, synthetic construct
  misc_feature 1..80: note = Artificially Synthesized Probe
  source 1..80: mol_type = other DNA
attaatttaatttttactgtgttcagggttttatcatatgcttattatttacatttcctttgtgaattgtgttcctatga

SEQ ID NO: 107395 - DNA, 80 bp, synthetic construct
  misc_feature 1..80: note = Artificially Synthesized Probe
  source 1..80: mol_type = other DNA
ggtgtgtgtgtgtattctgtgttgaaataaatggtagaaccaggacaacaggtagaggttatgaggttgtcatctgtgac

SEQ ID NO: 107396 - DNA, 80 bp, synthetic construct
  misc_feature 1..80: note = Artificially Synthesized Probe
  source 1..80: mol_type = other DNA
tcctcctgagaagacattccattatgaaatctaagtaactttgacagcaaacccttcagtcttatcattttcattagata

SEQ ID NO: 107397 - DNA, 80 bp, synthetic construct; identical to SEQ ID NO: 37020
  misc_feature 1..80: note = Artificially Synthesized Probe
  source 1..80: mol_type = other DNA

SEQ ID NO: 107398 - DNA, 80 bp, synthetic construct
  misc_feature 1..80: note = Artificially Synthesized Probe
  source 1..80: mol_type = other DNA
gactcctttttaaacattcttaaacataaacctaatttttagcataattgtggaatataaagaggttttgtctatgtggg

SEQ ID NO: 107399 - DNA, 80 bp, synthetic construct
  misc_feature 1..80: note = Artificially Synthesized Probe
  source 1..80: mol_type = other DNA
tgcatttttacaaatcttttaaatgtctgtctgaataatagatagctggattctcatatatgctttaatattctctatct

SEQ ID NO: 107400 - DNA, 80 bp, synthetic construct; identical to SEQ ID NO: 37021
  misc_feature 1..80: note = Artificially Synthesized Probe
  source 1..80: mol_type = other DNA

SEQ ID NO: 107401 - DNA, 80 bp, synthetic construct
  misc_feature 1..80: note = Artificially Synthesized Probe
  source 1..80: mol_type = other DNA
acctccggttagcctcctctgaatactcttggatttcaatttcatttataatgtgtgatattctggactggacacagcac

SEQ ID NO: 107402 - DNA, 80 bp, synthetic construct; identical to SEQ ID NO: 36999
  misc_feature 1..80: note = Artificially Synthesized Probe
  source 1..80: mol_type = other DNA

SEQ ID NO: 107403 - DNA, 80 bp, synthetic construct
  misc_feature 1..80: note = Artificially Synthesized Probe
  source 1..80: mol_type = other DNA
tgatgtattggctattttattaatagtaatatcaataaaaataatcattaagataactgataatattcaggacttcatat

SEQ ID NO: 107404 - DNA, 80 bp, synthetic construct
  misc_feature 1..80: note = Artificially Synthesized Probe
  source 1..80: mol_type = other DNA
agccaatgtttgatctgaacaacttgattctaggatcattttggctgggaattttctgagagctgtgtgtgtgtgtgtgt

SEQ ID NO: 107405 - DNA, 80 bp, synthetic construct
  misc_feature 1..80: note = Artificially Synthesized Probe
  source 1..80: mol_type = other DNA
agtcaaatattgatactttctactaagtcatcttgccaacacccattttgttatacttatgctgaatctgtttgtcatct

SEQ ID NO: 107406 - DNA, 80 bp, synthetic construct
  misc_feature 1..80: note = Artificially Synthesized Probe
  source 1..80: mol_type = other DNA
aaagtaattaggaatattgaaaaacctaaaatgtagttctctccatattctggatactcctgcctttttcttccactttc

SEQ ID NO: 107407 - DNA, 80 bp, synthetic construct; identical to SEQ ID NO: 37022
  misc_feature 1..80: note = Artificially Synthesized Probe
  source 1..80: mol_type = other DNA

SEQ ID NO: 107408 - DNA, 80 bp, synthetic construct
  misc_feature 1..80: note = Artificially Synthesized Probe
  source 1..80: mol_type = other DNA
cccactgatgaataaagacaatctccctgcacaattgcactgcaggcaagactgaacttatgaccaccacttctgtgtaa

SEQ ID NO: 107409 - DNA, 80 bp, synthetic construct
  misc_feature 1..80: note = Artificially Synthesized Probe
  source 1..80: mol_type = other DNA
aattctcaggagcacttttagctataagattccttcatccaattaaataagctttaagcttcatgaaaagtgtaaaaggg

SEQ ID NO: 107410 - DNA, 80 bp, synthetic construct; identical to SEQ ID NO: 37023
  misc_feature 1..80: note = Artificially Synthesized Probe
  source 1..80: mol_type = other DNA

SEQ ID NO: 107411 - DNA, 80 bp, synthetic construct
  misc_feature 1..80: note = Artificially Synthesized Probe
  source 1..80: mol_type = other DNA
acctcacaggtactaaagaataaatgattggaaaataaacattattgaatatatgttagtaattattattttcattgtta

SEQ ID NO: 107412 - DNA, 80 bp, synthetic construct
  misc_feature 1..80: note = Artificially Synthesized Probe
  source 1..80: mol_type = other DNA
tccaaactatacttttttttaaccctacatgcctttagttcatggaaagaaaagtatgttaaagatgctatgggggtgaa

SEQ ID NO: 107413 - DNA, 80 bp, synthetic construct
  misc_feature 1..80: note = Artificially Synthesized Probe
  source 1..80: mol_type = other DNA
aacagaccatcttcccacatttgagagggaactatacaaaaatgggaaaatatttgttttaaatatcttttggatgtgaa

SEQ ID NO: 107414 - DNA, 80 bp, synthetic construct
  misc_feature 1..80: note = Artificially Synthesized Probe
  source 1..80: mol_type = other DNA
attgtgccccagtgcagacactccttcctacttccctgtagaaaacagaactgtttttttaaaattctttctcaactacc

SEQ ID NO: 107415 - DNA, 80 bp, synthetic construct
  misc_feature 1..80: note = Artificially Synthesized Probe
  source 1..80: mol_type = other DNA
tggatatacataaatttattttgaaaactcaactttatcttcagttgctcacataaatattgagagcaaacatttttcta

SEQ ID NO: 107416 - DNA, 80 bp, synthetic construct; identical to SEQ ID NO: 37024
  misc_feature 1..80: note = Artificially Synthesized Probe
  source 1..80: mol_type = other DNA

SEQ ID NO: 107417 - DNA, 80 bp, synthetic construct
  misc_feature 1..80: note = Artificially Synthesized Probe
  source 1..80: mol_type = other DNA
ttttttcccttaaggctaatgttctcgggactaccatgaaaaatccaggtatcctaatctggagggttaccctttggatc

SEQ ID NO: 107418 - DNA, 80 bp, synthetic construct
  misc_feature 1..80: note = Artificially Synthesized Probe
  source 1..80: mol_type = other DNA
cgggttcacgccattctcctgcctcagcctcccgagtaggggggactacaggcgcccgccgccacgcctggctaattttt

SEQ ID NO: 107419 - DNA, 80 bp, synthetic construct; identical to SEQ ID NO: 37025
  misc_feature 1..80: note = Artificially Synthesized Probe
  source 1..80: mol_type = other DNA

SEQ ID NO: 107420 - DNA, 80 bp, synthetic construct
  misc_feature 1..80: note = Artificially Synthesized Probe
  source 1..80: mol_type = other DNA
cttcatgcagttatatgtttccaagaacagataaactgtgaacttaatacaagtgtctcctttccttggattctcaccat

SEQ ID NO: 107421 - DNA, 80 bp, synthetic construct
  misc_feature 1..80: note = Artificially Synthesized Probe
  source 1..80: mol_type = other DNA
tctctttccagccctggaaagacatcccaagtgtacgtattgtttatattatgttattagtatatctttaccagcaaagg

SEQ ID NO: 107422 - DNA, 80 bp, synthetic construct
  misc_feature 1..80: note = Artificially Synthesized Probe
  source 1..80: mol_type = other DNA
tagtgcctgtggtcccagctacttgagaggctgaggtgaaaagattgtttgagtcgaggaaatggatgctgcagtgagcc

SEQ ID NO: 107423 - DNA, 80 bp, synthetic construct
  misc_feature 1..80: note = Artificially Synthesized Probe
  source 1..80: mol_type = other DNA
catgtgttttttccacacatgtaggaaggagaaggtaggaacaatgaaaagattcttttagtgatcatagtggctccaaa

SEQ ID NO: 107424 - DNA, 80 bp, synthetic construct; identical to SEQ ID NO: 37026
  misc_feature 1..80: note = Artificially Synthesized Probe
  source 1..80: mol_type = other DNA

SEQ ID NO: 107425 - DNA, 80 bp, synthetic construct
  misc_feature 1..80: note = Artificially Synthesized Probe
  source 1..80: mol_type = other DNA
ttaagttaaacataatcttgcttgaatgaggatgagtataagatacctcagtcatgaccttgtagatcactgcatcagcc

SEQ ID NO: 107426 - DNA, 80 bp, synthetic construct
  misc_feature 1..80: note = Artificially Synthesized Probe
  source 1..80: mol_type = other DNA
atttatttttcttttttagcaacaaatgagttggattctatgtttcattttaacgtgttaaaattagtttagtgcctaca

SEQ ID NO: 107427 - DNA, 80 bp, synthetic construct
  misc_feature 1..80: note = Artificially Synthesized Probe
  source 1..80: mol_type = other DNA
tgccctaagcaacttacgatattttgatgtttcttttctgacaccccattcgataggcttttgtcttcatgctcagcatc

SEQ ID NO: 107428 - DNA, 80 bp, synthetic construct
  misc_feature 1..80: note = Artificially Synthesized Probe
  source 1..80: mol_type = other DNA
gaaatttaacatataaccattcattgctgtcagaggtgggaaggagtccctgagaaagaaattattcttgttttccagcc

SEQ ID NO: 107429 - DNA, 80 bp, synthetic construct; identical to SEQ ID NO: 37027
  misc_feature 1..80: note = Artificially Synthesized Probe
  source 1..80: mol_type = other DNA

SEQ ID NO: 107430 - DNA, 80 bp, synthetic construct
  misc_feature 1..80: note = Artificially Synthesized Probe
  source 1..80: mol_type = other DNA
atttctaggacaagacatctacacatatacaaactgtcaattcataacatgtcatggaaacataaaagaaggtatcagtg

SEQ ID NO: 107431 - DNA, 80 bp, synthetic construct
  misc_feature 1..80: note = Artificially Synthesized Probe
  source 1..80: mol_type = other DNA
ttctgcaaagcaatgttagaaaattgcatgtgttagcttgtatacacaacttagcttacaatgttagcttgtagctaact

SEQ ID NO: 107432 - DNA, 80 bp, synthetic construct
  misc_feature 1..80: note = Artificially Synthesized Probe
  source 1..80: mol_type = other DNA
catatggctatctggaggaagagcattccagctactcaaatccaaagtggtatcatggtgtgatgtctttttttttattt

SEQ ID NO: 107433 - DNA, 80 bp, synthetic construct; identical to SEQ ID NO: 37028
  misc_feature 1..80: note = Artificially Synthesized Probe
  source 1..80: mol_type = other DNA

SEQ ID NO: 107434 - DNA, 80 bp, synthetic construct
  misc_feature 1..80: note = Artificially Synthesized Probe
  source 1..80: mol_type = other DNA
ggcctgagaacttacataaacacccttggtacatggaaagtaaatataaaatggtgctgataattctaattacatagttt

SEQ ID NO: 107435 - DNA, 80 bp, synthetic construct
  misc_feature 1..80: note = Artificially Synthesized Probe
  source 1..80: mol_type = other DNA
ttaggtgaatagatatgtatcgaagggaaattaagagagcataagaaaaccccactttacctgccatctatccatggaag

SEQ ID NO: 107436 - DNA, 80 bp, synthetic construct
  misc_feature 1..80: note = Artificially Synthesized Probe
  source 1..80: mol_type = other DNA
aatatctaaaatgcacacacggacaaggccaaagttaatctttgccacggcaacaaccaggcagggttcagttttactca

SEQ ID NO: 107437 - DNA, 80 bp, synthetic construct; identical to SEQ ID NO: 37029
  misc_feature 1..80: note = Artificially Synthesized Probe
  source 1..80: mol_type = other DNA

SEQ ID NO: 107438 - DNA, 80 bp, synthetic construct
  misc_feature 1..80: note = Artificially Synthesized Probe
  source 1..80: mol_type = other DNA
actggtcatgctcacatctgttttctgccagccttttctggtgcccgcaggcacccacctgcacccaatgtcctcctttt

SEQ ID NO: 107439 - DNA, 80 bp, synthetic construct
  misc_feature 1..80: note = Artificially Synthesized Probe
  source 1..80: mol_type = other DNA
tatactatgttttaagcttccctaatatcccactgctgaatcccaccgacatggaatccacggcatggtgaatccctgac

SEQ ID NO: 107440 - DNA, 80 bp, synthetic construct
  misc_feature 1..80: note = Artificially Synthesized Probe
  source 1..80: mol_type = other DNA
tagcttacttagtcctggggctgtaaagtcaactgaatgatggagtcatttttttcaaaatgcgacatcttcttacccac

SEQ ID NO: 107441 - DNA, 80 bp, synthetic construct
  misc_feature 1..80: note = Artificially Synthesized Probe
  source 1..80: mol_type = other DNA
tctattgtgagcaccttaatacggaactgtaagaataattactatttttaatgccaaatgaagcatgtaagtattactag

SEQ ID NO: 107442 - DNA, 80 bp, synthetic construct; identical to SEQ ID NO: 37030
  misc_feature 1..80: note = Artificially Synthesized Probe
  source 1..80: mol_type = other DNA

SEQ ID NO: 107443 - DNA, 80 bp, synthetic construct
  misc_feature 1..80: note = Artificially Synthesized Probe
  source 1..80: mol_type = other DNA
ggaagacaaaatagcttgggacacattaataacttacacaaaaaattttaaaaattaaatcttctaatagatttgatata

SEQ ID NO: 107444 - DNA, 80 bp, synthetic construct
  misc_feature 1..80: note = Artificially Synthesized Probe
  source 1..80: mol_type = other DNA
caagtctctatctaattcatactccctattgctctttcctgcttcacaaacttcttaaaagattttttcatgtggtgtga

SEQ ID NO: 107445 - DNA, 80 bp, synthetic construct; identical to SEQ ID NO: 37000
  misc_feature 1..80: note = Artificially Synthesized Probe
  source 1..80: mol_type = other DNA

SEQ ID NO: 107446 - DNA, 80 bp, synthetic construct
  misc_feature 1..80: note = Artificially Synthesized Probe
  source 1..80: mol_type = other DNA
acaatacagtataacaactatttacatagcatttattttgcattaagtattataagtaatctaaagatgatttaaggtat

SEQ ID NO: 107447 - DNA, 80 bp, synthetic construct; identical to SEQ ID NO: 37031
  misc_feature 1..80: note = Artificially Synthesized Probe
  source 1..80: mol_type = other DNA

SEQ ID NO: 107448 - DNA, 80 bp, synthetic construct
  misc_feature 1..80: note = Artificially Synthesized Probe
  source 1..80: mol_type = other DNA
aaacatgaaactaccttctagttctcttatttatctcagccatctggctcctctttctctattcccttgttacctattgg

SEQ ID NO: 107449 - DNA, 80 bp, synthetic construct
  misc_feature 1..80: note = Artificially Synthesized Probe
  source 1..80: mol_type = other DNA
tagctccagttctgctgtcttttttgtattaaagaccaatttctccaactatgcactagacacttccaactagtatccca

SEQ ID NO: 107450 - DNA, 80 bp, synthetic construct
  misc_feature 1..80: note = Artificially Synthesized Probe
  source 1..80: mol_type = other DNA
ctgacaaagaacatgctaggaagtctgtattcttcatgtcttaaaatattcacctctgcttccattgccacagctttgat

SEQ ID NO: 107451 - DNA, 80 bp, synthetic construct
  misc_feature 1..80: note = Artificially Synthesized Probe
  source 1..80: mol_type = other DNA
ttttttcctgtaacctaaagttacatctgggttggtcaaagtgaagcatagtaactacattccctttgatagtgctgcaa

SEQ ID NO: 107452 - DNA, 80 bp, synthetic construct; identical to SEQ ID NO: 37032
  misc_feature 1..80: note = Artificially Synthesized Probe
  source 1..80: mol_type = other DNA

SEQ ID NO: 107453 - DNA, 80 bp, synthetic construct
  misc_feature 1..80: note = Artificially Synthesized Probe
  source 1..80: mol_type = other DNA
tccctgcaacctccacctccagggttcaagcgactctcctgtctcagtctcccaagtagctgggattacaggtgcacgcc

SEQ ID NO: 107454 - DNA, 80 bp, synthetic construct
  misc_feature 1..80: note = Artificially Synthesized Probe
  source 1..80: mol_type = other DNA
ccattttaactgtattctaaaagcattttacagcctgctaatacataacctcatctccaaccttgcttcctaagttccac

SEQ ID NO: 107455 - DNA, 80 bp, synthetic construct
  misc_feature 1..80: note = Artificially Synthesized Probe
  source 1..80: mol_type = other DNA
ggactgtgccttgcacatcacagacattcaatgaaaattatttaattgaatttggtaagcagtcctattaagttctaaat

SEQ ID NO: 107456 - DNA, 80 bp, synthetic construct
  misc_feature 1..80: note = Artificially Synthesized Probe
  source 1..80: mol_type = other DNA
ttattttccagaaagatatctagcacccctctaccttacatcttgcttttcagccaggaagaacaactttttctttctga

SEQ ID NO: 107457 - DNA, 80 bp, synthetic construct; identical to SEQ ID NO: 37033
  misc_feature 1..80: note = Artificially Synthesized Probe
  source 1..80: mol_type = other DNA

SEQ ID NO: 107458 - DNA, 80 bp, synthetic construct
  misc_feature 1..80: note = Artificially Synthesized Probe
  source 1..80: mol_type = other DNA
tacttcatattattacaatgattcaggaagctaatgtatatggtatacttacatatatatatgacctagtataacgcatg

SEQ ID NO: 107459 - DNA, 80 bp, synthetic construct
  misc_feature 1..80: note = Artificially Synthesized Probe
  source 1..80: mol_type = other DNA
tccattacagaggcataatcagtttactattcagaaaaatgcaagagtacatttttactgctcctccagtgatactatgg

SEQ ID NO: 107460 - DNA, 80 bp, synthetic construct
  misc_feature 1..80: note = Artificially Synthesized Probe
  source 1..80: mol_type = other DNA
tttaagaaattgaaattttgaagtattaataatgtacttctctcccaaaattgttttaatgtaatgatttttgccatatg

SEQ ID NO: 107461 - DNA, 80 bp, synthetic construct; identical to SEQ ID NO: 37034
  misc_feature 1..80: note = Artificially Synthesized Probe
  source 1..80: mol_type = other DNA

SEQ ID NO: 107462 - DNA, 80 bp, synthetic construct
  misc_feature 1..80: note = Artificially Synthesized Probe
  source 1..80: mol_type = other DNA
aagtagataggtaggtaagctttattatattttttaaatgtgaaattttacaattgtgaaaatttacaattttacaattt

SEQ ID NO: 107463 - DNA, 80 bp, synthetic construct
  misc_feature 1..80: note = Artificially Synthesized Probe
  source 1..80: mol_type = other DNA
ataactggggctatgattgcaaacatttataagatgtggtatgaaaatgtcccaatcacaaaaacactcaatttaaaaat

SEQ ID NO: 107464 - DNA, 80 bp, synthetic construct
  misc_feature 1..80: note = Artificially Synthesized Probe
  source 1..80: mol_type = other DNA
gatagtaaggaaagtccccatttgctcttcatttggcttcctctaatattaacatttgccaaggttacatttgttaaaac

SEQ ID NO: 107465 - DNA, 80 bp, synthetic construct; identical to SEQ ID NO: 37035
  misc_feature 1..80: note = Artificially Synthesized Probe
  source 1..80: mol_type = other DNA

SEQ ID NO: 107466 - DNA, 80 bp, synthetic construct
  misc_feature 1..80: note = Artificially Synthesized Probe
  source 1..80: mol_type = other DNA
attgtattctttcaacatggaattaatgttgatgagaagcaaacatctaaatttaaaagaaaatatagtttgttgaggga

SEQ ID NO: 107467 - DNA, 80 bp, synthetic construct
  misc_feature 1..80: note = Artificially Synthesized Probe
  source 1..80: mol_type = other DNA
cttttgttctgtgtaagtaagtataggggcagagtagttagcttgaacttagttctttctttgttctggactatttgcta

SEQ ID NO: 107468 - DNA, 80 bp, synthetic construct
  misc_feature 1..80: note = Artificially Synthesized Probe
  source 1..80: mol_type = other DNA
tagcttgatcttccccctgactaggtttgattggattaaatcatcataaagagacaaaataatgcaaaaagtgataaatc

SEQ ID NO: 107469 - DNA, 80 bp, synthetic construct
  misc_feature 1..80: note = Artificially Synthesized Probe
  source 1..80: mol_type = other DNA
tgctggtaaactgatcacttgagaacataaagtcaactttccctggaagagtttctcattataaaagaaaggcaagcatc

SEQ ID NO: 107470 - DNA, 80 bp, synthetic construct; identical to SEQ ID NO: 37036
  misc_feature 1..80: note = Artificially Synthesized Probe
  source 1..80: mol_type = other DNA

SEQ ID NO: 107471 - DNA, 80 bp, synthetic construct
  misc_feature 1..80: note = Artificially Synthesized Probe
  source 1..80: mol_type = other DNA
aattcaatacatggagtattaatgcgctgtatgaatgccgaaggtagtattggacgccacaatctttaggaaccatgctt

SEQ ID NO: 107472 - DNA, 80 bp, synthetic construct
  misc_feature 1..80: note = Artificially Synthesized Probe
  source 1..80: mol_type = other DNA
ttgtacaattgttaaacttaagaaacagatggtagatctgtatcagtcagtgaggggtttctgaagtacttttctggatg

SEQ ID NO: 107473 - DNA, 80 bp, synthetic construct
  misc_feature 1..80: note = Artificially Synthesized Probe
  source 1..80: mol_type = other DNA
cacttcttgagagtgggtatctttattttgagttggtatctttttgagagttggccactcataagccttgcttttgataa

SEQ ID NO: 107474 - DNA, 80 bp, synthetic construct
  misc_feature 1..80: note = Artificially Synthesized Probe
  source 1..80: mol_type = other DNA
gcatgatcatagaagatttatgtagaagtcagaaatcaaggtcaagagggtaggcatatttagattcttaccctattcat

SEQ ID NO: 107475 - DNA, 80 bp, synthetic construct; identical to SEQ ID NO: 37037
  misc_feature 1..80: note = Artificially Synthesized Probe
  source 1..80: mol_type = other DNA

SEQ ID NO: 107476 - DNA, 80 bp, synthetic construct
  misc_feature 1..80: note = Artificially Synthesized Probe
  source 1..80: mol_type = other DNA
gtcacatttattttccagaaagatttctagcacccctctaccttacatcttgcttttcagccaggaagaacaacttttac

SEQ ID NO: 107477 - DNA, 80 bp, synthetic construct
  misc_feature 1..80: note = Artificially Synthesized Probe
  source 1..80: mol_type = other DNA
gtaagcattcttcctccctgcttccatagaaagtaggaaactattgcacttacacattgtaatgtggctatagtatgatc

SEQ ID NO: 107478 - DNA, 80 bp, synthetic construct
  misc_feature 1..80: note = Artificially Synthesized Probe
  source 1..80: mol_type = other DNA
atctatctatctatctatcagttctccatgtttgtctatttggcgttcccatgaacttcagaccttcgcctgtgttctct

SEQ ID NO: 107479 - DNA, 80 bp, synthetic construct; identical to SEQ ID NO: 37038
  misc_feature 1..80: note = Artificially Synthesized Probe
  source 1..80: mol_type = other DNA

SEQ ID NO: 107480 - DNA, 80 bp, synthetic construct
  misc_feature 1..80: note = Artificially Synthesized Probe
  source 1..80: mol_type = other DNA
gcacatgaaagtgccaagaggaaatgcaataccatcttatgaaatgagaaattacacatatcttacagtgagtttcaaaa

SEQ ID NO: 107481 - DNA, 80 bp, synthetic construct
  misc_feature 1..80: note = Artificially Synthesized Probe
  source 1..80: mol_type = other DNA
atttcaccagtgcctttaagaaggacaaatcaaattaaaaagtcaaaatgactgaaggtgataatccagatggtggtaac

SEQ ID NO: 107482 - DNA, 80 bp, synthetic construct
  misc_feature 1..80: note = Artificially Synthesized Probe
  source 1..80: mol_type = other DNA
tacccccatgaagagctatcaatttaacaaccacagttgtaaggattcttaataagctgtcaatgagcactgctgccggt

SEQ ID NO: 107483 - DNA, 80 bp, synthetic construct; identical to SEQ ID NO: 37039
  misc_feature 1..80: note = Artificially Synthesized Probe
  source 1..80: mol_type = other DNA

SEQ ID NO: 107484 - DNA, 80 bp, synthetic construct
  misc_feature 1..80: note = Artificially Synthesized Probe
  source 1..80: mol_type = other DNA
tattcctgaaaatagagttccaatttgatcaaaacataaaccagagtgagtgagtgagtgactagaattataaaggccag

SEQ ID NO: 107485 - DNA, 80 bp, synthetic construct
  misc_feature 1..80: note = Artificially Synthesized Probe
  source 1..80: mol_type = other DNA
cagacagctgctcctgcagtttgggcacatagtcgtcccactcagcctggtaacgctttctggccactggggccacgagc

SEQ ID NO: 107486 - DNA, 80 bp, synthetic construct
  misc_feature 1..80: note = Artificially Synthesized Probe
  source 1..80: mol_type = other DNA
caccacgcccagctattttttttttttttttttttgtatttttgtatttttagtagagacggggttttaccatgttggcc

SEQ ID NO: 107487 - DNA, 80 bp, synthetic construct; identical to SEQ ID NO: 37040
  misc_feature 1..80: note = Artificially Synthesized Probe
  source 1..80: mol_type = other DNA

SEQ ID NO: 107488 - DNA, 80 bp, synthetic construct
  misc_feature 1..80: note = Artificially Synthesized Probe
  source 1..80: mol_type = other DNA
gctccccaagtcctgaaattttgctttgtaataatctctaataacttcttgctttgacacctccattgccatcatcttaa

SEQ ID NO: 107489 - DNA, 80 bp, synthetic construct
  misc_feature 1..80: note = Artificially Synthesized Probe
  source 1..80: mol_type = other DNA
tccttgactcaagatcatcccatgaaatgctggtgggtctgttaacctaggtgggcgtcagcactttgcccagctcgtcc

SEQ ID NO: 107490 - DNA, 80 bp, synthetic construct
  misc_feature 1..80: note = Artificially Synthesized Probe
  source 1..80: mol_type = other DNA
gcgactcggcagcctctgaaaactagccagggaagccggggctcatttataggattttaaaaatattattaaaggcttca

SEQ ID NO: 107491 - DNA, 80 bp, synthetic construct
  misc_feature 1..80: note = Artificially Synthesized Probe
  source 1..80: mol_type = other DNA
actcaggaggctgaggcaggagaaccgcgtgaacccggcaggcggaggttgcagtgagctgagatagtgccacggcactc

SEQ ID NO: 107492 - DNA, 80 bp, synthetic construct
  misc_feature 1..80: note = Artificially Synthesized Probe
  source 1..80: mol_type = other DNA
taacaggaaagagacacatcagtgcattttacaagcagatcaatgtggcggtatctagcatgcatggggaagggatggag

SEQ ID NO: 107493 - DNA, 80 bp, synthetic construct; identical to SEQ ID NO: 37041
  misc_feature 1..80: note = Artificially Synthesized Probe
  source 1..80: mol_type = other DNA

SEQ ID NO: 107494 - DNA, 80 bp, synthetic construct
  misc_feature 1..80: note = Artificially Synthesized Probe
  source 1..80: mol_type = other DNA
taaatgttccttctttactaaagatagagaaaccattttctgatgtacaaagggatgaagagctggcccaatatgaattt

SEQ ID NO: 107495 - DNA, 80 bp, synthetic construct
  misc_feature 1..80: note = Artificially Synthesized Probe
  source 1..80: mol_type = other DNA
actagagctgcagggtatcagggaatgtgacaaggcagcaaaatgtttctacacatgtctgttttttcaggcattatctt

SEQ ID NO: 107496 - DNA, 80 bp, synthetic construct; identical to SEQ ID NO: 37042
  misc_feature 1..80: note = Artificially Synthesized Probe
  source 1..80: mol_type = other DNA

SEQ ID NO: 107497 - DNA, 80 bp, synthetic construct
  misc_feature 1..80: note = Artificially Synthesized Probe
  source 1..80: mol_type = other DNA
atctattttctccaagttgcataatgtaatgaattaataaagcttagttgctggccaaatcaatggtgactttttatgtt

SEQ ID NO: 107498 - DNA, 80 bp, synthetic construct; identical to SEQ ID NO: 37001
  misc_feature 1..80: note = Artificially Synthesized Probe
  source 1..80: mol_type = other DNA

SEQ ID NO: 107499 - DNA, 80 bp, synthetic construct
  misc_feature 1..80: note = Artificially Synthesized Probe
  source 1..80: mol_type = other DNA
cattttgtagcagttaaatgtatagtcaggcagcttcaacgtcaactagagaagttgtggttttaaccccgagatagggc

SEQ ID NO: 107500 - DNA, 80 bp, synthetic construct
  misc_feature 1..80: note = Artificially Synthesized Probe
  source 1..80: mol_type = other DNA
cgaagagaagaaaccacaagagcagtaaagacactgctgttagcttttagctgtgcaaacagcagtcttatgagaacaac

SEQ ID NO: 107501 - DNA, 80 bp, synthetic construct; identical to SEQ ID NO: 37043
  misc_feature 1..80: note = Artificially Synthesized Probe
  source 1..80: mol_type = other DNA

SEQ ID NO: 107502 - DNA, 80 bp, synthetic construct
  misc_feature 1..80: note = Artificially Synthesized Probe
  source 1..80: mol_type = other DNA
ttggtgctgtaaacacgtttctacataactagattaaattcacagacactcactgtcctagcactgtttattttctatgg

SEQ ID NO: 107503 - DNA, 80 bp, synthetic construct
  misc_feature 1..80: note = Artificially Synthesized Probe
  source 1..80: mol_type = other DNA
tgggtaaaaatactgaaggacagacaagttcatgctaccatttttgttaggcataggcctgttcacttttcttcccattt

SEQ ID NO: 107504 - DNA, 80 bp, synthetic construct
  misc_feature 1..80: note = Artificially Synthesized Probe
  source 1..80: mol_type = other DNA
gatttagcattaaatattttttccttacagtgcaatgcagttgaacaagcatgggggtttttacagtcagacagatctgc

SEQ ID NO: 107505 - DNA, 80 bp, synthetic construct; identical to SEQ ID NO: 37044
  misc_feature 1..80: note = Artificially Synthesized Probe
  source 1..80: mol_type = other DNA

SEQ ID NO: 107506 - DNA, 80 bp, synthetic construct
  misc_feature 1..80: note = Artificially Synthesized Probe
  source 1..80: mol_type = other DNA
gctatctgaagtatattgcataaatcaggtatatatccctggatttaggtaaatgaaaacagacattttcataagaagca

SEQ ID NO: 107507 - DNA, 80 bp, synthetic construct
  misc_feature 1..80: note = Artificially Synthesized Probe
  source 1..80: mol_type = other DNA
aacctactaaatcagattttccagcgctggagcccagaaatagtcacctttaatctaattcccagtcaggattaatacaa

SEQ ID NO: 107508 - DNA, 80 bp, synthetic construct
  misc_feature 1..80: note = Artificially Synthesized Probe
  source 1..80: mol_type = other DNA
attgtacaaatgtcctatagtatgtccatgggaaaaaaatgggtttgtggcaaatacttttaggagatcttgagctaaac

SEQ ID NO: 107509 - DNA, 80 bp, synthetic construct; identical to SEQ ID NO: 37045
  misc_feature 1..80: note = Artificially Synthesized Probe
  source 1..80: mol_type = other DNA

SEQ ID NO: 107510 - DNA, 80 bp, synthetic construct
  misc_feature 1..80: note = Artificially Synthesized Probe
  source 1..80: mol_type = other DNA
gttttaacacccacctctatactttctcaaggtgtttaaggttctgggcaaatcctacttcttctattatgttctcttat

SEQ ID NO: 107511 - DNA, 80 bp, synthetic construct
  misc_feature 1..80: note = Artificially Synthesized Probe
  source 1..80: mol_type = other DNA
ttttgaggtgtgtgtttgcaaagtcatatgtattcacaagcaaaaaacattattgtaaatattggacaccataagtcatt

SEQ ID NO: 107512 - DNA, 80 bp, synthetic construct
  misc_feature 1..80: note = Artificially Synthesized Probe
  source 1..80: mol_type = other DNA
tttgaaagtttaaatagtaccataaggcctagagtaagtaagaacagtcttttgctcccacgactctcccctcccttgat

SEQ ID NO: 107513 - DNA, 80 bp, synthetic construct
  misc_feature 1..80: note = Artificially Synthesized Probe
  source 1..80: mol_type = other DNA
tgaaaatatgaattgtagttggttatcctctcttttgctccttgcattgcctcattctcccaagtgcctcttttgtttat

SEQ ID NO: 107514 - DNA, 80 bp, synthetic construct
  misc_feature 1..80: note = Artificially Synthesized Probe
  source 1..80: mol_type = other DNA
aaggcactacactcactgagtcttagtttccttatatatcaaatgaactgcatgtcaataatcactaaaatcctttgctt

SEQ ID NO: 107515 - DNA, 80 bp, synthetic construct; identical to SEQ ID NO: 37046
  misc_feature 1..80: note = Artificially Synthesized Probe
  source 1..80: mol_type = other DNA

SEQ ID NO: 107516 - DNA, 80 bp, synthetic construct
  misc_feature 1..80: note = Artificially Synthesized Probe
  source 1..80: mol_type = other DNA
gtggttctctgaaatcataatacctggcttgtcgctgcccagagtgcttactccataaatacttaataatttaatatgat

SEQ ID NO: 107517 - DNA, 80 bp, synthetic construct
  misc_feature 1..80: note = Artificially Synthesized Probe
  source 1..80: mol_type = other DNA
cttttttccacttttgtacaggctttatgtttatggaggtcaagtatgcattctcaaccttcaaaacatgctatcattca

SEQ ID NO: 107518 - DNA, 80 bp, synthetic construct; identical to SEQ ID NO: 37047
  misc_feature 1..80: note = Artificially Synthesized Probe
  source 1..80: mol_type = other DNA

SEQ ID NO: 107519 - DNA, 80 bp, synthetic construct
  misc_feature 1..80: note = Artificially Synthesized Probe
  source 1..80: mol_type = other DNA
tgtgaattagtggatttcttgacattgtaacctacatgaaatcaggtataggagacacaaaaggcataaactcatagttc

SEQ ID NO: 107520 - DNA, 80 bp, synthetic construct
  misc_feature 1..80: note = Artificially Synthesized Probe
  source 1..80: mol_type = other DNA
acacagctttgaagatcaagtgttctgttatctacattttcatctgtttaatgtatctagtcaattccattggtgattca

SEQ ID NO: 107521 - DNA, 80 bp, synthetic construct
  misc_feature 1..80: note = Artificially Synthesized Probe
  source 1..80: mol_type = other DNA
ttaagttttaaaaaatgtagaaaatttcatccctagaagataaaagtcaaagtgtagaatgtagtaactgtaatatgtgg

SEQ ID NO: 107522 - DNA, 80 bp, synthetic construct
  misc_feature 1..80: note = Artificially Synthesized Probe
  source 1..80: mol_type = other DNA
gaagtgcaatgccattctactgacttagaacaacttttttgacttcctgcaaagaggacccttacagtatttttggagaa

SEQ ID NO: 107523 - DNA, 80 bp, synthetic construct
  misc_feature 1..80: note = Artificially Synthesized Probe
  source 1..80: mol_type = other DNA
cacctacacatgtgccctcttaatttccattgctatgtcacatattttgctttacctattttccacactttcccagtatt

SEQ ID NO: 107524 - DNA, 80 bp, synthetic construct; identical to SEQ ID NO: 37048
  misc_feature 1..80: note = Artificially Synthesized Probe
  source 1..80: mol_type = other DNA

SEQ ID NO: 107525 - DNA, 80 bp, synthetic construct
  misc_feature 1..80: note = Artificially Synthesized Probe
  source 1..80: mol_type = other DNA
gtggcaccatcacatctcactacagcctcaacacacactcatgggcgtagcctcccaagtagctgggactataggtgtgc

SEQ ID NO: 107526 - DNA, 80 bp, synthetic construct
  misc_feature 1..80: note = Artificially Synthesized Probe
  source 1..80: mol_type = other DNA
ggtcttttttttctatcagtgaagattcagcacagtggcttctatctatgattttggtaatgtttaataatgtttgcaca

SEQ ID NO: 107527 - DNA, 80 bp, synthetic construct
  misc_feature 1..80: note = Artificially Synthesized Probe
  source 1..80: mol_type = other DNA
gtaccttcacctactccctaccttgtttcatatataaaggcattctccaccaaagtatttgttagtgttctgctaacgtt

SEQ ID NO: 107528 - DNA, 80 bp, synthetic construct
  misc_feature 1..80: note = Artificially Synthesized Probe
  source 1..80: mol_type = other DNA
tttatgtaatctagtgcacatggcttattaaaattgatatgttgctttaagttgcatcactctagtgcataccttatttc

SEQ ID NO: 107529 - DNA, 80 bp, synthetic construct; identical to SEQ ID NO: 37049
  misc_feature 1..80: note = Artificially Synthesized Probe
  source 1..80: mol_type = other DNA

SEQ ID NO: 107530 - DNA, 80 bp, synthetic construct; identical to SEQ ID NO: 37002
  misc_feature 1..80: note = Artificially Synthesized Probe
  source 1..80: mol_type = other DNA

SEQ ID NO: 107531 - DNA, 80 bp, synthetic construct
  misc_feature 1..80: note = Artificially Synthesized Probe
  source 1..80: mol_type = other DNA
aaatcagtgtacaagcaaacacatattcaattcaagaggcctttatgggaagtaagcatgaacatagaagaaaggaaaat

SEQ ID NO: 107532 - DNA, 80 bp, synthetic construct
  misc_feature 1..80: note = Artificially Synthesized Probe
  source 1..80: mol_type = other DNA
acatctaaacaaaaggtctgtaaattttaataattgtgcttgatattagtgtagtttggttgactttcctgtcaaaatag

SEQ ID NO: 107533 - DNA, 80 bp, synthetic construct
  misc_feature 1..80: note = Artificially Synthesized Probe
  source 1..80: mol_type = other DNA
agccaaattatgattaagatgcatttttacttagctcatgagtttttaataaacaccttctgtaaaagaattctcatgct

SEQ ID NO: 107534 - DNA, 80 bp, synthetic construct; identical to SEQ ID NO: 37050
  misc_feature 1..80: note = Artificially Synthesized Probe
  source 1..80: mol_type = other DNA

SEQ ID NO: 107535 - DNA, 80 bp, synthetic construct
  misc_feature 1..80: note = Artificially Synthesized Probe
  source 1..80: mol_type = other DNA
cttttaaaaaacgtattgcctttggaccacttggaagtttattaatctctctgagacatggaacatatacgtagtctgat

SEQ ID NO: 107536 - DNA, 80 bp, synthetic construct
  misc_feature 1..80: note = Artificially Synthesized Probe
  source 1..80: mol_type = other DNA
tatagttggtgctacacattttggtgacaacaaagtagtaaatcagaacaacagaatataggggtctgtggaattagtgg

SEQ ID NO: 107537 - DNA, 80 bp, synthetic construct
  misc_feature 1..80: note = Artificially Synthesized Probe
  source 1..80: mol_type = other DNA
gttatcatcagatctgtttgatttctcctttgcacttactcatgcttaaaagaatccagcaattacttatcaatcacttc

SEQ ID NO: 107538 - DNA, 80 bp, synthetic construct; identical to SEQ ID NO: 37051
  misc_feature 1..80: note = Artificially Synthesized Probe
  source 1..80: mol_type = other DNA

SEQ ID NO: 107539 - DNA, 80 bp, synthetic construct
  misc_feature 1..80: note = Artificially Synthesized Probe
  source 1..80: mol_type = other DNA
gtatgttcacacactcaaaaacaatttgaatattttaaatttggtgatatgttttgttcttcacaaacaatgaaggacac

SEQ ID NO: 107540 - DNA, 80 bp, synthetic construct
  misc_feature 1..80: note = Artificially Synthesized Probe
  source 1..80: mol_type = other DNA
aacaatagtttacatgaaacagaaagataaaagctaactagataagaaaagggacaaaagtacaaacaatatcaattaaa

SEQ ID NO: 107541 - DNA, 80 bp, synthetic construct
  misc_feature 1..80: note = Artificially Synthesized Probe
  source 1..80: mol_type = other DNA
tctttgatctgctctttggacattctaggtaatgtaatttggagggtcaattttatttttcagatacacatacccatagg

SEQ ID NO: 107542 - DNA, 80 bp, synthetic construct
  misc_feature 1..80: note = Artificially Synthesized Probe
  source 1..80: mol_type = other DNA
aatacggggtgatgctccttggatggcaactctgaaggaagaaaatgttttcacatcagtttgttctcagaagataaaat

SEQ ID NO: 107543 - DNA, 80 bp, synthetic construct; identical to SEQ ID NO: 37052
  misc_feature 1..80: note = Artificially Synthesized Probe
  source 1..80: mol_type = other DNA

SEQ ID NO: 107544 - DNA, 80 bp, synthetic construct
  misc_feature 1..80: note = Artificially Synthesized Probe
  source 1..80: mol_type = other DNA
ttcactgaacttcaggattctatcctggacacttctcttttatgtagttcggtgatctccttcacctctgtagctgcaaa

SEQ ID NO: 107545 - DNA, 80 bp, synthetic construct
  misc_feature 1..80: note = Artificially Synthesized Probe
  source 1..80: mol_type = other DNA
aactcactagcatgttaaactatcaatctagatattttccttattactctttctcctttattctcacttgaaaggattta

SEQ ID NO: 107546 - DNA, 80 bp, synthetic construct; identical to SEQ ID NO: 37053
  misc_feature 1..80: note = Artificially Synthesized Probe
  source 1..80: mol_type = other DNA

SEQ ID NO: 107547 - DNA, 80 bp, synthetic construct
  misc_feature 1..80: note = Artificially Synthesized Probe
  source 1..80: mol_type = other DNA
tatgttctcctttagcacattctgtatcacctgtcatcacactgtattgattgattgtttttgtttatatctcacactaa

SEQ ID NO: 107548 - DNA, 80 bp, synthetic construct
  misc_feature 1..80: note = Artificially Synthesized Probe
  source 1..80: mol_type = other DNA
tttgcaggcttgaaattaatcccaatagtgatcctttagtctgttatgtttctgatttagcctggggattcaaaaaataa

SEQ ID NO: 107549 - DNA, 80 bp, synthetic construct
  misc_feature 1..80: note = Artificially Synthesized Probe
  source 1..80: mol_type = other DNA
atgaaatttgaaattttctaagagatttttgtttcttctttgcagggcaaagcccaacaccttcccccactggtaagaat

SEQ ID NO: 107550 - DNA, 80 bp, synthetic construct
  misc_feature 1..80: note = Artificially Synthesized Probe
  source 1..80: mol_type = other DNA
aagggcagatggaatatggtgcaccctaggtgttgcattatttgcacgacaaaagtttgtagagagctgggaataatttc

SEQ ID NO: 107551 - DNA, 80 bp, synthetic construct; identical to SEQ ID NO: 37054
  misc_feature 1..80: note = Artificially Synthesized Probe
  source 1..80: mol_type = other DNA

SEQ ID NO: 107552 - DNA, 80 bp, synthetic construct
  misc_feature 1..80: note = Artificially Synthesized Probe
  source 1..80: mol_type = other DNA
tgttatagatatgtagataacagatttgcatatgtctatatttctttaagagtatgttgcttttttcaatggtatgcaaa

SEQ ID NO: 107553 - DNA, 80 bp, synthetic construct
  misc_feature 1..80: note = Artificially Synthesized Probe
  source 1..80: mol_type = other DNA
attgcagatggttaaatatcacatcacttaactgatgttactgaaaatgtattttcctgcataatcatatggttgacagt

SEQ ID NO: 107554 - DNA, 80 bp, synthetic construct
  misc_feature 1..80: note = Artificially Synthesized Probe
  source 1..80: mol_type = other DNA
accatgaaaatagtaacaaaaacacttctgaatctgcataagaactatatttccttatttttaaagaaggtctaacacaa

SEQ ID NO: 107555 - DNA, 80 bp, synthetic construct
  misc_feature 1..80: note = Artificially Synthesized Probe
  source 1..80: mol_type = other DNA
agaagatagattcatctcaaccataccagatggttatttttgcaggaaagggataggtataaggtagaatggggagtgat

SEQ ID NO: 107556 - DNA, 80 bp, synthetic construct; identical to SEQ ID NO: 37055
  misc_feature 1..80: note = Artificially Synthesized Probe
  source 1..80: mol_type = other DNA

SEQ ID NO: 107557 - DNA, 80 bp, synthetic construct
  misc_feature 1..80: note = Artificially Synthesized Probe
  source 1..80: mol_type = other DNA
tgaaaacctttctccctacccctgggactgaatttgcttggctagaagtaatctttaggaatgctactcatcaaaatagc

SEQ ID NO: 107558 - DNA, 80 bp, synthetic construct
  misc_feature 1..80: note = Artificially Synthesized Probe
  source 1..80: mol_type = other DNA
aacctcaaaagtagggaagctgacagttcagccttcagttggtggccaaaggcccgagagcccctcacaaaccactggag

SEQ ID NO: 107559 - DNA, 80 bp, synthetic construct
  misc_feature 1..80: note = Artificially Synthesized Probe
  source 1..80: mol_type = other DNA
atgcccactcatattgggtgggggtgggggggttggggagggtctgcctcccccagtccactgactcaaatgttaatctc

SEQ ID NO: 107560 - DNA, 80 bp, synthetic construct
  misc_feature 1..80: note = Artificially Synthesized Probe
  source 1..80: mol_type = other DNA
gaccatgtgtgtatatgtcaccttggtgcagagagagaaatttttcatcagtgctgacctttgatttttttttctagaca

SEQ ID NO: 107561 - DNA, 80 bp, synthetic construct; identical to SEQ ID NO: 37056
  misc_feature 1..80: note = Artificially Synthesized Probe
  source 1..80: mol_type = other DNA

SEQ ID NO: 107562 - DNA, 80 bp, synthetic construct
  misc_feature 1..80: note = Artificially Synthesized Probe
  source 1..80: mol_type = other DNA
tcttttctcccaccctctctccctccctttcttttattcaatgcatagtagttgaaaaaatctaaagttagacctgattt

SEQ ID NO: 107563 - DNA, 80 bp, synthetic construct
  misc_feature 1..80: note = Artificially Synthesized Probe
  source 1..80: mol_type = other DNA
gtctatgatcattttgcatttctgtaatcacagaatagttctgcaatatttcatgtatattggaattgaagttcaattga

SEQ ID NO: 107564 - DNA, 80 bp, synthetic construct; identical to SEQ ID NO: 37057
  misc_feature 1..80: note = Artificially Synthesized Probe
  source 1..80: mol_type = other DNA

SEQ ID NO: 107565 - DNA, 80 bp, synthetic construct
  misc_feature 1..80: note = Artificially Synthesized Probe
  source 1..80: mol_type = other DNA
ttggtatatttttctattcttttattaagaaaatcacttttttcagtaaaagagcattaaaaaaactttaaaggacttta

SEQ ID NO: 107566 - DNA, 80 bp, synthetic construct
  misc_feature 1..80: note = Artificially Synthesized Probe
  source 1..80: mol_type = other DNA
tgttatcatgacgtcaaagacatttttgtagactttggttgtttgtaaacctagttgtgagttttgtttttcagtccttt

SEQ ID NO: 107567 - DNA, 80 bp, synthetic construct
  misc_feature 1..80: note = Artificially Synthesized Probe
  source 1..80: mol_type = other DNA
aaaccccatctctactaaaagtacaaaaattagctggatgtggtggtgtatgcctgtaatcccagctacttgggtggctg

SEQ ID NO: 107568 - DNA, 80 bp, synthetic construct; identical to SEQ ID NO: 37058
  misc_feature 1..80: note = Artificially Synthesized Probe
  source 1..80: mol_type = other DNA

SEQ ID NO: 107569 - DNA, 80 bp, synthetic construct
  misc_feature 1..80: note = Artificially Synthesized Probe
  source 1..80: mol_type = other DNA
ttaccattatgcttcatccttctgaactcaattgctttggataggcgagaagctgctttcaatttcatttccccattttt

SEQ ID NO: 107570 - DNA, 80 bp, synthetic construct; identical to SEQ ID NO: 37003
  misc_feature 1..80: note = Artificially Synthesized Probe
  source 1..80: mol_type = other DNA

SEQ ID NO: 107571 - DNA, 80 bp, synthetic construct
  misc_feature 1..80: note = Artificially Synthesized Probe
  source 1..80: mol_type = other DNA
tatgtatgtgtagatatatgtacatacacactatagtggactggggagttagtatactgggaggagcatacatttagggt

SEQ ID NO: 107572 - DNA, 80 bp, synthetic construct
  misc_feature 1..80: note = Artificially Synthesized Probe
  source 1..80: mol_type = other DNA
gagaccacaacttctcttagtccagacaatacttccacccaagtatccccggactctttggataatgctagtgcttttaa

SEQ ID NO: 107573 - DNA, 80 bp, synthetic construct; identical to SEQ ID NO: 37059
  misc_feature 1..80: note = Artificially Synthesized Probe
  source 1..80: mol_type = other DNA

SEQ ID NO: 107574 - DNA, 80 bp, synthetic construct
  misc_feature 1..80: note = Artificially Synthesized Probe
  source 1..80: mol_type = other DNA
tctactctccttggaaggtgtcttaaatgggagtcttcccatttctttgtttcactctagattctctttatccaaaaatt

SEQ ID NO: 107575 - DNA, 80 bp, synthetic construct
  misc_feature 1..80: note = Artificially Synthesized Probe
  source 1..80: mol_type = other DNA
gggaaaaatcagattgatgcaagagatatttttgccaaggaggggcactatgctccttagaatactgatatatgtatatg

SEQ ID NO: 107576 - DNA, 80 bp, synthetic construct
  misc_feature 1..80: note = Artificially Synthesized Probe
  source 1..80: mol_type = other DNA
tgtttaacaatgccatttatcttcgtttgaaaaacaagcatatataataccatcacagaaattttgtttagggtacatca

SEQ ID NO: 107577 - DNA, 80 bp, synthetic construct; identical to SEQ ID NO: 37060
  misc_feature 1..80: note = Artificially Synthesized Probe
  source 1..80: mol_type = other DNA

SEQ ID NO: 107578 - DNA, 80 bp, synthetic construct
  misc_feature 1..80: note = Artificially Synthesized Probe
  source 1..80: mol_type = other DNA
ggtagagcaaagtatgagaaaggtttaaagttgaatagattgaaaataaggatgaataattttaaaatactgatttgttc

SEQ ID NO: 107579 - DNA, 80 bp, synthetic construct
  misc_feature 1..80: note = Artificially Synthesized Probe
  source 1..80: mol_type = other DNA
ttatactgctgaatgcagtcaatttttttcatttactgatataattgggggaaaatcctttaatctgcatttctaagaat

SEQ ID NO: 107580 - DNA, 80 bp, synthetic construct
  misc_feature 1..80: note = Artificially Synthesized Probe
  source 1..80: mol_type = other DNA
tttgtatatactgttaagtatatataaagtatatgtatgtgttgtgtgtatatattttaatcctatgtatacatacatat

SEQ ID NO: 107581 - DNA, 80 bp, synthetic construct
  misc_feature 1..80: note = Artificially Synthesized Probe
  source 1..80: mol_type = other DNA
atatttaatcttcattcctgtttgtatgtcagtgtgctacttcaatatcagtctgttaaaagagtctaggaatgactact

SEQ ID NO: 107582 - DNA, 80 bp, synthetic construct
  misc_feature 1..80: note = Artificially Synthesized Probe
  source 1..80: mol_type = other DNA
aagagaccgtgtatgtaagcatggacatgtgagattgtttccacatgttttcaaacactagatattatcaaccttttaaa

SEQ ID NO: 107583 - DNA, 80 bp, synthetic construct; identical to SEQ ID NO: 37061
  misc_feature 1..80: note = Artificially Synthesized Probe
  source 1..80: mol_type = other DNA

SEQ ID NO: 107584 - DNA, 80 bp, synthetic construct
  misc_feature 1..80: note = Artificially Synthesized Probe
  source 1..80: mol_type = other DNA
tactgacagacacattttaacagattcagttacttcacagtttggtaaactataatcgcaatttgctccttataacctct

SEQ ID NO: 107585 - DNA, 80 bp, synthetic construct
  misc_feature 1..80: note = Artificially Synthesized Probe
  source 1..80: mol_type = other DNA
aatgcaaaactcaaccctaccccaggcagcaatgctatctcaggtttgcgggtcctttagacttgtgcaaatatgaaaag

SEQ ID NO: 107586 - DNA, 80 bp, synthetic construct; identical to SEQ ID NO: 37062
  misc_feature 1..80: note = Artificially Synthesized Probe
  source 1..80: mol_type = other DNA

SEQ ID NO: 107587 - DNA, 80 bp, synthetic construct
  misc_feature 1..80: note = Artificially Synthesized Probe
  source 1..80: mol_type = other DNA
acaaaagggtgaagagtgattcctattatcagtgaagggcagtgagaaattgtaaccacaatgaaactgttatttaaaga

SEQ ID NO: 107588 - DNA, 80 bp, synthetic construct
  misc_feature 1..80: note = Artificially Synthesized Probe
  source 1..80: mol_type = other DNA
agtgtccaaatcacttcttggtgtccttttatatgcaagaaaaacaagtatgtcttttgtcagatcacaaatccacacag

SEQ ID NO: 107589 - DNA, 80 bp, synthetic construct
  misc_feature 1..80: note = Artificially Synthesized Probe
  source 1..80: mol_type = other DNA
attattattttgcagtattaaaactgtgcccttggcataaaaatcattccaggcaatccacactctttaaacaagtggga

SEQ ID NO: 107590 - DNA, 80 bp, synthetic construct
  misc_feature 1..80: note = Artificially Synthesized Probe
  source 1..80: mol_type = other DNA
cacagactagtctgctctgtcctgatcaaggaattcttcttctcaaagaagtggctaattccactgatgaaaaatctatt

SEQ ID NO: 107591 - DNA, 80 bp, synthetic construct; identical to SEQ ID NO: 37063
  misc_feature 1..80: note = Artificially Synthesized Probe
  source 1..80: mol_type = other DNA

SEQ ID NO: 107592 - DNA, 80 bp, synthetic construct
  misc_feature 1..80: note = Artificially Synthesized Probe
  source 1..80: mol_type = other DNA
tggtttagtggcttttgaagactgagctgagaacccatgctcaattatttggaagatgcattttcaattctaatggaatg

SEQ ID NO: 107593 - DNA, 80 bp, synthetic construct
  misc_feature 1..80: note = Artificially Synthesized Probe
  source 1..80: mol_type = other DNA
aattgattgatttcttaacagacaatcagcaaaattatcagtttttattagagattttagtagagaccgagcttaaacaa

SEQ ID NO: 107594 - DNA, 80 bp, synthetic construct
  misc_feature 1..80: note = Artificially Synthesized Probe
  source 1..80: mol_type = other DNA
aatgtgagactaatctcacatcattgaactgatgaccccagggatcttgacagaaaataacccaacaagctcttgaatag

SEQ ID NO: 107595 - DNA, 80 bp, synthetic construct
  misc_feature 1..80: note = Artificially Synthesized Probe
  source 1..80: mol_type = other DNA
ggaaagttctaacctagtacaatgtgcagtttctttggctacaacactagattctataccaattagcaactatgtgattg

SEQ ID NO: 107596 - DNA, 80 bp, synthetic construct; identical to SEQ ID NO: 37064
  misc_feature 1..80: note = Artificially Synthesized Probe
  source 1..80: mol_type = other DNA

SEQ ID NO: 107597 - DNA, 80 bp, synthetic construct
  misc_feature 1..80: note = Artificially Synthesized Probe
  source 1..80: mol_type = other DNA
ttgatgcattttttatattgcctaaggcagcctgcagcccagagtcttaggcttcttgggctgtccaaactatatatttt

SEQ ID NO: 107598 - DNA, 80 bp, synthetic construct
  misc_feature 1..80: note = Artificially Synthesized Probe
  source 1..80: mol_type = other DNA
agcagaagtgcttgaagatttgtttctctgccttatctttagtaattgtgtttatgttggctatctggctattgcccttg

SEQ ID NO: 107599 - DNA, 80 bp, synthetic construct; identical to SEQ ID NO: 37065
  misc_feature 1..80: note = Artificially Synthesized Probe
  source 1..80: mol_type = other DNA

SEQ ID NO: 107600 - DNA, 80 bp, synthetic construct
  misc_feature 1..80: note = Artificially Synthesized Probe
  source 1..80: mol_type = other DNA
ccatggcaaagaagaatcaataataggccttaatgtcatatagctctgggatcaaatccaatttcttcaacttcgtagct

SEQ ID NO: 107601 - DNA, 80 bp, synthetic construct
  misc_feature 1..80: note = Artificially Synthesized Probe
  source 1..80: mol_type = other DNA
acgcttattagaatccaagtatggaaagccgtgaatgaaagggaaatgaatagtctgaggaagattgcatatcatcaact

SEQ ID NO: 107602 - DNA, 80 bp, synthetic construct
  misc_feature 1..80: note = Artificially Synthesized Probe
  source 1..80: mol_type = other DNA
ttgctaaagagtttttctttcaccttttaatataacgaattaattagcttttattcttctattcattttcttgcagatgc

SEQ ID NO: 107603 - DNA, 80 bp, synthetic construct; identical to SEQ ID NO: 37066
  misc_feature 1..80: note = Artificially Synthesized Probe
  source 1..80: mol_type = other DNA

SEQ ID NO: 107604 - DNA, 80 bp, synthetic construct
  misc_feature 1..80: note = Artificially Synthesized Probe
  source 1..80: mol_type = other DNA
ttgaagtataaatgatcatcattcatttatttaagaatataatcaaaatttgcatacctggaagaaaaccatccaccctc

SEQ ID NO: 107605 - DNA, 80 bp, synthetic construct
  misc_feature 1..80: note = Artificially Synthesized Probe
  source 1..80: mol_type = other DNA
agcatcagacggctgatggcagagttcccgttaagcagtgagagggcgtggagataaaggaaagagaaactgaggaatgg

SEQ ID NO: 107606 - DNA, 80 bp, synthetic construct
  misc_feature 1..80: note = Artificially Synthesized Probe
  source 1..80: mol_type = other DNA
actcacacaagatactgctaaatttgttgacagagcaatttgttaccctggatctagtagatgtgcaaagagcttacaaa

SEQ ID NO: 107607 - DNA, 80 bp, synthetic construct
  misc_feature 1..80: note = Artificially Synthesized Probe
  source 1..80: mol_type = other DNA
aaatatgaagacctttaaaatatttttggctgtgtgaatcttcagccatgttgccataccgccaattagatgcgtaccta

SEQ ID NO: 107608 - DNA, 80 bp, synthetic construct
  misc_feature 1..80: note = Artificially Synthesized Probe
  source 1..80: mol_type = other DNA
catattctgttaaatctaactagatagactttatgaagtagaagtattgtaaatcagctttcccaaaaatgacatggcag

SEQ ID NO: 107609 - DNA, 80 bp, synthetic construct; identical to SEQ ID NO: 37067
  misc_feature 1..80: note = Artificially Synthesized Probe
  source 1..80: mol_type = other DNA

SEQ ID NO: 107610 - DNA, 80 bp, synthetic construct
  misc_feature 1..80: note = Artificially Synthesized Probe
  source 1..80: mol_type = other DNA
tgtaacaaacttgcacatataaccctggaatccaaaataaaagttgaaaactaagttttccagttagacaactttggtaa

SEQ ID NO: 107611 - DNA, 80 bp, synthetic construct
  misc_feature 1..80: note = Artificially Synthesized Probe
  source 1..80: mol_type = other DNA
ttctgtcttgcttgttaggggctggctcaaagcagatacttgaaaacagtttgtctctctttttttttttctcattttct

SEQ ID NO: 107612 - DNA, 80 bp, synthetic construct; identical to SEQ ID NO: 37068
  misc_feature 1..80: note = Artificially Synthesized Probe
  source 1..80: mol_type = other DNA

SEQ ID NO: 107613 - DNA, 80 bp, synthetic construct
  misc_feature 1..80: note = Artificially Synthesized Probe
  source 1..80: mol_type = other DNA
tcccaagtagctgggactataggcacatgccaccgagcccagctgatttttgtatttttagtagagattgggattcacca

SEQ ID NO: 107614 - DNA, 80 bp, synthetic construct
  misc_feature 1..80: note = Artificially Synthesized Probe
  source 1..80: mol_type = other DNA
agacaagaagacattctctgcattttaaattaaagtacaatttgtctgtggtcattcaagagatagtttagagaaaccta

SEQ ID NO: 107615 - DNA, 80 bp, synthetic construct
  misc_feature 1..80: note = Artificially Synthesized Probe
  source 1..80: mol_type = other DNA
ctctacaattggaattctgctccaacctcatcccccaaaccccatgtctatttttctatttcctgctcatattttaaaac

SEQ ID NO: 107616 - DNA, 80 bp, synthetic construct
  misc_feature 1..80: note = Artificially Synthesized Probe
  source 1..80: mol_type = other DNA
gcaattcatgcttgtgtctgcctccacactggattatacatttctaaaagctgattatatctaacttgcctttgaattcc

SEQ ID NO: 107617 - DNA, 80 bp, synthetic construct; identical to SEQ ID NO: 37069
  misc_feature 1..80: note = Artificially Synthesized Probe
  source 1..80: mol_type = other DNA

SEQ ID NO: 107618 - DNA, 80 bp, synthetic construct
  misc_feature 1..80: note = Artificially Synthesized Probe
  source 1..80: mol_type = other DNA
tagactttgctctcatggaagttccaagtccagctaggaagacagacacttatctggtaatcatccaaatataaatttac

SEQ ID NO: 107619 - DNA, 80 bp, synthetic construct
  misc_feature 1..80: note = Artificially Synthesized Probe
  source 1..80: mol_type = other DNA
aaaataacactcaatgttctattttcttttagatgaaaaatatgcaaacatcactgtggattacttatataacaaggaaa

SEQ ID NO: 107620 - DNA, 80 bp, synthetic construct
  misc_feature 1..80: note = Artificially Synthesized Probe
  source 1..80: mol_type = other DNA
tgtgccaccaggtaaatatcaatttatttcttttaataaatttataaaaacagtacacttttgtgtgtggtgttctccag

SEQ ID NO: 107621 - DNA, 80 bp, synthetic construct
  misc_feature 1..80: note = Artificially Synthesized Probe
  source 1..80: mol_type = other DNA
gggagatgtttatgtgcactaaatatagtttatcctgctaagtgattgtctgcaagctttctttattctcctctacttaa

SEQ ID NO: 107622 - DNA, 80 bp, synthetic construct; identical to SEQ ID NO: 37070
  misc_feature 1..80: note = Artificially Synthesized Probe
  source 1..80: mol_type = other DNA

SEQ ID NO: 107623 - DNA, 80 bp, synthetic construct
  misc_feature 1..80: note = Artificially Synthesized Probe
  source 1..80: mol_type = other DNA
tgaaaataaaatccatttaatttattcattttccctaaatattactgagataaattaccaattaaacacagaagatgaca

SEQ ID NO: 107624 - DNA, 80 bp, synthetic construct
  misc_feature 1..80: note = Artificially Synthesized Probe
  source 1..80: mol_type = other DNA
atgagtgttttttaaaatgtgcgaaagctacaattttatcaatatgtttgcttgcatttcattttttaacgtggtataac

SEQ ID NO: 107625 - DNA, 80 bp, synthetic construct
  misc_feature 1..80: note = Artificially Synthesized Probe
  source 1..80: mol_type = other DNA
aggaatgaatgagggcttaggatacacattatgaaatactaatcaagtttatttctgtatcttcttgtcaggggttgaaa

SEQ ID NO: 107626 - DNA, 80 bp, synthetic construct; identical to SEQ ID NO: 37004
  misc_feature 1..80: note = Artificially Synthesized Probe
  source 1..80: mol_type = other DNA

SEQ ID NO: 107627 - DNA, 80 bp, synthetic construct; identical to SEQ ID NO: 37071
  misc_feature 1..80: note = Artificially Synthesized Probe
  source 1..80: mol_type = other DNA

SEQ ID NO: 107628 - DNA, 80 bp, synthetic construct
  misc_feature 1..80: note = Artificially Synthesized Probe
  source 1..80: mol_type = other DNA
cttggcaattgttatacacaggcattgttgaagagatcatgaaagaagggtgttataaggaaatgataatacacaaactc

SEQ ID NO: 107629 - DNA, 80 bp, synthetic construct
  misc_feature 1..80: note = Artificially Synthesized Probe
  source 1..80: mol_type = other DNA
ttgaggcaactaataattgagatagtatttttaaagtgtatttgaatttaatgaggtgaactctcccaccctttgactta

SEQ ID NO: 107630 - DNA, 80 bp, synthetic construct; identical to SEQ ID NO: 37072
  misc_feature 1..80: note = Artificially Synthesized Probe
  source 1..80: mol_type = other DNA

SEQ ID NO: 107631 - DNA, 80 bp, synthetic construct
  misc_feature 1..80: note = Artificially Synthesized Probe
  source 1..80: mol_type = other DNA
actggtcatagtcaaaatgcagaaacataacacagaatttagtcagcatccccagagaaaaataaatgacctcaagctat

SEQ ID NO: 107632 - DNA, 80 bp, synthetic construct
  misc_feature 1..80: note = Artificially Synthesized Probe
  source 1..80: mol_type = other DNA
gcctgtattttcataaaagttgaatgtaaaaattatttttagggttttttattattttggtaatttccacagatgtttca

SEQ ID NO: 107633 - DNA, 80 bp, synthetic construct
  misc_feature 1..80: note = Artificially Synthesized Probe
  source 1..80: mol_type = other DNA
tgagtataagtgtgactcagaaatactctataataaccacaagtttactaacgcaagtaaaattattaaaacagattttg

SEQ ID NO: 107634 - DNA, 80 bp, synthetic construct
  misc_feature 1..80: note = Artificially Synthesized Probe
  source 1..80: mol_type = other DNA
cttcttttgcttatgtttttggtgtcgtatatgaaagtccattgccaagtcatgcagatttatccatatgttttgttcta

SEQ ID NO: 107635 - DNA, 80 bp, synthetic construct; identical to SEQ ID NO: 37073
  misc_feature 1..80: note = Artificially Synthesized Probe
  source 1..80: mol_type = other DNA

SEQ ID NO: 107636 - DNA, 80 bp, synthetic construct
  misc_feature 1..80: note = Artificially Synthesized Probe
  source 1..80: mol_type = other DNA
tggaattctgtatgaattttaggatcaacttttcaatttttataaagaagccatctgggattctttcagggattgcattg

SEQ ID NO: 107637 - DNA, 80 bp, synthetic construct
  misc_feature 1..80: note = Artificially Synthesized Probe
  source 1..80: mol_type = other DNA
aaacttgattccaaatgatatctcttcctttcagacactgtgagcagataaagggatagtttaaggttaagtgatagagg

SEQ ID NO: 107638 - DNA, 80 bp, synthetic construct
  misc_feature 1..80: note = Artificially Synthesized Probe
  source 1..80: mol_type = other DNA
cagagaaaaacttctacagagataacaattattttgcttttcagaaggacgcatgctgtttcttagggacacggctgact

SEQ ID NO: 107639 - DNA, 80 bp, synthetic construct
  misc_feature 1..80: note = Artificially Synthesized Probe
  source 1..80: mol_type = other DNA
tatttctagtttaagtttattcctggttataatgctgttgttttcttaatcacattttcaggtttgttactaatgtacaa

SEQ ID NO: 107640 - DNA, 80 bp, synthetic construct
  misc_feature 1..80: note = Artificially Synthesized Probe
  source 1..80: mol_type = other DNA
tggagtgcagtggcgtgatctcggctcactgcaacctctgactcctgggttcaagcaattctcctgcctcggcctcccaa

SEQ ID NO: 107641 - DNA, 80 bp, synthetic construct; identical to SEQ ID NO: 37074
  misc_feature 1..80: note = Artificially Synthesized Probe
  source 1..80: mol_type = other DNA

SEQ ID NO: 107642 - DNA, 80 bp, synthetic construct
  misc_feature 1..80: note = Artificially Synthesized Probe
  source 1..80: mol_type = other DNA
ttttcagtgggggaaaaatagtcttttcaactaatgatcctggtatctctgtagaaaaaaaatgaacatcagctctcacc

SEQ ID NO: 107643 - DNA, 80 bp, synthetic construct
  misc_feature 1..80: note = Artificially Synthesized Probe
  source 1..80: mol_type = other DNA
ggagtgcataaaaattgaatattcctgctctttggatgaggccactaaggaaataaaaaagcaataaatagtttgtaaaa

SEQ ID NO: 107644 - DNA, 80 bp, synthetic construct
  misc_feature 1..80: note = Artificially Synthesized Probe
  source 1..80: mol_type = other DNA
aatgatgctcagcatcattagttaactgagaaatacaaattaaaacaacactgagatgataatactatacatccattaaa

SEQ ID NO: 107645 - DNA, 80 bp, synthetic construct; identical to SEQ ID NO: 37075
  misc_feature 1..80: note = Artificially Synthesized Probe
  source 1..80: mol_type = other DNA

SEQ ID NO: 107646 - DNA, 80 bp, synthetic construct
  misc_feature 1..80: note = Artificially Synthesized Probe
  source 1..80: mol_type = other DNA
ggagctgagttgactgggaagtaccacagaaggacattttgggatcacagaaattttctttatcttgattgtggtgttgg

SEQ ID NO: 107647 - DNA, 80 bp, synthetic construct
  misc_feature 1..80: note = Artificially Synthesized Probe
  source 1..80: mol_type = other DNA
atgactagttactggaagcaatgacaagtgctactcaatgactgctaaatttattggtgctatgaatgccagatttttag

SEQ ID NO: 107648 - DNA, 80 bp, synthetic construct
  misc_feature 1..80: note = Artificially Synthesized Probe
  source 1..80: mol_type = other DNA
gtttcacagtgccaatctggtgtgacatttactttgttaaaggaatttactctaaaacaaattaaatgagcccagatgca

SEQ ID NO: 107649 - DNA, 80 bp, synthetic construct
  misc_feature 1..80: note = Artificially Synthesized Probe
  source 1..80: mol_type = other DNA
gccttcaatccttactgtgtccatacccaccattaccaggataatctttgtaaaaggcagaacttacctttgtccattcc

SEQ ID NO: 107650 - DNA, 80 bp, synthetic construct; identical to SEQ ID NO: 37076
  misc_feature 1..80: note = Artificially Synthesized Probe
  source 1..80: mol_type = other DNA

SEQ ID NO: 107651 - DNA, 80 bp, synthetic construct
  misc_feature 1..80: note = Artificially Synthesized Probe
  source 1..80: mol_type = other DNA
tcattcaaagctttccagccccagaaatgactaaaatccagaacattctaaatatttgcttgtccttcttggtcttagtt

SEQ ID NO: 107652 - DNA, 80 bp, synthetic construct
  misc_feature 1..80: note = Artificially Synthesized Probe
  source 1..80: mol_type = other DNA
cagctaataatacagacaaaatgttgggtgaataaaaatgaacatgggcccatgtagccgctggggccagtttggtgtaa

SEQ ID NO: 107653 - DNA, 80 bp, synthetic construct; identical to SEQ ID NO: 37077
  misc_feature 1..80: note = Artificially Synthesized Probe
  source 1..80: mol_type = other DNA

SEQ ID NO: 107654 - DNA, 80 bp, synthetic construct
  misc_feature 1..80: note = Artificially Synthesized Probe
  source 1..80: mol_type = other DNA
tgtctttaggtcttaataatcagactactaaagcaaagttaaatatgcatgtagttttcaaattaacattcaaaggccaa

SEQ ID NO: 107655 - DNA, 80 bp, synthetic construct
  misc_feature 1..80: note = Artificially Synthesized Probe
  source 1..80: mol_type = other DNA
cacattgttcattttttttttctcttctctgaatcttctattcactatccctttctgcattcctcaatgtctacactctc

SEQ ID NO: 107656 - DNA, 80 bp, synthetic construct
  misc_feature 1..80: note = Artificially Synthesized Probe
  source 1..80: mol_type = other DNA
tagcatgggtccttcttattgggcaactaaatagtgttacccaaatttaacagctgtccacatagaacacttaaacggga

SEQ ID NO: 107657 - DNA, 80 bp, synthetic construct; identical to SEQ ID NO: 37078
  misc_feature 1..80: note = Artificially Synthesized Probe
  source 1..80: mol_type = other DNA

SEQ ID NO: 107658 - DNA, 80 bp, synthetic construct
  misc_feature 1..80: note = Artificially Synthesized Probe
  source 1..80: mol_type = other DNA
ttaaaagaggagaaaaaatgcaattgacattaatttagttttattggtttagcaggtttttttaattatgtattatttaa

SEQ ID NO: 107659 - DNA, 80 bp, synthetic construct
  misc_feature 1..80: note = Artificially Synthesized Probe
  source 1..80: mol_type = other DNA
agagggagtctccctctgtcgcccaggctggagtgcagtcatgcgatctcggctcactgcaagctccgcctcccaggttc

SEQ ID NO: 107660 - DNA, 80 bp, synthetic construct
  misc_feature 1..80: note = Artificially Synthesized Probe
  source 1..80: mol_type = other DNA
accaatttaattccctgatgattatatatatattacctagtgaaatccttggcagtttttccattttaattttaatttta

SEQ ID NO: 107661 - DNA, 80 bp, synthetic construct
  misc_feature 1..80: note = Artificially Synthesized Probe
  source 1..80: mol_type = other DNA
ggcctcccaaagtgtgtttgtttatttttcctcacatttttagcttaagatattttggagaactgcagttttatctcgtt

SEQ ID NO: 107662 - DNA, 80 bp, synthetic construct
  misc_feature 1..80: note = Artificially Synthesized Probe
  source 1..80: mol_type = other DNA
cctttcaagaccaccatgatgttgctggaaattattttgtgtaatgccttttatttttttaagaaaaaaaaaacagaaca

SEQ ID NO: 107663 - DNA, 80 bp, synthetic construct; identical to SEQ ID NO: 37079
  misc_feature 1..80: note = Artificially Synthesized Probe
  source 1..80: mol_type = other DNA

SEQ ID NO: 107664 - DNA, 80 bp, synthetic construct
  misc_feature 1..80: note = Artificially Synthesized Probe
  source 1..80: mol_type = other DNA
tcttccgtttgtaatattttcttttctcccttacatgtattcagttccacttacctttcaatgaacagctgaattccact

SEQ ID NO: 107665 - DNA, 80 bp, synthetic construct
  misc_feature 1..80: note = Artificially Synthesized Probe
  source 1..80: mol_type = other DNA
cagaaaaggttttctaaaaaagaatcattctgaaacatgcaactcaagacttacagtatacactgggggctgtgttttct

SEQ ID NO: 107666 - DNA, 80 bp, synthetic construct
  misc_feature 1..80: note = Artificially Synthesized Probe
  source 1..80: mol_type = other DNA
tgttcaatacactggctgataattgtaggtacttttgagtatcaaggatgtacttatttttcaatcactcaatagtttgg

SEQ ID NO: 107667 - DNA, 80 bp, synthetic construct; identical to SEQ ID NO: 37080
  misc_feature 1..80: note = Artificially Synthesized Probe
  source 1..80: mol_type = other DNA

SEQ ID NO: 107668 - DNA, 80 bp, synthetic construct
  misc_feature 1..80: note = Artificially Synthesized Probe
  source 1..80: mol_type = other DNA
acctggcacatttgttaacatctagggcttataaacacgtaaaatctaaaagtttaaaaaccgttatcctggattctctc

SEQ ID NO: 107669 - DNA, 80 bp, synthetic construct
  misc_feature 1..80: note = Artificially Synthesized Probe
  source 1..80: mol_type = other DNA
tttgctgttgtctttactatctggaaatattaattgtaatcagaaacctaacaatgtctcataaagcattagcctactaa

SEQ ID NO: 107670 - DNA, 80 bp, synthetic construct; identical to SEQ ID NO: 37081
  misc_feature 1..80: note = Artificially Synthesized Probe
  source 1..80: mol_type = other DNA

SEQ ID NO: 107671 - DNA, 80 bp, synthetic construct
  misc_feature 1..80: note = Artificially Synthesized Probe
  source 1..80: mol_type = other DNA
aaagttctggtcctggagctctatgcttttgttgttttcctgagtttctgtatcacagaaaaagaagacaatttgtttct

SEQ ID NO: 107672 - DNA, 80 bp, synthetic construct; identical to SEQ ID NO: 37005
  misc_feature 1..80: note = Artificially Synthesized Probe
  source 1..80: mol_type = other DNA

SEQ ID NO: 107673 - DNA, 80 bp, synthetic construct
  misc_feature 1..80: note = Artificially Synthesized Probe
  source 1..80: mol_type = other DNA
tctattctctaattctacacagtctccttcagggattgcaataactctcatggcttcatgtacaacctatatgctaatac

SEQ ID NO: 107674 - DNA, 80 bp, synthetic construct
  misc_feature 1..80: note = Artificially Synthesized Probe
  source 1..80: mol_type = other DNA
tattaataacaaatctttcttcattttgatagctccaagccaggtctggaacatgactgtctccatgacatcagataata

SEQ ID NO: 107675 - DNA, 80 bp, synthetic construct
  misc_feature 1..80: note = Artificially Synthesized Probe
  source 1..80: mol_type = other DNA
ggtaaaagtatgctctctacattactatagtaccaactacattataatgattgattcatagtacttaaataactttaaga

SEQ ID NO: 107676 - DNA, 80 bp, synthetic construct; identical to SEQ ID NO: 37082
  misc_feature 1..80: note = Artificially Synthesized Probe
  source 1..80: mol_type = other DNA

SEQ ID NO: 107677 - DNA, 80 bp, synthetic construct
  misc_feature 1..80: note = Artificially Synthesized Probe
  source 1..80: mol_type = other DNA
gtacatgtaacttcataatatacacatttatatgcacttaacacgtattatcaacattctgagtacacagttttcaaaat

SEQ ID NO: 107678 - DNA, 80 bp, synthetic construct
  misc_feature 1..80: note = Artificially Synthesized Probe
  source 1..80: mol_type = other DNA
cattccgataacacacttattggtaaagcaaaatttttgaatgtctttaataatttatgtttcataaattcctaaaaatg

SEQ ID NO: 107679 - DNA, 80 bp, synthetic construct; identical to SEQ ID NO: 37083
  misc_feature 1..80: note = Artificially Synthesized Probe
  source 1..80: mol_type = other DNA

SEQ ID NO: 107680 - DNA, 80 bp, synthetic construct
  misc_feature 1..80: note = Artificially Synthesized Probe
  source 1..80: mol_type = other DNA
ttattcctgttaaatagaaatttccatagttaattttttaatatgatgttgacaaacggcctcatattctttttttgttt

SEQ ID NO: 107681 - DNA, 80 bp, synthetic construct
  misc_feature 1..80: note = Artificially Synthesized Probe
  source 1..80: mol_type = other DNA
ctgggattacaggcacctgccaccacacctggcaaatttttgtattttcagtagagataggttttcaccatgttggccag

SEQ ID NO: 107682 - DNA, 80 bp, synthetic construct
  misc_feature 1..80: note = Artificially Synthesized Probe
  source 1..80: mol_type = other DNA
gtcggttggattttatcgatttttagggcattatgatagatgatgccatagttgtgatgccctggtgtgattagtttaaa

SEQ ID NO: 107683 - DNA, 80 bp, synthetic construct
  misc_feature 1..80: note = Artificially Synthesized Probe
  source 1..80: mol_type = other DNA
agctctttgagctagattcattttgaaattttaagactttcgattatttcttatctagccaatagaaactttagaaacac

SEQ ID NO: 107684 - DNA, 80 bp, synthetic construct; identical to SEQ ID NO: 37084
  misc_feature 1..80: note = Artificially Synthesized Probe
  source 1..80: mol_type = other DNA

SEQ ID NO: 107685 - DNA, 80 bp, synthetic construct
  misc_feature 1..80: note = Artificially Synthesized Probe
  source 1..80: mol_type = other DNA
caggttcaagcgattctcctgcctcagcctcccaagaagctgggattacaggcatgcaccaccatgcctggctaattttt

SEQ ID NO: 107686 - DNA, 80 bp, synthetic construct
  misc_feature 1..80: note = Artificially Synthesized Probe
  source 1..80: mol_type = other DNA
tttgttcctgaaaaatttgtcttcattcctttcatgcagagaaattctttaagactcatttatatcttctttcaatagga

SEQ ID NO: 107687 - DNA, 80 bp, synthetic construct
  misc_feature 1..80: note = Artificially Synthesized Probe
  source 1..80: mol_type = other DNA
tggtttctctataatttctcagaggcacctaggtgttactctttttagccacctccctccacgctcttcccacttcctag

SEQ ID NO: 107688 - DNA, 80 bp, synthetic construct; identical to SEQ ID NO: 37085
  misc_feature 1..80: note = Artificially Synthesized Probe
  source 1..80: mol_type = other DNA

SEQ ID NO: 107689 - DNA, 80 bp, synthetic construct
  misc_feature 1..80: note = Artificially Synthesized Probe
  source 1..80: mol_type = other DNA
ggaaaaaaaaggctatggattgtactttggtaaaattttgactgtaacccatgtctatatcgtttgtcactaatttctga

SEQ ID NO: 107690 - DNA, 80 bp, synthetic construct
  misc_feature 1..80: note = Artificially Synthesized Probe
  source 1..80: mol_type = other DNA
ctaattattagctgataaaagttaattggcttttacaatttctgccttttaggatttgtagaataatttttacagctcta

SEQ ID NO: 107691 - DNA, 80 bp, synthetic construct
  misc_feature 1..80: note = Artificially Synthesized Probe
  source 1..80: mol_type = other DNA
ttcttactgctcttttgctcttttcattttccctgtatatgtaaattgttttcacttcatttgtattacattttatgaga

SEQ ID NO: 107692 - DNA, 80 bp, synthetic construct
  misc_feature 1..80: note = Artificially Synthesized Probe
  source 1..80: mol_type = other DNA
ttatgaatattttgatgtattggattttatttcttcatccagtttcattattttaaataattatttaataattgtttaat

SEQ ID NO: 107693 - DNA, 80 bp, synthetic construct
  misc_feature 1..80: note = Artificially Synthesized Probe
  source 1..80: mol_type = other DNA
gatatataatatatatatatatataaattcacattagcaaactaattattttattttttgttactgaaattcaggcctat

SEQ ID NO: 107694 - DNA, 80 bp, synthetic construct
  misc_feature 1..80: note = Artificially Synthesized Probe
  source 1..80: mol_type = other DNA
atgtaaaatagtgtgtggggaaagtgtcaaatcatcctactttggtctttgtgcatttaggaaaaataaaagcaattagc

SEQ ID NO: 107695 - DNA, 80 bp, synthetic construct
  misc_feature 1..80: note = Artificially Synthesized Probe
  source 1..80: mol_type = other DNA
aataatatctcttccgtaaatgtaatatttttaattgtcagtaaaaccatacatatatatgtaaatatatttaaatacaa

SEQ ID NO: 107696 - DNA, 80 bp, synthetic construct
  misc_feature 1..80: note = Artificially Synthesized Probe
  source 1..80: mol_type = other DNA
tcttcagcatatgtttagcagaagtgggccttagatacaagtctgtcttgatttacttaatggaagctaatataagcact

SEQ ID NO: 107697 - DNA, 80 bp, synthetic construct; identical to SEQ ID NO: 37086
  misc_feature 1..80: note = Artificially Synthesized Probe
  source 1..80: mol_type = other DNA

SEQ ID NO: 107698 - DNA, 80 bp, synthetic construct
  misc_feature 1..80: note = Artificially Synthesized Probe
  source 1..80: mol_type = other DNA
gggctttctctactggttaacattgtaaatagaattatttaagcctgtatgtactttgttgtcagcaacttctaggtctt

SEQ ID NO: 107699 - DNA, 80 bp, synthetic construct
  misc_feature 1..80: note = Artificially Synthesized Probe
  source 1..80: mol_type = other DNA
ccaaactgctttactaagccctctgcaaagttttagttctttctgctcagatttatgaaataaaaactccctgtgttaaa

SEQ ID NO: 107700 - DNA, 80 bp, synthetic construct
  misc_feature 1..80: note = Artificially Synthesized Probe
  source 1..80: mol_type = other DNA
tagcagtcatagactcagctgaacattcacactcacatcttaataggccagatctgaaacatttcacctggaaagacaca

SEQ ID NO: 107701 - DNA, 80 bp, synthetic construct
  misc_feature 1..80: note = Artificially Synthesized Probe
  source 1..80: mol_type = other DNA
tgagatatgagagaatgagaccacatgtgtaggtgtaggagctgcattccaaaaggaatcagtatctcttatactatttc

SEQ ID NO: 107702 - DNA, 80 bp, synthetic construct; identical to SEQ ID NO: 37087
  misc_feature 1..80: note = Artificially Synthesized Probe
  source 1..80: mol_type = other DNA

SEQ ID NO: 107703 - DNA, 80 bp, synthetic construct
  misc_feature 1..80: note = Artificially Synthesized Probe
  source 1..80: mol_type = other DNA
ttgggtttccccggcataatattccaccacctgtactttgacatcattgtcaattgaactcctggggaccctttcttctt

SEQ ID NO: 107704 - DNA, 80 bp, synthetic construct
  misc_feature 1..80: note = Artificially Synthesized Probe
  source 1..80: mol_type = other DNA
ctagtgtaagaaaaataattctaattctcccatacaaaaaaaatttttattctgctctggcacttgttcagtgtatcgac

SEQ ID NO: 107705 - DNA, 80 bp, synthetic construct; identical to SEQ ID NO: 37088
  misc_feature 1..80: note = Artificially Synthesized Probe
  source 1..80: mol_type = other DNA

SEQ ID NO: 107706 - DNA, 80 bp, synthetic construct
  misc_feature 1..80: note = Artificially Synthesized Probe
  source 1..80: mol_type = other DNA
tcaatggtgcaaattataaattgtattcaaatttactgtaaagatcatgtcctctagacagcccctatcccacttgtata

SEQ ID NO: 107707 - DNA, 80 bp, synthetic construct
  misc_feature 1..80: note = Artificially Synthesized Probe
  source 1..80: mol_type = other DNA
caggcaggcaccaccacacctggctaatttttgtatttttagtagagaagggatttcaccatgttggttaggctagtctt

SEQ ID NO: 107708 - DNA, 80 bp, synthetic construct
  misc_feature 1..80: note = Artificially Synthesized Probe
  source 1..80: mol_type = other DNA
tttgtaacctgaagatttatatatctgagaattctttgctccattttcttcccatagtctttggttgagtctattagtca

SEQ ID NO: 107709 - DNA, 80 bp, synthetic construct
  misc_feature 1..80: note = Artificially Synthesized Probe
  source 1..80: mol_type = other DNA
ttagatgttctgtggtccttagaagatcttggtgactgaggagatttcctatgatattgctgatttatttttttctgata

SEQ ID NO: 107710 - DNA, 80 bp, synthetic construct; identical to SEQ ID NO: 37089
  misc_feature 1..80: note = Artificially Synthesized Probe
  source 1..80: mol_type = other DNA

SEQ ID NO: 107711 - DNA, 80 bp, synthetic construct
  misc_feature 1..80: note = Artificially Synthesized Probe
  source 1..80: mol_type = other DNA
cacatttactgcatatgtcactttcaaacctgagactcaggcattctgagtaaatggaatctattcctttgatttaggct

SEQ ID NO: 107712 - DNA, 80 bp, synthetic construct
  misc_feature 1..80: note = Artificially Synthesized Probe
  source 1..80: mol_type = other DNA
ttagaatgcaagctttatctgaagacttggctattttattaagtttgttgagaaaagtctgatgctgcttaatatttttg

SEQ ID NO: 107713 - DNA, 80 bp, synthetic construct
  misc_feature 1..80: note = Artificially Synthesized Probe
  source 1..80: mol_type = other DNA
actagtaatcactggtatggattgacaatttcagtgaaaggaatttcagatagagataagacaaggaacactttgggtca

SEQ ID NO: 107714 - DNA, 80 bp, synthetic construct; identical to SEQ ID NO: 37090
  misc_feature 1..80: note = Artificially Synthesized Probe
  source 1..80: mol_type = other DNA

SEQ ID NO: 107715 - DNA, 80 bp, synthetic construct
  misc_feature 1..80: note = Artificially Synthesized Probe
  source 1..80: mol_type = other DNA
gccatacagaaaatacatcccctctacttccttatcaccctacttatttttttcagagtatatgaaaaaatgcataatta

SEQ ID NO: 107716 - DNA, 80 bp, synthetic construct
  misc_feature 1..80: note = Artificially Synthesized Probe
  source 1..80: mol_type = other DNA
cctcccaagtagttggcattacagacacacaccatgcctggctaattttttgtatatttagtagagatgaggtttcacca

SEQ ID NO: 107717 - DNA, 80 bp, synthetic construct
  misc_feature 1..80: note = Artificially Synthesized Probe
  source 1..80: mol_type = other DNA
tattatctctgccttatattctatagcatttccacggactgtcttcctttttatcttcacagcccttatatcttctcacc

SEQ ID NO: 107718 - DNA, 80 bp, synthetic construct; identical to SEQ ID NO: 37006
  misc_feature 1..80: note = Artificially Synthesized Probe
  source 1..80: mol_type = other DNA

SEQ ID NO: 107719 - DNA, 80 bp, synthetic construct; identical to SEQ ID NO: 37091
  misc_feature 1..80: note = Artificially Synthesized Probe
  source 1..80: mol_type = other DNA

SEQ ID NO: 107720 - DNA, 80 bp, synthetic construct
  misc_feature 1..80: note = Artificially Synthesized Probe
  source 1..80: mol_type = other DNA
cttaagtcaccgcattattttgctgcattttcactacataagaaaaggtgaatatactggagatatttccaacacaccct

SEQ ID NO: 107721 - DNA, 80 bp, synthetic construct
  misc_feature 1..80: note = Artificially Synthesized Probe
  source 1..80: mol_type = other DNA
gtgaagtagaagtctttctcatccccttaagaggctacccacttctgcatataaagttaaactatatgagtttgtctcca

SEQ ID NO: 107722 - DNA, 80 bp, synthetic construct
  misc_feature 1..80: note = Artificially Synthesized Probe
  source 1..80: mol_type = other DNA
cattggttcagaacaatatagccaaaatcacagaattagaaatttattgtatttgaccttattctaaaatgtttattttt

SEQ ID NO: 107723 - DNA, 80 bp, synthetic construct; identical to SEQ ID NO: 37092
  misc_feature 1..80: note = Artificially Synthesized Probe
  source 1..80: mol_type = other DNA

SEQ ID NO: 107724 - DNA, 80 bp, synthetic construct
  misc_feature 1..80: note = Artificially Synthesized Probe
  source 1..80: mol_type = other DNA
ggtttgaattaaacattaatattattttctaaatttactaataatgttgtggacttgtttaataataaccagtgaaaaga

SEQ ID NO: 107725 - DNA, 80 bp, synthetic construct
  misc_feature 1..80: note = Artificially Synthesized Probe
  source 1..80: mol_type = other DNA
tatgtgagtttagcagacaattcttggttgttttctttcctccctcaccctcctctctcctctctgactctgctttctcc

SEQ ID NO: 107726 - DNA, 80 bp, synthetic construct
  misc_feature 1..80: note = Artificially Synthesized Probe
  source 1..80: mol_type = other DNA
gagaatatagaaacttatttttcctattttcacagcaatttagatgaacagcaggagcttgttgaaaggggtaagtatgt

SEQ ID NO: 107727 - DNA, 80 bp, synthetic construct; identical to SEQ ID NO: 37093
  misc_feature 1..80: note = Artificially Synthesized Probe
  source 1..80: mol_type = other DNA

SEQ ID NO: 107728 - DNA, 80 bp, synthetic construct
  misc_feature 1..80: note = Artificially Synthesized Probe
  source 1..80: mol_type = other DNA
cttggacttttgttgatacagtgataaaacttaaattcctttactcactcagcacctgtgaagttcccagtgtacgccaa

SEQ ID NO: 107729 - DNA, 80 bp, synthetic construct
  misc_feature 1..80: note = Artificially Synthesized Probe
  source 1..80: mol_type = other DNA
ttttgatcacatgctgtgtatgaaatttcatgttcaattttttcccaagtaaaccttgattattctagacaatttgaaaa

SEQ ID NO: 107730 - DNA, 80 bp, synthetic construct
  misc_feature 1..80: note = Artificially Synthesized Probe
  source 1..80: mol_type = other DNA
cctagtagttgaatgtgtatagttctatagatatatggaagatagaaaactgtgtgcaagggcagaaatctggtctgtta

SEQ ID NO: 107731 - DNA, 80 bp, synthetic construct
  misc_feature 1..80: note = Artificially Synthesized Probe
  source 1..80: mol_type = other DNA
cccactaaagacacatttatggattggacaaagaacagcaatttgacttgggagaagaaaacacatttgtttatcttttt

SEQ ID NO: 107732 - DNA, 80 bp, synthetic construct
  misc_feature 1..80: note = Artificially Synthesized Probe
  source 1..80: mol_type = other DNA
taagacaggaataatttcagaactcctttgtctgtgttaatctgtgttggaagtgtttccctctggtaatagcaggtacc

SEQ ID NO: 107733 - DNA, 80 bp, synthetic construct; identical to SEQ ID NO: 37094
  misc_feature 1..80: note = Artificially Synthesized Probe
  source 1..80: mol_type = other DNA

SEQ ID NO: 107734 - DNA, 80 bp, synthetic construct
  misc_feature 1..80: note = Artificially Synthesized Probe
  source 1..80: mol_type = other DNA
cttggaaagtgtcaatgaaatattttatctcaaaattggtaccgattgcaccttggaacgcagtagaatttactcactca

SEQ ID NO: 107735 - DNA, 80 bp, synthetic construct
  misc_feature 1..80: note = Artificially Synthesized Probe
  source 1..80: mol_type = other DNA
cttctttctttatctgataaactggtaaaattaatatgattactgaaagaaacactatcagtagtacatggaagagtagg

SEQ ID NO: 107736 - DNA, 80 bp, synthetic construct
  misc_feature 1..80: note = Artificially Synthesized Probe
  source 1..80: mol_type = other DNA
ttgaagcataacaaattaatacaacttgtttcaccatttagtgtaaacagatgatcaaattaagctgagtcatgggtata

SEQ ID NO: 107737 - DNA, 80 bp, synthetic construct; identical to SEQ ID NO: 37095
  misc_feature 1..80: note = Artificially Synthesized Probe
  source 1..80: mol_type = other DNA

SEQ ID NO: 107738 - DNA, 80 bp, synthetic construct
  misc_feature 1..80: note = Artificially Synthesized Probe
  source 1..80: mol_type = other DNA
atgtaactagtattgaatctttaatatgtttccagatgatgaaaaacaactgatgaatgtggagccaatccatgcagata

SEQ ID NO: 107739 - DNA, 80 bp, synthetic construct
  misc_feature 1..80: note = Artificially Synthesized Probe
  source 1..80: mol_type = other DNA
cacttgatattgcaacataagcaaagtagatattattagcagatctctatgaaccagaagagagactcatagaggttgac

SEQ ID NO: 107740 - DNA, 80 bp, synthetic construct
  misc_feature 1..80: note = Artificially Synthesized Probe
  source 1..80: mol_type = other DNA
tgtttttaaatgaatttgatagtgacacaacaactaatcctaaatttgtccccactcaagagatttgttctgaaagttgt

SEQ ID NO: 107741 - DNA, 80 bp, synthetic construct
  misc_feature 1..80: note = Artificially Synthesized Probe
  source 1..80: mol_type = other DNA
taatttgggctgaggacacctatcccatgaagcccgtattttctatcagtggcttcttggagatggtgttttaaatcttc

SEQ ID NO: 107742 - DNA, 80 bp, synthetic construct; identical to SEQ ID NO: 37096
  misc_feature 1..80: note = Artificially Synthesized Probe
  source 1..80: mol_type = other DNA

SEQ ID NO: 107743 - DNA, 80 bp, synthetic construct
  misc_feature 1..80: note = Artificially Synthesized Probe
  source 1..80: mol_type = other DNA
tttcttttccttaaacagatgattataaccgtgttgaactctctgagataaacggagatgcagggtcaaactacataaat

SEQ ID NO: 107744 - DNA, 80 bp, synthetic construct
  misc_feature 1..80: note = Artificially Synthesized Probe
  source 1..80: mol_type = other DNA
aaggatagttatttattatgtgactattggtattaggtataacatagaattttcctctacaaacaaaattatattaagaa

SEQ ID NO: 107745 - DNA, 80 bp, synthetic construct
  misc_feature 1..80: note = Artificially Synthesized Probe
  source 1..80: mol_type = other DNA
attggtaaatatttgagttgaaattcaaccagagtctgactgactccaaaatgttatgctttaatttcatcacactaaat

SEQ ID NO: 107746 - DNA, 80 bp, synthetic construct; identical to SEQ ID NO: 37097
  misc_feature 1..80: note = Artificially Synthesized Probe
  source 1..80: mol_type = other DNA

SEQ ID NO: 107747 - DNA, 80 bp, synthetic construct
  misc_feature 1..80: note = Artificially Synthesized Probe
  source 1..80: mol_type = other DNA
gtatgcgcaataatgtgtcatgagatagaagtttcaggaagttacttaaattaatgttgaattcttgtgacccatgtttc

SEQ ID NO: 107748 - DNA, 80 bp, synthetic construct
  misc_feature 1..80: note = Artificially Synthesized Probe
  source 1..80: mol_type = other DNA
ctcctttatcttggtaacaggagcagagaaagcagacatagtaggtaatgaaatgaaagttattatatctcttatctgaa

SEQ ID NO: 107749 - DNA, 80 bp, synthetic construct; identical to SEQ ID NO: 37098
  misc_feature 1..80: note = Artificially Synthesized Probe
  source 1..80: mol_type = other DNA

SEQ ID NO: 107750 - DNA, 80 bp, synthetic construct
  misc_feature 1..80: note = Artificially Synthesized Probe
  source 1..80: mol_type = other DNA
ctttgaaactgcccagagaaattcacaatcacaaaatgatggatctgaagcaattcctctaactcacaatttttcctgtt

SEQ ID NO: 107751 - DNA, 80 bp, synthetic construct
  misc_feature 1..80: note = Artificially Synthesized Probe
  source 1..80: mol_type = other DNA
tcagcttttatttgtttacctcctaggtcccagggatgaaactgttgatgatttctggaggatgatttgggaacagaaag

SEQ ID NO: 107752 - DNA, 80 bp, synthetic construct
  misc_feature 1..80: note = Artificially Synthesized Probe
  source 1..80: mol_type = other DNA
gttaggaaaacaaggtgttgaatggcattttgaaaagccacatgtatctgcctgatgactaaaacagagagttctctatt

SEQ ID NO: 107753 - DNA, 80 bp, synthetic construct
  misc_feature 1..80: note = Artificially Synthesized Probe
  source 1..80: mol_type = other DNA
gacttcctccaggtccctgttacaaccagattttctttgcagacttttaaattatggaagttctggtgctgccactgagt

SEQ ID NO: 107754 - DNA, 80 bp, synthetic construct; identical to SEQ ID NO: 36997
  misc_feature 1..80: note = Artificially Synthesized Probe
  source 1..80: mol_type = other DNA

SEQ ID NO: 107755 - DNA, 80 bp, synthetic construct; identical to SEQ ID NO: 37099
  misc_feature 1..80: note = Artificially Synthesized Probe
  source 1..80: mol_type = other DNA

SEQ ID NO: 107756 - DNA, 80 bp, synthetic construct
  misc_feature 1..80: note = Artificially Synthesized Probe
  source 1..80: mol_type = other DNA
aagatcatcctgctaaaaagtatgaaggaaattcttcaggacacattagtgggaaatagaatatatttcaagcatcacag

SEQ ID NO: 107757 - DNA, 80 bp, synthetic construct
  misc_feature 1..80: note = Artificially Synthesized Probe
  source 1..80: mol_type = other DNA
tactggccgtcaatggaagagggcactcgggcttttggagatgttgttgtaaagatcaaccagcacaaaagatgtccaga

SEQ ID NO: 107758 - DNA, 80 bp, synthetic construct
  misc_feature 1..80: note = Artificially Synthesized Probe
  source 1..80: mol_type = other DNA
tggttagaacaatgacaaaaatcaatagggtcaaatttaagtcactggtcaagacgtttttgtccaactcaaatcgaaag

SEQ ID NO: 107759 - DNA, 80 bp, synthetic construct
  misc_feature 1..80: note = Artificially Synthesized Probe
  source 1..80: mol_type = other DNA
taagagaaatgacagcattagagaacactgtaagaagtataaagttctaactatgcagcagagatagaatgtttagttca

SEQ ID NO: 107760 - DNA, 80 bp, synthetic construct; identical to SEQ ID NO: 37100
  misc_feature 1..80: note = Artificially Synthesized Probe
  source 1..80: mol_type = other DNA

SEQ ID NO: 107761 - DNA, 80 bp, synthetic construct
  misc_feature 1..80: note = Artificially Synthesized Probe
  source 1..80: mol_type = other DNA
catggtaggtgtgtatattcatggggtaaatgagatgttttgattgaggcatacaatgcataacaatcacatcagggtaa

SEQ ID NO: 107762 - DNA, 80 bp, synthetic construct
  misc_feature 1..80: note = Artificially Synthesized Probe
  source 1..80: mol_type = other DNA
tttgtacacattaaccatcaccatttccacccctgccatacccttccaatcctttggtaaccatcattctactctgtata

SEQ ID NO: 107763 - DNA, 80 bp, synthetic construct
  misc_feature 1..80: note = Artificially Synthesized Probe
  source 1..80: mol_type = other DNA
tacttcattgtatatatgtactacattttgtttatccattcatcagtcaactgatgcttaggttgtttccaaaagttgac

SEQ ID NO: 107764 - DNA, 80 bp, synthetic construct; identical to SEQ ID NO: 37101
  misc_feature 1..80: note = Artificially Synthesized Probe
  source 1..80: mol_type = other DNA

SEQ ID NO: 107765 - DNA, 80 bp, synthetic construct
  misc_feature 1..80: note = Artificially Synthesized Probe
  source 1..80: mol_type = other DNA
caaacaaattcttacttttttttggtagtctttctaattttccaaggtcaccagctaatagcaaatgagagttgtagggg

SEQ ID NO: 107766 - DNA, 80 bp, synthetic construct
  misc_feature 1..80: note = Artificially Synthesized Probe
  source 1..80: mol_type = other DNA
tttaaaaatcagattattagatttttcattataaagttctgtaagcttcttatgtattctggatattaatgctttgtcag

SEQ ID NO: 107767 - DNA, 80 bp, synthetic construct
  misc_feature 1..80: note = Artificially Synthesized Probe
  source 1..80: mol_type = other DNA
gcacaaaccaatgccctggagagtttccccaacattttcttttagtagtttcatagattaaggtcttagatctaagtcta

SEQ ID NO: 107768 - DNA, 80 bp, synthetic construct; identical to SEQ ID NO: 37102
  misc_feature 1..80: note = Artificially Synthesized Probe
  source 1..80: mol_type = other DNA

SEQ ID NO: 107769 - DNA, 80 bp, synthetic construct
  misc_feature 1..80: note = Artificially Synthesized Probe
  source 1..80: mol_type = other DNA
tattggtattttgatagatattgcattgaatctgtagatagttttgagtagtatggacattttaataatactgagtcttt

SEQ ID NO: 107770 - DNA, 80 bp, synthetic construct
  misc_feature 1..80: note = Artificially Synthesized Probe
  source 1..80: mol_type = other DNA
tgatttctttttcagattgttcaatgttagcatataaaaacactgcttgttttaatgttgattttatatctcatgacctt

SEQ ID NO: 107771 - DNA, 80 bp, synthetic construct
  misc_feature 1..80: note = Artificially Synthesized Probe
  source 1..80: mol_type = other DNA
tccagttgaacaacagtggtgaaagtgggcatccttgtctttatccagatcttagaagaaaggctttcagttttttctca

SEQ ID NO: 107772 - DNA, 80 bp, synthetic construct
  misc_feature 1..80: note = Artificially Synthesized Probe
  source 1..80: mol_type = other DNA
ttcattctgttgatataatgtatcacaataattgatttgtgtatgttgaaccatccttgcatcccttggataaatgccac

SEQ ID NO: 107773 - DNA, 80 bp, synthetic construct
  misc_feature 1..80: note = Artificially Synthesized Probe
  source 1..80: mol_type = other DNA
aatcagaagtttaatatgacacaattaaatatatttgtatatctcacaccggaggtttctcttcaaacataaggagttag

SEQ ID NO: 107774 - DNA, 80 bp, synthetic construct
  misc_feature 1..80: note = Artificially Synthesized Probe
  source 1..80: mol_type = other DNA
agcctgcaacgaccacactggtaacaaacaagtaactgtcccattttccctgaactatgtcttcaatttcatctaaaaat

SEQ ID NO: 107775 - DNA, 80 bp, synthetic construct
  misc_feature 1..80: note = Artificially Synthesized Probe
  source 1..80: mol_type = other DNA
atattggctgtgtgcatttcattaaataggtttacccccaaaactgtccacttgccttttaaacatccttagggttgctg

SEQ ID NO: 107776 - DNA, 80 bp, synthetic construct
  misc_feature 1..80: note = Artificially Synthesized Probe
  source 1..80: mol_type = other DNA
ggtcctggtgtgggttcagccataacctccaggacagatgagagcaggcacttctaaagggtggcccttccgagagggaa

SEQ ID NO: 107777 - DNA, 80 bp, synthetic construct
  misc_feature 1..80: note = Artificially Synthesized Probe
  source 1..80: mol_type = other DNA
ggagctggtgacggctggggacatactgtgagcctggagctggtggctgctggagacatactgtgagcctggagctggtg

SEQ ID NO: 107778 - DNA, 80 bp, synthetic construct
  misc_feature 1..80: note = Artificially Synthesized Probe
  source 1..80: mol_type = other DNA
ggggacatacggtgagcctggagctgggactggctgggacaggctggtgctgtgtggtctggtcagtgtccccacgtggc

SEQ ID NO: 107779 - DNA, 80 bp, synthetic construct
  misc_feature 1..80: note = Artificially Synthesized Probe
  source 1..80: mol_type = other DNA
cctttttactccaagcgtattagggtctcctgcccagaagtcactgtcaatgcccttaacaaaaagggctgtcagcccct

SEQ ID NO: 107780 - DNA, 80 bp, synthetic construct
  misc_feature 1..80: note = Artificially Synthesized Probe
  source 1..80: mol_type = other DNA
catgcgccaccaaatctagctaagttttgtatttctggtagagatggggtttcgcctgttggccaggctggtcttgaact

SEQ ID NO: 107781 - DNA, 80 bp, synthetic construct
  misc_feature 1..80: note = Artificially Synthesized Probe
  source 1..80: mol_type = other DNA
cccacctgtgctccatgggaggaaagcacatggccaagggggggtttctttggaggtggctctgctcccacccatgcccc

SEQ ID NO: 107782 - DNA, 80 bp, synthetic construct
  misc_feature 1..80: note = Artificially Synthesized Probe
  source 1..80: mol_type = other DNA
tgcatggaggaagctctaacacctcccaccgccaaggtctcttctgcccttaaaattccatgagcttttccttcagtgtg

SEQ ID NO: 107783 - DNA, 80 bp, synthetic construct
  misc_feature 1..80: note = Artificially Synthesized Probe
  source 1..80: mol_type = other DNA
cacaagttaccttctttaatccctactaccacctgcaggataggaatccacttttttgcagacgggcagctgaggctcgg

SEQ ID NO: 107784 - DNA, 80 bp, synthetic construct
  misc_feature 1..80: note = Artificially Synthesized Probe
  source 1..80: mol_type = other DNA
aaacactagtgtgcctggcacctcataaatcggtgcttctcatgtttgtcttgaagacatagggtaaattttttgctgta

SEQ ID NO: 107785 - DNA, 80 bp, synthetic construct
  misc_feature 1..80: note = Artificially Synthesized Probe
  source 1..80: mol_type = other DNA
gtcctgagccctacaaacctaacttgttgttttctaaaattaaggccaaaatgccagcaaagcaagcattattccacccg

SEQ ID NO: 107786 - DNA, 80 bp, synthetic construct
  misc_feature 1..80: note = Artificially Synthesized Probe
  source 1..80: mol_type = other DNA
agtgaatattcagattccacagccatctggctgtcatttcacaagctctttgcaaaatctggctataattctaccaaggt

SEQ ID NO: 107787 - DNA, 80 bp, synthetic construct
  misc_feature 1..80: note = Artificially Synthesized Probe
  source 1..80: mol_type = other DNA
gactgcagagcaccacgcatgcgcatcacacctgcttccaattcagggagctcagaactggctagcatgaggcttgttaa

SEQ ID NO: 107788 - DNA, 80 bp, synthetic construct
  misc_feature 1..80: note = Artificially Synthesized Probe
  source 1..80: mol_type = other DNA
aataagatccctaaggaagaagagacaatgtgactatctggcttgagttacagtctttaacaaaataaaaccatgagttt

SEQ ID NO: 107789 - DNA, 80 bp, synthetic construct
  misc_feature 1..80: note = Artificially Synthesized Probe
  source 1..80: mol_type = other DNA
ctgcctcagcctcctgagtacatgggattacaggcgcacgccaccatgcccagctaatttttttgtatttttagtagagt

SEQ ID NO: 107790 - DNA, 80 bp, synthetic construct
  misc_feature 1..80: note = Artificially Synthesized Probe
  source 1..80: mol_type = other DNA
aaattcttcagtgcatcagttatgggaaagaaggaaccaaagcgcagaagggatgtgcccagcgccatttttaaatgtag

SEQ ID NO: 107791 - DNA, 80 bp, synthetic construct
  misc_feature 1..80: note = Artificially Synthesized Probe
  source 1..80: mol_type = other DNA
cactgttttcctttgtgtaatttgcatggcatgtgtgtttccagtgatatgaagaaggagataacctgaagtgtcttcct

SEQ ID NO: 107792 - DNA, 80 bp, synthetic construct
  misc_feature 1..80: note = Artificially Synthesized Probe
  source 1..80: mol_type = other DNA
ctacgacattgatgtgggtcaacagcaagtccatgtccctgggttctgtttgcagaggaggattcctttcccatctgtca

SEQ ID NO: 107793 - DNA, 80 bp, synthetic construct
  misc_feature 1..80: note = Artificially Synthesized Probe
  source 1..80: mol_type = other DNA
ccccaaagacagggaatgtcatgcgccgggttgggtcagaataaggaaaggttagaaactcttattttcaaaatagtcta

SEQ ID NO: 107794 - DNA, 80 bp, synthetic construct
  misc_feature 1..80: note = Artificially Synthesized Probe
  source 1..80: mol_type = other DNA
agctcaccttagtgggttcaatacgccagacacacctgcctccaaccctccccaccccgaggctctgaaggtgggtggga

SEQ ID NO: 107795 - DNA, 80 bp, synthetic construct
  misc_feature 1..80: note = Artificially Synthesized Probe
  source 1..80: mol_type = other DNA
cactttgttttccttcttgtggtaactaaaaacactctggcatgtaattcaaaaacagcattgagggtaactgcataatg

SEQ ID NO: 107796 - DNA, 80 bp, synthetic construct
  misc_feature 1..80: note = Artificially Synthesized Probe
  source 1..80: mol_type = other DNA
aaattggctaattccatgtcaaggtttcatcagacatttcatctaccctctaaaattagtttgtcaaaatacacacacag

SEQ ID NO: 107797 - DNA, 80 bp, synthetic construct
  misc_feature 1..80: note = Artificially Synthesized Probe
  source 1..80: mol_type = other DNA
ggtggactgagccactgggcattcctccctccaaagggtccaaaaaccagggcagccccaactggccgggaaagctcctc

SEQ ID NO: 107798 - DNA, 80 bp, synthetic construct
  misc_feature 1..80: note = Artificially Synthesized Probe
  source 1..80: mol_type = other DNA
ccaaaacagactatcattacccggtgtgactgggccaatgaacccaaaaacaggaacggcaacgttgactctaaagcaag

SEQ ID NO: 107799 - DNA, 80 bp, synthetic construct
  misc_feature 1..80: note = Artificially Synthesized Probe
  source 1..80: mol_type = other DNA
aggtcaggagtttgagaccagcctggccaacatagtgaaaccctgtctctaataaaaatacaaaaaaattagcctggtgt

SEQ ID NO: 107800 - DNA, 80 bp, synthetic construct
  misc_feature 1..80: note = Artificially Synthesized Probe
  source 1..80: mol_type = other DNA
tttttttgcaattttttaaagctcataagctatcactgtgtgagtgtattttacgtgtggtccaagataattcttattcc

SEQ ID NO: 107801 - DNA, 80 bp, synthetic construct
  misc_feature 1..80: note = Artificially Synthesized Probe
  source 1..80: mol_type = other DNA
ctcacgtgatcacacccactctttcttcttgtggaaagccccacgtggagcagaggggcatctggagctcctgcccagaa

SEQ ID NO: 107802 - DNA, 80 bp, synthetic construct
  misc_feature 1..80: note = Artificially Synthesized Probe
  source 1..80: mol_type = other DNA
cctacatctaaaatcagggtcttggactttgctgcccatgtggggccagcagggaaaaccctgccttgctggaggtagag

SEQ ID NO: 107803 - DNA, 80 bp, synthetic construct
  misc_feature 1..80: note = Artificially Synthesized Probe
  source 1..80: mol_type = other DNA
tagctggctttcactgattttttcttttttgctaaaaggaactagaagatataaaacctcagagcctctatccacccagt

SEQ ID NO: 107804 - DNA, 80 bp, synthetic construct
  misc_feature 1..80: note = Artificially Synthesized Probe
  source 1..80: mol_type = other DNA
gctgcaaatacctgtttcttattcctgttaccattttctcgtattctcaagtagaactgtccctacatttcctttccttt

SEQ ID NO: 107805 - DNA, 80 bp, synthetic construct
  misc_feature 1..80: note = Artificially Synthesized Probe
  source 1..80: mol_type = other DNA
aaatcacagagcaagtgaccagcacattctctgaggctctggagttgctgtcacccccagcaatcctgtccctgtttcct

SEQ ID NO: 107806 - DNA, 80 bp, synthetic construct
  misc_feature 1..80: note = Artificially Synthesized Probe
  source 1..80: mol_type = other DNA
cggtggcacgcgcctgtagtcccagctactcaggaggctgaagcaagaggatcgcttgaacctgggagacagaggttgca

SEQ ID NO: 107807 - DNA, 80 bp, synthetic construct
  misc_feature 1..80: note = Artificially Synthesized Probe
  source 1..80: mol_type = other DNA
aaacacgtgagccaggtgaagggtcatgcagaaaagcaggactgggtgtgagcatgaggacaggaagggggaaggggctg

SEQ ID NO: 107808 - DNA, 80 bp, synthetic construct
  misc_feature 1..80: note = Artificially Synthesized Probe
  source 1..80: mol_type = other DNA
ccagctttgcactgtcaaagggaatccctcccaggggaggacggactgagctctcagagtcctttgggcaccacagcccg

SEQ ID NO: 107809 - DNA, 80 bp, synthetic construct
  misc_feature 1..80: note = Artificially Synthesized Probe
  source 1..80: mol_type = other DNA
cctgttgccctcccaggccacaccttgacgtgggaggccacgggacagacgccacctctcccgagtagcaggtgggtgac

SEQ ID NO: 107810 - DNA, 80 bp, synthetic construct
  misc_feature 1..80: note = Artificially Synthesized Probe
  source 1..80: mol_type = other DNA
acagggcatgggcactccagaggggctcagcttatggttaacgctggggctgccttcatctcacgcatgctgggcagcct

SEQ ID NO: 107811 - DNA, 80 bp, synthetic construct
  misc_feature 1..80: note = Artificially Synthesized Probe
  source 1..80: mol_type = other DNA
ccacaccaccgatgtcaggggttctgtgcaggcaaagtggccttctctttgtattgattttgggggctttgtttttttta

SEQ ID NO: 107812 - DNA, 80 bp, synthetic construct
  misc_feature 1..80: note = Artificially Synthesized Probe
  source 1..80: mol_type = other DNA
ttgaaacatgggcctcatccagaattgaggctcaaacacatgagtgatctgggtgaggaattgacatgaagatagtctca

SEQ ID NO: 107813 - DNA, 80 bp, synthetic construct
  misc_feature 1..80: note = Artificially Synthesized Probe
  source 1..80: mol_type = other DNA
ccatctgtctctcaaactcctttcattttgcaaaattgaacttcattccctgtaaatgctgactccccagcccctggcac

SEQ ID NO: 107814 - DNA, 80 bp, synthetic construct
  misc_feature 1..80: note = Artificially Synthesized Probe
  source 1..80: mol_type = other DNA
attccattccatataatgttctcaaggcgcacccatgctgtcgcagaggtcagggctctttgcgtctatttttaaataaa

SEQ ID NO: 107815 - DNA, 80 bp, synthetic construct
  misc_feature 1..80: note = Artificially Synthesized Probe
  source 1..80: mol_type = other DNA
ctgattcatgctagaaacaagggactttccatgcagggtccaggaatgcctcatcagccccccaccgtaccccctgtcca

SEQ ID NO: 107816 - DNA, 80 bp, synthetic construct
  misc_feature 1..80: note = Artificially Synthesized Probe
  source 1..80: mol_type = other DNA
ggcacgaccttgcccatgggggtcacccactccgacccacaggggtggccgaggacctggatcccggggctgtgccatcc

SEQ ID NO: 107817 - DNA, 80 bp, synthetic construct
  misc_feature 1..80: note = Artificially Synthesized Probe
  source 1..80: mol_type = other DNA
agatcaggatcctgtcacaatgtaaggtcatctgtgcctagtggatcagacgctgtgaagaggagtgtgtgcaaacctca

SEQ ID NO: 107818 - DNA, 80 bp, synthetic construct
  misc_feature 1..80: note = Artificially Synthesized Probe
  source 1..80: mol_type = other DNA
aaggcattggtcaaactgagtgccttccagcatcttccccagagagcaccacccacaagggtgcacatgggctctgccat

SEQ ID NO: 107819 - DNA, 80 bp, synthetic construct
  misc_feature 1..80: note = Artificially Synthesized Probe
  source 1..80: mol_type = other DNA
tgtaacatatgcctgtgtgccttttatgataaaggtgttttcttccttttcatcagatacactggatgctccaagaacaa

SEQ ID NO: 107820 - DNA, 80 bp, synthetic construct
  misc_feature 1..80: note = Artificially Synthesized Probe
  source 1..80: mol_type = other DNA
caactccacaaaggagaggaaccgcagtccgtgccaacagcctttcccaggaaagaccttccgggacctgccacccatct

SEQ ID NO: 107821 - DNA, 80 bp, synthetic construct
  misc_feature 1..80: note = Artificially Synthesized Probe
  source 1..80: mol_type = other DNA
tccaaggcgagcacaagcgggaaagaatggggctggaatgttgggagagaagggagtgtgtgatcagcattgtctgcata

SEQ ID NO: 107822 - DNA, 80 bp, synthetic construct
  misc_feature 1..80: note = Artificially Synthesized Probe
  source 1..80: mol_type = other DNA
ccctgcctcctctggcgagctttgtgttcaccgggcggattctggcagacaccggtcccccagttgttgcagcgagactc

SEQ ID NO: 107823 - DNA, 80 bp, synthetic construct
  misc_feature 1..80: note = Artificially Synthesized Probe
  source 1..80: mol_type = other DNA
acatcaaagagcaggcttagacccatgagaccttaataaacgtgttagaaaccatcggataatgcattgatcatgattga

SEQ ID NO: 107824 - DNA, 80 bp, synthetic construct
  misc_feature 1..80: note = Artificially Synthesized Probe
  source 1..80: mol_type = other DNA
ttcgcctgagcgctcgctagggtggaggaagcagctgtgggcctgcagccagggctcgctccaaacgctggaagctccgc

SEQ ID NO: 107825 - DNA, 80 bp, synthetic construct
  misc_feature 1..80: note = Artificially Synthesized Probe
  source 1..80: mol_type = other DNA
ttttcctcttcctctttcttcctcccaagagcccaattaagaacttccagagtttagaaatgacttgggttgattatgtg

SEQ ID NO: 107826 - DNA, 80 bp, synthetic construct
  misc_feature 1..80: note = Artificially Synthesized Probe
  source 1..80: mol_type = other DNA
acgagagcacacatcctcagagccccccagcctcgttctgaaaatgaaagacggagatagcctgtgctctgagggctgcg

SEQ ID NO: 107827 - DNA, 80 bp, synthetic construct
  misc_feature 1..80: note = Artificially Synthesized Probe
  source 1..80: mol_type = other DNA
tctcctgaggctgccactgggaaagaacaaacttgggaatccaagatggagggcagcaggacgctcccacatcccccact

SEQ ID NO: 107828 - DNA, 80 bp, synthetic construct
  misc_feature 1..80: note = Artificially Synthesized Probe
  source 1..80: mol_type = other DNA
cccacaggcccactcatggctggcgtggccacccacggagtctaactgcaatgactgagaacacaggcctgcccgaggct

SEQ ID NO: 107829 - DNA, 80 bp, synthetic construct
  misc_feature 1..80: note = Artificially Synthesized Probe
  source 1..80: mol_type = other DNA
gttttcttttcaatgtctaatctatttctctcataggcgtcgttaatgggctgggacctgacttcctactaagtgtaatt

SEQ ID NO: 107830 - DNA, 80 bp, synthetic construct
  misc_feature 1..80: note = Artificially Synthesized Probe
  source 1..80: mol_type = other DNA
ccttcacccctccacggacatctggccctcatcccatccatgagtgacccacacagcacatttccagaactggcatttgt

SEQ ID NO: 107831 - DNA, 80 bp, synthetic construct
  misc_feature 1..80: note = Artificially Synthesized Probe
  source 1..80: mol_type = other DNA
gtccaagatcagggtgctggcacagctgggctctggtgagggccctattcccactgcggatggtcactgccttgctgtgt

SEQ ID NO: 107832 - DNA, 80 bp, synthetic construct
  misc_feature 1..80: note = Artificially Synthesized Probe
  source 1..80: mol_type = other DNA
tgggggccccagctcctaacccatcccatcaggggtggggttctcatgcatgcacttggggggccctgcctaacccattg

SEQ ID NO: 107833 - DNA, 80 bp, synthetic construct
  misc_feature 1..80: note = Artificially Synthesized Probe
  source 1..80: mol_type = other DNA
taatccattacattgggggtagagctctaacacatgcatttggggggccccagctcctaacccattgcatcagggtgggg

SEQ ID NO: 107834 - DNA, 80 bp, synthetic construct
  misc_feature 1..80: note = Artificially Synthesized Probe
  source 1..80: mol_type = other DNA
gggggtagagctctaacacatgcatttggggggccccagctcctaacccattgcatcagggtggggctctaacacatgca

SEQ ID NO: 107835 - DNA, 80 bp, synthetic construct
  misc_feature 1..80: note = Artificially Synthesized Probe
  source 1..80: mol_type = other DNA
ttggaagacagatctgaggaaattccctggaatgcaggacagaaagatagagaaaataggaaagggatttaagggacatg

SEQ ID NO: 107836 - DNA, 80 bp, synthetic construct
  misc_feature 1..80: note = Artificially Synthesized Probe
  source 1..80: mol_type = other DNA
aacacatgcatttggggggccccagctcctaacccattgcatcagggtggggctctaacacatgcatttggggggcccca

SEQ ID NO: 107837 - DNA, 80 bp, synthetic construct
  misc_feature 1..80: note = Artificially Synthesized Probe
  source 1..80: mol_type = other DNA
tttggggggccccagctcctaagtcagcctgagaagatcagtgagaaaggtgaccatacattctggcaatacatactgtt

SEQ ID NO: 107838 - DNA, 80 bp, synthetic construct
  misc_feature 1..80: note = Artificially Synthesized Probe
  source 1..80: mol_type = other DNA
tctggttcaagcgatttttctgcctcagcctcctgagctaggattacaggcacccaccaccatgccctgctaatttttct

SEQ ID NO: 107839 - DNA, 80 bp, synthetic construct
  misc_feature 1..80: note = Artificially Synthesized Probe
  source 1..80: mol_type = other DNA
atggcccgatactttcataatcaaaaaagtgtctacatacactgacaacaaccagtaaagaccacacgttttgtgcactt

SEQ ID NO: 107840 - DNA, 80 bp, synthetic construct
  misc_feature 1..80: note = Artificially Synthesized Probe
  source 1..80: mol_type = other DNA
cttgagagtctacaccacccttcctgtctacacctgcaggtttgggagcctaggctaccttccctgtatatttccacaga

SEQ ID NO: 107841 - DNA, 80 bp, synthetic construct
  misc_feature 1..80: note = Artificially Synthesized Probe
  source 1..80: mol_type = other DNA
ctttggagtctacaccacattccccatgcatatacacaggcttgggagtctacaccacactccctaagcacacaaaggct

SEQ ID NO: 107842 - DNA, 80 bp, synthetic construct
  misc_feature 1..80: note = Artificially Synthesized Probe
  source 1..80: mol_type = other DNA
ggcttgggagtctacaccacctttcctgtctacaccaccttaactgtgtacagacacaggcttgggggtctacatcgcct

SEQ ID NO: 107843 - DNA, 80 bp, synthetic construct
  misc_feature 1..80: note = Artificially Synthesized Probe
  source 1..80: mol_type = other DNA
ccaccttccctgtctaaatatgcagacttgggagtctataacacccttcctgtctatacacaggcttgggagtctacacc

SEQ ID NO: 107844 - DNA, 80 bp, synthetic construct
  misc_feature 1..80: note = Artificially Synthesized Probe
  source 1..80: mol_type = other DNA
cacaggcttgggagtctataccacatttcctcatagacttgggggtctacaccaattttgctgtgtaaaggcacaggttt

SEQ ID NO: 107845 - DNA, 80 bp, synthetic construct
  misc_feature 1..80: note = Artificially Synthesized Probe
  source 1..80: mol_type = other DNA
ctgtagtcccagctactcaggaggctgaggcatgagaattgcttgaacctgggaggcggagttgtagtgagctgagatcg

SEQ ID NO: 107846 - DNA, 80 bp, synthetic construct
  misc_feature 1..80: note = Artificially Synthesized Probe
  source 1..80: mol_type = other DNA
tccttaccaagacaggacacaaggaaactccaaaacagtaaaggttaatcaggaaggagcggcccacaaaggaaccacca

SEQ ID NO: 107847 - DNA, 80 bp, synthetic construct
  misc_feature 1..80: note = Artificially Synthesized Probe
  source 1..80: mol_type = other DNA
tgattctttaccagtatggtaaagagggtaattgctctgggaggtgaaaagtgcgtaagaattttgatcagtatctgtct

SEQ ID NO: 107848 - DNA, 80 bp, synthetic construct
  misc_feature 1..80: note = Artificially Synthesized Probe
  source 1..80: mol_type = other DNA
tcagcttgttctgggcacagaggatttaaggaatatttgagatttgaacaaaactgaaaaaagaccaactctgctagtcg

SEQ ID NO: 107849 - DNA, 80 bp, synthetic construct
  misc_feature 1..80: note = Artificially Synthesized Probe
  source 1..80: mol_type = other DNA
tggaatgccgcacatagccatctctgccccaaacagcagccccctctatatgatggggttttcgctcctgccagcagcac

SEQ ID NO: 107850 - DNA, 80 bp, synthetic construct
  misc_feature 1..80: note = Artificially Synthesized Probe
  source 1..80: mol_type = other DNA
agcctgatacagagtcacacaccagatgcacattacaaagagcgtcacagtggaatgagaggaaagcctgtgagaacaaa

SEQ ID NO: 107851 - DNA, 80 bp, synthetic construct
  misc_feature 1..80: note = Artificially Synthesized Probe
  source 1..80: mol_type = other DNA
attccagaaagctgggctgaaaaattgttataagatgcttaccaacagcaggccgtcaccgtcagaaaccaaagctgtac

SEQ ID NO: 107852 - DNA, 80 bp, synthetic construct
  misc_feature 1..80: note = Artificially Synthesized Probe
  source 1..80: mol_type = other DNA
cgccagtcaggtccttccaggagaaggcggcaccaagcccagcgtcgaacgaagcaggtccttctcccttcacaagcagc

SEQ ID NO: 107853 - DNA, 80 bp, synthetic construct
  misc_feature 1..80: note = Artificially Synthesized Probe
  source 1..80: mol_type = other DNA
cccatcccaacacaggggcagtcctgctgccctttcgttctctcccattgtgcccttggcagaagaatatatttccactc

SEQ ID NO: 107854 - DNA, 80 bp, synthetic construct
  misc_feature 1..80: note = Artificially Synthesized Probe
  source 1..80: mol_type = other DNA
agggtaaagggagctcttccgccaacaggtggccggtgttgcttcccagcgggttccacccactgcctagcaggccatct

SEQ ID NO: 107855 - DNA, 80 bp, synthetic construct
  misc_feature 1..80: note = Artificially Synthesized Probe
  source 1..80: mol_type = other DNA
cacaacacacgtcccaaaataaatcttcactaggtacagagttggcaccaaatggctttctcctacaaaatcaaaacagc

SEQ ID NO: 107856 - DNA, 80 bp, synthetic construct
  misc_feature 1..80: note = Artificially Synthesized Probe
  source 1..80: mol_type = other DNA
taatgatagaggatagatatagatgggtgattgataggtggatatagatgatggataggtagacgattgacaggtaaaga

SEQ ID NO: 107857 - DNA, 80 bp, synthetic construct
  misc_feature 1..80: note = Artificially Synthesized Probe
  source 1..80: mol_type = other DNA
gtcaagagttcaagaccagtctgggcaacatagtgaaactacgtctctactaaaaatacaaaaattagccgggcatggtg

SEQ ID NO: 107858 - DNA, 80 bp, synthetic construct
  misc_feature 1..80: note = Artificially Synthesized Probe
  source 1..80: mol_type = other DNA
gataagttatataaatagatgtttgataggtgaatggagatgattcaaaggtagataggtagaggatagacagaacaaaa

SEQ ID NO: 107859 - DNA, 80 bp, synthetic construct
  misc_feature 1..80: note = Artificially Synthesized Probe
  source 1..80: mol_type = other DNA
tgttatgcaagtgtgaggatcaaagacattttcagacaaagagaaggaaactttcccaataaaagactgaaagaaggata

SEQ ID NO: 107860 - DNA, 80 bp, synthetic construct
  misc_feature 1..80: note = Artificially Synthesized Probe
  source 1..80: mol_type = other DNA
cacgcaggtcaggcagctcccgcgcaggtcagacagctcccgggcaggtcaggcggctcccgtgaaggtcagggggctcc

SEQ ID NO: 107861 - DNA, 80 bp, synthetic construct
  misc_feature 1..80: note = Artificially Synthesized Probe
  source 1..80: mol_type = other DNA
cacgcaggtcagagggctcccgcgcaggtcactcccaggcaggtggctcccgcgcaggtcaggcggctcctgtgcaggtc

SEQ ID NO: 107862 - DNA, 80 bp, synthetic construct
  misc_feature 1..80: note = Artificially Synthesized Probe
  source 1..80: mol_type = other DNA
aggtcagagggctcccgtgcaggtcactcccaggcaggtggctcccgcgcaggtcaggcggctcctgtgcaggtcgctcc

SEQ ID NO: 107863 - DNA, 80 bp, synthetic construct
  misc_feature 1..80: note = Artificially Synthesized Probe
  source 1..80: mol_type = other DNA
aggttagacatcttttctgccatcatgggctctgattccccaacctggtgccatggtccactcagtcgcttcttggccct

SEQ ID NO: 107864 - DNA, 80 bp, synthetic construct
  misc_feature 1..80: note = Artificially Synthesized Probe
  source 1..80: mol_type = other DNA
cacacctttagaacccactgagatttctaaagctcctcctctagtgagcaacctgggatgtttgtgctcaaagaaaacag

SEQ ID NO: 107865 - DNA, 80 bp, synthetic construct
  misc_feature 1..80: note = Artificially Synthesized Probe
  source 1..80: mol_type = other DNA
gataaagctctcctggtaaggcacctcgccatcttcccagcagtagctattggttaacttcatagacccccttttaaata

SEQ ID NO: 107866 - DNA, 80 bp, synthetic construct
  misc_feature 1..80: note = Artificially Synthesized Probe
  source 1..80: mol_type = other DNA
caccccactaaatttttcattgttctggagagacggggtcttgctatgttgcccagcctggtcttgaactcctggcctca

SEQ ID NO: 107867 - DNA, 80 bp, synthetic construct
  misc_feature 1..80: note = Artificially Synthesized Probe
  source 1..80: mol_type = other DNA
atggccatgttctcttctttagatcctgaggccgcagggtgcagctttccatttgtaaactgtccctggggtgctgcccc

SEQ ID NO: 107868 - DNA, 80 bp, synthetic construct
  misc_feature 1..80: note = Artificially Synthesized Probe
  source 1..80: mol_type = other DNA
ggtgcagcaatgagggacccaaaggtgagcagggaaagagtctccataatttggcacagagaggagcaggattctcctca

SEQ ID NO: 107869 - DNA, 80 bp, synthetic construct
  misc_feature 1..80: note = Artificially Synthesized Probe
  source 1..80: mol_type = other DNA
agctagtaaaacaaacggttgatttcaggatacaaagacaaggcacaactgaaatactgaacaatactgtatgtgtcaga

SEQ ID NO: 107870 - DNA, 80 bp, synthetic construct
  misc_feature 1..80: note = Artificially Synthesized Probe
  source 1..80: mol_type = other DNA
gaggcccagaagacagagacctctcacctcttaacacctccccaggtctgaccaggggttaattatgactgtatgtcatg

SEQ ID NO: 107871 - DNA, 80 bp, synthetic construct
  misc_feature 1..80: note = Artificially Synthesized Probe
  source 1..80: mol_type = other DNA
ccggagcccccagcaggaattcttccagtgcttggaggagattcttctctcatgttttctttgttcttcatcaccccatt

SEQ ID NO: 107872 - DNA, 80 bp, synthetic construct
  misc_feature 1..80: note = Artificially Synthesized Probe
  source 1..80: mol_type = other DNA
gaggtcataccatatgtacttttttgatacctgactttttctttctcagaatgacacacttccatctttccaggccaata

SEQ ID NO: 107873 - DNA, 80 bp, synthetic construct
  misc_feature 1..80: note = Artificially Synthesized Probe
  source 1..80: mol_type = other DNA
ctgttcactcagcctgagcagttcctctttctgagatgtgaccacaggaggtgaccgcggggatacctcacccagccagc

SEQ ID NO: 107874 - DNA, 80 bp, synthetic construct
  misc_feature 1..80: note = Artificially Synthesized Probe
  source 1..80: mol_type = other DNA
aaagaaggtcatctgagaggtgaggcgatgtcaaagaacaaaatcctcccagctgttgtctccccacttacatatttttt

SEQ ID NO: 107875 - DNA, 80 bp, synthetic construct
  misc_feature 1..80: note = Artificially Synthesized Probe
  source 1..80: mol_type = other DNA
ctgctccgttccactttctgttcctgtgaacttgatgattctaaccacctcgtatcaaacagcatttgtccttttaggac

SEQ ID NO: 107876 - DNA, 80 bp, synthetic construct
  misc_feature 1..80: note = Artificially Synthesized Probe
  source 1..80: mol_type = other DNA
atagtgctgctatgagcatggatgtgccaatatctgtccaggtccctacttctgatggtttcaggtatgtatgtacccag

SEQ ID NO: 107877 - DNA, 80 bp, synthetic construct
  misc_feature 1..80: note = Artificially Synthesized Probe
  source 1..80: mol_type = other DNA
tgaattgctggactgctaggtgaaagtggaactgatattctttgagaccctactaagtgtcaacatgcagagaacacaac

SEQ ID NO: 107878 - DNA, 80 bp, synthetic construct
  misc_feature 1..80: note = Artificially Synthesized Probe
  source 1..80: mol_type = other DNA
tcatgaagccctttgagaacagacatcaaccatgtgaatgttactccttaagttagagccaaagatatttggtttgccaa

SEQ ID NO: 107879 - DNA, 80 bp, synthetic construct
  misc_feature 1..80: note = Artificially Synthesized Probe
  source 1..80: mol_type = other DNA
gcatcggttgattaatctgatttttgtagtccatgcatgtcaataaggcccattcacatgtcagaatgtgcacagggtta

SEQ ID NO: 107880 - DNA, 80 bp, synthetic construct
  misc_feature 1..80: note = Artificially Synthesized Probe
  source 1..80: mol_type = other DNA
agaaaacccattcattcccacagaaggcaggagaggatgctgcaacaaaatacaactcagaaaatgcagggcatatgtaa

SEQ ID NO: 107881 - DNA, 80 bp, synthetic construct
  misc_feature 1..80: note = Artificially Synthesized Probe
  source 1..80: mol_type = other DNA
tctcatagttccttgaagtcagaatttccaatgattctagaagtaataaccccagtaattctcattactacttcaaggta

SEQ ID NO: 107882 - DNA, 80 bp, synthetic construct
  misc_feature 1..80: note = Artificially Synthesized Probe
  source 1..80: mol_type = other DNA
taaagaggaaaatgccgcttctgcaggacatgggtgaccttgagcaactgcatgttttctcaccaaatacaaggaatttt

SEQ ID NO: 107883 - DNA, 80 bp, synthetic construct
  misc_feature 1..80: note = Artificially Synthesized Probe
  source 1..80: mol_type = other DNA
gcctccccagggctggtcagaaatgcagaatattgggtctaacatacctcagaaaatgcactttgacatttaacaatcct

SEQ ID NO: 107884 - DNA, 80 bp, synthetic construct
  misc_feature 1..80: note = Artificially Synthesized Probe
  source 1..80: mol_type = other DNA
caccccccacagtagcagcagctctccctacctcccatccccactgcccgtggccctggaacaccacaatttgggtgaag

SEQ ID NO: 107885 - DNA, 80 bp, synthetic construct
  misc_feature 1..80: note = Artificially Synthesized Probe
  source 1..80: mol_type = other DNA
caatgaacacatgtcttttgagatctcatgacctccaagagaagtctctctgtcaggaaatgtcttagctggaactgtaa

SEQ ID NO: 107886 - DNA, 80 bp, synthetic construct
  misc_feature 1..80: note = Artificially Synthesized Probe
  source 1..80: mol_type = other DNA
gatcatagatgacgccttctcgccatggtctcactccatgaagggggcgaggaagctctctggagctgccttattagtga

SEQ ID NO: 107887 - DNA, 80 bp, synthetic construct
  misc_feature 1..80: note = Artificially Synthesized Probe
  source 1..80: mol_type = other DNA
aaacacccagaccagaacaggaagagggcaaatagccttactcctccatctgccctttacatgaaaaatataatcgtgga

SEQ ID NO: 107888 - DNA, 80 bp, synthetic construct
  misc_feature 1..80: note = Artificially Synthesized Probe
  source 1..80: mol_type = other DNA
ctattattaatagtccatttagcacttgaaagccacaaggctgattgtgcatgaagccctgtgtgcttgcttgggagcct

SEQ ID NO: 107889 - DNA, 80 bp, synthetic construct
  misc_feature 1..80: note = Artificially Synthesized Probe
  source 1..80: mol_type = other DNA
aatgtgaattaactaaacaacaaagccttcatcatgctgagtgcaggccctttaaagaccagaatgtgtccccatccgtt

SEQ ID NO: 107890 - DNA, 80 bp, synthetic construct
  misc_feature 1..80: note = Artificially Synthesized Probe
  source 1..80: mol_type = other DNA
ttgcacggacaaagaaggtatctgctggtgcagtgccaccgaagaagagaggtcctacctgaaacctcacagggaaattt

SEQ ID NO: 107891 - DNA, 80 bp, synthetic construct
  misc_feature 1..80: note = Artificially Synthesized Probe
  source 1..80: mol_type = other DNA
ccttgtgcttctcgttcaaagcaagaagtacccaagtggaacgcagatacggcacgtcagtgagaacaaaagcatcacaa

SEQ ID NO: 107892 - DNA, 80 bp, synthetic construct
  misc_feature 1..80: note = Artificially Synthesized Probe
  source 1..80: mol_type = other DNA
tttctttacggcagtatggttgcatgagttttgtaaccagccatattttgtggaaggggaagccagagttcacaggatgt

SEQ ID NO: 107893 - DNA, 80 bp, synthetic construct
  misc_feature 1..80: note = Artificially Synthesized Probe
  source 1..80: mol_type = other DNA
ggccgtggaaatgcaacttgattacaacaaacacttagtggagctaatcacacagcattcagatgctcccagcccacccc

SEQ ID NO: 107894 - DNA, 80 bp, synthetic construct
  misc_feature 1..80: note = Artificially Synthesized Probe
  source 1..80: mol_type = other DNA
ggcacagtctccctcccttccccttatccctcagattgtgaagaaacaagtgaggtctttgattagatgcctatttttta

SEQ ID NO: 107895 - DNA, 80 bp, synthetic construct
  misc_feature 1..80: note = Artificially Synthesized Probe
  source 1..80: mol_type = other DNA
gtgcctgggatgtctacgaaacacacatcatgacagctcctgcatcagggggctgctgggatgattaaacaaaattatac

SEQ ID NO: 107896 - DNA, 80 bp, synthetic construct
  misc_feature 1..80: note = Artificially Synthesized Probe
  source 1..80: mol_type = other DNA
cacacaaagacctacctcattctttccaacagctgcaggatattctgtggtgtgaatatgatatatttaactaacctctt

SEQ ID NO: 107897 - DNA, 80 bp, synthetic construct
  misc_feature 1..80: note = Artificially Synthesized Probe
  source 1..80: mol_type = other DNA
gaagtgggatttgggggtaatagaattgtacattttgtgatggatacagccaatcgacctgtgagcagctgagctgactc

SEQ ID NO: 107898 - DNA, 80 bp, synthetic construct
  misc_feature 1..80: note = Artificially Synthesized Probe
  source 1..80: mol_type = other DNA
tgccaggccctggccccagcccccaagccccctgcccacccttcatgccccaggaatacctggcttgactcctcaccttc

SEQ ID NO: 107899 - DNA, 80 bp, synthetic construct
  misc_feature 1..80: note = Artificially Synthesized Probe
  source 1..80: mol_type = other DNA
tctgtggcccatatcagccaggaaaatgaagggtcacagacgccctgctgggagctaaagagaaatgtgtgcaaatctaa

SEQ ID NO: 107900 - DNA, 80 bp, synthetic construct
  misc_feature 1..80: note = Artificially Synthesized Probe
  source 1..80: mol_type = other DNA
gacaccattcagaaaattgtattgtggaggaaggcaaggatgaaacaaacaaggcatggaggcttctgctctataaaact

SEQ ID NO: 107901 - DNA, 80 bp, synthetic construct
  misc_feature 1..80: note = Artificially Synthesized Probe
  source 1..80: mol_type = other DNA
gattatcagaatggaactaaatatgcagcttttaaatacaaccacaccaaagggaactttgcaaattaccgggaactttg

SEQ ID NO: 107902 - DNA, 80 bp, synthetic construct
  misc_feature 1..80: note = Artificially Synthesized Probe
  source 1..80: mol_type = other DNA
tgagcacaaaggtggacgtgtccccaaaatagcagctttgctcagaattccaaacagggcctcagctcaatggtgagaaa

SEQ ID NO: 107903 - DNA, 80 bp, synthetic construct
  misc_feature 1..80: note = Artificially Synthesized Probe
  source 1..80: mol_type = other DNA
tcgccctctgttacttcatgactccaacttactttctacacacaagacatagaaaccatctcatgcaagccccccaggaa

SEQ ID NO: 107904 - DNA, 80 bp, synthetic construct
  misc_feature 1..80: note = Artificially Synthesized Probe
  source 1..80: mol_type = other DNA
gcatcctaagtgctcccaccttctgcaaacgtacacaaataagtgaataatgtcgacttttcgggttcaagaagtcacaa

SEQ ID NO: 107905 - DNA, 80 bp, synthetic construct
  misc_feature 1..80: note = Artificially Synthesized Probe
  source 1..80: mol_type = other DNA
ctaagcccacaacactgtcctctaaatatttaggacacctatattttcctttgtgtcagccatttctctccctttaaaaa

SEQ ID NO: 107906 - DNA, 80 bp, synthetic construct
  misc_feature 1..80: note = Artificially Synthesized Probe
  source 1..80: mol_type = other DNA
ttaggagttcaagaccagcctcaccaacatggtgaagccctgtctttactaaaaatacaaaaaattaactgggcgtggtg

SEQ ID NO: 107907 - DNA, 80 bp, synthetic construct
  misc_feature 1..80: note = Artificially Synthesized Probe
  source 1..80: mol_type = other DNA
tagctcctgagcaattccagaagagactcagccatcgagctgactgtagcctcccgaggacaagctttgggaaacaggcc

SEQ ID NO: 107908 - DNA, 80 bp, synthetic construct
  misc_feature 1..80: note = Artificially Synthesized Probe
  source 1..80: mol_type = other DNA
atcctggatcttgttagagatgctatttttgctgttggccacccttcgcggggtttggtaataaaagattgttaaagtgg

SEQ ID NO: 107909 - DNA, 80 bp, synthetic construct
  misc_feature 1..80: note = Artificially Synthesized Probe
  source 1..80: mol_type = other DNA
agccgctaccacaccaagcaaatttttgtatttttagtagagatggtttcaccatattggccaggctggtctcaaactcc

SEQ ID NO: 107910 - DNA, 80 bp, synthetic construct
  misc_feature 1..80: note = Artificially Synthesized Probe
  source 1..80: mol_type = other DNA
gggaggaaggtaaggagaacagctccctgtgcttctaatttaagtatctacattttcacaagtccccattaacatagcca

SEQ ID NO: 107911 - DNA, 80 bp, synthetic construct
  misc_feature 1..80: note = Artificially Synthesized Probe
  source 1..80: mol_type = other DNA
gtgacaaacaggcctgacgaggccagccgtgcctgcgattgcattttccactctccaaacagaatctattagacatgatg

SEQ ID NO: 107912 - DNA, 80 bp, synthetic construct
  misc_feature 1..80: note = Artificially Synthesized Probe
  source 1..80: mol_type = other DNA
cgcccaggctgggccctggacaacacaagtaggtccccaattaacagccaagttaattaactgattggaaacacagggga

SEQ ID NO: 107913 - DNA, 80 bp, synthetic construct
  misc_feature 1..80: note = Artificially Synthesized Probe
  source 1..80: mol_type = other DNA
gaggggcagagaaaaccaaatggtgaacccccatctcacctcatcccacccttccttgctgcccaggtgtgcaagatggg

SEQ ID NO: 107914 - DNA, 80 bp, synthetic construct
  misc_feature 1..80: note = Artificially Synthesized Probe
  source 1..80: mol_type = other DNA
tccaattctgtgaactgccctctgcttcctgatggagctgtgctgttccctcctctgcatgccacctgcccaacacagct

SEQ ID NO: 107915 - DNA, 80 bp, synthetic construct
  misc_feature 1..80: note = Artificially Synthesized Probe
  source 1..80: mol_type = other DNA
tgcaggcagatcacttgaggtcacaagttcgagaccagcctggccaacatggtgaaacctcgtatctactaaaaatataa

SEQ ID NO: 107916 - DNA, 80 bp, synthetic construct
  misc_feature 1..80: note = Artificially Synthesized Probe
  source 1..80: mol_type = other DNA
taatgttttaaattttatacctgcaaacagtatctagctcaacttcctcatttcaagaatggggaaactgagatgcagag

SEQ ID NO: 107917 - DNA, 80 bp, synthetic construct
  misc_feature 1..80: note = Artificially Synthesized Probe
  source 1..80: mol_type = other DNA
actactgaggaaatctgcaggaaaagagggtcttcaaatactggggtaaatcatatgactgacttgtattacacaaagct

SEQ ID NO: 107918 - DNA, 80 bp, synthetic construct
  misc_feature 1..80: note = Artificially Synthesized Probe
  source 1..80: mol_type = other DNA
cagactaataatcttttttaacaaactggggtaacctacatgtaaagttgccaaatctttatgtgtgtaactaaaaatgt

SEQ ID NO: 107919 - DNA, 80 bp, synthetic construct
  misc_feature 1..80: note = Artificially Synthesized Probe
  source 1..80: mol_type = other DNA
ggaacactttagcccaggagtttgaggacagtctggtcaacatagtgagaccccatctctacaaaaaatacaaaaattaa

SEQ ID NO: 107920 - DNA, 80 bp, synthetic construct
  misc_feature 1..80: note = Artificially Synthesized Probe
  source 1..80: mol_type = other DNA
taactgtacatgtatgtatgtgaaatctcaggaatttaggtattttaaggggaatacatctgacaataggaatgcagcgt

SEQ ID NO: 107921 - DNA, 80 bp, synthetic construct
  misc_feature 1..80: note = Artificially Synthesized Probe
  source 1..80: mol_type = other DNA
gggcctcacaggacgagggccagacccagatgcgcccgcttgggcggacgagactccctgacaccctccccgggacgtca

SEQ ID NO: 107922 - DNA, 80 bp, synthetic construct
  misc_feature 1..80: note = Artificially Synthesized Probe
  source 1..80: mol_type = other DNA
cggggcacaaggctgcccaacaagaacgcggggcgcgaggccgcctaactgacaggaacgcggggcgcgaggccgcctga

SEQ ID NO: 107923 - DNA, 80 bp, synthetic construct
  misc_feature 1..80: note = Artificially Synthesized Probe
  source 1..80: mol_type = other DNA
caggaacgcggggcgcgaggccgcctgacaggaactcggggcgcgaggccgcctgacaggagcgcggggcggcgccctcc

SEQ ID NO: 107924 - DNA, 80 bp, synthetic construct
  misc_feature 1..80: note = Artificially Synthesized Probe
  source 1..80: mol_type = other DNA
gtgtgtggcaatgtctagtgtttctccagcccttcacccccttttgccccaaattggctgtaagcctcttaggagccaga

SEQ ID NO: 107925 - DNA, 80 bp, synthetic construct
  misc_feature 1..80: note = Artificially Synthesized Probe
  source 1..80: mol_type = other DNA
cgcgccgggctgagatcgggccccaggctctccgcggagccgtctccaacccctgcaggccgacctgggcagccaggcgg

SEQ ID NO: 107926 - DNA, 80 bp, synthetic construct
  misc_feature 1..80: note = Artificially Synthesized Probe
  source 1..80: mol_type = other DNA
caaggtgttttgctgaataaataaattaatacataataaaggctgcgtccaaccagatgaggacagaaccgagcgccctc

SEQ ID NO: 107927 - DNA, 80 bp, synthetic construct
  misc_feature 1..80: note = Artificially Synthesized Probe
  source 1..80: mol_type = other DNA
ccgagtggcctgctagcccgctctcccacacagtctccttgatgtgaagtgtcacccggcttgctgcggcgtgtctccgc

SEQ ID NO: 107928 - DNA, 80 bp, synthetic construct
  misc_feature 1..80: note = Artificially Synthesized Probe
  source 1..80: mol_type = other DNA
aggagaaccgcctcctcaggaaccctgtggagctcatggcttttgtgactgagactaaaagcatccataaaagcccgaca

SEQ ID NO: 107929 - DNA, 80 bp, synthetic construct
  misc_feature 1..80: note = Artificially Synthesized Probe
  source 1..80: mol_type = other DNA
accggacactccacctagtccctcttcaggttttaatccattctgttttatttcatttgattttatttcattttatttcc

SEQ ID NO: 107930 - DNA, 80 bp, synthetic construct
  misc_feature 1..80: note = Artificially Synthesized Probe
  source 1..80: mol_type = other DNA
gatcacctgaggtcaggagtttgagaccagtctgatgaaaccccatctctacttaaaaaatacaaaaattagccaagcat

SEQ ID NO: 107931 - DNA, 80 bp, synthetic construct
  misc_feature 1..80: note = Artificially Synthesized Probe
  source 1..80: mol_type = other DNA
acaaaaaaaaacacacacctatttctttttttttttttttttttttcttttgagcaggagtgaaagtattaaaaagcttt

SEQ ID NO: 107932 - DNA, 80 bp, synthetic construct
  misc_feature 1..80: note = Artificially Synthesized Probe
  source 1..80: mol_type = other DNA
tttcttaaggatccaaaaaaataaaaaccaatttcattgctgctgtttccatttcttggcaaaaattaggaaacacaact

SEQ ID NO: 107933 - DNA, 80 bp, synthetic construct
  misc_feature 1..80: note = Artificially Synthesized Probe
  source 1..80: mol_type = other DNA
tattaagtgaattaacctcatgaaattctactataagataagcactaggaatgcactggaaagagaaaggtgctagtgag

SEQ ID NO: 107934 - DNA, 80 bp, synthetic construct
  misc_feature 1..80: note = Artificially Synthesized Probe
  source 1..80: mol_type = other DNA
tgttctgaaaagaggtttctctgtctggctgtctagttgggtggaaaactgatcctcttcgttcacagtgagatagagga

SEQ ID NO: 107935 - DNA, 80 bp, synthetic construct
  misc_feature 1..80: note = Artificially Synthesized Probe
  source 1..80: mol_type = other DNA
tttacacaaagaatcagataactccatccaggccctgaactgctgtgattcaattcctctgatgctgtctataaacctgc

SEQ ID NO: 107936 - DNA, 80 bp, synthetic construct
  misc_feature 1..80: note = Artificially Synthesized Probe
  source 1..80: mol_type = other DNA
ccctgacagccctgacccaccagggcactgagccagctctgtgcctacgaagacagctgtctgctgaaccctttctgggt

SEQ ID NO: 107937 - DNA, 80 bp, synthetic construct
  misc_feature 1..80: note = Artificially Synthesized Probe
  source 1..80: mol_type = other DNA
tcactgtgatccttcattatttcatacattttgtccagatctgtttttggtgccagggtcattgactcccttagtccacc

SEQ ID NO: 107938 - DNA, 80 bp, synthetic construct
  misc_feature 1..80: note = Artificially Synthesized Probe
  source 1..80: mol_type = other DNA
ttgcaagtatgagtttatactttctgaatgatttacattttattccaactaaataaataaatctcactccatgacatttt

SEQ ID NO: 107939 - DNA, 80 bp, synthetic construct
  misc_feature 1..80: note = Artificially Synthesized Probe
  source 1..80: mol_type = other DNA
atgggaattaatgatcatcctctggtacagatgcctcatctgatcatcaacatttctttgtatgtcactaacactatacc

SEQ ID NO: 107940 - DNA, 80 bp, synthetic construct
  misc_feature 1..80: note = Artificially Synthesized Probe
  source 1..80: mol_type = other DNA
aaaagtcattcgttggtatcaattttaaaaataaagagtcagcataggggtcttcaatccaatcctagagtagcagagct

SEQ ID NO: 107941 - DNA, 80 bp, synthetic construct
  misc_feature 1..80: note = Artificially Synthesized Probe
  source 1..80: mol_type = other DNA
tgtccttatgtggaagttacttatgaatcgatgaaactggaccagagactcttttccagctctgagagtctgtaattgat

SEQ ID NO: 107942 - DNA, 80 bp, synthetic construct
  misc_feature 1..80: note = Artificially Synthesized Probe
  source 1..80: mol_type = other DNA
cttgtgtcattctcaaactatgctgcaatttccatgggcctgtgaagagatttatggattaggtgacccattttaactat

SEQ ID NO: 107943 - DNA, 80 bp, synthetic construct
  misc_feature 1..80: note = Artificially Synthesized Probe
  source 1..80: mol_type = other DNA
gcatcacagttagacccacaagaaggcaaccagaaagattaaaaatcatcgttcggactttctcaattatagatttatgc

SEQ ID NO: 107944 - DNA, 80 bp, synthetic construct
  misc_feature 1..80: note = Artificially Synthesized Probe
  source 1..80: mol_type = other DNA
gtgcatcgagacagcaaataaccatagattgaagctctccagattagacacttaaaaactaagtatctaaaatgttatta

SEQ ID NO: 107945 - DNA, 80 bp, synthetic construct
  misc_feature 1..80: note = Artificially Synthesized Probe
  source 1..80: mol_type = other DNA
aaataagaatatgtatccggtaaataaatgcacatttctgttggtggcgccatcagacactgagacactgagaggagggg

SEQ ID NO: 107946 - DNA, 80 bp, synthetic construct
  misc_feature 1..80: note = Artificially Synthesized Probe
  source 1..80: mol_type = other DNA
gtggcatggaaggggccaatacttctttctttcttttaaagtttgttctgccataatttaggccaaattcttcctctgct

SEQ ID NO: 107947 - DNA, 80 bp, synthetic construct
  misc_feature 1..80: note = Artificially Synthesized Probe
  source 1..80: mol_type = other DNA
agacctgactttatgcaccagcttcaagtgtttcctcccacaaccgttaattcgtggacctgttaacttttaccaagttt

SEQ ID NO: 107948 - DNA, 80 bp, synthetic construct
  misc_feature 1..80: note = Artificially Synthesized Probe
  source 1..80: mol_type = other DNA
gtgagagccactgatttacacggcagaactggccaccaccagactactcaccctcttctccttcaggctgcaaattaaaa

SEQ ID NO: 107949 - DNA, 80 bp, synthetic construct
  misc_feature 1..80: note = Artificially Synthesized Probe
  source 1..80: mol_type = other DNA
caatatacccacacatggtagaatctttcaaaatgaggctttgattttggagttcgtacttattttatctacaatctttg

SEQ ID NO: 107950 - DNA, 80 bp, synthetic construct
  misc_feature 1..80: note = Artificially Synthesized Probe
  source 1..80: mol_type = other DNA
accaaacacgtcactttttaacatttgctattgactgatattgtcaataatgtagttggctagccccataagatgggttt

SEQ ID NO: 107951 - DNA, 80 bp, synthetic construct
  misc_feature 1..80: note = Artificially Synthesized Probe
  source 1..80: mol_type = other DNA
ttttttgtagagatagagtctcactgtgttgcccaggctggtctcaaactcttggcctcaatcagtcctcccacctcagc

SEQ ID NO: 107952 - DNA, 80 bp, synthetic construct
  misc_feature 1..80: note = Artificially Synthesized Probe
  source 1..80: mol_type = other DNA
ctaaatcaacacatctcttgagaactacatcttacttcccaaagagacaaaatagttataaccaataataatttcagtat

SEQ ID NO: 107953 - DNA, 80 bp, synthetic construct
  misc_feature 1..80: note = Artificially Synthesized Probe
  source 1..80: mol_type = other DNA
gatgcttgattccacttcttctatcatgccccattcacacactataagaagggtctaccaagtcaagaaacagcaaaaaa

SEQ ID NO: 107954 - DNA, 80 bp, synthetic construct
  misc_feature 1..80: note = Artificially Synthesized Probe
  source 1..80: mol_type = other DNA
aactcatttaaaaaatgttctctgagtttgcaacatccccattccatatgctgtcaatactttccccgctggaagagcct

SEQ ID NO: 107955 - DNA, 80 bp, synthetic construct
  misc_feature 1..80: note = Artificially Synthesized Probe
  source 1..80: mol_type = other DNA
gctcatgcagaagaagccgttttcagaccacactcgttttgcaagaacgaacatctctgtaaagttctgcttctgacgtc

SEQ ID NO: 107956 - DNA, 80 bp, synthetic construct
  misc_feature 1..80: note = Artificially Synthesized Probe
  source 1..80: mol_type = other DNA
agcctcccaccagcacctctgcctgcctctcccgcagaggcctccggggagtaacatgctgctgatctgagtgaacataa

SEQ ID NO: 107957 - DNA, 80 bp, synthetic construct
  misc_feature 1..80: note = Artificially Synthesized Probe
  source 1..80: mol_type = other DNA
agtcctgcccgatgccacaaacaccatggggcctgcacaacactgagagctcccaaacaccacaaacagcatggggccta

SEQ ID NO: 107958 - DNA, 80 bp, synthetic construct
  misc_feature 1..80: note = Artificially Synthesized Probe
  source 1..80: mol_type = other DNA
ggctccccaccctgcctgatgccacaaacaacatggggcctacacaacactgagggctgcgcaccctgcctgatgccaca

SEQ ID NO: 107959 - DNA, 80 bp, synthetic construct
  misc_feature 1..80: note = Artificially Synthesized Probe
  source 1..80: mol_type = other DNA
cagacagcatggggcctgcacaacactgagggctccccaccctgcctgatgccacagacagcatggggcctgcacaacac

SEQ ID NO: 107960 - DNA, 80 bp, synthetic construct
  misc_feature 1..80: note = Artificially Synthesized Probe
  source 1..80: mol_type = other DNA
actgagggctccccaccctgcctgatgccacagacaacatggggcctacacaacactgagggctgcccaccctgcctgat

SEQ ID NO: 107961 - DNA, 80 bp, synthetic construct
  misc_feature 1..80: note = Artificially Synthesized Probe
  source 1..80: mol_type = other DNA
aacagcaaagtgagcactcaccttgtcttcatttcctctaagaggaagactgttgtaacctgataaaacagacagataaa

SEQ ID NO: 107962 - DNA, 80 bp, synthetic construct
  misc_feature 1..80: note = Artificially Synthesized Probe
  source 1..80: mol_type = other DNA
tctgaatagtgcactgggccctaacacagaccctgcactgcccggccacctccctctccccttgccatccccacaggcca

SEQ ID NO: 107963 - DNA, 80 bp, synthetic construct
  misc_feature 1..80: note = Artificially Synthesized Probe
  source 1..80: mol_type = other DNA
cctagacatgccaagtatactaaaaaacgtgctctgaattttgcatttatcaaatattacataataaaacattttaaaag

SEQ ID NO: 107964 - DNA, 80 bp, synthetic construct
  misc_feature 1..80: note = Artificially Synthesized Probe
  source 1..80: mol_type = other DNA
tggagcccaaacatccaatcaaaccaggtcgtaaatatacaggtagtccccgcttatgatggggctatggcaggataaac

SEQ ID NO: 107965 - DNA, 80 bp, synthetic construct
  misc_feature 1..80: note = Artificially Synthesized Probe
  source 1..80: mol_type = other DNA
cagtttgggaggacaaggaaggaggatcacttgagtccaggagttcaagccaggcatggtggcacatacctgtagtatca

SEQ ID NO: 107966 - DNA, 80 bp, synthetic construct
  misc_feature 1..80: note = Artificially Synthesized Probe
  source 1..80: mol_type = other DNA
aggtttgttacgtgggtgtattgagtgatgccgactgttgggtttatgatgatcctgtcacccaaacgaggaacacagta

SEQ ID NO: 107967 - DNA, 80 bp, synthetic construct
  misc_feature 1..80: note = Artificially Synthesized Probe
  source 1..80: mol_type = other DNA
ggcacaatctcatttcactgcatcctccatcttccaggttcaagtgattctcctgcctcagccccccaagtagctgggat

SEQ ID NO: 107968 - DNA, 80 bp, synthetic construct
  misc_feature 1..80: note = Artificially Synthesized Probe
  source 1..80: mol_type = other DNA
ccaagtcccacttcttttattcaagggctttacagtcatcaaagggatgatgtgaaataaactccaaagggctgtcacca

SEQ ID NO: 107969 - DNA, 80 bp, synthetic construct
  misc_feature 1..80: note = Artificially Synthesized Probe
  source 1..80: mol_type = other DNA
accttaatattggcttttaactgtagagttttctgctttttaaactcaaatgttccacattttgggactgggtaaaggtg

SEQ ID NO: 107970 - DNA, 80 bp, synthetic construct
  misc_feature 1..80: note = Artificially Synthesized Probe
  source 1..80: mol_type = other DNA
tctaaagtaatattgtttctaacaataacaatattccatcctgtcagccaccacctccaacattaactgtagaaacctgg

SEQ ID NO: 107971 - DNA, 80 bp, synthetic construct
  misc_feature 1..80: note = Artificially Synthesized Probe
  source 1..80: mol_type = other DNA
ttgacttctaatatgagtgcaagtgcaaactgtaaagattatctgattggaaagataaggtgacctctcaatctgtcaac

SEQ ID NO: 107972 - DNA, 80 bp, synthetic construct
  misc_feature 1..80: note = Artificially Synthesized Probe
  source 1..80: mol_type = other DNA
atcataatttcatgttggctatttcatagaatcaaggaccataacagcataacaaagcaggcacatggatgccgcaagtc

SEQ ID NO: 107973 - DNA, 80 bp, synthetic construct
  misc_feature 1..80: note = Artificially Synthesized Probe
  source 1..80: mol_type = other DNA
aagaactcttagtaaaagagatgtgagggacaaaatggacttgaggtgggaagtcatcagacagcagctcctgccactgc

SEQ ID NO: 107974 - DNA, 80 bp, synthetic construct
  misc_feature 1..80: note = Artificially Synthesized Probe
  source 1..80: mol_type = other DNA
aatcacagcctctgactgccaattttattagcggctccatccatttacaagttgaatgtatttcacatttggaaccagaa

SEQ ID NO: 107975 - DNA, 80 bp, synthetic construct
  misc_feature 1..80: note = Artificially Synthesized Probe
  source 1..80: mol_type = other DNA
cgtggtgacggagcacccacatcacatgatagaaaattctacactttccttccaccagcatagttcagaaaagagtaggg

SEQ ID NO: 107976 - DNA, 80 bp, synthetic construct
  misc_feature 1..80: note = Artificially Synthesized Probe
  source 1..80: mol_type = other DNA
gtcagattggggtcagagaatttttcctttaaacattaagtgctcaaggcagaaaagacaacatattgaaaacttggaga

SEQ ID NO: 107977 - DNA, 80 bp, synthetic construct
  misc_feature 1..80: note = Artificially Synthesized Probe
  source 1..80: mol_type = other DNA
ggtgtttgtgtcaccacgtttttaaaaacctgacggaagcccagaaagcattcggaacataaaatttttatggacacatc

SEQ ID NO: 107978 - DNA, 80 bp, synthetic construct
  misc_feature 1..80: note = Artificially Synthesized Probe
  source 1..80: mol_type = other DNA
aatcccctgctggtgccaaagagcactttaaaatctccgtggcctgaggttgagaagcttctaagagaaaggcagtttga

SEQ ID NO: 107979 - DNA, 80 bp, synthetic construct
  misc_feature 1..80: note = Artificially Synthesized Probe
  source 1..80: mol_type = other DNA
tacccaccaggtgtcctgtggtacattccttaaccactccaagactcagtctttctatctgtaaattgaagatagaaata

SEQ ID NO: 107980 - DNA, 80 bp, synthetic construct
  misc_feature 1..80: note = Artificially Synthesized Probe
  source 1..80: mol_type = other DNA
gaggaggtggccacctgaatctatatgtaacacagtacaccaaaaaagaaaagtccattttactttatgataatttaaaa

SEQ ID NO: 107981 - DNA, 80 bp, synthetic construct
  misc_feature 1..80: note = Artificially Synthesized Probe
  source 1..80: mol_type = other DNA
aatgcccttggttttctgaatcccagttaggactattagagggaacagacaaaaacaaaggaagtgaaatgccctcttac

SEQ ID NO: 107982 - DNA, 80 bp, synthetic construct
  misc_feature 1..80: note = Artificially Synthesized Probe
  source 1..80: mol_type = other DNA
gcagcaaatcagatttttaaaaaataaaaagtcaaatcactccccctcccacaaaaaaatagagttccacaccctcaata

SEQ ID NO: 107983 - DNA, 80 bp, synthetic construct
  misc_feature 1..80: note = Artificially Synthesized Probe
  source 1..80: mol_type = other DNA
ctcgtgatgtagagtgacaaacaaaaaaggtatttaaaatgtgcagaagcaggtgtttccaagggagcctcacccatttt

SEQ ID NO: 107984 - DNA, 80 bp, synthetic construct
  misc_feature 1..80: note = Artificially Synthesized Probe
  source 1..80: mol_type = other DNA
ccttctatcaactaagattaaaaaataagtccagctgggtctacatttatgaaggtcaacttaaactaatgtggaaagag

SEQ ID NO: 107985 - DNA, 80 bp, synthetic construct
  misc_feature 1..80: note = Artificially Synthesized Probe
  source 1..80: mol_type = other DNA
tctgccatttattaagctttttcttcaccgctccacgcacaaagaatccttaaacctggtcgggcacagtggctatgcac

SEQ ID NO: 107986 - DNA, 80 bp, synthetic construct
  misc_feature 1..80: note = Artificially Synthesized Probe
  source 1..80: mol_type = other DNA
cccaaactaagacaaaacttttttaaattagcctggtgcagaggcatgtgcctgtagtcccagctattcagaaggctaag

SEQ ID NO: 107987 - DNA, 80 bp, synthetic construct
  misc_feature 1..80: note = Artificially Synthesized Probe
  source 1..80: mol_type = other DNA
atcttagatatctgtcacccaatgccagggagctattattagtttgggtgatgtttggctgcaaacactttttcatgagg

SEQ ID NO: 107988 - DNA, 80 bp, synthetic construct
  misc_feature 1..80: note = Artificially Synthesized Probe
  source 1..80: mol_type = other DNA
tatgtctccttgaggcttcactccccttcctagtcccatattcctcactttcaaaatctaaagaaaagtcgatgagtaac

SEQ ID NO: 107989 - DNA, 80 bp, synthetic construct
  misc_feature 1..80: note = Artificially Synthesized Probe
  source 1..80: mol_type = other DNA
tttgtcccgtgtaccctgtgtcgatagccctattcttcacaggaagctggagacccaacatgctgacatgtttcatagca

SEQ ID NO: 107990 - DNA, 80 bp, synthetic construct
  misc_feature 1..80: note = Artificially Synthesized Probe
  source 1..80: mol_type = other DNA
gagctgccagacgctaacacacagctaagctcagcactgagaagaagtcattttaaaagctcttccattccctgcccatc

SEQ ID NO: 107991 - DNA, 80 bp, synthetic construct
  misc_feature 1..80: note = Artificially Synthesized Probe
  source 1..80: mol_type = other DNA
gacagggaacaacaggcagagaagctcacagatgtgcaaggagcaggctcttcttgggggaagggacaggttgctcatta

SEQ ID NO: 107992 - DNA, 80 bp, synthetic construct
  misc_feature 1..80: note = Artificially Synthesized Probe
  source 1..80: mol_type = other DNA
tgtgtgggctccctggtgaatgaaaagtctgtgtaggcaaatcggaaggccaaaacaaaggagcaaaatgaacaatctcc

SEQ ID NO: 107993 - DNA, 80 bp, synthetic construct
  misc_feature 1..80: note = Artificially Synthesized Probe
  source 1..80: mol_type = other DNA
ctgagcaggttcacaagtcagcctccatgtaagtgaagaacagcgtaaagcccttaacaaagggcttatgttcaagttaa

SEQ ID NO: 107994 - DNA, 80 bp, synthetic construct
  misc_feature 1..80: note = Artificially Synthesized Probe
  source 1..80: mol_type = other DNA
cgggcatcccagggaaatccagaaccagtggctgtgactgctcccccgacggagcccctgttccttgcacagccgctgct

SEQ ID NO: 107995 - DNA, 80 bp, synthetic construct
  misc_feature 1..80: note = Artificially Synthesized Probe
  source 1..80: mol_type = other DNA
aagcaaagctgaatcgtgtcactagaaaggatgccatgttcccctgtgttcagcttcgataatggtctcacagataatta

SEQ ID NO: 107996 - DNA, 80 bp, synthetic construct
  misc_feature 1..80: note = Artificially Synthesized Probe
  source 1..80: mol_type = other DNA
tggagtgcggctcaaggccacgagaataaactcagagacagcagttatcgaccctgggtttcatcaagagctccttcact

SEQ ID NO: 107997 - DNA, 80 bp, synthetic construct
  misc_feature 1..80: note = Artificially Synthesized Probe
  source 1..80: mol_type = other DNA
gagcaaaaacttggatctccttgaaccacatgtgttctggaggcctcaacgtgaagttgaatgttaataggtaaataaat

SEQ ID NO: 107998 - DNA, 80 bp, synthetic construct
  misc_feature 1..80: note = Artificially Synthesized Probe
  source 1..80: mol_type = other DNA
gaaagcttctccttgcattctccgtggattgtgttctgacaaaatggcagcaacactgagtgaggatggtacaaggtgga

SEQ ID NO: 107999 - DNA, 80 bp, synthetic construct
  misc_feature 1..80: note = Artificially Synthesized Probe
  source 1..80: mol_type = other DNA
aatgtaggtgatgcctttcacctggagtcctcgaaacaatttcaacgatgtctgcatccttaatgttttcccacaaaata

SEQ ID NO: 108000 - DNA, 80 bp, synthetic construct
  misc_feature 1..80: note = Artificially Synthesized Probe
  source 1..80: mol_type = other DNA
aacactgctgcattgggcattatcattcagtttagcagctttcctctcttcatgcacttccatctttgggttttcctttg

SEQ ID NO: 108001 - DNA, 80 bp, synthetic construct
  misc_feature 1..80: note = Artificially Synthesized Probe
  source 1..80: mol_type = other DNA
cttcatgtgtaggtgaagggcggcacctggcctcagagcaaacaactctcccataaggtgactggccaggtcaagccagc

SEQ ID NO: 108002 - DNA, 80 bp, synthetic construct
  misc_feature 1..80: note = Artificially Synthesized Probe
  source 1..80: mol_type = other DNA
cctgggccctgggggcacagtgactgggctacatcccagaggtgcgggaccagcacagacactccctcccaggactccaa

SEQ ID NO: 108003 - DNA, 80 bp, synthetic construct
  misc_feature 1..80: note = Artificially Synthesized Probe
  source 1..80: mol_type = other DNA
agactcctggttctctgcagtttttgtttgtttgggattttgacgataaagcactactggagaccagaagggcctagagg

SEQ ID NO: 108004 - DNA, 80 bp, synthetic construct
  misc_feature 1..80: note = Artificially Synthesized Probe
  source 1..80: mol_type = other DNA
tggaaacattggctttatggtaaatcttcttaataaacaagattagcaggaaaggaggtgccggggactggaggttttat

SEQ ID NO: 108005 - DNA, 80 bp, synthetic construct
  misc_feature 1..80: note = Artificially Synthesized Probe
  source 1..80: mol_type = other DNA
cctcgaaggttcgtcaccaactcgtgcagcagatagacggcagtccgggctgtggcaggtgacagcccagggcccagaca

SEQ ID NO: 108006 - DNA, 80 bp, synthetic construct
  misc_feature 1..80: note = Artificially Synthesized Probe
  source 1..80: mol_type = other DNA
aagcgggtgcagcgggacatccgaggcccggcccctcgcggcacacgcggcggaacacgagcggggggcgcacccacgcc

SEQ ID NO: 108007 - DNA, 80 bp, synthetic construct
  misc_feature 1..80: note = Artificially Synthesized Probe
  source 1..80: mol_type = other DNA
gcgacccgtggccgggggcttgagacccagagcctgggggtgtcgcgctggaaccccgagacccccggagcccccgaccc

SEQ ID NO: 108008 - DNA, 80 bp, synthetic construct
  misc_feature 1..80: note = Artificially Synthesized Probe
  source 1..80: mol_type = other DNA
ctctcattcattgaggcgtccctcccccagaacctctcagaggcgcccctcccccaacgcccccactcatttattgaggc

SEQ ID NO: 108009 - DNA, 80 bp, synthetic construct
  misc_feature 1..80: note = Artificially Synthesized Probe
  source 1..80: mol_type = other DNA
cgcctctccccacccagaccccctcacggaggcgcccctctcacaacgcccccaactaattcattgaggcgcccctcccc

SEQ ID NO: 108010 - DNA, 80 bp, synthetic construct
  misc_feature 1..80: note = Artificially Synthesized Probe
  source 1..80: mol_type = other DNA
tggccgcgcgggaggcggcgggaggcggccgagtccgggcccagggaggcgcgcgccgccggctcctcccgccgcgcctc

SEQ ID NO: 108011 - DNA, 80 bp, synthetic construct
  misc_feature 1..80: note = Artificially Synthesized Probe
  source 1..80: mol_type = other DNA
gaaccattccctagaatccatgtgctgcctccctaatcccctccaggttaccccgcaacataacctcatttgcaggtggg

SEQ ID NO: 108012 - DNA, 80 bp, synthetic construct
  misc_feature 1..80: note = Artificially Synthesized Probe
  source 1..80: mol_type = other DNA
ctcaggaggaacaagccctgcctgcattgtagacttctggcctccgaaactgtgaggaagacactgctgtggtttcagct

SEQ ID NO: 108013 - DNA, 80 bp, synthetic construct
  misc_feature 1..80: note = Artificially Synthesized Probe
  source 1..80: mol_type = other DNA
taatcccagcactttgggaggctgaggcaggcggatcacgaggtcaggagtttgagatcagcctgaccaacatggagaaa

SEQ ID NO: 108014 - DNA, 80 bp, synthetic construct; identical to SEQ ID NO: 39072
  misc_feature 1..80: note = Artificially Synthesized Probe
  source 1..80: mol_type = other DNA

SEQ ID NO: 108015 - DNA, 80 bp, synthetic construct
  misc_feature 1..80: note = Artificially Synthesized Probe
  source 1..80: mol_type = other DNA
tttctctttctccttggtcttcctaaactttgccctaattaatcgatatcactgcctctctcagaggtgactgtggctgt

SEQ ID NO: 108016 - DNA, 80 bp, synthetic construct
  misc_feature 1..80: note = Artificially Synthesized Probe
  source 1..80: mol_type = other DNA
agctaataattaattcagcacatattgttatttttccattttgctaggttctttagtagacagataatgagcaagacagg

SEQ ID NO: 108017 - DNA, 80 bp, synthetic construct
  misc_feature 1..80: note = Artificially Synthesized Probe
  source 1..80: mol_type = other DNA
ccactcttggaaggaaccataaacggctcccaaacatgagaaagtatgctcagtctcacgcaagccagagaaacagaagt

SEQ ID NO: 108018 - DNA, 80 bp, synthetic construct
  misc_feature 1..80: note = Artificially Synthesized Probe
  source 1..80: mol_type = other DNA
tcttggcaaagattattgcagggaatgtggcagtatctatcaaaataaacaataagcatccgcgatgactcaggatctgg

SEQ ID NO: 108019 - DNA, 80 bp, synthetic construct
  misc_feature 1..80: note = Artificially Synthesized Probe
  source 1..80: mol_type = other DNA
gcagggccctctcctgagagcggcgtcatgtgaggagctgctgtttacgcaccacatgaccacagcagcaccggctggcc

SEQ ID NO: 108020 - DNA, 80 bp, synthetic construct
  misc_feature 1..80: note = Artificially Synthesized Probe
  source 1..80: mol_type = other DNA
gtacaatatgacaaagaaaaccacgagtttagagcttaggtcactgtaaagctgcttttgaaaaaggtgcaagacgtaag

SEQ ID NO: 108021 - DNA, 80 bp, synthetic construct
  misc_feature 1..80: note = Artificially Synthesized Probe
  source 1..80: mol_type = other DNA
cgcatggccttgtgatgtggtttggatctgtgtcctggccagtctcatgttgaaatgtagccccagggctggaggtgggg

SEQ ID NO: 108022 - DNA, 80 bp, synthetic construct
  misc_feature 1..80: note = Artificially Synthesized Probe
  source 1..80: mol_type = other DNA
gacgtcttggctcccctttgccttccgccatgactggatacttcctgaggcctccccaggagcagaggccaccatgcttc

SEQ ID NO: 108023 - DNA, 80 bp, synthetic construct
  misc_feature 1..80: note = Artificially Synthesized Probe
  source 1..80: mol_type = other DNA
ttgcacaggggaggctgggtcccactggtaccgggccctgtgagagtctcaggtacagaacagagtcccaggagcgtcaa

SEQ ID NO: 108024 - DNA, 80 bp, synthetic construct
  misc_feature 1..80: note = Artificially Synthesized Probe
  source 1..80: mol_type = other DNA
gggtcggacccattcactgtgcaccgaactcggtgggtcagacccatccagtgtgcactgaactcggtgggtcagaccca

SEQ ID NO: 108025 - DNA, 80 bp, synthetic construct
  misc_feature 1..80: note = Artificially Synthesized Probe
  source 1..80: mol_type = other DNA
gtcagacccatccagcatgcactgaacttggtgggtcggacccattcactgtgcactgaactcggtgggtcagacccatc

SEQ ID NO: 108026 - DNA, 80 bp, synthetic construct
  misc_feature 1..80: note = Artificially Synthesized Probe
  source 1..80: mol_type = other DNA
cggacccattcgctgtgcactgaactcggtgggtcggacccatccagcgtgcactgaactcggtgggtcggacccattcg

SEQ ID NO: 108027 - DNA, 80 bp, synthetic construct
  misc_feature 1..80: note = Artificially Synthesized Probe
  source 1..80: mol_type = other DNA
cctctaccgaacacggtgaactgagaactgtggtcacccgagtcgcagatgaggaaatagagacgcggccaatggcatgt

SEQ ID NO: 108028 - DNA, 80 bp, synthetic construct
  misc_feature 1..80: note = Artificially Synthesized Probe
  source 1..80: mol_type = other DNA
gacccatccagcgtgcactgaactcggtgggtcggacccattcactgtgcactgaactcggtgggtcagacccatccagt

SEQ ID NO: 108029 - DNA, 80 bp, synthetic construct
  misc_feature 1..80: note = Artificially Synthesized Probe
  source 1..80: mol_type = other DNA
cccatccagcatgcactgaacttggtgggtcggacccattcactgtgcactgaactcggtgggtcagacccatccagcat

SEQ ID NO: 108030 - DNA, 80 bp, synthetic construct
  misc_feature 1..80: note = Artificially Synthesized Probe
  source 1..80: mol_type = other DNA
cattcgctgtgcactgaactcggtgggtcagacccatccagcgtgcactgaactcggtgggtcggacccattcgctgtgc

SEQ ID NO: 108031 - DNA, 80 bp, synthetic construct
  misc_feature 1..80: note = Artificially Synthesized Probe
  source 1..80: mol_type = other DNA
tccagcgtgcactgaactcggtgggtcggacccattcactgtgcactgaactcggtgggtcagacccatccagtgtgcac

SEQ ID NO: 108032 - DNA, 80 bp, synthetic construct
  misc_feature 1..80: note = Artificially Synthesized Probe
  source 1..80: mol_type = other DNA
cactgtgcactgaactcggtgggtcagacccatccagcatgcactgaactcggtgggtcggacccatccagcgtgcactg

SEQ ID NO: 108033 - DNA, 80 bp, synthetic construct
  misc_feature 1..80: note = Artificially Synthesized Probe
  source 1..80: mol_type = other DNA
ctgtgcactgaactcggtgggtcagacccatccagcgtgcactgaactcggtgggtcggacccatccagcgtgcactgaa

SEQ ID NO: 108034 - DNA, 80 bp, synthetic construct
  misc_feature 1..80: note = Artificially Synthesized Probe
  source 1..80: mol_type = other DNA
gtgcactgaactcggtgggttggacccatccagcgtgcactgaactcggtgggtcagacccattcactgtgcactgaact

SEQ ID NO: 108035 - DNA, 80 bp, synthetic construct
  misc_feature 1..80: note = Artificially Synthesized Probe
  source 1..80: mol_type = other DNA
gcactgaactcggtgggtcggacccatccagcgtgcactgaacttggtgggtcggacccattcactgtgcactgaactca

SEQ ID NO: 108036 - DNA, 80 bp, synthetic construct
  misc_feature 1..80: note = Artificially Synthesized Probe
  source 1..80: mol_type = other DNA
actgaactcggtgggtcggacccattcactgtgcactgaactcggtgggtcggacccatccagcgtgcactgaactcggt

SEQ ID NO: 108037 - DNA, 80 bp, synthetic construct
  misc_feature 1..80: note = Artificially Synthesized Probe
  source 1..80: mol_type = other DNA
tgaactcggtgggtcagacccatccagtgtgcactgaacttggtgggtcggacccatccagcgtgcactgaactcggtgg

SEQ ID NO: 108038 - DNA, 80 bp, synthetic construct
  misc_feature 1..80: note = Artificially Synthesized Probe
  source 1..80: mol_type = other DNA
ccagcgaatcaggagagaagctttaaaattcccgaggttcctcaatttcctttccctgtggttctgtggcttcatggggt

SEQ ID NO: 108039 - DNA, 80 bp, synthetic construct
  misc_feature 1..80: note = Artificially Synthesized Probe
  source 1..80: mol_type = other DNA
aactcggtgggtcggacccattcactgtgcactgaactcggtggacgcgtaaatggctctcaaaggagctccccaggccc

SEQ ID NO: 108040 - DNA, 80 bp, synthetic construct
  misc_feature 1..80: note = Artificially Synthesized Probe
  source 1..80: mol_type = other DNA
gtgaaggcttcccaaacctgcccgccggagagagacatcccccgcaggggctccccatcagggcagggcacacccccacc

SEQ ID NO: 108041 - DNA, 80 bp, synthetic construct
  misc_feature 1..80: note = Artificially Synthesized Probe
  source 1..80: mol_type = other DNA
gtctgtgaacgcaggccccacaaagctggagagttcgccctgcggcctggtttactcatcaggcctccgcgccagcaccc

SEQ ID NO: 108042 - DNA, 80 bp, synthetic construct
  misc_feature 1..80: note = Artificially Synthesized Probe
  source 1..80: mol_type = other DNA
tggagggactggggccaggggagcgcctgccaaggccccggcactggtggcgtggggtgcaggggaccccagcccctttc

SEQ ID NO: 108043 - DNA, 80 bp, synthetic construct
  misc_feature 1..80: note = Artificially Synthesized Probe
  source 1..80: mol_type = other DNA
cgacgggcccagggaagactccaggcaggcaggagggccgaagttcagaggccgtgagccgtgtgggtctgaggaggtca

SEQ ID NO: 108044 - DNA, 80 bp, synthetic construct
  misc_feature 1..80: note = Artificially Synthesized Probe
  source 1..80: mol_type = other DNA
ttgtctcacttgccccgaagctgcaggacgttcagttctgtccctgcggcttctcccaatgataaactctctcaaagaga

SEQ ID NO: 108045 - DNA, 80 bp, synthetic construct
  misc_feature 1..80: note = Artificially Synthesized Probe
  source 1..80: mol_type = other DNA
ttttctgtgatcatgggaaatctttggtcacttcctgcaatgcctaacttttcgtttttcacgtctctgtcactgcgctt

SEQ ID NO: 108046 - DNA, 80 bp, synthetic construct
  misc_feature 1..80: note = Artificially Synthesized Probe
  source 1..80: mol_type = other DNA
tcaagaggatggattctgaaaagcacttactcagcacggctttcccaagttaagttctatattatttaagtcgaatggag

SEQ ID NO: 108047 - DNA, 80 bp, synthetic construct
  misc_feature 1..80: note = Artificially Synthesized Probe
  source 1..80: mol_type = other DNA
aaatgtcacccttctgaaagcaaagtgatagggaaacagatcttgaaaaaactcgatgattctttatcttacaaaaggat

SEQ ID NO: 108048 - DNA, 80 bp, synthetic construct
  misc_feature 1..80: note = Artificially Synthesized Probe
  source 1..80: mol_type = other DNA
tgagtgagcatctccgtgttgcctttcggccgtttccagagaaatgtaccggtttcttgatggaagtgtttccttcctgc

SEQ ID NO: 108049 - DNA, 80 bp, synthetic construct
  misc_feature 1..80: note = Artificially Synthesized Probe
  source 1..80: mol_type = other DNA
agccctttctccttagttcatcccagaagaaaactggaatttttaaaggacctttctaagaaaatgaaggcaaagcaaca

SEQ ID NO: 108050 - DNA, 80 bp, synthetic construct
  misc_feature 1..80: note = Artificially Synthesized Probe
  source 1..80: mol_type = other DNA
cctggggaggacacacgttggaaccaaatgtcatgtttgcatgaagggagaacaaagcaggtggtgtggagaatctggct

SEQ ID NO: 108051 - DNA, 80 bp, synthetic construct
  misc_feature 1..80: note = Artificially Synthesized Probe
  source 1..80: mol_type = other DNA
tcaggatgggcggcatctcagatgctcacccggttttaccctcacaggaaccccaggggaaaggcactgccatcaagccc

SEQ ID NO: 108052 - DNA, 80 bp, synthetic construct
  misc_feature 1..80: note = Artificially Synthesized Probe
  source 1..80: mol_type = other DNA
tgccccaatgacctgcccacccctgccccttcccatcaggctttcatgtggccccttccccgggggtccctgagacgtgt

SEQ ID NO: 108053 - DNA, 80 bp, synthetic construct
  misc_feature 1..80: note = Artificially Synthesized Probe
  source 1..80: mol_type = other DNA
gaagcctccttctctcacaccctggcctgtctcctttataagagtgttgtatgctcccctctctagatggagtgctcatt

SEQ ID NO: 108054 - DNA, 80 bp, synthetic construct
  misc_feature 1..80: note = Artificially Synthesized Probe
  source 1..80: mol_type = other DNA
aggtctgggctccggggcagtgtgcagcctccaccctgccacatgtgtcctttgtcacagaaagtctccgctcttggtgc

SEQ ID NO: 108055 - DNA, 80 bp, synthetic construct
  misc_feature 1..80: note = Artificially Synthesized Probe
  source 1..80: mol_type = other DNA
atgccacgttttgtccaacgtgccccaggagtggctgcatgtcaggaacatgtcgctgggaatctctgtggcttatctga

SEQ ID NO: 108056 - DNA, 80 bp, synthetic construct
  misc_feature 1..80: note = Artificially Synthesized Probe
  source 1..80: mol_type = other DNA
cggcaccaacctgcatgtgctttctacagcctgtgtgtgccagggagggtggcggtcagtgccccgagattggctgtagc

SEQ ID NO: 108057 - DNA, 80 bp, synthetic construct
  misc_feature 1..80: note = Artificially Synthesized Probe
  source 1..80: mol_type = other DNA
tcagaggaaggaaaatcagaactgctgagtgagaggagacgccagggtccaaggcccacgtctggcccacttggttgctg

SEQ ID NO: 108058 - DNA, 80 bp, synthetic construct
  misc_feature 1..80: note = Artificially Synthesized Probe
  source 1..80: mol_type = other DNA
acgatgcccgctgctccccacacccaccccgactccacaccatgcccgccgctccccacacccaccccgactccacacga

SEQ ID NO: 108059 - DNA, 80 bp, synthetic construct
  misc_feature 1..80: note = Artificially Synthesized Probe
  source 1..80: mol_type = other DNA
tccccacacccaccccaactccacacgacgcctgccgcttcccactcccaccccgactccgcacgatgcccaccactccc

SEQ ID NO: 108060 - DNA, 80 bp, synthetic construct
  misc_feature 1..80: note = Artificially Synthesized Probe
  source 1..80: mol_type = other DNA
ttggttgatgaggaagatccagtttccctgagtttacaatctgtacgcacagagtctaagtcagccggactcatacttgg

SEQ ID NO: 108061 - DNA, 80 bp, synthetic construct
  misc_feature 1..80: note = Artificially Synthesized Probe
  source 1..80: mol_type = other DNA
ttgcggtttaggcattccagcagaagtggtgcttgctgtcagagctgccattacatatgtgaatgccaaacacaattctc

SEQ ID NO: 108062 - DNA, 80 bp, synthetic construct
  misc_feature 1..80: note = Artificially Synthesized Probe
  source 1..80: mol_type = other DNA
tcggggctaagctggccgtccctccagctcccatcccctggttaaaggaccccattctcctgggcagggaacaccatgag

SEQ ID NO: 108063 - DNA, 80 bp, synthetic construct
  misc_feature 1..80: note = Artificially Synthesized Probe
  source 1..80: mol_type = other DNA
ggccctaataccaaatctcatcacaaatatgaactcctggtctctgctccttttctaaaagggacaaatgtcaaaacagc

SEQ ID NO: 108064 - DNA, 80 bp, synthetic construct
  misc_feature 1..80: note = Artificially Synthesized Probe
  source 1..80: mol_type = other DNA
ctcgccccagggagtgatgggaaaaaatgtgccctcctcagctcagggatcgggaaagccaggcttcttgactgttgctt

SEQ ID NO: 108065 - DNA, 80 bp, synthetic construct
  misc_feature 1..80: note = Artificially Synthesized Probe
  source 1..80: mol_type = other DNA
gctctgcaatgaggctttttagtgaaaacatggttttctggctttttgtggtccagatccaccagtctatactattatta

SEQ ID NO: 108066 - DNA, 80 bp, synthetic construct
  misc_feature 1..80: note = Artificially Synthesized Probe
  source 1..80: mol_type = other DNA
ttcaccccagaggctccgtctccagtgcgggaaacagcacagccaggcacggtcacccaccaggacgacgcctacggcct

SEQ ID NO: 108067 - DNA, 80 bp, synthetic construct
  misc_feature 1..80: note = Artificially Synthesized Probe
  source 1..80: mol_type = other DNA
gcctctggccggcgccaccaggaaggctcctgtgaagagccgagcacccagcccacacctcctcctgccttgctgtcaca

SEQ ID NO: 108068 - DNA, 80 bp, synthetic construct
  misc_feature 1..80: note = Artificially Synthesized Probe
  source 1..80: mol_type = other DNA
ccagggactgtgtgtgggggctgcacgttccaggcagaagcacggcaaagatctcaggaagtaaatattcttgtttatct

SEQ ID NO: 108069 - DNA, 80 bp, synthetic construct
  misc_feature 1..80: note = Artificially Synthesized Probe
  source 1..80: mol_type = other DNA
caaagactgggcttaccaggatcatgtggccggtggagatgtccatgttggactgcacaggctcctcggaccaggatgag

SEQ ID NO: 108070 - DNA, 80 bp, synthetic construct
  misc_feature 1..80: note = Artificially Synthesized Probe
  source 1..80: mol_type = other DNA
gttagtggcattggggacacccagcaggacgagggccacggcacccacgtggcacaaccccttctcctgctaagatccaa

SEQ ID NO: 108071 - DNA, 80 bp, synthetic construct
  misc_feature 1..80: note = Artificially Synthesized Probe
  source 1..80: mol_type = other DNA
aggtgcacgggtttgcttaattgctccttttgggtctccaaaggcctaaaaagtcgacaaggctacagtaaatacaatct

SEQ ID NO: 108072 - DNA, 80 bp, synthetic construct
  misc_feature 1..80: note = Artificially Synthesized Probe
  source 1..80: mol_type = other DNA
acacacacatatacacacacacaccacacacacacacacatcacacatatatacacacatacaccacacacaccacacac

SEQ ID NO: 108073 - DNA, 80 bp, synthetic construct
  misc_feature 1..80: note = Artificially Synthesized Probe
  source 1..80: mol_type = other DNA
caccacacacgtcacacatatacacacacatacgccacacacacacaccacacacatcacacatatacacacacatacgc

SEQ ID NO: 108074 - DNA, 80 bp, synthetic construct
  misc_feature 1..80: note = Artificially Synthesized Probe
  source 1..80: mol_type = other DNA
acacacacacaccacacacatcacacatatacacacacatacaccacacacaccacacacatcacacatatacacacaca

SEQ ID NO: 108075 - DNA, 80 bp, synthetic construct
  misc_feature 1..80: note = Artificially Synthesized Probe
  source 1..80: mol_type = other DNA
cacacacaccacacacacaccacacacatcacacatatacacacacatacaccacacacacaccacacacatcacacata

SEQ ID NO: 108076 - DNA, 80 bp, synthetic construct
  misc_feature 1..80: note = Artificially Synthesized Probe
  source 1..80: mol_type = other DNA
atacacacacaaacgccacacacaccacacacatcacacatatacacacacatacaccacacacaccacacacatcacac

SEQ ID NO: 108077 - DNA, 80 bp, synthetic construct
  misc_feature 1..80: note = Artificially Synthesized Probe
  source 1..80: mol_type = other DNA
tcacagacacacacacactgcacacgccacaaacactcactcctatagattcaagaaagcatccactggatcctcctctg

SEQ ID NO: 108078 - DNA, 80 bp, synthetic construct
  misc_feature 1..80: note = Artificially Synthesized Probe
  source 1..80: mol_type = other DNA
agaaactggtaccacaatcaaagagtctgcagaaaaaagaagaacctcattctgacgtttctttctctttccaaagcaat

SEQ ID NO: 108079 - DNA, 80 bp, synthetic construct
  misc_feature 1..80: note = Artificially Synthesized Probe
  source 1..80: mol_type = other DNA
aaactctcaacattacaccccaagacagcttctgagggatcactgcagggtcttcgaccctccttccccaggcaaagctc

SEQ ID NO: 108080 - DNA, 80 bp, synthetic construct
  misc_feature 1..80: note = Artificially Synthesized Probe
  source 1..80: mol_type = other DNA
ccaacaatctcgttttgaaagtgttctaaccactgtgttaggatagcccgtcctattgcctgatgaaaatatacctgtac

SEQ ID NO: 108081 - DNA, 80 bp, synthetic construct
  misc_feature 1..80: note = Artificially Synthesized Probe
  source 1..80: mol_type = other DNA
aagccacccactcgctccccacagccgtgtgcgtcaaaggccttgcactccccaaggcaatcgccaaagctcaggaaaca

SEQ ID NO: 108082 - DNA, 80 bp, synthetic construct
  misc_feature 1..80: note = Artificially Synthesized Probe
  source 1..80: mol_type = other DNA
tcctgcagttggtgcctacacagcagaatcatggcagaaacgacgcaggggaactggcctctctgagacaagcttgtctt

SEQ ID NO: 108083 - DNA, 80 bp, synthetic construct
  misc_feature 1..80: note = Artificially Synthesized Probe
  source 1..80: mol_type = other DNA
accatctagaaaacatttccctccacctggctctctgggatgagcaattcatgctcccgggctctctgcttcggactcat

SEQ ID NO: 108084 - DNA, 80 bp, synthetic construct
  misc_feature 1..80: note = Artificially Synthesized Probe
  source 1..80: mol_type = other DNA
gggacggggggggatgaccccggggactggggggggacgactgcggggatggggggggacgactgtggggaaggggggga

SEQ ID NO: 108085 - DNA, 80 bp, synthetic construct
  misc_feature 1..80: note = Artificially Synthesized Probe
  source 1..80: mol_type = other DNA
tctggtgagggtaaggggtctctaagaaaagggagagttccagttccttctttcccatacatcttcaggtacttgttagt

SEQ ID NO: 108086 - DNA, 80 bp, synthetic construct
  misc_feature 1..80: note = Artificially Synthesized Probe
  source 1..80: mol_type = other DNA
gtctcccaggctggagtggagaggcacgatctcggctcactgcagcctccacctcctgggttcaaacgattctcctgcct

SEQ ID NO: 108087 - DNA, 80 bp, synthetic construct
  misc_feature 1..80: note = Artificially Synthesized Probe
  source 1..80: mol_type = other DNA
ataccagtaaccaacctgagtatacatctcatttatttctcaattgtgcacatgaattttgcttgacgtgggggaaaagc

SEQ ID NO: 108088 - DNA, 80 bp, synthetic construct
  misc_feature 1..80: note = Artificially Synthesized Probe
  source 1..80: mol_type = other DNA
gaccctctggggaagaggatttgaaacgctggagatttactcacataaaaataaaaaatcaagctagttccatgcccatc

SEQ ID NO: 108089 - DNA, 80 bp, synthetic construct
  misc_feature 1..80: note = Artificially Synthesized Probe
  source 1..80: mol_type = other DNA
caatagcaaacaaccacaaacttttcatgtgaacttgggaaaacctctaaaggtctctaagcctattttttcactttata

SEQ ID NO: 108090 - DNA, 80 bp, synthetic construct
  misc_feature 1..80: note = Artificially Synthesized Probe
  source 1..80: mol_type = other DNA
ttagtgaatagaagttagggccgttctctaagccagagccaaactcttgacggcttggcaaatgtaaagatatttctgaa

SEQ ID NO: 108091 - DNA, 80 bp, synthetic construct
  misc_feature 1..80: note = Artificially Synthesized Probe
  source 1..80: mol_type = other DNA
tctgctgcctcagcctcccgagtagctggaattataggcgtgcaccaccacacccagctaatttttgtatttttagtaga

SEQ ID NO: 108092 - DNA, 80 bp, synthetic construct
  misc_feature 1..80: note = Artificially Synthesized Probe
  source 1..80: mol_type = other DNA
acctttggtaggagctgtggcttctggacacattgaacccagaactgtgctgcaatttaaatgtgaaaaataccacaact

SEQ ID NO: 108093 - DNA, 80 bp, synthetic construct
  misc_feature 1..80: note = Artificially Synthesized Probe
  source 1..80: mol_type = other DNA
cgggtggctcagtgcccagtggctcagtgctggtgcacggtgagggagacccagggttcggtgcctctcagcggggaccc

SEQ ID NO: 108094 - DNA, 80 bp, synthetic construct
  misc_feature 1..80: note = Artificially Synthesized Probe
  source 1..80: mol_type = other DNA
cggcagctcttcgcctgtgcagagggagacgctgccgtgggagaagggtgtgcccacagcaaggcaacgcgcggccgggg

SEQ ID NO: 108095 - DNA, 80 bp, synthetic construct
  misc_feature 1..80: note = Artificially Synthesized Probe
  source 1..80: mol_type = other DNA
gcctgcagggaggaatgggatgatggggaagccgggtcctgggtggaggaggttggcagtgataaggccaggaatggcct

SEQ ID NO: 108096 - DNA, 80 bp, synthetic construct
  misc_feature 1..80: note = Artificially Synthesized Probe
  source 1..80: mol_type = other DNA
ccatgtttccctcacatcaccagcgcaggcttttctgaaggctctgggggaacctgccacttaggagagtctctgcacct

SEQ ID NO: 108097 - DNA, 80 bp, synthetic construct
  misc_feature 1..80: note = Artificially Synthesized Probe
  source 1..80: mol_type = other DNA
cattcactcatagcacctgcagtcagagggcctgattttgaatctgggcttcaggtcttactgactgtgtggccttggga

SEQ ID NO: 108098 - DNA, 80 bp, synthetic construct
  misc_feature 1..80: note = Artificially Synthesized Probe
  source 1..80: mol_type = other DNA
tgattattagtttattcaaaatcaggtttgctatggtcccttgccgagtcagcactgcacagggtgccaggaacaccagg

SEQ ID NO: 108099 - DNA, 80 bp, synthetic construct
  misc_feature 1..80: note = Artificially Synthesized Probe
  source 1..80: mol_type = other DNA
cctccctgaacttgaggtcaaagaaagctttaggcaggagaggctcaggccccaaggctaggccgcaatggcacctgcag

SEQ ID NO: 108100 - DNA, 80 bp, synthetic construct
  misc_feature 1..80: note = Artificially Synthesized Probe
  source 1..80: mol_type = other DNA
tcggaatgtgcttttccagggcgagccttctttttggacatgggatgtacccgatgtctacaagcttgaagtaacattgc

SEQ ID NO: 108101 - DNA, 80 bp, synthetic construct
  misc_feature 1..80: note = Artificially Synthesized Probe
  source 1..80: mol_type = other DNA
ccaactgaagagtgtcctgcctcacgccgtatctcaggacatccacaaagcattgcttttgccacattctgcttggccgc

SEQ ID NO: 108102 - DNA, 80 bp, synthetic construct
  misc_feature 1..80: note = Artificially Synthesized Probe
  source 1..80: mol_type = other DNA
accatgtaccccacagacactgtgcagcccacagccagcatgcaccccacacaccccactatcacacaccccacacaccc

SEQ ID NO: 108103 - DNA, 80 bp, synthetic construct
  misc_feature 1..80: note = Artificially Synthesized Probe
  source 1..80: mol_type = other DNA
ggaaaccgtgatgacatcacactgacaagttaaaccctggagtcccagcggcactggctgtcggccgtcctgcacgtgcc

SEQ ID NO: 108104 - DNA, 80 bp, synthetic construct
  misc_feature 1..80: note = Artificially Synthesized Probe
  source 1..80: mol_type = other DNA
tccctccaaggacgggggctgggacgtttggccgctgcctctcccactcactgtggcctgcccctgccagcgtcccttcc

SEQ ID NO: 108105 - DNA, 80 bp, synthetic construct
  misc_feature 1..80: note = Artificially Synthesized Probe
  source 1..80: mol_type = other DNA
actgaggggcatctcatgtggtctcattcactggtcctttaggctgattatagtttccaaattcataatggaaattctat

SEQ ID NO: 108106 - DNA, 80 bp, synthetic construct
  misc_feature 1..80: note = Artificially Synthesized Probe
  source 1..80: mol_type = other DNA
aggttataatttgggacatttccaccctgcatgaggtgactctaaccctctaagcaaggctgccagtgtgggctcactgg

SEQ ID NO: 108107 - DNA, 80 bp, synthetic construct
  misc_feature 1..80: note = Artificially Synthesized Probe
  source 1..80: mol_type = other DNA
gctgaggcgatgactgaatggacagcgtggcacacatacttctttaaaacctcagttgaaggttacagcatcagctgcca

SEQ ID NO: 108108 - DNA, 80 bp, synthetic construct
  misc_feature 1..80: note = Artificially Synthesized Probe
  source 1..80: mol_type = other DNA
ggccatcgccactacgaatactctaagtaccattctgtgtggtgagtttaaaatacagaacggtagtcgggcgtggtggc

SEQ ID NO: 108109 - DNA, 80 bp, synthetic construct
  misc_feature 1..80: note = Artificially Synthesized Probe
  source 1..80: mol_type = other DNA
aggtgggaggatcacttgagcccaggaggatgaggctgcagtgagctatgattgcaccaatgcactccaaccctggtgac

SEQ ID NO: 108110 - DNA, 80 bp, synthetic construct
  misc_feature 1..80: note = Artificially Synthesized Probe
  source 1..80: mol_type = other DNA
gatttataatcctcggtaaacacaaagggtgcatcctcacccggaacaaaactctcctggtcagacggtgaacaccccag

SEQ ID NO: 108111 - DNA, 80 bp, synthetic construct
  misc_feature 1..80: note = Artificially Synthesized Probe
  source 1..80: mol_type = other DNA
cagatcttggccggacagaaggtccaatccttccagccacttcacttaaaggaaaatcttctatttaagatccagactca

SEQ ID NO: 108112 - DNA, 80 bp, synthetic construct
  misc_feature 1..80: note = Artificially Synthesized Probe
  source 1..80: mol_type = other DNA
tgaagaagaaaggtagatgtaaccacataactcttttgattgtagatttagctgcgatgtcggcggcacttgcgaattcc

SEQ ID NO: 108113 - DNA, 80 bp, synthetic construct
  misc_feature 1..80: note = Artificially Synthesized Probe
  source 1..80: mol_type = other DNA
cccacagccaccacacaccccacagccaccacacaacccacagccaccacacaacccacagccaccatgcaccccacagc

SEQ ID NO: 108114 - DNA, 80 bp, synthetic construct
  misc_feature 1..80: note = Artificially Synthesized Probe
  source 1..80: mol_type = other DNA
ttttctcttcccaattcatactctttagcagcgaagaaaaaacaatatatatgtgaactaagaaaaggactataaatcat

SEQ ID NO: 108115 - DNA, 80 bp, synthetic construct
  misc_feature 1..80: note = Artificially Synthesized Probe
  source 1..80: mol_type = other DNA
catgttctttgcagggacatggatgaagctggaaaccatcattctcagcaaaatatcacaaagacagaaaatcaaacacc

SEQ ID NO: 108116 - DNA, 80 bp, synthetic construct
  misc_feature 1..80: note = Artificially Synthesized Probe
  source 1..80: mol_type = other DNA
caacatggcacatgtatacatatgtaacaaacctgcacgttgtgcacatgtaccctagaacttaaagtataattaaaaaa

SEQ ID NO: 108117 - DNA, 80 bp, synthetic construct
  misc_feature 1..80: note = Artificially Synthesized Probe
  source 1..80: mol_type = other DNA
agctgtctggcccctcttaggtgttgagaaagttattaagaaaattattaaggatagcatgtcaaattcccagtgagaag

SEQ ID NO: 108118 - DNA, 80 bp, synthetic construct
  misc_feature 1..80: note = Artificially Synthesized Probe
  source 1..80: mol_type = other DNA
tagaaaaaaaaaaaaccccacagtagaaaatgaaatccattattggcaaaaaaagcaagccaagacagagctgagatctg

SEQ ID NO: 108119 - DNA, 80 bp, synthetic construct
  misc_feature 1..80: note = Artificially Synthesized Probe
  source 1..80: mol_type = other DNA
gctgccaaaagctgcgtgtgtgtttttaatctgtgaaatggggatgaaggcagagcagctccacagagttgttgggagga

SEQ ID NO: 108120 - DNA, 80 bp, synthetic construct
  misc_feature 1..80: note = Artificially Synthesized Probe
  source 1..80: mol_type = other DNA
tggcttgcacactcagcctgtgggacactgatctctggtgggtgcaatgagtacacagcctggcttgcacgctcagcctg

SEQ ID NO: 108121 - DNA, 80 bp, synthetic construct
  misc_feature 1..80: note = Artificially Synthesized Probe
  source 1..80: mol_type = other DNA
tggcttgcacgctcagcctgtgggacactgatctctggtgtgtgcaatgagtacacagcctggcttgcacgctcagcctg

SEQ ID NO: 108122 - DNA, 80 bp, synthetic construct
  misc_feature 1..80: note = Artificially Synthesized Probe
  source 1..80: mol_type = other DNA
tgacttgcacactcggcccgtgggacactgatcttacacgggtgtgggcatccccctgccagtgcccgcatctacatttg

SEQ ID NO: 108123 - DNA, 80 bp, synthetic construct
  misc_feature 1..80: note = Artificially Synthesized Probe
  source 1..80: mol_type = other DNA
tctcagtaaaactagagtaactaggcatttttaaagaagatggtggcgtcttccactgttgccctaaatggaaatgctcc

SEQ ID NO: 108124 - DNA, 80 bp, synthetic construct
  misc_feature 1..80: note = Artificially Synthesized Probe
  source 1..80: mol_type = other DNA
gaaatgtgaaaaattgatctttttgcagctcggtgctgcctccaacacatccagagccaactggaactgtgagtgtgagc

SEQ ID NO: 108125 - DNA, 80 bp, synthetic construct
  misc_feature 1..80: note = Artificially Synthesized Probe
  source 1..80: mol_type = other DNA
gccaccacacaacccacagccaccacgcaccccacagccaccacacaacccacggccaccacacaccccacagccagcac

SEQ ID NO: 108126 - DNA, 80 bp, synthetic construct
  misc_feature 1..80: note = Artificially Synthesized Probe
  source 1..80: mol_type = other DNA
tcagcacggcacattcggacaccacagtcctcgctcgccgtagagccgcctgctcctctgctgtgcccaggccggggccc

SEQ ID NO: 108127 - DNA, 80 bp, synthetic construct
  misc_feature 1..80: note = Artificially Synthesized Probe
  source 1..80: mol_type = other DNA
ggaaatcactcagagaagagacctgtcattcttgaattctgccaaaagaagaccaggacaacaaaggtttcaggaaaacc

SEQ ID NO: 108128 - DNA, 80 bp, synthetic construct
  misc_feature 1..80: note = Artificially Synthesized Probe
  source 1..80: mol_type = other DNA
actgggctctgctggggaggaataaaggccactctccagactggacgtggcaccaagagaacgtggtgaacgggaaccgg

SEQ ID NO: 108129 - DNA, 80 bp, synthetic construct
  misc_feature 1..80: note = Artificially Synthesized Probe
  source 1..80: mol_type = other DNA
aaatctaaacaggaaggtgaaatgttgagaaagcgtgtgcagggaaaaggccggggaaaaatattccaggttgttaaacg

SEQ ID NO: 108130 - DNA, 80 bp, synthetic construct
  misc_feature 1..80: note = Artificially Synthesized Probe
  source 1..80: mol_type = other DNA
gcagaggagcagtaaccaatgatttcgttgaggagagcgactttacacaaacactccaccatgctaggtctctgatcggc

SEQ ID NO: 108131 - DNA, 80 bp, synthetic construct
  misc_feature 1..80: note = Artificially Synthesized Probe
  source 1..80: mol_type = other DNA
agccgagcctgtccgtgatctaagccggggacgtcctcggctcatggcccacgtggccaacgctgctctggtgacacagt

SEQ ID NO: 108132 - DNA, 80 bp, synthetic construct
  misc_feature 1..80: note = Artificially Synthesized Probe
  source 1..80: mol_type = other DNA
ctccccgctcctgacacacgacgacacccagtcaggggctgtaagcacagctcctgcaggaaggggttccacgcacgggc

SEQ ID NO: 108133 - DNA, 80 bp, synthetic construct
  misc_feature 1..80: note = Artificially Synthesized Probe
  source 1..80: mol_type = other DNA
gtgaaaaataattttcaacactcttctaaatgtggaacagtcttggaacagcctaagatcagtaggaaaaaagcggcctc

SEQ ID NO: 108134 - DNA, 80 bp, synthetic construct
  misc_feature 1..80: note = Artificially Synthesized Probe
  source 1..80: mol_type = other DNA
ttctgtctgctttctgtacccacagcatctacgtggtgcagaggggccctcgctgagcccctgcacactggtcagcatcc

SEQ ID NO: 108135 - DNA, 80 bp, synthetic construct
  misc_feature 1..80: note = Artificially Synthesized Probe
  source 1..80: mol_type = other DNA
ctgaagcccctggtgggtggctgggaaacgcaggtgctccacgtgaagcacagaaggcacgtacgggctcacgggacccg

SEQ ID NO: 108136 - DNA, 80 bp, synthetic construct
  misc_feature 1..80: note = Artificially Synthesized Probe
  source 1..80: mol_type = other DNA
gcttgattggctctttagaaatcatccagaagaaatggcaagacgtttgctgtttaattaccacgtgtaaaaaacaataa

SEQ ID NO: 108137 - DNA, 80 bp, synthetic construct
  misc_feature 1..80: note = Artificially Synthesized Probe
  source 1..80: mol_type = other DNA
aaagacattggaaggaaacacagaattttaatgagcatcttctctctggaacagcccatgtctaagaccggcttctgtga

SEQ ID NO: 108138 - DNA, 80 bp, synthetic construct
  misc_feature 1..80: note = Artificially Synthesized Probe
  source 1..80: mol_type = other DNA
cccggctcccacggaggatgactcaccgggcaattaagttctaagggcttccaaaaaagtcagtggtgccttcaaagttc

SEQ ID NO: 108139 - DNA, 80 bp, synthetic construct
  misc_feature 1..80: note = Artificially Synthesized Probe
  source 1..80: mol_type = other DNA
acgggcagctgttttttttacaagaaacttttgcaccttcctaattttctttttgctcagaataagggctgattttcatg

SEQ ID NO: 108140 - DNA, 80 bp, synthetic construct
  misc_feature 1..80: note = Artificially Synthesized Probe
  source 1..80: mol_type = other DNA
acatcaagatcttagttcaatgtatcgattcattcttatcgagcatgtaaaggtccccggtgggtgctgtgggtctattg

SEQ ID NO: 108141 - DNA, 80 bp, synthetic construct
  misc_feature 1..80: note = Artificially Synthesized Probe
  source 1..80: mol_type = other DNA
actggagggatggtgacgagacgtcaccgcagaggcggcagaagggataaaggggaggtagggatgaatagggccctggt

SEQ ID NO: 108142 - DNA, 80 bp, synthetic construct
  misc_feature 1..80: note = Artificially Synthesized Probe
  source 1..80: mol_type = other DNA
agcccagggacacaaaaggtattcacatccttccattcggtggccaccacagcttaattaagccaaaggaagggcagggg

SEQ ID NO: 108143 - DNA, 80 bp, synthetic construct
  misc_feature 1..80: note = Artificially Synthesized Probe
  source 1..80: mol_type = other DNA
aaggcctgaaggacgccctgaagagcttcttcctaccagacccccgaaggccagggtctgggggcctgctgggaatcccg

SEQ ID NO: 108144 - DNA, 80 bp, synthetic construct
  misc_feature 1..80: note = Artificially Synthesized Probe
  source 1..80: mol_type = other DNA
ggagtgaactttgcagagggtgctgggagcagccggcccgaggacaccgctgactggggtacaggggccacgggtcgcac

SEQ ID NO: 108145 - DNA, 80 bp, synthetic construct
  misc_feature 1..80: note = Artificially Synthesized Probe
  source 1..80: mol_type = other DNA
tcagaagaatcagacacgttttctagactttccccttcacatttcagcttcacgtttggggctcacttaacaatttgtat

SEQ ID NO: 108146 - DNA, 80 bp, synthetic construct
  misc_feature 1..80: note = Artificially Synthesized Probe
  source 1..80: mol_type = other DNA
tccagtttccatccaatttagtattttgttttgcaaaaaaaatctgcattgtatttcctcccactcaggaacatccgatc

SEQ ID NO: 108147 - DNA, 80 bp, synthetic construct
  misc_feature 1..80: note = Artificially Synthesized Probe
  source 1..80: mol_type = other DNA
gctctcctcagaggtactcagtccagttatacatcaatgtgagaatagtcccagcacttatcacttgtaaactcttttaa

SEQ ID NO: 108148 - DNA, 80 bp, synthetic construct
  misc_feature 1..80: note = Artificially Synthesized Probe
  source 1..80: mol_type = other DNA
acactgggtctcgtaactcctcacacaccccaactgctgacctcagcgagatgctgacctggaccacgtggggaggggat

SEQ ID NO: 108149 - DNA, 80 bp, synthetic construct
  misc_feature 1..80: note = Artificially Synthesized Probe
  source 1..80: mol_type = other DNA
tacctggaggcgcacactagcacagacccagacactcaattctggggctgcattattatcctgtacattaaaaaatcttg

SEQ ID NO: 108150 - DNA, 80 bp, synthetic construct
  misc_feature 1..80: note = Artificially Synthesized Probe
  source 1..80: mol_type = other DNA
agcctcccgagtagctgggatgacacgtgcacgccaccacacctggctaatttttgtatttttaatagagacggggtttc

SEQ ID NO: 108151 - DNA, 80 bp, synthetic construct
  misc_feature 1..80: note = Artificially Synthesized Probe
  source 1..80: mol_type = other DNA
acattttgagcaacaaagtttcagaacagctggctggatgaagaagggagcactattctgcagcccccatggaacaggaa

SEQ ID NO: 108152 - DNA, 80 bp, synthetic construct
  misc_feature 1..80: note = Artificially Synthesized Probe
  source 1..80: mol_type = other DNA
catgctcctctcccgccccacagaggccccctctgtcctggcccctctctctctgagctcaggcccttccatgctcctct

SEQ ID NO: 108153 - DNA, 80 bp, synthetic construct
  misc_feature 1..80: note = Artificially Synthesized Probe
  source 1..80: mol_type = other DNA
tgtctgtttccgggttcacactggggagtccttcacaaaggcagactgggccgactctgatgtaagatcaagttctctgc

SEQ ID NO: 108154 - DNA, 80 bp, synthetic construct
  misc_feature 1..80: note = Artificially Synthesized Probe
  source 1..80: mol_type = other DNA
caacaccaatcacagctctggggacccccacgtgtcagccatggcaaaatgaacccccaacacagcaggggagggaagga

SEQ ID NO: 108155 - DNA, 80 bp, synthetic construct
  misc_feature 1..80: note = Artificially Synthesized Probe
  source 1..80: mol_type = other DNA
cagccttccttatccacgtcctcgaagtgatccccgtttgacatttggaaatgactttcatctgctgggtcctcctcggt

SEQ ID NO: 108156 - DNA, 80 bp, synthetic construct
  misc_feature 1..80: note = Artificially Synthesized Probe
  source 1..80: mol_type = other DNA
atttttgacaggctaatgcatttcaccacagataatgccattcaccacagaggcgcattctctctcgtgcccatcaaggc

SEQ ID NO: 108157 - DNA, 80 bp, synthetic construct
  misc_feature 1..80: note = Artificially Synthesized Probe
  source 1..80: mol_type = other DNA
ccacgccgagctcctcctgccgggggggtctgcacagttctgggtgggggaggctccaggagctacccgaggcttcttct

SEQ ID NO: 108158 - DNA, 80 bp, synthetic construct
  misc_feature 1..80: note = Artificially Synthesized Probe
  source 1..80: mol_type = other DNA
ccgcctgctggaatctcctccccaccgcctactgtttcttttgaaatcccagtttaatccacttttttacacttcccttt

SEQ ID NO: 108159 - DNA, 80 bp, synthetic construct
  misc_feature 1..80: note = Artificially Synthesized Probe
  source 1..80: mol_type = other DNA
gtctattggcttttaagaaattttcccaaaaccaaaaaaggtgagttaaaggcaggagtgctggggttgccgacagacgt

SEQ ID NO: 108160 - DNA, 80 bp, synthetic construct
  misc_feature 1..80: note = Artificially Synthesized Probe
  source 1..80: mol_type = other DNA
acttcaaccaagaaggtgaacgggtgctttaagaaaaagtattttttttaagcaagtgaaaattgatgaaccgattcccc

SEQ ID NO: 108161 - DNA, 80 bp, synthetic construct
  misc_feature 1..80: note = Artificially Synthesized Probe
  source 1..80: mol_type = other DNA
aagccccttgggctgggaggtgaggtgttcagagcacagatgcccgaggctgcacctgcaccaagacctgaccttacccc

SEQ ID NO: 108162 - DNA, 80 bp, synthetic construct
  misc_feature 1..80: note = Artificially Synthesized Probe
  source 1..80: mol_type = other DNA
tctgttttcttctctggaagtgcatgctttgcagacaccaatgtcctcagttttagttcagaaaatgtgtcccgcctctc

SEQ ID NO: 108163 - DNA, 80 bp, synthetic construct
  misc_feature 1..80: note = Artificially Synthesized Probe
  source 1..80: mol_type = other DNA
tcagagctgacgtggcacccgcacccacagggctgccctcatccgcatggcggcccaagaggaggccccagttcatagat

SEQ ID NO: 108164 - DNA, 80 bp, synthetic construct
  misc_feature 1..80: note = Artificially Synthesized Probe
  source 1..80: mol_type = other DNA
gcaagaggggaataagataagaaggaagaaacggaggggggtgaaagcaggcagaatgtgcctcttctgatcctcttggg

SEQ ID NO: 108165 - DNA, 80 bp, synthetic construct
  misc_feature 1..80: note = Artificially Synthesized Probe
  source 1..80: mol_type = other DNA
ctgactgggaggacctcttccctctagcccagttcctcctggcagccctgcaaatgcccaccctcttgggtctgtcccta

SEQ ID NO: 108166 - DNA, 80 bp, synthetic construct
  misc_feature 1..80: note = Artificially Synthesized Probe
  source 1..80: mol_type = other DNA
gtttaccgccggttcactttcattgcaaactcctcatctccaagaaatcatcaaccgagaaaagaaaggatgtcaccttt

SEQ ID NO: 108167 - DNA, 80 bp, synthetic construct
  misc_feature 1..80: note = Artificially Synthesized Probe
  source 1..80: mol_type = other DNA
tggggcgcctctcagtttatctgctgctgactttgcccccttgtaaaacagggttgggagataatgagatgcctggggaa

SEQ ID NO: 108168 - DNA, 80 bp, synthetic construct
  misc_feature 1..80: note = Artificially Synthesized Probe
  source 1..80: mol_type = other DNA
ctggcagagaaatgtgtgaggcggactggtacacaacacaagcctaagggaagcagcacccgctccacagacaccacgca

SEQ ID NO: 108169 - DNA, 80 bp, synthetic construct
  misc_feature 1..80: note = Artificially Synthesized Probe
  source 1..80: mol_type = other DNA
ttaggaagcagttattcgagtcatacccaggtgtgaaaagctaccaaggtcaaggcaaacataggaatggcctagtgcca

SEQ ID NO: 108170 - DNA, 80 bp, synthetic construct
  misc_feature 1..80: note = Artificially Synthesized Probe
  source 1..80: mol_type = other DNA
gcagcatgcttctgttttatgtttagaggtttctctggccacctttcgagacttcattgttctctgaagatcgagctcta

SEQ ID NO: 108171 - DNA, 80 bp, synthetic construct
  misc_feature 1..80: note = Artificially Synthesized Probe
  source 1..80: mol_type = other DNA
agatgacgcatgattacgtgtaatttacaaaacacatttgatgctcaggcaacctcacagatctcgtgagcaaactcttc

SEQ ID NO: 108172 - DNA, 80 bp, synthetic construct
  misc_feature 1..80: note = Artificially Synthesized Probe
  source 1..80: mol_type = other DNA
cacttcagatttatgagaaaaatgcacttcaaaggggcactttccagaaaaacgttcagactcatggtgaaaaggtatct

SEQ ID NO: 108173 - DNA, 80 bp, synthetic construct
  misc_feature 1..80: note = Artificially Synthesized Probe
  source 1..80: mol_type = other DNA
gatttccttcacatcagaaaccatgggatttggcaccagcgtgacaaccatttagcatttgctgattcctagttagtcca

SEQ ID NO: 108174 - DNA, 80 bp, synthetic construct
  misc_feature 1..80: note = Artificially Synthesized Probe
  source 1..80: mol_type = other DNA
caatctgcaaaaccgaatccacgtctcgaaagtttcaagagaattctactgtagacatctgtactatcagctacatttgg

SEQ ID NO: 108175 - DNA, 80 bp, synthetic construct
  misc_feature 1..80: note = Artificially Synthesized Probe
  source 1..80: mol_type = other DNA
tatttggcacagttttcacagggtgcccttcatttttgaagcagcataggttttgcttatttgagttttgcaaaaaatat

SEQ ID NO: 108176 - DNA, 80 bp, synthetic construct
  misc_feature 1..80: note = Artificially Synthesized Probe
  source 1..80: mol_type = other DNA
cgtgattacaccaatgcctgaagattaaactcacctagagaaagaacggtctcttaaagccccagagaatgaaccaaggc

SEQ ID NO: 108177 - DNA, 80 bp, synthetic construct
  misc_feature 1..80: note = Artificially Synthesized Probe
  source 1..80: mol_type = other DNA
ggagcagcagcagcgaccgagacgtgcacttagccgctgtgtttacaggaggtccccgtggcccggatgcatgctttcct

SEQ ID NO: 108178 - DNA, 80 bp, synthetic construct
  misc_feature 1..80: note = Artificially Synthesized Probe
  source 1..80: mol_type = other DNA
gatgatcaaagcctcaaggaaatggatgcaacattcaaagagactccgagagaaaaggaggagaatgtcttctaatcatc

SEQ ID NO: 108179 - DNA, 80 bp, synthetic construct
  misc_feature 1..80: note = Artificially Synthesized Probe
  source 1..80: mol_type = other DNA
ctcagctttctgtctcaggagtcatgaacctcaggagaagcaagtgtggtataaatagtctgactcaagagacggggagc

SEQ ID NO: 108180 - DNA, 80 bp, synthetic construct
  misc_feature 1..80: note = Artificially Synthesized Probe
  source 1..80: mol_type = other DNA
atatatatatacacacatatatgcatatatgacaggctatgccaatttgaaaaaaaagaataaaagtcaataaaattgga

SEQ ID NO: 108181 - DNA, 80 bp, synthetic construct
  misc_feature 1..80: note = Artificially Synthesized Probe
  source 1..80: mol_type = other DNA
acacccaatttttgctccagtctgagcaaattaaacttggctggattatctgatggggttgatatcctggtaagtgtcaa

SEQ ID NO: 108182 - DNA, 80 bp, synthetic construct
  misc_feature 1..80: note = Artificially Synthesized Probe
  source 1..80: mol_type = other DNA
ttagaagctagtaattcaatctccttactgcttcaaaactattttaagaaaagctctcttactccccaggagcacaacgt

SEQ ID NO: 108183 - DNA, 80 bp, synthetic construct
  misc_feature 1..80: note = Artificially Synthesized Probe
  source 1..80: mol_type = other DNA
ggaagtgccttgccaggacactaacccagctgctgtttaacagaggacatgaggattcaccttttggaaccccagggagg

SEQ ID NO: 108184 - DNA, 80 bp, synthetic construct
  misc_feature 1..80: note = Artificially Synthesized Probe
  source 1..80: mol_type = other DNA
ataaaacttatgatattgccacctaccattctctctctccgaggttacctacctctcacctaccttgcacaataatcttt

SEQ ID NO: 108185 - DNA, 80 bp, synthetic construct
  misc_feature 1..80: note = Artificially Synthesized Probe
  source 1..80: mol_type = other DNA
aacctcactgtgattatagaatcagcaaagtacacaggttcagtgagccagaaataaatacattaatgcgagaagacacc

SEQ ID NO: 108186 - DNA, 80 bp, synthetic construct
  misc_feature 1..80: note = Artificially Synthesized Probe
  source 1..80: mol_type = other DNA
aattaatacctgcttcatttaccaaagtaaatatcctttccttgtaaccgcaattgtctgagtccttgacacgttactca

SEQ ID NO: 108187 - DNA, 80 bp, synthetic construct
  misc_feature 1..80: note = Artificially Synthesized Probe
  source 1..80: mol_type = other DNA
tccctaaagggcattttgtggtgatttcaaagctaaaccaaccagaaagtctttacactcatttcatttccaaattttcc

SEQ ID NO: 108188 - DNA, 80 bp, synthetic construct
  misc_feature 1..80: note = Artificially Synthesized Probe
  source 1..80: mol_type = other DNA
tataaaatcaatatcaacttaaccaccatgccctcaggaggaacagcaaaaaggtcactccaagaaattcaaacaatttt

SEQ ID NO: 108189 - DNA, 80 bp, synthetic construct
  misc_feature 1..80: note = Artificially Synthesized Probe
  source 1..80: mol_type = other DNA
ctgtcaacagcaatgtcatctgaagggctgtgtgtatgatggtgctagtgggaatcctgggagactgtccctcactggca

SEQ ID NO: 108190 - DNA, 80 bp, synthetic construct
  misc_feature 1..80: note = Artificially Synthesized Probe
  source 1..80: mol_type = other DNA
cctttccattctatcaatattttatatttgaatttcaaagtatatcaaagggcgccacgctttctaaaaatctctgcctg

SEQ ID NO: 108191 - DNA, 80 bp, synthetic construct
  misc_feature 1..80: note = Artificially Synthesized Probe
  source 1..80: mol_type = other DNA
ctgcttcttcaaacgtgattttccttttgctttgaagcaaagctatgcactgcaactgaaatgccagcctcaacacattt

SEQ ID NO: 108192 - DNA, 80 bp, synthetic construct
  misc_feature 1..80: note = Artificially Synthesized Probe
  source 1..80: mol_type = other DNA
ctgtcttgtggtcaatctcttttaagcatagagattgtgtaaattccttatgtgggggagggtcctgagagctcacagag

SEQ ID NO: 108193 - DNA, 80 bp, synthetic construct
  misc_feature 1..80: note = Artificially Synthesized Probe
  source 1..80: mol_type = other DNA
gtattgcacactgtaatcatgtgactagagaaaacaaaggatccagtccaatgaggaaatcttacacatgtactgaccaa

SEQ ID NO: 108194 - DNA, 80 bp, synthetic construct
  misc_feature 1..80: note = Artificially Synthesized Probe
  source 1..80: mol_type = other DNA
ggacaatactaaatacgaaatgtgcgccatagaacttccagaaactctgtggttttttaaaaatgcccgacttggtctga

SEQ ID NO: 108195 - DNA, 80 bp, synthetic construct
  misc_feature 1..80: note = Artificially Synthesized Probe
  source 1..80: mol_type = other DNA
caggtcaaaggatcttttcacagaagaccccgaggaagccgatgatttttgagacatcttcaaacacctacacgccaaat

SEQ ID NO: 108196 - DNA, 80 bp, synthetic construct
  misc_feature 1..80: note = Artificially Synthesized Probe
  source 1..80: mol_type = other DNA
aactgtggctgcaacgtatttgcacgaatgctgatgagaagttccaaactgtcctcataaaagaccccaaactatgatac

SEQ ID NO: 108197 - DNA, 80 bp, synthetic construct
  misc_feature 1..80: note = Artificially Synthesized Probe
  source 1..80: mol_type = other DNA
gcatctgcacctgggtcgccccctagtcccgagagcttctccttcagcctgtgctgagagctatggcggaggcagtagat

SEQ ID NO: 108198 - DNA, 80 bp, synthetic construct
  misc_feature 1..80: note = Artificially Synthesized Probe
  source 1..80: mol_type = other DNA
cagaacaaggagagaggggtgtgttagctcctgacaaagcatgacctcctaaaaacacacgtctccaaatgcaacttgaa

SEQ ID NO: 108199 - DNA, 80 bp, synthetic construct
  misc_feature 1..80: note = Artificially Synthesized Probe
  source 1..80: mol_type = other DNA
ccttcagtggtggctgtttttcaaatttatgtaacgtatttggcagctaatttgctgccttaagtaaagtatccatccct

SEQ ID NO: 108200 - DNA, 80 bp, synthetic construct
  misc_feature 1..80: note = Artificially Synthesized Probe
  source 1..80: mol_type = other DNA
agtagccaccaagtccagcacatcttcagcaacaaaggaacgtgggactggctctgtgcatcttcacagaacattctccc

SEQ ID NO: 108201 - DNA, 80 bp, synthetic construct
  misc_feature 1..80: note = Artificially Synthesized Probe
  source 1..80: mol_type = other DNA
tggataaagtctctcttatttcatgacatcgtggctccctctcaggctgtggtttgtgaggaaaagtgaaaaaagggaag

SEQ ID NO: 108202 - DNA, 80 bp, synthetic construct
  misc_feature 1..80: note = Artificially Synthesized Probe
  source 1..80: mol_type = other DNA
acctacgtatttttccttgaaaggagctgcagagcctttggaacttcacttctcagcgaggaaaacccttcagattctca

SEQ ID NO: 108203 - DNA, 80 bp, synthetic construct
  misc_feature 1..80: note = Artificially Synthesized Probe
  source 1..80: mol_type = other DNA
aatagttgcacggctctcccctcattaacttcattagaaggtatattagcaacaattaaggacgccacaggaaaatggga

SEQ ID NO: 108204 - DNA, 80 bp, synthetic construct
  misc_feature 1..80: note = Artificially Synthesized Probe
  source 1..80: mol_type = other DNA
gcctggccggcctattcattatctctcttctattagtaattttctgctccgtattcagcctcccaactcttcatttcctc

SEQ ID NO: 108205 - DNA, 80 bp, synthetic construct
  misc_feature 1..80: note = Artificially Synthesized Probe
  source 1..80: mol_type = other DNA
gactgagttaatggaaacgcgggttaaatgagaaaagacgcccggattttcctgcctggatgcgcggctcggaggaggac

SEQ ID NO: 108206 - DNA, 80 bp, synthetic construct
  misc_feature 1..80: note = Artificially Synthesized Probe
  source 1..80: mol_type = other DNA
gaggggcgggaaccaggggagcggcccgaaccccgtttggtccggaccccgcagccaccgctgggtctcgccgccgggtc

SEQ ID NO: 108207 - DNA, 80 bp, synthetic construct
  misc_feature 1..80: note = Artificially Synthesized Probe
  source 1..80: mol_type = other DNA
ctcctgcgcgcccctccccgcccctccccgggcacagcccgttcacgaaacctaaggcgccggccacgcgccacctcccc

SEQ ID NO: 108208 - DNA, 80 bp, synthetic construct
  misc_feature 1..80: note = Artificially Synthesized Probe
  source 1..80: mol_type = other DNA
gtccaagcggcgccgggacaggggccgggtcctctgcccaccccagggtccatgttcgcctgcggggccgcgtcccccgg

SEQ ID NO: 108209 - DNA, 80 bp, synthetic construct
  misc_feature 1..80: note = Artificially Synthesized Probe
  source 1..80: mol_type = other DNA
ccctcccacccctcatcccggccgggccgatggcccccgcgcgcctccatccgccccagcgcggaggcgaccccggcccc

SEQ ID NO: 108210 - DNA, 80 bp, synthetic construct
  misc_feature 1..80: note = Artificially Synthesized Probe
  source 1..80: mol_type = other DNA
ggcagtggcacccaggctgtgcgcgcgggtgtgtggggttccgaggcgcagggcgaccgccggctccggctccccgagga

SEQ ID NO: 108211 - DNA, 80 bp, synthetic construct
  misc_feature 1..80: note = Artificially Synthesized Probe
  source 1..80: mol_type = other DNA
acgctccgcacgcgcgggagcggaaccgggcctgctttggaggcctcccttggcgcgcttggatttactcaaaggtcaaa

SEQ ID NO: 108212 - DNA, 80 bp, synthetic construct
  misc_feature 1..80: note = Artificially Synthesized Probe
  source 1..80: mol_type = other DNA
aggtccataatgatgtagcaggaaaatcaactgtctgctgtggacggctcctgcttcttgcatgccaggattaagactaa

SEQ ID NO: 108213 - DNA, 80 bp, synthetic construct
  misc_feature 1..80: note = Artificially Synthesized Probe
  source 1..80: mol_type = other DNA
gtcccagcagaggaggggtgggagccgccccaggcccacctccccgcgccggtccacaaggaggcccctcctgcaacctg

SEQ ID NO: 108214 - DNA, 80 bp, synthetic construct
  misc_feature 1..80: note = Artificially Synthesized Probe
  source 1..80: mol_type = other DNA
cctgacacagaagtcgctggatcccagggcccggctgggaaacccgcttcctacccgcccgcgggcgccgcagaagaaac

SEQ ID NO: 108215 - DNA, 80 bp, synthetic construct
  misc_feature 1..80: note = Artificially Synthesized Probe
  source 1..80: mol_type = other DNA
gttccaataactttacaatgacttgactccctttttgtggagttaaaaaaaatcttcaaactcctgctagccatggcctt

SEQ ID NO: 108216 - DNA, 80 bp, synthetic construct
  misc_feature 1..80: note = Artificially Synthesized Probe
  source 1..80: mol_type = other DNA
gggtggaccccaaagagagcccagactaattagaggcatcttatcagtcttgacttgaaattgaaagaaaattatgttta

SEQ ID NO: 108217 - DNA, 80 bp, synthetic construct
  misc_feature 1..80: note = Artificially Synthesized Probe
  source 1..80: mol_type = other DNA
ccgggtgggggagatgcacagataggcacacttcagtgctgagttctcagaggcaggaatagtataatttaaaaaaataa

SEQ ID NO: 108218 - DNA, 80 bp, synthetic construct
  misc_feature 1..80: note = Artificially Synthesized Probe
  source 1..80: mol_type = other DNA
accacagagacaatttgtggagctgtcttagaacttagcatctgcagacactgtcctgaccaatttaaattattttgacc

SEQ ID NO: 108219 - DNA, 80 bp, synthetic construct
  misc_feature 1..80: note = Artificially Synthesized Probe
  source 1..80: mol_type = other DNA
ccacacaaatacaaaactttatggtaaatatgtgttgacgggtagccagatttagtccttttccaaggttgtgtgatata

SEQ ID NO: 108220 - DNA, 80 bp, synthetic construct
  misc_feature 1..80: note = Artificially Synthesized Probe
  source 1..80: mol_type = other DNA
tcagtcccagcctcatcctatctttgtgtgcatttaaattactaaattataaatacctttttctcttaaaacttagaagt

SEQ ID NO: 108221 - DNA, 80 bp, synthetic construct
  misc_feature 1..80: note = Artificially Synthesized Probe
  source 1..80: mol_type = other DNA
gccatagcaagtgatccaacttgaaaacacgggggaaggggtgtcttaaaatattttaaaagtattttttaaagctgtta

SEQ ID NO: 108222 - DNA, 80 bp, synthetic construct
  misc_feature 1..80: note = Artificially Synthesized Probe
  source 1..80: mol_type = other DNA
tttgtgcaactgaaagctattgttcctccgtgcagatgaaattgtacttgcaaatctgccattcaagtggccaaaaaacc

SEQ ID NO: 108223 - DNA, 80 bp, synthetic construct
  misc_feature 1..80: note = Artificially Synthesized Probe
  source 1..80: mol_type = other DNA
tttgccatctttaagcactcctaaaacatcagttttaaagaaatactgtgttttaagacatcagggaagatttatgatac

SEQ ID NO: 108224 - DNA, 80 bp, synthetic construct
  misc_feature 1..80: note = Artificially Synthesized Probe
  source 1..80: mol_type = other DNA
atcctgcccgctctcgtgccctcctgggcatgggtgcggccaggccgggcgccggatcctgcccgctcgcgtgccctcct

SEQ ID NO: 108225 - DNA, 80 bp, synthetic construct
  misc_feature 1..80: note = Artificially Synthesized Probe
  source 1..80: mol_type = other DNA
aaactcagactcagcggatcacacttaaggcaccggctcctgacccctatttttggcccgcccgcctggtccccaggcct

SEQ ID NO: 108226 - DNA, 80 bp, synthetic construct
  misc_feature 1..80: note = Artificially Synthesized Probe
  source 1..80: mol_type = other DNA
ttgtcagaacccctctgtggcacgactttgagcagagggcgagggaaaggagggtcagcgttcggccccgtcccctgcct

SEQ ID NO: 108227 - DNA, 80 bp, synthetic construct
  misc_feature 1..80: note = Artificially Synthesized Probe
  source 1..80: mol_type = other DNA
tgcggcccagcctcctggccacagagcgcgccggccgcgagggaggaccaaggtccccaaccacgcccgcgtccacccgt

SEQ ID NO: 108228 - DNA, 80 bp, synthetic construct
  misc_feature 1..80: note = Artificially Synthesized Probe
  source 1..80: mol_type = other DNA
ctctcttgttcgatcgcgtcctaaaatctgggatcggcgacgcaaggacagcctggtttggcgaagacccctcggacacc

SEQ ID NO: 108229 - DNA, 80 bp, synthetic construct
  misc_feature 1..80: note = Artificially Synthesized Probe
  source 1..80: mol_type = other DNA
ccgtccagcccgcagcgcccagctcagcgcactgaggaccaaaaagggcgggagactctctccggccctaaaaggcaatt

SEQ ID NO: 108230 - DNA, 80 bp, synthetic construct
  misc_feature 1..80: note = Artificially Synthesized Probe
  source 1..80: mol_type = other DNA
ctctctggcgagcacgcggccgcctcacctggggtgggggaggcgctgagaaagcgcagttctctttgggggaggagaga

SEQ ID NO: 108231 - DNA, 80 bp, synthetic construct
  misc_feature 1..80: note = Artificially Synthesized Probe
  source 1..80: mol_type = other DNA
ggaaaatgcgcccacactggcgcctctccatcctggctgctcgccccttccctcctcctttcccacacgcctcccatctc

SEQ ID NO: 108232 - DNA, 80 bp, synthetic construct
  misc_feature 1..80: note = Artificially Synthesized Probe
  source 1..80: mol_type = other DNA
accctccaaatctgtgcgctcagaaggagctgccctttgcccgctcctcctcacaggcccaccctagacccacttgggga

SEQ ID NO: 108233 - DNA, 80 bp, synthetic construct
  misc_feature 1..80: note = Artificially Synthesized Probe
  source 1..80: mol_type = other DNA
cctacgcgcctggtgatgctctcgtgggcccttcctgctccctccgcccccatcccagcctctctcgcctcttccagggc

SEQ ID NO: 108234 - DNA, 80 bp, synthetic construct
  misc_feature 1..80: note = Artificially Synthesized Probe
  source 1..80: mol_type = other DNA
agccagctgcttccctgcgctggagccacagactagcggggtcatccgcttctgaccacaaacttctagggcggccggag

SEQ ID NO: 108235 - DNA, 80 bp, synthetic construct
  misc_feature 1..80: note = Artificially Synthesized Probe
  source 1..80: mol_type = other DNA
ctcctgggcatgggtgcggccaggccgggcgccggatcctgcccgctctcgtgccctcctgggcatgggtgcggccaggc

SEQ ID NO: 108236 - DNA, 80 bp, synthetic construct
  misc_feature 1..80: note = Artificially Synthesized Probe
  source 1..80: mol_type = other DNA
gcgcgggcgggctcagggcgggctccggacggtcccggtagggccgccggccgcgcgcgtagcaccaaccagcgcggccg

SEQ ID NO: 108237 - DNA, 80 bp, synthetic construct
  misc_feature 1..80: note = Artificially Synthesized Probe
  source 1..80: mol_type = other DNA
cgagactatgaatggacatcagctttgtcagtcattggtacaacgccgaagccagggccttcgccttttctttcttttca

SEQ ID NO: 108238 - DNA, 80 bp, synthetic construct
  misc_feature 1..80: note = Artificially Synthesized Probe
  source 1..80: mol_type = other DNA
ggcatatcgttcttcccagttaccttttccagtgttgccgttcgggcctttttgctccctttccaaatggaagcaggcca

SEQ ID NO: 108239 - DNA, 80 bp, synthetic construct
  misc_feature 1..80: note = Artificially Synthesized Probe
  source 1..80: mol_type = other DNA
accatttggtccaggccaatgtcggccgccagcccaaaacgccgaagggagacggcggtgaaaacccaggcgtgcgagct

SEQ ID NO: 108240 - DNA, 80 bp, synthetic construct
  misc_feature 1..80: note = Artificially Synthesized Probe
  source 1..80: mol_type = other DNA
agagctagggtctcggggcgactaggaccactgagcacctcccccccgcgcctcccgcccatgctctctctccccaggcc

SEQ ID NO: 108241 - DNA, 80 bp, synthetic construct
  misc_feature 1..80: note = Artificially Synthesized Probe
  source 1..80: mol_type = other DNA
cagatcttgtcacacgcagatgacagtctgcggagggctctttagtttctccttttctggaaaccccagcggccccctcc

SEQ ID NO: 108242 - DNA, 80 bp, synthetic construct
  misc_feature 1..80: note = Artificially Synthesized Probe
  source 1..80: mol_type = other DNA
ccaggccaggcccaggcggcgcttccacagtctcccctcccctcccttgcactctggcgctgcccctagacctgctcggt

SEQ ID NO: 108243 - DNA, 80 bp, synthetic construct
  misc_feature 1..80: note = Artificially Synthesized Probe
  source 1..80: mol_type = other DNA
ttcctctgactgcaggcccaggctgagttccgcatttatttttgtatttatagggcaaggccagagcgcttcataaagct

SEQ ID NO: 108244 - DNA, 80 bp, synthetic construct
  misc_feature 1..80: note = Artificially Synthesized Probe
  source 1..80: mol_type = other DNA
cctctgcccatgagtgaacccctccagtaggcggggacggggtacatcaccttggccctctcgtcccccctgcccagggc

SEQ ID NO: 108245 - DNA, 80 bp, synthetic construct
  misc_feature 1..80: note = Artificially Synthesized Probe
  source 1..80: mol_type = other DNA
cctcctccggtgcctcggcgtccccagccaggctccagggcgaccccaggcccggccctgggcagagacagaggagggga

SEQ ID NO: 108246 - DNA, 80 bp, synthetic construct
  misc_feature 1..80: note = Artificially Synthesized Probe
  source 1..80: mol_type = other DNA
ggtgggatagggtgggcgtgtgtcccccttcacttgataaaaggcttttcttagtgtcaaaggattcatttaaagcctcc

SEQ ID NO: 108247 - DNA, 80 bp, synthetic construct
  misc_feature 1..80: note = Artificially Synthesized Probe
  source 1..80: mol_type = other DNA
catagcaacggccagcgcgcgcgtctgtgtgtgcgcgcgtgtctgatgtgtgtgtgcccgtggtgttcccgggactcccc

SEQ ID NO: 108248 - DNA, 80 bp, synthetic construct
  misc_feature 1..80: note = Artificially Synthesized Probe
  source 1..80: mol_type = other DNA
ggccgctggggcattggggcatcctgccctcgctgccccgaccctcccgctgcggtcgcagggccttggggcaccgggga

SEQ ID NO: 108249 - DNA, 80 bp, synthetic construct
  misc_feature 1..80: note = Artificially Synthesized Probe
  source 1..80: mol_type = other DNA
ggcagaggccagaggggccctggcgcaccctccccgcccgcggcgacctcgcaccaccttccccgccagcccgcggctct

SEQ ID NO: 108250 - DNA, 80 bp, synthetic construct
  misc_feature 1..80: note = Artificially Synthesized Probe
  source 1..80: mol_type = other DNA
ctcagtctccacggcggcgcagaccgcacgcggccaccctgggcctcggacagggctagggggacgcagaccctgccgtc

SEQ ID NO: 108251 - DNA, 80 bp, synthetic construct
  misc_feature 1..80: note = Artificially Synthesized Probe
  source 1..80: mol_type = other DNA
tacaattcttttcgttagtcccttcttccgttgtctcagtgtttcacttccaacatcaaagcaccgcattcctgatttga

SEQ ID NO: 108252 - DNA, 80 bp, synthetic construct
  misc_feature 1..80: note = Artificially Synthesized Probe
  source 1..80: mol_type = other DNA
gtgcacctgcggcaatatattctgggtggcagacggttatttatgtctgagagcctccaactcactccccttcctcccac

SEQ ID NO: 108253 - DNA, 80 bp, synthetic construct
  misc_feature 1..80: note = Artificially Synthesized Probe
  source 1..80: mol_type = other DNA
aactggtaagttactcgccagatttccattctatttttctttattttaaattccctttttatttccagggcaggaaaatg

SEQ ID NO: 108254 - DNA, 80 bp, synthetic construct
  misc_feature 1..80: note = Artificially Synthesized Probe
  source 1..80: mol_type = other DNA
ttacatgatttcaataacattttcagagaaaacttttaaacatgacacaaaatatttttgagagacatgttgattgaaat

SEQ ID NO: 108255 - DNA, 80 bp, synthetic construct
  misc_feature 1..80: note = Artificially Synthesized Probe
  source 1..80: mol_type = other DNA
ttaaagtgcatttcacatttgttatgtgtaaaacctaatgttctgtgataagaatctcattttcaatttaaggaacacca

SEQ ID NO: 108256 - DNA, 80 bp, synthetic construct
  misc_feature 1..80: note = Artificially Synthesized Probe
  source 1..80: mol_type = other DNA
aggtagaaaatgatttaaaaaacacctgagactcttgatttcagaagtctaaatcaattttgttttttaaactaagacag

SEQ ID NO: 108257 - DNA, 80 bp, synthetic construct
  misc_feature 1..80: note = Artificially Synthesized Probe
  source 1..80: mol_type = other DNA
gaggagtcagcgcacacacaaagaaaatccagatggaaggaaagaaaggaaccttaacgatgtctaccggggacagagcg

SEQ ID NO: 108258 - DNA, 80 bp, synthetic construct
  misc_feature 1..80: note = Artificially Synthesized Probe
  source 1..80: mol_type = other DNA
aaaacaacattttaaagtaacaatgagtgcattttgaaaacaagatgttttgagaggtcagcctcctagtaaagcatagt

SEQ ID NO: 108259 - DNA, 80 bp, synthetic construct
  misc_feature 1..80: note = Artificially Synthesized Probe
  source 1..80: mol_type = other DNA
cagacactagtgagaagtccttattcatcataaaagaaggtaagtccattgcaacaatagggcagtgaaacaactgcatc

SEQ ID NO: 108260 - DNA, 80 bp, synthetic construct
  misc_feature 1..80: note = Artificially Synthesized Probe
  source 1..80: mol_type = other DNA
cagagccctcaccatctacccatgcatactgggtcttggcagagccctcaccatctacccatgcatactgggtcttggaa

SEQ ID NO: 108261 - DNA, 80 bp, synthetic construct
  misc_feature 1..80: note = Artificially Synthesized Probe
  source 1..80: mol_type = other DNA
cctcaccatctacccatgcatactggatcttagtagagccctcaccatctacccatgcatactggatcttagtagagccc

SEQ ID NO: 108262 - DNA, 80 bp, synthetic construct
  misc_feature 1..80: note = Artificially Synthesized Probe
  source 1..80: mol_type = other DNA
catctacccatgcatactggatcttggcagagccctcaccatctacccatgcatactgggtcttggcagagccctcacca

SEQ ID NO: 108263 - DNA, 80 bp, synthetic construct
  misc_feature 1..80: note = Artificially Synthesized Probe
  source 1..80: mol_type = other DNA
cccatgcatactgggtcttagcagagccctcaccgtctacccatgcatactggatcttggcagagccctcaccatctacc

SEQ ID NO: 108264 - DNA, 80 bp, synthetic construct
  misc_feature 1..80: note = Artificially Synthesized Probe
  source 1..80: mol_type = other DNA
catactgggtcttggcagagccctcaccgtctacccatgcatactgggtcttggcagagccctcaccatctacccatgca

SEQ ID NO: 108265 - DNA, 80 bp, synthetic construct
  misc_feature 1..80: note = Artificially Synthesized Probe
  source 1..80: mol_type = other DNA
gggtcttggcagagccctcaccatctacccatgcatactgggtcttggcagagccctcaccatctacccatgcatactgt

SEQ ID NO: 108266 - DNA, 80 bp, synthetic construct
  misc_feature 1..80: note = Artificially Synthesized Probe
  source 1..80: mol_type = other DNA
tagtagagccctcaccatctacccatgcatactgggtcttagtagagccctcaccatctactcatgcatactggatctta

SEQ ID NO: 108267 - DNA, 80 bp, synthetic construct
  misc_feature 1..80: note = Artificially Synthesized Probe
  source 1..80: mol_type = other DNA
agttgtccatgtcgggaatctacagggaagtgacgcaggctgccatcttgctcagcaccccagtgtggcgggcgccccag

SEQ ID NO: 108268 - DNA, 80 bp, synthetic construct
  misc_feature 1..80: note = Artificially Synthesized Probe
  source 1..80: mol_type = other DNA
agccctcaccgtctacccatgcatactgggtcttagcagagccctcaccgtctacccatgcatactggatcttggcagag

SEQ ID NO: 108269 - DNA, 80 bp, synthetic construct
  misc_feature 1..80: note = Artificially Synthesized Probe
  source 1..80: mol_type = other DNA
caccatctactcatgcatactgggtcttggcagagccctcaccatctacccatgcatactggatcttagcagagccctca

SEQ ID NO: 108270 - DNA, 80 bp, synthetic construct
  misc_feature 1..80: note = Artificially Synthesized Probe
  source 1..80: mol_type = other DNA
atgtaagcagtgcaaatgtaagatatagctataaaatcaatgcccttattttaaaattgagaaatgctaaaattattttt

SEQ ID NO: 108271 - DNA, 80 bp, synthetic construct
  misc_feature 1..80: note = Artificially Synthesized Probe
  source 1..80: mol_type = other DNA
aatccaaaaataggaactcaatgatgagatagacttgatatcccaccaatggcttgacatgcttacatgaaaccacgtgc

SEQ ID NO: 108272 - DNA, 80 bp, synthetic construct
  misc_feature 1..80: note = Artificially Synthesized Probe
  source 1..80: mol_type = other DNA
ttaaaagtagcattttgaaaaaatactgttcataagcacaggtacttataaacagtgcagtctccctagaggtgaatccg

SEQ ID NO: 108273 - DNA, 80 bp, synthetic construct
  misc_feature 1..80: note = Artificially Synthesized Probe
  source 1..80: mol_type = other DNA
tattcttttcaaaactgagctaaaattccttagattgaatgtttgtaagaaagactcattaccacatgaacaagaatcta

SEQ ID NO: 108274 - DNA, 80 bp, synthetic construct
  misc_feature 1..80: note = Artificially Synthesized Probe
  source 1..80: mol_type = other DNA
agttacatactacacatccattacaatatttggaaacttttcctcgggttgctttggaattaaaagtagaacaataattc

SEQ ID NO: 108275 - DNA, 80 bp, synthetic construct
  misc_feature 1..80: note = Artificially Synthesized Probe
  source 1..80: mol_type = other DNA
tcctgacaacatccgtggggtgggggctcccctgaggcccctgaggctgccgctcactggggaagggccttgaggatggc

SEQ ID NO: 108276 - DNA, 80 bp, synthetic construct
  misc_feature 1..80: note = Artificially Synthesized Probe
  source 1..80: mol_type = other DNA
aaagaacagcaacagcctgacaaagctcacctttgtacctggattctactgagaaggaaaatcaaatgatcaccatcaag

SEQ ID NO: 108277 - DNA, 80 bp, synthetic construct
  misc_feature 1..80: note = Artificially Synthesized Probe
  source 1..80: mol_type = other DNA
ctggctcactgccaaccgccgacacccaggttcaaatgattctgctgccagtagctgggattacaggtgtctgccaccag

SEQ ID NO: 108278 - DNA, 80 bp, synthetic construct
  misc_feature 1..80: note = Artificially Synthesized Probe
  source 1..80: mol_type = other DNA
attctgacacagtgcggagcaggttcagggtaagctgtcactgagacggagcattggtggtgcaggattccatgtgactc

SEQ ID NO: 108279 - DNA, 80 bp, synthetic construct
  misc_feature 1..80: note = Artificially Synthesized Probe
  source 1..80: mol_type = other DNA
ggccactgggtaccatcccgtgccaagctcagcaaatgtaaatcgctctcattgttattttctaattcactcagggctca

SEQ ID NO: 108280 - DNA, 80 bp, synthetic construct
  misc_feature 1..80: note = Artificially Synthesized Probe
  source 1..80: mol_type = other DNA
tgccacatgtaactatatgtctccctaatatgtttccattcacacactttaggaagtgatatacctacttcgaccttgct

SEQ ID NO: 108281 - DNA, 80 bp, synthetic construct
  misc_feature 1..80: note = Artificially Synthesized Probe
  source 1..80: mol_type = other DNA
gagtattaaaaaagaaacaaatctgaaatatcacttccaccattaagagtgcatttgaaaaggccatttcaaaagagtag

SEQ ID NO: 108282 - DNA, 80 bp, synthetic construct
  misc_feature 1..80: note = Artificially Synthesized Probe
  source 1..80: mol_type = other DNA
ttggggtgaggcttgaggcttccttgtcttttgtcctccccacaatcagatcccattacttttttcgggtcatcccttat

SEQ ID NO: 108283 - DNA, 80 bp, synthetic construct
  misc_feature 1..80: note = Artificially Synthesized Probe
  source 1..80: mol_type = other DNA
acccatcagaggctggctccctttcatctgatcaaccaaggacacacaggggcgcctccagacctcccctgcatgccttc

SEQ ID NO: 108284 - DNA, 80 bp, synthetic construct
  misc_feature 1..80: note = Artificially Synthesized Probe
  source 1..80: mol_type = other DNA
tgctacggactgctcatcatttcacgcatgtgcacatgcactgtctctcacacacgcacgctttcgcacacgtggagaca

SEQ ID NO: 108285 - DNA, 80 bp, synthetic construct
  misc_feature 1..80: note = Artificially Synthesized Probe
  source 1..80: mol_type = other DNA
tatccgaagctggtcagtggcagaatctcaatcaacacacaggctcctatgcgaacccacacactgagggcatgtttcac

SEQ ID NO: 108286 - DNA, 80 bp, synthetic construct
  misc_feature 1..80: note = Artificially Synthesized Probe
  source 1..80: mol_type = other DNA
cagtctttcaaaaagatggtggtctttattctctattttccatagaatgtggtcacaggcatcgtgtgagcactgccatt

SEQ ID NO: 108287 - DNA, 80 bp, synthetic construct
  misc_feature 1..80: note = Artificially Synthesized Probe
  source 1..80: mol_type = other DNA
ctctgacccactcacaaagcactgcggttctaggtatgaaagcttctcactcttaactgacgtgggctgtgcgtttataa

SEQ ID NO: 108288 - DNA, 80 bp, synthetic construct
  misc_feature 1..80: note = Artificially Synthesized Probe
  source 1..80: mol_type = other DNA
gtgctggtgtaactgacgcgggctgtgcatttataagaaagcccggtcggtgctggtgtaactgacgcgggctgtgggtt

SEQ ID NO: 108289 - DNA, 80 bp, synthetic construct
  misc_feature 1..80: note = Artificially Synthesized Probe
  source 1..80: mol_type = other DNA
ggtcggtcctggtgtaactgacacgggctgtgggtttgtaagagagccgggtaggtgctggtgtaactgacgtgggctgt

SEQ ID NO: 108290 - DNA, 80 bp, synthetic construct
  misc_feature 1..80: note = Artificially Synthesized Probe
  source 1..80: mol_type = other DNA
aagttaaagaaaaccaagcaaatatgccaccggtgtctctttccaaggcttgtttgatttctcctggactctggctcttg

SEQ ID NO: 108291 - DNA, 80 bp, synthetic construct
  misc_feature 1..80: note = Artificially Synthesized Probe
  source 1..80: mol_type = other DNA
gtaactgacacgggctctgagtttatgagaaagcctggtcggtgctggtgaacatgggtgtctcccctcagagaagtaag

SEQ ID NO: 108292 - DNA, 80 bp, synthetic construct
  misc_feature 1..80: note = Artificially Synthesized Probe
  source 1..80: mol_type = other DNA
atatggtggataataatctctggcaacacaaaaaggcaggcagcagctcagctcactgtttcatctgttgatcagtctac

SEQ ID NO: 108293 - DNA, 80 bp, synthetic construct
  misc_feature 1..80: note = Artificially Synthesized Probe
  source 1..80: mol_type = other DNA
aggtcagaaggaggtgtctccaggaaacactaggggaccttcatacctgaggggccaaaatagctgttttcaagctgctg

SEQ ID NO: 108294 - DNA, 80 bp, synthetic construct
  misc_feature 1..80: note = Artificially Synthesized Probe
  source 1..80: mol_type = other DNA
gaagtatcgaaagtttggaaaaatagagaaataagaagagctcctaaactgagcctgtggcaaagggagtatcctgaaat

SEQ ID NO: 108295 - DNA, 80 bp, synthetic construct
  misc_feature 1..80: note = Artificially Synthesized Probe
  source 1..80: mol_type = other DNA
cctggaggacagcaaaggcagcagagatggctgctaaggacgcacactggggtccccgaccgactttcgagctccgaggg

SEQ ID NO: 108296 - DNA, 80 bp, synthetic construct
  misc_feature 1..80: note = Artificially Synthesized Probe
  source 1..80: mol_type = other DNA
caccaggaccccaggcccacagaaactgtaagataaaacatggttgtgttaagctaagtttcgggataactcgctgtgca

SEQ ID NO: 108297 - DNA, 80 bp, synthetic construct
  misc_feature 1..80: note = Artificially Synthesized Probe
  source 1..80: mol_type = other DNA
gcggtccaacccccacctcagcacgctcccctcactccccgcggccgcttgtcctctgccgctgctctggatttgggatt

SEQ ID NO: 108298 - DNA, 80 bp, synthetic construct
  misc_feature 1..80: note = Artificially Synthesized Probe
  source 1..80: mol_type = other DNA
gggctcagggccctctgaagctctcactcgcccaaagctgacggcctctgttttttccagctgcagctccgggtgccatc

SEQ ID NO: 108299 - DNA, 80 bp, synthetic construct
  misc_feature 1..80: note = Artificially Synthesized Probe
  source 1..80: mol_type = other DNA
tcactgccctgtgcctcagtttctctccctgaaaatgggaataaaatgtacttgactcatgggcttaatgaactgatccc

SEQ ID NO: 108300 - DNA, 80 bp, synthetic construct
  misc_feature 1..80: note = Artificially Synthesized Probe
  source 1..80: mol_type = other DNA
agataataggattaagtaacacaaatataaagaggaaaaatgatcaccgatgaagagtgcaagagaccacgtgtgtgtgc

SEQ ID NO: 108301 - DNA, 80 bp, synthetic construct
  misc_feature 1..80: note = Artificially Synthesized Probe
  source 1..80: mol_type = other DNA
cttctcagcacctcctgaggaagccccaggacagaacaggaaccactggagtcagaagcagaatgaggggcatctgtatt

SEQ ID NO: 108302 - DNA, 80 bp, synthetic construct
  misc_feature 1..80: note = Artificially Synthesized Probe
  source 1..80: mol_type = other DNA
catgagcgcaggtaagttttattacaattttactcagaggttttgcaaactgcagggatgcaatgtattctttttttctt

SEQ ID NO: 108303 - DNA, 80 bp, synthetic construct
  misc_feature 1..80: note = Artificially Synthesized Probe
  source 1..80: mol_type = other DNA
aaatgacagtgactgttatcaaatgtctaactctgtgctcgagcactaacctccatgcttgcaggaaggctctttgtgaa

SEQ ID NO: 108304 - DNA, 80 bp, synthetic construct
  misc_feature 1..80: note = Artificially Synthesized Probe
  source 1..80: mol_type = other DNA
taaaaatacaaaaaaattagctgggcatggtggcatgcgcctgtagtcccagctactcaggaggctgaggcagaagaatt

SEQ ID NO: 108305 - DNA, 80 bp, synthetic construct
  misc_feature 1..80: note = Artificially Synthesized Probe
  source 1..80: mol_type = other DNA
cttaaggtcacacagcaggaggcgaggcagggtatgaattgagtgaatctgacgccagagccttctggatcaacatgggc

SEQ ID NO: 108306 - DNA, 80 bp, synthetic construct
  misc_feature 1..80: note = Artificially Synthesized Probe
  source 1..80: mol_type = other DNA
gaatctgacctcagtgccttccagataaatgcggatcacatcccccagaatgctgggaattgagtgaatctgacccaggt

SEQ ID NO: 108307 - DNA, 80 bp, synthetic construct
  misc_feature 1..80: note = Artificially Synthesized Probe
  source 1..80: mol_type = other DNA
cagaatgctgggaattgagtgaatctgacccaggtgccttctggataaaggcggaccacatccttccagaatgctgggaa

SEQ ID NO: 108308 - DNA, 80 bp, synthetic construct
  misc_feature 1..80: note = Artificially Synthesized Probe
  source 1..80: mol_type = other DNA
gattaacgtggaccacattcctccagaatgctgggaattgagcaaatctgaccccagcaccttccagatcaatgtgcact

SEQ ID NO: 108309 - DNA, 80 bp, synthetic construct
  misc_feature 1..80: note = Artificially Synthesized Probe
  source 1..80: mol_type = other DNA
tctgacccagtgccttccggatcaacatgcactacatccctccacgatgtgggaactgggcgaatgtgaccccagtgcct

SEQ ID NO: 108310 - DNA, 80 bp, synthetic construct
  misc_feature 1..80: note = Artificially Synthesized Probe
  source 1..80: mol_type = other DNA
agaatgctgggaactgggtgaatctgaccccagtgccttccagatcaacgtgaccacatccttccagaatgctgggaatt

SEQ ID NO: 108311 - DNA, 80 bp, synthetic construct
  misc_feature 1..80: note = Artificially Synthesized Probe
  source 1..80: mol_type = other DNA
tcaacgtgaccacatccctcctgattgccagcaaatgagcgaatctgaccccagtatcttccagatcaatgtggaccaca

SEQ ID NO: 108312 - DNA, 80 bp, synthetic construct
  misc_feature 1..80: note = Artificially Synthesized Probe
  source 1..80: mol_type = other DNA
aggtggaccacatccctccagaatgccagacagatgaaggacacagaaaacttaatagtaaaacatattttctgatacgc

SEQ ID NO: 108313 - DNA, 80 bp, synthetic construct
  misc_feature 1..80: note = Artificially Synthesized Probe
  source 1..80: mol_type = other DNA
gataaggaacgaagtggaacagttcccgtgccccaggagcgcagagctcctcactcacccaggctgcgatgtttctgctt

SEQ ID NO: 108314 - DNA, 80 bp, synthetic construct
  misc_feature 1..80: note = Artificially Synthesized Probe
  source 1..80: mol_type = other DNA
ccacacatacacacagacacatacccagcatacttacacacacagcacacacacaaccacattcacacacacataggcat

SEQ ID NO: 108315 - DNA, 80 bp, synthetic construct
  misc_feature 1..80: note = Artificially Synthesized Probe
  source 1..80: mol_type = other DNA
ccgctgtagtttaaaagcttcagggaagacttgatcagtctcggcaggtattacaggcagaggcagatttctttttcctt

SEQ ID NO: 108316 - DNA, 80 bp, synthetic construct
  misc_feature 1..80: note = Artificially Synthesized Probe
  source 1..80: mol_type = other DNA
aggcacgcaccactacgcccagctaatttttgtatttttagtagagacggggtttcaccatgttagccaggatggtcttg

SEQ ID NO: 108317 - DNA, 80 bp, synthetic construct
  misc_feature 1..80: note = Artificially Synthesized Probe
  source 1..80: mol_type = other DNA
ttttatgatctcatttcagcaaatgtcactgcaaagtggagatgctatcatcccttagcagtgtgcatctgccttgggcc

SEQ ID NO: 108318 - DNA, 80 bp, synthetic construct
  misc_feature 1..80: note = Artificially Synthesized Probe
  source 1..80: mol_type = other DNA
tgattctgccccgtgccgtgtgcctctgagtgttgccttcccttctgaagctcaggcacatcctctcctctgctgccagc

SEQ ID NO: 108319 - DNA, 80 bp, synthetic construct
  misc_feature 1..80: note = Artificially Synthesized Probe
  source 1..80: mol_type = other DNA
ttccttccacagggactgtccagatcatcctaaaggttgggcagtggtgtgagtggctctcggccattcaggagtacctg

SEQ ID NO: 108320 - DNA, 80 bp, synthetic construct
  misc_feature 1..80: note = Artificially Synthesized Probe
  source 1..80: mol_type = other DNA
atgtgtgccccaacttccgtaaaaccacacatgcatagtcacaagcggctccctgctttatgcattctaaagcaattcag

SEQ ID NO: 108321 - DNA, 80 bp, synthetic construct
  misc_feature 1..80: note = Artificially Synthesized Probe
  source 1..80: mol_type = other DNA
cctttacatcaaacatgagatggtcatagtcacaattcaataacaagccacgtatggctccatgaaagccaccagtgaga

SEQ ID NO: 108322 - DNA, 80 bp, synthetic construct
  misc_feature 1..80: note = Artificially Synthesized Probe
  source 1..80: mol_type = other DNA
gccgagagagacaactgtggcttctgcctctcccagtgggagtgaggcccctggtcagagggcctgggtcgggggctgtg

SEQ ID NO: 108323 - DNA, 80 bp, synthetic construct
  misc_feature 1..80: note = Artificially Synthesized Probe
  source 1..80: mol_type = other DNA
tgtctgaaatgagctgcttacttttatttccaagaaaatgacaaagacgattttgacccctgacaattctttcagtcctg

SEQ ID NO: 108324 - DNA, 80 bp, synthetic construct
  misc_feature 1..80: note = Artificially Synthesized Probe
  source 1..80: mol_type = other DNA
actgtggttggggatgctctgggtgccccacacggttcaagccctccccagacctgggtctcagggatgccacttggcac

SEQ ID NO: 108325 - DNA, 80 bp, synthetic construct
  misc_feature 1..80: note = Artificially Synthesized Probe
  source 1..80: mol_type = other DNA
cacccctctgagaaattccctgcgagccccccagctctgtcttctatggggacttcgacctcgctccacgttgtgcagcc

SEQ ID NO: 108326 - DNA, 80 bp, synthetic construct
  misc_feature 1..80: note = Artificially Synthesized Probe
  source 1..80: mol_type = other DNA
ctgggacagagatttacacatacaagtcggatattctggggagctggaattcaaggatggacaatgaaagcccagagaca

SEQ ID NO: 108327 - DNA, 80 bp, synthetic construct
  misc_feature 1..80: note = Artificially Synthesized Probe
  source 1..80: mol_type = other DNA
gatgctggagagaggagcgtgaggcatacagaggcccaggtggctctgtgggggtcggacgcatgggtgtgtccccacca

SEQ ID NO: 108328 - DNA, 80 bp, synthetic construct
  misc_feature 1..80: note = Artificially Synthesized Probe
  source 1..80: mol_type = other DNA
gacgaggctttctggaacgtccagaataaagagaatcctcatttctcagcacacggacttctgatgtgagaagacagtga

SEQ ID NO: 108329 - DNA, 80 bp, synthetic construct
  misc_feature 1..80: note = Artificially Synthesized Probe
  source 1..80: mol_type = other DNA
acacagtgagaccccatctctacaaacaataaaaaaatcacccaagctgcctaaccgcccccacccccccgccccgtggc

SEQ ID NO: 108330 - DNA, 80 bp, synthetic construct
  misc_feature 1..80: note = Artificially Synthesized Probe
  source 1..80: mol_type = other DNA
gatgtcccctggggggacatctcttccggaggatctttagggtccctttcagccctgccatctgtacgcccaccatggac

SEQ ID NO: 108331 - DNA, 80 bp, synthetic construct
  misc_feature 1..80: note = Artificially Synthesized Probe
  source 1..80: mol_type = other DNA
gaggttccggggcagccgggttacacgcgagagccccacgcgccggaggttccggggcagccgggttacacgcgagagcc

SEQ ID NO: 108332 - DNA, 80 bp, synthetic construct
  misc_feature 1..80: note = Artificially Synthesized Probe
  source 1..80: mol_type = other DNA
cccggttacacgcgagagccccacgcgccggaggttccggggcagccgggttacacgcgagagccccacgcgccggaggt

SEQ ID NO: 108333 - DNA, 80 bp, synthetic construct
  misc_feature 1..80: note = Artificially Synthesized Probe
  source 1..80: mol_type = other DNA
agccccacgcgccagaggttccggggcagccgggttacacgcgagagccccacgcgccggaggttccggggcagccgggt

SEQ ID NO: 108334 - DNA, 80 bp, synthetic construct
  misc_feature 1..80: note = Artificially Synthesized Probe
  source 1..80: mol_type = other DNA
cctcaggcccacctgaccccggcagacctcctgctctcctctttgtcttctggccttgcaggcagctgtctaatgcaggg

SEQ ID NO: 108335 - DNA, 80 bp, synthetic construct
  misc_feature 1..80: note = Artificially Synthesized Probe
  source 1..80: mol_type = other DNA
tcatttagtgcatatattccttttaagaggtgtctaaatccttcgtgggccacaacagggtagacatcaggggctgtagc

SEQ ID NO: 108336 - DNA, 80 bp, synthetic construct
  misc_feature 1..80: note = Artificially Synthesized Probe
  source 1..80: mol_type = other DNA
catacatatgcacatgtgcacacacacaggcatgcacacaccacacaacactcacccacactcacatcatacatacgcac

SEQ ID NO: 108337 - DNA, 80 bp, synthetic construct
  misc_feature 1..80: note = Artificially Synthesized Probe
  source 1..80: mol_type = other DNA
ggaaggggggccgggcagctgggggcaccatgagtggggggaggggctgcgtcgtggaaggggggctgggtggctggggg

SEQ ID NO: 108338 - DNA, 80 bp, synthetic construct
  misc_feature 1..80: note = Artificially Synthesized Probe
  source 1..80: mol_type = other DNA
caaactgtgtcccctcaagaggatatgttgagtcttaaccccaggacctcagcatgttatgtaacttggaaaaaggacct

SEQ ID NO: 108339 - DNA, 80 bp, synthetic construct
  misc_feature 1..80: note = Artificially Synthesized Probe
  source 1..80: mol_type = other DNA
aggagtttaagaccagcctgaccaacatagtgaaaccccgtctctacttaaaatgtaaaaattagccaggcgtggtggtg

SEQ ID NO: 108340 - DNA, 80 bp, synthetic construct
  misc_feature 1..80: note = Artificially Synthesized Probe
  source 1..80: mol_type = other DNA
ttcagacacagacagacgtgcacagggagcgggtcacacacagaggcagggactggagtggggcagccacaagccgaggg

SEQ ID NO: 108341 - DNA, 80 bp, synthetic construct
  misc_feature 1..80: note = Artificially Synthesized Probe
  source 1..80: mol_type = other DNA
tcacacatgggccacacagaacgtggctgtgggcgggattgttctgggtgagccatgcgcatcccctgctatcagcaaca

SEQ ID NO: 108342 - DNA, 80 bp, synthetic construct
  misc_feature 1..80: note = Artificially Synthesized Probe
  source 1..80: mol_type = other DNA
ccaatgacgcatctttaattctattattgacaacatcgtggaatataacagaattgaggaatagccccacggcacgtttc

SEQ ID NO: 108343 - DNA, 80 bp, synthetic construct
  misc_feature 1..80: note = Artificially Synthesized Probe
  source 1..80: mol_type = other DNA
aaaatctatacttgtgatgtcaacagccgttcctccatctctcagcaagaaatgccatcagcaaagagacggtgtgacgc

SEQ ID NO: 108344 - DNA, 80 bp, synthetic construct
  misc_feature 1..80: note = Artificially Synthesized Probe
  source 1..80: mol_type = other DNA
tcccgacagctgtggccagatccagctttgctacggacacggagccacagaactggtctggacatggagccacagaactg

SEQ ID NO: 108345 - DNA, 80 bp, synthetic construct
  misc_feature 1..80: note = Artificially Synthesized Probe
  source 1..80: mol_type = other DNA
agctttcaattgagtgattatgtcttaaaagaatcacataaatgatacagctccacattttgaggtgtgtaaagccacga

SEQ ID NO: 108346 - DNA, 80 bp, synthetic construct
  misc_feature 1..80: note = Artificially Synthesized Probe
  source 1..80: mol_type = other DNA
tgcatcactgagtttgacagacacagtgtatggatgccagattagttcgttttactgtcagtatagtacagtccgttaaa

SEQ ID NO: 108347 - DNA, 80 bp, synthetic construct
  misc_feature 1..80: note = Artificially Synthesized Probe
  source 1..80: mol_type = other DNA
attcatgcacacatccaaacacacacaccccacacatcatacatatgcacatgcacacacacacattcacacaaacatgc

SEQ ID NO: 108348 - DNA, 80 bp, synthetic construct
  misc_feature 1..80: note = Artificially Synthesized Probe
  source 1..80: mol_type = other DNA
cagggcgagctactataggaataacaatggaggcttaagatctgtagaaaaatctatgagtttaggaattgtgattcctg

SEQ ID NO: 108349 - DNA, 80 bp, synthetic construct
  misc_feature 1..80: note = Artificially Synthesized Probe
  source 1..80: mol_type = other DNA
ccctgaagtcagggatccctggggaacgatgcccagtccgacgtgcttctcctgagccgattttgggtttcccgttttct

SEQ ID NO: 108350 - DNA, 80 bp, synthetic construct
  misc_feature 1..80: note = Artificially Synthesized Probe
  source 1..80: mol_type = other DNA
gcagattctaggtctcccgctttctgaggccatttccccagggaatggctccaagcccgatcacttctcctgaatgtatt

SEQ ID NO: 108351 - DNA, 80 bp, synthetic construct
  misc_feature 1..80: note = Artificially Synthesized Probe
  source 1..80: mol_type = other DNA
ggtggcttctgtgtcatcttcactctgaatgagtgaaatgtgtgcttaaaatggccttgagaaaagcaccccctgcaggg

SEQ ID NO: 108352 - DNA, 80 bp, synthetic construct
  misc_feature 1..80: note = Artificially Synthesized Probe
  source 1..80: mol_type = other DNA
ggacactggggtgccagtccccccgctaccataaaggaagaagaggaaaacagaatgaggcaaagtgataggggatgaag

SEQ ID NO: 108353 - DNA, 80 bp, synthetic construct
  misc_feature 1..80: note = Artificially Synthesized Probe
  source 1..80: mol_type = other DNA
aatgacccttctgctaaagctgccaggcactgcgctggtgtaagctgatcatagctccatcatcccaaatctaaaccact

SEQ ID NO: 108354 - DNA, 80 bp, synthetic construct
  misc_feature 1..80: note = Artificially Synthesized Probe
  source 1..80: mol_type = other DNA
cttcagcaatgcctgtcaagatggagacagactcctgtgctgaggttgcagggttgcactctgaaaagacacccagggca

SEQ ID NO: 108355 - DNA, 80 bp, synthetic construct
  misc_feature 1..80: note = Artificially Synthesized Probe
  source 1..80: mol_type = other DNA
tttccaccctaaccccatgtgagacagccactgccccaaaactagggatgggaaccaaaacctttgagaagcccacgtgg

SEQ ID NO: 108356 - DNA, 80 bp, synthetic construct
  misc_feature 1..80: note = Artificially Synthesized Probe
  source 1..80: mol_type = other DNA
tgtgaggaactcatacacctgagtcctcgtcctaagaagtcgcagttgttgggtgggccatggccacgaagactctgcgg

SEQ ID NO: 108357 - DNA, 80 bp, synthetic construct
  misc_feature 1..80: note = Artificially Synthesized Probe
  source 1..80: mol_type = other DNA
tggccacgtagactctgcaggaacactgcctggccacgtagactctgcaggaacactgcctggccacgtagactctgcgg

SEQ ID NO: 108358 - DNA, 80 bp, synthetic construct
  misc_feature 1..80: note = Artificially Synthesized Probe
  source 1..80: mol_type = other DNA
tggccacgtagactctgcgggaacactgcctggtcacacagactctgcgggaacactgcctggccacgtagactctgcgg

SEQ ID NO: 108359 - DNA, 80 bp, synthetic construct
  misc_feature 1..80: note = Artificially Synthesized Probe
  source 1..80: mol_type = other DNA
tgcacacacaaatatacacacagccatgcacacactcacacaacatacatatccatgctcacatgtcatacatatgcatg

SEQ ID NO: 108360 - DNA, 80 bp, synthetic construct
  misc_feature 1..80: note = Artificially Synthesized Probe
  source 1..80: mol_type = other DNA
tggccacgtagactctgcgggaacactgcctggccacgtagactctgcgggaacactgcctggccacgtagactctgagg

SEQ ID NO: 108361 - DNA, 80 bp, synthetic construct
  misc_feature 1..80: note = Artificially Synthesized Probe
  source 1..80: mol_type = other DNA
cacaaagatggtcattcacagcatcaccaaaatcgatccacgaggctttgagaaaatgcatctctaaaaaaagcacattt

SEQ ID NO: 108362 - DNA, 80 bp, synthetic construct
  misc_feature 1..80: note = Artificially Synthesized Probe
  source 1..80: mol_type = other DNA
cactcagcacctgcatgggacatgcatcgccacaaggtcacaggtgggcacctgggtgctgcagggtcagctgacttagt

SEQ ID NO: 108363 - DNA, 80 bp, synthetic construct
  misc_feature 1..80: note = Artificially Synthesized Probe
  source 1..80: mol_type = other DNA
acagctccacgcctcacctctcaggccaggcagcggccaacccagcctcttcaccaggtatgggcaccggctgctccttg

SEQ ID NO: 108364 - DNA, 80 bp, synthetic construct
  misc_feature 1..80: note = Artificially Synthesized Probe
  source 1..80: mol_type = other DNA
ggagattaattgctaccccgcgtacctttcagaggtttatatgaagccatttttcggtatttctctaagtgactgaaaca

SEQ ID NO: 108365 - DNA, 80 bp, synthetic construct
  misc_feature 1..80: note = Artificially Synthesized Probe
  source 1..80: mol_type = other DNA
tgaggtctctcttttaacctgttataaattaccttttgtaatctctcctaaaccattatatagaggagggaggggagaca

SEQ ID NO: 108366 - DNA, 80 bp, synthetic construct
  misc_feature 1..80: note = Artificially Synthesized Probe
  source 1..80: mol_type = other DNA
ttctctgctttcatgtgaaggaaataaaacaaggcactcatgaatgagctcttcaagcacggactttcctggagctcaca

SEQ ID NO: 108367 - DNA, 80 bp, synthetic construct
  misc_feature 1..80: note = Artificially Synthesized Probe
  source 1..80: mol_type = other DNA
tctgaggtgacactgcagcctctctccgtggccctgtggtgagtctcagcatgtccaggcatctgaggtgacactgcagc

SEQ ID NO: 108368 - DNA, 80 bp, synthetic construct
  misc_feature 1..80: note = Artificially Synthesized Probe
  source 1..80: mol_type = other DNA
ggcgtccgcggtgacactgcagccactcttggtttctcagctgccgcaatcggtccttccagtgtccgacctctggggcc

SEQ ID NO: 108369 - DNA, 80 bp, synthetic construct
  misc_feature 1..80: note = Artificially Synthesized Probe
  source 1..80: mol_type = other DNA
tggccctgggggctccaggagggggtctccccaggagcgtgttccccagtgcatggcccctgtcctccaacacctgctca

SEQ ID NO: 108370 - DNA, 80 bp, synthetic construct
  misc_feature 1..80: note = Artificially Synthesized Probe
  source 1..80: mol_type = other DNA
tcatgtatcatacatacacacacacacacagatatacacacaggcatgcacatgctcacacaacatgcacacccacactc

SEQ ID NO: 108371 - DNA, 80 bp, synthetic construct
  misc_feature 1..80: note = Artificially Synthesized Probe
  source 1..80: mol_type = other DNA
ttctgaaggttgtgcctgactcacgtctccattctcgacccattaaagggggagcggagatcgtgcttcccaagggaccc

SEQ ID NO: 108372 - DNA, 80 bp, synthetic construct
  misc_feature 1..80: note = Artificially Synthesized Probe
  source 1..80: mol_type = other DNA
gcacatcccggcctcctgggaacgcggagaacttcgtgcctgctgtccagttcttggcatccgggagctccagctggcat

SEQ ID NO: 108373 - DNA, 80 bp, synthetic construct
  misc_feature 1..80: note = Artificially Synthesized Probe
  source 1..80: mol_type = other DNA
tgaagacagcctctgcaatctccggccttcccgcagttgcccgcgtactttcttcattcctcaaaggtctcattaattta

SEQ ID NO: 108374 - DNA, 80 bp, synthetic construct
  misc_feature 1..80: note = Artificially Synthesized Probe
  source 1..80: mol_type = other DNA
gttactgctgtggggtcatacagataaataagacatggttcctatttctcagactcatcacccactggtaagacagccac

SEQ ID NO: 108375 - DNA, 80 bp, synthetic construct
  misc_feature 1..80: note = Artificially Synthesized Probe
  source 1..80: mol_type = other DNA
cagatatctgcagtgttagcgagagacgctgttgacccttcttggcttatcatggaactgaatttccttaggttcagttg

SEQ ID NO: 108376 - DNA, 80 bp, synthetic construct
  misc_feature 1..80: note = Artificially Synthesized Probe
  source 1..80: mol_type = other DNA
gtttgggaacgcgtgcggcccacaggacaaagccttgttgcacacccgggtcaagggcaaatcccagctgcacagccggg

SEQ ID NO: 108377 - DNA, 80 bp, synthetic construct
  misc_feature 1..80: note = Artificially Synthesized Probe
  source 1..80: mol_type = other DNA
cctcgtctccatcaagcgctttctggggagaaactccttcaaggataacggcaaatggtgagcgtgcctcactctttata

SEQ ID NO: 108378 - DNA, 80 bp, synthetic construct
  misc_feature 1..80: note = Artificially Synthesized Probe
  source 1..80: mol_type = other DNA
tcttaagtgtgacaaggtgaaagcccctcgcgagttgaggaaggtctcattacttctgacagaggccccatgttggggag

SEQ ID NO: 108379 - DNA, 80 bp, synthetic construct
  misc_feature 1..80: note = Artificially Synthesized Probe
  source 1..80: mol_type = other DNA
agatataaaacagaagacttcggggcaaaaggaagtcttagaaaaatataaaggaatagaaagaaacagctgttccccgg

SEQ ID NO: 108380 - DNA, 80 bp, synthetic construct
  misc_feature 1..80: note = Artificially Synthesized Probe
  source 1..80: mol_type = other DNA
cttcatgtgccatgttcgcatcatgagcaatgttgtaatgaacagccacgcacttcattctttgcacatctcaaagaatt

SEQ ID NO: 108381 - DNA, 80 bp, synthetic construct
  misc_feature 1..80: note = Artificially Synthesized Probe
  source 1..80: mol_type = other DNA
acacttcacactctcacacaatacaccccacatcacacatgcacatcctttatacctacattcaggatcacacacataca

SEQ ID NO: 108382 - DNA, 80 bp, synthetic construct
  misc_feature 1..80: note = Artificially Synthesized Probe
  source 1..80: mol_type = other DNA
cccagtgtcagcgtccactgagtcgcagctcccctctacactgggtgtgcccgagcttgctgcatgggaggaaggtggct

SEQ ID NO: 108383 - DNA, 80 bp, synthetic construct
  misc_feature 1..80: note = Artificially Synthesized Probe
  source 1..80: mol_type = other DNA
ggaggatggtggctttgcagacccttccattttattcatcgtgttacagagcattctaaacctccttccttctagagtag

SEQ ID NO: 108384 - DNA, 80 bp, synthetic construct
  misc_feature 1..80: note = Artificially Synthesized Probe
  source 1..80: mol_type = other DNA
cattgtctgtatctggcagcatttggtccctgtcatgaggttacagtgagcccctggcccccaccctcacgtgtctgtga

SEQ ID NO: 108385 - DNA, 80 bp, synthetic construct
  misc_feature 1..80: note = Artificially Synthesized Probe
  source 1..80: mol_type = other DNA
ggaagggagtgatcccgccagggaggggaggcctgacagaagacatggtctctcagggggggtcctgatgtcatgtcaga

SEQ ID NO: 108386 - DNA, 80 bp, synthetic construct
  misc_feature 1..80: note = Artificially Synthesized Probe
  source 1..80: mol_type = other DNA
atcctggaggctttgcgtttgcactgaaatgtgtggacttgacgccagaagcaactcctgcgtggcccgagtgtgggcct

SEQ ID NO: 108387 - DNA, 80 bp, synthetic construct
  misc_feature 1..80: note = Artificially Synthesized Probe
  source 1..80: mol_type = other DNA
atccagagaggcaagggagaaggcaggggtgagcgaggcggtgcagggtggggctctgctcccacgggttcgatgtgggg

SEQ ID NO: 108388 - DNA, 80 bp, synthetic construct
  misc_feature 1..80: note = Artificially Synthesized Probe
  source 1..80: mol_type = other DNA
ccagactctcaccaatgcagatggtctcctagctatttttaatgagggaagatttgttggaagcacaaaattgaattaag

SEQ ID NO: 108389 - DNA, 80 bp, synthetic construct
  misc_feature 1..80: note = Artificially Synthesized Probe
  source 1..80: mol_type = other DNA
ctccccgggccatttcgcagaaagaaattgtttagcaaaaaaaagcaaaaggctcagatttccttagaaaggacagtgta

SEQ ID NO: 108390 - DNA, 80 bp, synthetic construct
  misc_feature 1..80: note = Artificially Synthesized Probe
  source 1..80: mol_type = other DNA
ctggcaccagaatgtccacggggacagctctggtctggcctggcctgagctgcaggctctcctgtcacagcactggctga

SEQ ID NO: 108391 - DNA, 80 bp, synthetic construct
  misc_feature 1..80: note = Artificially Synthesized Probe
  source 1..80: mol_type = other DNA
acacacggcatgcataggcccacacaacacccacacccatcacacacactcccacacacacacacacacacactctcctg

SEQ ID NO: 108392 - DNA, 80 bp, synthetic construct
  misc_feature 1..80: note = Artificially Synthesized Probe
  source 1..80: mol_type = other DNA
ctcgccggctgtgttcccaagcactttctccctcctctcctttctctaccacagcccaggccttcctcacctcatgctct

SEQ ID NO: 108393 - DNA, 80 bp, synthetic construct
  misc_feature 1..80: note = Artificially Synthesized Probe
  source 1..80: mol_type = other DNA
agggatgtgcagtcaaattggtgctcagatggagtctgatgaaaggcaagctctggaaggaacacggaccctgagcaagt

SEQ ID NO: 108394 - DNA, 80 bp, synthetic construct
  misc_feature 1..80: note = Artificially Synthesized Probe
  source 1..80: mol_type = other DNA
tggaatttagagacctgagacctgttgatttatgtagaatttaggcttcccccgtctgaatcgcgctggtgtatctggaa

SEQ ID NO: 108395 - DNA, 80 bp, synthetic construct
  misc_feature 1..80: note = Artificially Synthesized Probe
  source 1..80: mol_type = other DNA
ggaatttaggcttcccccgtctgaattgcgctggtttacgtgacatttaggctacccccacctgaaacacatttatttgc

SEQ ID NO: 108396 - DNA, 80 bp, synthetic construct
  misc_feature 1..80: note = Artificially Synthesized Probe
  source 1..80: mol_type = other DNA
cctggttaaatttactttacattttgatatgtattcagttctcagataaacacactatggaggttcctcagtgtatgatg

SEQ ID NO: 108397 - DNA, 80 bp, synthetic construct
  misc_feature 1..80: note = Artificially Synthesized Probe
  source 1..80: mol_type = other DNA
ccatctctcacaaagcctgtttatgataaagtgctgaagatatcaggccatttcttgactactgccctgaaagtgaataa

SEQ ID NO: 108398 - DNA, 80 bp, synthetic construct
  misc_feature 1..80: note = Artificially Synthesized Probe
  source 1..80: mol_type = other DNA
catgcttcttcttacatgataaatttaaagtaaattaaaaggcatgcattacatgttaaatgggacagagtcaatatctg

SEQ ID NO: 108399 - DNA, 80 bp, synthetic construct
  misc_feature 1..80: note = Artificially Synthesized Probe
  source 1..80: mol_type = other DNA
acaaaaataaactgacttttaaaaaacctgtgggggaaaggacggtttcctcaacaggtggttctgggagaactggatat

SEQ ID NO: 108400 - DNA, 80 bp, synthetic construct
  misc_feature 1..80: note = Artificially Synthesized Probe
  source 1..80: mol_type = other DNA
ccagaggagtgtggccagaccctcgcctcccaggagaactggatatctacacacagaggagtgtggccagaccctcgcct

SEQ ID NO: 108401 - DNA, 80 bp, synthetic construct
  misc_feature 1..80: note = Artificially Synthesized Probe
  source 1..80: mol_type = other DNA
gtaacatattgctgggatcaaaggaggcaaatctgcatcttattcacttgaaaatcaagtagatcagaatcataacaaac

SEQ ID NO: 108402 - DNA, 80 bp, synthetic construct
  misc_feature 1..80: note = Artificially Synthesized Probe
  source 1..80: mol_type = other DNA
agaactggatatccacacgcagaggagtgagccagaccctcgcctcccaggagaactggatacctacacccagaggagtg

SEQ ID NO: 108403 - DNA, 80 bp, synthetic construct
  misc_feature 1..80: note = Artificially Synthesized Probe
  source 1..80: mol_type = other DNA
gaccctcacctcccaggagaactggatatccacacgcagaggagtgagccagaccctcgcctcccaggagaactggatat

SEQ ID NO: 108404 - DNA, 80 bp, synthetic construct
  misc_feature 1..80: note = Artificially Synthesized Probe
  source 1..80: mol_type = other DNA
cagaggagtgtggccagaccctcgcctcccaggagaactggatatccacacgcagaggagtgtggccagaccctcacctc

SEQ ID NO: 108405 - DNA, 80 bp, synthetic construct
  misc_feature 1..80: note = Artificially Synthesized Probe
  source 1..80: mol_type = other DNA
aaactggatatccacatgcagaggaatgagccagaccctcgcctcccaggagaactggatatccacacgcagaggagtgt

SEQ ID NO: 108406 - DNA, 80 bp, synthetic construct
  misc_feature 1..80: note = Artificially Synthesized Probe
  source 1..80: mol_type = other DNA
gctggacgcacacttggccagaacatacatgaactcagagctaaatgtgagacctaaaacatacagggcaagacctttat

SEQ ID NO: 108407 - DNA, 80 bp, synthetic construct
  misc_feature 1..80: note = Artificially Synthesized Probe
  source 1..80: mol_type = other DNA
agagagcgaaaagacaacccatataaagggggaaaagatttgcgaatcaaattgcagtgggggattaatatccagaacat

SEQ ID NO: 108408 - DNA, 80 bp, synthetic construct
  misc_feature 1..80: note = Artificially Synthesized Probe
  source 1..80: mol_type = other DNA
tcctcagtgcaattccacctcatgccatgtgcgtgactcttaccgaaaaaaacagaaagtaacaggtgctggtgagaagg

SEQ ID NO: 108409 - DNA, 80 bp, synthetic construct
  misc_feature 1..80: note = Artificially Synthesized Probe
  source 1..80: mol_type = other DNA
ggttcacagcaactttatgacagcagccaaagggtggatgcaaggccagcatctgtggacggatggacagaggagcaaaa

SEQ ID NO: 108410 - DNA, 80 bp, synthetic construct
  misc_feature 1..80: note = Artificially Synthesized Probe
  source 1..80: mol_type = other DNA
acatacagcacaacacagggaaccctggggacactgcccagtgaaagaagccatcactagaggacacagactgtgtgatt

SEQ ID NO: 108411 - DNA, 80 bp, synthetic construct
  misc_feature 1..80: note = Artificially Synthesized Probe
  source 1..80: mol_type = other DNA
cgttgtgaacacatacaatgctaagaggcgtgcacctaaaaacggttaggacgatccattttctgttttgtgtcgtttac

SEQ ID NO: 108412 - DNA, 80 bp, synthetic construct
  misc_feature 1..80: note = Artificially Synthesized Probe
  source 1..80: mol_type = other DNA
cccctgagtctgtggggcctgcactgctgcatctctggctgccctgtgcccagaaacccaccctccatccttccacactc

SEQ ID NO: 108413 - DNA, 80 bp, synthetic construct
  misc_feature 1..80: note = Artificially Synthesized Probe
  source 1..80: mol_type = other DNA
aggaggacagggaattgtgcaaaatatcctggtaagtttctatcgactgctggaccatcccataatactgttgaggtgct

SEQ ID NO: 108414 - DNA, 80 bp, synthetic construct
  misc_feature 1..80: note = Artificially Synthesized Probe
  source 1..80: mol_type = other DNA
gagggtctggcaaggaggtcagctcagctgggcagacacatgcagcccggaggcctggggtgtccgggtcccacgaagcc

SEQ ID NO: 108415 - DNA, 80 bp, synthetic construct
  misc_feature 1..80: note = Artificially Synthesized Probe
  source 1..80: mol_type = other DNA
gcgtgaagatctttctcagaaaggacaagcccacagcatctgcgtcggtgcctcctgcctctgacagggctcctggcgcc

SEQ ID NO: 108416 - DNA, 80 bp, synthetic construct
  misc_feature 1..80: note = Artificially Synthesized Probe
  source 1..80: mol_type = other DNA
tacactcttaacttatccacagaaaggcttttgaagaggtggggaaaggtagctcagattttaaattggggcctcaaaac

SEQ ID NO: 108417 - DNA, 80 bp, synthetic construct
  misc_feature 1..80: note = Artificially Synthesized Probe
  source 1..80: mol_type = other DNA
aaattggaacaaaaaggaatgaattcccaatcccagaccagaacctcaaatcccccagaagagacttccatgagccccac

SEQ ID NO: 108418 - DNA, 80 bp, synthetic construct
  misc_feature 1..80: note = Artificially Synthesized Probe
  source 1..80: mol_type = other DNA
ggtcggtcgttgtctggacacagacaatgggaatctgggctgataccgggcctttgaaaatagtcggggaggaaaacaga

SEQ ID NO: 108419 - DNA, 80 bp, synthetic construct
  misc_feature 1..80: note = Artificially Synthesized Probe
  source 1..80: mol_type = other DNA
tcatgtatttttaaaaaagaatgaatttaaaactctaatccacttggcccagatttgttttgggaggcaggtgggaaccc

SEQ ID NO: 108420 - DNA, 80 bp, synthetic construct
  misc_feature 1..80: note = Artificially Synthesized Probe
  source 1..80: mol_type = other DNA
cagcagctccgtgcatagggactcctgggaagacttctctttgaggaaatgtttccgctgctaaaatgcaaagttccccg

SEQ ID NO: 108421 - DNA, 80 bp, synthetic construct
  misc_feature 1..80: note = Artificially Synthesized Probe
  source 1..80: mol_type = other DNA
cagggaggtcctgggagggtcgctagggtgaggacgctgagagcccatgtgctggaaaggacccaggaagagggctgagg

SEQ ID NO: 108422 - DNA, 80 bp, synthetic construct
  misc_feature 1..80: note = Artificially Synthesized Probe
  source 1..80: mol_type = other DNA
tgggccacaggtgtttagattaaacctgatccacgtgtgtctgtgagtgtgactcggaggagtccagcattggattcagt

SEQ ID NO: 108423 - DNA, 80 bp, synthetic construct
  misc_feature 1..80: note = Artificially Synthesized Probe
  source 1..80: mol_type = other DNA
gatatgggcttatagggtaaagtccacattcgcataaaattttaaccaagtagggacagagcctggcaattctgggttct

SEQ ID NO: 108424 - DNA, 80 bp, synthetic construct
  misc_feature 1..80: note = Artificially Synthesized Probe
  source 1..80: mol_type = other DNA
tgcccaccgcagtttgctgccatcccacctacctgccctgcacaaccagtgccagggcaccggggcaggaccgagatgca

SEQ ID NO: 108425 - DNA, 80 bp, synthetic construct
  misc_feature 1..80: note = Artificially Synthesized Probe
  source 1..80: mol_type = other DNA
caaagtaaacttcctggaactgttttttgaaatgtggctactgtcctttcctcttctagaaaaacgaggatgaggagcca

SEQ ID NO: 108426 - DNA, 80 bp, synthetic construct
  misc_feature 1..80: note = Artificially Synthesized Probe
  source 1..80: mol_type = other DNA
ctgggccatttccccctccatctgccaaaatcccattactgaggttgtcaaaatgcttcaacctctcttaaaatgcagtg

SEQ ID NO: 108427 - DNA, 80 bp, synthetic construct
  misc_feature 1..80: note = Artificially Synthesized Probe
  source 1..80: mol_type = other DNA
agattgcttcacgatgaagggtatgaccaagtggaattgtacacggtatagttaggaggtgatgatgaccacagtggggt

SEQ ID NO: 108428 - DNA, 80 bp, synthetic construct
  misc_feature 1..80: note = Artificially Synthesized Probe
  source 1..80: mol_type = other DNA
cagggacctggcagctcttccgcttgttctctctctcattcctcatggggactgcactaggactttccccttctccccaa

SEQ ID NO: 108429 - DNA, 80 bp, synthetic construct
  misc_feature 1..80: note = Artificially Synthesized Probe
  source 1..80: mol_type = other DNA
agcaggctcctttacgacttcacctctgcgctgcccccactgagaagctcctgctaacctcgtccagttgtcaaatcact

SEQ ID NO: 108430 - DNA, 80 bp, synthetic construct
  misc_feature 1..80: note = Artificially Synthesized Probe
  source 1..80: mol_type = other DNA
actctgcggtgactagaaccgtatctggcatatggcagacattcagtacaaaacccatggacagaacaaataagtaagtc

SEQ ID NO: 108431 - DNA, 80 bp, synthetic construct
  misc_feature 1..80: note = Artificially Synthesized Probe
  source 1..80: mol_type = other DNA
cttttccaccccatgcgcccagcacagttaccctttcccgtcccacgcgcccagcacagttaccctttcccgtcccacgc

SEQ ID NO: 108432 - DNA, 80 bp, synthetic construct
  misc_feature 1..80: note = Artificially Synthesized Probe
  source 1..80: mol_type = other DNA
gcccagcacagttacccttttccgccccatgcgcccagcacagttactcttttccgccccatgcgcccagcacagttact

SEQ ID NO: 108433 - DNA, 80 bp, synthetic construct
  misc_feature 1..80: note = Artificially Synthesized Probe
  source 1..80: mol_type = other DNA
tttccaccccatgcgcccagcacagttaccctttcccgtcccacgcgcccagcacagttactcttttccgccccatgcgc

SEQ ID NO: 108434 - DNA, 80 bp, synthetic construct
  misc_feature 1..80: note = Artificially Synthesized Probe
  source 1..80: mol_type = other DNA
ccagcacagttaccctttcccgtcccacgcgcccagcacagttaccctttcccgtcccacacgcccagcacagttaccct

SEQ ID NO: 108435 - DNA, 80 bp, synthetic construct
  misc_feature 1..80: note = Artificially Synthesized Probe
  source 1..80: mol_type = other DNA
ttcccgtcccacgcgcccagcacagttaccctttcccgtcccacgcgcccagcacagttaccctttcccgtcccacgcgc

SEQ ID NO: 108436 - DNA, 80 bp, synthetic construct
  misc_feature 1..80: note = Artificially Synthesized Probe
  source 1..80: mol_type = other DNA
gtggctaggtcctcaacacctatgtcagaatcaacaagcatgtgcggtcaatggcgttcaggaggccgtctgcagctgag

SEQ ID NO: 108437 - DNA, 80 bp, synthetic construct
  misc_feature 1..80: note = Artificially Synthesized Probe
  source 1..80: mol_type = other DNA
ccagcacagttactcttccgtcccacgcgcccagcacagttaccctttcccgtcccacgcgcccagcacagttactcttt

SEQ ID NO: 108438 - DNA, 80 bp, synthetic construct
  misc_feature 1..80: note = Artificially Synthesized Probe
  source 1..80: mol_type = other DNA
cccgtcccacgcgcccagcacagttacccttttccgtcccacgcgcccagcacagttactcttccgtcccatgcgcccag

SEQ ID NO: 108439 - DNA, 80 bp, synthetic construct
  misc_feature 1..80: note = Artificially Synthesized Probe
  source 1..80: mol_type = other DNA
cacagttactcttccgtcccatgcgcccagcacagttaccctttcccgtcccacgcgcccagcacagttactcttttccg

SEQ ID NO: 108440 - DNA, 80 bp, synthetic construct
  misc_feature 1..80: note = Artificially Synthesized Probe
  source 1..80: mol_type = other DNA
ccatgcgcccagcacagttactctttgccgtcccatgcgcccagcacagttactctttgccgtcccatgcgcccagcaca

SEQ ID NO: 108441 - DNA, 80 bp, synthetic construct
  misc_feature 1..80: note = Artificially Synthesized Probe
  source 1..80: mol_type = other DNA
gttaccctttcccgtcccaggcgcccagcacagttaccctttcccgtcccacgcgcccagcacagttactcttttccgtc

SEQ ID NO: 108442 - DNA, 80 bp, synthetic construct
  misc_feature 1..80: note = Artificially Synthesized Probe
  source 1..80: mol_type = other DNA
atgcgcccagcacagttacccttttccgtcccatgcgcccagcacagttaccctttcccgtcccatgcgcccagcacagt

SEQ ID NO: 108443 - DNA, 80 bp, synthetic construct
  misc_feature 1..80: note = Artificially Synthesized Probe
  source 1..80: mol_type = other DNA
tactcttccaccccatgctcccagcacactcttccgtcccatgtgcccagtgcagtcttccgtcccatgcgcccagtgca

SEQ ID NO: 108444 - DNA, 80 bp, synthetic construct
  misc_feature 1..80: note = Artificially Synthesized Probe
  source 1..80: mol_type = other DNA
gcttgaatataatgagtctacctttaaggtaaatttcagctctttgggtttgtaatggatggaaaaaggcaggcaaagaa

SEQ ID NO: 108445 - DNA, 80 bp, synthetic construct
  misc_feature 1..80: note = Artificially Synthesized Probe
  source 1..80: mol_type = other DNA
tcaagccattctcatttggcttcgaaatgataacacaaaactgttacaataacctggaactgtaagggtcctggggatcc

SEQ ID NO: 108446 - DNA, 80 bp, synthetic construct
  misc_feature 1..80: note = Artificially Synthesized Probe
  source 1..80: mol_type = other DNA
catctgagattattaaatagcagccgctaactgcctcgatgcaggagtcccatctccccaaacaaattctggctgtgatg

SEQ ID NO: 108447 - DNA, 80 bp, synthetic construct
  misc_feature 1..80: note = Artificially Synthesized Probe
  source 1..80: mol_type = other DNA
atgcagccagctcccctcccaggccgcactgactgctggtactgctgcttccgggggcctggcctttacgggggtctggc

SEQ ID NO: 108448 - DNA, 80 bp, synthetic construct
  misc_feature 1..80: note = Artificially Synthesized Probe
  source 1..80: mol_type = other DNA
gtgttcatgtgcacagccacattggccattttgacccaacagacactcaagcaactcttgcgtgaatttggtgggaagat

SEQ ID NO: 108449 - DNA, 80 bp, synthetic construct
  misc_feature 1..80: note = Artificially Synthesized Probe
  source 1..80: mol_type = other DNA
gctccaagtcatcagagagcggccaggagtgcatctgactttgctggtgacctgcatcttatctgcgtccacactcaact

SEQ ID NO: 108450 - DNA, 80 bp, synthetic construct
  misc_feature 1..80: note = Artificially Synthesized Probe
  source 1..80: mol_type = other DNA
aaaatatgaaggggttgaatggcatcaaaacacattaaatgacagaacatgactcgcctccttggctggattctaaactc

SEQ ID NO: 108451 - DNA, 80 bp, synthetic construct
  misc_feature 1..80: note = Artificially Synthesized Probe
  source 1..80: mol_type = other DNA
ctgaattcccggtgtgttgatagcgatcggcacatgcctcaagccacctggaagagaagctgccccaagattctccaggc

SEQ ID NO: 108452 - DNA, 80 bp, synthetic construct
  misc_feature 1..80: note = Artificially Synthesized Probe
  source 1..80: mol_type = other DNA
gcttcaccactggtagccccaagcatctctggctggggatacatcacccgatcacaccagcccgagaaccttccctttcc

SEQ ID NO: 108453 - DNA, 80 bp, synthetic construct
  misc_feature 1..80: note = Artificially Synthesized Probe
  source 1..80: mol_type = other DNA
tgtgcctatatttggagacaggacctccaaggagctaattaaggttcaatgaggccaaaagggcggccccgatcctacag

SEQ ID NO: 108454 - DNA, 80 bp, synthetic construct
  misc_feature 1..80: note = Artificially Synthesized Probe
  source 1..80: mol_type = other DNA
gtcagagctgtgagaacagacgtgtcctgcagtttaatgcacccagtctgtggtcctgggcacggccacccgtgatgact

SEQ ID NO: 108455 - DNA, 80 bp, synthetic construct
  misc_feature 1..80: note = Artificially Synthesized Probe
  source 1..80: mol_type = other DNA
aaaaatcagaggaggtacaatcccaccagtgcccggctggacacatattggttttggagccaaggggtaacagtttccct

SEQ ID NO: 108456 - DNA, 80 bp, synthetic construct
  misc_feature 1..80: note = Artificially Synthesized Probe
  source 1..80: mol_type = other DNA
caccaggcgtcttggataaacagaagtgaactacgtcctggttgcagctgtatttatttcacacattcatttaaaaagtt

SEQ ID NO: 108457 - DNA, 80 bp, synthetic construct
  misc_feature 1..80: note = Artificially Synthesized Probe
  source 1..80: mol_type = other DNA
gcccccagcagtgttcctgtgtccgtggtttggaggctctgttcgctgagcctcagcacgacctcaacctgatctgggag

SEQ ID NO: 108458 - DNA, 80 bp, synthetic construct
  misc_feature 1..80: note = Artificially Synthesized Probe
  source 1..80: mol_type = other DNA
aaacacagagaccttgtcccatgcccgtgggctcatggtcaaggacactttgcatcatttgacctcggaaacaggagaaa

SEQ ID NO: 108459 - DNA, 80 bp, synthetic construct
  misc_feature 1..80: note = Artificially Synthesized Probe
  source 1..80: mol_type = other DNA
tgaggcgaggacgcagcagcaagttcccatcccctggcctggcttctctgggcccaggcgctcccattcgtactcacggt

SEQ ID NO: 108460 - DNA, 80 bp, synthetic construct
  misc_feature 1..80: note = Artificially Synthesized Probe
  source 1..80: mol_type = other DNA
ggccggcttagaaggtctggaagagcctgactaggaattaggatgctgtgcgttaatctgcaaataccacccccgatgcg

SEQ ID NO: 108461 - DNA, 80 bp, synthetic construct
  misc_feature 1..80: note = Artificially Synthesized Probe
  source 1..80: mol_type = other DNA
ccaaagggcctcactgttcctgtggagagctgttattttgaaattatatcttgtcatgaaagtttcacttttaaacacta

SEQ ID NO: 108462 - DNA, 80 bp, synthetic construct
  misc_feature 1..80: note = Artificially Synthesized Probe
  source 1..80: mol_type = other DNA
gtatctgtgtgctctgggaaggctgacatttcaacattcctggcgtctgaattcgacatctctcccaccaccgggaagga

SEQ ID NO: 108463 - DNA, 80 bp, synthetic construct
  misc_feature 1..80: note = Artificially Synthesized Probe
  source 1..80: mol_type = other DNA
ctctctgatgggagccttatccgagaggtgggtgggagggacgcaggctgccggtgctggtcccgggttgtttgtggtgc

SEQ ID NO: 108464 - DNA, 80 bp, synthetic construct
  misc_feature 1..80: note = Artificially Synthesized Probe
  source 1..80: mol_type = other DNA
tggatacgtgcttgttttagggttttgtatgtattatttcagagctccgtgctgtttctggacacgtgttttagggtttt

SEQ ID NO: 108465 - DNA, 80 bp, synthetic construct
  misc_feature 1..80: note = Artificially Synthesized Probe
  source 1..80: mol_type = other DNA
gacagagcacctggaaggatttgattttaagatttaacttcgcattaggggttttcttcataggctcctgcaattcagat

SEQ ID NO: 108466 - DNA, 80 bp, synthetic construct
  misc_feature 1..80: note = Artificially Synthesized Probe
  source 1..80: mol_type = other DNA
ctccatgttccggagattaaagcaaactccatggctctcagtctcgtctgaaacttcatgcctctgaattgcccctgaat

SEQ ID NO: 108467 - DNA, 80 bp, synthetic construct
  misc_feature 1..80: note = Artificially Synthesized Probe
  source 1..80: mol_type = other DNA
tacaataccatgtagagacataagcaatattttggcatcattctgtccgctcagtaggccgtgttccctctggtagggcc

SEQ ID NO: 108468 - DNA, 80 bp, synthetic construct
  misc_feature 1..80: note = Artificially Synthesized Probe
  source 1..80: mol_type = other DNA
cccaggggcaccttcgttgtagcttattcgtctatgaggggaggaaaagatggtctcctgtaaaaaatgttaaagtgcca

SEQ ID NO: 108469 - DNA, 80 bp, synthetic construct
  misc_feature 1..80: note = Artificially Synthesized Probe
  source 1..80: mol_type = other DNA
gtgtgaccagacaaggttgttatggaatcaaataccaaattatggcagatgctaatttcagtcatcttgcacacagatca

SEQ ID NO: 108470 - DNA, 80 bp, synthetic construct
  misc_feature 1..80: note = Artificially Synthesized Probe
  source 1..80: mol_type = other DNA
caccctgactccatcgggggacccccagcatcctactcaacactacgagggagccccactgccaaaaggccaggctgcat

SEQ ID NO: 108471 - DNA, 80 bp, synthetic construct
  misc_feature 1..80: note = Artificially Synthesized Probe
  source 1..80: mol_type = other DNA
caagacagagcagctttcctctgacctcttcctcttccagaagccagagccagccagggttcagggagagcggaatcact

SEQ ID NO: 108472 - DNA, 80 bp, synthetic construct
  misc_feature 1..80: note = Artificially Synthesized Probe
  source 1..80: mol_type = other DNA
gttgtacacatacacccactttgctttgtatatggtgagctaccttaatgccattgcccagatgcagatttgttattatg

SEQ ID NO: 108473 - DNA, 80 bp, synthetic construct
  misc_feature 1..80: note = Artificially Synthesized Probe
  source 1..80: mol_type = other DNA
gcaacgcgggagcctgaccagctccggaacatcgtctccctccatccacggcaaggcagggggagcctcaccagctccgg

SEQ ID NO: 108474 - DNA, 80 bp, synthetic construct
  misc_feature 1..80: note = Artificially Synthesized Probe
  source 1..80: mol_type = other DNA
tgtcgtctttccccagagagggctccaaggagtggcgggagcttctcagaggctcctaatcaatgctttttcttttaaac

SEQ ID NO: 108475 - DNA, 80 bp, synthetic construct
  misc_feature 1..80: note = Artificially Synthesized Probe
  source 1..80: mol_type = other DNA
tggatttgtaagcagattcgttcttcagattataattagagccgctctctctccccgcctttttgaaagttcccattagc

SEQ ID NO: 108476 - DNA, 80 bp, synthetic construct
  misc_feature 1..80: note = Artificially Synthesized Probe
  source 1..80: mol_type = other DNA
tcagatgctactgaaacgagcaacaagggaaggggggagatgatgctcatgtgatttggaggccaaaggtgcttctaact

SEQ ID NO: 108477 - DNA, 80 bp, synthetic construct
  misc_feature 1..80: note = Artificially Synthesized Probe
  source 1..80: mol_type = other DNA
ctactgattgcaacatatctttagtaagtaaaatgaaaggtgtgtcttactactgctggctgtttccggccaacaagccc

SEQ ID NO: 108478 - DNA, 80 bp, synthetic construct
  misc_feature 1..80: note = Artificially Synthesized Probe
  source 1..80: mol_type = other DNA
gtgtgtttgctaacgctgttcatcttgtctaggatgcttctcctccatcaaaaccacttcaagaatcagtccctcctgga

SEQ ID NO: 108479 - DNA, 80 bp, synthetic construct
  misc_feature 1..80: note = Artificially Synthesized Probe
  source 1..80: mol_type = other DNA
actggttgtacgtggagtcctctaagctatgagggaagaaggggacaactgtttggccaaaccatagtctctgtggccct

SEQ ID NO: 108480 - DNA, 80 bp, synthetic construct
  misc_feature 1..80: note = Artificially Synthesized Probe
  source 1..80: mol_type = other DNA
tctggttcatctttgcattctccatcagattgcagaagttgtgtcaacgacgaaccaataaatgaatgtgtgcagtcggg

SEQ ID NO: 108481 - DNA, 80 bp, synthetic construct
  misc_feature 1..80: note = Artificially Synthesized Probe
  source 1..80: mol_type = other DNA
gagtgtgctcaatgcttacaactaggctttttccaatcacctgtaactcatgtgaatgtggtcactgatttgagcatcaa

SEQ ID NO: 108482 - DNA, 80 bp, synthetic construct
  misc_feature 1..80: note = Artificially Synthesized Probe
  source 1..80: mol_type = other DNA
catgggcccctggaaacccaggatagggagtggcagaacacactggcgggggctggacgagcagaggaatgagggaagga

SEQ ID NO: 108483 - DNA, 80 bp, synthetic construct
  misc_feature 1..80: note = Artificially Synthesized Probe
  source 1..80: mol_type = other DNA
gtaaccagctacttaactgtatttagacggggcagtctccagagatttttgaaaaggaagaaggaagtaaattcagttac

SEQ ID NO: 108484 - DNA, 80 bp, synthetic construct
  misc_feature 1..80: note = Artificially Synthesized Probe
  source 1..80: mol_type = other DNA
gactacttgatgagctgacttctgtttttttttttttttccagaagtgggtatctaggtttgctgattgctggagtaaac

SEQ ID NO: 108485 - DNA, 80 bp, synthetic construct
  misc_feature 1..80: note = Artificially Synthesized Probe
  source 1..80: mol_type = other DNA
ttgctgttctttgtttgagctttgaactcctcacataaccccttaactgtcctcttgatcttttattcatgagcttgaca

SEQ ID NO: 108486 - DNA, 80 bp, synthetic construct
  misc_feature 1..80: note = Artificially Synthesized Probe
  source 1..80: mol_type = other DNA
ggaagaggaccatcccactactcagtttaatctgtcttgaaaatgcttcggtattgcatgaacgtgatgcatgatccaac

SEQ ID NO: 108487 - DNA, 80 bp, synthetic construct
  misc_feature 1..80: note = Artificially Synthesized Probe
  source 1..80: mol_type = other DNA
tgaacggaccactcactgagcctgggcagctccctgcatctgacttctggagagttctagagatactcacaggtcaggag

SEQ ID NO: 108488 - DNA, 80 bp, synthetic construct
  misc_feature 1..80: note = Artificially Synthesized Probe
  source 1..80: mol_type = other DNA
gagtggagccaggagtgctgtctgctcacggtgggaccagcctgcaatcggtgcggcgggctatgcttagggcctaagaa

SEQ ID NO: 108489 - DNA, 80 bp, synthetic construct
  misc_feature 1..80: note = Artificially Synthesized Probe
  source 1..80: mol_type = other DNA
gctatctccaggttggctgagttgggctcctggcaagccatggctgggatagctatctccgggttggctgagttaggttc

SEQ ID NO: 108490 - DNA, 80 bp, synthetic construct
  misc_feature 1..80: note = Artificially Synthesized Probe
  source 1..80: mol_type = other DNA
caaggccgtggctgggatagttatttccaggttggctgaattaggttcctggcatggctgtgaaagtgctgccccatttc

SEQ ID NO: 108491 - DNA, 80 bp, synthetic construct
  misc_feature 1..80: note = Artificially Synthesized Probe
  source 1..80: mol_type = other DNA
caccatctggatccccttcatgctttctgtttttatgggaagtcctaattcaacacatgtttcctgaggtgctactacgt

SEQ ID NO: 108492 - DNA, 80 bp, synthetic construct
  misc_feature 1..80: note = Artificially Synthesized Probe
  source 1..80: mol_type = other DNA
aggagattcaaggagcctgaaactcaaacaagtggaagaggctggaacgtcacctaaggtgataggaactggggacccga

SEQ ID NO: 108493 - DNA, 80 bp, synthetic construct
  misc_feature 1..80: note = Artificially Synthesized Probe
  source 1..80: mol_type = other DNA
gtttaaaacacaaatagaggtataatatagtagccatctagaacctcaatttaagatatgagattgggtctgcttttgaa

SEQ ID NO: 108494 - DNA, 80 bp, synthetic construct
  misc_feature 1..80: note = Artificially Synthesized Probe
  source 1..80: mol_type = other DNA
cagcagggagcagaatcaggcaggcaagtgcgcaggccgggccagcctggaccgtggagctgtgtctccaacgggaacct

SEQ ID NO: 108495 - DNA, 80 bp, synthetic construct
  misc_feature 1..80: note = Artificially Synthesized Probe
  source 1..80: mol_type = other DNA
ccccactgtcctcatcactcaggcacatccaggctgatgaaaaagcaacagaatgggttcaaaggcctcttaccaaacga

SEQ ID NO: 108496 - DNA, 80 bp, synthetic construct
  misc_feature 1..80: note = Artificially Synthesized Probe
  source 1..80: mol_type = other DNA
actacgggtgtctgagaggcgcctctgagtccctatgccaccgcatctgggttgggtcacgatgctccccttgcacggag

SEQ ID NO: 108497 - DNA, 80 bp, synthetic construct
  misc_feature 1..80: note = Artificially Synthesized Probe
  source 1..80: mol_type = other DNA
ctcagcccaggtcatcacagatccagccagtgatctgctggatgagaagcttctgcacggactcgtccaccctctcactg

SEQ ID NO: 108498 - DNA, 80 bp, synthetic construct
  misc_feature 1..80: note = Artificially Synthesized Probe
  source 1..80: mol_type = other DNA
agagggcaggctgcacaatgctgggctcctccgacaatgctcacctctcttctcccctccatttgcacctcagtcctgat

SEQ ID NO: 108499 - DNA, 80 bp, synthetic construct
  misc_feature 1..80: note = Artificially Synthesized Probe
  source 1..80: mol_type = other DNA
ctgatacagcagcaaagaccacccaacgatctggttcctacccatttccaggcagtcggtaaatgaaacctaacatgttt

SEQ ID NO: 108500 - DNA, 80 bp, synthetic construct
  misc_feature 1..80: note = Artificially Synthesized Probe
  source 1..80: mol_type = other DNA
cctcacagggccctgagtgtggagatcacaggactccctgcaccccacagtcctcacagggccctgagtgtggagatcac

SEQ ID NO: 108501 - DNA, 80 bp, synthetic construct
  misc_feature 1..80: note = Artificially Synthesized Probe
  source 1..80: mol_type = other DNA
gcatggagatcatgggcctccctacactccacagtccacatggggccaagagcatggagatcatgggcctcccctagacc

SEQ ID NO: 108502 - DNA, 80 bp, synthetic construct
  misc_feature 1..80: note = Artificially Synthesized Probe
  source 1..80: mol_type = other DNA
actcacggggccctgagcaaggagatcacgggactccctgcaccccacagtccacacggggccctgagtgtgatcacggg

SEQ ID NO: 108503 - DNA, 80 bp, synthetic construct
  misc_feature 1..80: note = Artificially Synthesized Probe
  source 1..80: mol_type = other DNA
tgcacccacagtcctcagcagtttctagagcagaagatgcccattaaaggcagatctcttccgttcagctgcctggtctg

SEQ ID NO: 108504 - DNA, 80 bp, synthetic construct
  misc_feature 1..80: note = Artificially Synthesized Probe
  source 1..80: mol_type = other DNA
ccgggtgattctgaggcctgcgtctctcagctgtgggctgttgaggcgattctgaggcctgtgtccctgagctgtgggct

SEQ ID NO: 108505 - DNA, 80 bp, synthetic construct
  misc_feature 1..80: note = Artificially Synthesized Probe
  source 1..80: mol_type = other DNA
ccacattctcaggggccgcctgctgccagctccctcgctgtggcctcatccagctcctgctggcgtggtctgacccctaa

SEQ ID NO: 108506 - DNA, 80 bp, synthetic construct
  misc_feature 1..80: note = Artificially Synthesized Probe
  source 1..80: mol_type = other DNA
ttcctcctcacagccacccgccttggtggacggtgtgaggggcaggtgcagacactacaaagacgtggccattaaaactc

SEQ ID NO: 108507 - DNA, 80 bp, synthetic construct
  misc_feature 1..80: note = Artificially Synthesized Probe
  source 1..80: mol_type = other DNA
gggtgtgcgggtgattctgaggcctgcgtccctgagctgtgggctgttgaggtgattctgaggcctgcgtctctgagctg

SEQ ID NO: 108508 - DNA, 80 bp, synthetic construct
  misc_feature 1..80: note = Artificially Synthesized Probe
  source 1..80: mol_type = other DNA
gctttgggctgtccgggtgattctgaggcctgcgtccctgagctgtggggtgtccgcgtgattctgaggcctgcgtccct

SEQ ID NO: 108509 - DNA, 80 bp, synthetic construct
  misc_feature 1..80: note = Artificially Synthesized Probe
  source 1..80: mol_type = other DNA
ccctgagctgtgggctgttgaggtgattctgaggcctgcgtctctcagctgtgggctgttgaggtgattctgaggcctgc

SEQ ID NO: 108510 - DNA, 80 bp, synthetic construct
  misc_feature 1..80: note = Artificially Synthesized Probe
  source 1..80: mol_type = other DNA
ctgcgtccctgaggtgtggggtgtccgggcgattgtgaggcctgtgtccctgagctgcaggctgttgaggtgattctgag

SEQ ID NO: 108511 - DNA, 80 bp, synthetic construct
  misc_feature 1..80: note = Artificially Synthesized Probe
  source 1..80: mol_type = other DNA
tgacccctgcgtctctgagctgtagggtgtctgggagattctgaggcctgcgtccctgagctgtgagctgttgaggtaat

SEQ ID NO: 108512 - DNA, 80 bp, synthetic construct
  misc_feature 1..80: note = Artificially Synthesized Probe
  source 1..80: mol_type = other DNA
tgattttgaggcctgcgtccctgagctgcggggtttctcggtaattctgaggcctgtgtccctgagctgtggggtgtctg

SEQ ID NO: 108513 - DNA, 80 bp, synthetic construct
  misc_feature 1..80: note = Artificially Synthesized Probe
  source 1..80: mol_type = other DNA
ttgacgtgattctgatgcctgcgtccctgagctgtgggctgttcaggtgattgtgaggcctgcgtctatgagctgtgggc

SEQ ID NO: 108514 - DNA, 80 bp, synthetic construct
  misc_feature 1..80: note = Artificially Synthesized Probe
  source 1..80: mol_type = other DNA
gggctgtccgggtgattctgaggcctgcgtccctgagctgtgggctgttgaggtgattctgaggcctgcgtccctgagct

SEQ ID NO: 108515 - DNA, 80 bp, synthetic construct
  misc_feature 1..80: note = Artificially Synthesized Probe
  source 1..80: mol_type = other DNA
agctgtgggctgttgaggtgattctgaggcctgcgtccctgagctgtgggctgttgaggtgattctgaggcctgtgtccc

SEQ ID NO: 108516 - DNA, 80 bp, synthetic construct
  misc_feature 1..80: note = Artificially Synthesized Probe
  source 1..80: mol_type = other DNA
tccctgagctacaggctgttgaggtgattctgtggcctgtgtccctgagctgtggggtgtccgggtgattctgaggcctg

SEQ ID NO: 108517 - DNA, 80 bp, synthetic construct
  misc_feature 1..80: note = Artificially Synthesized Probe
  source 1..80: mol_type = other DNA
tgtctgcgtgaccatgaggagaagcggaggacagcccaggtgaggacatcagacccaggagtgggtgaggagcccctgca

SEQ ID NO: 108518 - DNA, 80 bp, synthetic construct
  misc_feature 1..80: note = Artificially Synthesized Probe
  source 1..80: mol_type = other DNA
cctgcggctgtgagctgtggggtgtctgagtgattctgcggcctgtgtctctgagctgtggggtgtccgggtgattctga

SEQ ID NO: 108519 - DNA, 80 bp, synthetic construct
  misc_feature 1..80: note = Artificially Synthesized Probe
  source 1..80: mol_type = other DNA
ttgaggcctgcgtccctgagctgtgggctgttgaggtgattctgaggcctgtgtccctgcgctgtggggtgtctgggtga

SEQ ID NO: 108520 - DNA, 80 bp, synthetic construct
  misc_feature 1..80: note = Artificially Synthesized Probe
  source 1..80: mol_type = other DNA
gggattctgagggctcttttgcttgtggcccttctgcttggcatgcatactcaggcctgcaacatagcacgtggtcctga

SEQ ID NO: 108521 - DNA, 80 bp, synthetic construct
  misc_feature 1..80: note = Artificially Synthesized Probe
  source 1..80: mol_type = other DNA
caatgttctttctcttgtttcttgttgtgtggttttggccaaacgatcaaaacaatcaaatctctgggtcttggcttccc

SEQ ID NO: 108522 - DNA, 80 bp, synthetic construct
  misc_feature 1..80: note = Artificially Synthesized Probe
  source 1..80: mol_type = other DNA
caggtaacatggagctgctggagacccagccccagggaccccctgccaatatctgagtgaacagttcttgcaagctagga

SEQ ID NO: 108523 - DNA, 80 bp, synthetic construct
  misc_feature 1..80: note = Artificially Synthesized Probe
  source 1..80: mol_type = other DNA
agagaaattcttaaatgtaccgcagcgttcagctcctcagtgggttcggaaacagctggaaggaagggtgtaaagcccgc

SEQ ID NO: 108524 - DNA, 80 bp, synthetic construct
  misc_feature 1..80: note = Artificially Synthesized Probe
  source 1..80: mol_type = other DNA
ctcgctggtaggccgtggaaccttctggccgcatctttagcttctctagaaagggctactcgaccgtgggctctaaagag

SEQ ID NO: 108525 - DNA, 80 bp, synthetic construct
  misc_feature 1..80: note = Artificially Synthesized Probe
  source 1..80: mol_type = other DNA
tgcagccgcaggaccaagggattgatttctttctcggttataaattgcaactggagacatgctgacatgtgaagggaagc

SEQ ID NO: 108526 - DNA, 80 bp, synthetic construct
  misc_feature 1..80: note = Artificially Synthesized Probe
  source 1..80: mol_type = other DNA
ttgaatgaaggcaccatgcatttaaattaaatgtcagatgtaatttagcacccaggcatcaagaggctgagcgtgtgcag

SEQ ID NO: 108527 - DNA, 80 bp, synthetic construct
  misc_feature 1..80: note = Artificially Synthesized Probe
  source 1..80: mol_type = other DNA
ctgttgctaagacacacgagatcattgtttggaaggcgttttcccttctctctccctcaaatgactgtttaattgaggtt

SEQ ID NO: 108528 - DNA, 80 bp, synthetic construct
  misc_feature 1..80: note = Artificially Synthesized Probe
  source 1..80: mol_type = other DNA
accgaggggaccattcctacgggatgaggaaacacatctaacacaggccttctaaagagagaggagggagggagggaggg

SEQ ID NO: 108529 - DNA, 80 bp, synthetic construct
  misc_feature 1..80: note = Artificially Synthesized Probe
  source 1..80: mol_type = other DNA
tgctgcccacacggatgcccagagcgtgttccccaagaccagcgggtctcatgctgtccacacgctcccaccaggcgatc

SEQ ID NO: 108530 - DNA, 80 bp, synthetic construct
  misc_feature 1..80: note = Artificially Synthesized Probe
  source 1..80: mol_type = other DNA
gggtagatatgctcagaaaagctctggtcttcaggctgcaagctcccaagcaggatccacgagctcctgcaccccaaacc

SEQ ID NO: 108531 - DNA, 80 bp, synthetic construct
  misc_feature 1..80: note = Artificially Synthesized Probe
  source 1..80: mol_type = other DNA
tcgtaagtgctgcctcaacaacatggtgacttgtccgaacatgacctgactttgcatcccagggaaggcacagccacagc

SEQ ID NO: 108532 - DNA, 80 bp, synthetic construct
  misc_feature 1..80: note = Artificially Synthesized Probe
  source 1..80: mol_type = other DNA
cccttttgtgctggcctcagggtcaacgcgcactctctcttctgcttccctgtttccagctggcttcttcacccgaaagc

SEQ ID NO: 108533 - DNA, 80 bp, synthetic construct
  misc_feature 1..80: note = Artificially Synthesized Probe
  source 1..80: mol_type = other DNA
tttagaacagaggacacccatcaaaggcagcaaaccactgactctggaaatctgtgattagagatggccagctccatctc

SEQ ID NO: 108534 - DNA, 80 bp, synthetic construct
  misc_feature 1..80: note = Artificially Synthesized Probe
  source 1..80: mol_type = other DNA
ccggcagtgctgataacagacggtcaggagatggatttctgtggtgtggctgttctccaaggggcaggaactaactggga

SEQ ID NO: 108535 - DNA, 80 bp, synthetic construct
  misc_feature 1..80: note = Artificially Synthesized Probe
  source 1..80: mol_type = other DNA
agtgccatgtgccaggcatgtctgctgtgctgtgggaggagacggtgctgttccctggccgatgcccactggaccccaca

SEQ ID NO: 108536 - DNA, 80 bp, synthetic construct
  misc_feature 1..80: note = Artificially Synthesized Probe
  source 1..80: mol_type = other DNA
gcacaggcaccagccaccactgcttctcctcccgtctgggcctcactccagccctagtggcctccgtctgggccgcagct

SEQ ID NO: 108537 - DNA, 80 bp, synthetic construct
  misc_feature 1..80: note = Artificially Synthesized Probe
  source 1..80: mol_type = other DNA
ctcccctccgttctctaccatgtgccaggccccacacctgccctaacgcttcccagatcgtggcatgcgtgcatggctgc

SEQ ID NO: 108538 - DNA, 80 bp, synthetic construct
  misc_feature 1..80: note = Artificially Synthesized Probe
  source 1..80: mol_type = other DNA
catcttgctccctcctcatcctggcaccagctgaccccatccttgggaggccttggtctctggttccccgctcccctatc

SEQ ID NO: 108539 - DNA, 80 bp, synthetic construct
  misc_feature 1..80: note = Artificially Synthesized Probe
  source 1..80: mol_type = other DNA
gcctgtggggcctgagtcctgggagaagcaaactcaggcctggaggctgagtccgtgtggggaatgtggcctgtgctgct

SEQ ID NO: 108540 - DNA, 80 bp, synthetic construct
  misc_feature 1..80: note = Artificially Synthesized Probe
  source 1..80: mol_type = other DNA
tcttgcaccagaatagctcaggggaaggaaaggcacagaaaataaacaacacacagcagaggaggccctgctcctgcccg

SEQ ID NO: 108541 - DNA, 80 bp, synthetic construct
  misc_feature 1..80: note = Artificially Synthesized Probe
  source 1..80: mol_type = other DNA
gttctagaaagaaaaccgggaggaggcggtgtgggaccgtgggcagacatcaacctagaccagcccctgtccccccttgg

SEQ ID NO: 108542 - DNA, 80 bp, synthetic construct
  misc_feature 1..80: note = Artificially Synthesized Probe
  source 1..80: mol_type = other DNA
ggatctttgtgttttactgaagttcacggggtgcccccagccctacttggcatgcgtgttttctttgtagttagttttct

SEQ ID NO: 108543 - DNA, 80 bp, synthetic construct
  misc_feature 1..80: note = Artificially Synthesized Probe
  source 1..80: mol_type = other DNA
ggtgcttcatgaacactctgcagcggggtgtgcttcaaggggaggaagaacttagattataatgcttttgttgttgttgt

SEQ ID NO: 108544 - DNA, 80 bp, synthetic construct
  misc_feature 1..80: note = Artificially Synthesized Probe
  source 1..80: mol_type = other DNA
gactatgggtgtgcgctgccacgcccggctaatttttataatttttgtagagacagggtttctccatgttgcccaggctg

SEQ ID NO: 108545 - DNA, 80 bp, synthetic construct
  misc_feature 1..80: note = Artificially Synthesized Probe
  source 1..80: mol_type = other DNA
gctgtcaaagacaaaaactacccagaaacccagtactgtgccaaatgttgagaaaatctgtaattccaaacagtagcttc

SEQ ID NO: 108546 - DNA, 80 bp, synthetic construct
  misc_feature 1..80: note = Artificially Synthesized Probe
  source 1..80: mol_type = other DNA
ataagaaaatgtggtccatatacaccgtggaatactatgcaaccataaaaagaatgaaatcatgtcttttgcagcaacat

SEQ ID NO: 108547 - DNA, 80 bp, synthetic construct
  misc_feature 1..80: note = Artificially Synthesized Probe
  source 1..80: mol_type = other DNA
ggggagagggaaggagtgaaaaaaaaccaccccttggctactatgctcactgcctggagacggatccattcttactccaa

SEQ ID NO: 108548 - DNA, 80 bp, synthetic construct
  misc_feature 1..80: note = Artificially Synthesized Probe
  source 1..80: mol_type = other DNA
gctggcattgtgtaggtaaatgctgcagtggtttacttggcatctgactaccctgacattttatgggtaggatttgtacc

SEQ ID NO: 108549 - DNA, 80 bp, synthetic construct
  misc_feature 1..80: note = Artificially Synthesized Probe
  source 1..80: mol_type = other DNA
ggaagagtggcacttccaaaagagtttccatgaatgagtgaataatgaagttctaggttaggatctcggctctgtaattt

SEQ ID NO: 108550 - DNA, 80 bp, synthetic construct
  misc_feature 1..80: note = Artificially Synthesized Probe
  source 1..80: mol_type = other DNA
aagtacctgggattacaggtgtccgtcaccacgcccagctaatttttgtatttttaatagagacgggttgcaccatgttg

SEQ ID NO: 108551 - DNA, 80 bp, synthetic construct
  misc_feature 1..80: note = Artificially Synthesized Probe
  source 1..80: mol_type = other DNA
cagcacggagcttagcagggaaaggcatgagaagctgctagcgtggggactcaaggaacatcagcagtgtccttaccttc

SEQ ID NO: 108552 - DNA, 80 bp, synthetic construct
  misc_feature 1..80: note = Artificially Synthesized Probe
  source 1..80: mol_type = other DNA
cactggcccttcgtgttttcatgtttcagccaaacataaaagcgagacgtctcctgctcagctttcccaattctgcccag

SEQ ID NO: 108553 - DNA, 80 bp, synthetic construct
  misc_feature 1..80: note = Artificially Synthesized Probe
  source 1..80: mol_type = other DNA
atgtcattattcctcagccagggttgtgcggatgggagcgctggtcacttaagcacatgaagaagaaaaagtctttctgc

SEQ ID NO: 108554 - DNA, 80 bp, synthetic construct
  misc_feature 1..80: note = Artificially Synthesized Probe
  source 1..80: mol_type = other DNA
tttttttttaaaacctcccccaccccctaaagagatcattattgttacgacatagaaaaacctagccttgcagctgaggc

SEQ ID NO: 108555 - DNA, 80 bp, synthetic construct
  misc_feature 1..80: note = Artificially Synthesized Probe
  source 1..80: mol_type = other DNA
gccaggcctggaaggcagagcgggagagcagagagacatgctccacgccgcaggcccagctcaccctccgactgaggcag

SEQ ID NO: 108556 - DNA, 80 bp, synthetic construct
  misc_feature 1..80: note = Artificially Synthesized Probe
  source 1..80: mol_type = other DNA
agttagcgggctatgaggatcttttctatctcgaagccgtgcgtctttcacctgttgttcgactggtatgctctgtggct

SEQ ID NO: 108557 - DNA, 80 bp, synthetic construct
  misc_feature 1..80: note = Artificially Synthesized Probe
  source 1..80: mol_type = other DNA
aaagagccccagctgctgaacttaacctggggccccgcgaatgaaccaggctccgcccctgacgcccgagacaccgcgca

SEQ ID NO: 108558 - DNA, 80 bp, synthetic construct
  misc_feature 1..80: note = Artificially Synthesized Probe
  source 1..80: mol_type = other DNA
ggtctcgggactgacggcgcaggggacgcgcgggattgacggagcgggagatgcggtcgcgggatgggatgtgctccccg

SEQ ID NO: 108559 - DNA, 80 bp, synthetic construct
  misc_feature 1..80: note = Artificially Synthesized Probe
  source 1..80: mol_type = other DNA
ctgcacgctcctgggtcatgctccgctcaggcggctccttcagtgaagttgcacagcagtcagggtaacctccatgtccc

SEQ ID NO: 108560 - DNA, 80 bp, synthetic construct
  misc_feature 1..80: note = Artificially Synthesized Probe
  source 1..80: mol_type = other DNA
agccgaggcaggtggcagctgctgtgctgggaaggctgcgtgcgcggggcatcctctcttggcccgggtgggcggacgca

SEQ ID NO: 108561 - DNA, 80 bp, synthetic construct
  misc_feature 1..80: note = Artificially Synthesized Probe
  source 1..80: mol_type = other DNA
tgcacagcagaaggccctgctcagaaaatccctgatttcacgggactcctagtggctctgcctcccggatggagccctgc

SEQ ID NO: 108562 - DNA, 80 bp, synthetic construct
  misc_feature 1..80: note = Artificially Synthesized Probe
  source 1..80: mol_type = other DNA
catcaaataattccgacgtttcaagaaaaaggcaagtgactctattattcctcgtttctcttgggtctgaaaaatcatgt

SEQ ID NO: 108563 - DNA, 80 bp, synthetic construct
  misc_feature 1..80: note = Artificially Synthesized Probe
  source 1..80: mol_type = other DNA
ctggccctcttagtcccgcactgcctggctggtcccccagccatctggttctgcactgcccagccatgccatcccctcgg

SEQ ID NO: 108564 - DNA, 80 bp, synthetic construct
  misc_feature 1..80: note = Artificially Synthesized Probe
  source 1..80: mol_type = other DNA
tcaatgcagcaccgtgtccaccatgcgccaagggagcctgctgggctgagatgcacctgtttaggcagcatcggggagcg

SEQ ID NO: 108565 - DNA, 80 bp, synthetic construct
  misc_feature 1..80: note = Artificially Synthesized Probe
  source 1..80: mol_type = other DNA
ggccgcttcattaaagttgaatttaaagccagactttaaagaatgaactgctgtcttttcaaaggcctccttcaaatgga

SEQ ID NO: 108566 - DNA, 80 bp, synthetic construct
  misc_feature 1..80: note = Artificially Synthesized Probe
  source 1..80: mol_type = other DNA
tcatgactttgaggctttaaaaattactttaacaaataatgtacgcgttgagaatggtcgcctgggcagcgattataatg

SEQ ID NO: 108567 - DNA, 80 bp, synthetic construct
  misc_feature 1..80: note = Artificially Synthesized Probe
  source 1..80: mol_type = other DNA
tgagaaccatagtgtaggaagagaccgggcgggcaaagtgggaccatccagcagcccctacctgtcagggggacccaccc

SEQ ID NO: 108568 - DNA, 80 bp, synthetic construct
  misc_feature 1..80: note = Artificially Synthesized Probe
  source 1..80: mol_type = other DNA
cgtggtgatcagtttcccacgtgctcagggggttctgcgccctgccccaaatcttacagctgatgtggggtagagacaga

SEQ ID NO: 108569 - DNA, 80 bp, synthetic construct
  misc_feature 1..80: note = Artificially Synthesized Probe
  source 1..80: mol_type = other DNA
acgcaaataaaaccacaagtcctgccctcgagagatcattatctgggcccagagcagctgctccacagaagtgcgaagga

SEQ ID NO: 108570 - DNA, 80 bp, synthetic construct
  misc_feature 1..80: note = Artificially Synthesized Probe
  source 1..80: mol_type = other DNA
agtctccactgacacctgctggggtacttgccttttaacaaggcatccaaaataagaaaaaacttttcagaatgcttgtg

SEQ ID NO: 108571 - DNA, 80 bp, synthetic construct
  misc_feature 1..80: note = Artificially Synthesized Probe
  source 1..80: mol_type = other DNA
ttatttccttctcctgcctaattgccctggccaagcattcttatacaccaacaacagacaaacagagagccaaatcatga

SEQ ID NO: 108572 - DNA, 80 bp, synthetic construct
  misc_feature 1..80: note = Artificially Synthesized Probe
  source 1..80: mol_type = other DNA
aagaatcaatatcgtgaaaatggccatactgcccaaggtaatttatagattcaatgccatccccatcaagctaccaatga

SEQ ID NO: 108573 - DNA, 80 bp, synthetic construct
  misc_feature 1..80: note = Artificially Synthesized Probe
  source 1..80: mol_type = other DNA
ggtactggtaccaaaacagagatatagatcaatggaacagaacagagccctcagaaataatgcctcatatctacaactat

SEQ ID NO: 108574 - DNA, 80 bp, synthetic construct
  misc_feature 1..80: note = Artificially Synthesized Probe
  source 1..80: mol_type = other DNA
tcccacttccctgcagactccaggctgtgcccagagagagctgagctcggcggcccaggcgcctcaccactggccctcag

SEQ ID NO: 108575 - DNA, 80 bp, synthetic construct
  misc_feature 1..80: note = Artificially Synthesized Probe
  source 1..80: mol_type = other DNA
acattagacctaaaaccataaaaaccctagaagaaaacctaggcattaccattcaggacataggcatgggcaaggacttc

SEQ ID NO: 108576 - DNA, 80 bp, synthetic construct
  misc_feature 1..80: note = Artificially Synthesized Probe
  source 1..80: mol_type = other DNA
ggctaatatccagaatctacaatgaactcaaacaaatttacaagaaaaaaaccccatcaaaaagtgggcgaagaacatga

SEQ ID NO: 108577 - DNA, 80 bp, synthetic construct
  misc_feature 1..80: note = Artificially Synthesized Probe
  source 1..80: mol_type = other DNA
ttagaatggcaatcattaaaaagtcaggaaacaacaggtgctggagagggtgtggagaaataggaacacttttacactgt

SEQ ID NO: 108578 - DNA, 80 bp, synthetic construct
  misc_feature 1..80: note = Artificially Synthesized Probe
  source 1..80: mol_type = other DNA
ttattgcagcattattcacgatagcaaagatttggaaccaacccaaatgtccaacaataatagactggattaagaaaatg

SEQ ID NO: 108579 - DNA, 80 bp, synthetic construct
  misc_feature 1..80: note = Artificially Synthesized Probe
  source 1..80: mol_type = other DNA
caatgagatcacatggacacaggaaggggaatatcacactctggggactgttgtggggtggggggaggggggagggatag

SEQ ID NO: 108580 - DNA, 80 bp, synthetic construct
  misc_feature 1..80: note = Artificially Synthesized Probe
  source 1..80: mol_type = other DNA
gagccaaaggagagaggtgggagcatggtggccccaggcaccgcatgcagggaggggtatcagggccccccttgggaagt

SEQ ID NO: 108581 - DNA, 80 bp, synthetic construct
  misc_feature 1..80: note = Artificially Synthesized Probe
  source 1..80: mol_type = other DNA
cgcccactcacagtcggtcacagggctaaccctccatcagagcccacggccgcccactcatggtcacagagctaaccatc

SEQ ID NO: 108582 - DNA, 80 bp, synthetic construct
  misc_feature 1..80: note = Artificially Synthesized Probe
  source 1..80: mol_type = other DNA
cctgaggtgtccagtccaactcaaatttccagccacatacaccatgacctctggcgtgatgtgccctcctcatttttctc

SEQ ID NO: 108583 - DNA, 80 bp, synthetic construct
  misc_feature 1..80: note = Artificially Synthesized Probe
  source 1..80: mol_type = other DNA
cacaggttggcggtggccctgagccaggctggtgtggcctcgagtcccttctcctagccccaaaccccacggcacagttg

SEQ ID NO: 108584 - DNA, 80 bp, synthetic construct
  misc_feature 1..80: note = Artificially Synthesized Probe
  source 1..80: mol_type = other DNA
attaaattcttctggaaatcttagcctgcctcactgcttggtttcctcttcattcggaattaattcctcccttggatgct

SEQ ID NO: 108585 - DNA, 80 bp, synthetic construct
  misc_feature 1..80: note = Artificially Synthesized Probe
  source 1..80: mol_type = other DNA
cccagagcaccacggtgcccaccttttgttttcagagaagcaacaacacctcatattcagtctaacctgtgaccattttc

SEQ ID NO: 108586 - DNA, 80 bp, synthetic construct
  misc_feature 1..80: note = Artificially Synthesized Probe
  source 1..80: mol_type = other DNA
ttgcagactgagcagggttctgcatctgactctggctgaccggaggccttgaggcaagtcacccaacctcccagaactgc

SEQ ID NO: 108587 - DNA, 80 bp, synthetic construct
  misc_feature 1..80: note = Artificially Synthesized Probe
  source 1..80: mol_type = other DNA
cgagaatgctgaggaatcgtaactggcacactctgcagggaggaatatagcatgatgcagtcgctgttagtgggtcctca

SEQ ID NO: 108588 - DNA, 80 bp, synthetic construct
  misc_feature 1..80: note = Artificially Synthesized Probe
  source 1..80: mol_type = other DNA
tggaagaaaagataaacatcatgtggtccacccacacatgggaatattactcagcactgaaaaggcagagattttggatg

SEQ ID NO: 108589 - DNA, 80 bp, synthetic construct
  misc_feature 1..80: note = Artificially Synthesized Probe
  source 1..80: mol_type = other DNA
agtgtttaatggggacagacttccagtgtggaaagatggaaagagttttagaagcagatagtgatgatggttgcacagta

SEQ ID NO: 108590 - DNA, 80 bp, synthetic construct
  misc_feature 1..80: note = Artificially Synthesized Probe
  source 1..80: mol_type = other DNA
gaaatgatccatcctgccattcatccatccatccatcaagcactcatccatccttccatccttcatccacccatccatct

SEQ ID NO: 108591 - DNA, 80 bp, synthetic construct
  misc_feature 1..80: note = Artificially Synthesized Probe
  source 1..80: mol_type = other DNA
tccatcatccatgcatccatacctccatccatccaaccacccatccttcccccatccatccactcactccccatccatcc

SEQ ID NO: 108592 - DNA, 80 bp, synthetic construct
  misc_feature 1..80: note = Artificially Synthesized Probe
  source 1..80: mol_type = other DNA
atccatctttccttcatccatccctccatcatccatccacccatccatcatcctttcacccatccatcatccactcttct

SEQ ID NO: 108593 - DNA, 80 bp, synthetic construct
  misc_feature 1..80: note = Artificially Synthesized Probe
  source 1..80: mol_type = other DNA
atcatccatttttcctccatccacccatccactcatccatccatccatcattgctccatccatccacccacctacccatc

SEQ ID NO: 108594 - DNA, 80 bp, synthetic construct
  misc_feature 1..80: note = Artificially Synthesized Probe
  source 1..80: mol_type = other DNA
catccatccttcctccatccattcactcacccatccatcatccattcttcctccatccatccactcatccactcatccat

SEQ ID NO: 108595 - DNA, 80 bp, synthetic construct
  misc_feature 1..80: note = Artificially Synthesized Probe
  source 1..80: mol_type = other DNA
acccatccatccaaccaaccattcatccttcctccatccatccatccatctatccgcccacccatccatcatccattctt

SEQ ID NO: 108596 - DNA, 80 bp, synthetic construct
  misc_feature 1..80: note = Artificially Synthesized Probe
  source 1..80: mol_type = other DNA
tccatccttccatccattcacccacacatccatcatccattcttcttacatccatccacccatccatccttccttcatcc

SEQ ID NO: 108597 - DNA, 80 bp, synthetic construct
  misc_feature 1..80: note = Artificially Synthesized Probe
  source 1..80: mol_type = other DNA
gcagccacagactccttacctgtctctcggcagagcaggaagatgcagcaggaggatggggcttctctgttttgctctca

SEQ ID NO: 108598 - DNA, 80 bp, synthetic construct
  misc_feature 1..80: note = Artificially Synthesized Probe
  source 1..80: mol_type = other DNA
cacccataaacaaacactttcactgaagagacacgggaggaatcagaaaaagctattctcagagcttctatcctagagaa

SEQ ID NO: 108599 - DNA, 80 bp, synthetic construct
  misc_feature 1..80: note = Artificially Synthesized Probe
  source 1..80: mol_type = other DNA
aacttgctcaatgctccatagcatttggctgagacaccatttcttggaggacaggacattgaaatctcagaggctgggtg

SEQ ID NO: 108600 - DNA, 80 bp, synthetic construct
  misc_feature 1..80: note = Artificially Synthesized Probe
  source 1..80: mol_type = other DNA
gtgggtggaatcctgtctgatgacccagctgggagtggcttgtccccctctggacactgccagccctcctcctggcacca

SEQ ID NO: 108601 - DNA, 80 bp, synthetic construct
  misc_feature 1..80: note = Artificially Synthesized Probe
  source 1..80: mol_type = other DNA
ttgtccacacccctcctggctcagggcatgcgcgtccacagccacttgggcaggcacacctgaggggcacccctccctcc

SEQ ID NO: 108602 - DNA, 80 bp, synthetic construct
  misc_feature 1..80: note = Artificially Synthesized Probe
  source 1..80: mol_type = other DNA
tgacatgaagtagccaggctgtgctgggcacacagcactccacgtccatcatccatctgtggcttatgaacgccttgtac

SEQ ID NO: 108603 - DNA, 80 bp, synthetic construct
  misc_feature 1..80: note = Artificially Synthesized Probe
  source 1..80: mol_type = other DNA
ctgtgttcttaggataacccaatctttctctctccttctaccttgataatgatgcctgacactttgtacggtgtttgcct

SEQ ID NO: 108604 - DNA, 80 bp, synthetic construct
  misc_feature 1..80: note = Artificially Synthesized Probe
  source 1..80: mol_type = other DNA
cactgccaggccagtctgccttccgtggtcacaggcgaacactgttctgtttggtgctgtgcctctgcagtgtggtgaga

SEQ ID NO: 108605 - DNA, 80 bp, synthetic construct
  misc_feature 1..80: note = Artificially Synthesized Probe
  source 1..80: mol_type = other DNA
tttgttttgttattgtttttaaactcaaaaggcaggtaggacttaggaggcaagaaagcccgcttgagggacattaagga

SEQ ID NO: 108606 - DNA, 80 bp, synthetic construct
  misc_feature 1..80: note = Artificially Synthesized Probe
  source 1..80: mol_type = other DNA
actctacttcagattgcaactacttaagcatctttgtttaacaaaatcaataaaaaaagatttcactaacaagactgcaa

SEQ ID NO: 108607 - DNA, 80 bp, synthetic construct
  misc_feature 1..80: note = Artificially Synthesized Probe
  source 1..80: mol_type = other DNA
tgttcactgaagcacagcacacgggcagaaccgcacgctacatcctcaggctttgctttggggccaagaagcgacccccc

SEQ ID NO: 108608 - DNA, 80 bp, synthetic construct
  misc_feature 1..80: note = Artificially Synthesized Probe
  source 1..80: mol_type = other DNA
cgccccagcccagccccagctccaccccagatgtttctgttcagaaacaaaatcagttacaaaaaaacctaaacacatca

SEQ ID NO: 108609 - DNA, 80 bp, synthetic construct
  misc_feature 1..80: note = Artificially Synthesized Probe
  source 1..80: mol_type = other DNA
gtgggggatgcaccctggggaggggaagggtgcgccccccacgccacagaaaagaacctgcaaagccctgagtcctggag

SEQ ID NO: 108610 - DNA, 80 bp, synthetic construct
  misc_feature 1..80: note = Artificially Synthesized Probe
  source 1..80: mol_type = other DNA
aattgtagtgtctttctttagaaaataaggacaagtgattggggtgttttggcacccacagtgccatggcacctatggag

SEQ ID NO: 108611 - DNA, 80 bp, synthetic construct
  misc_feature 1..80: note = Artificially Synthesized Probe
  source 1..80: mol_type = other DNA
gcataaaaatatggccgtaatgttggcataatttttcatgatcatcttcattaaccacagcgaacgggaggagcgtttgc

SEQ ID NO: 108612 - DNA, 80 bp, synthetic construct
  misc_feature 1..80: note = Artificially Synthesized Probe
  source 1..80: mol_type = other DNA
cggcatccaggcttaaggcgctggtctgatttcacagtttaattactgctaatctgagaggccacagctaatgagctgcc

SEQ ID NO: 108613 - DNA, 80 bp, synthetic construct
  misc_feature 1..80: note = Artificially Synthesized Probe
  source 1..80: mol_type = other DNA
atggaaacatcacagcaatgtcaacaggcaaatggaacacagataggattttggaattcagccaccacaactccactgaa

SEQ ID NO: 108614 - DNA, 80 bp, synthetic construct
  misc_feature 1..80: note = Artificially Synthesized Probe
  source 1..80: mol_type = other DNA
tcaccaggatttgtaacagcacagcagacatgtcaccagcccctccacacggaactctcttccgcagctccctgtggctc

SEQ ID NO: 108615 - DNA, 80 bp, synthetic construct
  misc_feature 1..80: note = Artificially Synthesized Probe
  source 1..80: mol_type = other DNA
cggcagatggcctgaaagcacatgtggggctgtggcctctggtgcaggcatcatggcttactgggctttaggatacacac

SEQ ID NO: 108616 - DNA, 80 bp, synthetic construct
  misc_feature 1..80: note = Artificially Synthesized Probe
  source 1..80: mol_type = other DNA
ggtgaatgctgcttctgcttctagaacactgctctgcaatttagagatgaaattctggcacccttaattctatttgttta

SEQ ID NO: 108617 - DNA, 80 bp, synthetic construct
  misc_feature 1..80: note = Artificially Synthesized Probe
  source 1..80: mol_type = other DNA
taattaaatattcttagcagcatcatgtggagaaactggattttcaattaagcactttctgaggtgagggtctcagcagg

SEQ ID NO: 108618 - DNA, 80 bp, synthetic construct
  misc_feature 1..80: note = Artificially Synthesized Probe
  source 1..80: mol_type = other DNA
agaaatctttgttaaaaattagcgctataggggagcttattttgcccaatgacagagcagatctgaaaaaagcatcaaat

SEQ ID NO: 108619 - DNA, 80 bp, synthetic construct
  misc_feature 1..80: note = Artificially Synthesized Probe
  source 1..80: mol_type = other DNA
ctttctgtctaaagcatcttactgactgctgtgtgacacctaatcaggaggagaaaatggagcggggagaccagcacacg

SEQ ID NO: 108620 - DNA, 80 bp, synthetic construct
  misc_feature 1..80: note = Artificially Synthesized Probe
  source 1..80: mol_type = other DNA
cccccgaggtgagacctctgtcctccccacctgagtgtgggggctgtgggcccgcttggccagttgaggcagcagaatgc

SEQ ID NO: 108621 - DNA, 80 bp, synthetic construct
  misc_feature 1..80: note = Artificially Synthesized Probe
  source 1..80: mol_type = other DNA
gttcttgggaaactcgctgccattctgtgaggaagcccaagcagccttgtggaggctccacatgcagaggcccagagctc

SEQ ID NO: 108622 - DNA, 80 bp, synthetic construct
  misc_feature 1..80: note = Artificially Synthesized Probe
  source 1..80: mol_type = other DNA
agctgagagcaaaacagggctctccaatttgggataatttgctatgcagatatagattcctggggtacctgcccccccat

SEQ ID NO: 108623 - DNA, 80 bp, synthetic construct
  misc_feature 1..80: note = Artificially Synthesized Probe
  source 1..80: mol_type = other DNA
cagtgagacacagcccctgccctcagggagcttacaactgagtggaggagaaagacacacacggcacagggaaaatgtgc

SEQ ID NO: 108624 - DNA, 80 bp, synthetic construct
  misc_feature 1..80: note = Artificially Synthesized Probe
  source 1..80: mol_type = other DNA
acacactcacagacacagacacaaacacacagacacagacacagaaacacacagacacaagacacaaacagacacacacg

SEQ ID NO: 108625 - DNA, 80 bp, synthetic construct
  misc_feature 1..80: note = Artificially Synthesized Probe
  source 1..80: mol_type = other DNA
cgcacacacagatgcacagacacccacacatagaaatacacacagatacacacacagaacacagacacaaacacacacat

SEQ ID NO: 108626 - DNA, 80 bp, synthetic construct
  misc_feature 1..80: note = Artificially Synthesized Probe
  source 1..80: mol_type = other DNA
acacccatacagacatacacagacacacaaacacacagacatacagacacacatagacacagacacacacatacacacag

SEQ ID NO: 108627 - DNA, 80 bp, synthetic construct
  misc_feature 1..80: note = Artificially Synthesized Probe
  source 1..80: mol_type = other DNA
gacctggggcaggaagtggaaagaggcccctgatccaggtgcagctcctgctcccggaaccgcctgtgaacgactgtgac

SEQ ID NO: 108628 - DNA, 80 bp, synthetic construct
  misc_feature 1..80: note = Artificially Synthesized Probe
  source 1..80: mol_type = other DNA
gtgggagaacatctttttgaacaaacacgtaaacacattgagtctttggtcgcttttgcatcttctttcttctctggcct

SEQ ID NO: 108629 - DNA, 80 bp, synthetic construct
  misc_feature 1..80: note = Artificially Synthesized Probe
  source 1..80: mol_type = other DNA
ccgcctgctcccctgtaaatgggcagtgatacaaccagcttcccagaactcccagaactggatccaggcctgggtgagaa

SEQ ID NO: 108630 - DNA, 80 bp, synthetic construct
  misc_feature 1..80: note = Artificially Synthesized Probe
  source 1..80: mol_type = other DNA
tgcagctagtacaactgaagagctgacttgtaaactttatccaattttagtgactctaaggaaccacatgtggctactgt

SEQ ID NO: 108631 - DNA, 80 bp, synthetic construct
  misc_feature 1..80: note = Artificially Synthesized Probe
  source 1..80: mol_type = other DNA
ggacaagcctccttggtcatgctccggctggcctttagctgaggtttagctctacgcggacattagaagcacaaaccaag

SEQ ID NO: 108632 - DNA, 80 bp, synthetic construct
  misc_feature 1..80: note = Artificially Synthesized Probe
  source 1..80: mol_type = other DNA
ctgcagtccccacagacgcctttgctcaagcccacctgcctcttcccagcaccacccgtgtcttcatctggggagaagag

SEQ ID NO: 108633 - DNA, 80 bp, synthetic construct
  misc_feature 1..80: note = Artificially Synthesized Probe
  source 1..80: mol_type = other DNA
ccctctgtctgtgttgcctctgttccttggagctgtatcttcctcagcctcaatttctctgcccattggtgtctttgttc

SEQ ID NO: 108634 - DNA, 80 bp, synthetic construct
  misc_feature 1..80: note = Artificially Synthesized Probe
  source 1..80: mol_type = other DNA
caataactggactgatccaagttgaagtcagttggtgaatgaatcaataaactccaactgagagctctacacagcacatc

SEQ ID NO: 108635 - DNA, 80 bp, synthetic construct
  misc_feature 1..80: note = Artificially Synthesized Probe
  source 1..80: mol_type = other DNA
acatagggaaaacaagaatgggaaataagttggagcctagaatgaggttagtatgcaaaacccatgacacggacctactt

SEQ ID NO: 108636 - DNA, 80 bp, synthetic construct
  misc_feature 1..80: note = Artificially Synthesized Probe
  source 1..80: mol_type = other DNA
ttcttaaattaaaaaagaaatgttccaggagtcctcacagagatgcgctgaatagaatatgcaccatcctccatgatgtc

SEQ ID NO: 108637 - DNA, 80 bp, synthetic construct
  misc_feature 1..80: note = Artificially Synthesized Probe
  source 1..80: mol_type = other DNA
tattcttcccaaccaagatttcactggaagttgagctgcagtgagtttaagaaaatggtaagccccccatctctgcacgc

SEQ ID NO: 108638 - DNA, 80 bp, synthetic construct
  misc_feature 1..80: note = Artificially Synthesized Probe
  source 1..80: mol_type = other DNA
tgactcagcctcatggtacagcagagggcacgcccgacaggggaggtcttcgagtcaacaatgggaagtagaaatctgcc

SEQ ID NO: 108639 - DNA, 80 bp, synthetic construct
  misc_feature 1..80: note = Artificially Synthesized Probe
  source 1..80: mol_type = other DNA
ttacatgccagagtctctgaaagttcttgatgagaacagtgacacaatgaaagcaaagtcagggaagatgagaaggtggc

SEQ ID NO: 108640 - DNA, 80 bp, synthetic construct
  misc_feature 1..80: note = Artificially Synthesized Probe
  source 1..80: mol_type = other DNA
aagatggcgccactctgcaggacgccgtgtgtggcaaccactcgctctcacccttcgggtctgcggcagctactgtcata

SEQ ID NO: 108641 - DNA, 80 bp, synthetic construct
  misc_feature 1..80: note = Artificially Synthesized Probe
  source 1..80: mol_type = other DNA
cagggccgagggatggaaggaaaacaaacccttgcagttcaacccacagggcggaggcggcagcgtgagaagcttcctga

SEQ ID NO: 108642 - DNA, 80 bp, synthetic construct
  misc_feature 1..80: note = Artificially Synthesized Probe
  source 1..80: mol_type = other DNA
accacatgctcccgcgtcaccacacacagcagatcaggaccacgtgctcccgcgtcaccacacacagcagatcaggacca

SEQ ID NO: 108643 - DNA, 80 bp, synthetic construct
  misc_feature 1..80: note = Artificially Synthesized Probe
  source 1..80: mol_type = other DNA
tcggggcagtccccacacaagggcaggacggagcctggacggaagctccacgccctggggtacctgctggggcatccagg

SEQ ID NO: 108644 - DNA, 80 bp, synthetic construct
  misc_feature 1..80: note = Artificially Synthesized Probe
  source 1..80: mol_type = other DNA
ctgtgatgctatagggatggtcagtgaggagaccgccgcaaaatgcagactcagaggtgtgcataggtgggctgggcccg

SEQ ID NO: 108645 - DNA, 80 bp, synthetic construct
  misc_feature 1..80: note = Artificially Synthesized Probe
  source 1..80: mol_type = other DNA
ccctcctctcctttttcacctcctccctgtcctccttctccctctccttcacttcctccctctcctcctccatctcctcc

SEQ ID NO: 108646 - DNA, 80 bp, synthetic construct
  misc_feature 1..80: note = Artificially Synthesized Probe
  source 1..80: mol_type = other DNA
actctcctcctcctccatctcctcctcctcctcctcttcctccctcctctgtctctcctcttcctcactctcctcctcct

SEQ ID NO: 108647 - DNA, 80 bp, synthetic construct
  misc_feature 1..80: note = Artificially Synthesized Probe
  source 1..80: mol_type = other DNA
tccactcccctcctctggtgctgtggctttccctcttttcctcctctcttcctccctcctctgctcctccctcctcctgc

SEQ ID NO: 108648 - DNA, 80 bp, synthetic construct
  misc_feature 1..80: note = Artificially Synthesized Probe
  source 1..80: mol_type = other DNA
cctctcctcctcctccctctcctcctccatctcctcctccttctccccctcctcctcgctcttctcctcgtccttcctct

SEQ ID NO: 108649 - DNA, 80 bp, synthetic construct
  misc_feature 1..80: note = Artificially Synthesized Probe
  source 1..80: mol_type = other DNA
tcattttctttctccgcttttcctgttctcttttcaacacttttatcctcagtatcattttctccacacacaattcaatt

SEQ ID NO: 108650 - DNA, 80 bp, synthetic construct
  misc_feature 1..80: note = Artificially Synthesized Probe
  source 1..80: mol_type = other DNA
gtgccccacactgctaagctcagggacgcagccttcctgatgccggaggacacgcagtgccccacactgctaagctcagg

SEQ ID NO: 108651 - DNA, 80 bp, synthetic construct
  misc_feature 1..80: note = Artificially Synthesized Probe
  source 1..80: mol_type = other DNA
gacactatgaaagggcagtcccgctgcatcagggacatgcatgctcctctcacacatgtggattcagagctagggccaga

SEQ ID NO: 108652 - DNA, 80 bp, synthetic construct
  misc_feature 1..80: note = Artificially Synthesized Probe
  source 1..80: mol_type = other DNA
actttaaaagcactgaaagatccaccagaataagatgtctgctgaaaagctagtttctttcaaccactgctgaggaaaat

SEQ ID NO: 108653 - DNA, 80 bp, synthetic construct
  misc_feature 1..80: note = Artificially Synthesized Probe
  source 1..80: mol_type = other DNA
tcaccacacagcagatcaggaccacgtgctcccgcttcaccacacacagcagatcaggaccacatgctcccacgtcacca

SEQ ID NO: 108654 - DNA, 80 bp, synthetic construct
  misc_feature 1..80: note = Artificially Synthesized Probe
  source 1..80: mol_type = other DNA
aaaaaccaattcagacaggaaccactgaaggaattaaaagttacagaaccagagtctaaagtgagcacagcaaactccgc

SEQ ID NO: 108655 - DNA, 80 bp, synthetic construct
  misc_feature 1..80: note = Artificially Synthesized Probe
  source 1..80: mol_type = other DNA
cccaagtacatgtgaatacaggtgtcgaatgcccacgtaaacatgtacatgtgaatacaggcatcaaatgcccacgtaca

SEQ ID NO: 108656 - DNA, 80 bp, synthetic construct
  misc_feature 1..80: note = Artificially Synthesized Probe
  source 1..80: mol_type = other DNA
atacaggtgttgggtgcccatgtaaacatgtacacgtgaatacaggtatcgaatgcctatgtaaacatgtacatgtgaat

SEQ ID NO: 108657 - DNA, 80 bp, synthetic construct
  misc_feature 1..80: note = Artificially Synthesized Probe
  source 1..80: mol_type = other DNA
aatgcctatgtagacatgtacacatgaatacaggcactggatgcccacgtaaacatgtccatgtgaatacatgcactgaa

SEQ ID NO: 108658 - DNA, 80 bp, synthetic construct
  misc_feature 1..80: note = Artificially Synthesized Probe
  source 1..80: mol_type = other DNA
gcccacatatgcaacaagtcaatgtcttcctatgccactgctctctggacagaccacattctgaaaacaatgatgaagcc

SEQ ID NO: 108659 - DNA, 80 bp, synthetic construct
  misc_feature 1..80: note = Artificially Synthesized Probe
  source 1..80: mol_type = other DNA
gcaaatgccacctagaagcaaaacctgacttaggtcaccaggtgcaggccttacatatagaggtagtagcgctacattga

SEQ ID NO: 108660 - DNA, 80 bp, synthetic construct
  misc_feature 1..80: note = Artificially Synthesized Probe
  source 1..80: mol_type = other DNA
tgctggtcgcttgtgctgagcaaggccttgcttctcatctgaccaaagaagaccgtgtttcctgggaccctgcaggctgc

SEQ ID NO: 108661 - DNA, 80 bp, synthetic construct
  misc_feature 1..80: note = Artificially Synthesized Probe
  source 1..80: mol_type = other DNA
gcttgccttctctgtctaaataacttgcttctcaccctgctgcaggagtctccgaagcacaaaggctgaccctagactct

SEQ ID NO: 108662 - DNA, 80 bp, synthetic construct
  misc_feature 1..80: note = Artificially Synthesized Probe
  source 1..80: mol_type = other DNA
cattctccctggttgctgaaaatgagcagtgtgtgtcctcccaagcagggctgggacgccactgataccatcgacgtaca

SEQ ID NO: 108663 - DNA, 80 bp, synthetic construct
  misc_feature 1..80: note = Artificially Synthesized Probe
  source 1..80: mol_type = other DNA
ttggctagttgaattctgattcgatactttataattagggctcactagtgacgagcaaaagcccgtgaaactgtctttgt

SEQ ID NO: 108664 - DNA, 80 bp, synthetic construct
  misc_feature 1..80: note = Artificially Synthesized Probe
  source 1..80: mol_type = other DNA
agatcaggaccacgtgctcccatgtcaccacacacagcagagcaggaccacgtgctcccgcgtcaccacacacagcagat

SEQ ID NO: 108665 - DNA, 80 bp, synthetic construct
  misc_feature 1..80: note = Artificially Synthesized Probe
  source 1..80: mol_type = other DNA
taggatgggatagtgcacactctgaaggtgaagctttaggtgacgtcgaagcatccagccatatctgtcagtttatataa

SEQ ID NO: 108666 - DNA, 80 bp, synthetic construct
  misc_feature 1..80: note = Artificially Synthesized Probe
  source 1..80: mol_type = other DNA
acaggcagctcgacatggtgcagaccgtggcagccaagtcaggcatacagcagccctcttgctggcttccagtactggct

SEQ ID NO: 108667 - DNA, 80 bp, synthetic construct
  misc_feature 1..80: note = Artificially Synthesized Probe
  source 1..80: mol_type = other DNA
cacttgacactgttgcttgcatgtgcccccgggccaaggtggacgagctctccaaactcgctttctctgcctcatccgtg

SEQ ID NO: 108668 - DNA, 80 bp, synthetic construct
  misc_feature 1..80: note = Artificially Synthesized Probe
  source 1..80: mol_type = other DNA
ggcctcctgccgctcacggccacaatcaccccacatcctggtccactcacacccacgtcacccacatgcggctccttcta

SEQ ID NO: 108669 - DNA, 80 bp, synthetic construct
  misc_feature 1..80: note = Artificially Synthesized Probe
  source 1..80: mol_type = other DNA
ttttgatttgatatattacacatgggctagtgttattatcatctcctcaaagtggagggtctgctacattaccgcctgga

SEQ ID NO: 108670 - DNA, 80 bp, synthetic construct
  misc_feature 1..80: note = Artificially Synthesized Probe
  source 1..80: mol_type = other DNA
accactgcaatcaattcttctgggtctgctctcagacttcaaggtgagatgaatctgtactaagaaaacttccacttttt

SEQ ID NO: 108671 - DNA, 80 bp, synthetic construct
  misc_feature 1..80: note = Artificially Synthesized Probe
  source 1..80: mol_type = other DNA
cctcagtcaaatcgttatttctgcatctttatcaagtcatctgacttcacagtacccaaaacgtatattacttcagcctc

SEQ ID NO: 108672 - DNA, 80 bp, synthetic construct
  misc_feature 1..80: note = Artificially Synthesized Probe
  source 1..80: mol_type = other DNA
tgcccatatgcctgagaagcttcctgcattttcagccaccactgtcctccaagcttgccacagacgggagtaggttccca

SEQ ID NO: 108673 - DNA, 80 bp, synthetic construct
  misc_feature 1..80: note = Artificially Synthesized Probe
  source 1..80: mol_type = other DNA
cggccacagaggtgtgcagtgcaaagccacagaccaaactgcaagtaatttgttcatgtaagaattcagctcatgagctc

SEQ ID NO: 108674 - DNA, 80 bp, synthetic construct
  misc_feature 1..80: note = Artificially Synthesized Probe
  source 1..80: mol_type = other DNA
aggaccacgtggtcccgcatcaccacacacagcagatcaggaccacgtgctcccacgtcaccacacacagcagatcagga

SEQ ID NO: 108675 - DNA, 80 bp, synthetic construct
  misc_feature 1..80: note = Artificially Synthesized Probe
  source 1..80: mol_type = other DNA
atcagctctaagggtaggagctgcagcccgccctccacagagggggtccagggcttcttactgatcatccaggcatggga

SEQ ID NO: 108676 - DNA, 80 bp, synthetic construct
  misc_feature 1..80: note = Artificially Synthesized Probe
  source 1..80: mol_type = other DNA
tcggtactccaagaaattatttggaaaatgactacccaagagatgatcacacagcatcgcatcaacattcaggatttctt

SEQ ID NO: 108677 - DNA, 80 bp, synthetic construct
  misc_feature 1..80: note = Artificially Synthesized Probe
  source 1..80: mol_type = other DNA
ctaacatggtctgactgtgtccccacccaaatctcatcttgaattgtcccataatccccacatgttgggggagtgacctg

SEQ ID NO: 108678 - DNA, 80 bp, synthetic construct
  misc_feature 1..80: note = Artificially Synthesized Probe
  source 1..80: mol_type = other DNA
tctgctgtgattgtaagtttcctgaggcctcctcagccctgcagaactgtgagtccattaaacctctttccttcataaat

SEQ ID NO: 108679 - DNA, 80 bp, synthetic construct
  misc_feature 1..80: note = Artificially Synthesized Probe
  source 1..80: mol_type = other DNA
acagcctgggacatacgtccatccatacctaggaaggttcatcgaacgcatgtctgagcctgatgttcctcggcactgct

SEQ ID NO: 108680 - DNA, 80 bp, synthetic construct
  misc_feature 1..80: note = Artificially Synthesized Probe
  source 1..80: mol_type = other DNA
atactaaagttgaccgatcctggctataaaaagttctgcaaagaaaagtatggcagtaaacaagattccaggagccctct

SEQ ID NO: 108681 - DNA, 80 bp, synthetic construct
  misc_feature 1..80: note = Artificially Synthesized Probe
  source 1..80: mol_type = other DNA
tcatctttgctccaggccctctgaggcttgaacactgccctgttttcattcaagaagaaaagtgaaaccaggaaggcagg

SEQ ID NO: 108682 - DNA, 80 bp, synthetic construct
  misc_feature 1..80: note = Artificially Synthesized Probe
  source 1..80: mol_type = other DNA
catggtgtaagtgcagaggaggagaaggaagctgggatgggtgtgtttagttctgcttccagggactattcctaaattct

SEQ ID NO: 108683 - DNA, 80 bp, synthetic construct
  misc_feature 1..80: note = Artificially Synthesized Probe
  source 1..80: mol_type = other DNA
ctcagcatctgcacagtgacggattaggggggcggttcagcagcccctcgaaccttcacccggggctcgtttgctgcttc

SEQ ID NO: 108684 - DNA, 80 bp, synthetic construct
  misc_feature 1..80: note = Artificially Synthesized Probe
  source 1..80: mol_type = other DNA
tcccgctcggcctgaccctcctctccacaaagggcttgaagagcaactgacccatgaaacgggcaggggctgggctgatc

SEQ ID NO: 108685 - DNA, 80 bp, synthetic construct
  misc_feature 1..80: note = Artificially Synthesized Probe
  source 1..80: mol_type = other DNA
cgtgctcccacatcaccacacaccacagatcaggaccacgtgctcccgcatcaccacagacagcagatcaggaccacgtg

SEQ ID NO: 108686 - DNA, 80 bp, synthetic construct
  misc_feature 1..80: note = Artificially Synthesized Probe
  source 1..80: mol_type = other DNA
ggcctctctgcagctaatggaaggaaatgaacccatcgtgtggggcgacataggggcccagggggcctggacaagtaata

SEQ ID NO: 108687 - DNA, 80 bp, synthetic construct
  misc_feature 1..80: note = Artificially Synthesized Probe
  source 1..80: mol_type = other DNA
ttccatttttccacttgtaacggctgttacagccgctgtttcatcgcgtcgtcataggagttgaacaaagctgtgtgtgt

SEQ ID NO: 108688 - DNA, 80 bp, synthetic construct
  misc_feature 1..80: note = Artificially Synthesized Probe
  source 1..80: mol_type = other DNA
tctggggcgccaaggccagtggtgtaaatccacactctatggtgacggtggatccacagctgccgcgggtccccccaacc

SEQ ID NO: 108689 - DNA, 80 bp, synthetic construct
  misc_feature 1..80: note = Artificially Synthesized Probe
  source 1..80: mol_type = other DNA
tccccaggaccagagcgcctgcgacctgcctgggtgccatccgcaaacctggtctctgctgaaatctgaacagtctacac

SEQ ID NO: 108690 - DNA, 80 bp, synthetic construct
  misc_feature 1..80: note = Artificially Synthesized Probe
  source 1..80: mol_type = other DNA
aagaatcgcgatcctttccaggtacacagtctagcagctgccacgcccggctgggagctgagacgcgcagggggcccagc

SEQ ID NO: 108691 - DNA, 80 bp, synthetic construct
  misc_feature 1..80: note = Artificially Synthesized Probe
  source 1..80: mol_type = other DNA
tgctgctgctcccaggagagatggtcccgtgcaagtgccaggcccctgctgtttggcctcctctgccccctgtggggcac

SEQ ID NO: 108692 - DNA, 80 bp, synthetic construct
  misc_feature 1..80: note = Artificially Synthesized Probe
  source 1..80: mol_type = other DNA
acctagggccccacaggtaccgttcacgtatcctggctttagtcttgctggttttctcaccagcatttagtgctagttca

SEQ ID NO: 108693 - DNA, 80 bp, synthetic construct
  misc_feature 1..80: note = Artificially Synthesized Probe
  source 1..80: mol_type = other DNA
agcactcctgggcactgtcccagctgtggatggcactggaaactgggcttgtccacagcgtgagtcccttgaggctggaa

SEQ ID NO: 108694 - DNA, 80 bp, synthetic construct
  misc_feature 1..80: note = Artificially Synthesized Probe
  source 1..80: mol_type = other DNA
cgtcaccacatgccacagatcaagaccacgtgctcctgcatcaccacagacagcagatcaggaccatgtgctcccacatc

SEQ ID NO: 108695 - DNA, 80 bp, synthetic construct
  misc_feature 1..80: note = Artificially Synthesized Probe
  source 1..80: mol_type = other DNA
caatgtgtttggaaacatgaattcatgtggcagcggtaacatttagaagagaaacagccacatttaaaaacgcgtaagac

SEQ ID NO: 108696 - DNA, 80 bp, synthetic construct
  misc_feature 1..80: note = Artificially Synthesized Probe
  source 1..80: mol_type = other DNA
gagtgccagtgtcagctgtaggtcccatggcctgaggaagccactgagcctgggacagcttgaggggcaggaggcggaca

SEQ ID NO: 108697 - DNA, 80 bp, synthetic construct
  misc_feature 1..80: note = Artificially Synthesized Probe
  source 1..80: mol_type = other DNA
gatgaggtggataaatgctcatttcctcttgctcttcagtttccacctcaaaacactgctatggaaaactccaaagcagg

SEQ ID NO: 108698 - DNA, 80 bp, synthetic construct
  misc_feature 1..80: note = Artificially Synthesized Probe
  source 1..80: mol_type = other DNA
ggctgcccgggactggctcttctggaagcaattcgtgggaaacccacttggatgccacttatgacccccgcgtgccagtg

SEQ ID NO: 108699 - DNA, 80 bp, synthetic construct
  misc_feature 1..80: note = Artificially Synthesized Probe
  source 1..80: mol_type = other DNA
tgggcctggggggcgcgtggactcccagctgttgctgtgcctgggtcaccccagtgggcagggcgggcagggggcttccc

SEQ ID NO: 108700 - DNA, 80 bp, synthetic construct
  misc_feature 1..80: note = Artificially Synthesized Probe
  source 1..80: mol_type = other DNA
acaccctgaacacctgctctgtgggagacggggtggtgtttgagctggtgccatctgggtcccctggggtggtggctggg

SEQ ID NO: 108701 - DNA, 80 bp, synthetic construct
  misc_feature 1..80: note = Artificially Synthesized Probe
  source 1..80: mol_type = other DNA
atcgacgtccccaagacactgacaggcctggaggtctggacaatggggagccagcaccgggtcccctgggaaccacgcag

SEQ ID NO: 108702 - DNA, 80 bp, synthetic construct
  misc_feature 1..80: note = Artificially Synthesized Probe
  source 1..80: mol_type = other DNA
tgaggcgggcggatcacgaggtcaggagatcgagatcatcccggctaacatggtgaaactccgtctctactaaaagtaca

SEQ ID NO: 108703 - DNA, 80 bp, synthetic construct
  misc_feature 1..80: note = Artificially Synthesized Probe
  source 1..80: mol_type = other DNA
aaaaaaaaaaaagaaagtacaggaagctttcagcctccttggcaagacactgctgtctggagaccctgggagaagtgtgc

SEQ ID NO: 108704 - DNA, 80 bp, synthetic construct
  misc_feature 1..80: note = Artificially Synthesized Probe
  source 1..80: mol_type = other DNA
taggaagggcctagaaggcagatttcccaccatgagaagccacatggagcccagctcccaggcatgcagccctgctgggc

SEQ ID NO: 108705 - DNA, 80 bp, synthetic construct
  misc_feature 1..80: note = Artificially Synthesized Probe
  source 1..80: mol_type = other DNA
gcccttaaaagttaagagaatataggaggaaatctaagaacagatagcagaaggtctttgtgaccttggatttggccaat

SEQ ID NO: 108706 - DNA, 80 bp, synthetic construct
  misc_feature 1..80: note = Artificially Synthesized Probe
  source 1..80: mol_type = other DNA
cggcccacttctctgccatgtgggaggcagccggggccacatctctgctatgctggaggccgctggaaccacctctccaa

SEQ ID NO: 108707 - DNA, 80 bp, synthetic construct
  misc_feature 1..80: note = Artificially Synthesized Probe
  source 1..80: mol_type = other DNA
cactacaggacagtcagaatggtaggatttgagctaaattgctagaattagagagcgtcacaaaaattctaggaggtcag

SEQ ID NO: 108708 - DNA, 80 bp, synthetic construct
  misc_feature 1..80: note = Artificially Synthesized Probe
  source 1..80: mol_type = other DNA
cagatgcttccgggatgaatttggttcacctttgaaggacactttgaaagcaacacaacaaaactggctgggccttgtac

SEQ ID NO: 108709 - DNA, 80 bp, synthetic construct
  misc_feature 1..80: note = Artificially Synthesized Probe
  source 1..80: mol_type = other DNA
aggccccctgggcacagacatcttgtacaaggtcagagagactgggtttcgggcttcatgagcctcagaaattcagctct

SEQ ID NO: 108710 - DNA, 80 bp, synthetic construct
  misc_feature 1..80: note = Artificially Synthesized Probe
  source 1..80: mol_type = other DNA
gtatgtggtgtgtggtgtgaaatgtgggtgtgatatgtgtgtgtggtatgtgtgcatgtatgtgtgtgggggtatgtgtg

SEQ ID NO: 108711 - DNA, 80 bp, synthetic construct
  misc_feature 1..80: note = Artificially Synthesized Probe
  source 1..80: mol_type = other DNA
gtggtgtgtgtagtatgtgtgcaggtatgtgtgtggtatgtgtggtgctgtgtgtgtggtatgttgtgtgtgtatggtat

SEQ ID NO: 108712 - DNA, 80 bp, synthetic construct
  misc_feature 1..80: note = Artificially Synthesized Probe
  source 1..80: mol_type = other DNA
tgtgtgtatggtggtgtgtgtgtggtgtgtgtgtggtgggggtgtgtgtggtgtgaatgtggtgtgtgtggtgtgtgtat

SEQ ID NO: 108713 - DNA, 80 bp, synthetic construct
  misc_feature 1..80: note = Artificially Synthesized Probe
  source 1..80: mol_type = other DNA
taacttggttctaaaggtggtttgggttcaggtcctggagtacatgctcaggaactgtcaagcaatctgggggcacagga

SEQ ID NO: 108714 - DNA, 80 bp, synthetic construct
  misc_feature 1..80: note = Artificially Synthesized Probe
  source 1..80: mol_type = other DNA
tccacccgataaacacaagtgggaaattgtgtaagaaaatgaagtgagattccaatattaaaaagtcagataggtcaaaa

SEQ ID NO: 108715 - DNA, 80 bp, synthetic construct
  misc_feature 1..80: note = Artificially Synthesized Probe
  source 1..80: mol_type = other DNA
tcccgggttcaagtgattctcctgcctcagcctcctgagtagcatctgccaccacacctggctaatgtttgtatttttag

SEQ ID NO: 108716 - DNA, 80 bp, synthetic construct
  misc_feature 1..80: note = Artificially Synthesized Probe
  source 1..80: mol_type = other DNA
aggaaacagggtccaggagcattttctctgctcgggtgaagctcaggggaagacataagtacatgaaagacattccgttc

SEQ ID NO: 108717 - DNA, 80 bp, synthetic construct
  misc_feature 1..80: note = Artificially Synthesized Probe
  source 1..80: mol_type = other DNA
atcccgtttcttataatctaattgataagaattatagcataagtgcatgtatgtgtatgagaacagtcactctggcatcg

SEQ ID NO: 108718 - DNA, 80 bp, synthetic construct
  misc_feature 1..80: note = Artificially Synthesized Probe
  source 1..80: mol_type = other DNA
atgcaacacccgattccatgtttgaaaacagaacagaacaaaattcaacaagaaataagcgcccgcgtccacatattctc

SEQ ID NO: 108719 - DNA, 80 bp, synthetic construct
  misc_feature 1..80: note = Artificially Synthesized Probe
  source 1..80: mol_type = other DNA
ctgcacccacctgccccccctccctgcacccgccccccctccctgcacccacctgccctactcagggtggtgagagcgga

SEQ ID NO: 108720 - DNA, 80 bp, synthetic construct
  misc_feature 1..80: note = Artificially Synthesized Probe
  source 1..80: mol_type = other DNA
gcttacatttgttatgtcacaaacacaaagcgttctcctaggaggtttctggtacagaccatgtttcctgaggacctgga

SEQ ID NO: 108721 - DNA, 80 bp, synthetic construct
  misc_feature 1..80: note = Artificially Synthesized Probe
  source 1..80: mol_type = other DNA
aaaataaaaccagcctgtcatggaggagtcccctttgcccggagagcctgtccttcccctctgggggtcacactgccagt

SEQ ID NO: 108722 - DNA, 80 bp, synthetic construct
  misc_feature 1..80: note = Artificially Synthesized Probe
  source 1..80: mol_type = other DNA
ctgacctgcagcccgcactgagccagcaagccgcgggagaggccaggcgcccgcagcggggcatctgcgcctggtgtgca

SEQ ID NO: 108723 - DNA, 80 bp, synthetic construct
  misc_feature 1..80: note = Artificially Synthesized Probe
  source 1..80: mol_type = other DNA
gtctccgcgtcccagcaccagctgccttcagctcgagggtgtgttttcgggggtggggatcccacatggcacggctcctg

SEQ ID NO: 108724 - DNA, 80 bp, synthetic construct
  misc_feature 1..80: note = Artificially Synthesized Probe
  source 1..80: mol_type = other DNA
ctggggccgggggtctctgctcctacagcccgcagatgggccacccggaggctgccccgtgatggctggacctgaggctt

SEQ ID NO: 108725 - DNA, 80 bp, synthetic construct
  misc_feature 1..80: note = Artificially Synthesized Probe
  source 1..80: mol_type = other DNA
tcatctctttttctaaagtggaggcaagggaccccagtttgggattaatcagcagtgatgagcttaaataaatgagataa

SEQ ID NO: 108726 - DNA, 80 bp, synthetic construct
  misc_feature 1..80: note = Artificially Synthesized Probe
  source 1..80: mol_type = other DNA
tgtgtaacaaagacactatcaaaagagtaaaaaaccccgatgtaatgggagaaaatacttgcaaattacatagctgataa

SEQ ID NO: 108727 - DNA, 80 bp, synthetic construct
  misc_feature 1..80: note = Artificially Synthesized Probe
  source 1..80: mol_type = other DNA
cacccagccgagagtcccctgctgttccctctgcagagcaaacacagtttctgctgaaaagaatgtggcagatgaacaaa

SEQ ID NO: 108728 - DNA, 80 bp, synthetic construct
  misc_feature 1..80: note = Artificially Synthesized Probe
  source 1..80: mol_type = other DNA
gtgtaccctgtgagtatgcacgtttctagaggtggagtttgacccttgaattgttcaaattataagtagaatcacagaaa

SEQ ID NO: 108729 - DNA, 80 bp, synthetic construct
  misc_feature 1..80: note = Artificially Synthesized Probe
  source 1..80: mol_type = other DNA
gcaatggtgagttctgccacacgtggaaaacacgttggcttctctgggttttaagtgtcctgtcagcagctcggagcctc

SEQ ID NO: 108730 - DNA, 80 bp, synthetic construct
  misc_feature 1..80: note = Artificially Synthesized Probe
  source 1..80: mol_type = other DNA
cctttgcctcctccgccttgcagggaccccagggctgacctgcctccctcggccccctctctgccagagccaggtctgag

SEQ ID NO: 108731 - DNA, 80 bp, synthetic construct
  misc_feature 1..80: note = Artificially Synthesized Probe
  source 1..80: mol_type = other DNA
cctcattctctgctctgacccgggctcgcacctcccctcgttctctgctctgacccgggctcgcacctctcctcgttctc

SEQ ID NO: 108732 - DNA, 80 bp, synthetic construct
  misc_feature 1..80: note = Artificially Synthesized Probe
  source 1..80: mol_type = other DNA
aggctgcctgcacttccggttctgcgtctggccggcctacgggcactcgggcagtgcggtgaccaattatagcgtcgacg

SEQ ID NO: 108733 - DNA, 80 bp, synthetic construct
  misc_feature 1..80: note = Artificially Synthesized Probe
  source 1..80: mol_type = other DNA
gtggggatttcatttcttcatcgcctctgtgaacacccactaaaaccgtaagtgggaaaagtgggtgccttctgtatttt

SEQ ID NO: 108734 - DNA, 80 bp, synthetic construct
  misc_feature 1..80: note = Artificially Synthesized Probe
  source 1..80: mol_type = other DNA
atatcacaagcaaaatttaaatcacaaaatacttcatatctgcctgcactcattgtcatgctaaagcacatcacctcggt

SEQ ID NO: 108735 - DNA, 80 bp, synthetic construct
  misc_feature 1..80: note = Artificially Synthesized Probe
  source 1..80: mol_type = other DNA
gtgtcaagcttgaagcccctcacctgtgcacctgggaggctcctggggctcaagctcaaagccccctcacctgtgcatct

SEQ ID NO: 108736 - DNA, 80 bp, synthetic construct
  misc_feature 1..80: note = Artificially Synthesized Probe
  source 1..80: mol_type = other DNA
cccctcacctatgcacctgggaggcccccaggagctgcagcaaagctgggccccagccacagcctgcaaaatctccgact

SEQ ID NO: 108737 - DNA, 80 bp, synthetic construct
  misc_feature 1..80: note = Artificially Synthesized Probe
  source 1..80: mol_type = other DNA
tgttagggagatgcatgctaaaaccacattgagatccactcacatccactgggatggctgtaatcaaacagccaagagat

SEQ ID NO: 108738 - DNA, 80 bp, synthetic construct
  misc_feature 1..80: note = Artificially Synthesized Probe
  source 1..80: mol_type = other DNA
agtccttccagccactttctgtgcttgctctgacatttgcccaaactaacgttgctgaggttgacctcatgtttattcag

SEQ ID NO: 108739 - DNA, 80 bp, synthetic construct
  misc_feature 1..80: note = Artificially Synthesized Probe
  source 1..80: mol_type = other DNA
cctggcagctcacctggtgtaccttctgtgagacccagccagcccatcggtcaccaaggggtgcatgtcacaccctgacc

SEQ ID NO: 108740 - DNA, 80 bp, synthetic construct
  misc_feature 1..80: note = Artificially Synthesized Probe
  source 1..80: mol_type = other DNA
ctggagaaaaatggcccgccccgtgaaacagcaaataaacacacgcgttccaggacgtgagatacggcctccacatcaat

SEQ ID NO: 108741 - DNA, 80 bp, synthetic construct
  misc_feature 1..80: note = Artificially Synthesized Probe
  source 1..80: mol_type = other DNA
gtgaactttcccaactgctgatgttacgtgcactaagcacatgattttcctattcattcccgaatctcacattttaccgg

SEQ ID NO: 108742 - DNA, 80 bp, synthetic construct
  misc_feature 1..80: note = Artificially Synthesized Probe
  source 1..80: mol_type = other DNA
aggcgcagagaagagaaggaaacgttaaaaatctggttggagagaggaaacaaacttggaccatctttgacagtggtatt

SEQ ID NO: 108743 - DNA, 80 bp, synthetic construct
  misc_feature 1..80: note = Artificially Synthesized Probe
  source 1..80: mol_type = other DNA
gcctcagggagcttccagtcacggtggaaggcgaaagggaagcaatctcgtcccacggtgggcgtaggcgcaaggtggga

SEQ ID NO: 108744 - DNA, 80 bp, synthetic construct
  misc_feature 1..80: note = Artificially Synthesized Probe
  source 1..80: mol_type = other DNA
cccacacccaacactggggattacggttcgacaggagattttggggcacactgatccaaccatctcaacagcaaagagtg

SEQ ID NO: 108745 - DNA, 80 bp, synthetic construct
  misc_feature 1..80: note = Artificially Synthesized Probe
  source 1..80: mol_type = other DNA
ttatcactataaagcaaaaccaaaaacggacctcaggtttctctgcaatatgtaggatccgtgaaacctccaacgtgaaa

SEQ ID NO: 108746 - DNA, 80 bp, synthetic construct
  misc_feature 1..80: note = Artificially Synthesized Probe
  source 1..80: mol_type = other DNA
catcgctcatcttaattctcctgagggtgatatttacacctgatatttacaaggtgtggcaagtgagaatttcatcccag

SEQ ID NO: 108747 - DNA, 80 bp, synthetic construct
  misc_feature 1..80: note = Artificially Synthesized Probe
  source 1..80: mol_type = other DNA
ggcactgtccattaatacacaaatgaatccacaaagtgcggtccatccatgccatggaatatgagtcagtcataaaatgg

SEQ ID NO: 108748 - DNA, 80 bp, synthetic construct
  misc_feature 1..80: note = Artificially Synthesized Probe
  source 1..80: mol_type = other DNA
gggaggcggccacaggctcctgggtgtgctgtgggacgtaccactcggtggcagggcctggccagagagctgccctgcag

SEQ ID NO: 108749 - DNA, 80 bp, synthetic construct
  misc_feature 1..80: note = Artificially Synthesized Probe
  source 1..80: mol_type = other DNA
gcatcctttgtagtcttgaattctgagcccattcctgagacccctctgaacctccagaggccccgcagctctcaagctgg

SEQ ID NO: 108750 - DNA, 80 bp, synthetic construct
  misc_feature 1..80: note = Artificially Synthesized Probe
  source 1..80: mol_type = other DNA
ccagtctgtccaatatggtgaaatcccgtctctactaaaaatacaaaaattagctgggtgtggtggcgcacgcctgtaat

SEQ ID NO: 108751 - DNA, 80 bp, synthetic construct
  misc_feature 1..80: note = Artificially Synthesized Probe
  source 1..80: mol_type = other DNA
taccttttggaatgtgaaattgcctctgagacgaacctgtgatttgtcacctctgggagatgacaaggatgcctctgtga

SEQ ID NO: 108752 - DNA, 80 bp, synthetic construct
  misc_feature 1..80: note = Artificially Synthesized Probe
  source 1..80: mol_type = other DNA
acggacacacacacacacgtcgcttctggtctgagaatgtctgcctcctttccattcccctgggcaggttattttcttct

SEQ ID NO: 108753 - DNA, 80 bp, synthetic construct
  misc_feature 1..80: note = Artificially Synthesized Probe
  source 1..80: mol_type = other DNA
aatctggggctaaaagtattacagatggctctacacattgaaccgttgatatttaaactcaatcagcagatgctggtgct

SEQ ID NO: 108754 - DNA, 80 bp, synthetic construct
  misc_feature 1..80: note = Artificially Synthesized Probe
  source 1..80: mol_type = other DNA
ataccacccctgtgactagggtgctgccccctcctcctttcttctccaacttctagatttggcccctaaatgtgactgaa

SEQ ID NO: 108755 - DNA, 80 bp, synthetic construct
  misc_feature 1..80: note = Artificially Synthesized Probe
  source 1..80: mol_type = other DNA
ggggaggaagggctgggtgaggctggagcgtgggtgggaggtgctggacagggatgctgagggcaacgggccctccctgc

SEQ ID NO: 108756 - DNA, 80 bp, synthetic construct
  misc_feature 1..80: note = Artificially Synthesized Probe
  source 1..80: mol_type = other DNA
cgctgaacgtgtgttcctctagccacttactcaacgtctccactgcaggccccagtgtaacttggccaagcagacatttc

SEQ ID NO: 108757 - DNA, 80 bp, synthetic construct
  misc_feature 1..80: note = Artificially Synthesized Probe
  source 1..80: mol_type = other DNA
attcagattcgcggaaacaaagaagaacggaagtgatccatccccgtaggcaaggagatgtgtatccacacacaaaatag

SEQ ID NO: 108758 - DNA, 80 bp, synthetic construct
  misc_feature 1..80: note = Artificially Synthesized Probe
  source 1..80: mol_type = other DNA
gtgttctgagcgtggagtgaactttctaagtcacaatttaagtcacatccctctccctctggaaatgtctgctggctttg

SEQ ID NO: 108759 - DNA, 80 bp, synthetic construct
  misc_feature 1..80: note = Artificially Synthesized Probe
  source 1..80: mol_type = other DNA
ccccctccatccctcagaggcaccacagccggccccctccatccctcagaggcaccacagccggccccctccatccctca

SEQ ID NO: 108760 - DNA, 80 bp, synthetic construct
  misc_feature 1..80: note = Artificially Synthesized Probe
  source 1..80: mol_type = other DNA
atcccttagaggtaccacaggcagcctcctccatccctgaggcaccacaggcggcctcctccatccctcagaggcaccac

SEQ ID NO: 108761 - DNA, 80 bp, synthetic construct
  misc_feature 1..80: note = Artificially Synthesized Probe
  source 1..80: mol_type = other DNA
ccatcactgtgccctcttctcctttcttcacatcacaccttactagaaattacccggtcactatagtgcctgtcccttct

SEQ ID NO: 108762 - DNA, 80 bp, synthetic construct
  misc_feature 1..80: note = Artificially Synthesized Probe
  source 1..80: mol_type = other DNA
tacggacgttctgtggaaatagatgttgtgttttcacctcttgtaccttgttcacttaaaatttaatcaacatcttatta

SEQ ID NO: 108763 - DNA, 80 bp, synthetic construct
  misc_feature 1..80: note = Artificially Synthesized Probe
  source 1..80: mol_type = other DNA
aggagatcgagaccatcctggccaacacggtgaaaccccgtctctactaaaaatacaaaaaaccagccgggtgtggtggc

SEQ ID NO: 108764 - DNA, 80 bp, synthetic construct
  misc_feature 1..80: note = Artificially Synthesized Probe
  source 1..80: mol_type = other DNA
atacacacacatatatatacacacatatacatatacacacacatatatatacacatatatatacacatatatacacatat

SEQ ID NO: 108765 - DNA, 80 bp, synthetic construct
  misc_feature 1..80: note = Artificially Synthesized Probe
  source 1..80: mol_type = other DNA
accagaaactgaaccgacgctgaaagtatcaggccttccgcttagcgctgccttcgagatcagtctctcgacccctgtta

SEQ ID NO: 108766 - DNA, 80 bp, synthetic construct
  misc_feature 1..80: note = Artificially Synthesized Probe
  source 1..80: mol_type = other DNA
gcagctgcatggatttttttaatgtcaaattccatatgaaacagcacaaatccccatttctgccccactgggttgagaaa

SEQ ID NO: 108767 - DNA, 80 bp, synthetic construct
  misc_feature 1..80: note = Artificially Synthesized Probe
  source 1..80: mol_type = other DNA
aatttgatgggcacgctatgatttattgccaaatgatatttaagaaaaattcacaggagaggcggctgctgaatgcctcc

SEQ ID NO: 108768 - DNA, 80 bp, synthetic construct
  misc_feature 1..80: note = Artificially Synthesized Probe
  source 1..80: mol_type = other DNA
tattggaacacaaaattcccggtctgtggctcctgccagacaaaagaaatgagtcaccccagactcactctgcaccttgt

SEQ ID NO: 108769 - DNA, 80 bp, synthetic construct
  misc_feature 1..80: note = Artificially Synthesized Probe
  source 1..80: mol_type = other DNA
cggtccagatgggtttcactgagctgaagtcagggcttgggtgggccgcacgctctggggcggctcctgaccttttctgg

SEQ ID NO: 108770 - DNA, 80 bp, synthetic construct
  misc_feature 1..80: note = Artificially Synthesized Probe
  source 1..80: mol_type = other DNA
tgtagcgaggcccaccgtgttgacacttccctgagtgtgcagcgtggtactgttggctctcaaccgtacggcagatgtcg

SEQ ID NO: 108771 - DNA, 80 bp, synthetic construct
  misc_feature 1..80: note = Artificially Synthesized Probe
  source 1..80: mol_type = other DNA
cctgggcctggcttttgtttcacttcacgtcatgtcatgcaggtttatccctgttgttgcagatggcaggttgtccgtct

SEQ ID NO: 108772 - DNA, 80 bp, synthetic construct
  misc_feature 1..80: note = Artificially Synthesized Probe
  source 1..80: mol_type = other DNA
agcgcacccgtcacttcgaggtcctgatttaacttcctttggataaatatctggaagtgggattgctgaatcatatggtg

SEQ ID NO: 108773 - DNA, 80 bp, synthetic construct
  misc_feature 1..80: note = Artificially Synthesized Probe
  source 1..80: mol_type = other DNA
atcgtggctctgatttgcatgttcctgatcattagtgatgttgagcatctttccatgtacagtgtgttggccatttgtat

SEQ ID NO: 108774 - DNA, 80 bp, synthetic construct
  misc_feature 1..80: note = Artificially Synthesized Probe
  source 1..80: mol_type = other DNA
gtggcaccatctcggctcactgcaacctccacctcccagattcaagtgattctcctgcctcagcctcccaagtagctggg

SEQ ID NO: 108775 - DNA, 80 bp, synthetic construct
  misc_feature 1..80: note = Artificially Synthesized Probe
  source 1..80: mol_type = other DNA
agccacctatacattttaaatattaactccttatccgttatgtggtatgcaaatatttcctccccggtgaccagtagggg

SEQ ID NO: 108776 - DNA, 80 bp, synthetic construct
  misc_feature 1..80: note = Artificially Synthesized Probe
  source 1..80: mol_type = other DNA
acctttgcctagatgaatgtcatcatgcttcccccgtgttttcttctagtacgtttatggtttccagtcttatgtctcag

SEQ ID NO: 108777 - DNA, 80 bp, synthetic construct
  misc_feature 1..80: note = Artificially Synthesized Probe
  source 1..80: mol_type = other DNA
attctcctcatgcttatgaaggagcacttggcagtgtatgagttgtttctggactctctgttccattgatctataagtct

SEQ ID NO: 108778 - DNA, 80 bp, synthetic construct
  misc_feature 1..80: note = Artificially Synthesized Probe
  source 1..80: mol_type = other DNA
agtttggccacacttctcagccactgcatttctgtgctggcccctggggagtgaagcctgaccccacccagcatggctca

SEQ ID NO: 108779 - DNA, 80 bp, synthetic construct
  misc_feature 1..80: note = Artificially Synthesized Probe
  source 1..80: mol_type = other DNA
ttttccctagacagtgaaataataaacattttctaaaagttcctcaagaaaaactattgaaattatttagtagaaacata

SEQ ID NO: 108780 - DNA, 80 bp, synthetic construct
  misc_feature 1..80: note = Artificially Synthesized Probe
  source 1..80: mol_type = other DNA
cctgtttacccaatgcccccgcgaagtcatagtttggtggcatacagctcttaagaatgcttattagctcttaatatcag

SEQ ID NO: 108781 - DNA, 80 bp, synthetic construct
  misc_feature 1..80: note = Artificially Synthesized Probe
  source 1..80: mol_type = other DNA
gcactcatgatatgtcagaccaagttctagggactgcagtggtgaacaactccagtgtctgtgcacggagcttccattct

SEQ ID NO: 108782 - DNA, 80 bp, synthetic construct
  misc_feature 1..80: note = Artificially Synthesized Probe
  source 1..80: mol_type = other DNA
ggacccacgcgtgcacacacatacacacacttgcacacacatgcacacagtctcccctctgacccttctcgccctactgg

SEQ ID NO: 108783 - DNA, 80 bp, synthetic construct
  misc_feature 1..80: note = Artificially Synthesized Probe
  source 1..80: mol_type = other DNA
cactcacgagagaaggctggttttatccactgtgtgtggagcctggcaacaagcatcccacattggtgtgatccaggtta

SEQ ID NO: 108784 - DNA, 80 bp, synthetic construct
  misc_feature 1..80: note = Artificially Synthesized Probe
  source 1..80: mol_type = other DNA
tactggtgctctcagacacattttccatgaaaagaagaaaatagcaaattccagtaagcattaaggaaactccttctctg

SEQ ID NO: 108785 - DNA, 80 bp, synthetic construct
  misc_feature 1..80: note = Artificially Synthesized Probe
  source 1..80: mol_type = other DNA
gaaggtctgaagaaaagggaaaagatcgcagctcatcaggaatgaaaggtggcttgttctccagcatcctagttaaaagt

SEQ ID NO: 108786 - DNA, 80 bp, synthetic construct
  misc_feature 1..80: note = Artificially Synthesized Probe
  source 1..80: mol_type = other DNA
acatagaacatgtattcgacgtaaactcccggttgtttaaagtcattaacgttgtgtcgttatgtctagtgtcaggttat

SEQ ID NO: 108787 - DNA, 80 bp, synthetic construct
  misc_feature 1..80: note = Artificially Synthesized Probe
  source 1..80: mol_type = other DNA
gacacagccagaggccccaggagcccccaccttggggacatggagtgtctgtgtgagcctggctttgttctgaggcagga

SEQ ID NO: 108788 - DNA, 80 bp, synthetic construct
  misc_feature 1..80: note = Artificially Synthesized Probe
  source 1..80: mol_type = other DNA
cacaaccttggaaaatatcttgcttgaaaaaaacatgttttgctacatgtgagccaagcccttcaatgagagaggaacag

SEQ ID NO: 108789 - DNA, 80 bp, synthetic construct
  misc_feature 1..80: note = Artificially Synthesized Probe
  source 1..80: mol_type = other DNA
gcctctttgtgaagaggtgtgggaagatgtgcacacagtagagagcagactatcacaagccacaaaaatgtgtgtgtgtg

SEQ ID NO: 108790 - DNA, 80 bp, synthetic construct
  misc_feature 1..80: note = Artificially Synthesized Probe
  source 1..80: mol_type = other DNA
ctgaaatccaagatgctccaaatcagcattttcctttagggtcaggcctatgctcaaaaagttttcgatttgggggcatt

SEQ ID NO: 108791 - DNA, 80 bp, synthetic construct
  misc_feature 1..80: note = Artificially Synthesized Probe
  source 1..80: mol_type = other DNA
tgtctatagatgtctggtatatatgtatatgtgcaggtgtaaatgtgtgcaatagatgcatatacgtgtatatgtgtgta

SEQ ID NO: 108792 - DNA, 80 bp, synthetic construct
  misc_feature 1..80: note = Artificially Synthesized Probe
  source 1..80: mol_type = other DNA
ctgtctctgcattcttactggcaggattattgggaactattggatctttctgaggaggccaggatgatttccgtggcctg

SEQ ID NO: 108793 - DNA, 80 bp, synthetic construct
  misc_feature 1..80: note = Artificially Synthesized Probe
  source 1..80: mol_type = other DNA
acctgcacctcagcagcaccaagctcaggggctgccctgggctcccctctgagcatcagctcctctgttccagggagagc

SEQ ID NO: 108794 - DNA, 80 bp, synthetic construct
  misc_feature 1..80: note = Artificially Synthesized Probe
  source 1..80: mol_type = other DNA
ggcagccccaagccaaaaacgatgattaatttccagttttgaatgtttagtgcataacagaaagatggaaaatagcttga

SEQ ID NO: 108795 - DNA, 80 bp, synthetic construct
  misc_feature 1..80: note = Artificially Synthesized Probe
  source 1..80: mol_type = other DNA
gtaggtgaacggtttgtaccaccagggaactgtgcccgagaacacatatgttcccacaacaatggggtttgtcagcttgc

SEQ ID NO: 108796 - DNA, 80 bp, synthetic construct
  misc_feature 1..80: note = Artificially Synthesized Probe
  source 1..80: mol_type = other DNA
gtgtgggttcagagagcaggaatagcactccctgcccttgtcatgctgtggccaaggtttaggactccacagggcccaga

SEQ ID NO: 108797 - DNA, 80 bp, synthetic construct
  misc_feature 1..80: note = Artificially Synthesized Probe
  source 1..80: mol_type = other DNA
gagggtgagggcagggctgcatgcctgagagctgacaaatccttcacatcctggagctttgtactgaacactgcagggtt

SEQ ID NO: 108798 - DNA, 80 bp, synthetic construct
  misc_feature 1..80: note = Artificially Synthesized Probe
  source 1..80: mol_type = other DNA
cgtcaggctctgggatggatgtttacgtgggttaccctaccaaatccctgagaactgctgctatgattcccactttacag

SEQ ID NO: 108799 - DNA, 80 bp, synthetic construct
  misc_feature 1..80: note = Artificially Synthesized Probe
  source 1..80: mol_type = other DNA
accaggcatccccagcctctgggccacggactgacaccagtctgtggcctgttaggaactggggtgcacagcaggaggtg

SEQ ID NO: 108800 - DNA, 80 bp, synthetic construct
  misc_feature 1..80: note = Artificially Synthesized Probe
  source 1..80: mol_type = other DNA
actgcatcatcgtctacttgctgctaaactggacagtagagaaagaacttcaactattctgagtttgtttttaaaggccc

SEQ ID NO: 108801 - DNA, 80 bp, synthetic construct
  misc_feature 1..80: note = Artificially Synthesized Probe
  source 1..80: mol_type = other DNA
gcgggtgagtgagcgagtgaaactttgtcggtatttatagccagtccccatggctcacagtactgcctgggctccacctc

SEQ ID NO: 108802 - DNA, 80 bp, synthetic construct
  misc_feature 1..80: note = Artificially Synthesized Probe
  source 1..80: mol_type = other DNA
aaaacaagctcagggcacccactgattctacatgatggtgggttttataattatttaattatatattacaatgtaataat

SEQ ID NO: 108803 - DNA, 80 bp, synthetic construct
  misc_feature 1..80: note = Artificially Synthesized Probe
  source 1..80: mol_type = other DNA
ttgttgaaaacactcttttggattaagcatctataagattcagttgttgccttggacgattcacatttcacatggtcagt

SEQ ID NO: 108804 - DNA, 80 bp, synthetic construct
  misc_feature 1..80: note = Artificially Synthesized Probe
  source 1..80: mol_type = other DNA
gtcacttgcttttatgtggaatgtgggcaatttttaaaactttattttaatgtgcacgagaaaaagcaaaatagtacatc

SEQ ID NO: 108805 - DNA, 80 bp, synthetic construct
  misc_feature 1..80: note = Artificially Synthesized Probe
  source 1..80: mol_type = other DNA
ggaaggagcccggcaccacccctgccgtgtgagctcccacgtaggcccagggttggatgagatgacaccgaggctgtgga

SEQ ID NO: 108806 - DNA, 80 bp, synthetic construct
  misc_feature 1..80: note = Artificially Synthesized Probe
  source 1..80: mol_type = other DNA
cacgttcaactcctaacaccagcacagtgaatgccgccttctggacatagggtctctgtggatggagttagtaaagatga

SEQ ID NO: 108807 - DNA, 80 bp, synthetic construct
  misc_feature 1..80: note = Artificially Synthesized Probe
  source 1..80: mol_type = other DNA
ccacagagagtcgcccgagagcttcctgagcacgtggccctgacaacacctggatctccagcttccggcccgcggtcccg

SEQ ID NO: 108808 - DNA, 80 bp, synthetic construct
  misc_feature 1..80: note = Artificially Synthesized Probe
  source 1..80: mol_type = other DNA
taatgggtcatggaaaataccaggctgatggcagagggtgcgtggggaggagatcagggaaccgccaggccggagctgga

SEQ ID NO: 108809 - DNA, 80 bp, synthetic construct
  misc_feature 1..80: note = Artificially Synthesized Probe
  source 1..80: mol_type = other DNA
agataaagccaaccgttgttgtttaagcaaaggctgcggacagtgagcacagaacttcacaacacatcatggtcgcagcg

SEQ ID NO: 108810 - DNA, 80 bp, synthetic construct
  misc_feature 1..80: note = Artificially Synthesized Probe
  source 1..80: mol_type = other DNA
acaggctctccacggggacggcggggctgctgggcacaggctctccacggggacagcggggctgctgggcacagggtctc

SEQ ID NO: 108811 - DNA, 80 bp, synthetic construct
  misc_feature 1..80: note = Artificially Synthesized Probe
  source 1..80: mol_type = other DNA
ggggctgggctcttcacggggacggcgggacttctgggggctggctctccacggggacggcgggactgctggaggctggc

SEQ ID NO: 108812 - DNA, 80 bp, synthetic construct
  misc_feature 1..80: note = Artificially Synthesized Probe
  source 1..80: mol_type = other DNA
agcttgggaagggcattctctggtcttctgtaatgcattcctttacagaaagggaaatgggaagaaaggtttcacgtcca

SEQ ID NO: 108813 - DNA, 80 bp, synthetic construct
  misc_feature 1..80: note = Artificially Synthesized Probe
  source 1..80: mol_type = other DNA
gctctgaagactgagcactgagggtcagcagcaggtaggagatgtctttgaagtttcatctgttatcttaaaaactcgtg

SEQ ID NO: 108814 - DNA, 80 bp, synthetic construct
  misc_feature 1..80: note = Artificially Synthesized Probe
  source 1..80: mol_type = other DNA
ggcacctgtagtcccagctactcgggaggctgaggcaggagaatggcatgaacccgggaggtggagcttgcagtgagcgg

SEQ ID NO: 108815 - DNA, 80 bp, synthetic construct
  misc_feature 1..80: note = Artificially Synthesized Probe
  source 1..80: mol_type = other DNA
tatcaaaatgacttcaccccaaatctccacgtgaagtagatgcgtctcctctccatcgtggctgttggcacagtgctgtg

SEQ ID NO: 108816 - DNA, 80 bp, synthetic construct
  misc_feature 1..80: note = Artificially Synthesized Probe
  source 1..80: mol_type = other DNA
ggcatcacacaggaacgtgcgtgagcccatgaaatacttgctcaataataaatgctgccaagctgctaagcttggggaac

SEQ ID NO: 108817 - DNA, 80 bp, synthetic construct
  misc_feature 1..80: note = Artificially Synthesized Probe
  source 1..80: mol_type = other DNA
ctctggattttagggtctagaccaaagctgaggctgttttatacattttggggtccctggaactcaggacaaggccatct

SEQ ID NO: 108818 - DNA, 80 bp, synthetic construct
  misc_feature 1..80: note = Artificially Synthesized Probe
  source 1..80: mol_type = other DNA
catgtgactgagggtttggccgggctccccttatcaacccggcatccctcgaccatgttctctggtgcacacaggtgagc

SEQ ID NO: 108819 - DNA, 80 bp, synthetic construct
  misc_feature 1..80: note = Artificially Synthesized Probe
  source 1..80: mol_type = other DNA
aggaggggttccgctgcccttcctggggcacctgtttcgctttttgtctttctttcctccctttccactccactcccttt

SEQ ID NO: 108820 - DNA, 80 bp, synthetic construct
  misc_feature 1..80: note = Artificially Synthesized Probe
  source 1..80: mol_type = other DNA
tttggagtttttcttaatggtgaaaagaaagaagttgtcagaggagaccagaaactctatgtcagctgagaaagctgtaa

SEQ ID NO: 108821 - DNA, 80 bp, synthetic construct
  misc_feature 1..80: note = Artificially Synthesized Probe
  source 1..80: mol_type = other DNA
tagctgggcttcacagaaatggaggttgagttcccggagcggtagcccagggctggtatgttgagaattccgtttggaaa

SEQ ID NO: 108822 - DNA, 80 bp, synthetic construct
  misc_feature 1..80: note = Artificially Synthesized Probe
  source 1..80: mol_type = other DNA
taaaaagagatgactcggtgacaaacaggaggacggtgctcaaatgactgtgacacgtgccgtgtatctgcaaagacctg

SEQ ID NO: 108823 - DNA, 80 bp, synthetic construct
  misc_feature 1..80: note = Artificially Synthesized Probe
  source 1..80: mol_type = other DNA
tcagccggcagaggggctgcctgccctttgatctctcctgagactgtggcctgggacccgggtcagggaatttcacaccg

SEQ ID NO: 108824 - DNA, 80 bp, synthetic construct
  misc_feature 1..80: note = Artificially Synthesized Probe
  source 1..80: mol_type = other DNA
ggacccctcaccctgcccggtcctcctgctgtggggtgtgagtccagccagtgctgggaagccggtgtggctaggacaac

SEQ ID NO: 108825 - DNA, 80 bp, synthetic construct
  misc_feature 1..80: note = Artificially Synthesized Probe
  source 1..80: mol_type = other DNA
gttaaactttgttagtgtacaaaatgtggtgatcctactcgtataaaaaagaaagttcaaatgcgcagaagaaagatcag

SEQ ID NO: 108826 - DNA, 80 bp, synthetic construct
  misc_feature 1..80: note = Artificially Synthesized Probe
  source 1..80: mol_type = other DNA
gcgtgtggctgtctacacagcacgcattccttaccccggtggttttcatctggaccctgagtcagaatggcctggagcgc

SEQ ID NO: 108827 - DNA, 80 bp, synthetic construct
  misc_feature 1..80: note = Artificially Synthesized Probe
  source 1..80: mol_type = other DNA
tccttagagtgagggggattgttctgccccaatggcctcttcagagctgcgagactgtgcccacgcgaggcagtggtcgc

SEQ ID NO: 108828 - DNA, 80 bp, synthetic construct
  misc_feature 1..80: note = Artificially Synthesized Probe
  source 1..80: mol_type = other DNA
actgcaaacctcccatttcctcccaggtccttaaagctccacatcataaaacggatgtgcgcgtgaaggaaacgtgggtg

SEQ ID NO: 108829 - DNA, 80 bp, synthetic construct
  misc_feature 1..80: note = Artificially Synthesized Probe
  source 1..80: mol_type = other DNA
gggacaggagggggcaggacagggacagaggagagacacggggcaggacggggcaggacggggacaggcgggggcaggac

SEQ ID NO: 108830 - DNA, 80 bp, synthetic construct
  misc_feature 1..80: note = Artificially Synthesized Probe
  source 1..80: mol_type = other DNA
aacccaaatgaacacagagtgatggggccccagcaccccatccacaggctcattccattatttgaaaatgtttctaaaaa

SEQ ID NO: 108831 - DNA, 80 bp, synthetic construct
  misc_feature 1..80: note = Artificially Synthesized Probe
  source 1..80: mol_type = other DNA
ggagggaagcaaatctcacccaactttaaatatttgtttctccaaagctacgtggtcacccgtgcatggtgacggtgatg

SEQ ID NO: 108832 - DNA, 80 bp, synthetic construct
  misc_feature 1..80: note = Artificially Synthesized Probe
  source 1..80: mol_type = other DNA
gcagaagattctgcgcccttcagcctcaccgtcctcacctggcctgggtgctgctgtgggcaggcgctgggcacgctggg

SEQ ID NO: 108833 - DNA, 80 bp, synthetic construct
  misc_feature 1..80: note = Artificially Synthesized Probe
  source 1..80: mol_type = other DNA
tgtggtcaaaaggcaggactggtgtgtggtgtttcctgacattttgttacctgtagagccacttagagaagcaccgctgc

SEQ ID NO: 108834 - DNA, 80 bp, synthetic construct
  misc_feature 1..80: note = Artificially Synthesized Probe
  source 1..80: mol_type = other DNA
aatggagccagtgaacagcagctcaggtgcctggacaatatgccagccctgccccccgtaccggggtctcgaacccagga

SEQ ID NO: 108835 - DNA, 80 bp, synthetic construct
  misc_feature 1..80: note = Artificially Synthesized Probe
  source 1..80: mol_type = other DNA
atgacgtcatgggagttggccctagtccagtgttgctggcatccttttaaagggacattcggatgcagacaggcactcat

SEQ ID NO: 108836 - DNA, 80 bp, synthetic construct
  misc_feature 1..80: note = Artificially Synthesized Probe
  source 1..80: mol_type = other DNA
tgtgtgtaaagcagcacacatgcatgccacaaagcagaggctaagcagtgcacactgtgcacactctgcacacgctcagg

SEQ ID NO: 108837 - DNA, 80 bp, synthetic construct
  misc_feature 1..80: note = Artificially Synthesized Probe
  source 1..80: mol_type = other DNA
atgcacgtacagatcacgccctctcgctggtgtacatgtgaacacatgctcccctcatatatacaaatacactcactcct

SEQ ID NO: 108838 - DNA, 80 bp, synthetic construct
  misc_feature 1..80: note = Artificially Synthesized Probe
  source 1..80: mol_type = other DNA
ggccatgctgccttgcagactctgctgctcggtgtggtcgggggcctgggtcggccccagggtgaatgagtgatgggttc

SEQ ID NO: 108839 - DNA, 80 bp, synthetic construct
  misc_feature 1..80: note = Artificially Synthesized Probe
  source 1..80: mol_type = other DNA
ctggatatgagtgagaaacaaactttcttgggttaagttgttaagatttcggggatgtgtttaaagtccctagtgttctt

SEQ ID NO: 108840 - DNA, 80 bp, synthetic construct
  misc_feature 1..80: note = Artificially Synthesized Probe
  source 1..80: mol_type = other DNA
ctctaccctctgccctctgccctctgccctggcgttgagtgctttgctgggactgcggctccctggccccctctcttgcc

SEQ ID NO: 108841 - DNA, 80 bp, synthetic construct
  misc_feature 1..80: note = Artificially Synthesized Probe
  source 1..80: mol_type = other DNA
aggggtccccacatccagggcactgcagatgggctgccgaccacatgcctctggcctccggccagtctcgggccatttgc

SEQ ID NO: 108842 - DNA, 80 bp, synthetic construct
  misc_feature 1..80: note = Artificially Synthesized Probe
  source 1..80: mol_type = other DNA
cctttcacataaaacccttcacttgtgctcttaggagagggttttgcacacgtctggctctgcttcccttctgctgcatt

SEQ ID NO: 108843 - DNA, 80 bp, synthetic construct
  misc_feature 1..80: note = Artificially Synthesized Probe
  source 1..80: mol_type = other DNA
gggaaaggagaggtcactgaggtcacatgagtatcaggcagatggtgccactgccggagccaccccagagccaccatcac

SEQ ID NO: 108844 - DNA, 80 bp, synthetic construct
  misc_feature 1..80: note = Artificially Synthesized Probe
  source 1..80: mol_type = other DNA
ccggggccatcaatggggtgagggggccaaggagagccctggctgccctgcagagggtgtgtccgtgtggcctgtgtgca

SEQ ID NO: 108845 - DNA, 80 bp, synthetic construct
  misc_feature 1..80: note = Artificially Synthesized Probe
  source 1..80: mol_type = other DNA
gcccccagcaactcaccacatcacacgttcacaaacataggcttggtcagaaacacttacatcaaatgatctgtaacgtt

SEQ ID NO: 108846 - DNA, 80 bp, synthetic construct
  misc_feature 1..80: note = Artificially Synthesized Probe
  source 1..80: mol_type = other DNA
atgtgtgtatgtatcatgtgtgatgtgtatgtatggtgtatatgtgtgttatgtgcatggtgtgtgcctgtttgtacatg

SEQ ID NO: 108847 - DNA, 80 bp, synthetic construct
  misc_feature 1..80: note = Artificially Synthesized Probe
  source 1..80: mol_type = other DNA
atgtgcatgtgtggtgtgtgtggtaggtgtgtggtgtgtgtgcattcatgtgaaagtgtgtgcacatgtgtgtttgcatg

SEQ ID NO: 108848 - DNA, 80 bp, synthetic construct
  misc_feature 1..80: note = Artificially Synthesized Probe
  source 1..80: mol_type = other DNA
tgtggcctcagagatgggtggggtcattggggagctggatcaataatctggacatttgggaagatgtcttgggggccagg

SEQ ID NO: 108849 - DNA, 80 bp, synthetic construct
  misc_feature 1..80: note = Artificially Synthesized Probe
  source 1..80: mol_type = other DNA
aggggcactggagtccaaggccctgggtgtgagtccctgggatgctaaaatttaatttcctcatgtgccaaatgaagaca

SEQ ID NO: 108850 - DNA, 80 bp, synthetic construct
  misc_feature 1..80: note = Artificially Synthesized Probe
  source 1..80: mol_type = other DNA
ctggcccgccctcctccagcagccctcgcccaacacacccctcctctgaaaccagcaaggccaggcccaggcacccgtga

SEQ ID NO: 108851 - DNA, 80 bp, synthetic construct
  misc_feature 1..80: note = Artificially Synthesized Probe
  source 1..80: mol_type = other DNA
ccccaaacacctgctgggcctgggtccacagtggcccacctgcacccgctcagggtggcctgggcagcccccttcggaag

SEQ ID NO: 108852 - DNA, 80 bp, synthetic construct
  misc_feature 1..80: note = Artificially Synthesized Probe
  source 1..80: mol_type = other DNA
gctccgctcagctggctctgtcggctcgagtctgagcccatccgtcagcgtcaattaggaagcctcagctcagaacgcaa

SEQ ID NO: 108853 - DNA, 80 bp, synthetic construct
  misc_feature 1..80: note = Artificially Synthesized Probe
  source 1..80: mol_type = other DNA
atacaaattccatggatggctctgagctccaatagctgtaaatttggaaaggaaaagaaatatttgacaagacacagcag

SEQ ID NO: 108854 - DNA, 80 bp, synthetic construct
  misc_feature 1..80: note = Artificially Synthesized Probe
  source 1..80: mol_type = other DNA
cgcagcacagccctcccgccacaagggtacaccaagcggccacggcacagccctccccacccctacctccttttggcagc

SEQ ID NO: 108855 - DNA, 80 bp, synthetic construct
  misc_feature 1..80: note = Artificially Synthesized Probe
  source 1..80: mol_type = other DNA
cacatgcgatcacactgcatgaccccccccacacccacacatgcagtcacacacacgcacacaacagacacatgcttatg

SEQ ID NO: 108856 - DNA, 80 bp, synthetic construct
  misc_feature 1..80: note = Artificially Synthesized Probe
  source 1..80: mol_type = other DNA
tacagcagatccacaatgtatatgcacacacacaacacatccacactcacacatgcactccacatacatgcacacagcag

SEQ ID NO: 108857 - DNA, 80 bp, synthetic construct
  misc_feature 1..80: note = Artificially Synthesized Probe
  source 1..80: mol_type = other DNA
agcagacccacacacgttcacacacacaacacagtcacatatgcactcaaacatacatgcacacagcagacccatatata

SEQ ID NO: 108858 - DNA, 80 bp, synthetic construct
  misc_feature 1..80: note = Artificially Synthesized Probe
  source 1..80: mol_type = other DNA
cacgtgcacacacacgcacacacactcatacatgcactcacagcagactcccccacacacgcattcttacacatgcacac

SEQ ID NO: 108859 - DNA, 80 bp, synthetic construct
  misc_feature 1..80: note = Artificially Synthesized Probe
  source 1..80: mol_type = other DNA
atgatcttggagttattccttattctctacatgccaggaaaggtgaaatcagaaaggagaggatttgacagcctcaccca

SEQ ID NO: 108860 - DNA, 80 bp, synthetic construct
  misc_feature 1..80: note = Artificially Synthesized Probe
  source 1..80: mol_type = other DNA
ccatgctggaggagaggaggatgaggccaggcatactggacagcttgtgtgaccccaaggcaggcatggcaggatctagg

SEQ ID NO: 108861 - DNA, 80 bp, synthetic construct
  misc_feature 1..80: note = Artificially Synthesized Probe
  source 1..80: mol_type = other DNA
agttttagttatgagaggcctataagacctctgagtaaagacataactctaggatctggtcagagctataaattcagggt

SEQ ID NO: 108862 - DNA, 80 bp, synthetic construct
  misc_feature 1..80: note = Artificially Synthesized Probe
  source 1..80: mol_type = other DNA
atgaaggtgagcccagcatggttgacaccaagacaagaggaagttttgagaaggggcttattagctctcaaaagctgatg

SEQ ID NO: 108863 - DNA, 80 bp, synthetic construct
  misc_feature 1..80: note = Artificially Synthesized Probe
  source 1..80: mol_type = other DNA
ttggggagaatgcaaacaggaagacaaataaaccagaggccagggaaaccaatggttgttgatgtcacagagaatgatga

SEQ ID NO: 108864 - DNA, 80 bp, synthetic construct
  misc_feature 1..80: note = Artificially Synthesized Probe
  source 1..80: mol_type = other DNA
catttggtggcacaaaaactgatttcatttctccccagcagccagcaaaggatgctggcggtgttgggtaggtgtggggt

SEQ ID NO: 108865 - DNA, 80 bp, synthetic construct
  misc_feature 1..80: note = Artificially Synthesized Probe
  source 1..80: mol_type = other DNA
ctatccatcatccatccatctactcatctatccatccctccctctatctatacaccatccaataaccatccattcactca

SEQ ID NO: 108866 - DNA, 80 bp, synthetic construct
  misc_feature 1..80: note = Artificially Synthesized Probe
  source 1..80: mol_type = other DNA
tccatctatacactcatccatccatccactcacccactatccatcatccatccataatacactcatgcatccatccaccc

SEQ ID NO: 108867 - DNA, 80 bp, synthetic construct
  misc_feature 1..80: note = Artificially Synthesized Probe
  source 1..80: mol_type = other DNA
cactcatccacccatctatatgctatccatcatccatccacctatatattagccattatctatccataatacacttatcc

SEQ ID NO: 108868 - DNA, 80 bp, synthetic construct
  misc_feature 1..80: note = Artificially Synthesized Probe
  source 1..80: mol_type = other DNA
actcttctatccacccatccactatccatctacccatccacatatcccatcatccatgcgtacatgcatccatccttcct

SEQ ID NO: 108869 - DNA, 80 bp, synthetic construct
  misc_feature 1..80: note = Artificially Synthesized Probe
  source 1..80: mol_type = other DNA
tccatcacttatccatgtattcatccactatcaagcattcatccatccacccatgatccatacagacatacatgcaccca

SEQ ID NO: 108870 - DNA, 80 bp, synthetic construct
  misc_feature 1..80: note = Artificially Synthesized Probe
  source 1..80: mol_type = other DNA
gacccatattgttaaaaaatagagctaataatcacctaaaatatttaataaaaccttaaaacacataaatacctaaaata

SEQ ID NO: 108871 - DNA, 80 bp, synthetic construct
  misc_feature 1..80: note = Artificially Synthesized Probe
  source 1..80: mol_type = other DNA
tgggctgtgattatgagcagctgcttctgattacaatcagtgaatcactaatctgcagtctgctacaaaacagctggact

SEQ ID NO: 108872 - DNA, 80 bp, synthetic construct
  misc_feature 1..80: note = Artificially Synthesized Probe
  source 1..80: mol_type = other DNA
catatgacaggcaaggactggtgaagttttcagattttctcactcattggctagcattcctttgaactcttcaaaggctt

SEQ ID NO: 108873 - DNA, 80 bp, synthetic construct
  misc_feature 1..80: note = Artificially Synthesized Probe
  source 1..80: mol_type = other DNA
ggaggttgaatcagtccttcgttccacagctgggtatgagacagacagagaaattagaagtgttttttcctttttcctcc

SEQ ID NO: 108874 - DNA, 80 bp, synthetic construct
  misc_feature 1..80: note = Artificially Synthesized Probe
  source 1..80: mol_type = other DNA
gtttgtgcacagcctcctgtgaccctcctgaaggtaggagctgaccacaagtcctcctcccaaggcaggggcgagctcag

SEQ ID NO: 108875 - DNA, 80 bp, synthetic construct
  misc_feature 1..80: note = Artificially Synthesized Probe
  source 1..80: mol_type = other DNA
tttaaaattgctggcattcgtggaagtgtatagaaacttgtttctataatcaatggctgctcctgtcactgggccagtga

SEQ ID NO: 108876 - DNA, 80 bp, synthetic construct
  misc_feature 1..80: note = Artificially Synthesized Probe
  source 1..80: mol_type = other DNA
gggatgttaaggatgggaggcctctgtctggtgccccacctgtccaatgggcagcagcttcccgaggacaagtgcatgct

SEQ ID NO: 108877 - DNA, 80 bp, synthetic construct
  misc_feature 1..80: note = Artificially Synthesized Probe
  source 1..80: mol_type = other DNA
ccattccggagggacatggtgagacctggctcgacaggaagttctagaggacaggcatgcttttgggtcactggctgtct

SEQ ID NO: 108878 - DNA, 80 bp, synthetic construct
  misc_feature 1..80: note = Artificially Synthesized Probe
  source 1..80: mol_type = other DNA
agatgatggaaccacttccacatgctgaatgaagccacaaagcaggcggatcacgagcggcacccagggcccacattagg

SEQ ID NO: 108879 - DNA, 80 bp, synthetic construct
  misc_feature 1..80: note = Artificially Synthesized Probe
  source 1..80: mol_type = other DNA
tggtctgtagctggacacgtggatgaagtttctctttcccagcctttcttgaagctggacatgcgactcggttctggcca

SEQ ID NO: 108880 - DNA, 80 bp, synthetic construct
  misc_feature 1..80: note = Artificially Synthesized Probe
  source 1..80: mol_type = other DNA
cagcagccatctgggatcatgaggagcagctcagggctgagggctggagcggcaggagtagaacaccttgtttctgggac

SEQ ID NO: 108881 - DNA, 80 bp, synthetic construct
  misc_feature 1..80: note = Artificially Synthesized Probe
  source 1..80: mol_type = other DNA
attatcctctcaaaagtgtcaaaatgccacgtcagtgtatgaatcacacctttgaacaatgaaggctcccgtgttaagag

SEQ ID NO: 108882 - DNA, 80 bp, synthetic construct
  misc_feature 1..80: note = Artificially Synthesized Probe
  source 1..80: mol_type = other DNA
gccccagccccattcagcttccaccactcagcttctctgccgagctcccaggcactgttctggagacctcaaggctccag

SEQ ID NO: 108883 - DNA, 80 bp, synthetic construct
  misc_feature 1..80: note = Artificially Synthesized Probe
  source 1..80: mol_type = other DNA
tcaggcaatcccctctgctcaagccaccaccagtaaatagaacggcagcacaaccgtgatcaccacagtcatcacaatga

SEQ ID NO: 108884 - DNA, 80 bp, synthetic construct
  misc_feature 1..80: note = Artificially Synthesized Probe
  source 1..80: mol_type = other DNA
cagcacgaacacgatcgtcacaatcgcgagcgccatttccacgcgtgctgtgcaaagacggcagcacgaacacgatcgtc

SEQ ID NO: 108885 - DNA, 80 bp, synthetic construct
  misc_feature 1..80: note = Artificially Synthesized Probe
  source 1..80: mol_type = other DNA
acggcagcacgaacacgatcgtcacaatcgcgagcgccatttccacgcgtgctgtgcaaagatggcagcacgaacacgat

SEQ ID NO: 108886 - DNA, 80 bp, synthetic construct
  misc_feature 1..80: note = Artificially Synthesized Probe
  source 1..80: mol_type = other DNA
gcaaggctaatgcagactcttctcaagtaagtgtcggaggcgccaactgaagggaagctggacacatctctctgccctgg

SEQ ID NO: 108887 - DNA, 80 bp, synthetic construct
  misc_feature 1..80: note = Artificially Synthesized Probe
  source 1..80: mol_type = other DNA
tgggagtcctgattgcagagggtggggaccatggcatcccagagggtgggcagaacatggctttaggatgtcaccgtcct

SEQ ID NO: 108888 - DNA, 80 bp, synthetic construct
  misc_feature 1..80: note = Artificially Synthesized Probe
  source 1..80: mol_type = other DNA
ttgtcctgcatctccgaccgtgtccccagcagacacattgcactagagatgatgcttccttggtcaaaacactaggttct

SEQ ID NO: 108889 - DNA, 80 bp, synthetic construct
  misc_feature 1..80: note = Artificially Synthesized Probe
  source 1..80: mol_type = other DNA
ggtagtgtggccacgcggcctcttagtgtacgtgttagaacctattattaaaggagtcaactgagcctggcggccacctc

SEQ ID NO: 108890 - DNA, 80 bp, synthetic construct
  misc_feature 1..80: note = Artificially Synthesized Probe
  source 1..80: mol_type = other DNA
attgttttcaaactcatgaagcatcaaaggcccttgtggttttctggagtttccattctctagagcttttcgacaacacc

SEQ ID NO: 108891 - DNA, 80 bp, synthetic construct
  misc_feature 1..80: note = Artificially Synthesized Probe
  source 1..80: mol_type = other DNA
gtggctgtctggaggccaagctcgatcagaatgtccctgggcactgtctgggggcctgagaaagcgttcgggctgtgtgg

SEQ ID NO: 108892 - DNA, 80 bp, synthetic construct
  misc_feature 1..80: note = Artificially Synthesized Probe
  source 1..80: mol_type = other DNA
gtccacaaaggacccctccggcatttgggggaacccagtgtgctctgcagatgttccttgagcgaggactgaggaccagg

SEQ ID NO: 108893 - DNA, 80 bp, synthetic construct
  misc_feature 1..80: note = Artificially Synthesized Probe
  source 1..80: mol_type = other DNA
gccttcctcgggctgcacgttctgattttgtttttttttgaaaaggtaaacataaagaaaatgcttgaagccccaggaca

SEQ ID NO: 108894 - DNA, 80 bp, synthetic construct
  misc_feature 1..80: note = Artificially Synthesized Probe
  source 1..80: mol_type = other DNA
ttttccccacatgcagatggagctgggaccagcctctgggttaaaattcagcatcacgtcttactcagaggaagatggtg

SEQ ID NO: 108895 - DNA, 80 bp, synthetic construct
  misc_feature 1..80: note = Artificially Synthesized Probe
  source 1..80: mol_type = other DNA
aggccacgttgactacagagcccatggacggaacagcgatcggatacaagacttgcccccacttccgcaagccctcggca

SEQ ID NO: 108896 - DNA, 80 bp, synthetic construct
  misc_feature 1..80: note = Artificially Synthesized Probe
  source 1..80: mol_type = other DNA
ctgagagatgtcctggttactgcaggtatgatcacagcaagaccctgagagatgtcctggttactgcaggtacaaacagt

SEQ ID NO: 108897 - DNA, 80 bp, synthetic construct
  misc_feature 1..80: note = Artificially Synthesized Probe
  source 1..80: mol_type = other DNA
tcccgaaaatgcccactttggctaaaaaggtccagtagtggagaattttaacaacgccactcagttttatttgcgtaacc

SEQ ID NO: 108898 - DNA, 80 bp, synthetic construct
  misc_feature 1..80: note = Artificially Synthesized Probe
  source 1..80: mol_type = other DNA
gggaaattgatgacatccccatcttaaaaccaaacacaatttgaatttcaaatgcacttggagttcttccttccaggaca

SEQ ID NO: 108899 - DNA, 80 bp, synthetic construct
  misc_feature 1..80: note = Artificially Synthesized Probe
  source 1..80: mol_type = other DNA
aaatgccagagctcaatccccatgcttttgtaggagaaaattggatcccagagaggttaaaagctctgtccaaagtgata

SEQ ID NO: 108900 - DNA, 80 bp, synthetic construct
  misc_feature 1..80: note = Artificially Synthesized Probe
  source 1..80: mol_type = other DNA
gagctatttaaagtcaaaaacaaaaaggcaagggtcccgtcttgctgcgagtgttggggcaggtgctatctgaacacggt

SEQ ID NO: 108901 - DNA, 80 bp, synthetic construct
  misc_feature 1..80: note = Artificially Synthesized Probe
  source 1..80: mol_type = other DNA
ccatacgtggggttaggtaagtttgaaagtctggacaaggctgtcattaaagcgtaggtgatgctaaacggcgtgaaagc

SEQ ID NO: 108902 - DNA, 80 bp, synthetic construct
  misc_feature 1..80: note = Artificially Synthesized Probe
  source 1..80: mol_type = other DNA
aagtggctgccccagcaccaccccgtccagagggccgggagagcagccgcattgaaggtcgctccaggaaaagccctggc

SEQ ID NO: 108903 - DNA, 80 bp, synthetic construct
  misc_feature 1..80: note = Artificially Synthesized Probe
  source 1..80: mol_type = other DNA
gggccgtgcttctagctgcactgtccctccatgcttccaaagacattgtgtcctggtcaccagaactcctggtctgcagt

SEQ ID NO: 108904 - DNA, 80 bp, synthetic construct
  misc_feature 1..80: note = Artificially Synthesized Probe
  source 1..80: mol_type = other DNA
ggaagaaaggaggggctggcttctctgtgcctgctcactggcagctgagcacccccaggggcatctggggtccctgaatt

SEQ ID NO: 108905 - DNA, 80 bp, synthetic construct
  misc_feature 1..80: note = Artificially Synthesized Probe
  source 1..80: mol_type = other DNA
tcatcctgcaaatcaacgatgaattaccaagggaagaatttacctttacaatggagtgatgtggcaggtgcctcttttac

SEQ ID NO: 108906 - DNA, 80 bp, synthetic construct
  misc_feature 1..80: note = Artificially Synthesized Probe
  source 1..80: mol_type = other DNA
cacagctgccggaggcacacacatcaccacatgctgaagacctgcatctgaatctagtagtgtggggcaatccaacaggc

SEQ ID NO: 108907 - DNA, 80 bp, synthetic construct
  misc_feature 1..80: note = Artificially Synthesized Probe
  source 1..80: mol_type = other DNA
taaaaataaaaagcaagctattgggacaacgggaaaactggccacatacgaacgtgtgctaagtaacgtcactgcttcca

SEQ ID NO: 108908 - DNA, 80 bp, synthetic construct
  misc_feature 1..80: note = Artificially Synthesized Probe
  source 1..80: mol_type = other DNA
gagggtgcaggtgctcattttactcttctttcaacttgtttgacagtgtggagtttgcaaaataaaattctgggataaag

SEQ ID NO: 108909 - DNA, 80 bp, synthetic construct
  misc_feature 1..80: note = Artificially Synthesized Probe
  source 1..80: mol_type = other DNA
atatcctgtagtctaagccttctctcgttggggttttctgttatttcttcccgaagcatcttaactgatgcgggttctgt

SEQ ID NO: 108910 - DNA, 80 bp, synthetic construct
  misc_feature 1..80: note = Artificially Synthesized Probe
  source 1..80: mol_type = other DNA
gtctaagactccccacaccgtctctgagaggaacgcctcccacagcacgcacagagattccctagataagaaggacattc

SEQ ID NO: 108911 - DNA, 80 bp, synthetic construct
  misc_feature 1..80: note = Artificially Synthesized Probe
  source 1..80: mol_type = other DNA
agggtctcagtgagcatttcagagccatctccacctgtcagaacgagcaggaagacatccaacccttattgggagtctac

SEQ ID NO: 108912 - DNA, 80 bp, synthetic construct
  misc_feature 1..80: note = Artificially Synthesized Probe
  source 1..80: mol_type = other DNA
cacgaatggaaccctaggccataaaatatatggatattccagggtttaattcatagccatccttaagctgggggagggca

SEQ ID NO: 108913 - DNA, 80 bp, synthetic construct
  misc_feature 1..80: note = Artificially Synthesized Probe
  source 1..80: mol_type = other DNA
agcacctggcacctccgctaattctccggggtggaggcacttgcacaaccatgtgatgaattcttcagcagcgcccggaa

SEQ ID NO: 108914 - DNA, 80 bp, synthetic construct
  misc_feature 1..80: note = Artificially Synthesized Probe
  source 1..80: mol_type = other DNA
ctgcatctcaggctctgtttcataaacaggaggattatttcagaccgatcagaggcggctgcattctgcaaattaccgtg

SEQ ID NO: 108915 - DNA, 80 bp, synthetic construct
  misc_feature 1..80: note = Artificially Synthesized Probe
  source 1..80: mol_type = other DNA
taaacatacatttgggaaggtggaagtcaagaaatgtagcggttctgttgagttcaaagagaaacacaggattcctaagt

SEQ ID NO: 108916 - DNA, 80 bp, synthetic construct
  misc_feature 1..80: note = Artificially Synthesized Probe
  source 1..80: mol_type = other DNA
ggaaggaaaggcacaatctgtcacagtttccaaacacatatgcttcgcgtgggaatctggggttgattcaaaggctgaat

SEQ ID NO: 108917 - DNA, 80 bp, synthetic construct
  misc_feature 1..80: note = Artificially Synthesized Probe
  source 1..80: mol_type = other DNA
tgggaaaagttaccaaaccaatttactcaatggagaaaatagccaactggtcaaagaactgtgatgagatggcgggattc

SEQ ID NO: 108918 - DNA, 80 bp, synthetic construct
  misc_feature 1..80: note = Artificially Synthesized Probe
  source 1..80: mol_type = other DNA
acttgtccaggagcgagatgtggctggtgcccatccatcccatatgatcgtaaactcgttcaggaagtatgcgacgtggc

SEQ ID NO: 108919 - DNA, 80 bp, synthetic construct
  misc_feature 1..80: note = Artificially Synthesized Probe
  source 1..80: mol_type = other DNA
gctggtgcccatccatcccatatgatggtaaactcgtccaggaagtgtgtgacgtggggggcgcccatccatcctgtatg

SEQ ID NO: 108920 - DNA, 80 bp, synthetic construct
  misc_feature 1..80: note = Artificially Synthesized Probe
  source 1..80: mol_type = other DNA
aaatactggagcggcattctgcactgcaacaacactgaaggacccgagggtggcttctccgtggctctgaggttaacgct

SEQ ID NO: 108921 - DNA, 80 bp, synthetic construct
  misc_feature 1..80: note = Artificially Synthesized Probe
  source 1..80: mol_type = other DNA
tgattgtaaactcgttcaggaagtgtgtgacgtggccggagcccatccatcctgtatgatggtaaacttgatggagcata

SEQ ID NO: 108922 - DNA, 80 bp, synthetic construct
  misc_feature 1..80: note = Artificially Synthesized Probe
  source 1..80: mol_type = other DNA
tttcttctggtcacaactctcatccatggacattttaggagtaacaagccgctcatttccataaatcagcattgtggctt

SEQ ID NO: 108923 - DNA, 80 bp, synthetic construct
  misc_feature 1..80: note = Artificially Synthesized Probe
  source 1..80: mol_type = other DNA
cttcgaaactctctgtagtactttctatccgccaatcaatgagccagcagcattccctgtgatcaatccatcaattccac

SEQ ID NO: 108924 - DNA, 80 bp, synthetic construct
  misc_feature 1..80: note = Artificially Synthesized Probe
  source 1..80: mol_type = other DNA
caatcagtgagccagcagcactccctgtgatcaatccatcaattccacccaccagtgagccagcagcactccctgtgatc

SEQ ID NO: 108925 - DNA, 80 bp, synthetic construct
  misc_feature 1..80: note = Artificially Synthesized Probe
  source 1..80: mol_type = other DNA
catcaattccacccaccaatcagtgagccagaagcactccctgtgatcaatccatcaattgatcagtcgacccacccgct

SEQ ID NO: 108926 - DNA, 80 bp, synthetic construct
  misc_feature 1..80: note = Artificially Synthesized Probe
  source 1..80: mol_type = other DNA
ctgcagggaggaccccaggcgggtgtggggacccaccttaggaggacagacgcacatgaggctacggggcttgttgtcat

SEQ ID NO: 108927 - DNA, 80 bp, synthetic construct
  misc_feature 1..80: note = Artificially Synthesized Probe
  source 1..80: mol_type = other DNA
aatggagctggggcagtgatgagctacttcttgccttttgtcaggaaaagaagctggatagatttctcttctcttccttt

SEQ ID NO: 108928 - DNA, 80 bp, synthetic construct
  misc_feature 1..80: note = Artificially Synthesized Probe
  source 1..80: mol_type = other DNA
aacgaagatgcaagacacacagcctctctaaaaacaggagcagaaacacacaacacaacgggaaaaacagggtgtcataa

SEQ ID NO: 108929 - DNA, 80 bp, synthetic construct
  misc_feature 1..80: note = Artificially Synthesized Probe
  source 1..80: mol_type = other DNA
gagaatcacgagcaaagcacaaaagatgctaaaagaggggatattagagacgtacggcacaggaaagagactcgtcctaa

SEQ ID NO: 108930 - DNA, 80 bp, synthetic construct
  misc_feature 1..80: note = Artificially Synthesized Probe
  source 1..80: mol_type = other DNA
ggcttattcaagaaactagagtttacttgggggaaggtcctagtttatccctcacttcacacacattacaaccaccagaa

SEQ ID NO: 108931 - DNA, 80 bp, synthetic construct
  misc_feature 1..80: note = Artificially Synthesized Probe
  source 1..80: mol_type = other DNA
aagcagatgtgcttgctgcaaaccaccttcctacggcccagcagaggcacaacaagcagcgaattttttccagggcctcc

SEQ ID NO: 108932 - DNA, 80 bp, synthetic construct
  misc_feature 1..80: note = Artificially Synthesized Probe
  source 1..80: mol_type = other DNA
tttctgaacttcagacagtacaacaagcaacgttagacacagacaagcctggcagaacattggccaaaagtaagaggcaa

SEQ ID NO: 108933 - DNA, 80 bp, synthetic construct
  misc_feature 1..80: note = Artificially Synthesized Probe
  source 1..80: mol_type = other DNA
taagatgctatcgtttgccctaaataattgcatgcacttaaatgaagtcctaacccttggtgttaagtgagtggatgatg

SEQ ID NO: 108934 - DNA, 80 bp, synthetic construct
  misc_feature 1..80: note = Artificially Synthesized Probe
  source 1..80: mol_type = other DNA
gcaggtttattggacttgccagatgcacctgcatttgttggagatattagttcaactggataagaggaattgaggtattt

SEQ ID NO: 108935 - DNA, 80 bp, synthetic construct
  misc_feature 1..80: note = Artificially Synthesized Probe
  source 1..80: mol_type = other DNA
atgggttgaagaacttacagcagaaccacataaagaccaaagtgttcctcagaagcatattttaaagacaatttgataag

SEQ ID NO: 108936 - DNA, 80 bp, synthetic construct
  misc_feature 1..80: note = Artificially Synthesized Probe
  source 1..80: mol_type = other DNA
tagaagaggtttggcctatgtcatgaccatgtcctggcctggaccatttttaattgctccagagacttccaaattgtgtc

SEQ ID NO: 108937 - DNA, 80 bp, synthetic construct
  misc_feature 1..80: note = Artificially Synthesized Probe
  source 1..80: mol_type = other DNA
gcccttccatgcatccctccatccacccacccatccacccaccaccacctgtccacccacccacccatccacacatctgc

SEQ ID NO: 108938 - DNA, 80 bp, synthetic construct
  misc_feature 1..80: note = Artificially Synthesized Probe
  source 1..80: mol_type = other DNA
ccacccatccacacatccacccttccatgtgtccctccacccatccacccacccatccactcaccaccacctgtccaccc

SEQ ID NO: 108939 - DNA, 80 bp, synthetic construct
  misc_feature 1..80: note = Artificially Synthesized Probe
  source 1..80: mol_type = other DNA
ctgttttgatgcagagtcatccgagatggctcagaaggggcaccatgaggagccagggccatgtaccacattctgtggag

SEQ ID NO: 108940 - DNA, 80 bp, synthetic construct
  misc_feature 1..80: note = Artificially Synthesized Probe
  source 1..80: mol_type = other DNA
tcacaaggacacagtgtatccagcctccacagggcaggactcacatcctccttcactccatgacccttccttgttgccgc

SEQ ID NO: 108941 - DNA, 80 bp, synthetic construct
  misc_feature 1..80: note = Artificially Synthesized Probe
  source 1..80: mol_type = other DNA
tactccagttcctctcacagtggatggcacgggagaaagctcctctccactatgcctactccagttcctctcgtagtgga

SEQ ID NO: 108942 - DNA, 80 bp, synthetic construct
  misc_feature 1..80: note = Artificially Synthesized Probe
  source 1..80: mol_type = other DNA
atagtggatggtacgggagaaagctcctctccactatgcctactccagttcctctcatagtggatggcacgggagaaagc

SEQ ID NO: 108943 - DNA, 80 bp, synthetic construct
  misc_feature 1..80: note = Artificially Synthesized Probe
  source 1..80: mol_type = other DNA
agagaaatgaaagtgctgccgtccacacggaagcccgacccacaacaaagctagtgacagttcatttccttcctgcttac

SEQ ID NO: 108944 - DNA, 80 bp, synthetic construct
  misc_feature 1..80: note = Artificially Synthesized Probe
  source 1..80: mol_type = other DNA
gagaaagctcctctccaccgtggctactccagttcctctcatagtggatggcacgggagaaagctcctctccaccgtggc

SEQ ID NO: 108945 - DNA, 80 bp, synthetic construct
  misc_feature 1..80: note = Artificially Synthesized Probe
  source 1..80: mol_type = other DNA
gccgtggctactccagttcctctcgtagtggatggcacgggagaaagctcctctccgccgtggctactccagttcctctc

SEQ ID NO: 108946 - DNA, 80 bp, synthetic construct
  misc_feature 1..80: note = Artificially Synthesized Probe
  source 1..80: mol_type = other DNA
ttcctctcgtagtggatggcacgggagaaagctcctctccactgtggctactccagttcctctcgtagtggatggcatgg

SEQ ID NO: 108947 - DNA, 80 bp, synthetic construct
  misc_feature 1..80: note = Artificially Synthesized Probe
  source 1..80: mol_type = other DNA
aagccaatgacttatatttggcacaagacagattaacacgtaattgttctttactgaattggtatctgactgtgtgagtt

SEQ ID NO: 108948 - DNA, 80 bp, synthetic construct
  misc_feature 1..80: note = Artificially Synthesized Probe
  source 1..80: mol_type = other DNA
tatgtggtggagtgtgtgtggcgtgtgtttgtgtttgtgagagagactgtgtgtgtgtctggctgtgtgtgtggttgtgt

SEQ ID NO: 108949 - DNA, 80 bp, synthetic construct
  misc_feature 1..80: note = Artificially Synthesized Probe
  source 1..80: mol_type = other DNA
aatgtgtctgtgtatgactgtgtggctatgtgtagtgtgtgtgactgtgtagctgtgtggaatgtgtatgtgcaactgtg

SEQ ID NO: 108950 - DNA, 80 bp, synthetic construct
  misc_feature 1..80: note = Artificially Synthesized Probe
  source 1..80: mol_type = other DNA
gtgtgaccgtgtggagtgtgtgtgactgtgtaaccatgtgtgactgtgtggccatatgtgactgtgtgactgtgtgtgac

SEQ ID NO: 108951 - DNA, 80 bp, synthetic construct
  misc_feature 1..80: note = Artificially Synthesized Probe
  source 1..80: mol_type = other DNA
gaccgcgtgactgtgtgactgtgactgtgtggccgtcactgttaccacatgtgactgtgtggccctgtgtgactgtgtga

SEQ ID NO: 108952 - DNA, 80 bp, synthetic construct
  misc_feature 1..80: note = Artificially Synthesized Probe
  source 1..80: mol_type = other DNA
tgtggccgcgtgtgactgtgtggccgcgtgtgactgtgtgaccgcgtgtgactgtgtgaccgtgtgtgactgtgtgactg

SEQ ID NO: 108953 - DNA, 80 bp, synthetic construct
  misc_feature 1..80: note = Artificially Synthesized Probe
  source 1..80: mol_type = other DNA
catccgagccggctgaagcccacagagcaggccccgtgttggggggaagttggaatttagggagtggtgctggattctgg

SEQ ID NO: 108954 - DNA, 80 bp, synthetic construct
  misc_feature 1..80: note = Artificially Synthesized Probe
  source 1..80: mol_type = other DNA
cttgcttgttcccccctctttggccaaagatgtggtaaattttgccagaacaaaatgaactaagcgtttgactgtgtcag

SEQ ID NO: 108955 - DNA, 80 bp, synthetic construct
  misc_feature 1..80: note = Artificially Synthesized Probe
  source 1..80: mol_type = other DNA
aggagccccgtcctcagacccctccaggagccagaagtgtttcttcttggagaggtgaggggctgggcgccctctcaggc

SEQ ID NO: 108956 - DNA, 80 bp, synthetic construct
  misc_feature 1..80: note = Artificially Synthesized Probe
  source 1..80: mol_type = other DNA
ccgtgtccgccctgcactcgctcccagcacagggcagaggcggtcgcagagctgcatgatctacttttaagttctgtgaa

SEQ ID NO: 108957 - DNA, 80 bp, synthetic construct
  misc_feature 1..80: note = Artificially Synthesized Probe
  source 1..80: mol_type = other DNA
agacaaaactgtgaacgaggacattatctaaagtgcagagccccacatggtgggaagctcaaatgctcactaacaggtcg

SEQ ID NO: 108958 - DNA, 80 bp, synthetic construct
  misc_feature 1..80: note = Artificially Synthesized Probe
  source 1..80: mol_type = other DNA
ccaaaggaaccctaaattagtcttaaacacacacacaaatctatctgaggcagggaaactgcccattaagggccagtaat

SEQ ID NO: 108959 - DNA, 80 bp, synthetic construct
  misc_feature 1..80: note = Artificially Synthesized Probe
  source 1..80: mol_type = other DNA
gttgcttgagaaacactactattttttctacatttatgaaaatattgcagcgttcggggtgctggggacgtcctctctgg

SEQ ID NO: 108960 - DNA, 80 bp, synthetic construct
  misc_feature 1..80: note = Artificially Synthesized Probe
  source 1..80: mol_type = other DNA
taaggatcaacatcaaaattggaactttctctttctatagccacatccaattgaaagtatcttagacctcccagtggctt

SEQ ID NO: 108961 - DNA, 80 bp, synthetic construct
  misc_feature 1..80: note = Artificially Synthesized Probe
  source 1..80: mol_type = other DNA
gcatccattttaaataacaggaaggtccccaacccatacacaacattagaaacggcattatttgctggcccctttgtgcg

SEQ ID NO: 108962 - DNA, 80 bp, synthetic construct
  misc_feature 1..80: note = Artificially Synthesized Probe
  source 1..80: mol_type = other DNA
gggaggagatttaaagtgcaaatggtacaaaaggggctcaaatgccgctttgtgtgcagattcaggagactttttttttt

SEQ ID NO: 108963 - DNA, 80 bp, synthetic construct
  misc_feature 1..80: note = Artificially Synthesized Probe
  source 1..80: mol_type = other DNA
atttttgtatttttagtagagatggggtttcaccatgtcggtcaggctggtttcgaactccagaccttgtgattcgccca

SEQ ID NO: 108964 - DNA, 80 bp, synthetic construct
  misc_feature 1..80: note = Artificially Synthesized Probe
  source 1..80: mol_type = other DNA
gcaccaaatgctttctaactattcttgggaaagaggcaaggcacaagtaaattaaatatattaacaagtcggagtaaagg

SEQ ID NO: 108965 - DNA, 80 bp, synthetic construct
  misc_feature 1..80: note = Artificially Synthesized Probe
  source 1..80: mol_type = other DNA
aatgtcactcttgatagcataatatctgaaacatcatcttcccaagtccacaccaatactttacacagaaaattaaactc

SEQ ID NO: 108966 - DNA, 80 bp, synthetic construct
  misc_feature 1..80: note = Artificially Synthesized Probe
  source 1..80: mol_type = other DNA
ttctaaacgcaggtcctccgtctcagaaggagaaattgacataacagtcgttactaaatcttactctttaaaaagcactc

SEQ ID NO: 108967 - DNA, 80 bp, synthetic construct
  misc_feature 1..80: note = Artificially Synthesized Probe
  source 1..80: mol_type = other DNA
aatgtcttcaaaagcaagcatttgaggtgtgtataattacaagaaaacaatgcaatggtggtttccagcattaatgaatt

SEQ ID NO: 108968 - DNA, 80 bp, synthetic construct
  misc_feature 1..80: note = Artificially Synthesized Probe
  source 1..80: mol_type = other DNA
tctgagcctcccctggagaagtcaagaggtcccctccttccagacccaacttccctggccactgactgtcgggattccct

SEQ ID NO: 108969 - DNA, 80 bp, synthetic construct
  misc_feature 1..80: note = Artificially Synthesized Probe
  source 1..80: mol_type = other DNA
ctttctttccagcgtgccacacaatatcatgatacttacggttctatgattcacactcgcagtttcgaaggaaacctctg

SEQ ID NO: 108970 - DNA, 80 bp, synthetic construct
  misc_feature 1..80: note = Artificially Synthesized Probe
  source 1..80: mol_type = other DNA
agtgccaccccactgcaggcaccgggagctcttccacggagaggaaaggtgcagagaaagactctgaccccctgcacgga

SEQ ID NO: 108971 - DNA, 80 bp, synthetic construct
  misc_feature 1..80: note = Artificially Synthesized Probe
  source 1..80: mol_type = other DNA
agccccacacacaggaggtggtgtgcagcacgtgtctctgcaggaaagggaacaggagggactggccttggcgggtggtg

SEQ ID NO: 108972 - DNA, 80 bp, synthetic construct
  misc_feature 1..80: note = Artificially Synthesized Probe
  source 1..80: mol_type = other DNA
gaagaaagaacactagagctgaaattcgaggaagaaaccggacatctggggcagaggaacgacccaaagccactgaggaa

SEQ ID NO: 108973 - DNA, 80 bp, synthetic construct
  misc_feature 1..80: note = Artificially Synthesized Probe
  source 1..80: mol_type = other DNA
cattattactcctccacttctagtacgagaggcttgttcacgtcctaagttgctctgtgttcccggcaacgtacccggca

SEQ ID NO: 108974 - DNA, 80 bp, synthetic construct
  misc_feature 1..80: note = Artificially Synthesized Probe
  source 1..80: mol_type = other DNA
tgtctcttttgttttgttatttcaggggcgtttttcttattctggcctgtgggaagatgccctggagccctggacactgg

SEQ ID NO: 108975 - DNA, 80 bp, synthetic construct
  misc_feature 1..80: note = Artificially Synthesized Probe
  source 1..80: mol_type = other DNA
aacttggatggctgcctttgttgtttttcaaatggactattttattcctagaaaaagatacacaggctaatgtaatgaat

SEQ ID NO: 108976 - DNA, 80 bp, synthetic construct
  misc_feature 1..80: note = Artificially Synthesized Probe
  source 1..80: mol_type = other DNA
cagtgaatcacgcagcctaactcaccaggttactggcctaactcaccatgttcccggccataccccagtgaaccacacag

SEQ ID NO: 108977 - DNA, 80 bp, synthetic construct
  misc_feature 1..80: note = Artificially Synthesized Probe
  source 1..80: mol_type = other DNA
tgaggaatgtgtgaagccatttcctgcccccgtgcagacgctgtcactgggttgcatgagtttgagagaccttcttaaaa

SEQ ID NO: 108978 - DNA, 80 bp, synthetic construct
  misc_feature 1..80: note = Artificially Synthesized Probe
  source 1..80: mol_type = other DNA
gagccacttgcagatgcggtaacccactgtgcggcacagaacctccccgcggggcaggtgggtgcacaggaaagaaacca

SEQ ID NO: 108979 - DNA, 80 bp, synthetic construct
  misc_feature 1..80: note = Artificially Synthesized Probe
  source 1..80: mol_type = other DNA
caaaaattaaccccaggcagattaaagcctaaatggggggaaaaaacctgtaaatgttttgaagaaaacatttgagcctc

SEQ ID NO: 108980 - DNA, 80 bp, synthetic construct
  misc_feature 1..80: note = Artificially Synthesized Probe
  source 1..80: mol_type = other DNA
ccaggaagcgagattcacggcacctctgtcagatgaaagggctgggtctgcgtccagccaggcaatgaagatgagccgcc

SEQ ID NO: 108981 - DNA, 80 bp, synthetic construct
  misc_feature 1..80: note = Artificially Synthesized Probe
  source 1..80: mol_type = other DNA
gtttctccttcagagacgtattgagagaactcggtatcattatgaaatctctcaggcctccaggaaatgacgctctaaaa

SEQ ID NO: 108982 - DNA, 80 bp, synthetic construct
  misc_feature 1..80: note = Artificially Synthesized Probe
  source 1..80: mol_type = other DNA
tgctgtctgagagaaaatcgtgtcatggatcatcatccctgtgctgcaggtgtgtctgatgtttacagagacctctctcg

SEQ ID NO: 108983 - DNA, 80 bp, synthetic construct
  misc_feature 1..80: note = Artificially Synthesized Probe
  source 1..80: mol_type = other DNA
ctccatcatgcgtgcccgatgtcgacagagccctctctcactccatcacgtgtgcccgatgtttacagagccctctctga

SEQ ID NO: 108984 - DNA, 80 bp, synthetic construct
  misc_feature 1..80: note = Artificially Synthesized Probe
  source 1..80: mol_type = other DNA
ctacatcatgtgtggccgatgtttacagagccctctctcattacatcttctgtgcccgatgtttacagagccctctctga

SEQ ID NO: 108985 - DNA, 80 bp, synthetic construct
  misc_feature 1..80: note = Artificially Synthesized Probe
  source 1..80: mol_type = other DNA
ctccttcatatgtggccaatgtttacagagccctccctcactacatcatgtgtggccgatgtttacagagccctctctca

SEQ ID NO: 108986 - DNA, 80 bp, synthetic construct
  misc_feature 1..80: note = Artificially Synthesized Probe
  source 1..80: mol_type = other DNA
ctccatcatgcgtgcccgatgtctacagagccctctctcactccatcatgcgtgcccgatgtctacagagccctctctca

SEQ ID NO: 108987 - DNA, 80 bp, synthetic construct
  misc_feature 1..80: note = Artificially Synthesized Probe
  source 1..80: mol_type = other DNA
ctctgtcatgcatgccggatgtttacagatgtttacagagcgctctctcactccatcatgtgtgcccaatgtctacagag

SEQ ID NO: 108988 - DNA, 80 bp, synthetic construct
  misc_feature 1..80: note = Artificially Synthesized Probe
  source 1..80: mol_type = other DNA
tcggttctgctttctatgccgtctgtgatcccaagaaatgactggaatcctataggtgatcttttgatggtaaagaatca

SEQ ID NO: 108989 - DNA, 80 bp, synthetic construct
  misc_feature 1..80: note = Artificially Synthesized Probe
  source 1..80: mol_type = other DNA
ccctctctcattacatcatgtgtgcccgatgtctacagagccctctctcactccatcatgtatgcccgatgtttacagag

SEQ ID NO: 108990 - DNA, 80 bp, synthetic construct
  misc_feature 1..80: note = Artificially Synthesized Probe
  source 1..80: mol_type = other DNA
gtttacagagccctctttcattacatcatgtgtgcctgatgtttacagagccctctctcattacatcgtgtgtgcctgat

SEQ ID NO: 108991 - DNA, 80 bp, synthetic construct
  misc_feature 1..80: note = Artificially Synthesized Probe
  source 1..80: mol_type = other DNA
ggtgcagtatgtttacagatgtttacagagccctctttcattacatcatatgtgcccaatgtttacagagccctctctca

SEQ ID NO: 108992 - DNA, 80 bp, synthetic construct
  misc_feature 1..80: note = Artificially Synthesized Probe
  source 1..80: mol_type = other DNA
ttcctggctttacaggcaacaaaatgctcccaccagtcaatgaagccacagagcttgccaggagtgaatggggccccacc

SEQ ID NO: 108993 - DNA, 80 bp, synthetic construct
  misc_feature 1..80: note = Artificially Synthesized Probe
  source 1..80: mol_type = other DNA
gtggtgcagccagcagccccgacgcctctgcagtcccagacccagggaagccccgtgtgcaccacggtgtgccctggacc

SEQ ID NO: 108994 - DNA, 80 bp, synthetic construct
  misc_feature 1..80: note = Artificially Synthesized Probe
  source 1..80: mol_type = other DNA
cagcgtggctggcgtccaggaccccagcacctctacacccaggtccttctcagttcccaccggccgggctgacgctggtc

SEQ ID NO: 108995 - DNA, 80 bp, synthetic construct
  misc_feature 1..80: note = Artificially Synthesized Probe
  source 1..80: mol_type = other DNA
cattcccagtgtgtgagctggggccatccggaagttgcgattcatgtcagacactacggggccgaggctcatgtgggtgt

SEQ ID NO: 108996 - DNA, 80 bp, synthetic construct
  misc_feature 1..80: note = Artificially Synthesized Probe
  source 1..80: mol_type = other DNA
gatgtgctgtttaggactaaattcagctgcatataacagaaaacttctgacaaggttggtgtgaacacctgaggcttttc

SEQ ID NO: 108997 - DNA, 80 bp, synthetic construct
  misc_feature 1..80: note = Artificially Synthesized Probe
  source 1..80: mol_type = other DNA
tggccaggtctcactcagtgaccacatctaagcacaggggaggccaaacgtgttattttagctaaacttagggttcgatc

SEQ ID NO: 108998 - DNA, 80 bp, synthetic construct
  misc_feature 1..80: note = Artificially Synthesized Probe
  source 1..80: mol_type = other DNA
tggtcttccaaggattggagcatcttacacgttttttatttcagtttaaaccactttctactcatatgcttttggtttaa

SEQ ID NO: 108999 - DNA, 80 bp, synthetic construct
  misc_feature 1..80: note = Artificially Synthesized Probe
  source 1..80: mol_type = other DNA
gaactggggagaaacatgatgtggtcagattccaaatttccgaagtgcggagcctcaggctcacataagggatcccaggt

SEQ ID NO: 109000 - DNA, 80 bp, synthetic construct
  misc_feature 1..80: note = Artificially Synthesized Probe
  source 1..80: mol_type = other DNA
ctcatttcaaagggccacggtgagcattctggttgctgagtgcctttctcacttgtctcctatgcacagcatatattcac

SEQ ID NO: 109001 - DNA, 80 bp, synthetic construct
  misc_feature 1..80: note = Artificially Synthesized Probe
  source 1..80: mol_type = other DNA
ccgaatttccgacgtggggtgcctcacgctcgcataagggatcccaggtctcccggggcctggtgtgtgcaccacagact

SEQ ID NO: 109002 - DNA, 80 bp, synthetic construct
  misc_feature 1..80: note = Artificially Synthesized Probe
  source 1..80: mol_type = other DNA
ccctccaattccttgacagacaaaaggtgtagaatagcctgggattccaggttcctgggagtcctgcagggcaggtgcag

SEQ ID NO: 109003 - DNA, 80 bp, synthetic construct
  misc_feature 1..80: note = Artificially Synthesized Probe
  source 1..80: mol_type = other DNA
atgctttgcacattaggatttttcagatcttccctattcttggtttacccaaagcaaagcgagttcttgctggggtgaag

SEQ ID NO: 109004 - DNA, 80 bp, synthetic construct
  misc_feature 1..80: note = Artificially Synthesized Probe
  source 1..80: mol_type = other DNA
taaatgctgactcctgcccctcccacaccaagtgtgttcgatgaaggtgctgtttaggggatccaggctaaatacacaac

SEQ ID NO: 109005 - DNA, 80 bp, synthetic construct
  misc_feature 1..80: note = Artificially Synthesized Probe
  source 1..80: mol_type = other DNA
ataattaccaacccccaaaaagggttctctaacgagggtgcattttatcagtcccttaacgaggctgtttgggttcctgc

SEQ ID NO: 109006 - DNA, 80 bp, synthetic construct
  misc_feature 1..80: note = Artificially Synthesized Probe
  source 1..80: mol_type = other DNA
tctttaatacaaatatagtctgatggaaagtctctgaaacccaacctacggaggcccctccctgtcatctcctggtgcat

SEQ ID NO: 109007 - DNA, 80 bp, synthetic construct
  misc_feature 1..80: note = Artificially Synthesized Probe
  source 1..80: mol_type = other DNA
ttgtgtccctgctctgcagagaccgcccagctctaggtgcctgagtgttttctgctctccacatttgaaaccctaacaaa

SEQ ID NO: 109008 - DNA, 80 bp, synthetic construct
  misc_feature 1..80: note = Artificially Synthesized Probe
  source 1..80: mol_type = other DNA
gaatttggcagacagtgatgtgagacgctcacatggcaaactttcttttctgtttctctttggcacaaagcctcagcgct

SEQ ID NO: 109009 - DNA, 80 bp, synthetic construct
  misc_feature 1..80: note = Artificially Synthesized Probe
  source 1..80: mol_type = other DNA
aacacccgttttcctaaagattgacaagaggacgtgttactcaaataaccacccgctcagaagaaaaaacctctgtgcag

SEQ ID NO: 109010 - DNA, 80 bp, synthetic construct
  misc_feature 1..80: note = Artificially Synthesized Probe
  source 1..80: mol_type = other DNA
gccaacagaaccaaggaaagttatatttatgtgggaattattttgtcaaaaaagttccaaaatgttggcaaactctgctc

SEQ ID NO: 109011 - DNA, 80 bp, synthetic construct
  misc_feature 1..80: note = Artificially Synthesized Probe
  source 1..80: mol_type = other DNA
gaccaagctgagaatggagatctgcatgttttaatcaaatgctttctaagccaagtctcctaccctctaacagacgacca

SEQ ID NO: 109012 - DNA, 80 bp, synthetic construct
  misc_feature 1..80: note = Artificially Synthesized Probe
  source 1..80: mol_type = other DNA
agcactttgggaggctgagaagggcggatcacgaggtcaagatgctgagaccatcctggccaacatggtgaaaccccgtc

SEQ ID NO: 109013 - DNA, 80 bp, synthetic construct
  misc_feature 1..80: note = Artificially Synthesized Probe
  source 1..80: mol_type = other DNA
acacatgcttcttgattggatttgacagatttggtgtttgttctttggagacaggtttcctttttattccaggcaggaag

SEQ ID NO: 109014 - DNA, 80 bp, synthetic construct
  misc_feature 1..80: note = Artificially Synthesized Probe
  source 1..80: mol_type = other DNA
ctcaaaaaaaaaaaaaaaaaaaatactagcacagtggaccctgaagcgccagcagcaaaccctctgagatgtgcgtccgg

SEQ ID NO: 109015 - DNA, 80 bp, synthetic construct
  misc_feature 1..80: note = Artificially Synthesized Probe
  source 1..80: mol_type = other DNA
atttgggtctttcttgtactcacacggatgcgatgtgtgattcctggtaggaaacaagaagcagctcactggcaacacca

SEQ ID NO: 109016 - DNA, 80 bp, synthetic construct
  misc_feature 1..80: note = Artificially Synthesized Probe
  source 1..80: mol_type = other DNA
catggggtaacttcagagccttcttctcaacaggcacggcccgcagagccactggaggtaaggatcctctccagccaggg

SEQ ID NO: 109017 - DNA, 80 bp, synthetic construct
  misc_feature 1..80: note = Artificially Synthesized Probe
  source 1..80: mol_type = other DNA
tgaccctttctcccaggcccacggtcttggggcactttctcagggcctgaccttggagcagacaagagctgagcgctcag

SEQ ID NO: 109018 - DNA, 80 bp, synthetic construct
  misc_feature 1..80: note = Artificially Synthesized Probe
  source 1..80: mol_type = other DNA
caagccctaagcccagtacctgtggacgtgaccttatcggggaatagggtctttgtggaggtaactggctaagtttcaat

SEQ ID NO: 109019 - DNA, 80 bp, synthetic construct
  misc_feature 1..80: note = Artificially Synthesized Probe
  source 1..80: mol_type = other DNA
aagaaaccagccctgcccacacattgaccctggactcccagcctgtgagtggtgggcgatgaatctgcggtttgcgccgc

SEQ ID NO: 109020 - DNA, 80 bp, synthetic construct
  misc_feature 1..80: note = Artificially Synthesized Probe
  source 1..80: mol_type = other DNA
aagggctgggctcagaagcctggataccgtggctgcctctgccccaccctcagctctgggacaaaccttcagtcccagcc

SEQ ID NO: 109021 - DNA, 80 bp, synthetic construct
  misc_feature 1..80: note = Artificially Synthesized Probe
  source 1..80: mol_type = other DNA
cttcttaaatccggctctgtgcctatgaagacggaagcagcagcattccgcttgcaggtttttgaaaaaacaaatggggc

SEQ ID NO: 109022 - DNA, 80 bp, synthetic construct
  misc_feature 1..80: note = Artificially Synthesized Probe
  source 1..80: mol_type = other DNA
ttactggtgtggttttaacgtacttagggatatgagtcactgaatttttacccagaggcctgaacccacatgataaactg

SEQ ID NO: 109023 - DNA, 80 bp, synthetic construct
  misc_feature 1..80: note = Artificially Synthesized Probe
  source 1..80: mol_type = other DNA
ctctgttggagctggcctgggcgttgtgggaagggctgggaggaggcccaggacaatgcagaacagacaggacgtttcac

SEQ ID NO: 109024 - DNA, 80 bp, synthetic construct
  misc_feature 1..80: note = Artificially Synthesized Probe
  source 1..80: mol_type = other DNA
aggatggctgcaccattgcaggggtgtgtgtggggctggatcagggaggctggctttgctgttgcaggggtgtgtgtggg

SEQ ID NO: 109025 - DNA, 80 bp, synthetic construct
  misc_feature 1..80: note = Artificially Synthesized Probe
  source 1..80: mol_type = other DNA
tgcaggggtgtgtgtggggccggatcggggaggatggctgcaccattgcaggcgtgtgtgcggggcttgctgactctcgt

SEQ ID NO: 109026 - DNA, 80 bp, synthetic construct
  misc_feature 1..80: note = Artificially Synthesized Probe
  source 1..80: mol_type = other DNA
ttttaacaacagtttccaaacaacaaacaaacccatggagcacgaaacctctggggaccttttgaagctaaacgctgagt

SEQ ID NO: 109027 - DNA, 80 bp, synthetic construct
  misc_feature 1..80: note = Artificially Synthesized Probe
  source 1..80: mol_type = other DNA
tcaggaatagccctcactgcatagagcacatcccggcgggagcgttagagctgagggatgcctgtggctgagccgaggga

SEQ ID NO: 109028 - DNA, 80 bp, synthetic construct
  misc_feature 1..80: note = Artificially Synthesized Probe
  source 1..80: mol_type = other DNA
ggacagccacccaactgcacggcaccatcattttttctgatactgagttgatattttgccctacaggtcactggaggcct

SEQ ID NO: 109029 - DNA, 80 bp, synthetic construct
  misc_feature 1..80: note = Artificially Synthesized Probe
  source 1..80: mol_type = other DNA
tgcctgattctcggcaccatttttaacacggtgggatgtcttggatttttatgataataatttcagtatatgttcaaccc

SEQ ID NO: 109030 - DNA, 80 bp, synthetic construct
  misc_feature 1..80: note = Artificially Synthesized Probe
  source 1..80: mol_type = other DNA
cacagctggctgttttttgttttcgcttttcaagcacacacattttctcacacacagctcagatgtctattttacactga

SEQ ID NO: 109031 - DNA, 80 bp, synthetic construct
  misc_feature 1..80: note = Artificially Synthesized Probe
  source 1..80: mol_type = other DNA
tgtggcacacagttctactggtttctcctggctttattacaaaatgtatcacaaaggttaactcacagtagtgcaaaggt

SEQ ID NO: 109032 - DNA, 80 bp, synthetic construct
  misc_feature 1..80: note = Artificially Synthesized Probe
  source 1..80: mol_type = other DNA
gcaacaggctgaaaccattgtctcgatgtttctgtgtcatgggaccacagggtttaagaacaagcaaggtggcaggacat

SEQ ID NO: 109033 - DNA, 80 bp, synthetic construct
  misc_feature 1..80: note = Artificially Synthesized Probe
  source 1..80: mol_type = other DNA
cctgctggttccctcacctcacccagaatctttttcgtatgtctgtcagtcaaagtggtcacttcatccatagttattcc

SEQ ID NO: 109034 - DNA, 80 bp, synthetic construct
  misc_feature 1..80: note = Artificially Synthesized Probe
  source 1..80: mol_type = other DNA
attctcaaatttttctccaaatttttagcagcatcttctatttatcttccaagcattgctgacaagggaggtggccaggt

SEQ ID NO: 109035 - DNA, 80 bp, synthetic construct
  misc_feature 1..80: note = Artificially Synthesized Probe
  source 1..80: mol_type = other DNA
gagggagggggatgctgcaggaggaagctggggctctgctgtgcccaacactgaagctgggcccgtgtggggcggagagt

SEQ ID NO: 109036 - DNA, 80 bp, synthetic construct
  misc_feature 1..80: note = Artificially Synthesized Probe
  source 1..80: mol_type = other DNA
cctagggaggaggagatggcagatctgcacaggctctgcgctcctctctctccggagcgtcctctcctctgtgtggcagg

SEQ ID NO: 109037 - DNA, 80 bp, synthetic construct
  misc_feature 1..80: note = Artificially Synthesized Probe
  source 1..80: mol_type = other DNA
cctcatctgggatgacaaccagatccagctctgaggtccgtgccctgagtagaaaagttcacacagcaaagtttccggag

SEQ ID NO: 109038 - DNA, 80 bp, synthetic construct
  misc_feature 1..80: note = Artificially Synthesized Probe
  source 1..80: mol_type = other DNA
cacaaagcaggagtgtctgccaggagcacgtgtgcccacacagcaggcctggccccagtggctcagatcaggaacagaca

SEQ ID NO: 109039 - DNA, 80 bp, synthetic construct
  misc_feature 1..80: note = Artificially Synthesized Probe
  source 1..80: mol_type = other DNA
cagggagagcctcccagccaccacccacactcctgcagggagagccccgtcaccacccacactcctgcagggagagcctc

SEQ ID NO: 109040 - DNA, 80 bp, synthetic construct
  misc_feature 1..80: note = Artificially Synthesized Probe
  source 1..80: mol_type = other DNA
ggagagccccagctactgtacacactcctgcagggagagccccagccactgtacacactcctgcagggagagcctcccag

SEQ ID NO: 109041 - DNA, 80 bp, synthetic construct
  misc_feature 1..80: note = Artificially Synthesized Probe
  source 1..80: mol_type = other DNA
agcctcccagccaccacccacactcctgcagggagagccccccagctaccacccacactcctgcagggagagccccccag

SEQ ID NO: 109042 - DNA, 80 bp, synthetic construct
  misc_feature 1..80: note = Artificially Synthesized Probe
  source 1..80: mol_type = other DNA
gatcatttgaggtcaggagttcaagaccagcctgaccaaatggtgaaacctcgtctctactaaaaatacaaaaaaaatta

SEQ ID NO: 109043 - DNA, 80 bp, synthetic construct
  misc_feature 1..80: note = Artificially Synthesized Probe
  source 1..80: mol_type = other DNA
agagccccgtcaccacccacactcctgcagggagagccccccagctaccacccacactcctgcagggagagccccccagc

SEQ ID NO: 109044 - DNA, 80 bp, synthetic construct
  misc_feature 1..80: note = Artificially Synthesized Probe
  source 1..80: mol_type = other DNA
cctcccagccaccacccacactcctgcagggagagccccgtcaccacccacactcctgtagggagagccccggccaccac

SEQ ID NO: 109045 - DNA, 80 bp, synthetic construct
  misc_feature 1..80: note = Artificially Synthesized Probe
  source 1..80: mol_type = other DNA
ccagccactgtacacactcctgcagggagagccccggccaccacccacactcctgcagggagagccccccagctaccacc

SEQ ID NO: 109046 - DNA, 80 bp, synthetic construct
  misc_feature 1..80: note = Artificially Synthesized Probe
  source 1..80: mol_type = other DNA
ccagccaccacccacactcctgcagggagagcctcccagccaccacccacactcctgcagggagagccccccagccacca

SEQ ID NO: 109047 - DNA, 80 bp, synthetic construct
  misc_feature 1..80: note = Artificially Synthesized Probe
  source 1..80: mol_type = other DNA
gccaccacccacactcctgcagggagagtcccccagccaccacccacactcctgcagggagagccccagctactgtacac

SEQ ID NO: 109048 - DNA, 80 bp, synthetic construct
  misc_feature 1..80: note = Artificially Synthesized Probe
  source 1..80: mol_type = other DNA
actgtacacactcctgcagggagagcccccagctctgcagcacagaccccagagacagcatgcggcttcgtgattcctgt

SEQ ID NO: 109049 - DNA, 80 bp, synthetic construct
  misc_feature 1..80: note = Artificially Synthesized Probe
  source 1..80: mol_type = other DNA
aggccacctgaggacacacacctgagggtggtgcccaagccaagactctctctagggatgtccacgtgaccccagagaag

SEQ ID NO: 109050 - DNA, 80 bp, synthetic construct
  misc_feature 1..80: note = Artificially Synthesized Probe
  source 1..80: mol_type = other DNA
taatgaattttcatctttgttctcctataggaacgtttcagagctgagtccacatatctaattgagtgctgtgtgaacgc

SEQ ID NO: 109051 - DNA, 80 bp, synthetic construct
  misc_feature 1..80: note = Artificially Synthesized Probe
  source 1..80: mol_type = other DNA
aagcaagccatgtgcagtttatacagacataatacaagcaacgcccaattgtatttacccaaatggcatagaaaagtaag

SEQ ID NO: 109052 - DNA, 80 bp, synthetic construct
  misc_feature 1..80: note = Artificially Synthesized Probe
  source 1..80: mol_type = other DNA
cagtttcttatatttatacaaatacacatagttaaaatgaaacagaactggcagcattcacggtccgtccaaccagggaa

SEQ ID NO: 109053 - DNA, 80 bp, synthetic construct
  misc_feature 1..80: note = Artificially Synthesized Probe
  source 1..80: mol_type = other DNA
aacaggcacagatgggctggcccaaagttaattaaaaaccaagaagaggataaagaaatgtggcccagtccagggagctg

SEQ ID NO: 109054 - DNA, 80 bp, synthetic construct
  misc_feature 1..80: note = Artificially Synthesized Probe
  source 1..80: mol_type = other DNA
gtgcgtgctccatggtgacactgccccacggggtccaaatgctgaattcctgtaccttttacatacgtgaagtctataca

SEQ ID NO: 109055 - DNA, 80 bp, synthetic construct
  misc_feature 1..80: note = Artificially Synthesized Probe
  source 1..80: mol_type = other DNA
aacatgcagctggtgatgccctgtggcatctgcctcctgccctcggacatgctggcccgccctccctgagtcttgcaggg

SEQ ID NO: 109056 - DNA, 80 bp, synthetic construct
  misc_feature 1..80: note = Artificially Synthesized Probe
  source 1..80: mol_type = other DNA
ggagaccttgcttggaggtgtctgcagggccttgaaggggacaccgacccttcctgactcccagcctctgcgttgccagc

SEQ ID NO: 109057 - DNA, 80 bp, synthetic construct
  misc_feature 1..80: note = Artificially Synthesized Probe
  source 1..80: mol_type = other DNA
ttcgaggactctgtgtgccggagtctgtcctccccatcacagggacactgctgcttcgaggactctgtgtgccggagtct

SEQ ID NO: 109058 - DNA, 80 bp, synthetic construct
  misc_feature 1..80: note = Artificially Synthesized Probe
  source 1..80: mol_type = other DNA
ttgtccttcctgtcgcagggacatggccgcatcaaggacctactgcagcacggtgcctccttcaccaagcgaactgtgtc

SEQ ID NO: 109059 - DNA, 80 bp, synthetic construct
  misc_feature 1..80: note = Artificially Synthesized Probe
  source 1..80: mol_type = other DNA
ttctgaacacagaatgtcttgcttatttcacacgtgtgctaatttgctgtacaccaccggcttatttaattgttgtgcat

SEQ ID NO: 109060 - DNA, 80 bp, synthetic construct
  misc_feature 1..80: note = Artificially Synthesized Probe
  source 1..80: mol_type = other DNA
tgcaggcttggctggtcaagaatcatgttctagaaattatttccagtgctgagcacagtccctgagatttaaaaacgctt

SEQ ID NO: 109061 - DNA, 80 bp, synthetic construct
  misc_feature 1..80: note = Artificially Synthesized Probe
  source 1..80: mol_type = other DNA
cattaaaagttgtacttgcctgcaatgaacaattattggacaagaacggcccctgtagcacttgtttacttttctgaaat

SEQ ID NO: 109062 - DNA, 80 bp, synthetic construct
  misc_feature 1..80: note = Artificially Synthesized Probe
  source 1..80: mol_type = other DNA
ggaccggctttaaagtcacagcagtttcctgaaagatgagggggaggaggacagtgacgctcacagcacagccacttgtc

SEQ ID NO: 109063 - DNA, 80 bp, synthetic construct
  misc_feature 1..80: note = Artificially Synthesized Probe
  source 1..80: mol_type = other DNA
tcagttttgcatggaccagcattctccaagcgctctgatcagtcttacaggagaagtaggctgtgtggtctgggagcctt

SEQ ID NO: 109064 - DNA, 80 bp, synthetic construct
  misc_feature 1..80: note = Artificially Synthesized Probe
  source 1..80: mol_type = other DNA
tgccccagtgcagagtggagacgaggtcttcccctccttcccagcttgcctgggcggcgacgcgtctcagagacctctgc

SEQ ID NO: 109065 - DNA, 80 bp, synthetic construct
  misc_feature 1..80: note = Artificially Synthesized Probe
  source 1..80: mol_type = other DNA
aattctttaaaaactgcagcgtggttcactggccctgtgatgggctgaatgcgcccccaagttcatgtggcagccttgac

SEQ ID NO: 109066 - DNA, 80 bp, synthetic construct
  misc_feature 1..80: note = Artificially Synthesized Probe
  source 1..80: mol_type = other DNA
aagatgaagatggcatctaccaggcgggggagtggcctcaggagaaacgggctctgcccacgcctcgacctcggacttcc

SEQ ID NO: 109067 - DNA, 80 bp, synthetic construct
  misc_feature 1..80: note = Artificially Synthesized Probe
  source 1..80: mol_type = other DNA
agctaattgtgcgatttctgccggccacgtggttttgatccaaaagcatttgaaagctgctctgaagatgcagaaaagct

SEQ ID NO: 109068 - DNA, 80 bp, synthetic construct
  misc_feature 1..80: note = Artificially Synthesized Probe
  source 1..80: mol_type = other DNA
gcaccatccagaggccccagatgccgacacctggggacgggctgtatcaggcagatgtttcctcccgggctccacctggg

SEQ ID NO: 109069 - DNA, 80 bp, synthetic construct
  misc_feature 1..80: note = Artificially Synthesized Probe
  source 1..80: mol_type = other DNA
ctgtgccactttctccaaggtctggggccgccaccctgtggtgcctctggaagctgccatgtggggctggcccacggtga

SEQ ID NO: 109070 - DNA, 80 bp, synthetic construct
  misc_feature 1..80: note = Artificially Synthesized Probe
  source 1..80: mol_type = other DNA
tctgagacccaggtttgggccccaaggtggtaccatcgagggaggcatgttctggcaggtgacagcccctcctctgtgcc

SEQ ID NO: 109071 - DNA, 80 bp, synthetic construct
  misc_feature 1..80: note = Artificially Synthesized Probe
  source 1..80: mol_type = other DNA
tccaagcactcccctcctgggcacgtggctgtgtgtgcatgtgtggctgggtgggcaggggggttgactctggccaccga

SEQ ID NO: 109072 - DNA, 80 bp, synthetic construct
  misc_feature 1..80: note = Artificially Synthesized Probe
  source 1..80: mol_type = other DNA
tcttctcaacatgacgttattaatcggagctttaaaaccaatgttacacctctacactgctttcttcttccaaggagggg

SEQ ID NO: 109073 - DNA, 80 bp, synthetic construct
  misc_feature 1..80: note = Artificially Synthesized Probe
  source 1..80: mol_type = other DNA
cagtcctgcaccaggggatgaacgaggaatcggcttctgctctgctgaacatcccactggttcatgtccacttgtttggg

SEQ ID NO: 109074 - DNA, 80 bp, synthetic construct
  misc_feature 1..80: note = Artificially Synthesized Probe
  source 1..80: mol_type = other DNA
tggggccacgacggaccctgcaaagctggtctgactgtgccgagcctgtcgggggttgggggaaggaaggcgggagctcg

SEQ ID NO: 109075 - DNA, 80 bp, synthetic construct
  misc_feature 1..80: note = Artificially Synthesized Probe
  source 1..80: mol_type = other DNA
gtgggtcacagccaggtgaatgggccctcctggggctgcagccccaggtcctgatgttacttgtgccagcctggccacag

SEQ ID NO: 109076 - DNA, 80 bp, synthetic construct
  misc_feature 1..80: note = Artificially Synthesized Probe
  source 1..80: mol_type = other DNA
ggcctccttccccgctgccgcgcaacctctgacagccacgtgtactctcctgctttagaacaaggacctttcccttttgt

SEQ ID NO: 109077 - DNA, 80 bp, synthetic construct
  misc_feature 1..80: note = Artificially Synthesized Probe
  source 1..80: mol_type = other DNA
catcctggcctgctgggcatttgtttcatcaattaagagtcagtgagcaggaaacaacattgcatattcacacaaacaca

SEQ ID NO: 109078 - DNA, 80 bp, synthetic construct
  misc_feature 1..80: note = Artificially Synthesized Probe
  source 1..80: mol_type = other DNA
agcacacacacgaccatatgtacacacacgaacatgcacgatcacacccatatccctcgtgtacacacacacacacatac

SEQ ID NO: 109079 - DNA, 80 bp, synthetic construct
  misc_feature 1..80: note = Artificially Synthesized Probe
  source 1..80: mol_type = other DNA
gctgtctggcccgagtcccaggctcgccccagtgcttgccacacacaccctggggtctcctcagaagcagtgcctgtgcc

SEQ ID NO: 109080 - DNA, 80 bp, synthetic construct
  misc_feature 1..80: note = Artificially Synthesized Probe
  source 1..80: mol_type = other DNA
cgcccccgacgccctggatacacggccaccaccccgcccccgacgccctggatacacggccaccaccccgtccccgacgc

SEQ ID NO: 109081 - DNA, 80 bp, synthetic construct
  misc_feature 1..80: note = Artificially Synthesized Probe
  source 1..80: mol_type = other DNA
cacggccaccaccccgcccctgacgccctggatacacggccaccaccccgcccctgacgccctggatacacggccaccac

SEQ ID NO: 109082 - DNA, 80 bp, synthetic construct
  misc_feature 1..80: note = Artificially Synthesized Probe
  source 1..80: mol_type = other DNA
cggccaccaccctgtccctgacgccctggatacacggccacctggatacacggccaccaccccgcccctgacgctctgga

SEQ ID NO: 109083 - DNA, 80 bp, synthetic construct
  misc_feature 1..80: note = Artificially Synthesized Probe
  source 1..80: mol_type = other DNA
cttagtccagacatcatattgaaaactgttatttccatactgtctaaaaacagcatcttcaagggcatttgtgacccgtc

SEQ ID NO: 109084 - DNA, 80 bp, synthetic construct
  misc_feature 1..80: note = Artificially Synthesized Probe
  source 1..80: mol_type = other DNA
caccaccccgcccagactgaagggtgacaccagaggcaaaaagagtgaactagattcacgtaaatcaacatgaataaact

SEQ ID NO: 109085 - DNA, 80 bp, synthetic construct
  misc_feature 1..80: note = Artificially Synthesized Probe
  source 1..80: mol_type = other DNA
cacagtccgtgagcaaagggccgcaggcgtggtggaggtgtgcccaggcccagcatgcccccagagtccacaagagcagg

SEQ ID NO: 109086 - DNA, 80 bp, synthetic construct
  misc_feature 1..80: note = Artificially Synthesized Probe
  source 1..80: mol_type = other DNA
aaagggcccgaaacagttcacgagtggggtgtgggctgtgggtccagacacagttatcctaaggccaggcacaggaaggg

SEQ ID NO: 109087 - DNA, 80 bp, synthetic construct
  misc_feature 1..80: note = Artificially Synthesized Probe
  source 1..80: mol_type = other DNA
ggagtttgccaagtgatgagttttcctgtctgagcttgtttccatcatctccacgatgaacgtaggacaccaggacattg

SEQ ID NO: 109088 - DNA, 80 bp, synthetic construct
  misc_feature 1..80: note = Artificially Synthesized Probe
  source 1..80: mol_type = other DNA
gaactggttaaattttttaaagggaagaaagtatgacacatggagaaaaaggtgcagcccatttcccagcctgaggactg

SEQ ID NO: 109089 - DNA, 80 bp, synthetic construct
  misc_feature 1..80: note = Artificially Synthesized Probe
  source 1..80: mol_type = other DNA
tggtaactgggaaatgctcgacatggaaaattctgcttgatcatctgagatgccacctcagtcttggggaactcaaggcc

SEQ ID NO: 109090 - DNA, 80 bp, synthetic construct
  misc_feature 1..80: note = Artificially Synthesized Probe
  source 1..80: mol_type = other DNA
tcccgaaacaccctgacacgtgtaattccaaatctgtaagtactaagttttaaaatgcgtgtgagcaagtcaaatttctg

SEQ ID NO: 109091 - DNA, 80 bp, synthetic construct
  misc_feature 1..80: note = Artificially Synthesized Probe
  source 1..80: mol_type = other DNA
gggaggtctgtggactccaggccgctcacttatccccatgcatataaaattcctagggataatttcatttgatgacagag

SEQ ID NO: 109092 - DNA, 80 bp, synthetic construct
  misc_feature 1..80: note = Artificially Synthesized Probe
  source 1..80: mol_type = other DNA
ttttgcaagggatcaaacccaccatttagtccattcccaaggcactgaggaccttgggaatttagccacatcaatgcagt

SEQ ID NO: 109093 - DNA, 80 bp, synthetic construct
  misc_feature 1..80: note = Artificially Synthesized Probe
  source 1..80: mol_type = other DNA
agtgagctgaagccttgtcctggtggagaagggctctctggtgaagctttcccaggcatttttctgctaaagtttttata

SEQ ID NO: 109094 - DNA, 80 bp, synthetic construct
  misc_feature 1..80: note = Artificially Synthesized Probe
  source 1..80: mol_type = other DNA
accaacccctaaatcaaaacagaggactgatttaaaattcactgtgtaaatccaggtgtttttttttaattcagtgaaac

SEQ ID NO: 109095 - DNA, 80 bp, synthetic construct
  misc_feature 1..80: note = Artificially Synthesized Probe
  source 1..80: mol_type = other DNA
gtctgctgttgcttcgatgggaccccttccgcctctcggtagccactgctgtggttgtgcttggtcatcaggatggtact

SEQ ID NO: 109096 - DNA, 80 bp, synthetic construct
  misc_feature 1..80: note = Artificially Synthesized Probe
  source 1..80: mol_type = other DNA
aattttccagccagaattatgtaagctgaaccagccgagatgtctatggtgttggctgctgtttctgctgttaattgttg

SEQ ID NO: 109097 - DNA, 80 bp, synthetic construct
  misc_feature 1..80: note = Artificially Synthesized Probe
  source 1..80: mol_type = other DNA
cttttcataaagcatcaatgacttcatcattgttccacccatgtttcaccacaattttgatgtttgttcttccttcaatt

SEQ ID NO: 109098 - DNA, 80 bp, synthetic construct
  misc_feature 1..80: note = Artificially Synthesized Probe
  source 1..80: mol_type = other DNA
cacattttccatggaccttcttcagaatctcttccataacaagcctgatggctgcttggggtgctggctgaactcagagt

SEQ ID NO: 109099 - DNA, 80 bp, synthetic construct
  misc_feature 1..80: note = Artificially Synthesized Probe
  source 1..80: mol_type = other DNA
gcacaccacagtcatctgtttcttaaagtactttgatgttgatctttctgtgagactctggaagtggagatagctttggg

SEQ ID NO: 109100 - DNA, 80 bp, synthetic construct
  misc_feature 1..80: note = Artificially Synthesized Probe
  source 1..80: mol_type = other DNA
tctatttacatcttccgacacactggaaatctagcctgagaaatgatctttaaagggaagaatagagaagcgctgccgcc

SEQ ID NO: 109101 - DNA, 80 bp, synthetic construct
  misc_feature 1..80: note = Artificially Synthesized Probe
  source 1..80: mol_type = other DNA
agctggctcccagagcttccaaagttgacggttctgaactaggcaccaatctttcctcttttctcagctggggaggccca

SEQ ID NO: 109102 - DNA, 80 bp, synthetic construct
  misc_feature 1..80: note = Artificially Synthesized Probe
  source 1..80: mol_type = other DNA
tgatgcaggctgacatatgagaactgtgggcctgggggatttgggttgttctgcttatgggaaagggcaggcgtgacctc

SEQ ID NO: 109103 - DNA, 80 bp, synthetic construct
  misc_feature 1..80: note = Artificially Synthesized Probe
  source 1..80: mol_type = other DNA
gactcactggcacaacttcaccctcctccttttatttttttttgtaatacaaaggcttgaggtacagtattatttttgga

SEQ ID NO: 109104 - DNA, 80 bp, synthetic construct
  misc_feature 1..80: note = Artificially Synthesized Probe
  source 1..80: mol_type = other DNA
acccctaaatacctacacacccacacacccacaaaaatgcacacacacccatgtctacacatgtgcactcagctccagaa

SEQ ID NO: 109105 - DNA, 80 bp, synthetic construct
  misc_feature 1..80: note = Artificially Synthesized Probe
  source 1..80: mol_type = other DNA
tgtgctgcgtgaactcctacaagaaacaaattaagaaaaatggaagtatggaccatcaatgggaaaatgtcacgtttctt

SEQ ID NO: 109106 - DNA, 80 bp, synthetic construct
  misc_feature 1..80: note = Artificially Synthesized Probe
  source 1..80: mol_type = other DNA
cacacacacatacccagcgcctccccacacacacccagtgtcctccccacacacacatacacagcgcttctccacacaca

SEQ ID NO: 109107 - DNA, 80 bp, synthetic construct
  misc_feature 1..80: note = Artificially Synthesized Probe
  source 1..80: mol_type = other DNA
tcctccccacacacacatacccagtgtcctccccacacacgcatacccagtgtcctccccacacacccatacccagtgtc

SEQ ID NO: 109108 - DNA, 80 bp, synthetic construct
  misc_feature 1..80: note = Artificially Synthesized Probe
  source 1..80: mol_type = other DNA
ccacacacgcatatccagtgcctccgcacacatggatacccagtgccttcccacgctatgtcctcacagctgtttcccct

SEQ ID NO: 109109 - DNA, 80 bp, synthetic construct
  misc_feature 1..80: note = Artificially Synthesized Probe
  source 1..80: mol_type = other DNA
tcagtccacatgcccctccttggagtgtcccctccccgccctgtcagggctcctgagagtttcctcagcttcctggcggg

SEQ ID NO: 109110 - DNA, 80 bp, synthetic construct
  misc_feature 1..80: note = Artificially Synthesized Probe
  source 1..80: mol_type = other DNA
cactagaacttgacagaggaagccacaaagcttcctggccatggaaagtgggaactggccacggaacaggggaactgccc

SEQ ID NO: 109111 - DNA, 80 bp, synthetic construct
  misc_feature 1..80: note = Artificially Synthesized Probe
  source 1..80: mol_type = other DNA
ttatccaccaatgtttccgccaccagcgagtgctgagcaagtatctgttgaataaatgaatgtgcaccaggaaagaaagc

SEQ ID NO: 109112 - DNA, 80 bp, synthetic construct
  misc_feature 1..80: note = Artificially Synthesized Probe
  source 1..80: mol_type = other DNA
gggccgggaggagaacgtaccgtcctcaaggtccgtctcgccgtgggggccgggaggagaacgtactgtcctcaaggtct

SEQ ID NO: 109113 - DNA, 80 bp, synthetic construct
  misc_feature 1..80: note = Artificially Synthesized Probe
  source 1..80: mol_type = other DNA
gagaacgtactgtcctcaagcagaatttcctgcgctggtctctgggatgggcagagggccctgctttcaggtactgagga

SEQ ID NO: 109114 - DNA, 80 bp, synthetic construct
  misc_feature 1..80: note = Artificially Synthesized Probe
  source 1..80: mol_type = other DNA
tcccactgactttgacggctctaggtctgccacaactccggcaaagtcccaggaccctgagcagcctcgggaagagctct

SEQ ID NO: 109115 - DNA, 80 bp, synthetic construct
  misc_feature 1..80: note = Artificially Synthesized Probe
  source 1..80: mol_type = other DNA
cagtctgcctctggcctccctctgtttccccctccacaactgggcaggctgctcccttcaccccaacactccatggctcc

SEQ ID NO: 109116 - DNA, 80 bp, synthetic construct
  misc_feature 1..80: note = Artificially Synthesized Probe
  source 1..80: mol_type = other DNA
acggcggagcccaaaccacagagctttctcctcctctcttcctattccctgaggagttaccagaacaaggcccttctgat

SEQ ID NO: 109117 - DNA, 80 bp, synthetic construct
  misc_feature 1..80: note = Artificially Synthesized Probe
  source 1..80: mol_type = other DNA
gccccgatcctgcctctgcttctgtccacatggccccagccacagtgccttcctgccagccaaccatgttcacaaggaag

SEQ ID NO: 109118 - DNA, 80 bp, synthetic construct
  misc_feature 1..80: note = Artificially Synthesized Probe
  source 1..80: mol_type = other DNA
aaggcaggggtttgcttgcaggtagcaaagtaacccaagcagacacacactcatgcacacacacacagagacacactcat

SEQ ID NO: 109119 - DNA, 80 bp, synthetic construct
  misc_feature 1..80: note = Artificially Synthesized Probe
  source 1..80: mol_type = other DNA
atacacacacactcatgcacatacacagagaaacacttgtgcacggagacacacttgtgcacatacacagagacacaggc

SEQ ID NO: 109120 - DNA, 80 bp, synthetic construct
  misc_feature 1..80: note = Artificially Synthesized Probe
  source 1..80: mol_type = other DNA
aggaggagcccaggctgtgtcggggtcaccttgacttcactattttcgaaatgctgaattttgctgcaaagttttcctaa

SEQ ID NO: 109121 - DNA, 80 bp, synthetic construct
  misc_feature 1..80: note = Artificially Synthesized Probe
  source 1..80: mol_type = other DNA
aaacctctatcggcagtttctgataaccttgctccgggtcacacgttatcttcctgaagtggcagccacggaagctgcaa

SEQ ID NO: 109122 - DNA, 80 bp, synthetic construct
  misc_feature 1..80: note = Artificially Synthesized Probe
  source 1..80: mol_type = other DNA
ttcaggcaccaatatcagaaaatgagtcattgccgggaacttcactgtgcagtcccagaagtcttaattccagcagacag

SEQ ID NO: 109123 - DNA, 80 bp, synthetic construct
  misc_feature 1..80: note = Artificially Synthesized Probe
  source 1..80: mol_type = other DNA
aggggctgagtccccaggtcaggcatccccaggggggcacggggctgcagagggtcaggaggggccgagcccccaggcca

SEQ ID NO: 109124 - DNA, 80 bp, synthetic construct
  misc_feature 1..80: note = Artificially Synthesized Probe
  source 1..80: mol_type = other DNA
ggggccgagcccccaggccaggcatccccagggcaggcacggggctgcagagggtcagcagggcaggtatgccttggcca

SEQ ID NO: 109125 - DNA, 80 bp, synthetic construct
  misc_feature 1..80: note = Artificially Synthesized Probe
  source 1..80: mol_type = other DNA
tgggtgcccgagtgggctcatccaagccctgtttttgtgttggtctcctgttgtgacccatcccctgctatttctgctgg

SEQ ID NO: 109126 - DNA, 80 bp, synthetic construct
  misc_feature 1..80: note = Artificially Synthesized Probe
  source 1..80: mol_type = other DNA
atctgtgctgccctctggtctgtgaaacacgaggctgatgcccaaaaatgggcgggctcagacacaggcacaaccagcaa

SEQ ID NO: 109127 - DNA, 80 bp, synthetic construct
  misc_feature 1..80: note = Artificially Synthesized Probe
  source 1..80: mol_type = other DNA
taaagccacagcattttcttttcctgtggcaagttatccctttccttagaaaaaagtactgttggatgctgacaccacca

SEQ ID NO: 109128 - DNA, 80 bp, synthetic construct
  misc_feature 1..80: note = Artificially Synthesized Probe
  source 1..80: mol_type = other DNA
ggctgggagaggccgcactgcaccccaagagtgaggatgggtcgggggcagcgggaatggtgctctatggggcttcacat

SEQ ID NO: 109129 - DNA, 80 bp, synthetic construct
  misc_feature 1..80: note = Artificially Synthesized Probe
  source 1..80: mol_type = other DNA
tccaggaggacgacgttctgaaatgggccttgatgccctggacggcctcgctagcctttacccacaggggaaggtgcagg

SEQ ID NO: 109130 - DNA, 80 bp, synthetic construct
  misc_feature 1..80: note = Artificially Synthesized Probe
  source 1..80: mol_type = other DNA
gggtttcctcagggaccccagatctgagtgcagcaccagggtttcctcggggaccccgggtccgagtgcagcaccagggt

SEQ ID NO: 109131 - DNA, 80 bp, synthetic construct
  misc_feature 1..80: note = Artificially Synthesized Probe
  source 1..80: mol_type = other DNA
ggacccgagatctgagtgcagcgccagggtttcctcagggaccttgggtccaagtgccatggtcagggtttccttgggga

SEQ ID NO: 109132 - DNA, 80 bp, synthetic construct
  misc_feature 1..80: note = Artificially Synthesized Probe
  source 1..80: mol_type = other DNA
aggtgatgtctctggacccagcatcaaagcccgggtcttggtgggtggtgcagaaggtgttcctaacagtgggctgggga

SEQ ID NO: 109133 - DNA, 80 bp, synthetic construct
  misc_feature 1..80: note = Artificially Synthesized Probe
  source 1..80: mol_type = other DNA
atcagctctgcttgaccggggagaagaggaacaggaaatatgtcaggggtgagattttaaaatgtgtgtgaatataaaca

SEQ ID NO: 109134 - DNA, 80 bp, synthetic construct
  misc_feature 1..80: note = Artificially Synthesized Probe
  source 1..80: mol_type = other DNA
cagctttgctgtctaggaatttataagtgtaagagagcaaagattcagttccccaaaagataccctcttggtggcctgtg

SEQ ID NO: 109135 - DNA, 80 bp, synthetic construct
  misc_feature 1..80: note = Artificially Synthesized Probe
  source 1..80: mol_type = other DNA
ggtcagtgtgataccatgcacccacacttactcaccgagaagctctcggattccgtggggctggaagggtcagtgtgata

SEQ ID NO: 109136 - DNA, 80 bp, synthetic construct
  misc_feature 1..80: note = Artificially Synthesized Probe
  source 1..80: mol_type = other DNA
gagctctctcagattccatggggctggaagggtcagtgtgataccatgcacccacgcttactcactgaggagctctctca

SEQ ID NO: 109137 - DNA, 80 bp, synthetic construct
  misc_feature 1..80: note = Artificially Synthesized Probe
  source 1..80: mol_type = other DNA
tccctggagaataaagaggttggaaaacagacccacttatgtctacttctacaattttccattcctgactcaggctgtaa

SEQ ID NO: 109138 - DNA, 80 bp, synthetic construct
  misc_feature 1..80: note = Artificially Synthesized Probe
  source 1..80: mol_type = other DNA
gtgataccgtgcacccacacttactcaccgaggagctctcggattccgtggggctggaagggtcagtgtgataccatgca

SEQ ID NO: 109139 - DNA, 80 bp, synthetic construct
  misc_feature 1..80: note = Artificially Synthesized Probe
  source 1..80: mol_type = other DNA
agtgtgataccgtgcacccacaattactcaccgaggagctctctcagattccatggggctggaagggtcagtgtgatacc

SEQ ID NO: 109140 - DNA, 80 bp, synthetic construct
  misc_feature 1..80: note = Artificially Synthesized Probe
  source 1..80: mol_type = other DNA
gctcttggattctgtgttttcaagcctgcccatgtgtaggaaaagcacagcctccatgagaacagcaggaacacaccccc

SEQ ID NO: 109141 - DNA, 80 bp, synthetic construct
  misc_feature 1..80: note = Artificially Synthesized Probe
  source 1..80: mol_type = other DNA
ttctgatttatggtaattgtcaacaaaagcaaaaacacagacaattttaaccctgcagtagctgggagttaaccggcatg

SEQ ID NO: 109142 - DNA, 80 bp, synthetic construct
  misc_feature 1..80: note = Artificially Synthesized Probe
  source 1..80: mol_type = other DNA
cctcaccccacgtgagcccggcttactcgtggcctggaggactttgagtgagactaatttccatatcaaacccaatttag

SEQ ID NO: 109143 - DNA, 80 bp, synthetic construct
  misc_feature 1..80: note = Artificially Synthesized Probe
  source 1..80: mol_type = other DNA
atttttatgaaaatttgggcaacataatgttttcacataaactgacagtccttgagataatcccgttattgtctggttga

SEQ ID NO: 109144 - DNA, 80 bp, synthetic construct
  misc_feature 1..80: note = Artificially Synthesized Probe
  source 1..80: mol_type = other DNA
accagaatttgtttgcgttcacttagagacgatctgtaaattagcagcttcacaatcaggccctgtgatgttgctgctga

SEQ ID NO: 109145 - DNA, 80 bp, synthetic construct
  misc_feature 1..80: note = Artificially Synthesized Probe
  source 1..80: mol_type = other DNA
aaagaagtaaaattgcaacacaagttatattgcttcaacatcaagaattttttagggtccccgtgctagagggggcaccg

SEQ ID NO: 109146 - DNA, 80 bp, synthetic construct
  misc_feature 1..80: note = Artificially Synthesized Probe
  source 1..80: mol_type = other DNA
gcatcgttgacggtgacacatttgtaccatgtggtaatttttactttattgctatggctggatggctcagactgaaccgt

SEQ ID NO: 109147 - DNA, 80 bp, synthetic construct
  misc_feature 1..80: note = Artificially Synthesized Probe
  source 1..80: mol_type = other DNA
gatgtattcctctgaagctagcttgacccaatgctatcttttggaacaaatgataaaaaggcactctgagttaaatgaga

SEQ ID NO: 109148 - DNA, 80 bp, synthetic construct
  misc_feature 1..80: note = Artificially Synthesized Probe
  source 1..80: mol_type = other DNA
tagaatcaagcaggctcaactatcagaccaaatggtgagtggctttgctttgaaaggccttttgcctttggcagaggagt

SEQ ID NO: 109149 - DNA, 80 bp, synthetic construct
  misc_feature 1..80: note = Artificially Synthesized Probe
  source 1..80: mol_type = other DNA
tgtttacagtagtcattatgataaaatgaagtcatgagggtatgtggagatggaggtgtttacaggaatcattacggtaa

SEQ ID NO: 109150 - DNA, 80 bp, synthetic construct
  misc_feature 1..80: note = Artificially Synthesized Probe
  source 1..80: mol_type = other DNA
aggaaggagatgcagacacaggtgcacacagaggggtgaggacttgaggatgcagagacggcatctgaagcccaggagag

SEQ ID NO: 109151 - DNA, 80 bp, synthetic construct
  misc_feature 1..80: note = Artificially Synthesized Probe
  source 1..80: mol_type = other DNA
tacaccctagacatctgaggccaagcccctgtgactgcagggatgcgtctctgcctacgagaaaggagaggatttcctgt

SEQ ID NO: 109152 - DNA, 80 bp, synthetic construct
  misc_feature 1..80: note = Artificially Synthesized Probe
  source 1..80: mol_type = other DNA
tttgtttcacaggaatgaaagtgaaggtaaagtttgtgcctgtaaactactaaagagctactagggcccagtgtctaggg

SEQ ID NO: 109153 - DNA, 80 bp, synthetic construct
  misc_feature 1..80: note = Artificially Synthesized Probe
  source 1..80: mol_type = other DNA
actactgttgaagaacagaacacaccaccccaaaaatgactgtcatacatcagcacatgccaccccaaaaatgactgtcg

SEQ ID NO: 109154 - DNA, 80 bp, synthetic construct
  misc_feature 1..80: note = Artificially Synthesized Probe
  source 1..80: mol_type = other DNA
aaaatgactatcagagatcagaacacaccaccccaaaaatgactgttggagaacagaacatgccatcccaaacttgacta

SEQ ID NO: 109155 - DNA, 80 bp, synthetic construct
  misc_feature 1..80: note = Artificially Synthesized Probe
  source 1..80: mol_type = other DNA
cccaaaaatgactgttggagaacagaacacctcaccccaaaaatgactgtcgaagaccagaacacaccaccgcaaaatga

SEQ ID NO: 109156 - DNA, 80 bp, synthetic construct
  misc_feature 1..80: note = Artificially Synthesized Probe
  source 1..80: mol_type = other DNA
cccaaaaatgactatcagagaccagaacacaccaccccccaaaatgactgtcggagataaaaacatgccacccccaaaat

SEQ ID NO: 109157 - DNA, 80 bp, synthetic construct
  misc_feature 1..80: note = Artificially Synthesized Probe
  source 1..80: mol_type = other DNA
gacaccacaaaaatgactgttggagatcaaaacacaccacctcaaaatgactgttgttggagaccagaacacaccacccc

SEQ ID NO: 109158 - DNA, 80 bp, synthetic construct
  misc_feature 1..80: note = Artificially Synthesized Probe
  source 1..80: mol_type = other DNA
cccgaaaatgactgtcagagaacagaacacaccaccccaaaatgattgttggagatcagaacacaccaccccaaaatgac

SEQ ID NO: 109159 - DNA, 80 bp, synthetic construct
  misc_feature 1..80: note = Artificially Synthesized Probe
  source 1..80: mol_type = other DNA
tttcctcatgagaccaagtacacccaaaaaagggacagtaaaacaaaccaaaccccaaaccccaaaccagatacccttta

SEQ ID NO: 109160 - DNA, 80 bp, synthetic construct
  misc_feature 1..80: note = Artificially Synthesized Probe
  source 1..80: mol_type = other DNA
caccccaaaaatgactgttggagatcagaacacgtcaccctaaaaccgactgtcagagaacagaacacaccaccccaaaa

SEQ ID NO: 109161 - DNA, 80 bp, synthetic construct
  misc_feature 1..80: note = Artificially Synthesized Probe
  source 1..80: mol_type = other DNA
accaccccaaaaatgactgtcagagatcggaacgcaccacccaaaaaatgactgtcagagactagaacacaccaccccaa

SEQ ID NO: 109162 - DNA, 80 bp, synthetic construct
  misc_feature 1..80: note = Artificially Synthesized Probe
  source 1..80: mol_type = other DNA
acatcaccccaaaaatgactgttggagatcagaacacactaccccaaaatgactgtcgaaaaccagaacataccacccca

SEQ ID NO: 109163 - DNA, 80 bp, synthetic construct
  misc_feature 1..80: note = Artificially Synthesized Probe
  source 1..80: mol_type = other DNA
agaacataccatccaaaaatgactgtcagagaccagaacatagcaccccaaaatgactgtcagagaccagaacacaccat

SEQ ID NO: 109164 - DNA, 80 bp, synthetic construct
  misc_feature 1..80: note = Artificially Synthesized Probe
  source 1..80: mol_type = other DNA
acggctctcgtcactggaaaccccatcaatgcagagggctcgactgagggtgcatgacaggccttgcccttgctgaccgg

SEQ ID NO: 109165 - DNA, 80 bp, synthetic construct
  misc_feature 1..80: note = Artificially Synthesized Probe
  source 1..80: mol_type = other DNA
tctcacagggtggcagacaagagagagcatgtgcagggaaactgccctttataaaccatcagatctcatgagactcattg

SEQ ID NO: 109166 - DNA, 80 bp, synthetic construct
  misc_feature 1..80: note = Artificially Synthesized Probe
  source 1..80: mol_type = other DNA
tctgtctcagcagatgatggtgctgaagcctgagtctacacacctctttgtgattgacccgtttctctgggtatggctca

SEQ ID NO: 109167 - DNA, 80 bp, synthetic construct
  misc_feature 1..80: note = Artificially Synthesized Probe
  source 1..80: mol_type = other DNA
aaaaggggtacctgagttggcctggatgctcagtggctgccctgataagtgattatggaaaatgtgatgccagggcggtc

SEQ ID NO: 109168 - DNA, 80 bp, synthetic construct
  misc_feature 1..80: note = Artificially Synthesized Probe
  source 1..80: mol_type = other DNA
caggcctagcctctccagggcacctgatgcccacctgggcagagaaaggcacctgagcagaagggcatggggctttcaga

SEQ ID NO: 109169 - DNA, 80 bp, synthetic construct
  misc_feature 1..80: note = Artificially Synthesized Probe
  source 1..80: mol_type = other DNA
attagggtttcccacctgtatctcatgaactctgccaggtaaaagtttcatattcatggagtataccaggtgcgaatgtg

SEQ ID NO: 109170 - DNA, 80 bp, synthetic construct
  misc_feature 1..80: note = Artificially Synthesized Probe
  source 1..80: mol_type = other DNA
gcaccggctgccggttctgccatgtcacttctcctgcctcagtctcccctctgtgaaatgttgcctcctggggacaaggg

SEQ ID NO: 109171 - DNA, 80 bp, synthetic construct
  misc_feature 1..80: note = Artificially Synthesized Probe
  source 1..80: mol_type = other DNA
ctgcttccccactcccgaaactcctgtctctatctcacagtatacggaagataccattttctctgacatgttgtgcctgg

SEQ ID NO: 109172 - DNA, 80 bp, synthetic construct
  misc_feature 1..80: note = Artificially Synthesized Probe
  source 1..80: mol_type = other DNA
tcctgttaattttcttcatctctttaagcaactccaagtctgatgggttgacccactgaaaggggtttctggattattac

SEQ ID NO: 109173 - DNA, 80 bp, synthetic construct
  misc_feature 1..80: note = Artificially Synthesized Probe
  source 1..80: mol_type = other DNA
atcaccaagtccccacctcagacaataagccgtgtccctgcgactgaaatctatattatgcatatttttataaaaatgca

SEQ ID NO: 109174 - DNA, 80 bp, synthetic construct
  misc_feature 1..80: note = Artificially Synthesized Probe
  source 1..80: mol_type = other DNA
ataaaaattgaatgtgttgctatagcaacagccacatcacacagcacctctcctgcctttaagtcacaggaaagtattga

SEQ ID NO: 109175 - DNA, 80 bp, synthetic construct
  misc_feature 1..80: note = Artificially Synthesized Probe
  source 1..80: mol_type = other DNA
tcgaaaatacatttttgtgtttttcttcacttttgagaaatagaaaaagagtgagaagagcagtaagcagcaagcaggct

SEQ ID NO: 109176 - DNA, 80 bp, synthetic construct
  misc_feature 1..80: note = Artificially Synthesized Probe
  source 1..80: mol_type = other DNA
agcccaccacggtggggctgtctgggccatcgaggtccttgtcacagatccaaacccacagtgggccagtcctggggcca

SEQ ID NO: 109177 - DNA, 80 bp, synthetic construct
  misc_feature 1..80: note = Artificially Synthesized Probe
  source 1..80: mol_type = other DNA
cctcaccacagagccaaaccagagaaggggctgctcctgacctctgacctcccaccaaccaaaggcttatctggggtcct

SEQ ID NO: 109178 - DNA, 80 bp, synthetic construct
  misc_feature 1..80: note = Artificially Synthesized Probe
  source 1..80: mol_type = other DNA
caactaatgcatattagaataaaatagagtgacagtgcaggaaatgacaaaagatgcccactccccccagtacccacttc

SEQ ID NO: 109179 - DNA, 80 bp, synthetic construct
  misc_feature 1..80: note = Artificially Synthesized Probe
  source 1..80: mol_type = other DNA
cccactccattacccactctcccagtacatgcttcccccagtacccaacccccatacccactccccagtacccactcccc

SEQ ID NO: 109180 - DNA, 80 bp, synthetic construct
  misc_feature 1..80: note = Artificially Synthesized Probe
  source 1..80: mol_type = other DNA
cttcacccagtacccgcttccccaatacctgctccacccagtatttgctccccccagtacctgctctccaccatacccac

SEQ ID NO: 109181 - DNA, 80 bp, synthetic construct
  misc_feature 1..80: note = Artificially Synthesized Probe
  source 1..80: mol_type = other DNA
catggctgaggactttatttacaaaggatcatgcagttgtattattacacgcaaagcatcacaaatagagaggaaaacca

SEQ ID NO: 109182 - DNA, 80 bp, synthetic construct
  misc_feature 1..80: note = Artificially Synthesized Probe
  source 1..80: mol_type = other DNA
gggtgtgagtgaatgtttctggagagacagaccctggtttttcttgggctcacggacggtctgagattgctggagtgtta

SEQ ID NO: 109183 - DNA, 80 bp, synthetic construct
  misc_feature 1..80: note = Artificially Synthesized Probe
  source 1..80: mol_type = other DNA
ccttacccaaggaaccccgtgaactctgacacctcaggctttttagatccactgtccagagcctcaggagctgtgatctc

SEQ ID NO: 109184 - DNA, 80 bp, synthetic construct
  misc_feature 1..80: note = Artificially Synthesized Probe
  source 1..80: mol_type = other DNA
cctgcgcccccccaccccccaacatccaatgccccttctcttgaatccccaaacacaggccctcatctaaaggccagcag

SEQ ID NO: 109185 - DNA, 80 bp, synthetic construct
  misc_feature 1..80: note = Artificially Synthesized Probe
  source 1..80: mol_type = other DNA
caggtccccacatttgctaatgtgtgtgtaaacgcctttcctttggttacatattttctctttatttaggttgtaaaaaa

SEQ ID NO: 109186 - DNA, 80 bp, synthetic construct
  misc_feature 1..80: note = Artificially Synthesized Probe
  source 1..80: mol_type = other DNA
tttataattacccagacgtaaccaccaggggaaaacctcactgggtaagggatacatgagacttctttgttataactttg

SEQ ID NO: 109187 - DNA, 80 bp, synthetic construct
  misc_feature 1..80: note = Artificially Synthesized Probe
  source 1..80: mol_type = other DNA
gaaaccttaaaactgagttgggaccgtgacaggatgaaggtcagacccgcctggttacccgcccccatcattaatcatca

SEQ ID NO: 109188 - DNA, 80 bp, synthetic construct
  misc_feature 1..80: note = Artificially Synthesized Probe
  source 1..80: mol_type = other DNA
tgatatccaccaagtgcctgaaactgctcttccttttatggtttcgacccaacaaccaatcagcattccctcctcataag

SEQ ID NO: 109189 - DNA, 80 bp, synthetic construct
  misc_feature 1..80: note = Artificially Synthesized Probe
  source 1..80: mol_type = other DNA
tagctgaccatgcatgcccgtgtctccccttcacaaatattcacggctcctcccataacctgctgaatatgtatacttag

SEQ ID NO: 109190 - DNA, 80 bp, synthetic construct
  misc_feature 1..80: note = Artificially Synthesized Probe
  source 1..80: mol_type = other DNA
tcgtcattcttctgctgccaccatcaaccccataagagctgctctcttattcacctgttacgtacatgggcttctaacat

SEQ ID NO: 109191 - DNA, 80 bp, synthetic construct
  misc_feature 1..80: note = Artificially Synthesized Probe
  source 1..80: mol_type = other DNA
tctccaacagtaagaaaagttggtatcatagaaacttccacaacaggaattcactgagaaagaacgattagtgatacaaa

SEQ ID NO: 109192 - DNA, 80 bp, synthetic construct
  misc_feature 1..80: note = Artificially Synthesized Probe
  source 1..80: mol_type = other DNA
tttctgatttccttgctcgatggagtgtcttcttaggatacatttctcggagtttgattactgagccaaaggggaagagt

SEQ ID NO: 109193 - DNA, 80 bp, synthetic construct
  misc_feature 1..80: note = Artificially Synthesized Probe
  source 1..80: mol_type = other DNA
ttctaaagagttagactcattcaccctgcctaccatggagtgtacgtatatgagttttatcacatttggtctttatttat

SEQ ID NO: 109194 - DNA, 80 bp, synthetic construct
  misc_feature 1..80: note = Artificially Synthesized Probe
  source 1..80: mol_type = other DNA
catgaggtcaggacatcaaaaccatcctggctaacacggtgaaaccccgtctctactaaaaatacagaaaaattagctga

SEQ ID NO: 109195 - DNA, 80 bp, synthetic construct
  misc_feature 1..80: note = Artificially Synthesized Probe
  source 1..80: mol_type = other DNA
ataggactttagacttaggatgtgattggaacatctacggatttctcaccccactgtagctctgacatttcacctgcccc

SEQ ID NO: 109196 - DNA, 80 bp, synthetic construct
  misc_feature 1..80: note = Artificially Synthesized Probe
  source 1..80: mol_type = other DNA
ttaatgtgcctgacaaaggcacggtcctgctgctgggcaccgcagagcaacaacagctgtcaccctgacaagcaggggca

SEQ ID NO: 109197 - DNA, 80 bp, synthetic construct
  misc_feature 1..80: note = Artificially Synthesized Probe
  source 1..80: mol_type = other DNA
agggagaaggtgcatggccatgtcgagccatcacagctgatatgttcctgctattgatttggccaaagtctgcattcaat

SEQ ID NO: 109198 - DNA, 80 bp, synthetic construct
  misc_feature 1..80: note = Artificially Synthesized Probe
  source 1..80: mol_type = other DNA
ccctgtgacaagtgctgagcatccccacaccccccgccccccaccccaggtaacaaacatcacacagcaaattcacatta

SEQ ID NO: 109199 - DNA, 80 bp, synthetic construct
  misc_feature 1..80: note = Artificially Synthesized Probe
  source 1..80: mol_type = other DNA
atgaccataggttcatagacttttaagggacttttgggatccacatattcttggctacagaatcctttcttggaacaaag

SEQ ID NO: 109200 - DNA, 80 bp, synthetic construct
  misc_feature 1..80: note = Artificially Synthesized Probe
  source 1..80: mol_type = other DNA
actggacagagagaaggctccctcagcagagatggggggctctttgccacccagacagcccccagtctgagcagctcttc

SEQ ID NO: 109201 - DNA, 80 bp, synthetic construct
  misc_feature 1..80: note = Artificially Synthesized Probe
  source 1..80: mol_type = other DNA
tttccaatgatcacttttgtgactatgcaactgggctcatattactagctgcaacatcacaaaaatgacactggccaccg

SEQ ID NO: 109202 - DNA, 80 bp, synthetic construct
  misc_feature 1..80: note = Artificially Synthesized Probe
  source 1..80: mol_type = other DNA
tctatcacgacgcttagaagctagaacgctgggcaggggacctctgtgtctatcacgatgcttagaagctagaacgctgg

SEQ ID NO: 109203 - DNA, 80 bp, synthetic construct
  misc_feature 1..80: note = Artificially Synthesized Probe
  source 1..80: mol_type = other DNA
cttttgagttttgctttttggtgattatcactttcctttggaaaaaaacatggctttattaatttgaataaaatgcaaat

SEQ ID NO: 109204 - DNA, 80 bp, synthetic construct
  misc_feature 1..80: note = Artificially Synthesized Probe
  source 1..80: mol_type = other DNA
ttgcattaaacgcaagcgcaggggagagatttagtaaatgctattagatttctgtaatcaaactctgctttatattccag

SEQ ID NO: 109205 - DNA, 80 bp, synthetic construct
  misc_feature 1..80: note = Artificially Synthesized Probe
  source 1..80: mol_type = other DNA
ctccaaatatataaacctcccgaaactacagcagtgaataaaacagacaaacccttccatcacagagctcccattccagg

SEQ ID NO: 109206 - DNA, 80 bp, synthetic construct
  misc_feature 1..80: note = Artificially Synthesized Probe
  source 1..80: mol_type = other DNA
gagaagaaccatcttttgaaatgtaaaatggccacgtggagaaggataatgctccaggagctggtctccagcatttggtg

SEQ ID NO: 109207 - DNA, 80 bp, synthetic construct
  misc_feature 1..80: note = Artificially Synthesized Probe
  source 1..80: mol_type = other DNA
caaggtccatcctctgctcgctcaggggccagagaggacacaggttggatgtggatggaagcagaggtgtggtgctgtgc

SEQ ID NO: 109208 - DNA, 80 bp, synthetic construct
  misc_feature 1..80: note = Artificially Synthesized Probe
  source 1..80: mol_type = other DNA
gatttccatgcattgaatcaatctacttcctagacagagcttcacaaggagcagtgatgccatttccattaagagataag

SEQ ID NO: 109209 - DNA, 80 bp, synthetic construct
  misc_feature 1..80: note = Artificially Synthesized Probe
  source 1..80: mol_type = other DNA
aggcttgggatcatcatcgaacagataacataaaaagccagggcccaggtgagttccccacaggagacagcaccggcaga

SEQ ID NO: 109210 - DNA, 80 bp, synthetic construct
  misc_feature 1..80: note = Artificially Synthesized Probe
  source 1..80: mol_type = other DNA
taaagcaaagccctcacatgtgatgctaattatctcttagcagtttctctttaaagtgtaaatgcgctccctctgggctc

SEQ ID NO: 109211 - DNA, 80 bp, synthetic construct
  misc_feature 1..80: note = Artificially Synthesized Probe
  source 1..80: mol_type = other DNA
attcctcgatacacctccagcttcacctggaatgggagctcgtgatggaagggtttgtctgttttagtcactgctgtagt

SEQ ID NO: 109212 - DNA, 80 bp, synthetic construct
  misc_feature 1..80: note = Artificially Synthesized Probe
  source 1..80: mol_type = other DNA
tggcatcaactctgaggggcacaaagccgagagcacaggaagaaagtggatctccagactccaaaactgagaggagcaat

SEQ ID NO: 109213 - DNA, 80 bp, synthetic construct
  misc_feature 1..80: note = Artificially Synthesized Probe
  source 1..80: mol_type = other DNA
gagttcctgtggaagctgagagctggggtgtgagttcctgtggacgctgagagctggggtgtgagttcctgtggacgctg

SEQ ID NO: 109214 - DNA, 80 bp, synthetic construct
  misc_feature 1..80: note = Artificially Synthesized Probe
  source 1..80: mol_type = other DNA
tggggtgtgagttcctatagtcacacgaggacagcccatgtggccttggggtggatggagatggggactccacatgaagc

SEQ ID NO: 109215 - DNA, 80 bp, synthetic construct
  misc_feature 1..80: note = Artificially Synthesized Probe
  source 1..80: mol_type = other DNA
acaggaaagtggatcggctgggacactgagggcagaacttcttatccagaaactctcacatagaaattcacacttcagta

SEQ ID NO: 109216 - DNA, 80 bp, synthetic construct
  misc_feature 1..80: note = Artificially Synthesized Probe
  source 1..80: mol_type = other DNA
ccaccagggtctggatcataactgtttccaacactgcacagtcaccggacagagcagcaggaagggaaccgggccacaga

SEQ ID NO: 109217 - DNA, 80 bp, synthetic construct
  misc_feature 1..80: note = Artificially Synthesized Probe
  source 1..80: mol_type = other DNA
cgaagactaggaaacggccagagggtctgaacgagaccataaaataagccagagggtctgaacaagaccataaaataagc

SEQ ID NO: 109218 - DNA, 80 bp, synthetic construct
  misc_feature 1..80: note = Artificially Synthesized Probe
  source 1..80: mol_type = other DNA
ggtctgaacgagtcaataaaataagccagagggtctgaacgagaccataaaataagccagaggatctggacgagaccata

SEQ ID NO: 109219 - DNA, 80 bp, synthetic construct
  misc_feature 1..80: note = Artificially Synthesized Probe
  source 1..80: mol_type = other DNA
ccaagagaaaagtacccagcatttgagttttacagcagattagacagaggaggaaggaacgtgggagacaatttcaggaa

SEQ ID NO: 109220 - DNA, 80 bp, synthetic construct
  misc_feature 1..80: note = Artificially Synthesized Probe
  source 1..80: mol_type = other DNA
tcatccgcactctgccaccccagaaacctgcacacgacccagtggtgcgggtcctgggatgacccccatttgacaacaca

SEQ ID NO: 109221 - DNA, 80 bp, synthetic construct
  misc_feature 1..80: note = Artificially Synthesized Probe
  source 1..80: mol_type = other DNA
atcacaggtgcccaggggaggacgggaggagctgggaagatgaaacccagatcccccaatccaagcagggagtgcctgga

SEQ ID NO: 109222 - DNA, 80 bp, synthetic construct
  misc_feature 1..80: note = Artificially Synthesized Probe
  source 1..80: mol_type = other DNA
ttttatacagaaaaccagccaccggcaatgcttgtctaagtgtgaagctttctgagaatgtgttcgctcaaacccactgt

SEQ ID NO: 109223 - DNA, 80 bp, synthetic construct
  misc_feature 1..80: note = Artificially Synthesized Probe
  source 1..80: mol_type = other DNA
gacattacaagtgcccagcagaggacaggaggagctgggaggctgaagccacagcgaccaggccctgtggctcctccagc

SEQ ID NO: 109224 - DNA, 80 bp, synthetic construct
  misc_feature 1..80: note = Artificially Synthesized Probe
  source 1..80: mol_type = other DNA
ccggggaggtgctgtcccccatgctcacgtgtgcgtgggaaggagctccgttgtgagtgggcagccggggaggtgctgtc

SEQ ID NO: 109225 - DNA, 80 bp, synthetic construct
  misc_feature 1..80: note = Artificially Synthesized Probe
  source 1..80: mol_type = other DNA
gctgcccagtcagtggctccacctgtcaccatgtcctgcctcttttctggagtggccggagtccaggtttcaatgaggaa

SEQ ID NO: 109226 - DNA, 80 bp, synthetic construct
  misc_feature 1..80: note = Artificially Synthesized Probe
  source 1..80: mol_type = other DNA
gggcctaaatattccacagtacagcagagggtcccagcctcgacgcgttctctgaccaggttacagagatggctctaacc

SEQ ID NO: 109227 - DNA, 80 bp, synthetic construct
  misc_feature 1..80: note = Artificially Synthesized Probe
  source 1..80: mol_type = other DNA
cagctccttgtacacgcaggagacgcacctccgacatcacatcttccacatgcaggagactcacggcccggtcacagcca

SEQ ID NO: 109228 - DNA, 80 bp, synthetic construct
  misc_feature 1..80: note = Artificially Synthesized Probe
  source 1..80: mol_type = other DNA
gcatcaccagctgcccaacacctcattcatccggcacgagccaggaaggcatcgagaaacaccaagaacaggagcacctg

SEQ ID NO: 109229 - DNA, 80 bp, synthetic construct
  misc_feature 1..80: note = Artificially Synthesized Probe
  source 1..80: mol_type = other DNA
ccaattaagcagcttcttatttcaagagcccgagtctggggcctggtgaggacgagatttccccacagaagcagcttgtc

SEQ ID NO: 109230 - DNA, 80 bp, synthetic construct
  misc_feature 1..80: note = Artificially Synthesized Probe
  source 1..80: mol_type = other DNA
ccacacgccattcctcagaggaggcgcgtccgcgctctgtgtgcagttcattaagttgtcatgtcaggggacagcggcca

SEQ ID NO: 109231 - DNA, 80 bp, synthetic construct
  misc_feature 1..80: note = Artificially Synthesized Probe
  source 1..80: mol_type = other DNA
ttgcacacacaggggcttgatagattttcagtgatattatggaagcatttcctgttttatattgcctctcccaaatgtgc

SEQ ID NO: 109232 - DNA, 80 bp, synthetic construct
  misc_feature 1..80: note = Artificially Synthesized Probe
  source 1..80: mol_type = other DNA
ttgaatttaacaaaaaccttcttaggctgtatctcctcagaccctggagcaagggaaatttgggaatccaatttttcttg

SEQ ID NO: 109233 - DNA, 80 bp, synthetic construct
  misc_feature 1..80: note = Artificially Synthesized Probe
  source 1..80: mol_type = other DNA
tgaatgctttttcttgtggggatactaaatcaggacttcaaaggccctaagacatcattgaactcgccaggcacgtttcg

SEQ ID NO: 109234 - DNA, 80 bp, synthetic construct
  misc_feature 1..80: note = Artificially Synthesized Probe
  source 1..80: mol_type = other DNA
tctgttactcaccgacccgactccggtttgaagaattttcagtccagaggtttcctccagtttgtctttgttgtcaactg

SEQ ID NO: 109235 - DNA, 80 bp, synthetic construct
  misc_feature 1..80: note = Artificially Synthesized Probe
  source 1..80: mol_type = other DNA
tggaagggtcatgaacaggcacagaattagaacctgcacgaggccccattttcccactgacccagtgtgcgtccacctcg

SEQ ID NO: 109236 - DNA, 80 bp, synthetic construct
  misc_feature 1..80: note = Artificially Synthesized Probe
  source 1..80: mol_type = other DNA
tgggaaatatgtttcattaaccagcattaggtgttgataaaagactccgtagaaggcaaagctgaatgtgtgtatttctg

SEQ ID NO: 109237 - DNA, 80 bp, synthetic construct
  misc_feature 1..80: note = Artificially Synthesized Probe
  source 1..80: mol_type = other DNA
ctttcagagaatgaattgcactcgatggcaaaccaagggaaatgagctctggaaacaattagcagatggaaatgaaaccc

SEQ ID NO: 109238 - DNA, 80 bp, synthetic construct
  misc_feature 1..80: note = Artificially Synthesized Probe
  source 1..80: mol_type = other DNA
actgcaaaccctatgaatgaagagtgccttgcaattgtgattaatacaggatgagatagcaggaaaatatcaattactct

SEQ ID NO: 109239 - DNA, 80 bp, synthetic construct
  misc_feature 1..80: note = Artificially Synthesized Probe
  source 1..80: mol_type = other DNA
tctacatataactaattacctactgcgctgaaagaacaagacagacagaaaacagtctgggctaaagcaaaactccttta

SEQ ID NO: 109240 - DNA, 80 bp, synthetic construct
  misc_feature 1..80: note = Artificially Synthesized Probe
  source 1..80: mol_type = other DNA
cagattggcaagcttctctcaggagggtaatagtggactcttttaagcaggctgaggaacagaaagtgagtacaaatgca

SEQ ID NO: 109241 - DNA, 80 bp, synthetic construct
  misc_feature 1..80: note = Artificially Synthesized Probe
  source 1..80: mol_type = other DNA
cctgtgaagggcaggtaacaactgggtcaggctcggcaggcccacggctctgtcgcagctactcagccctgccttgcagc

SEQ ID NO: 109242 - DNA, 80 bp, synthetic construct
  misc_feature 1..80: note = Artificially Synthesized Probe
  source 1..80: mol_type = other DNA
gtctggctctagtccattctccacactgtgcccagggtgtcacgagcagtgagtctaagggtgtctgtccatccttgacc

SEQ ID NO: 109243 - DNA, 80 bp, synthetic construct
  misc_feature 1..80: note = Artificially Synthesized Probe
  source 1..80: mol_type = other DNA
ccttgcccagatattgggcttttcagcacatttcaggcattctccgtcccctgccaggatgctctgagctcctcagtctg

SEQ ID NO: 109244 - DNA, 80 bp, synthetic construct
  misc_feature 1..80: note = Artificially Synthesized Probe
  source 1..80: mol_type = other DNA
tttgccaggaatgactgttttttgaagactctatttcaggaaattatgtaagatttctacatagtatgtctttagaaata

SEQ ID NO: 109245 - DNA, 80 bp, synthetic construct
  misc_feature 1..80: note = Artificially Synthesized Probe
  source 1..80: mol_type = other DNA
atttctgctctgtgtaaatgctcccatcacagttgactttagtgctcatgtgacactactaaagggaatggggagagata

SEQ ID NO: 109246 - DNA, 80 bp, synthetic construct
  misc_feature 1..80: note = Artificially Synthesized Probe
  source 1..80: mol_type = other DNA
aggtgaagggagccatgcagtgtgcagagctcacatggggagagaggaagcaggagagggcggagggagggccaggctct

SEQ ID NO: 109247 - DNA, 80 bp, synthetic construct
  misc_feature 1..80: note = Artificially Synthesized Probe
  source 1..80: mol_type = other DNA
aatttcaacatgaggcatggcggggccgaaccaaccagatgcagagtcacacatggggaccgaatttcaacatgaggcat

SEQ ID NO: 109248 - DNA, 80 bp, synthetic construct
  misc_feature 1..80: note = Artificially Synthesized Probe
  source 1..80: mol_type = other DNA
gttataaaatggtgagctttagtatggatcgcctctgctcttaacatagtttatttaagtgcatgtttttatcattcaat

SEQ ID NO: 109249 - DNA, 80 bp, synthetic construct
  misc_feature 1..80: note = Artificially Synthesized Probe
  source 1..80: mol_type = other DNA
gccttcccgtccgtgtttcctgggtcctgaggcggggccttcccgtccgtgtttcctgggtcctgaggcggggcctcccc

SEQ ID NO: 109250 - DNA, 80 bp, synthetic construct
  misc_feature 1..80: note = Artificially Synthesized Probe
  source 1..80: mol_type = other DNA
ttctgaagtgggaccttcctgtccgtgtttccttggttctggagtgcacacttcccccagctgaagtggggtcgcagcac

SEQ ID NO: 109251 - DNA, 80 bp, synthetic construct
  misc_feature 1..80: note = Artificially Synthesized Probe
  source 1..80: mol_type = other DNA
ccggaaagggcgtcagctgcggccaatagtgactcagaggatgatcttgttggctgcagtggaacactcatgagaagtgt

SEQ ID NO: 109252 - DNA, 80 bp, synthetic construct
  misc_feature 1..80: note = Artificially Synthesized Probe
  source 1..80: mol_type = other DNA
tggagagtacgtggaaatcaacctcaccgtggcctcaagagcacgtggggaccagccccgtggtggcctggagagcacgt

SEQ ID NO: 109253 - DNA, 80 bp, synthetic construct
  misc_feature 1..80: note = Artificially Synthesized Probe
  source 1..80: mol_type = other DNA
cttttagatgccgatgcgagagtgaggctgataaacgagtctgagagagtttgttcaataaatacaagatcatctgaggt

SEQ ID NO: 109254 - DNA, 80 bp, synthetic construct
  misc_feature 1..80: note = Artificially Synthesized Probe
  source 1..80: mol_type = other DNA
cttcagggtctatgactgcactttgatgcttaggggcctgtgttctttcttcaacaaatacatccacgttgctgcaaagg

SEQ ID NO: 109255 - DNA, 80 bp, synthetic construct
  misc_feature 1..80: note = Artificially Synthesized Probe
  source 1..80: mol_type = other DNA
ggctgtgacaccagattcaagtgtctccttgcagaggctcttgattgatttctattgattcaaattacaaaaaactgcat

SEQ ID NO: 109256 - DNA, 80 bp, synthetic construct
  misc_feature 1..80: note = Artificially Synthesized Probe
  source 1..80: mol_type = other DNA
acatgcgctcacatggaagtggggaccagacatcgggtacttacagccatagagatgggaacaacagacacgtaagaggg

SEQ ID NO: 109257 - DNA, 80 bp, synthetic construct
  misc_feature 1..80: note = Artificially Synthesized Probe
  source 1..80: mol_type = other DNA
accagtatacccaggtcacaagcctgcacatgtactcccagattctaaaataaaagctgaaaattaaaaatacggataag

SEQ ID NO: 109258 - DNA, 80 bp, synthetic construct
  misc_feature 1..80: note = Artificially Synthesized Probe
  source 1..80: mol_type = other DNA
tactaaaaggttttaagagagtacaagggacagtttcattctcgagctaatctgagactgcagtgtaagtcaaaatcgaa

SEQ ID NO: 109259 - DNA, 80 bp, synthetic construct
  misc_feature 1..80: note = Artificially Synthesized Probe
  source 1..80: mol_type = other DNA
tttccatgcacgcttcacaagcagctgtgaggaccacgtgggagcctctgagccagcatggcccaggtctcagcacacag

SEQ ID NO: 109260 - DNA, 80 bp, synthetic construct
  misc_feature 1..80: note = Artificially Synthesized Probe
  source 1..80: mol_type = other DNA
tgctctggtctcttatgctattaactcgccgatcagtgcttctgcttgtgttttgaacatcaaacatcagctgaagcatc

SEQ ID NO: 109261 - DNA, 80 bp, synthetic construct
  misc_feature 1..80: note = Artificially Synthesized Probe
  source 1..80: mol_type = other DNA
acccacagcaataggataaaggtcaccaggattctcctgatttcttgtttcccaagatagggtctcttccttcccccaca

SEQ ID NO: 109262 - DNA, 80 bp, synthetic construct
  misc_feature 1..80: note = Artificially Synthesized Probe
  source 1..80: mol_type = other DNA
cgtcaagaaactccaccatcctctggaaagcccgacagtgccctgagcaggtgccggggagtctcacaaagcacagaatc

SEQ ID NO: 109263 - DNA, 80 bp, synthetic construct
  misc_feature 1..80: note = Artificially Synthesized Probe
  source 1..80: mol_type = other DNA
tttcagcgatgcctgtccttgctagttcactttctggctttgagatttctcactggcagagagaatcgaaacacagagag

SEQ ID NO: 109264 - DNA, 80 bp, synthetic construct
  misc_feature 1..80: note = Artificially Synthesized Probe
  source 1..80: mol_type = other DNA
tatgcctaaaaggaaaaacaatgcctcgtggtccccggcatcctgtgggtctcagggcacccccgacacctcccgacatt

SEQ ID NO: 109265 - DNA, 80 bp, synthetic construct
  misc_feature 1..80: note = Artificially Synthesized Probe
  source 1..80: mol_type = other DNA
tttgtctcgttaacctccctccagttacataactgtagactcgagaatgagtaactgttaagaatcaagtcactttatga

SEQ ID NO: 109266 - DNA, 80 bp, synthetic construct
  misc_feature 1..80: note = Artificially Synthesized Probe
  source 1..80: mol_type = other DNA
gtaactgaggactcacacctactccttttaagtctaaagtaaatacctgctgattctcagtgtccttttgttccttttta

SEQ ID NO: 109267 - DNA, 80 bp, synthetic construct
  misc_feature 1..80: note = Artificially Synthesized Probe
  source 1..80: mol_type = other DNA
tggagacagttggagaagctgccttaataaaggcacagaataacagagaaagcccgtttttatcttcatgggagacaaaa

SEQ ID NO: 109268 - DNA, 80 bp, synthetic construct
  misc_feature 1..80: note = Artificially Synthesized Probe
  source 1..80: mol_type = other DNA
caatttatgcagcattccatataattaagcaggcagctacagtggaataattttgcctactctctttatcctcgttattt

SEQ ID NO: 109269 - DNA, 80 bp, synthetic construct
  misc_feature 1..80: note = Artificially Synthesized Probe
  source 1..80: mol_type = other DNA
ggcttccttaggaaggatcctcctcccttatggggtggagcctggtttctggccgagctgaaacgacgtcccctagggta

SEQ ID NO: 109270 - DNA, 80 bp, synthetic construct
  misc_feature 1..80: note = Artificially Synthesized Probe
  source 1..80: mol_type = other DNA
ccactggtcaggattccccgtgcatgtcagcaaggtgcccagccgagggctttccttaaagcggaagtcattcctgggaa

SEQ ID NO: 109271 - DNA, 80 bp, synthetic construct
  misc_feature 1..80: note = Artificially Synthesized Probe
  source 1..80: mol_type = other DNA
atgaggcccacctggtcgcagggctgatcacaattcctgtaaaggaatcttttaaaaattagcaatgtccatactttcct

SEQ ID NO: 109272 - DNA, 80 bp, synthetic construct
  misc_feature 1..80: note = Artificially Synthesized Probe
  source 1..80: mol_type = other DNA
cagtggtaataggtattctatgaaaaaatggggtctttattcatacaaggttaagaaatagcctgccagtcactcaggcc

SEQ ID NO: 109273 - DNA, 80 bp, synthetic construct
  misc_feature 1..80: note = Artificially Synthesized Probe
  source 1..80: mol_type = other DNA
ctgagggagaccttagggaggggcagggtaggaaggacccacgtgtcctgagcccctctagactgggggctcgccagggt

SEQ ID NO: 109274 - DNA, 80 bp, synthetic construct
  misc_feature 1..80: note = Artificially Synthesized Probe
  source 1..80: mol_type = other DNA
acctgttggaaaggtttggaagcagccatggaagctgtcaccagtgttttatgctcagatctgtgctgatgtcacacttt

SEQ ID NO: 109275 - DNA, 80 bp, synthetic construct
  misc_feature 1..80: note = Artificially Synthesized Probe
  source 1..80: mol_type = other DNA
caatttagagcttcgtcactgatgcttttgacaatttcattttccttgtggtggtttattcactaagcaccaccacctag

SEQ ID NO: 109276 - DNA, 80 bp, synthetic construct
  misc_feature 1..80: note = Artificially Synthesized Probe
  source 1..80: mol_type = other DNA
accacgggaacatttacccctgtgtgtggtgtgtcctgcgtggcagtatctccttgtcccgtgtgtggggtgtcccgggc

SEQ ID NO: 109277 - DNA, 80 bp, synthetic construct
  misc_feature 1..80: note = Artificially Synthesized Probe
  source 1..80: mol_type = other DNA
gggtggcagtatctccctgtcccttgcgtgtggggtgtcctgggtggcagtatctccctgtctcctgtgtgtgaggtgtc

SEQ ID NO: 109278 - DNA, 80 bp, synthetic construct
  misc_feature 1..80: note = Artificially Synthesized Probe
  source 1..80: mol_type = other DNA
gggtgtcctgggtggcagtatctccctgtccgctgcgtgtggggtgtcccgggctgggcctcaggcttctcttttccacc

SEQ ID NO: 109279 - DNA, 80 bp, synthetic construct
  misc_feature 1..80: note = Artificially Synthesized Probe
  source 1..80: mol_type = other DNA
ttcttgccacttccactaggacgtccaatggtgtctccacccaaattcctgacctcaccgacttccccaagcctgtctgt

SEQ ID NO: 109280 - DNA, 80 bp, synthetic construct
  misc_feature 1..80: note = Artificially Synthesized Probe
  source 1..80: mol_type = other DNA
tctcattctctgctctggatcttgcagagaccccaactgcgctgcctggctcttccatccatggtgccgggcccggcctg

SEQ ID NO: 109281 - DNA, 80 bp, synthetic construct
  misc_feature 1..80: note = Artificially Synthesized Probe
  source 1..80: mol_type = other DNA
gaagcacttaggcaggagaaaagacaaattaatgaacgtgtcaaatcctgctgttcaggttacagaaaagccaatgattt

SEQ ID NO: 109282 - DNA, 80 bp, synthetic construct
  misc_feature 1..80: note = Artificially Synthesized Probe
  source 1..80: mol_type = other DNA
tgcatgactcacgcaaccagctcatgacatcagcaactgcagggatctcagagccagaattgcaaatgtcttattcttac

SEQ ID NO: 109283 - DNA, 80 bp, synthetic construct
  misc_feature 1..80: note = Artificially Synthesized Probe
  source 1..80: mol_type = other DNA
tgaagcatagttttagtttacaattttaagtgcatttttatttttaatgaaaatacttctacatcttgtaccctgtgtgc

SEQ ID NO: 109284 - DNA, 80 bp, synthetic construct
  misc_feature 1..80: note = Artificially Synthesized Probe
  source 1..80: mol_type = other DNA
cactctcaaaccagacaacgtattgggtgactggctgactggagcaatgaacaaaaaactgaattttttaaagagggtca

SEQ ID NO: 109285 - DNA, 80 bp, synthetic construct
  misc_feature 1..80: note = Artificially Synthesized Probe
  source 1..80: mol_type = other DNA
gccaaaccttaccagcccatcgagagaacatcactactcacaggattataatccaatccactgtctttttcattggatta

SEQ ID NO: 109286 - DNA, 80 bp, synthetic construct
  misc_feature 1..80: note = Artificially Synthesized Probe
  source 1..80: mol_type = other DNA
ggccttgggcccctcgacagctggacaggggctgactctatacactgggggggggaggatgctggccactcaacacacac

SEQ ID NO: 109287 - DNA, 80 bp, synthetic construct
  misc_feature 1..80: note = Artificially Synthesized Probe
  source 1..80: mol_type = other DNA
acgccccggccagctcctgcctcagggcctttgtacctgctgtttgttcctgaccctcaaatgcctgcctgcagccatct

SEQ ID NO: 109288 - DNA, 80 bp, synthetic construct
  misc_feature 1..80: note = Artificially Synthesized Probe
  source 1..80: mol_type = other DNA
aggatttgccctagtgcttagaacactgtccagcacattagaggacctcaacgattatctgttgagggaatgaataagtg

SEQ ID NO: 109289 - DNA, 80 bp, synthetic construct
  misc_feature 1..80: note = Artificially Synthesized Probe
  source 1..80: mol_type = other DNA
gttctagttttgaactaaagagccaacgataaaaggatatctgaggattcctgatttgcagtctcatgattctcttccaa

SEQ ID NO: 109290 - DNA, 80 bp, synthetic construct
  misc_feature 1..80: note = Artificially Synthesized Probe
  source 1..80: mol_type = other DNA
acgccgtggggacgggtccaggatcacgcacgtacgccgtgggaacgggtccaggatcaggcacgtacgccggatcacgc

SEQ ID NO: 109291 - DNA, 80 bp, synthetic construct
  misc_feature 1..80: note = Artificially Synthesized Probe
  source 1..80: mol_type = other DNA
taggaacgggcgcagaatcacacacgtacaccgttctgcacagctggcggacgcttcctctttcccacatggtgtggtgt

SEQ ID NO: 109292 - DNA, 80 bp, synthetic construct
  misc_feature 1..80: note = Artificially Synthesized Probe
  source 1..80: mol_type = other DNA
tgttgtgatccactgcgcggcaacaacacaaaacacaagaaaatgttttgatgttaatcattttacatcaagtcatctga

SEQ ID NO: 109293 - DNA, 80 bp, synthetic construct
  misc_feature 1..80: note = Artificially Synthesized Probe
  source 1..80: mol_type = other DNA
cccttgcctgtgcctgtgctggaagtgggctgttcatcatctctcttttcttctttggcggtgaggccaaaggcactgtg

SEQ ID NO: 109294 - DNA, 80 bp, synthetic construct
  misc_feature 1..80: note = Artificially Synthesized Probe
  source 1..80: mol_type = other DNA
gcggtgatctccaggatgaaaagatgcccccttagagatttaccacgatgcaaagacgctcatttctacctgaacagcca

SEQ ID NO: 109295 - DNA, 80 bp, synthetic construct
  misc_feature 1..80: note = Artificially Synthesized Probe
  source 1..80: mol_type = other DNA
ctggaaatgattcctctcaccaactcagatgactttctcttgaaagttagaagttttggggttaatttgtaattcaaaaa

SEQ ID NO: 109296 - DNA, 80 bp, synthetic construct
  misc_feature 1..80: note = Artificially Synthesized Probe
  source 1..80: mol_type = other DNA
tatcctgtggcacatacactttaggctctttgtcaactgaagaaccttatcaaaaataatggccctatttccacagttcg

SEQ ID NO: 109297 - DNA, 80 bp, synthetic construct
  misc_feature 1..80: note = Artificially Synthesized Probe
  source 1..80: mol_type = other DNA
tgagctcttctcggtcctatcaaagctaataactttcatgaattctgggtgcatagtttctgtatgtagacttttttttt

SEQ ID NO: 109298 - DNA, 80 bp, synthetic construct
  misc_feature 1..80: note = Artificially Synthesized Probe
  source 1..80: mol_type = other DNA
cattctatacacatggagcatcacgctttatttttccaatcacttacccagtccggtgggaaactgggttcttatttttc

SEQ ID NO: 109299 - DNA, 80 bp, synthetic construct
  misc_feature 1..80: note = Artificially Synthesized Probe
  source 1..80: mol_type = other DNA
gtgctcattggtttaagctttaaacactttgccgatttggtagatttacgttgtatctccttgggcttccaatgtgcatg

SEQ ID NO: 109300 - DNA, 80 bp, synthetic construct
  misc_feature 1..80: note = Artificially Synthesized Probe
  source 1..80: mol_type = other DNA
ttgtcagttatgtgggctgcaactatcatatctcagtttgtggcttggcttcttaaagttcctggttttaatacagtcta

SEQ ID NO: 109301 - DNA, 80 bp, synthetic construct
  misc_feature 1..80: note = Artificially Synthesized Probe
  source 1..80: mol_type = other DNA
aagaactgatttttgtatgtgattcaaggtagaggtcatttcatttttttctcattgaataccccatttccccatcaaag

SEQ ID NO: 109302 - DNA, 80 bp, synthetic construct
  misc_feature 1..80: note = Artificially Synthesized Probe
  source 1..80: mol_type = other DNA
agatccatgtgatctttcttactttagtgtaagtagtttatgctgtctacacacgaaggcaggtgttggctctttgtact

SEQ ID NO: 109303 - DNA, 80 bp, synthetic construct
  misc_feature 1..80: note = Artificially Synthesized Probe
  source 1..80: mol_type = other DNA
acatgtaaatctctccatttattgtcttcaacatcttttaagttttatatttttccccataaaagtcttatatatttaac

SEQ ID NO: 109304 - DNA, 80 bp, synthetic construct
  misc_feature 1..80: note = Artificially Synthesized Probe
  source 1..80: mol_type = other DNA
ttacctggatcttcttctgtctcttctgagtaaataatgaggccgtctgtgaataatgacaggcttgctccttctctcct

SEQ ID NO: 109305 - DNA, 80 bp, synthetic construct
  misc_feature 1..80: note = Artificially Synthesized Probe
  source 1..80: mol_type = other DNA
cagtgttttgctgggaagcatgatgtttctgtagggtctttaaaaaatcaaaataagaacaaactagtcttactttattc

SEQ ID NO: 109306 - DNA, 80 bp, synthetic construct
  misc_feature 1..80: note = Artificially Synthesized Probe
  source 1..80: mol_type = other DNA
ttgctattatttggcttttacacctatgtttttgaggaaatttctctctaattgtcattccctgtactgtaattactgag

SEQ ID NO: 109307 - DNA, 80 bp, synthetic construct
  misc_feature 1..80: note = Artificially Synthesized Probe
  source 1..80: mol_type = other DNA
agcaccgaagcctcgctcccctgtgccgcgcgctcagcgcgcactgccctgccggcgggccgcgcgtcatacctgcggaa

SEQ ID NO: 109308 - DNA, 80 bp, synthetic construct
  misc_feature 1..80: note = Artificially Synthesized Probe
  source 1..80: mol_type = other DNA
ttggctacagggctattggagtttttcattctggtattttggtcatgttatctaacatttcaaatatatggccataaatt

SEQ ID NO: 109309 - DNA, 80 bp, synthetic construct
  misc_feature 1..80: note = Artificially Synthesized Probe
  source 1..80: mol_type = other DNA
aaaattttgctttttaaacaaacagagagattctctgtctttgagattctccaacttcactgtcaggaatcgaggtgtag

SEQ ID NO: 109310 - DNA, 80 bp, synthetic construct
  misc_feature 1..80: note = Artificially Synthesized Probe
  source 1..80: mol_type = other DNA
gaatcgtaggtaatattctaactctgctggaacactcatggatcatgtgtaagatgtgtaagatgatcctcgatggtgat

SEQ ID NO: 109311 - DNA, 80 bp, synthetic construct
  misc_feature 1..80: note = Artificially Synthesized Probe
  source 1..80: mol_type = other DNA
aaccgtgtgtaagagtcttctactctgctggaacacttatgaatcgtgtgtaagagttgcctaatctgctaaaatgctta

SEQ ID NO: 109312 - DNA, 80 bp, synthetic construct
  misc_feature 1..80: note = Artificially Synthesized Probe
  source 1..80: mol_type = other DNA
gtgggctgcgttttagaaaatttcttagttctatactttacttctctaattctctcttcaactatatctaatctgctatt

SEQ ID NO: 109313 - DNA, 80 bp, synthetic construct
  misc_feature 1..80: note = Artificially Synthesized Probe
  source 1..80: mol_type = other DNA
tgtccaatagttacaatatctgaggctttcttttgttgtccattctttcaattaacttttgtcctgttacctggtatgtt

SEQ ID NO: 109314 - DNA, 80 bp, synthetic construct
  misc_feature 1..80: note = Artificially Synthesized Probe
  source 1..80: mol_type = other DNA
cctgcttgagatgttgtggctgtccaggcagcatgcagtgggattgtacatccctgtgaagcttggctgtggttaatgtc

SEQ ID NO: 109315 - DNA, 80 bp, synthetic construct
  misc_feature 1..80: note = Artificially Synthesized Probe
  source 1..80: mol_type = other DNA
ggggtcccagctccatgtggcatgtcttctattagccttaccatatcaggatttcctagtgcctcctgccctctatagac

SEQ ID NO: 109316 - DNA, 80 bp, synthetic construct
  misc_feature 1..80: note = Artificially Synthesized Probe
  source 1..80: mol_type = other DNA
attatctctatgtcctcatattctcgtagttttgtttttggaatgagggtgagtcccaatatttgtttcttccagcgtac

SEQ ID NO: 109317 - DNA, 80 bp, synthetic construct
  misc_feature 1..80: note = Artificially Synthesized Probe
  source 1..80: mol_type = other DNA
gaagtcctcacaccagatgtgctcggagaccaggttcacctggcagggaggagcggagggaggggacagagacaggtgtg

SEQ ID NO: 109318 - DNA, 80 bp, synthetic construct
  misc_feature 1..80: note = Artificially Synthesized Probe
  source 1..80: mol_type = other DNA
ctaaacacagatgtgtatataaaattgctaattattcagtgttttatggaatctgccgtgactcttgctgggactgtgaa

SEQ ID NO: 109319 - DNA, 80 bp, synthetic construct
  misc_feature 1..80: note = Artificially Synthesized Probe
  source 1..80: mol_type = other DNA
gcagggcctggtggttatggtcccagatgggcggctggagcctctgggaggtgttggcccagggctactcagttcaaaat

SEQ ID NO: 109320 - DNA, 80 bp, synthetic construct
  misc_feature 1..80: note = Artificially Synthesized Probe
  source 1..80: mol_type = other DNA
caccaagacgcatcatttgcctgtcctgtgtgtggtctaagaggtgcctggtgcttcactgcagagcacgcagctccttg

SEQ ID NO: 109321 - DNA, 80 bp, synthetic construct
  misc_feature 1..80: note = Artificially Synthesized Probe
  source 1..80: mol_type = other DNA
acacacgtccccctccccagctgaaggtccccaccatggcaggggctggccacgcaccccggccactccaggacacgtcc

SEQ ID NO: 109322 - DNA, 80 bp, synthetic construct
  misc_feature 1..80: note = Artificially Synthesized Probe
  source 1..80: mol_type = other DNA
ccaatacacgtccccctccccagctgaaggtccccaccatggcaggggctggccatgcaccccggccactccaggacacg

SEQ ID NO: 109323 - DNA, 80 bp, synthetic construct
  misc_feature 1..80: note = Artificially Synthesized Probe
  source 1..80: mol_type = other DNA
aagcgaaggcactgaacacactccagcctgcaacgcagaagtgcacattggcgtggagcatttgaaaggcattttctcct

SEQ ID NO: 109324 - DNA, 80 bp, synthetic construct
  misc_feature 1..80: note = Artificially Synthesized Probe
  source 1..80: mol_type = other DNA
catggctgcgcagtaataatagcggcaggctgggaaaagctaatgtcagctccaatttccaagtcatttttcaaattatt

SEQ ID NO: 109325 - DNA, 80 bp, synthetic construct
  misc_feature 1..80: note = Artificially Synthesized Probe
  source 1..80: mol_type = other DNA
tacaatgtttatcttcagcaattttcaacgcgtggtcctggacaaactgctatgttcaataaaagtgacaaggaagggac

SEQ ID NO: 109326 - DNA, 80 bp, synthetic construct
  misc_feature 1..80: note = Artificially Synthesized Probe
  source 1..80: mol_type = other DNA
catttcacgatgtaattggctttcccaacgcaaatttcagtgaaatttgactaagatttttttgtattaaaaggcatctg

SEQ ID NO: 109327 - DNA, 80 bp, synthetic construct
  misc_feature 1..80: note = Artificially Synthesized Probe
  source 1..80: mol_type = other DNA
tttcttagtttgtccttttcttcagacattagcacggatgctggtaaagacgtgccttctgaaatggtaaatgtaaagct

SEQ ID NO: 109328 - DNA, 80 bp, synthetic construct
  misc_feature 1..80: note = Artificially Synthesized Probe
  source 1..80: mol_type = other DNA
tgcgggtgtgtgtgcttagtgttatttaggggcttgagcgtcaaataattttttaaaaggttacaatccaaaactatcct

SEQ ID NO: 109329 - DNA, 80 bp, synthetic construct
  misc_feature 1..80: note = Artificially Synthesized Probe
  source 1..80: mol_type = other DNA
acctgggaacaacataaaaccaaactataacatcatccacatggcaacaggtaaaccatcgaaggaacaggagggaagct

SEQ ID NO: 109330 - DNA, 80 bp, synthetic construct
  misc_feature 1..80: note = Artificially Synthesized Probe
  source 1..80: mol_type = other DNA
attatctacaagcaacatatcgaaaacaacgccgtccagaaagattacaaactgacgcggccgggaaaatctatcagaca

SEQ ID NO: 109331 - DNA, 80 bp, synthetic construct
  misc_feature 1..80: note = Artificially Synthesized Probe
  source 1..80: mol_type = other DNA
gacaacgatatagggttaatgaactggtgtgtgccaagaaataaacatcgaaattaataaggaagaagtgatcacagtac

SEQ ID NO: 109332 - DNA, 80 bp, synthetic construct
  misc_feature 1..80: note = Artificially Synthesized Probe
  source 1..80: mol_type = other DNA
taaagaggactgagttttccagggggttaagcaacttacctaaagtcacagggctagtaaaacacagagccttattagaa

SEQ ID NO: 109333 - DNA, 80 bp, synthetic construct
  misc_feature 1..80: note = Artificially Synthesized Probe
  source 1..80: mol_type = other DNA
ccggaggggtgctgtgagcctcagagctggcgtttgaggggacaggggcttgtggatcatcttgtcctttatcgtgaagt

SEQ ID NO: 109334 - DNA, 80 bp, synthetic construct
  misc_feature 1..80: note = Artificially Synthesized Probe
  source 1..80: mol_type = other DNA
cgagaacatgacaaagagaattcaatagcgactgatcaagctctatggtctagaaaccagaatggaaccgatcagatatt

SEQ ID NO: 109335 - DNA, 80 bp, synthetic construct
  misc_feature 1..80: note = Artificially Synthesized Probe
  source 1..80: mol_type = other DNA
gaaggaaatggaaactaaattacaaaatagttagagaataataaaggctgtgggagataccgaaatgattccccggaggt

SEQ ID NO: 109336 - DNA, 80 bp, synthetic construct
  misc_feature 1..80: note = Artificially Synthesized Probe
  source 1..80: mol_type = other DNA
tggtgaataaacccaagagcttgattttaggggaaaaaatcataaactcttagaggtaatcaagaaaagtaaaacacctc

SEQ ID NO: 109337 - DNA, 80 bp, synthetic construct
  misc_feature 1..80: note = Artificially Synthesized Probe
  source 1..80: mol_type = other DNA
agtggtggtcccataagagtatgacggagctgacaaattcctgtcaccttgcgacgtcacagccatcgtaaagccacagt

SEQ ID NO: 109338 - DNA, 80 bp, synthetic construct
  misc_feature 1..80: note = Artificially Synthesized Probe
  source 1..80: mol_type = other DNA
tttgtaagtgcaccctgtgatgctcgcacaacgacgaaattgccagatgaaacatttatctgaaggcagcctcgtcatta

SEQ ID NO: 109339 - DNA, 80 bp, synthetic construct
  misc_feature 1..80: note = Artificially Synthesized Probe
  source 1..80: mol_type = other DNA
tacaaaacgtttttcaaagaaacttccttccagaaaagcacaaggccctaagtgtgactggaaagttctctcaaaacttt

SEQ ID NO: 109340 - DNA, 80 bp, synthetic construct
  misc_feature 1..80: note = Artificially Synthesized Probe
  source 1..80: mol_type = other DNA
cctgcttcttcttttgaacatgaagttctagccagcgaggacaaatgctgagatgtttgagacttcccaaaccacttgtg

SEQ ID NO: 109341 - DNA, 80 bp, synthetic construct
  misc_feature 1..80: note = Artificially Synthesized Probe
  source 1..80: mol_type = other DNA
gcaggaaaagcaaaaggctcacggagtcgcgctgatgtgaaccccagcgcaggcacttccgggcctaagcgtttctgcag

SEQ ID NO: 109342 - DNA, 80 bp, synthetic construct
  misc_feature 1..80: note = Artificially Synthesized Probe
  source 1..80: mol_type = other DNA
tgctggaccaatgggatactcacatgcaaaaagtgaatccagacatcaaccctataccctccacagaaattaatgcaaag

SEQ ID NO: 109343 - DNA, 80 bp, synthetic construct
  misc_feature 1..80: note = Artificially Synthesized Probe
  source 1..80: mol_type = other DNA
aactgataggcaggacttcatgaaaattaaaaactgaatatattattagtatatgacccagcagtcatgccctttggtat

SEQ ID NO: 109344 - DNA, 80 bp, synthetic construct
  misc_feature 1..80: note = Artificially Synthesized Probe
  source 1..80: mol_type = other DNA
gatcaaccgtggtgtatccatataataggatatcattcagggctaaaacggaatgagccgtcaaaccatgacacagggct

SEQ ID NO: 109345 - DNA, 80 bp, synthetic construct
  misc_feature 1..80: note = Artificially Synthesized Probe
  source 1..80: mol_type = other DNA
cagcagagcacagaggctttcatgacagggaaaccactctgtttgatgctatgatgatggatacgtgtcatcatacactt

SEQ ID NO: 109346 - DNA, 80 bp, synthetic construct
  misc_feature 1..80: note = Artificially Synthesized Probe
  source 1..80: mol_type = other DNA
gcccaaacccacagaatgtaccatcctgctgtggctcaaatatggtttataccatctgaaactcatgctgaaatttgatt

SEQ ID NO: 109347 - DNA, 80 bp, synthetic construct
  misc_feature 1..80: note = Artificially Synthesized Probe
  source 1..80: mol_type = other DNA
tcattatacatgctcattggcccttcttccagggcatggcgcagtaagaaagcccttgtcagagctgctgccatgccctc

SEQ ID NO: 109348 - DNA, 80 bp, synthetic construct
  misc_feature 1..80: note = Artificially Synthesized Probe
  source 1..80: mol_type = other DNA
gatgtaaaccatggaatgaatgtgggctcatcaactgtgacaaacagaccatcctaatacagatgggagcaatggagaga

SEQ ID NO: 109349 - DNA, 80 bp, synthetic construct
  misc_feature 1..80: note = Artificially Synthesized Probe
  source 1..80: mol_type = other DNA
taaaagttgcttgtttttatttgaagtgcagatgtccctggttagatgttcaaataccttaaaaactgtaggtaaagggc

SEQ ID NO: 109350 - DNA, 80 bp, synthetic construct
  misc_feature 1..80: note = Artificially Synthesized Probe
  source 1..80: mol_type = other DNA
cttgcagaaggaagtctttcctgggcgatggggccagcactgcatcctgacttggaacagagtgcgtggaaagggaaatg

SEQ ID NO: 109351 - DNA, 80 bp, synthetic construct
  misc_feature 1..80: note = Artificially Synthesized Probe
  source 1..80: mol_type = other DNA
ctgctaagtgctgatttaaacaagataaatgttctctttagttggacacaaactagcaagaatgactttgttcccatggg

SEQ ID NO: 109352 - DNA, 80 bp, synthetic construct
  misc_feature 1..80: note = Artificially Synthesized Probe
  source 1..80: mol_type = other DNA
aaaatactttcaatatttcaactgactgctttctaagtcacaaataacacagctaatcctgaggtcactcgcttacaaaa

SEQ ID NO: 109353 - DNA, 80 bp, synthetic construct
  misc_feature 1..80: note = Artificially Synthesized Probe
  source 1..80: mol_type = other DNA
atccctccttctccttaaagccattttaataaagaccccagaggctgtttactcaggtgaacacatttatttgtaaccag

SEQ ID NO: 109354 - DNA, 80 bp, synthetic construct
  misc_feature 1..80: note = Artificially Synthesized Probe
  source 1..80: mol_type = other DNA
tgatgggggcagaaaatccagccagataaataaactggtgagcaggttatcctcaaataaaaaggtcacatgatccagcc

SEQ ID NO: 109355 - DNA, 80 bp, synthetic construct
  misc_feature 1..80: note = Artificially Synthesized Probe
  source 1..80: mol_type = other DNA
tcacttaagtcaccagaagcttttcctatgagccagtcagtgcaggtgaggtgggagcagctagccataagttatgatgc

SEQ ID NO: 109356 - DNA, 80 bp, synthetic construct
  misc_feature 1..80: note = Artificially Synthesized Probe
  source 1..80: mol_type = other DNA
catgtcactacatcacattgagttggaaaaatccaaagaacatcatccccgtctttccacctgtgtcagttccttcaaag

SEQ ID NO: 109357 - DNA, 80 bp, synthetic construct
  misc_feature 1..80: note = Artificially Synthesized Probe
  source 1..80: mol_type = other DNA
ctctgatcccagaaaccaacaagaggaaattttcctgagataaagagaaatctctgcctttagataagaaatgtgttttc

SEQ ID NO: 109358 - DNA, 80 bp, synthetic construct
  misc_feature 1..80: note = Artificially Synthesized Probe
  source 1..80: mol_type = other DNA
agcagaatttaaaaaagcaacctgtcctgaattagaggaggctggctttggtgtgctgtttgggttggaccgtatctcag

SEQ ID NO: 109359 - DNA, 80 bp, synthetic construct
  misc_feature 1..80: note = Artificially Synthesized Probe
  source 1..80: mol_type = other DNA
tcacatccatggcctcttcacttggacaggatgagggggcgcggccacaggcaggtagaggggtggcagaggaggtctat

SEQ ID NO: 109360 - DNA, 80 bp, synthetic construct
  misc_feature 1..80: note = Artificially Synthesized Probe
  source 1..80: mol_type = other DNA
gaggagaaccgaggccaccagccctgttgccagagctcagctgctcctcccgacactggttctgagtcatggaatctccc

SEQ ID NO: 109361 - DNA, 80 bp, synthetic construct
  misc_feature 1..80: note = Artificially Synthesized Probe
  source 1..80: mol_type = other DNA
ggacacctcgctttatttcaggtacacagggtaagaagtccgctgcaggtggattaaagacttgccgagtcagccaggag

SEQ ID NO: 109362 - DNA, 80 bp, synthetic construct
  misc_feature 1..80: note = Artificially Synthesized Probe
  source 1..80: mol_type = other DNA
ttagcacgtcaggcaaatgcagttattgaaatgtagtcaggatgcaggcacctgcatttagcacgtcaggcaaatgcagt

SEQ ID NO: 109363 - DNA, 80 bp, synthetic construct
  misc_feature 1..80: note = Artificially Synthesized Probe
  source 1..80: mol_type = other DNA
gcaaatgcagttattgaagtgtagtcaggatgcacctgcatttagcacgtcaggcaaatgcagttattgaaatgtagtca

SEQ ID NO: 109364 - DNA, 80 bp, synthetic construct
  misc_feature 1..80: note = Artificially Synthesized Probe
  source 1..80: mol_type = other DNA
atatgtagtcaggatgcaggcacctgcatttagcacgttgctttagtaggttaaatcccctccagaatcttccagaatcc

SEQ ID NO: 109365 - DNA, 80 bp, synthetic construct
  misc_feature 1..80: note = Artificially Synthesized Probe
  source 1..80: mol_type = other DNA
ggatttagaaaaatctaaaagataaaaaccacaccacactcccagggtctggttcatgagcacacagccgtgtgaaccat

SEQ ID NO: 109366 - DNA, 80 bp, synthetic construct
  misc_feature 1..80: note = Artificially Synthesized Probe
  source 1..80: mol_type = other DNA
cagcagtggactcggtcaggccacgtggaaaccgcatggggccacagagtgatgggcctcagatgggcagcacacccagg

SEQ ID NO: 109367 - DNA, 80 bp, synthetic construct
  misc_feature 1..80: note = Artificially Synthesized Probe
  source 1..80: mol_type = other DNA
agtgacgtgatggtaaacagaggaaaacacgggccactcttcaaagcgcggtgcctcagaaaacacttccacagacacct

SEQ ID NO: 109368 - DNA, 80 bp, synthetic construct
  misc_feature 1..80: note = Artificially Synthesized Probe
  source 1..80: mol_type = other DNA
tggatgaatttaatttttatccatgcattacctccctctgtctatctaccactaaaccacagccacaggaagctgagggt

SEQ ID NO: 109369 - DNA, 80 bp, synthetic construct
  misc_feature 1..80: note = Artificially Synthesized Probe
  source 1..80: mol_type = other DNA
ccacgcattacatccttccatctatccaccactaaaccacagccacagtacactgagggtccatgcgtcacgtccctctg

SEQ ID NO: 109370 - DNA, 80 bp, synthetic construct
  misc_feature 1..80: note = Artificially Synthesized Probe
  source 1..80: mol_type = other DNA
gagcaagaagggattctggagatcatctaatttattttaatattacctaaatgagaagtggaggcagggagggccttgcc

SEQ ID NO: 109371 - DNA, 80 bp, synthetic construct
  misc_feature 1..80: note = Artificially Synthesized Probe
  source 1..80: mol_type = other DNA
accctgtaaaatgctgctcctttgcttcctgcttagacctgagaagtagcctctctccctgcagccctggagatccttca

SEQ ID NO: 109372 - DNA, 80 bp, synthetic construct
  misc_feature 1..80: note = Artificially Synthesized Probe
  source 1..80: mol_type = other DNA
acctcacgtctgctggggccctgaacacaggaagccccagggacccgtctgagagcagaggcctcgcgtcttctgggacc

SEQ ID NO: 109373 - DNA, 80 bp, synthetic construct
  misc_feature 1..80: note = Artificially Synthesized Probe
  source 1..80: mol_type = other DNA
gcctcgcgtcttctgggaccccaaagacaggaagccccagggacccgtctgagagcagaggcctcgcgtcttctgggacc

SEQ ID NO: 109374 - DNA, 80 bp, synthetic construct
  misc_feature 1..80: note = Artificially Synthesized Probe
  source 1..80: mol_type = other DNA
cctcacatcttctgggaccccaagacaggaagccccagggacccttctgagaacagagacctcacatctgctgggacccc

SEQ ID NO: 109375 - DNA, 80 bp, synthetic construct
  misc_feature 1..80: note = Artificially Synthesized Probe
  source 1..80: mol_type = other DNA
tcatgtctgctgggatcactcagtgcacacgggcatgtgtggtgtgtgggaagcaggagggaagcgaggttttattaaag

SEQ ID NO: 109376 - DNA, 80 bp, synthetic construct
  misc_feature 1..80: note = Artificially Synthesized Probe
  source 1..80: mol_type = other DNA
cgaatcccattcggaggaggagcagggcccgtcctcgtccggctggtgggtcctgccctgggtggctctggtcggagtac

SEQ ID NO: 109377 - DNA, 80 bp, synthetic construct
  misc_feature 1..80: note = Artificially Synthesized Probe
  source 1..80: mol_type = other DNA
aattcatgaagaagagaggtgcacatcactacctccattttgcaaactagggctggggtcaggagagctgcccgacgctt

SEQ ID NO: 109378 - DNA, 80 bp, synthetic construct
  misc_feature 1..80: note = Artificially Synthesized Probe
  source 1..80: mol_type = other DNA
cagaaggaaggtgcagatgaggactctgaggcccacccaagaccgtaaaaccagggcagggccataggcagatacaggac

SEQ ID NO: 109379 - DNA, 80 bp, synthetic construct
  misc_feature 1..80: note = Artificially Synthesized Probe
  source 1..80: mol_type = other DNA
ggtctggttcctttccctgggtttagggggctggggccaaagagaaaaatggtaggccctgaacactcttcttgtgatgg

SEQ ID NO: 109380 - DNA, 80 bp, synthetic construct
  misc_feature 1..80: note = Artificially Synthesized Probe
  source 1..80: mol_type = other DNA
aatctgagaccacctgagtttgaagcaccagggctgggagtgcaagttccgactatgaagagagggcagcacagagggcg

SEQ ID NO: 109381 - DNA, 80 bp, synthetic construct
  misc_feature 1..80: note = Artificially Synthesized Probe
  source 1..80: mol_type = other DNA
ggggggtgggacagggggcaggagggagggcagcacagaaggccaggcagagggctgggacagaaggcagcacacaaggc

SEQ ID NO: 109382 - DNA, 80 bp, synthetic construct
  misc_feature 1..80: note = Artificially Synthesized Probe
  source 1..80: mol_type = other DNA
atcagtgaaacggtgagaccattccttccacccttgtgtttccctggcatatgtgtcagccagctggtcaacacatgctg

SEQ ID NO: 109383 - DNA, 80 bp, synthetic construct
  misc_feature 1..80: note = Artificially Synthesized Probe
  source 1..80: mol_type = other DNA
tcaggagacacaaatgtcaactcctctgtgggttcctgcagcaccgggagaccctggcgcgactcctgagggcttcagtc

SEQ ID NO: 109384 - DNA, 80 bp, synthetic construct
  misc_feature 1..80: note = Artificially Synthesized Probe
  source 1..80: mol_type = other DNA
ggtcccatcttcctttcagggtccaggcagtcttccccctcattaaatcaaatttattcccaatcctctgatctccattc

SEQ ID NO: 109385 - DNA, 80 bp, synthetic construct
  misc_feature 1..80: note = Artificially Synthesized Probe
  source 1..80: mol_type = other DNA
gtggtgttcccgggacaccaggcactggaggtcggcacgcttattgtaatgaatctgaaggcagcccccaccaacgcgct

SEQ ID NO: 109386 - DNA, 80 bp, synthetic construct
  misc_feature 1..80: note = Artificially Synthesized Probe
  source 1..80: mol_type = other DNA
tttttcggagcctgttgaatcacatcacaaatgcaatttatagtttgcctcaagatgttttccggaaccttcctgcagag

SEQ ID NO: 109387 - DNA, 80 bp, synthetic construct
  misc_feature 1..80: note = Artificially Synthesized Probe
  source 1..80: mol_type = other DNA
catcaccgcgtgacatgtgtaattactgcactcggaagcacagtccaaatttattccattcacaggacatttatttcatt

SEQ ID NO: 109388 - DNA, 80 bp, synthetic construct
  misc_feature 1..80: note = Artificially Synthesized Probe
  source 1..80: mol_type = other DNA
tggttcactcttattttatcacaaacgttgcataataaaacattcctggtgcccctcgtgattcgcagcctcctgagagg

SEQ ID NO: 109389 - DNA, 80 bp, synthetic construct
  misc_feature 1..80: note = Artificially Synthesized Probe
  source 1..80: mol_type = other DNA
tcgtgagcaccatcagccctgcctggagcaccggagggtgccaaggggggctttcttttctttgcttctcctgctgcccc

SEQ ID NO: 109390 - DNA, 80 bp, synthetic construct
  misc_feature 1..80: note = Artificially Synthesized Probe
  source 1..80: mol_type = other DNA
tgctcacaggcactgctgcttggggatgaaatgtatatttttatggaaatgttaaaaattatttttggctgcctaaatta

SEQ ID NO: 109391 - DNA, 80 bp, synthetic construct
  misc_feature 1..80: note = Artificially Synthesized Probe
  source 1..80: mol_type = other DNA
ggctcccacagactctgagtcaagaactccttctgccgctgcaggagctgcagccagacgaggtttctagaagccatggc

SEQ ID NO: 109392 - DNA, 80 bp, synthetic construct
  misc_feature 1..80: note = Artificially Synthesized Probe
  source 1..80: mol_type = other DNA
ccacgagttaactaatacattttcataagcacatttgctgcctaggccaggtttctgtcgcttgctaataagaattaatt

SEQ ID NO: 109393 - DNA, 80 bp, synthetic construct
  misc_feature 1..80: note = Artificially Synthesized Probe
  source 1..80: mol_type = other DNA
ccgatcacacgctgagtaggcactgaaagaaaagtgactgaaatgtgagctcaattcttaatctaaccctgttctcagga

SEQ ID NO: 109394 - DNA, 80 bp, synthetic construct
  misc_feature 1..80: note = Artificially Synthesized Probe
  source 1..80: mol_type = other DNA
ctcttacatgacgaggggacattttcagtgagttaccgagacagttagaggtgtagctttggtaagctaaattgaataaa

SEQ ID NO: 109395 - DNA, 80 bp, synthetic construct
  misc_feature 1..80: note = Artificially Synthesized Probe
  source 1..80: mol_type = other DNA
taccaccgccaggagaaattattttaggttggtcatggctttctattgttactctaagttgcttcccctcccccctttaa

SEQ ID NO: 109396 - DNA, 80 bp, synthetic construct
  misc_feature 1..80: note = Artificially Synthesized Probe
  source 1..80: mol_type = other DNA
tgctttattattctgaactatttgagagaaacttatggacatgattttcccttagttctaaatacttcagtgcttatttc

SEQ ID NO: 109397 - DNA, 80 bp, synthetic construct
  misc_feature 1..80: note = Artificially Synthesized Probe
  source 1..80: mol_type = other DNA
cctcaggtgtaggttcagctgtgtggttttccaacttctgatctgtaaaggaaactttctacaacgccacacataacagc

SEQ ID NO: 109398 - DNA, 80 bp, synthetic construct
  misc_feature 1..80: note = Artificially Synthesized Probe
  source 1..80: mol_type = other DNA
cataccgacgtcatgtctctctagcctccttcaatttagaaaatccttcagttcagtctttcttggtctttgtgatagtg

SEQ ID NO: 109399 - DNA, 80 bp, synthetic construct
  misc_feature 1..80: note = Artificially Synthesized Probe
  source 1..80: mol_type = other DNA
gacatttttagagtagggtgagtcactctgacagttttacagtagggttgggtcattctgacagtttgagagtggggtga

SEQ ID NO: 109400 - DNA, 80 bp, synthetic construct
  misc_feature 1..80: note = Artificially Synthesized Probe
  source 1..80: mol_type = other DNA
tttgactgacatttatagagtaagggtgagtcattctgattgacagttttagaggaggggtgaatcactccgattgacag

SEQ ID NO: 109401 - DNA, 80 bp, synthetic construct
  misc_feature 1..80: note = Artificially Synthesized Probe
  source 1..80: mol_type = other DNA
actggcatttttagaggagggatgagtcactctgactgacagttttagaggaggggtgagtcactcattgacagttttag

SEQ ID NO: 109402 - DNA, 80 bp, synthetic construct
  misc_feature 1..80: note = Artificially Synthesized Probe
  source 1..80: mol_type = other DNA
agttttagaggaagggtgagtcattctgattgacagttttagaggaggggtgagtcactctgattgacagctttagagga

SEQ ID NO: 109403 - DNA, 80 bp, synthetic construct
  misc_feature 1..80: note = Artificially Synthesized Probe
  source 1..80: mol_type = other DNA
agaggaagggtgagtcactctgactgacagttttagaggaggggtgagtcactctgattgacagttttagtggagggatg

SEQ ID NO: 109404 - DNA, 80 bp, synthetic construct
  misc_feature 1..80: note = Artificially Synthesized Probe
  source 1..80: mol_type = other DNA
aggaggggtgagtcactctgattgacagctttagaggaagggtgagtcactctgattgacagttttagaggaaggatgag

SEQ ID NO: 109405 - DNA, 80 bp, synthetic construct
  misc_feature 1..80: note = Artificially Synthesized Probe
  source 1..80: mol_type = other DNA
gtataccgtggctgcctcaggaatagactgggttttgctctttgtcgagaacaccagggacatcatcttttgtgttcttt

SEQ ID NO: 109406 - DNA, 80 bp, synthetic construct
  misc_feature 1..80: note = Artificially Synthesized Probe
  source 1..80: mol_type = other DNA
tatcttgtggtgagagctattctgtggttctccagaatatcggccgctcattttagcatcaatgattcttatctgaatca

SEQ ID NO: 109407 - DNA, 80 bp, synthetic construct
  misc_feature 1..80: note = Artificially Synthesized Probe
  source 1..80: mol_type = other DNA
cttcttttcaaagtacttcacggaaagcagtactgcactgctgcaatttcatttgtttataccgaaatatggcaacacta

SEQ ID NO: 109408 - DNA, 80 bp, synthetic construct
  misc_feature 1..80: note = Artificially Synthesized Probe
  source 1..80: mol_type = other DNA
tgagtcaactggcacatcggctcacctcgatagcatttgcacatttgactggaagcctctggcttgtagaattttttccc

SEQ ID NO: 109409 - DNA, 80 bp, synthetic construct
  misc_feature 1..80: note = Artificially Synthesized Probe
  source 1..80: mol_type = other DNA
cagggctgtctcacttcctccagaagctctcagtctgctgccatttcttgggttcttcatccttcctgtggacctgggtc

SEQ ID NO: 109410 - DNA, 80 bp, synthetic construct
  misc_feature 1..80: note = Artificially Synthesized Probe
  source 1..80: mol_type = other DNA
ttgttttctcccttgcagaaccttaaagagttgtcaaattgtctcctggtttctgctgtttctagtgaagaatgaagtca

SEQ ID NO: 109411 - DNA, 80 bp, synthetic construct
  misc_feature 1..80: note = Artificially Synthesized Probe
  source 1..80: mol_type = other DNA
caggtggagggtgggtagggttgctggttttgaatattaattcttctttttttgtgtcccacctttcttggctcatcttc

SEQ ID NO: 109412 - DNA, 80 bp, synthetic construct
  misc_feature 1..80: note = Artificially Synthesized Probe
  source 1..80: mol_type = other DNA
tttgccaattcattcttctgcagtctctgatccgctgtaaagcccatgcagtgaatttcccatcttacaagctctccttt

SEQ ID NO: 109413 - DNA, 80 bp, synthetic construct
  misc_feature 1..80: note = Artificially Synthesized Probe
  source 1..80: mol_type = other DNA
cttttctcttctttatgggtcctaatgtcctgtttcttaacatgtttagcaattttggactgcaagatgaacattggcgg

SEQ ID NO: 109414 - DNA, 80 bp, synthetic construct
  misc_feature 1..80: note = Artificially Synthesized Probe
  source 1..80: mol_type = other DNA
ctccctcaggggggtctagccatcctcagcatctgtgtcgctccctcaggggggtctagccatcctcagcatctgtgtcg

SEQ ID NO: 109415 - DNA, 80 bp, synthetic construct
  misc_feature 1..80: note = Artificially Synthesized Probe
  source 1..80: mol_type = other DNA
cgccattctgtcctgtgtgcttcgcaatccgaaagtgaaccgatcgtaggtgtatgactacagcaaatgcagacacattc

SEQ ID NO: 109416 - DNA, 80 bp, synthetic construct
  misc_feature 1..80: note = Artificially Synthesized Probe
  source 1..80: mol_type = other DNA
tttctttgcaaacacaactggctacttgtggctgtaaacccacatcttaacatttacagcctaactacccaaaaccacta

SEQ ID NO: 109417 - DNA, 80 bp, synthetic construct
  misc_feature 1..80: note = Artificially Synthesized Probe
  source 1..80: mol_type = other DNA
acgagatgctatcgattatgggctctgtgcccctgtcacgttcacacgacatcccaaaccagactctactgggctcattc

SEQ ID NO: 109418 - DNA, 80 bp, synthetic construct
  misc_feature 1..80: note = Artificially Synthesized Probe
  source 1..80: mol_type = other DNA
gtgtctcctccactcggaagccagggtgggggtctacagtgcaggtcggacacctcccgtgtctcctccactcggaagcc

SEQ ID NO: 109419 - DNA, 80 bp, synthetic construct
  misc_feature 1..80: note = Artificially Synthesized Probe
  source 1..80: mol_type = other DNA
gtgcaaagctcttcagaggctcctcatgccctctggagaattttcaagttcgcagggagtgtatgaggccatcctttcgg

SEQ ID NO: 109420 - DNA, 80 bp, synthetic construct
  misc_feature 1..80: note = Artificially Synthesized Probe
  source 1..80: mol_type = other DNA
aagtattttttctcttgtagaatgtctttctgcctgcccctctcacccgcatgtcaacccccttcactggggcaatttct

SEQ ID NO: 109421 - DNA, 80 bp, synthetic construct
  misc_feature 1..80: note = Artificially Synthesized Probe
  source 1..80: mol_type = other DNA
gaacttgcagctggcacacataggtgagtaaaggtccacacggggctggaccacctagaaaaacagcttttgcttattta

SEQ ID NO: 109422 - DNA, 80 bp, synthetic construct
  misc_feature 1..80: note = Artificially Synthesized Probe
  source 1..80: mol_type = other DNA
ctactaagccgctgttgtcaggcacagagaagacactcagcatcggatgagagaataaagccgtgtgcggtgtggcttca

SEQ ID NO: 109423 - DNA, 80 bp, synthetic construct
  misc_feature 1..80: note = Artificially Synthesized Probe
  source 1..80: mol_type = other DNA
ccggggcctggaaaggccaactgcctgttggcctaaagagctagaaaaggatgaatggattcatatttacaaagacacca

SEQ ID NO: 109424 - DNA, 80 bp, synthetic construct
  misc_feature 1..80: note = Artificially Synthesized Probe
  source 1..80: mol_type = other DNA
tctgcaatgggttacattaacttggcagaaatgtttataagcaactgcatttagatgtaaatttggtatccaagacagtt

SEQ ID NO: 109425 - DNA, 80 bp, synthetic construct
  misc_feature 1..80: note = Artificially Synthesized Probe
  source 1..80: mol_type = other DNA
ctgttgttttattttcctttgacaatgtcaagctggaaattagaagcaatgtggcatgcggagccactcagatctgaagc

SEQ ID NO: 109426 - DNA, 80 bp, synthetic construct
  misc_feature 1..80: note = Artificially Synthesized Probe
  source 1..80: mol_type = other DNA
acactttatgaaaggtttcctttgctttgaatagttggctgtctcagaaaaactgcagcacccactggttggaaattaca

SEQ ID NO: 109427 - DNA, 80 bp, synthetic construct
  misc_feature 1..80: note = Artificially Synthesized Probe
  source 1..80: mol_type = other DNA
atcctgctgaaaggttcttgagctgctgctcagcagggacacaggagagggccggatgtgaggggtagacactataagca

SEQ ID NO: 109428 - DNA, 80 bp, synthetic construct
  misc_feature 1..80: note = Artificially Synthesized Probe
  source 1..80: mol_type = other DNA
gtgaacccagatctgctttgcactgaagacctcaatttttactattagtcttaccacatagacaaattaaatgtgacgtg

SEQ ID NO: 109429 - DNA, 80 bp, synthetic construct
  misc_feature 1..80: note = Artificially Synthesized Probe
  source 1..80: mol_type = other DNA
gtagtacactaagcatgattgtttttgagtaaaaagaaccaccctttggggtgttggtgcttatgtaggatgatccaacc

SEQ ID NO: 109430 - DNA, 80 bp, synthetic construct
  misc_feature 1..80: note = Artificially Synthesized Probe
  source 1..80: mol_type = other DNA
gcagtgccttgtgcatggtggcagccacatcaactcacacccaaattccgaattacagtcagataaagtaaagtaaagca

SEQ ID NO: 109431 - DNA, 80 bp, synthetic construct
  misc_feature 1..80: note = Artificially Synthesized Probe
  source 1..80: mol_type = other DNA
cccacctcaatagcgaggtttccagtatccaaattctgaattacaataagataaaataaagcacgcaggtctcctgtctc

SEQ ID NO: 109432 - DNA, 80 bp, synthetic construct
  misc_feature 1..80: note = Artificially Synthesized Probe
  source 1..80: mol_type = other DNA
cagaccaggtcactctcagtgctgtgtgttgtgggtggagctcaccaagtgccaggattcaccctgtggacacagccaca

SEQ ID NO: 109433 - DNA, 80 bp, synthetic construct
  misc_feature 1..80: note = Artificially Synthesized Probe
  source 1..80: mol_type = other DNA
ttccctctggcatatcttacaacctgtgttaataccagggcttttaagatgtgtttgcctagcagttggttttgctaggc

SEQ ID NO: 109434 - DNA, 80 bp, synthetic construct
  misc_feature 1..80: note = Artificially Synthesized Probe
  source 1..80: mol_type = other DNA
tcactgcacaggcggggaagagcagggagtacccaggtcctggaaggtgtcgccgcatgggcagcagagagcagggagga

SEQ ID NO: 109435 - DNA, 80 bp, synthetic construct
  misc_feature 1..80: note = Artificially Synthesized Probe
  source 1..80: mol_type = other DNA
tctgtcagcgatggtggtgttcagaacttggttataactcagccccggctcctttctgaagcctcagtgcagattctttt

SEQ ID NO: 109436 - DNA, 80 bp, synthetic construct
  misc_feature 1..80: note = Artificially Synthesized Probe
  source 1..80: mol_type = other DNA
tattgatttatgttctcacggggctgaaatagtcaatatcctcaaggcacctcactgtgtaacatttacatcggaagcca

SEQ ID NO: 109437 - DNA, 80 bp, synthetic construct
  misc_feature 1..80: note = Artificially Synthesized Probe
  source 1..80: mol_type = other DNA
ctgttacagaaatctaatgccctcccctgtgacactgcaaatctaatgccctctcctgtgacactgcaaatctaacaccc

SEQ ID NO: 109438 - DNA, 80 bp, synthetic construct
  misc_feature 1..80: note = Artificially Synthesized Probe
  source 1..80: mol_type = other DNA
tgcaaatctaacactctccccgaagacactgcaaatctaacgcccccccgtgacactgcaaatctaacgccctgccccat

SEQ ID NO: 109439 - DNA, 80 bp, synthetic construct
  misc_feature 1..80: note = Artificially Synthesized Probe
  source 1..80: mol_type = other DNA
taacacccccccgtgacactgcaaatctaacaccctccccaccacgacactgcaaatctaacactctcccccgtgacact

SEQ ID NO: 109440 - DNA, 80 bp, synthetic construct
  misc_feature 1..80: note = Artificially Synthesized Probe
  source 1..80: mol_type = other DNA
cctccccaccacgacactgcaaatctaacaccctccccaccacgacactgcaaatctaacactctcccccatgacactgc

SEQ ID NO: 109441 - DNA, 80 bp, synthetic construct
  misc_feature 1..80: note = Artificially Synthesized Probe
  source 1..80: mol_type = other DNA
accctctcaatcatgacactgcaaatctaacaccctcccccatgacactgcaaatctaacatcctccccaccatgacact

SEQ ID NO: 109442 - DNA, 80 bp, synthetic construct
  misc_feature 1..80: note = Artificially Synthesized Probe
  source 1..80: mol_type = other DNA
catctgtgcagggacatacgtccatgcatgtgtataaaagatctctgtaatttttatcagggctaggaccatcctgaaag

SEQ ID NO: 109443 - DNA, 80 bp, synthetic construct
  misc_feature 1..80: note = Artificially Synthesized Probe
  source 1..80: mol_type = other DNA
gccaggctgagtgcccatctcctcacaggacacagcgctctctgcaggacttttgctaagtggttggtcccctgcagcaa

SEQ ID NO: 109444 - DNA, 80 bp, synthetic construct
  misc_feature 1..80: note = Artificially Synthesized Probe
  source 1..80: mol_type = other DNA
ctccacacacgagggtcctcagcatgccttccacacgcacaggggtcctcggcccaccctccacacacaggggtcctcgg

SEQ ID NO: 109445 - DNA, 80 bp, synthetic construct
  misc_feature 1..80: note = Artificially Synthesized Probe
  source 1..80: mol_type = other DNA
agttttgctcccgcatctgagggctgcgtgtcacctcactgtgacttctgactgcacagcaggtgttggtgtggggagtc

SEQ ID NO: 109446 - DNA, 80 bp, synthetic construct
  misc_feature 1..80: note = Artificially Synthesized Probe
  source 1..80: mol_type = other DNA
ggagctggtggaatatgactccaccagctccagaccccaacttctccgcgttcacctgtacatcgcaagtgtctaaaaat

SEQ ID NO: 109447 - DNA, 80 bp, synthetic construct
  misc_feature 1..80: note = Artificially Synthesized Probe
  source 1..80: mol_type = other DNA
aaatcggttcttccatcacataacaatttaatgtgccttcagaaggtggagaagctcatggaagccattacgaaaatgag

SEQ ID NO: 109448 - DNA, 80 bp, synthetic construct
  misc_feature 1..80: note = Artificially Synthesized Probe
  source 1..80: mol_type = other DNA
ttgtccttccttttcattcccactggtgccaccccagccaccttcatctgcgtagcctgaatcactgtggcctaactggg

SEQ ID NO: 109449 - DNA, 80 bp, synthetic construct
  misc_feature 1..80: note = Artificially Synthesized Probe
  source 1..80: mol_type = other DNA
ggcttaaaaatttggccccaggaagcctttgcattcataactgtagctaccactattcactgctccaaaattcaaaggag

SEQ ID NO: 109450 - DNA, 80 bp, synthetic construct
  misc_feature 1..80: note = Artificially Synthesized Probe
  source 1..80: mol_type = other DNA
gataggagtttatttcaaaggagtaaaatacaacagcaacagatgaccagatgaccatcttagcctaaactgcatctgag

SEQ ID NO: 109451 - DNA, 80 bp, synthetic construct
  misc_feature 1..80: note = Artificially Synthesized Probe
  source 1..80: mol_type = other DNA
aagcgatgcagaatctcaccagaggataaacaggcaaagaactttggggctttgctaggaaaatgtcttactctgcggac

SEQ ID NO: 109452 - DNA, 80 bp, synthetic construct
  misc_feature 1..80: note = Artificially Synthesized Probe
  source 1..80: mol_type = other DNA
ctacaccctttaaattcagtgacagccaacagaatcacttcctgcccttgaaatccaacaatgtctccacaggaagcatc

SEQ ID NO: 109453 - DNA, 80 bp, synthetic construct
  misc_feature 1..80: note = Artificially Synthesized Probe
  source 1..80: mol_type = other DNA
gaaaccccctcccaagatgccaaggaagccccccacccccaggatactgaagtcctccccagatgccaaagctcccagag

SEQ ID NO: 109454 - DNA, 80 bp, synthetic construct
  misc_feature 1..80: note = Artificially Synthesized Probe
  source 1..80: mol_type = other DNA
gtctaagggtcaagttgatcactacaccatccccttttagtgtttttgtatctgttttgactccctattatttttctggt

SEQ ID NO: 109455 - DNA, 80 bp, synthetic construct
  misc_feature 1..80: note = Artificially Synthesized Probe
  source 1..80: mol_type = other DNA
aattacagacactccgagcccaggacaggctccagatgcccggccttcatgcagcaaacaccttcacagggaaggaaggc

SEQ ID NO: 109456 - DNA, 80 bp, synthetic construct
  misc_feature 1..80: note = Artificially Synthesized Probe
  source 1..80: mol_type = other DNA
cggtaccactcccaccactgactgaaccttggaatcaatacaatgcagggtagagcaattcatttgaattaatgtgttaa

SEQ ID NO: 109457 - DNA, 80 bp, synthetic construct
  misc_feature 1..80: note = Artificially Synthesized Probe
  source 1..80: mol_type = other DNA
aagcatccctagacatgttgattagaaatagtcttaagagggtcaaactatgtccacagaggctggaacaccaaaataga

SEQ ID NO: 109458 - DNA, 80 bp, synthetic construct
  misc_feature 1..80: note = Artificially Synthesized Probe
  source 1..80: mol_type = other DNA
gctgggaagcagcatgcttcttggggggcaggcattgtctacaacacagactacacagtccacagtccacaactcctgaa

SEQ ID NO: 109459 - DNA, 80 bp, synthetic construct
  misc_feature 1..80: note = Artificially Synthesized Probe
  source 1..80: mol_type = other DNA
gcctcggaccagcccctgtgtgagatggagatgtgtttagtgtgggaggaacacggtgagaggtcagagacagagcaggg

SEQ ID NO: 109460 - DNA, 80 bp, synthetic construct
  misc_feature 1..80: note = Artificially Synthesized Probe
  source 1..80: mol_type = other DNA
ccgcccttcattatggggcgccttcccggctctctgaagatttggttaagattaaatccaaatgaaacttaatttaaaca

SEQ ID NO: 109461 - DNA, 80 bp, synthetic construct
  misc_feature 1..80: note = Artificially Synthesized Probe
  source 1..80: mol_type = other DNA
tcacagcctccgcctgctagctgctcccggccaacccccatgggcacactgaccccgtgtgtcccgaagaccccccgcct

SEQ ID NO: 109462 - DNA, 80 bp, synthetic construct
  misc_feature 1..80: note = Artificially Synthesized Probe
  source 1..80: mol_type = other DNA
ctcggacaatggcgcctccaactcgaacaatgccacctccaacttggacaatgtcgcctccacctcagacaatggcgcct

SEQ ID NO: 109463 - DNA, 80 bp, synthetic construct
  misc_feature 1..80: note = Artificially Synthesized Probe
  source 1..80: mol_type = other DNA
tgccgccttcccacctccacaaagtctgcttcctaaagagcaagtccagccacaccacttcctggcttcagttgtcccat

SEQ ID NO: 109464 - DNA, 80 bp, synthetic construct
  misc_feature 1..80: note = Artificially Synthesized Probe
  source 1..80: mol_type = other DNA
cctggtggctaaagattcctaatctggcccttgaagactcaggcaaacttagaagctcctggtttcaaacttctctttcc

SEQ ID NO: 109465 - DNA, 80 bp, synthetic construct
  misc_feature 1..80: note = Artificially Synthesized Probe
  source 1..80: mol_type = other DNA
aagcctcttcagctggcccatgcctcatgggagttttgtagctctttctgcgtttgagaagacactaaaaaaaaaaaagt

SEQ ID NO: 109466 - DNA, 80 bp, synthetic construct
  misc_feature 1..80: note = Artificially Synthesized Probe
  source 1..80: mol_type = other DNA
ttcatggatgcctatttttgtcccaaaataaagactctgcatgtcaccatgttgatgcatctggaaacaagtgagaggct

SEQ ID NO: 109467 - DNA, 80 bp, synthetic construct
  misc_feature 1..80: note = Artificially Synthesized Probe
  source 1..80: mol_type = other DNA
tggtgtcaccactgtgggattcaacactttgaagaattaaggcagaggttacttttgtccacaaaatcacatcctgcagt

SEQ ID NO: 109468 - DNA, 80 bp, synthetic construct
  misc_feature 1..80: note = Artificially Synthesized Probe
  source 1..80: mol_type = other DNA
tgtgggatgtgccttgaatcgtctgagggtcaaagaatcaggggtctctatccattgactcccatcccttgctctctgaa

SEQ ID NO: 109469 - DNA, 80 bp, synthetic construct
  misc_feature 1..80: note = Artificially Synthesized Probe
  source 1..80: mol_type = other DNA
gctgttcatggaactgattacattatcttgtgttcctttgaatcggtacaaagcaactcaatcgaggaggaaaactatgg

SEQ ID NO: 109470 - DNA, 80 bp, synthetic construct
  misc_feature 1..80: note = Artificially Synthesized Probe
  source 1..80: mol_type = other DNA
ggcaggatgcgaaaaggtctgtcaaaggggtacttcttccaagtgggccaaagactccatcaggtcgagtagtgacatgg

SEQ ID NO: 109471 - DNA, 80 bp, synthetic construct
  misc_feature 1..80: note = Artificially Synthesized Probe
  source 1..80: mol_type = other DNA
aaccagggggtgctaaattgagaaagagaatgctaaattttggttaaaagacattctgtggtttttgcttgcccacctat

SEQ ID NO: 109472 - DNA, 80 bp, synthetic construct
  misc_feature 1..80: note = Artificially Synthesized Probe
  source 1..80: mol_type = other DNA
gaaccctgttttagcacctttgggcgagactggctttccaggaggaagctgacgaaatcatgtatagagttatactgacc

SEQ ID NO: 109473 - DNA, 80 bp, synthetic construct
  misc_feature 1..80: note = Artificially Synthesized Probe
  source 1..80: mol_type = other DNA
atcttgtacttgagatcgtcaataagatcaacagcagtttttcaccagaaaccatggaggcctgaaggcagtgggatgat

SEQ ID NO: 109474 - DNA, 80 bp, synthetic construct
  misc_feature 1..80: note = Artificially Synthesized Probe
  source 1..80: mol_type = other DNA
acaggctgaaatgcaggtcattgaggctgaaattctaaacagtaaccagaagccatacaagaaaataaagaacttcagta

SEQ ID NO: 109475 - DNA, 80 bp, synthetic construct
  misc_feature 1..80: note = Artificially Synthesized Probe
  source 1..80: mol_type = other DNA
caacataaagctgggaaggaagctattcagaagcagtttttgtgtgcttttgaagctaagttggtataaattcaaactac

SEQ ID NO: 109476 - DNA, 80 bp, synthetic construct
  misc_feature 1..80: note = Artificially Synthesized Probe
  source 1..80: mol_type = other DNA
ggaaaaaaggtgtaagacatacagaaaccagcagcaaagtggcagaagtaaatccttccttaacagaaattactgtaaat

SEQ ID NO: 109477 - DNA, 80 bp, synthetic construct
  misc_feature 1..80: note = Artificially Synthesized Probe
  source 1..80: mol_type = other DNA
gcccattgaagtattttggatttcatatttttggattatggaagctcaactggtgagtccggttggccttaaaacaagat

SEQ ID NO: 109478 - DNA, 80 bp, synthetic construct
  misc_feature 1..80: note = Artificially Synthesized Probe
  source 1..80: mol_type = other DNA
ttttggtacacattgcagggggcgggtgtcttagaaccaatcatctgcatatatgagatgaccacaaatgttccaaaatt

SEQ ID NO: 109479 - DNA, 80 bp, synthetic construct
  misc_feature 1..80: note = Artificially Synthesized Probe
  source 1..80: mol_type = other DNA
taaggttcaatttctaatcggggagaagtttcactattttctttctcattgacttggtctttgctgacaggtgaaatacg

SEQ ID NO: 109480 - DNA, 80 bp, synthetic construct
  misc_feature 1..80: note = Artificially Synthesized Probe
  source 1..80: mol_type = other DNA
gtaaaatgatgcattttgggatggtgaaaatgttacatacaggtggcagttgcacaatgttgtgaatgtaccaagtgcca

SEQ ID NO: 109481 - DNA, 80 bp, synthetic construct
  misc_feature 1..80: note = Artificially Synthesized Probe
  source 1..80: mol_type = other DNA
cctctttgtgctacccagcacagtgcctggaataataaatatttactgaaggcatcactaagcatggagttgaacatcat

SEQ ID NO: 109482 - DNA, 80 bp, synthetic construct
  misc_feature 1..80: note = Artificially Synthesized Probe
  source 1..80: mol_type = other DNA
atattccaagacccttaggaacaagtggtaattgtttactatctagacgggactctcctacttgataaaagtctcctgct

SEQ ID NO: 109483 - DNA, 80 bp, synthetic construct
  misc_feature 1..80: note = Artificially Synthesized Probe
  source 1..80: mol_type = other DNA
tcaaacaattcaggcttctttaagcctccagcttgcaactatctgactcattaagttgaagttggcaggaaagttataaa

SEQ ID NO: 109484 - DNA, 80 bp, synthetic construct
  misc_feature 1..80: note = Artificially Synthesized Probe
  source 1..80: mol_type = other DNA
tatctcaatggaaacactgttcttgtgtgttcagtatctgtgtgcatgttaatcttcctgtgagatcataaagctctgta

SEQ ID NO: 109485 - DNA, 80 bp, synthetic construct
  misc_feature 1..80: note = Artificially Synthesized Probe
  source 1..80: mol_type = other DNA
ctggtcccgtcctgctctaaaatgttcagatgcataatgggttatttttgttggtatttgggtgggtcgaatgctcactg

SEQ ID NO: 109486 - DNA, 80 bp, synthetic construct
  misc_feature 1..80: note = Artificially Synthesized Probe
  source 1..80: mol_type = other DNA
gttatttttgtcggtatttgggtggtatttttgctctatgacctcccatttctctgacgtctctagattcctttgttatt

SEQ ID NO: 109487 - DNA, 80 bp, synthetic construct
  misc_feature 1..80: note = Artificially Synthesized Probe
  source 1..80: mol_type = other DNA
agtgaaagcgccttctttccatatcggatgctggaagctgtgatgttggcaaacggctctttgcatgaagtactgtgtac

SEQ ID NO: 109488 - DNA, 80 bp, synthetic construct
  misc_feature 1..80: note = Artificially Synthesized Probe
  source 1..80: mol_type = other DNA
cactagcaatattcccagctggttgaccttcatttgttttagtttgatttcatccaacacagctttatcttacctgctgc

SEQ ID NO: 109489 - DNA, 80 bp, synthetic construct
  misc_feature 1..80: note = Artificially Synthesized Probe
  source 1..80: mol_type = other DNA
atatgaatatccactctaatacggttcagagaaggatgatctgttatctgaaacttttactgcaaaagctcttttaatca

SEQ ID NO: 109490 - DNA, 80 bp, synthetic construct
  misc_feature 1..80: note = Artificially Synthesized Probe
  source 1..80: mol_type = other DNA
ccatcttccctattggcaccttcagtccccggaggcgctgctgatgctcataggaagggactaaggccttcacagtctgt

SEQ ID NO: 109491 - DNA, 80 bp, synthetic construct
  misc_feature 1..80: note = Artificially Synthesized Probe
  source 1..80: mol_type = other DNA
atgcagttcattggaatgcgcagtttacaaaactgtatgcctgaattccagaaatgaccattactggcacttcctgtttg

SEQ ID NO: 109492 - DNA, 80 bp, synthetic construct
  misc_feature 1..80: note = Artificially Synthesized Probe
  source 1..80: mol_type = other DNA
tccgcttccgcagtcttcaggcctcaggcactgccagtgacattagctgctgtgcgtccctcctgccggactgcaacacc

SEQ ID NO: 109493 - DNA, 80 bp, synthetic construct
  misc_feature 1..80: note = Artificially Synthesized Probe
  source 1..80: mol_type = other DNA
cgcctgtctggcctgggcgcccactcactcctgctgcacctgccacaactgccggctgatcctgctgctctgatgccccc

SEQ ID NO: 109494 - DNA, 80 bp, synthetic construct
  misc_feature 1..80: note = Artificially Synthesized Probe
  source 1..80: mol_type = other DNA
aagcctctcgggctgggcagggagtccaggccctgggagccccccagagccccccacagaatgtgcagctagcctcgcca

SEQ ID NO: 109495 - DNA, 80 bp, synthetic construct
  misc_feature 1..80: note = Artificially Synthesized Probe
  source 1..80: mol_type = other DNA
ggtgggtagtgtgcatccctgagacggggtgggggacacggggggagacaggcgagggtgggtagtgtgcatgcctgaga

SEQ ID NO: 109496 - DNA, 80 bp, synthetic construct
  misc_feature 1..80: note = Artificially Synthesized Probe
  source 1..80: mol_type = other DNA
atggagacacaggtgtggcttctgttcctgtatctctagtaaatgtttccttctgagaaactgggtctgtcagcctcttt

SEQ ID NO: 109497 - DNA, 80 bp, synthetic construct
  misc_feature 1..80: note = Artificially Synthesized Probe
  source 1..80: mol_type = other DNA
ctgggtacagcagacttcatatcacagagacttccctctccaggacgtgaagatgtccatcaccgagacgtcagcacggc

SEQ ID NO: 109498 - DNA, 80 bp, synthetic construct
  misc_feature 1..80: note = Artificially Synthesized Probe
  source 1..80: mol_type = other DNA
ccacggggtgagccctctggctcgagaagtcctcagcgacatctgggggtcctgtgcatgcaccatgttgactgtacccg

SEQ ID NO: 109499 - DNA, 80 bp, synthetic construct
  misc_feature 1..80: note = Artificially Synthesized Probe
  source 1..80: mol_type = other DNA
ggggctggcagcactccccgagcacagtgggaactcaggagcaggggctggcggcactccccgggcacagagggaacggc

SEQ ID NO: 109500 - DNA, 80 bp, synthetic construct
  misc_feature 1..80: note = Artificially Synthesized Probe
  source 1..80: mol_type = other DNA
accgtggcacctgcacaccccagcacctgcacacccgagccgagcccctgcacatctgagcacctgcacatccgagcccc

SEQ ID NO: 109501 - DNA, 80 bp, synthetic construct
  misc_feature 1..80: note = Artificially Synthesized Probe
  source 1..80: mol_type = other DNA
ccctaaagacttctatgacatcctgacactgccctgcttggacactctctggacaggagacacctcacccctcacagaca

SEQ ID NO: 109502 - DNA, 80 bp, synthetic construct
  misc_feature 1..80: note = Artificially Synthesized Probe
  source 1..80: mol_type = other DNA
gcataagagcggtgctggagaaatgtaagcaaatccgcatttcgaagcagaaatcgctggtttaaatattctctcctttc

SEQ ID NO: 109503 - DNA, 80 bp, synthetic construct
  misc_feature 1..80: note = Artificially Synthesized Probe
  source 1..80: mol_type = other DNA
caggcagagccacttccagtttcctgactaaaaagtgaaagttccagaagcattcctagatctgtggtgtgtgtggtgca

SEQ ID NO: 109504 - DNA, 80 bp, synthetic construct
  misc_feature 1..80: note = Artificially Synthesized Probe
  source 1..80: mol_type = other DNA
tgtgtggtgtgtgtaatctctgcatgtgtgtctatgtgggtggtacccgtgtactgtgtgtgtgctgtgtggtgtgtgtg

SEQ ID NO: 109505 - DNA, 80 bp, synthetic construct
  misc_feature 1..80: note = Artificially Synthesized Probe
  source 1..80: mol_type = other DNA
tgtgtggtgtgtgtgtgtggtgcacgtgtgctgtgtggtgtgtgtagtctctgcatgtgtgtctatgtgggtggtgcctg

SEQ ID NO: 109506 - DNA, 80 bp, synthetic construct
  misc_feature 1..80: note = Artificially Synthesized Probe
  source 1..80: mol_type = other DNA
agtgggggtggcctctcccatgcagttgagtgtcctgggagggaaagcacagaagttctttctggtatctttagaaccaa

SEQ ID NO: 109507 - DNA, 80 bp, synthetic construct
  misc_feature 1..80: note = Artificially Synthesized Probe
  source 1..80: mol_type = other DNA
taaaaatttagaaattgctggcaatctttttgtttttacaaaatgccacttcctagtttgtttctgggtagtgtgggagt

SEQ ID NO: 109508 - DNA, 80 bp, synthetic construct
  misc_feature 1..80: note = Artificially Synthesized Probe
  source 1..80: mol_type = other DNA
ggtgtagctgcgaattttctatccaggcacatctcttcactgctgattaagctacctctttttgccaaacatactctata

SEQ ID NO: 109509 - DNA, 80 bp, synthetic construct
  misc_feature 1..80: note = Artificially Synthesized Probe
  source 1..80: mol_type = other DNA
gtctcatcagcagccaggggagggcttaccagtaatttttaagccatttcaacttctctgaaggcaaaacctgggaaagc

SEQ ID NO: 109510 - DNA, 80 bp, synthetic construct
  misc_feature 1..80: note = Artificially Synthesized Probe
  source 1..80: mol_type = other DNA
cgagcccctccacactccagcacctggacacaccagcacctgcacaccccagcacctgcacaccccagcacctgcacacc

SEQ ID NO: 109511 - DNA, 80 bp, synthetic construct
  misc_feature 1..80: note = Artificially Synthesized Probe
  source 1..80: mol_type = other DNA
tcaactctcttcttcagacaactcccaaccattgtggttttaagtggcagggcacagctcagaagagaaagacaaggagg

SEQ ID NO: 109512 - DNA, 80 bp, synthetic construct
  misc_feature 1..80: note = Artificially Synthesized Probe
  source 1..80: mol_type = other DNA
agtgcatctgagaaaacccccaaattggtgcgatttccaataatacgtagcctttgcatatttctaaagagagtcagagg

SEQ ID NO: 109513 - DNA, 80 bp, synthetic construct
  misc_feature 1..80: note = Artificially Synthesized Probe
  source 1..80: mol_type = other DNA
tgtgtttctcttgtgtttggatgagattttattcttcctacgtgctggcatttagtacactgttgtttatggctgtttga

SEQ ID NO: 109514 - DNA, 80 bp, synthetic construct
  misc_feature 1..80: note = Artificially Synthesized Probe
  source 1..80: mol_type = other DNA
aagagacgtggagcacatctggagggggaggctgggctgctgctgtagccgtgatcgctccggtccacatctgggttcat

SEQ ID NO: 109515 - DNA, 80 bp, synthetic construct
  misc_feature 1..80: note = Artificially Synthesized Probe
  source 1..80: mol_type = other DNA
gctgaaaaatcctcagacacaaatgaatctgttcgactcaatgtgcactcaacaattgactggctatccctagccctctt

SEQ ID NO: 109516 - DNA, 80 bp, synthetic construct
  misc_feature 1..80: note = Artificially Synthesized Probe
  source 1..80: mol_type = other DNA
ccaccagaatcaagggcccacagaggaatcaagtttcaggggtcatggtgggaacctcactttcccagaggataaactgt

SEQ ID NO: 109517 - DNA, 80 bp, synthetic construct
  misc_feature 1..80: note = Artificially Synthesized Probe
  source 1..80: mol_type = other DNA
tcatttaaatctgcaaccttgctagaatgcctggctcatgccactatgaaaacctgcatctgagcccattctgttttgaa

SEQ ID NO: 109518 - DNA, 80 bp, synthetic construct
  misc_feature 1..80: note = Artificially Synthesized Probe
  source 1..80: mol_type = other DNA
gagagcccactgttactctagagcaggggacaagagtcacccaaggtgactataagtccccacaaattcatctgatgtgc

SEQ ID NO: 109519 - DNA, 80 bp, synthetic construct
  misc_feature 1..80: note = Artificially Synthesized Probe
  source 1..80: mol_type = other DNA
agaggatgagatgtttaaagagaagcatatccatggaatcaaaatgcgatcagagcattatggccaaataatccctaaga

SEQ ID NO: 109520 - DNA, 80 bp, synthetic construct
  misc_feature 1..80: note = Artificially Synthesized Probe
  source 1..80: mol_type = other DNA
tttgcacacctacaaacaggataacacaagaaatgggaaaattcctagaaatacgcaacctactgagactgagtcatgaa

SEQ ID NO: 109521 - DNA, 80 bp, synthetic construct
  misc_feature 1..80: note = Artificially Synthesized Probe
  source 1..80: mol_type = other DNA
gaagaggaaacaatttctaactaatcctgtgagtccagcattactctgacacgaaagccagacagacactacaagcaaac

SEQ ID NO: 109522 - DNA, 80 bp, synthetic construct
  misc_feature 1..80: note = Artificially Synthesized Probe
  source 1..80: mol_type = other DNA
ccagcccctgcacaccccagcacctgcacaccgcagcccctgcacaccccagcacctgcacacccgagcccctgcacacc

SEQ ID NO: 109523 - DNA, 80 bp, synthetic construct
  misc_feature 1..80: note = Artificially Synthesized Probe
  source 1..80: mol_type = other DNA
ggatgtattcctagaatgcaagaatggttcaacacataaaaaataataaacgcaatacaccccactaacagaatgaagga

SEQ ID NO: 109524 - DNA, 80 bp, synthetic construct
  misc_feature 1..80: note = Artificially Synthesized Probe
  source 1..80: mol_type = other DNA
ggccatatatgaaaaatctgcagctaatgtaacactccagggtaaaagatggaagacttttcctttaagactaggaacaa

SEQ ID NO: 109525 - DNA, 80 bp, synthetic construct
  misc_feature 1..80: note = Artificially Synthesized Probe
  source 1..80: mol_type = other DNA
taaagattttacacaagagatctgttagaacttaatagaatttattaacaaatttagtaaagttgcagggtataaaatca

SEQ ID NO: 109526 - DNA, 80 bp, synthetic construct
  misc_feature 1..80: note = Artificially Synthesized Probe
  source 1..80: mol_type = other DNA
gttaaatgaaagaagacacaaataagtggaaagacatcccatcttcacgtattataaggctcattattgttagcttttaa

SEQ ID NO: 109527 - DNA, 80 bp, synthetic construct
  misc_feature 1..80: note = Artificially Synthesized Probe
  source 1..80: mol_type = other DNA
cttacaacaaagctatagtaatcaaaacagcatggtcctggcagaaaggcagacatatagaccaatggactataaaacgg

SEQ ID NO: 109528 - DNA, 80 bp, synthetic construct
  misc_feature 1..80: note = Artificially Synthesized Probe
  source 1..80: mol_type = other DNA
gatcaaatatctgaatttacaagatgaaactataaagctctaggaagacttagggggaagcttcatgacactggatttgg

SEQ ID NO: 109529 - DNA, 80 bp, synthetic construct
  misc_feature 1..80: note = Artificially Synthesized Probe
  source 1..80: mol_type = other DNA
ttacatatctgattaggagtatctagaacatatgtaagactcctacacccaacaacaaagaagcaaggattggaatagac

SEQ ID NO: 109530 - DNA, 80 bp, synthetic construct
  misc_feature 1..80: note = Artificially Synthesized Probe
  source 1..80: mol_type = other DNA
ccatcctcagaaaaccagaaaacaagggctcatgagggtgtaaagagactgaaactcgtgtgtactcctagtgggaatgt

SEQ ID NO: 109531 - DNA, 80 bp, synthetic construct
  misc_feature 1..80: note = Artificially Synthesized Probe
  source 1..80: mol_type = other DNA
attcccaacagccagaaggtggaagcaagctgagtgcccatcaggggaagaacagataaaaaacatgtggtctatacacg

SEQ ID NO: 109532 - DNA, 80 bp, synthetic construct
  misc_feature 1..80: note = Artificially Synthesized Probe
  source 1..80: mol_type = other DNA
gacagaaagtggaacggtgggtaccaggggccgggggaggggttgaggagttcttgtttagtgaatacagagtttcagtt

SEQ ID NO: 109533 - DNA, 80 bp, synthetic construct
  misc_feature 1..80: note = Artificially Synthesized Probe
  source 1..80: mol_type = other DNA
acttgcaccaccatccctggatcgaaccaaagtcaccaacatggactgaaaatgagccgcaagtgctggatcccgagtgt

SEQ ID NO: 109534 - DNA, 80 bp, synthetic construct
  misc_feature 1..80: note = Artificially Synthesized Probe
  source 1..80: mol_type = other DNA
tgggaagaatcataatcaggtgctgttttaaactgtaaatcaataaaacctttctgaaaaaggagttgggtggcacatgt

SEQ ID NO: 109535 - DNA, 80 bp, synthetic construct
  misc_feature 1..80: note = Artificially Synthesized Probe
  source 1..80: mol_type = other DNA
aaaaattattcatccgttaaaatgatattacaaatgttgaaaagaccaagatatttttatgatacaatgataaatgaaaa

SEQ ID NO: 109536 - DNA, 80 bp, synthetic construct
  misc_feature 1..80: note = Artificially Synthesized Probe
  source 1..80: mol_type = other DNA
gccaggcatggtgatgggcgcctgtaatcccagctactctggaggctgaggcaggagaatcacttgaacacaggacgggg

SEQ ID NO: 109537 - DNA, 80 bp, synthetic construct
  misc_feature 1..80: note = Artificially Synthesized Probe
  source 1..80: mol_type = other DNA
ctgtaacactcttgaaggaaatatgccaaaatattcacagtagttatagtttattagagagattatgaagaaatattttt

SEQ ID NO: 109538 - DNA, 80 bp, synthetic construct
  misc_feature 1..80: note = Artificially Synthesized Probe
  source 1..80: mol_type = other DNA
ggccaacagggtgaagacccatctctactgaaaatcaaaaaaattagctgggcatggtggtacacacctgtaatcccagc

SEQ ID NO: 109539 - DNA, 80 bp, synthetic construct
  misc_feature 1..80: note = Artificially Synthesized Probe
  source 1..80: mol_type = other DNA
aaaagagggcaggaaagtggtctagtgcccaagagacctgtctcagcattaaagcatccatttaataacggtgtaatctt

SEQ ID NO: 109540 - DNA, 80 bp, synthetic construct
  misc_feature 1..80: note = Artificially Synthesized Probe
  source 1..80: mol_type = other DNA
tgagcctctgtcaggtttatggaggatgagttccagtgggaaagaggcttcctgagtcacagtgagcccaggagacccgg

SEQ ID NO: 109541 - DNA, 80 bp, synthetic construct
  misc_feature 1..80: note = Artificially Synthesized Probe
  source 1..80: mol_type = other DNA
gtccctactctggcgggaaacacaggatgtgaaagtattttatgaaacagtttcagtgaagaagaaagtgggtcattttc

SEQ ID NO: 109542 - DNA, 80 bp, synthetic construct
  misc_feature 1..80: note = Artificially Synthesized Probe
  source 1..80: mol_type = other DNA
gcataaacgattacaaatatttgtgtgtttcctggtcgatgaaaacacgccgctgccagcaggatgagatccgaatgtga

SEQ ID NO: 109543 - DNA, 80 bp, synthetic construct
  misc_feature 1..80: note = Artificially Synthesized Probe
  source 1..80: mol_type = other DNA
tctctcattattagaggacaccctgatccaggacagcagaccaagggtgcttagtttttacactatttaatacacagatt

SEQ ID NO: 109544 - DNA, 80 bp, synthetic construct
  misc_feature 1..80: note = Artificially Synthesized Probe
  source 1..80: mol_type = other DNA
tgtttatgattccagaaggaatggaagtggtcagcccagtggttctcagagaccaccaaacacaggggttaaagcctgct

SEQ ID NO: 109545 - DNA, 80 bp, synthetic construct
  misc_feature 1..80: note = Artificially Synthesized Probe
  source 1..80: mol_type = other DNA
agcataggaagggttcgtgacacctgttcctattacagacatggggaggttcaaagtgaaccagtcaggaataatctcag

SEQ ID NO: 109546 - DNA, 80 bp, synthetic construct
  misc_feature 1..80: note = Artificially Synthesized Probe
  source 1..80: mol_type = other DNA
tagccatgggatgctggcaggtcattgatactgtcctatctatgaacggggttttcctgtctttaaatggggtgatgagg

SEQ ID NO: 109547 - DNA, 80 bp, synthetic construct
  misc_feature 1..80: note = Artificially Synthesized Probe
  source 1..80: mol_type = other DNA
gtcagatgcaagcctgcaggctgagccgggcagtctcctggcctcaggtggacctgcagtcagagacagtccctcccttc

SEQ ID NO: 109548 - DNA, 80 bp, synthetic construct
  misc_feature 1..80: note = Artificially Synthesized Probe
  source 1..80: mol_type = other DNA
ctaatggcagaaacaaggttttggagcaatctacaatttattgaaagcagccctgagtcccaggactaaaataactaaga

SEQ ID NO: 109549 - DNA, 80 bp, synthetic construct
  misc_feature 1..80: note = Artificially Synthesized Probe
  source 1..80: mol_type = other DNA
cttggatgtaattacttcacacgttctctgagaatgtgttccacacataaagaatttccataatggccaggcagccttga

SEQ ID NO: 109550 - DNA, 80 bp, synthetic construct
  misc_feature 1..80: note = Artificially Synthesized Probe
  source 1..80: mol_type = other DNA
cagaacagggctaactcgttcatctttccagtccaatggccggggttgctacatttctcaaacttaatttctatcattaa

SEQ ID NO: 109551 - DNA, 80 bp, synthetic construct
  misc_feature 1..80: note = Artificially Synthesized Probe
  source 1..80: mol_type = other DNA
aagttcaagcagtattttttttaataaagattattcccaatagatcttagtcttcatctgtaagaggctgttgagggcac

SEQ ID NO: 109552 - DNA, 80 bp, synthetic construct
  misc_feature 1..80: note = Artificially Synthesized Probe
  source 1..80: mol_type = other DNA
ccagactggggtccgccccacacgcacagaggatcactgggggcgatgtagagatgtggaagctggaccccaccccccag

SEQ ID NO: 109553 - DNA, 80 bp, synthetic construct
  misc_feature 1..80: note = Artificially Synthesized Probe
  source 1..80: mol_type = other DNA
ggaattcatccatttgaggttaaatgtttgccaatctaatttggtcaaaacagttcatccacaaccccgtgcaggccaca

SEQ ID NO: 109554 - DNA, 80 bp, synthetic construct
  misc_feature 1..80: note = Artificially Synthesized Probe
  source 1..80: mol_type = other DNA
gacccaaggaacaagaagtgcagacttcggctgttatttgacccaactgagtaagtttactgactgtagatttaaaaacc

SEQ ID NO: 109555 - DNA, 80 bp, synthetic construct
  misc_feature 1..80: note = Artificially Synthesized Probe
  source 1..80: mol_type = other DNA
ttcccttcctcaagcttcccacttgaaggttggtgtgaaaccccaccccactcaaccctggctgatccccatggcctgtt

SEQ ID NO: 109556 - DNA, 80 bp, synthetic construct
  misc_feature 1..80: note = Artificially Synthesized Probe
  source 1..80: mol_type = other DNA
tctgaggcacaaggcagggctgtcccaggcaaacagggacaccggccccttcatcagtaggtgacatgctttcattcaat

SEQ ID NO: 109557 - DNA, 80 bp, synthetic construct
  misc_feature 1..80: note = Artificially Synthesized Probe
  source 1..80: mol_type = other DNA
ccatatttcatcaatttcaagacgaaccctttttcacagtgtaacccctctgaagtcaagatgcctcttatgaacactgg

SEQ ID NO: 109558 - DNA, 80 bp, synthetic construct
  misc_feature 1..80: note = Artificially Synthesized Probe
  source 1..80: mol_type = other DNA
cacagctgagggggtgaagcaaggttcaaatcaaagtcagcactaataaaaatttctaggtttccaaccctacacaccca

SEQ ID NO: 109559 - DNA, 80 bp, synthetic construct
  misc_feature 1..80: note = Artificially Synthesized Probe
  source 1..80: mol_type = other DNA
agatcaaggtgttcttttcttatcatcttctttcttctctttcccctctcctaaatcactgctcactctctgccccacac

SEQ ID NO: 109560 - DNA, 80 bp, synthetic construct
  misc_feature 1..80: note = Artificially Synthesized Probe
  source 1..80: mol_type = other DNA
taagagccccctcattaccaaaaacttaacccaaaagtgcacttcccaaaatgcctccaaataagtgtgggaaatccagg

SEQ ID NO: 109561 - DNA, 80 bp, synthetic construct
  misc_feature 1..80: note = Artificially Synthesized Probe
  source 1..80: mol_type = other DNA
tatccctgtaaagtctaattccaacaggagtactcagccacattgaacttcttctcactaagaaaagttatctcggtggc

SEQ ID NO: 109562 - DNA, 80 bp, synthetic construct
  misc_feature 1..80: note = Artificially Synthesized Probe
  source 1..80: mol_type = other DNA
gtttaactgccttcctgtgaaagaaaaggcttcctgttttgtttcctgagactcctctttctccttcatgtcatcaccat

SEQ ID NO: 109563 - DNA, 80 bp, synthetic construct
  misc_feature 1..80: note = Artificially Synthesized Probe
  source 1..80: mol_type = other DNA
accatcatcatctttatcatcacaatccccattatcaccatcatcaccatcatcttcatcaccaccatcatcttcattat

SEQ ID NO: 109564 - DNA, 80 bp, synthetic construct
  misc_feature 1..80: note = Artificially Synthesized Probe
  source 1..80: mol_type = other DNA
ctgagggtgggtcccaatccaacgtgactgtgtctttagaagaagagggagacacctcgagaaggcacagacacggagag

SEQ ID NO: 109565 - DNA, 80 bp, synthetic construct
  misc_feature 1..80: note = Artificially Synthesized Probe
  source 1..80: mol_type = other DNA
ttcatcaccaccatcatcttcatcaccaccatcgtcttcattatcaccattaccattatcaccatcacaatgatcactat

SEQ ID NO: 109566 - DNA, 80 bp, synthetic construct
  misc_feature 1..80: note = Artificially Synthesized Probe
  source 1..80: mol_type = other DNA
attctaaaaagttctgtgtttgaaagtatatttgttttctttggctgctgttgtaacaaatcaccacaaacttagtggct

SEQ ID NO: 109567 - DNA, 80 bp, synthetic construct
  misc_feature 1..80: note = Artificially Synthesized Probe
  source 1..80: mol_type = other DNA
gtagaactgcacccggtggagaagtggctgaggtgggacggccgagccaggctcaggccaggtcaggctgtctggtcacc

SEQ ID NO: 109568 - DNA, 80 bp, synthetic construct
  misc_feature 1..80: note = Artificially Synthesized Probe
  source 1..80: mol_type = other DNA
gatgtggtggctcacacttacagtcccagctacttgggaggaccccttaagcctaggaggtcgaggctgcagtgcactgt

SEQ ID NO: 109569 - DNA, 80 bp, synthetic construct
  misc_feature 1..80: note = Artificially Synthesized Probe
  source 1..80: mol_type = other DNA
acggtaaatgggatggaaggtgcaggtagagactctgtgtggcaggttctatctcatttacgtggctgggagttgtaaat

SEQ ID NO: 109570 - DNA, 80 bp, synthetic construct
  misc_feature 1..80: note = Artificially Synthesized Probe
  source 1..80: mol_type = other DNA
catcaactcgcacaagttatgtatgtgcagtttactgagagtcagtcatacctaaaaagagaaaaactcaacaaacagga

SEQ ID NO: 109571 - DNA, 80 bp, synthetic construct
  misc_feature 1..80: note = Artificially Synthesized Probe
  source 1..80: mol_type = other DNA
tcatgcacggttctctttttgtgatgaacaccagtgtgaccagtgtaaatacaatattagttggatcatttgttagtaac

SEQ ID NO: 109572 - DNA, 80 bp, synthetic construct
  misc_feature 1..80: note = Artificially Synthesized Probe
  source 1..80: mol_type = other DNA
tgactcaatattaaaaaaattcacatggtgttttatggtttacaaggcagccttgaacatctgacaccatgtaacaagcg

SEQ ID NO: 109573 - DNA, 80 bp, synthetic construct
  misc_feature 1..80: note = Artificially Synthesized Probe
  source 1..80: mol_type = other DNA
tcgtctgcagtaagtgaggagggcacagagccttccatcaatctgttcagggcatgatttgctgcaaagtgagttgtgaa

SEQ ID NO: 109574 - DNA, 80 bp, synthetic construct
  misc_feature 1..80: note = Artificially Synthesized Probe
  source 1..80: mol_type = other DNA
gaaacactgacttctctatttggcacatctccagggtcatccttgcagatgaagaatccagcctgggtgtctcctgaccc

SEQ ID NO: 109575 - DNA, 80 bp, synthetic construct
  misc_feature 1..80: note = Artificially Synthesized Probe
  source 1..80: mol_type = other DNA
aaaatcccgttgatcctggtagatgggatatatgggaactaattttatatccatgcatgagttaaaacgagcagtaggca

SEQ ID NO: 109576 - DNA, 80 bp, synthetic construct
  misc_feature 1..80: note = Artificially Synthesized Probe
  source 1..80: mol_type = other DNA
gcacatgtcagatgctgcacatgaagggttaacatcttgcaatatccatggcatcaatgtttccttttttttttcatctt

SEQ ID NO: 109577 - DNA, 80 bp, synthetic construct
  misc_feature 1..80: note = Artificially Synthesized Probe
  source 1..80: mol_type = other DNA
cagaactgcgaggggatgccctcctgttgttttaaaacaacgagtttgcagcaccttgtgatgtcagccctagcaagaga

SEQ ID NO: 109578 - DNA, 80 bp, synthetic construct
  misc_feature 1..80: note = Artificially Synthesized Probe
  source 1..80: mol_type = other DNA
caccatgcccagcttatttctgtattctttgtagagacgggatctcaccatgttgcccaggctggtctcaaactcctaag

SEQ ID NO: 109579 - DNA, 80 bp, synthetic construct
  misc_feature 1..80: note = Artificially Synthesized Probe
  source 1..80: mol_type = other DNA
cacctctgatttctcaagtgaaatcatcatgagaagggcatgagtggggagctgggaggtggtggcaggctgggtgctgc

SEQ ID NO: 109580 - DNA, 80 bp, synthetic construct
  misc_feature 1..80: note = Artificially Synthesized Probe
  source 1..80: mol_type = other DNA
gggcacctgggagtttggcttagacagattgggctgtgcatggtggagaaaggcccaagcagaaaagctcctgaacaggc

SEQ ID NO: 109581 - DNA, 80 bp, synthetic construct
  misc_feature 1..80: note = Artificially Synthesized Probe
  source 1..80: mol_type = other DNA
gccaacgggatccctgaaggtgcagggacttaacacagccaccaagaaaatgcaggtgagaggatgagtccaggaaaaac

SEQ ID NO: 109582 - DNA, 80 bp, synthetic construct
  misc_feature 1..80: note = Artificially Synthesized Probe
  source 1..80: mol_type = other DNA
ataataatttagggataactgcacaatatacttgccacctttgccctatgaactccccaagagctcaggacacacattga

SEQ ID NO: 109583 - DNA, 80 bp, synthetic construct
  misc_feature 1..80: note = Artificially Synthesized Probe
  source 1..80: mol_type = other DNA
gaagaaagaaggggaaagtctctattccagcacaagggtctgaagtcatgaaaatagagcagagcagggagtgaagctgt

SEQ ID NO: 109584 - DNA, 80 bp, synthetic construct
  misc_feature 1..80: note = Artificially Synthesized Probe
  source 1..80: mol_type = other DNA
cccagggcaagacctagatcctggtgagccttggtgggacctgtgcccagcacaacacacatggacagcccagcaggggt

SEQ ID NO: 109585 - DNA, 80 bp, synthetic construct
  misc_feature 1..80: note = Artificially Synthesized Probe
  source 1..80: mol_type = other DNA
ctgcacgcacgaggcaccactccatcacatgacttccatctgcctggcaaatctgcaccatttttggaagcagctgaaat

SEQ ID NO: 109586 - DNA, 80 bp, synthetic construct
  misc_feature 1..80: note = Artificially Synthesized Probe
  source 1..80: mol_type = other DNA
gtgttttctccatgagttcttcaagaaaagagctggattctgttcatctttgttcttacccctgagtatccaactcagag

SEQ ID NO: 109587 - DNA, 80 bp, synthetic construct
  misc_feature 1..80: note = Artificially Synthesized Probe
  source 1..80: mol_type = other DNA
tatttgaagatttctggaagaaaaatgaatcagaaaattcagaatatccaggtgagtctggggatattccaccccagtgc

SEQ ID NO: 109588 - DNA, 80 bp, synthetic construct
  misc_feature 1..80: note = Artificially Synthesized Probe
  source 1..80: mol_type = other DNA
caaacaaaaaaacaaatgacccaactaaaaatgggcaagggatctgagcacacatttctccaaagaagacagacaaatgg

SEQ ID NO: 109589 - DNA, 80 bp, synthetic construct
  misc_feature 1..80: note = Artificially Synthesized Probe
  source 1..80: mol_type = other DNA
atgataacattaatcacagcaaactcatttgatgtaatggagaccaggaacccccctggaacgttccccagcaattccgt

SEQ ID NO: 109590 - DNA, 80 bp, synthetic construct
  misc_feature 1..80: note = Artificially Synthesized Probe
  source 1..80: mol_type = other DNA
aagaaaaaaaacccaccgttttagaatgcagtaatgagagcattggtaaagtaacagagacttcactgccagaggcgaca

SEQ ID NO: 109591 - DNA, 80 bp, synthetic construct
  misc_feature 1..80: note = Artificially Synthesized Probe
  source 1..80: mol_type = other DNA
taaacactccagtgaaagaaaagagaataattcacaaagatgtcagttctgcatacccaagtgagaactatgaaagcaga

SEQ ID NO: 109592 - DNA, 80 bp, synthetic construct
  misc_feature 1..80: note = Artificially Synthesized Probe
  source 1..80: mol_type = other DNA
atgattggcatttggctatcaaggcagaagaaaatggagcatatcacaagattgcacagcttggaagtgtaaaaggcgtt

SEQ ID NO: 109593 - DNA, 80 bp, synthetic construct
  misc_feature 1..80: note = Artificially Synthesized Probe
  source 1..80: mol_type = other DNA
acctcgggtcttaaaggatgaaaccagagcacatgggcattaacctgctgactgacagcagctcaggacgagagaatgcc

SEQ ID NO: 109594 - DNA, 80 bp, synthetic construct
  misc_feature 1..80: note = Artificially Synthesized Probe
  source 1..80: mol_type = other DNA
cacgggaactccacaccacgagagcagggcttcagagaccacgggaactccacaccacgagagcagggcttcagagacca

SEQ ID NO: 109595 - DNA, 80 bp, synthetic construct
  misc_feature 1..80: note = Artificially Synthesized Probe
  source 1..80: mol_type = other DNA
aactccacaccacgagaacagggcttcagagaccgcagaaactccacaccacgagaacagggcttcagagaccagagtaa

SEQ ID NO: 109596 - DNA, 80 bp, synthetic construct
  misc_feature 1..80: note = Artificially Synthesized Probe
  source 1..80: mol_type = other DNA
caccacaagaacaggcttcagagacctcaggaattccacactgtgatagcagggccccactgaagccaggggtgacataa

SEQ ID NO: 109597 - DNA, 80 bp, synthetic construct
  misc_feature 1..80: note = Artificially Synthesized Probe
  source 1..80: mol_type = other DNA
tagttcatgggctgataggacagacacaggatttaaaggccaaatagaaccacataaaacctgcagatgtaaaataacaa

SEQ ID NO: 109598 - DNA, 80 bp, synthetic construct
  misc_feature 1..80: note = Artificially Synthesized Probe
  source 1..80: mol_type = other DNA
caagtgttggagaggatgtggaagagacggaaccttacacactatacggtagcaatgtgagtgagggcagcctttacaga

SEQ ID NO: 109599 - DNA, 80 bp, synthetic construct
  misc_feature 1..80: note = Artificially Synthesized Probe
  source 1..80: mol_type = other DNA
ttgctaaataatcagaggtcttagagaaagatgtgcatagagccaaacaagctgtctacatgagacacagccacagccgg

SEQ ID NO: 109600 - DNA, 80 bp, synthetic construct
  misc_feature 1..80: note = Artificially Synthesized Probe
  source 1..80: mol_type = other DNA
taatggcaatgtaaaatttaaaaagatgaaagcatagcaacaaagataaaataaatagcatgcttttagaagaccacgcg

SEQ ID NO: 109601 - DNA, 80 bp, synthetic construct
  misc_feature 1..80: note = Artificially Synthesized Probe
  source 1..80: mol_type = other DNA
ccattcattgtcagtggtgttacaagccattggtgagcttccttccagagtgaatgccaaatgatacatttatattagat

SEQ ID NO: 109602 - DNA, 80 bp, synthetic construct
  misc_feature 1..80: note = Artificially Synthesized Probe
  source 1..80: mol_type = other DNA
tggaaagaatggacagcaccctggttgatgtgcagagtgaccctgcagtcaagtctgtttgcctcccactagcattttct

SEQ ID NO: 109603 - DNA, 80 bp, synthetic construct
  misc_feature 1..80: note = Artificially Synthesized Probe
  source 1..80: mol_type = other DNA
ctgccctactgtggagttagtgggtccacttcgagaagacagagacagagtgaagcctcaagaacagtgttcactggcag

SEQ ID NO: 109604 - DNA, 80 bp, synthetic construct
  misc_feature 1..80: note = Artificially Synthesized Probe
  source 1..80: mol_type = other DNA
cagtgggagcctgggcaggggcgggcagggctctgtggtaagacacagagggcaggggctggggtgggcagggctccatg

SEQ ID NO: 109605 - DNA, 80 bp, synthetic construct
  misc_feature 1..80: note = Artificially Synthesized Probe
  source 1..80: mol_type = other DNA
tctgtgggtgaagagctgtgcgggcgggcactgagaagaggtgcccacgtccatccccagcccctcaggcatgttcacca

SEQ ID NO: 109606 - DNA, 80 bp, synthetic construct
  misc_feature 1..80: note = Artificially Synthesized Probe
  source 1..80: mol_type = other DNA
gggtgtttctggataagaactcacactaaaggcctggcccggaccctgcctccatcagcagggtgcagcccaggcccagc

SEQ ID NO: 109607 - DNA, 80 bp, synthetic construct
  misc_feature 1..80: note = Artificially Synthesized Probe
  source 1..80: mol_type = other DNA
agcatctgcaccctgtatccgtttctctaacccagatttccttcaagtttcaatcctgtactttcggataaggactggat

SEQ ID NO: 109608 - DNA, 80 bp, synthetic construct
  misc_feature 1..80: note = Artificially Synthesized Probe
  source 1..80: mol_type = other DNA
agctattcatattcccacggccccacgaggagacgtgcttcattctacacaaacttgggcgagctccctagacccgaact

SEQ ID NO: 109609 - DNA, 80 bp, synthetic construct
  misc_feature 1..80: note = Artificially Synthesized Probe
  source 1..80: mol_type = other DNA
ccatgtgaatttacctttttttttttccattgcatgtcctttaaataaccaccaggtacctactgtgtgccctgggcact

SEQ ID NO: 109610 - DNA, 80 bp, synthetic construct
  misc_feature 1..80: note = Artificially Synthesized Probe
  source 1..80: mol_type = other DNA
gcatgcacctgtaatcccagctactcaggaggctgaggcaggagaacctcttgaacctaggaggcggaggttgcagtgag

SEQ ID NO: 109611 - DNA, 80 bp, synthetic construct
  misc_feature 1..80: note = Artificially Synthesized Probe
  source 1..80: mol_type = other DNA
gtgtggccgaggtggggtgttgtaccccatgcgatgtggagagagggaacttctgtcgaggatggcagagcagagctggg

SEQ ID NO: 109612 - DNA, 80 bp, synthetic construct
  misc_feature 1..80: note = Artificially Synthesized Probe
  source 1..80: mol_type = other DNA
catcgcgttatcagcaaacgaatcttcccagaatcaagctctgatctttcttctctgatgtgaggtgctcggcgattccc

SEQ ID NO: 109613 - DNA, 80 bp, synthetic construct
  misc_feature 1..80: note = Artificially Synthesized Probe
  source 1..80: mol_type = other DNA
cctctgtggcctctgttctctttattgttcagttatgaggcttcttcctcagttccatgggttaaaatccagatgcaagc

SEQ ID NO: 109614 - DNA, 80 bp, synthetic construct
  misc_feature 1..80: note = Artificially Synthesized Probe
  source 1..80: mol_type = other DNA
agatcgcaaactggtccatccctctccctgcctccagcgtctgccgaccatgcttgcacgtagccgtggacttgtgccgc

SEQ ID NO: 109615 - DNA, 80 bp, synthetic construct
  misc_feature 1..80: note = Artificially Synthesized Probe
  source 1..80: mol_type = other DNA
aagtcacagaggatataaacacttctgcttaagctcccaaatcgtcaaagccaggcatagtggaagagaagttgaatcaa

SEQ ID NO: 109616 - DNA, 80 bp, synthetic construct
  misc_feature 1..80: note = Artificially Synthesized Probe
  source 1..80: mol_type = other DNA
acagctaatagtccatgaatctaataattagttaactgattaacgaaatgcatattcattaagcacacctgtagagagcc

SEQ ID NO: 109617 - DNA, 80 bp, synthetic construct
  misc_feature 1..80: note = Artificially Synthesized Probe
  source 1..80: mol_type = other DNA
gtcaagtgggaggggttaatgtgctctggagtgacaggggtgggaggggtttatcagagatctgggagccaggaaaggtc

SEQ ID NO: 109618 - DNA, 80 bp, synthetic construct
  misc_feature 1..80: note = Artificially Synthesized Probe
  source 1..80: mol_type = other DNA
tgagaaggccccaggtgggatgacgtgagtgtgttcatggagtagtgtacaaggccccaggtgggatgaattgagcatgt

SEQ ID NO: 109619 - DNA, 80 bp, synthetic construct
  misc_feature 1..80: note = Artificially Synthesized Probe
  source 1..80: mol_type = other DNA
ggagcaggaagggggatcaccctgacaagactggtggcagctgggacaagagtcgtggctgaggaggagggaaggaggtc

SEQ ID NO: 109620 - DNA, 80 bp, synthetic construct
  misc_feature 1..80: note = Artificially Synthesized Probe
  source 1..80: mol_type = other DNA
ggtcaggtggacctgaattgttaccactaattaggataaaagaggtttacagatgccttgggccagggcagtttcccgga

SEQ ID NO: 109621 - DNA, 80 bp, synthetic construct
  misc_feature 1..80: note = Artificially Synthesized Probe
  source 1..80: mol_type = other DNA
ccaaaggaaataaaatcagtgtgtggaagggacatcagcacccctttgtttattgcagaactattcacaataaacaagat

SEQ ID NO: 109622 - DNA, 80 bp, synthetic construct
  misc_feature 1..80: note = Artificially Synthesized Probe
  source 1..80: mol_type = other DNA
tgcaaagacgtcttatgctgaccgcatgtcttttggcctttcttttcaagagccaaacacttcctcctagacaagacaca

SEQ ID NO: 109623 - DNA, 80 bp, synthetic construct
  misc_feature 1..80: note = Artificially Synthesized Probe
  source 1..80: mol_type = other DNA
tgtgaaaataatgaaaaggtcttaatgctggcatctttaacaaacccttcaaagtcacaaacactcatgaaagcagaagc

SEQ ID NO: 109624 - DNA, 80 bp, synthetic construct
  misc_feature 1..80: note = Artificially Synthesized Probe
  source 1..80: mol_type = other DNA
tcccttcctcaagggaagccttttcccctgattttctgtcacagtgaggttgcattcgtggtgaagtcggtcctggtttt

SEQ ID NO: 109625 - DNA, 80 bp, synthetic construct
  misc_feature 1..80: note = Artificially Synthesized Probe
  source 1..80: mol_type = other DNA
tctggagttgactctgcagagcactggcaaggccaggatccagagctgcatacaccaagggccgccctcccccaggccta

SEQ ID NO: 109626 - DNA, 80 bp, synthetic construct
  misc_feature 1..80: note = Artificially Synthesized Probe
  source 1..80: mol_type = other DNA
aaaatgttttaaatgttcaaaatacctgaaggagatgagaggacattgcttaagttatcagggaatgaaattcccaatag

SEQ ID NO: 109627 - DNA, 80 bp, synthetic construct
  misc_feature 1..80: note = Artificially Synthesized Probe
  source 1..80: mol_type = other DNA
acgttgctgagtgtccgctatgcactggtcatgattctaagttctcacatcacatttaacacatgacagtcctctaatgc

SEQ ID NO: 109628 - DNA, 80 bp, synthetic construct
  misc_feature 1..80: note = Artificially Synthesized Probe
  source 1..80: mol_type = other DNA
tatttctggggtagggggtgatggcgaatcggatactcaaatgttattttgtcaaatccgaatcatctctacgtgcttag

SEQ ID NO: 109629 - DNA, 80 bp, synthetic construct
  misc_feature 1..80: note = Artificially Synthesized Probe
  source 1..80: mol_type = other DNA
cttatgtattctgctctctgcagggggtgccgctgaatgccggtccttggaggtatgggctggactttatgactcgcatc

SEQ ID NO: 109630 - DNA, 80 bp, synthetic construct
  misc_feature 1..80: note = Artificially Synthesized Probe
  source 1..80: mol_type = other DNA
ctggtgagttcggggtagtgtgttgtatagcatcagataactaatagagtctatttcctcagcaatacaaggatccccca

SEQ ID NO: 109631 - DNA, 80 bp, synthetic construct
  misc_feature 1..80: note = Artificially Synthesized Probe
  source 1..80: mol_type = other DNA
tcatgaccatattattacatcactgaggtttctctgcaaaacaggaacttgttgatcagggtattcattttatgcaggct

SEQ ID NO: 109632 - DNA, 80 bp, synthetic construct
  misc_feature 1..80: note = Artificially Synthesized Probe
  source 1..80: mol_type = other DNA
actaaattactccagctatttgtcggagttggaaaagaaacttctaggactgagcagccataagatacagccatagatac

SEQ ID NO: 109633 - DNA, 80 bp, synthetic construct
  misc_feature 1..80: note = Artificially Synthesized Probe
  source 1..80: mol_type = other DNA
tctctactaaaactataaaaattagctgggcatggtggcacgtgcctgtagtcccagctacttgggagactgaggcagga

SEQ ID NO: 109634 - DNA, 80 bp, synthetic construct
  misc_feature 1..80: note = Artificially Synthesized Probe
  source 1..80: mol_type = other DNA
cagaaggacaggcaccccatgatctcactcacatgtggcacctaaaaaggacgaactcagggacagagtagaaggggggc

SEQ ID NO: 109635 - DNA, 80 bp, synthetic construct
  misc_feature 1..80: note = Artificially Synthesized Probe
  source 1..80: mol_type = other DNA
gtaggcagacgctcctccctttaagcctgaggaaacccaggcttaaagaagtgacatgatcagccagttcccaccaagcc

SEQ ID NO: 109636 - DNA, 80 bp, synthetic construct
  misc_feature 1..80: note = Artificially Synthesized Probe
  source 1..80: mol_type = other DNA
ggctgtgttgtcaggcactcacacagttagatcagtaacttgcagaaaggctcctcatataccaaagttgagtggataaa

SEQ ID NO: 109637 - DNA, 80 bp, synthetic construct
  misc_feature 1..80: note = Artificially Synthesized Probe
  source 1..80: mol_type = other DNA
cccacacatttcttggtccttatacaaattcagaggaactgcagacagtggtgtcaccagaaccatttagacaataatgt

SEQ ID NO: 109638 - DNA, 80 bp, synthetic construct
  misc_feature 1..80: note = Artificially Synthesized Probe
  source 1..80: mol_type = other DNA
atgaaactcaacttcaactaaaccaatcaatatattcaacacaccaacacacacacaaatttgactccagtcattgataa

SEQ ID NO: 109639 - DNA, 80 bp, synthetic construct
  misc_feature 1..80: note = Artificially Synthesized Probe
  source 1..80: mol_type = other DNA
tcaaaattttattggctcataacctacatctatttcataaaataaggtttgatctaaaatgacccttgggcgtttccaag

SEQ ID NO: 109640 - DNA, 80 bp, synthetic construct
  misc_feature 1..80: note = Artificially Synthesized Probe
  source 1..80: mol_type = other DNA
ttagaatttgtagaatgtggggtccccccaaacccctgagtcataaagatgaggaggggaatgcagagtgcagggtaccg

SEQ ID NO: 109641 - DNA, 80 bp, synthetic construct
  misc_feature 1..80: note = Artificially Synthesized Probe
  source 1..80: mol_type = other DNA
agtcacagagacaaggaggggaatgcagagtgcagcgtcccccataaaccccgagtcacagagatgaggaggggaatgca

SEQ ID NO: 109642 - DNA, 80 bp, synthetic construct
  misc_feature 1..80: note = Artificially Synthesized Probe
  source 1..80: mol_type = other DNA
tgcagggtccccccaaaccctgagtcacagagacgaggaggggaatgcagagtgcagggtcccccctaaaccccaagtca

SEQ ID NO: 109643 - DNA, 80 bp, synthetic construct
  misc_feature 1..80: note = Artificially Synthesized Probe
  source 1..80: mol_type = other DNA
gacgagtaggggaatgcagagtgcagggtcccccctaaaccccgagtcacagagacgaggagggggatgcagagtgcaga

SEQ ID NO: 109644 - DNA, 80 bp, synthetic construct
  misc_feature 1..80: note = Artificially Synthesized Probe
  source 1..80: mol_type = other DNA
ccccctaaaccccgagtcacagagatgaggaggggaatgcagagtaccgggttcccccctaaaccccgagtcacagagat

SEQ ID NO: 109645 - DNA, 80 bp, synthetic construct
  misc_feature 1..80: note = Artificially Synthesized Probe
  source 1..80: mol_type = other DNA
ggaggggaatgcagagtgcagggtcccccccaaaccccgagtcacagagacgaggaggggaatgcagagtgcagggtccc

SEQ ID NO: 109646 - DNA, 80 bp, synthetic construct
  misc_feature 1..80: note = Artificially Synthesized Probe
  source 1..80: mol_type = other DNA
gtgcttcaccacacacaaagaaacggtaactacgcgaggagacgtgtattcattagcttgactgtggtcatcattcacga

SEQ ID NO: 109647 - DNA, 80 bp, synthetic construct
  misc_feature 1..80: note = Artificially Synthesized Probe
  source 1..80: mol_type = other DNA
cccaaaccccgagtcacagagacgaggaggagaatgcagtgcagggtcccccctaaaccccgagtcatagagatgaggag

SEQ ID NO: 109648 - DNA, 80 bp, synthetic construct
  misc_feature 1..80: note = Artificially Synthesized Probe
  source 1..80: mol_type = other DNA
cctgaacccatgactttcagggctgtggcctcccccgcccccgcccacatgtgtccaccagccctgggagtgagtctgag

SEQ ID NO: 109649 - DNA, 80 bp, synthetic construct
  misc_feature 1..80: note = Artificially Synthesized Probe
  source 1..80: mol_type = other DNA
gttacggacaactgttaagtggaaattgtctggacgtaatgcagttcatcagctcaaaagctgtgggtctggctgtgtga

SEQ ID NO: 109650 - DNA, 80 bp, synthetic construct
  misc_feature 1..80: note = Artificially Synthesized Probe
  source 1..80: mol_type = other DNA
agatggagaatctgcctgacagggtgcacttgcacagccaagcaccaagaaggaaaatggcatttcattagccatggaga

SEQ ID NO: 109651 - DNA, 80 bp, synthetic construct
  misc_feature 1..80: note = Artificially Synthesized Probe
  source 1..80: mol_type = other DNA
ggctccaccccccacgccaggctccaccccatcccacgccaggctccaccccatcccacgccaggctccaccccatccca

SEQ ID NO: 109652 - DNA, 80 bp, synthetic construct
  misc_feature 1..80: note = Artificially Synthesized Probe
  source 1..80: mol_type = other DNA
cggcaccggttctggctggaaggttcccaaacctaggccagggtgtgaatgccaggggccctgtgagtggtgagtgatgg

SEQ ID NO: 109653 - DNA, 80 bp, synthetic construct
  misc_feature 1..80: note = Artificially Synthesized Probe
  source 1..80: mol_type = other DNA
tcatccccgacatgggctcttatcccaccaaccgcttctaaagacctgcagaagctccctagtcacaggacgtggcgagc

SEQ ID NO: 109654 - DNA, 80 bp, synthetic construct
  misc_feature 1..80: note = Artificially Synthesized Probe
  source 1..80: mol_type = other DNA
cgcccacacttctttccccttttccaaatcccacctgcaggtggtggtctctagcactcctcttggttcatgggccttga

SEQ ID NO: 109655 - DNA, 80 bp, synthetic construct
  misc_feature 1..80: note = Artificially Synthesized Probe
  source 1..80: mol_type = other DNA
ccagtgcattccacataaaaagcgtgcacctggaggaaactaaataatcacaaccaatcactctttttttagaaaaaagc

SEQ ID NO: 109656 - DNA, 80 bp, synthetic construct
  misc_feature 1..80: note = Artificially Synthesized Probe
  source 1..80: mol_type = other DNA
acagccgtcagacagtcatcctggcccaaggtgacctcattaccagaatttgttctagttgtcattagacatatcacact

SEQ ID NO: 109657 - DNA, 80 bp, synthetic construct
  misc_feature 1..80: note = Artificially Synthesized Probe
  source 1..80: mol_type = other DNA
tggcaaaaccctgtctttactaaaaatagaaaattagccaggtgtgttggtgggtgctgtaatcccagctactcaggagg

SEQ ID NO: 109658 - DNA, 80 bp, synthetic construct
  misc_feature 1..80: note = Artificially Synthesized Probe
  source 1..80: mol_type = other DNA
ctctgtccttcttctgttcttttaaacttctctgtgtagatacagcaagtgtgttttctactcactgcacagccagcgct

SEQ ID NO: 109659 - DNA, 80 bp, synthetic construct
  misc_feature 1..80: note = Artificially Synthesized Probe
  source 1..80: mol_type = other DNA
cgagagcagggagaccagccagacagcccacctggctgacgagacccggcctcgcttagaaagctcctccaagatgccac

SEQ ID NO: 109660 - DNA, 80 bp, synthetic construct
  misc_feature 1..80: note = Artificially Synthesized Probe
  source 1..80: mol_type = other DNA
atagataccctcatctacagccccgctctcgtatgtccgggggaagctatggagagggtgctgcaaagctgccagcaagt

SEQ ID NO: 109661 - DNA, 80 bp, synthetic construct
  misc_feature 1..80: note = Artificially Synthesized Probe
  source 1..80: mol_type = other DNA
gtagacacgcagaaactgacgcccagagaggcagggcaccccgtgtgtggtcaccgtggtcagtggcagaggtggggctg

SEQ ID NO: 109662 - DNA, 80 bp, synthetic construct
  misc_feature 1..80: note = Artificially Synthesized Probe
  source 1..80: mol_type = other DNA
ttcccattcactcagcattaccacggtttgatattaggactgcttgattcaagccaatagtgctaaattagaaataatga

SEQ ID NO: 109663 - DNA, 80 bp, synthetic construct
  misc_feature 1..80: note = Artificially Synthesized Probe
  source 1..80: mol_type = other DNA
cccctcctccaggaccctccagagtgaatctggagcgagggggcccagtgactttggggtcatttgcacggtatcagcta

SEQ ID NO: 109664 - DNA, 80 bp, synthetic construct
  misc_feature 1..80: note = Artificially Synthesized Probe
  source 1..80: mol_type = other DNA
gaaggtcacagccagccatgaaacagctgcactgccccagcacgccgcccacgcttggtcggcaacacagagattccatt

SEQ ID NO: 109665 - DNA, 80 bp, synthetic construct
  misc_feature 1..80: note = Artificially Synthesized Probe
  source 1..80: mol_type = other DNA
cgtgatgaccagtcactagtgggggtgagacaaccggtcactaacgggggcaatatgacccctcactaatggggtgatcg

SEQ ID NO: 109666 - DNA, 80 bp, synthetic construct
  misc_feature 1..80: note = Artificially Synthesized Probe
  source 1..80: mol_type = other DNA
ttttatgtctggatgctgaatagctggaggaagcggcctgctggttttgttcacactgggtgaacagttggaatacaggt

SEQ ID NO: 109667 - DNA, 80 bp, synthetic construct
  misc_feature 1..80: note = Artificially Synthesized Probe
  source 1..80: mol_type = other DNA
gggacattcagggcaatagggaatctgcttttcaatgcagcatcccagtggggtggccccatcacttctgacacctccat

SEQ ID NO: 109668 - DNA, 80 bp, synthetic construct
  misc_feature 1..80: note = Artificially Synthesized Probe
  source 1..80: mol_type = other DNA
aaataagctctcctgaagccccacagagacctgatttaagggaagatgatcaatctgaaatagtgaaacactggagctgg

SEQ ID NO: 109669 - DNA, 80 bp, synthetic construct
  misc_feature 1..80: note = Artificially Synthesized Probe
  source 1..80: mol_type = other DNA
gcaggggaccggagtcctcaccactcccccttttgtcttctccaagccagggtcaaagctgcctcatgcagacggagagg

SEQ ID NO: 109670 - DNA, 80 bp, synthetic construct
  misc_feature 1..80: note = Artificially Synthesized Probe
  source 1..80: mol_type = other DNA
tgtgctttggtcacacggagaattatcagtgcagtctctgtctctctctctcatttccccctaaattgccacatgttgca

SEQ ID NO: 109671 - DNA, 80 bp, synthetic construct
  misc_feature 1..80: note = Artificially Synthesized Probe
  source 1..80: mol_type = other DNA
caccaaacgcattcccgggcaggtgtgtacatcagaacagtgatgaatcagggacccttcttagtgctactataagtaac

SEQ ID NO: 109672 - DNA, 80 bp, synthetic construct
  misc_feature 1..80: note = Artificially Synthesized Probe
  source 1..80: mol_type = other DNA
tacaagaaaggggttgtttcctggcccccagtggggtgcagaatgtcagtgctgggctgcaccctgggcagggctgctct

SEQ ID NO: 109673 - DNA, 80 bp, synthetic construct
  misc_feature 1..80: note = Artificially Synthesized Probe
  source 1..80: mol_type = other DNA
aaggcaagacctaaatcctgaactcctaccgctataacacattcctctgcgctaaggaactgacattctaaaggtgcaga

SEQ ID NO: 109674 - DNA, 80 bp, synthetic construct
  misc_feature 1..80: note = Artificially Synthesized Probe
  source 1..80: mol_type = other DNA
cagcctgggcaacatggtgaaactctgtctctactaaaaatataaaagttaagctaggcgtggtggcgcatgcctgcagt

SEQ ID NO: 109675 - DNA, 80 bp, synthetic construct
  misc_feature 1..80: note = Artificially Synthesized Probe
  source 1..80: mol_type = other DNA
agcggttttcataagggggtaagactcagagggcagaagaaagcggagtcttgtggggggcaccatctgtggctgggtcg

SEQ ID NO: 109676 - DNA, 80 bp, synthetic construct
  misc_feature 1..80: note = Artificially Synthesized Probe
  source 1..80: mol_type = other DNA
caccttcgggtacctgacgggccggaatgacacatccttgtcatgtccaccccacttcacagatgggaaaccggggctca

SEQ ID NO: 109677 - DNA, 80 bp, synthetic construct
  misc_feature 1..80: note = Artificially Synthesized Probe
  source 1..80: mol_type = other DNA
acaaaacaaaaaactgaaatagtgaaacgccaggccattttctctacaaaacatccctgggccccttcaggaggaaagct

SEQ ID NO: 109678 - DNA, 80 bp, synthetic construct
  misc_feature 1..80: note = Artificially Synthesized Probe
  source 1..80: mol_type = other DNA
cattagctgcaaagaaaactcttctgggggctgccaaatgcagagctgcttcgtgtcccttctttgacagtaaaagttgt

SEQ ID NO: 109679 - DNA, 80 bp, synthetic construct
  misc_feature 1..80: note = Artificially Synthesized Probe
  source 1..80: mol_type = other DNA
tgaagctgcagctggggacacgagttaatgtgagtgcgagcccagggcagagcgggcccagataaataattcatgagcgc

SEQ ID NO: 109680 - DNA, 80 bp, synthetic construct
  misc_feature 1..80: note = Artificially Synthesized Probe
  source 1..80: mol_type = other DNA
cggcacctgcgcacaggggtggcctccaggggctccaagtcctctgggatccaggttctccttccttcagggcaccccca

SEQ ID NO: 109681 - DNA, 80 bp, synthetic construct
  misc_feature 1..80: note = Artificially Synthesized Probe
  source 1..80: mol_type = other DNA
ctcagggcggtgctgacagtaggacatgctggtccccttcccagtgaagtcccaggaaacagcctctcatgttgctgggc

SEQ ID NO: 109682 - DNA, 80 bp, synthetic construct
  misc_feature 1..80: note = Artificially Synthesized Probe
  source 1..80: mol_type = other DNA
gaggaggactggggaggggggccgagtctccagtcaggcagagagagctgctggtgtcaaccctgccagcaagatgtgcc

SEQ ID NO: 109683 - DNA, 80 bp, synthetic construct
  misc_feature 1..80: note = Artificially Synthesized Probe
  source 1..80: mol_type = other DNA
ggatatgctccagcctgtcacaagccaaggcgaccgagcttccctgagaggcacccagcctgatgcagcacagggcaaca

SEQ ID NO: 109684 - DNA, 80 bp, synthetic construct
  misc_feature 1..80: note = Artificially Synthesized Probe
  source 1..80: mol_type = other DNA
agccgtggagctttgtggaggctgcttggatttctatttgtgcttatgtttatatttgtaatccttcaggtgtaaacaaa

SEQ ID NO: 109685 - DNA, 80 bp, synthetic construct
  misc_feature 1..80: note = Artificially Synthesized Probe
  source 1..80: mol_type = other DNA
gacactttaaaaagggcaatggccggcatttctgaggtttccttttcctaaccaggaacagattctctttgacaaatggg

SEQ ID NO: 109686 - DNA, 80 bp, synthetic construct
  misc_feature 1..80: note = Artificially Synthesized Probe
  source 1..80: mol_type = other DNA
ccggtttccctctggctgagggagggtgagggagggcgagggagggcggacctgtttcctgttaaaccctggagctagca

SEQ ID NO: 109687 - DNA, 80 bp, synthetic construct
  misc_feature 1..80: note = Artificially Synthesized Probe
  source 1..80: mol_type = other DNA
tggggacccaggacaaggccaagggcacctaagcaccaagcaagagtgagattagaccctcccagaagtgatgcacccaa

SEQ ID NO: 109688 - DNA, 80 bp, synthetic construct
  misc_feature 1..80: note = Artificially Synthesized Probe
  source 1..80: mol_type = other DNA
cagttaccttttctaccctccatggcatctaacagatgcttcattgaaaacaattcacatttctaagaggccgtttggat

SEQ ID NO: 109689 - DNA, 80 bp, synthetic construct
  misc_feature 1..80: note = Artificially Synthesized Probe
  source 1..80: mol_type = other DNA
ggcacagcccagacatgcaggaggctccagccagtatttgagaacagacgcctgagtgccgggactcggcccacagccca

SEQ ID NO: 109690 - DNA, 80 bp, synthetic construct
  misc_feature 1..80: note = Artificially Synthesized Probe
  source 1..80: mol_type = other DNA
taaaggtgagttccatgaaaacaaaacacccaaattttgttcatttaaacgtgatcaaagactgcatggcgacacgttct

SEQ ID NO: 109691 - DNA, 80 bp, synthetic construct
  misc_feature 1..80: note = Artificially Synthesized Probe
  source 1..80: mol_type = other DNA
tctctcagcaccacctcattctaacaggagggctcctgaaatcagcgccttatggtgctaaggttttaataacacattag

SEQ ID NO: 109692 - DNA, 80 bp, synthetic construct
  misc_feature 1..80: note = Artificially Synthesized Probe
  source 1..80: mol_type = other DNA
tggggggtcacactccaccaggagcccccaggcaccgtggccacaggacagccgagcttgtggactgtcctccagagtcc

SEQ ID NO: 109693 - DNA, 80 bp, synthetic construct
  misc_feature 1..80: note = Artificially Synthesized Probe
  source 1..80: mol_type = other DNA
gggtcactcccagtggggagctgtggtttgggcgcctgagcctggagcccccgtcttactgggaggtgttcccttatgac

SEQ ID NO: 109694 - DNA, 80 bp, synthetic construct
  misc_feature 1..80: note = Artificially Synthesized Probe
  source 1..80: mol_type = other DNA
ataagattttctatcaaaacgtaaatagattcggatttctctgaagagcaggtttcctatatcggtgcgtacctgtccgt

SEQ ID NO: 109695 - DNA, 80 bp, synthetic construct
  misc_feature 1..80: note = Artificially Synthesized Probe
  source 1..80: mol_type = other DNA
atgtgcttttttttcctcccctttcagaaatgtaatttccatgacgcgtccacccagggccaggaaccacagaagagaaa

SEQ ID NO: 109696 - DNA, 80 bp, synthetic construct
  misc_feature 1..80: note = Artificially Synthesized Probe
  source 1..80: mol_type = other DNA
tgtacagacaagtgttcagtttttaaaaaaacaagcatggtaactgcatcccgctgaagcggttgccatgaagatgcatt

SEQ ID NO: 109697 - DNA, 80 bp, synthetic construct
  misc_feature 1..80: note = Artificially Synthesized Probe
  source 1..80: mol_type = other DNA
gcagggtgggccacagagctaggtcctggagagccacccccaacccagcacgggtccaggacagcaggaagaacccatcc

SEQ ID NO: 109698 - DNA, 80 bp, synthetic construct
  misc_feature 1..80: note = Artificially Synthesized Probe
  source 1..80: mol_type = other DNA
gccccccatgcactgagctcactgggtctccctgcgcccgtgtctggagtcatacacaatgctgttattttactgcctaa

SEQ ID NO: 109699 - DNA, 80 bp, synthetic construct
  misc_feature 1..80: note = Artificially Synthesized Probe
  source 1..80: mol_type = other DNA
tgtatcacgttgttttcctcctctttaaatattattgacacagcgatacttcactacaggccattaatactggtctgctt

SEQ ID NO: 109700 - DNA, 80 bp, synthetic construct
  misc_feature 1..80: note = Artificially Synthesized Probe
  source 1..80: mol_type = other DNA
caaagtttcctcatatttctcctcttaaagctgacagaaaataaccagcagaaaacaaacaacacatcttagggaaggga

SEQ ID NO: 109701 - DNA, 80 bp, synthetic construct
  misc_feature 1..80: note = Artificially Synthesized Probe
  source 1..80: mol_type = other DNA
gttcctaaaatcagcaccgcgtccccagcttacaactccttgttcctaaatcaatgccgcgtccccagcttacaactcct

SEQ ID NO: 109702 - DNA, 80 bp, synthetic construct
  misc_feature 1..80: note = Artificially Synthesized Probe
  source 1..80: mol_type = other DNA
ccttgttcctaaatcaacgccgtgtccccagcttacagctccttgttcctaaaatcaacgccgcgtccccagcttacagc

SEQ ID NO: 109703 - DNA, 80 bp, synthetic construct
  misc_feature 1..80: note = Artificially Synthesized Probe
  source 1..80: mol_type = other DNA
gctccttgttcctaaaattcaacgccgtgtccccagcttacagctcctttgttcctaaaatcaatgccacgtccccagct

SEQ ID NO: 109704 - DNA, 80 bp, synthetic construct
  misc_feature 1..80: note = Artificially Synthesized Probe
  source 1..80: mol_type = other DNA
tacaactccttgttcctaaaatcaacgccgcatccccagcttatagctccttgttcctaaatcaatgccacgtccccagc

SEQ ID NO: 109705 - DNA, 80 bp, synthetic construct
  misc_feature 1..80: note = Artificially Synthesized Probe
  source 1..80: mol_type = other DNA
aatgcccaattcaatgagcatttgttaaacacaccccaaggtttgttgccatgaattgtaaattcctggaaggcagcaaa

SEQ ID NO: 109706 - DNA, 80 bp, synthetic construct
  misc_feature 1..80: note = Artificially Synthesized Probe
  source 1..80: mol_type = other DNA
cgtgtgcatgtggaggtgcagaaggaggggtcatccatggaaatctgacttctacggcaaactcaagtttaagcaaaagt

SEQ ID NO: 109707 - DNA, 80 bp, synthetic construct
  misc_feature 1..80: note = Artificially Synthesized Probe
  source 1..80: mol_type = other DNA
tcgtatttcactccttaggagctcaccgatgcctggaagttaaactgtgtggtctgagacagattaaagaggaagaaata

SEQ ID NO: 109708 - DNA, 80 bp, synthetic construct
  misc_feature 1..80: note = Artificially Synthesized Probe
  source 1..80: mol_type = other DNA
gctatgaaaaaggatgaagttctgtctgttgcgcacaatggaatactattcagccataaaaaaggatgaagtcctgtctg

SEQ ID NO: 109709 - DNA, 80 bp, synthetic construct
  misc_feature 1..80: note = Artificially Synthesized Probe
  source 1..80: mol_type = other DNA
agaaagtcaaatactgcacattcacacatttaagtgggagccaaattacatgcgtgcatggatgtagcacatgggacaat

SEQ ID NO: 109710 - DNA, 80 bp, synthetic construct
  misc_feature 1..80: note = Artificially Synthesized Probe
  source 1..80: mol_type = other DNA
acagtaacaaatattactaagagaacctactggtcagatagatctttgctttcctgccagtcagtgccaggggagctttg

SEQ ID NO: 109711 - DNA, 80 bp, synthetic construct
  misc_feature 1..80: note = Artificially Synthesized Probe
  source 1..80: mol_type = other DNA
ggggaccttctagctttcttctctagctttcttcgtctctagcttttctttttttaaggcatttattgctcctgaaaata

SEQ ID NO: 109712 - DNA, 80 bp, synthetic construct
  misc_feature 1..80: note = Artificially Synthesized Probe
  source 1..80: mol_type = other DNA
gacacatcctaggcccggggcgggtgtggggaggcacgagcttctctggaaaccagcagctgtcgcctgcttgcccatct

SEQ ID NO: 109713 - DNA, 80 bp, synthetic construct
  misc_feature 1..80: note = Artificially Synthesized Probe
  source 1..80: mol_type = other DNA
ggggcctgggtcatgcctgccagttctgcacagagctgcctcctgagtgcccacgtgccctgcggggctgcctggcggct

SEQ ID NO: 109714 - DNA, 80 bp, synthetic construct
  misc_feature 1..80: note = Artificially Synthesized Probe
  source 1..80: mol_type = other DNA
gagacagacccttgacttcaggacagggggctgctctttccataaatccccctggctggcgcctggagcccaggttcctc

SEQ ID NO: 109715 - DNA, 80 bp, synthetic construct
  misc_feature 1..80: note = Artificially Synthesized Probe
  source 1..80: mol_type = other DNA
ataaacgtggggggaggcatgacagaaagccgggtttctacagaaagaggaggccagggaggggcagagcctggggggag

SEQ ID NO: 109716 - DNA, 80 bp, synthetic construct
  misc_feature 1..80: note = Artificially Synthesized Probe
  source 1..80: mol_type = other DNA
gggggagagtagtgcaggggagagtagtgcagggcagggggagaggagtgtggggctgggggagaggagtgcaggggaga

SEQ ID NO: 109717 - DNA, 80 bp, synthetic construct
  misc_feature 1..80: note = Artificially Synthesized Probe
  source 1..80: mol_type = other DNA
ggcgagggggagaggagtgtggggctgggggagaggaatgcagggcccgggaaaaggactgcagggccaagggagaggcc

SEQ ID NO: 109718 - DNA, 80 bp, synthetic construct
  misc_feature 1..80: note = Artificially Synthesized Probe
  source 1..80: mol_type = other DNA
aacgcagggtgacaaaaccttcgtgatgccgtccatgaccagctcatggtgcacctacctggcttttttttagtaaacaa

SEQ ID NO: 109719 - DNA, 80 bp, synthetic construct
  misc_feature 1..80: note = Artificially Synthesized Probe
  source 1..80: mol_type = other DNA
gcagcagtcagggctggcccggaggctcctgggctctgaccacgccatccatccgctgaggacagcagaccacctgcgtg

SEQ ID NO: 109720 - DNA, 80 bp, synthetic construct
  misc_feature 1..80: note = Artificially Synthesized Probe
  source 1..80: mol_type = other DNA
aggaggccgaggcaagtggatcacctgaagtcaggagatcgagaccatcctggccaacatggtgaaaccccatctctact

SEQ ID NO: 109721 - DNA, 80 bp, synthetic construct
  misc_feature 1..80: note = Artificially Synthesized Probe
  source 1..80: mol_type = other DNA
aaaaaaaaaaaaaaaaactctacttcaagttgtaattctgagattttgaagcacgtttggctggactccatccttcatgc

SEQ ID NO: 109722 - DNA, 80 bp, synthetic construct
  misc_feature 1..80: note = Artificially Synthesized Probe
  source 1..80: mol_type = other DNA
cgtaggggtccgccctggcccctacactatgcccaccaagaggacctcctgtaaacgtgagcctcatgccagagaaccca

SEQ ID NO: 109723 - DNA, 80 bp, synthetic construct
  misc_feature 1..80: note = Artificially Synthesized Probe
  source 1..80: mol_type = other DNA
tctagtcggcttgtccactctcatctcctttaaataaacagcaaaaccgttttcacaactcagctcccaatgtgaaatta

SEQ ID NO: 109724 - DNA, 80 bp, synthetic construct
  misc_feature 1..80: note = Artificially Synthesized Probe
  source 1..80: mol_type = other DNA
ttccaccaacacaggcaggggaaagcttggcctgggaacctgagttctgggacctgctccctggctggacttgctggcac

SEQ ID NO: 109725 - DNA, 80 bp, synthetic construct
  misc_feature 1..80: note = Artificially Synthesized Probe
  source 1..80: mol_type = other DNA
gagacttcactgcactttattaaatctcagccactcaaaggtggggtgcagactggggttcgcagctccgacataccaca

SEQ ID NO: 109726 - DNA, 80 bp, synthetic construct
  misc_feature 1..80: note = Artificially Synthesized Probe
  source 1..80: mol_type = other DNA
ggttcaagtgattctgatgcctcagcctcgcgagaagctgggattacaggtgagtgccaccatgcccggctaatttctgt

SEQ ID NO: 109727 - DNA, 80 bp, synthetic construct
  misc_feature 1..80: note = Artificially Synthesized Probe
  source 1..80: mol_type = other DNA
ctaataaaacttctcttttgccaaaggatgcttctcaggttgcattccccagtcaggggaataaccagaggattaaaaca

SEQ ID NO: 109728 - DNA, 80 bp, synthetic construct
  misc_feature 1..80: note = Artificially Synthesized Probe
  source 1..80: mol_type = other DNA
actaacgccctgcacacctttccttcttcctcctcctctttatttcttaacaggaagctgcctgacatttcggctttgag

SEQ ID NO: 109729 - DNA, 80 bp, synthetic construct
  misc_feature 1..80: note = Artificially Synthesized Probe
  source 1..80: mol_type = other DNA
gggctgaggagcagctgcagcaacctctgggacttttccaccagcagtattgccgcccaggaggaaggggaagcctcaga

SEQ ID NO: 109730 - DNA, 80 bp, synthetic construct
  misc_feature 1..80: note = Artificially Synthesized Probe
  source 1..80: mol_type = other DNA
gccgcaggtggggtgcagggtgggggctggggtttggccgcaggtggggagcagggtggggctggtgtctggccgcaggt

SEQ ID NO: 109731 - DNA, 80 bp, synthetic construct
  misc_feature 1..80: note = Artificially Synthesized Probe
  source 1..80: mol_type = other DNA
ctggggtttggccgcaggtggggagcagggtggggctggtgtctggccacaggtggggtgcagggtggggggtggggttt

SEQ ID NO: 109732 - DNA, 80 bp, synthetic construct
  misc_feature 1..80: note = Artificially Synthesized Probe
  source 1..80: mol_type = other DNA
gtgcaaggtggggctggggtttggccgcaggtctggtgcaacgtggggctggggtcgggccgcaggcggggtgaagggtg

SEQ ID NO: 109733 - DNA, 80 bp, synthetic construct
  misc_feature 1..80: note = Artificially Synthesized Probe
  source 1..80: mol_type = other DNA
caaagaatgggaagctggagccttaaataatttgcctaagttcaggcagcagcaaaagccagagccagaatctggaagca

SEQ ID NO: 109734 - DNA, 80 bp, synthetic construct
  misc_feature 1..80: note = Artificially Synthesized Probe
  source 1..80: mol_type = other DNA
tgtagtagatggtaaaacggccgaaaaccatcagcagcctcaggaccgccctgtcatgatgccaactcccaatccgtgct

SEQ ID NO: 109735 - DNA, 80 bp, synthetic construct
  misc_feature 1..80: note = Artificially Synthesized Probe
  source 1..80: mol_type = other DNA
aaactatggggttgcatcgtatttgaggtcatccggaggcacccgctgctgcactgggactcctggagatcctcctccag

SEQ ID NO: 109736 - DNA, 80 bp, synthetic construct
  misc_feature 1..80: note = Artificially Synthesized Probe
  source 1..80: mol_type = other DNA
gccccccaccgaggcgggagccacatctcaccaccaaatgcccttttatgggaactgaggtgcaaagcgggggcttgagg

SEQ ID NO: 109737 - DNA, 80 bp, synthetic construct
  misc_feature 1..80: note = Artificially Synthesized Probe
  source 1..80: mol_type = other DNA
ggtcatatgaaaaattagtgccacagagtttcggcccctaaaaagcttccagtttcacggtgaggggaaatgttgtaaac

SEQ ID NO: 109738 - DNA, 80 bp, synthetic construct
  misc_feature 1..80: note = Artificially Synthesized Probe
  source 1..80: mol_type = other DNA
cgcaggtgtggatgagggagaaaacaaaagctcccactgcgcccctccctccctggagcttagggttcatctgaggggtg

SEQ ID NO: 109739 - DNA, 80 bp, synthetic construct
  misc_feature 1..80: note = Artificially Synthesized Probe
  source 1..80: mol_type = other DNA
ctcaaagctcagcaggtccacggagcaggagccacacaaggctcttcaacaagccccgtgaggtggggagctggcctgga

SEQ ID NO: 109740 - DNA, 80 bp, synthetic construct
  misc_feature 1..80: note = Artificially Synthesized Probe
  source 1..80: mol_type = other DNA
gatgtttggcttctgtcatgagctgacctgtgtcccccaaaatccacaggggaagccctgaaccctcatgtgactgtact

SEQ ID NO: 109741 - DNA, 80 bp, synthetic construct
  misc_feature 1..80: note = Artificially Synthesized Probe
  source 1..80: mol_type = other DNA
ccacggtgggaatgcactcacacactggacttcctctccacccggcctttgtgtgaccaccgtgggtgcctttgtgatca

SEQ ID NO: 109742 - DNA, 80 bp, synthetic construct
  misc_feature 1..80: note = Artificially Synthesized Probe
  source 1..80: mol_type = other DNA
tggctaacacggtgaaaccccgtttctactaaaaatacaaaaaattagccgggcgtgttggcgggcgcctgtagtcccag

SEQ ID NO: 109743 - DNA, 80 bp, synthetic construct
  misc_feature 1..80: note = Artificially Synthesized Probe
  source 1..80: mol_type = other DNA
aaaaaaaaaaaaaatgaggtcctgagggggccccaatccaataggacctgtgttcttcaggaagaggaagagacacacag

SEQ ID NO: 109744 - DNA, 80 bp, synthetic construct
  misc_feature 1..80: note = Artificially Synthesized Probe
  source 1..80: mol_type = other DNA
accgtggccacccgagctgactgacaggggtggggaagcacgccatccgggctccagccctgcggttggcgggatccagg

SEQ ID NO: 109745 - DNA, 80 bp, synthetic construct
  misc_feature 1..80: note = Artificially Synthesized Probe
  source 1..80: mol_type = other DNA
cttcatttacaattccacaagctacgaaaaatcatttgctactgtcatagcagtataggaaacgtgtcagcaccttggga

SEQ ID NO: 109746 - DNA, 80 bp, synthetic construct
  misc_feature 1..80: note = Artificially Synthesized Probe
  source 1..80: mol_type = other DNA
tttgggagtaaagaatgggttttatcaccaaaaagaagacttcacatgatgtttctgcctgagagaagtaggcagggtct

SEQ ID NO: 109747 - DNA, 80 bp, synthetic construct
  misc_feature 1..80: note = Artificially Synthesized Probe
  source 1..80: mol_type = other DNA
cagatgcttcctgtgtgtccacagctgggtggtggttctagttttaggttttttatatttaaaaaaccagcagattaaaa

SEQ ID NO: 109748 - DNA, 80 bp, synthetic construct
  misc_feature 1..80: note = Artificially Synthesized Probe
  source 1..80: mol_type = other DNA
acattatatttctctgagataacagaaagaggcacatcttatcactttcctgacagtttcattttcaggatctgataatg

SEQ ID NO: 109749 - DNA, 80 bp, synthetic construct
  misc_feature 1..80: note = Artificially Synthesized Probe
  source 1..80: mol_type = other DNA
cagtatttgattcccagaggttttacaaaccatctccttcaagcaaatgcatgtaaatttcacttctgtgactctgagtt

SEQ ID NO: 109750 - DNA, 80 bp, synthetic construct
  misc_feature 1..80: note = Artificially Synthesized Probe
  source 1..80: mol_type = other DNA
cttagggtatgaagtgtgttgtagaaatgctaaatgctaatagatacataaacagtaagatggaagcgggagaaacacac

SEQ ID NO: 109751 - DNA, 80 bp, synthetic construct
  misc_feature 1..80: note = Artificially Synthesized Probe
  source 1..80: mol_type = other DNA
ctcggctcaccacaacctccacctcctggattcaagcaattctcctgcctcagtctgccgagtagctgggattacaggcg

SEQ ID NO: 109752 - DNA, 80 bp, synthetic construct
  misc_feature 1..80: note = Artificially Synthesized Probe
  source 1..80: mol_type = other DNA
ctcttaaggtgggtgcagcttatggtggcgaatatggaaaggttactattggctttcgctgatttctttaaaaaaaaatg

SEQ ID NO: 109753 - DNA, 80 bp, synthetic construct
  misc_feature 1..80: note = Artificially Synthesized Probe
  source 1..80: mol_type = other DNA
aatgcatcagatccagttgtgaagcaagagaggaagaggaagaggaagaggggaggaggagtggggatgggaggagctgg

SEQ ID NO: 109754 - DNA, 80 bp, synthetic construct
  misc_feature 1..80: note = Artificially Synthesized Probe
  source 1..80: mol_type = other DNA
ggggctagtaaagcccacttgatatgcacaaaataagattagctgcagcgttttgctgtccacgttgtcttagagagctg

SEQ ID NO: 109755 - DNA, 80 bp, synthetic construct
  misc_feature 1..80: note = Artificially Synthesized Probe
  source 1..80: mol_type = other DNA
gtcctcatgcacgctgaggcacacatcttacgtggatgctgttagtattcagtacactgcgtctaaaatgcacgtgtgtg

SEQ ID NO: 109756 - DNA, 80 bp, synthetic construct
  misc_feature 1..80: note = Artificially Synthesized Probe
  source 1..80: mol_type = other DNA
tagcagcagccactgcccaaataaacatgttcaaagctccttttcaccaaggcttctgctgtgaacctctcccttcttgg

SEQ ID NO: 109757 - DNA, 80 bp, synthetic construct
  misc_feature 1..80: note = Artificially Synthesized Probe
  source 1..80: mol_type = other DNA
tcctataggcagcatgaatggaaatgcaaagactccatcgatttttaccaacttttccaaggaaagtccaaatcatgttt

SEQ ID NO: 109758 - DNA, 80 bp, synthetic construct
  misc_feature 1..80: note = Artificially Synthesized Probe
  source 1..80: mol_type = other DNA
tgagtcccagcgccaggcaaagatctggcgagggaagagccgcccgggatgcagacacacttatcactcacttgccattt

SEQ ID NO: 109759 - DNA, 80 bp, synthetic construct
  misc_feature 1..80: note = Artificially Synthesized Probe
  source 1..80: mol_type = other DNA
ccaagagacttgtttgggtctgactggggccaccctggctgtacccacatttccaaaagtaaacctgtaacgcatcatgt

SEQ ID NO: 109760 - DNA, 80 bp, synthetic construct
  misc_feature 1..80: note = Artificially Synthesized Probe
  source 1..80: mol_type = other DNA
tgtactccgtcacagttctgggggctgaagtctgaggtccgggcttcggtttctcctgagactgcgcaggctggcgggcg

SEQ ID NO: 109761 - DNA, 80 bp, synthetic construct
  misc_feature 1..80: note = Artificially Synthesized Probe
  source 1..80: mol_type = other DNA
tgttggcgcttcccaggtgaacttggggaacacacgtcagcccatcccaggtggagctgcggcagtgcggggtgtggctg

SEQ ID NO: 109762 - DNA, 80 bp, synthetic construct
  misc_feature 1..80: note = Artificially Synthesized Probe
  source 1..80: mol_type = other DNA
tgtgacagtgatggaggggacccagacgcagggactacggagggcagtggggcctcacagggcacctcccacagggagca

SEQ ID NO: 109763 - DNA, 80 bp, synthetic construct
  misc_feature 1..80: note = Artificially Synthesized Probe
  source 1..80: mol_type = other DNA
gtgtgtatgtatctgggtgtgtgcattgcatgtgtgtgagggtgtgtgtggctgtgctatgtgtgagggtgtgctgtgtg

SEQ ID NO: 109764 - DNA, 80 bp, synthetic construct
  misc_feature 1..80: note = Artificially Synthesized Probe
  source 1..80: mol_type = other DNA
gcactgtcccaggcagaaccatggacaagctttgaggtcataggtttcaaacccaaaatttagataaggcaacgtgagaa

SEQ ID NO: 109765 - DNA, 80 bp, synthetic construct
  misc_feature 1..80: note = Artificially Synthesized Probe
  source 1..80: mol_type = other DNA
tgtgtgtgggggtgtgggtgtgtaggtgggtgtgctttgtgtatatgtggggtatgtacttgtgcacgtgtgagtgtgtg

SEQ ID NO: 109766 - DNA, 80 bp, synthetic construct
  misc_feature 1..80: note = Artificially Synthesized Probe
  source 1..80: mol_type = other DNA
tgcacgtgtatgtgtgtgggcatgtgcatacacactgcctgatgggttctgaggaatgaacggatccatgaatcaatgat

SEQ ID NO: 109767 - DNA, 80 bp, synthetic construct
  misc_feature 1..80: note = Artificially Synthesized Probe
  source 1..80: mol_type = other DNA
tatggaataattgcccattcttattttcattttcaggagaaagaaaacaggagtgagacaccaaaacgcagggctttgtt

SEQ ID NO: 109768 - DNA, 80 bp, synthetic construct
  misc_feature 1..80: note = Artificially Synthesized Probe
  source 1..80: mol_type = other DNA
cctcaggtgctttctcactatcaaagagcagcttagcatttatttcatatttttgtcttccactgattcttatttatttt

SEQ ID NO: 109769 - DNA, 80 bp, synthetic construct
  misc_feature 1..80: note = Artificially Synthesized Probe
  source 1..80: mol_type = other DNA
gtttagaatttcagtgactctagtatcaccgttttctttctatcttctcttccacgcacgtgtctgtctttctcatggtc

SEQ ID NO: 109770 - DNA, 80 bp, synthetic construct
  misc_feature 1..80: note = Artificially Synthesized Probe
  source 1..80: mol_type = other DNA
tcttcctgcctctagctccccgcactccctgcacttccccgaggtcactgcactcacagagcttcctatgtgatcagttc

SEQ ID NO: 109771 - DNA, 80 bp, synthetic construct
  misc_feature 1..80: note = Artificially Synthesized Probe
  source 1..80: mol_type = other DNA
tgaaaacgctctgatcaatgatcaaatctgcttccacccaattcaaatgcaagcagttctgaggcacgattatacacaat

SEQ ID NO: 109772 - DNA, 80 bp, synthetic construct
  misc_feature 1..80: note = Artificially Synthesized Probe
  source 1..80: mol_type = other DNA
aatgcaaatgaagccgattcagcatgtacaagcagaacccgcaaatgagagaaatgttggtatatgtgatttgtaaataa

SEQ ID NO: 109773 - DNA, 80 bp, synthetic construct
  misc_feature 1..80: note = Artificially Synthesized Probe
  source 1..80: mol_type = other DNA
cacgacatcaagctgagtataaggacacatttaaattctggccaaaaagcaaagcttatcctgggagttccaaacctcct

SEQ ID NO: 109774 - DNA, 80 bp, synthetic construct
  misc_feature 1..80: note = Artificially Synthesized Probe
  source 1..80: mol_type = other DNA
tctatgagcattgctaatgacacactcactgcacacttgaaactcttggatttccacactcatcatcactgatctacgcc

SEQ ID NO: 109775 - DNA, 80 bp, synthetic construct
  misc_feature 1..80: note = Artificially Synthesized Probe
  source 1..80: mol_type = other DNA
gtagagcacttcatcttgtccctgtccttgtggaggaggcaggggcctgtgtgaactgccctgcttactccggcatcccc

SEQ ID NO: 109776 - DNA, 80 bp, synthetic construct
  misc_feature 1..80: note = Artificially Synthesized Probe
  source 1..80: mol_type = other DNA
aagaatgaacacaactctcatgttaattcctaagaattaacacaactctcatgcttccctttaatcaagtaacgtgcctt

SEQ ID NO: 109777 - DNA, 80 bp, synthetic construct
  misc_feature 1..80: note = Artificially Synthesized Probe
  source 1..80: mol_type = other DNA
tcagacgttgtaggtgctacagagacatctagagagtgaacccacagacacacaaataacctgtgtttaaaagtgtgtta

SEQ ID NO: 109778 - DNA, 80 bp, synthetic construct
  misc_feature 1..80: note = Artificially Synthesized Probe
  source 1..80: mol_type = other DNA
tacaaacatcagttctgttttgtcctgcccactgtgcatttaggctaacaggcaatgaagaaatcttgaaactatgagaa

SEQ ID NO: 109779 - DNA, 80 bp, synthetic construct
  misc_feature 1..80: note = Artificially Synthesized Probe
  source 1..80: mol_type = other DNA
aaaaaagtattgtttatttctctgctgccttacacacagtaaacaaaagttaatttattcctgatgactaagactcctcc

SEQ ID NO: 109780 - DNA, 80 bp, synthetic construct
  misc_feature 1..80: note = Artificially Synthesized Probe
  source 1..80: mol_type = other DNA
taacaagatctttccacttagaataacaatcgcctccacggagaaggttttagaagttaccagtttgtaaacacagacgg

SEQ ID NO: 109781 - DNA, 80 bp, synthetic construct
  misc_feature 1..80: note = Artificially Synthesized Probe
  source 1..80: mol_type = other DNA
tctcaaaagggggtgaggatgacacaccttcctgtgtctgtcaccttcagcttctcttttcacaaaagtagacaagctcc

SEQ ID NO: 109782 - DNA, 80 bp, synthetic construct
  misc_feature 1..80: note = Artificially Synthesized Probe
  source 1..80: mol_type = other DNA
cattgctaaagacatcagatgtgcctgtttgatgctgtgaaagtttttcacatcagcccgtcttctcacaacatagaaag

SEQ ID NO: 109783 - DNA, 80 bp, synthetic construct
  misc_feature 1..80: note = Artificially Synthesized Probe
  source 1..80: mol_type = other DNA
ttgatttcattccagtttgaagcatccattcaaccagaagagggagcacatgtttaaaagaaacccccaaaccgtcagac

SEQ ID NO: 109784 - DNA, 80 bp, synthetic construct
  misc_feature 1..80: note = Artificially Synthesized Probe
  source 1..80: mol_type = other DNA
tcccctctgtggtttttgggaacttatcctacaaactaataatcggggacaaggggtttgaaaaaactgtcatctaattt

SEQ ID NO: 109785 - DNA, 80 bp, synthetic construct
  misc_feature 1..80: note = Artificially Synthesized Probe
  source 1..80: mol_type = other DNA
ttccccacagttctttcttggtcaaatcatggtttctttctttttttggttgaaaaactacaacaataagagatcaaata

SEQ ID NO: 109786 - DNA, 80 bp, synthetic construct
  misc_feature 1..80: note = Artificially Synthesized Probe
  source 1..80: mol_type = other DNA
cgtgttgggggcaagaaccacacatctttgtgcactgttcttagtgtctgacacgtgcctttcggaagcagatgtttaaa

SEQ ID NO: 109787 - DNA, 80 bp, synthetic construct
  misc_feature 1..80: note = Artificially Synthesized Probe
  source 1..80: mol_type = other DNA
ctccagcaagcttacatcactcagacggcaaatatttcaaagaaaaaatccatagtgtttagtaagccacagaagaacat

SEQ ID NO: 109788 - DNA, 80 bp, synthetic construct
  misc_feature 1..80: note = Artificially Synthesized Probe
  source 1..80: mol_type = other DNA
taccaccgcttgaagaacatggtacatttgtttctcatataaaaatgtgaaagcaggcaggtcggggctaatatggggac

SEQ ID NO: 109789 - DNA, 80 bp, synthetic construct
  misc_feature 1..80: note = Artificially Synthesized Probe
  source 1..80: mol_type = other DNA
tcacccacactagggagctgcagggactgggggacattctcatgcttttggagccagaccacttaaggtaaccaaggacc

SEQ ID NO: 109790 - DNA, 80 bp, synthetic construct
  misc_feature 1..80: note = Artificially Synthesized Probe
  source 1..80: mol_type = other DNA
ccactggccacacctagatgaaagggagctggcaaatgcagattttactccaagtaggggtgactgtgacccaaatcaaa

SEQ ID NO: 109791 - DNA, 80 bp, synthetic construct
  misc_feature 1..80: note = Artificially Synthesized Probe
  source 1..80: mol_type = other DNA
ctctcatatatgactcgtaaggccagtgaacacctgtaagaatctgaaggaaaatcaaccataaaggagaaaagttaatg

SEQ ID NO: 109792 - DNA, 80 bp, synthetic construct
  misc_feature 1..80: note = Artificially Synthesized Probe
  source 1..80: mol_type = other DNA
gtgttcattaatcagagctattgcaattgctgaatattctccagcaaaccattcatctatatatccatccatcatccacc

SEQ ID NO: 109793 - DNA, 80 bp, synthetic construct
  misc_feature 1..80: note = Artificially Synthesized Probe
  source 1..80: mol_type = other DNA
taccatctatccaaacatacattaatctaccaattcacttgttcatctatccattcattcacccatctatccatccatca

SEQ ID NO: 109794 - DNA, 80 bp, synthetic construct
  misc_feature 1..80: note = Artificially Synthesized Probe
  source 1..80: mol_type = other DNA
attcacccacccaccccatccatccacccacccactcacccacctacccatccatccatccacccacccacccacccact

SEQ ID NO: 109795 - DNA, 80 bp, synthetic construct
  misc_feature 1..80: note = Artificially Synthesized Probe
  source 1..80: mol_type = other DNA
cagccacccatccatccacccacccacccactcacccacccatccttgcatccacccaccagtttacctgttcatccatc

SEQ ID NO: 109796 - DNA, 80 bp, synthetic construct
  misc_feature 1..80: note = Artificially Synthesized Probe
  source 1..80: mol_type = other DNA
catccacccatctattcactcatctatgcattcatcaaccagcatccatccacccatccatccctcatccatcattcagc

SEQ ID NO: 109797 - DNA, 80 bp, synthetic construct
  misc_feature 1..80: note = Artificially Synthesized Probe
  source 1..80: mol_type = other DNA
ctccatccacgcatctttccaactacccatctatccatccacctacccatccattcaggaagccagccatcttttcaccc

SEQ ID NO: 109798 - DNA, 80 bp, synthetic construct
  misc_feature 1..80: note = Artificially Synthesized Probe
  source 1..80: mol_type = other DNA
ccatctcttcacccattcatctactcacccaaccaaccatccctccacacattcatccatccacccgtccatatacccac

SEQ ID NO: 109799 - DNA, 80 bp, synthetic construct
  misc_feature 1..80: note = Artificially Synthesized Probe
  source 1..80: mol_type = other DNA
atttttaagagaataagaacttctcctgaatatcatcttttccctttttgctctctcatttgtctctctttttcttccct

SEQ ID NO: 109800 - DNA, 80 bp, synthetic construct
  misc_feature 1..80: note = Artificially Synthesized Probe
  source 1..80: mol_type = other DNA
gactcagggccccctgctactggacactgggcctgtcctggagactcaggggccccgctgctggatgctgggtctgtcct

SEQ ID NO: 109801 - DNA, 80 bp, synthetic construct
  misc_feature 1..80: note = Artificially Synthesized Probe
  source 1..80: mol_type = other DNA
catgagcactgcagagtgccagtctgtgcctcatttctactccacgttgaatctttgaatctagtgatttggttgttgat

SEQ ID NO: 109802 - DNA, 80 bp, synthetic construct
  misc_feature 1..80: note = Artificially Synthesized Probe
  source 1..80: mol_type = other DNA
ggtctttttagttaatgtgtgacaaatagagaagagatggggagagagagggaaaaagtgagaggaggggtggtgagaga

SEQ ID NO: 109803 - DNA, 80 bp, synthetic construct
  misc_feature 1..80: note = Artificially Synthesized Probe
  source 1..80: mol_type = other DNA
ttcaggggaaagcagagccctttctctttactcaccagcagttcatattgttaatttttaactaaagacaactgattttt

SEQ ID NO: 109804 - DNA, 80 bp, synthetic construct
  misc_feature 1..80: note = Artificially Synthesized Probe
  source 1..80: mol_type = other DNA
cctagtaattaagacaaaaatagacacggaagccgcgatcgaggaggagggggaacaaaagggtcagcttccgctaagaa

SEQ ID NO: 109805 - DNA, 80 bp, synthetic construct
  misc_feature 1..80: note = Artificially Synthesized Probe
  source 1..80: mol_type = other DNA
ttcagggaataagagccactcccaagaactctcattcagactcgtaatcagcaaatcaacacggatgcctctcagagaaa

SEQ ID NO: 109806 - DNA, 80 bp, synthetic construct
  misc_feature 1..80: note = Artificially Synthesized Probe
  source 1..80: mol_type = other DNA
gtgtgtttagaccccgtcctgtgccccgccgggcccacagcacagacgcgcctggctgaagggcgagggggagtgggctg

SEQ ID NO: 109807 - DNA, 80 bp, synthetic construct
  misc_feature 1..80: note = Artificially Synthesized Probe
  source 1..80: mol_type = other DNA
aacggtctccatggcaacaattggacaagcaagtcgcctgcaattggcattaatttaaaatatttttccccgagtctcct

SEQ ID NO: 109808 - DNA, 80 bp, synthetic construct
  misc_feature 1..80: note = Artificially Synthesized Probe
  source 1..80: mol_type = other DNA
cagagaagctggcaagaccgtgtttaccaattaggttttttttatgatgcaaatgttgcacaccatgcggcaggaataaa

SEQ ID NO: 109809 - DNA, 80 bp, synthetic construct
  misc_feature 1..80: note = Artificially Synthesized Probe
  source 1..80: mol_type = other DNA
tcactaatctgtattaaaacagccccacacatccttgcaggaaaggaaaacattgcgtttggtataaccttccaatttta

SEQ ID NO: 109810 - DNA, 80 bp, synthetic construct
  misc_feature 1..80: note = Artificially Synthesized Probe
  source 1..80: mol_type = other DNA
ttttgctttaaaacgatagcaaggtgcatttgcaaatgaacgccagcacatgctgacaagagtggctcaaaatgaaggag

SEQ ID NO: 109811 - DNA, 80 bp, synthetic construct
  misc_feature 1..80: note = Artificially Synthesized Probe
  source 1..80: mol_type = other DNA
ggcccaggagcagggagaagggtctaggctccaggctccatcccagtgcttgggggcagagaggggtgcccaggagcacc

SEQ ID NO: 109812 - DNA, 80 bp, synthetic construct
  misc_feature 1..80: note = Artificially Synthesized Probe
  source 1..80: mol_type = other DNA
taaaaattaggtggtgtaggaccatcccctccaccggggccaggccagggtcatctctggatgctctgaggtttggttgc

SEQ ID NO: 109813 - DNA, 80 bp, synthetic construct
  misc_feature 1..80: note = Artificially Synthesized Probe
  source 1..80: mol_type = other DNA
tctatgttaaccacacagtttcagcattgatgctgacgttgactaactcagcagccgagaacagggctgggaacaggagg

SEQ ID NO: 109814 - DNA, 80 bp, synthetic construct
  misc_feature 1..80: note = Artificially Synthesized Probe
  source 1..80: mol_type = other DNA
acgcacaaggagcttccgagacagaagccacctgaggctgtgcccatcggggtccccttcttttaattttgcattgcagt

SEQ ID NO: 109815 - DNA, 80 bp, synthetic construct
  misc_feature 1..80: note = Artificially Synthesized Probe
  source 1..80: mol_type = other DNA
tagtgggtttgaaagttcccagagattctgagccaagatggggtatgtgttgcggacttctaaatggctagggaagggaa

SEQ ID NO: 109816 - DNA, 80 bp, synthetic construct
  misc_feature 1..80: note = Artificially Synthesized Probe
  source 1..80: mol_type = other DNA
aaggaaaaggctcttgcctgtatgatgtttctaacacacggctaaggtggccagagaagacaggcgtagcgtgcatgctc

SEQ ID NO: 109817 - DNA, 80 bp, synthetic construct
  misc_feature 1..80: note = Artificially Synthesized Probe
  source 1..80: mol_type = other DNA
tctacaaggaaaatcatctcggcttgaaatggatctcttgtcccacagtggctgcctcggtgtactgttaccgtatgtgg

SEQ ID NO: 109818 - DNA, 80 bp, synthetic construct
  misc_feature 1..80: note = Artificially Synthesized Probe
  source 1..80: mol_type = other DNA
taaaaccctgtctctactaaaaatacaaaaattagctgggcgtcgtggtaggtgcctgtaatcccagctacttgggaggc

SEQ ID NO: 109819 - DNA, 80 bp, synthetic construct
  misc_feature 1..80: note = Artificially Synthesized Probe
  source 1..80: mol_type = other DNA
aattaattcattaacattaggaagtagaaactcactctaacgtgacccacgctagcatgagataccgtgtaactgtactg

SEQ ID NO: 109820 - DNA, 80 bp, synthetic construct
  misc_feature 1..80: note = Artificially Synthesized Probe
  source 1..80: mol_type = other DNA
ctccccgatcctggggctgtttctgtaatagagtgtgttttgtcaccaaatgatatttattttgtttcaagcattatttc

SEQ ID NO: 109821 - DNA, 80 bp, synthetic construct
  misc_feature 1..80: note = Artificially Synthesized Probe
  source 1..80: mol_type = other DNA
cggtagaggccagggatggggctgcacaggatgcccacaaggcctcgtgattaactgttttttatttgtgcaattacttc

SEQ ID NO: 109822 - DNA, 80 bp, synthetic construct
  misc_feature 1..80: note = Artificially Synthesized Probe
  source 1..80: mol_type = other DNA
ttttgaggtcccatcatagacaagacctatattgagcaaaccaggctgtagagttagtgttcagtggaagatggtgagcg

SEQ ID NO: 109823 - DNA, 80 bp, synthetic construct
  misc_feature 1..80: note = Artificially Synthesized Probe
  source 1..80: mol_type = other DNA
agcacagcggcccccggcatccgcaggacacggttttccactgttttaccagtccctcagcttcgccagacatccctgga

SEQ ID NO: 109824 - DNA, 80 bp, synthetic construct
  misc_feature 1..80: note = Artificially Synthesized Probe
  source 1..80: mol_type = other DNA
aggcagacaggcagacaggcaggcagacagacaagacaggcagatagagacaagacaggcaggcagacagagacaagaca

SEQ ID NO: 109825 - DNA, 80 bp, synthetic construct
  misc_feature 1..80: note = Artificially Synthesized Probe
  source 1..80: mol_type = other DNA
tggtgagagcccaagctggggccctgtgtccttgttgagcatggtttgaactcaggagcatctgtgtgatggccagagcc

SEQ ID NO: 109826 - DNA, 80 bp, synthetic construct
  misc_feature 1..80: note = Artificially Synthesized Probe
  source 1..80: mol_type = other DNA
ccatctgggtagagacgcagaaagacttcttacagtgagtgggctttgcctgaactgagctctcagagatgagggggtga

SEQ ID NO: 109827 - DNA, 80 bp, synthetic construct
  misc_feature 1..80: note = Artificially Synthesized Probe
  source 1..80: mol_type = other DNA
cggagaggagaggccggcccggggtcatggtgaagccgtcaggacagaagcagtcaggggctggggcagccttgcccacc

SEQ ID NO: 109828 - DNA, 80 bp, synthetic construct
  misc_feature 1..80: note = Artificially Synthesized Probe
  source 1..80: mol_type = other DNA
gcacaggagttgtgttttgctgaataaaaagggaagaagcctgagccactgggatcactgcaataaccttcttcttccaa

SEQ ID NO: 109829 - DNA, 80 bp, synthetic construct
  misc_feature 1..80: note = Artificially Synthesized Probe
  source 1..80: mol_type = other DNA
ctccttgagatttctatacttaaaattcttaaaggcatttattgccctgccttagttgctgctttaccaagacaaacaca

SEQ ID NO: 109830 - DNA, 80 bp, synthetic construct
  misc_feature 1..80: note = Artificially Synthesized Probe
  source 1..80: mol_type = other DNA
ttggatgctattcaagccacagtaattataagggaaaacaagttcaaaagccttgagtgaaagcagcaggtaagagggag

SEQ ID NO: 109831 - DNA, 80 bp, synthetic construct
  misc_feature 1..80: note = Artificially Synthesized Probe
  source 1..80: mol_type = other DNA
ttttaaaaagaagggaatatatcggtaattagcacagaatataaatctccccccgagagatgggtgcagaaggacagcac

SEQ ID NO: 109832 - DNA, 80 bp, synthetic construct
  misc_feature 1..80: note = Artificially Synthesized Probe
  source 1..80: mol_type = other DNA
ggaggagcagccctgccccacctcgatctctgatgtccagcctccatagtggggagaggatgaactcctgttgctgaagc

SEQ ID NO: 109833 - DNA, 80 bp, synthetic construct
  misc_feature 1..80: note = Artificially Synthesized Probe
  source 1..80: mol_type = other DNA
tctgtcctagtaagtattaaaataaaaaatgaggtgacctcacaaggtccctgtggagaggcagagaaatggctgctgct

SEQ ID NO: 109834 - DNA, 80 bp, synthetic construct
  misc_feature 1..80: note = Artificially Synthesized Probe
  source 1..80: mol_type = other DNA
ctctgcttgtcagcagcttccacagacatggtgagaggagacattcaaggatgaatttaaattgtgaaactcaaggggca

SEQ ID NO: 109835 - DNA, 80 bp, synthetic construct
  misc_feature 1..80: note = Artificially Synthesized Probe
  source 1..80: mol_type = other DNA
ggcaggcagttggaaggaaacaccgttaaattctttgggtcttccacagttccaagttcaggattttttcttaaccatag

SEQ ID NO: 109836 - DNA, 80 bp, synthetic construct
  misc_feature 1..80: note = Artificially Synthesized Probe
  source 1..80: mol_type = other DNA
cctttaatgagggcccaaggaagcacccccactctccagttccatgatttcccacggtgattactgagggaagaccagcg

SEQ ID NO: 109837 - DNA, 80 bp, synthetic construct
  misc_feature 1..80: note = Artificially Synthesized Probe
  source 1..80: mol_type = other DNA
gcagcccgtaatgtgttcatagccaaggccccggcacccgggcactctgtctggggcagcctgtaatgtgttcatagcca

SEQ ID NO: 109838 - DNA, 80 bp, synthetic construct
  misc_feature 1..80: note = Artificially Synthesized Probe
  source 1..80: mol_type = other DNA
acttgaaaaataggaagaaaaagaagacaatatccctggaccttagaaacctcaatgatcaagagtagcgtttccctcca

SEQ ID NO: 109839 - DNA, 80 bp, synthetic construct
  misc_feature 1..80: note = Artificially Synthesized Probe
  source 1..80: mol_type = other DNA
agtgtgcatttatccctgataaacaaaaatcacggcacaaagcagaacggtggctgttttcttgtgactcattattaaca

SEQ ID NO: 109840 - DNA, 80 bp, synthetic construct
  misc_feature 1..80: note = Artificially Synthesized Probe
  source 1..80: mol_type = other DNA
agcacagaaaaccactttaatgaattcacctaagcccatgtcgacaaggagtagccagaagccaatcctggtttatttct

SEQ ID NO: 109841 - DNA, 80 bp, synthetic construct
  misc_feature 1..80: note = Artificially Synthesized Probe
  source 1..80: mol_type = other DNA
ctcccaatatctgaagacatcttggcctctactgtggctgtgtgtatttttctttgcggtaattaacactctaaaaaaaa

SEQ ID NO: 109842 - DNA, 80 bp, synthetic construct
  misc_feature 1..80: note = Artificially Synthesized Probe
  source 1..80: mol_type = other DNA
ctgaaactaaggaagacagttgcgtagagaccctgagcttgcattcagcagacacacacattcttaacctatcttgaaat

SEQ ID NO: 109843 - DNA, 80 bp, synthetic construct
  misc_feature 1..80: note = Artificially Synthesized Probe
  source 1..80: mol_type = other DNA
cacacacatgcaggcacacacacgtgcaggcaaacacatagggcctggcacagacatgcaggcacacacacgcaggtaaa

SEQ ID NO: 109844 - DNA, 80 bp, synthetic construct
  misc_feature 1..80: note = Artificially Synthesized Probe
  source 1..80: mol_type = other DNA
ctgctaaccactggtatctatcagcagtttcaattcctcttgatgtgtgagggtcattttgtcttctatgacaatgccaa

SEQ ID NO: 109845 - DNA, 80 bp, synthetic construct
  misc_feature 1..80: note = Artificially Synthesized Probe
  source 1..80: mol_type = other DNA
gtcctcactgctattcagcacttgcacatcagaaacccaggcatctggatggccagtgctgacttaattgactggtcagt

SEQ ID NO: 109846 - DNA, 80 bp, synthetic construct
  misc_feature 1..80: note = Artificially Synthesized Probe
  source 1..80: mol_type = other DNA
agcagaaactagaaattgaaagtgcacctttttcttggtaaaatgttgatgtgcaataagagtcaacacacatccgatgc

SEQ ID NO: 109847 - DNA, 80 bp, synthetic construct
  misc_feature 1..80: note = Artificially Synthesized Probe
  source 1..80: mol_type = other DNA
tagtgaaacacacacatttagatttttaagaggaaaaaaatgccaaaatgattgccaagacatgcactgggcattccctg

SEQ ID NO: 109848 - DNA, 80 bp, synthetic construct
  misc_feature 1..80: note = Artificially Synthesized Probe
  source 1..80: mol_type = other DNA
gaaactaagacaccttgtgacaaacaagcaatggaagagaaaactgctttaggagcaggaagggggccaaggccagcttg

SEQ ID NO: 109849 - DNA, 80 bp, synthetic construct
  misc_feature 1..80: note = Artificially Synthesized Probe
  source 1..80: mol_type = other DNA
aaaaaagaaaaaggaaaacagaaacgaaaagattgagtggggtttggggcctgcagagtccttgtctgcttgattgtggg

SEQ ID NO: 109850 - DNA, 80 bp, synthetic construct
  misc_feature 1..80: note = Artificially Synthesized Probe
  source 1..80: mol_type = other DNA
catgcagccctattctaagaaggacttgacctttgagtctgaaaaacaccctgcactttaggagctcagaagagaaaggc

SEQ ID NO: 109851 - DNA, 80 bp, synthetic construct
  misc_feature 1..80: note = Artificially Synthesized Probe
  source 1..80: mol_type = other DNA
atacattgttaatattttaaaaagcagacaaaggcccccatggtatgatacaactggatgggtgtttgttctcggccatg

SEQ ID NO: 109852 - DNA, 80 bp, synthetic construct
  misc_feature 1..80: note = Artificially Synthesized Probe
  source 1..80: mol_type = other DNA
agccctgtgggaacacaactgcttatatgtgacaaggcctaactccacacagaacaaacacgagtatcaaataacctcac

SEQ ID NO: 109853 - DNA, 80 bp, synthetic construct
  misc_feature 1..80: note = Artificially Synthesized Probe
  source 1..80: mol_type = other DNA
aaaatattgaacaaaaactaaaacacttataaaaaggattcgctgtgtggtgtgaagctttgtgcagtaattgacacaag

SEQ ID NO: 109854 - DNA, 80 bp, synthetic construct
  misc_feature 1..80: note = Artificially Synthesized Probe
  source 1..80: mol_type = other DNA
gtccgggtcttatttttgctttcaattccttttgtaatggaggtagcagttgttattgacaattaataggggcttcaaag

SEQ ID NO: 109855 - DNA, 80 bp, synthetic construct
  misc_feature 1..80: note = Artificially Synthesized Probe
  source 1..80: mol_type = other DNA
cggtgagcttcgcatgctaatgtattatttaggctttgtggtttcatccggagtaagtgcctatttaggaaaaattacag

SEQ ID NO: 109856 - DNA, 80 bp, synthetic construct
  misc_feature 1..80: note = Artificially Synthesized Probe
  source 1..80: mol_type = other DNA
tgaactttggagttgtcctcttggctgagcctcccatacagggagccagttcccacggtggctgtccccatgcctgggct

SEQ ID NO: 109857 - DNA, 80 bp, synthetic construct
  misc_feature 1..80: note = Artificially Synthesized Probe
  source 1..80: mol_type = other DNA
gctcgctgggggggaccataataacgcaaagcaaacaacatccatgtgggaaggtccactggccgaggacgggcaccaag

SEQ ID NO: 109858 - DNA, 80 bp, synthetic construct
  misc_feature 1..80: note = Artificially Synthesized Probe
  source 1..80: mol_type = other DNA
aaaacaacttttaccaattaaagacaaaaccgagaccctcttccacgtgagatggtacaggagggagctgcagtgggcct

SEQ ID NO: 109859 - DNA, 80 bp, synthetic construct
  misc_feature 1..80: note = Artificially Synthesized Probe
  source 1..80: mol_type = other DNA
catcaagaggcctgaccacacggccctgtcctctgcagggctgcgtgaacacaggacacacagcagtgatggtccagcag

SEQ ID NO: 109860 - DNA, 80 bp, synthetic construct
  misc_feature 1..80: note = Artificially Synthesized Probe
  source 1..80: mol_type = other DNA
ctccgctgaccaggcaggtccggggtcctagaaccaacagggctcacccaccccagccccaggcagagccggcccctgtg

SEQ ID NO: 109861 - DNA, 80 bp, synthetic construct
  misc_feature 1..80: note = Artificially Synthesized Probe
  source 1..80: mol_type = other DNA
actctcaaatgaaatcatgtgatcctgtttaaataaatggaaaattaaaaggcagggcactggctgacccttgatgccag

SEQ ID NO: 109862 - DNA, 80 bp, synthetic construct
  misc_feature 1..80: note = Artificially Synthesized Probe
  source 1..80: mol_type = other DNA
tgggaacacatgggcaccctccacaatcctctatcctgacacgatgctccttttgtgtctccactgtgtttttcactccc

SEQ ID NO: 109863 - DNA, 80 bp, synthetic construct
  misc_feature 1..80: note = Artificially Synthesized Probe
  source 1..80: mol_type = other DNA
gagcagagccctggcatcctgtggaacatattgtgagtgttcacagccgagaaagtaagatgactgggatgtcattttca

SEQ ID NO: 109864 - DNA, 80 bp, synthetic construct
  misc_feature 1..80: note = Artificially Synthesized Probe
  source 1..80: mol_type = other DNA
aaccagagatttgtaaacagcatcaaaagccttcacttccttctgcagccttaaagtttgaactttacatacattttaga

SEQ ID NO: 109865 - DNA, 80 bp, synthetic construct
  misc_feature 1..80: note = Artificially Synthesized Probe
  source 1..80: mol_type = other DNA
aaaattctctggacattttcatggctgaaaaccccaccagaacgctggccctgacaggaccctctcctcaagtcctgagg

SEQ ID NO: 109866 - DNA, 80 bp, synthetic construct
  misc_feature 1..80: note = Artificially Synthesized Probe
  source 1..80: mol_type = other DNA
ccctcctgaatctaggacagaggccatttcagacgagagaggaaagaacaacaaaatgaactgcaggagaagcagccaga

SEQ ID NO: 109867 - DNA, 80 bp, synthetic construct
  misc_feature 1..80: note = Artificially Synthesized Probe
  source 1..80: mol_type = other DNA
ccaaccgacgccacctggagaaagtaaatatttaactgtcagaaggaaaacactgtttgaacagtagtggccttaggaag

SEQ ID NO: 109868 - DNA, 80 bp, synthetic construct
  misc_feature 1..80: note = Artificially Synthesized Probe
  source 1..80: mol_type = other DNA
cccgtgcctgggctcccgtggtggctgtccctgtgcctgggctccagggccctggctttccatgtcacatctgcagacat

SEQ ID NO: 109869 - DNA, 80 bp, synthetic construct
  misc_feature 1..80: note = Artificially Synthesized Probe
  source 1..80: mol_type = other DNA
accagaaggagggaggccacctctccttgcggcattaggagaccagggtctctgaaagggcggggaccacggccaggcca

SEQ ID NO: 109870 - DNA, 80 bp, synthetic construct
  misc_feature 1..80: note = Artificially Synthesized Probe
  source 1..80: mol_type = other DNA
tctgtcctgcctggcagcctccccaccactcgccgtgggcacggggtccgtatccactcgccgggggcacggggtccgta

SEQ ID NO: 109871 - DNA, 80 bp, synthetic construct
  misc_feature 1..80: note = Artificially Synthesized Probe
  source 1..80: mol_type = other DNA
atgatttccctctaaaagcattcttccgaattctaccccaaagaaaccagtgacatttctcaacatcaggcttcctaatc

SEQ ID NO: 109872 - DNA, 80 bp, synthetic construct
  misc_feature 1..80: note = Artificially Synthesized Probe
  source 1..80: mol_type = other DNA
aaagcaccttcaaaggggctgggagctctggccctgcccatccacacagcaaatacagcaagcagaaataacacgttcac

SEQ ID NO: 109873 - DNA, 80 bp, synthetic construct
  misc_feature 1..80: note = Artificially Synthesized Probe
  source 1..80: mol_type = other DNA
atccacacagcaaacacagcaaccagaaataacatgttcacaggggctggaggctcctgtcctgcccatccacacagcaa

SEQ ID NO: 109874 - DNA, 80 bp, synthetic construct
  misc_feature 1..80: note = Artificially Synthesized Probe
  source 1..80: mol_type = other DNA
acaggtaataataacaatgataattctaatactattttgttagattagaagcatttttcctggacagaagcaacatcacc

SEQ ID NO: 109875 - DNA, 80 bp, synthetic construct
  misc_feature 1..80: note = Artificially Synthesized Probe
  source 1..80: mol_type = other DNA
tcttaaaggtagaagactgcagaaaataattcaccagaagcaggcatggtgcatccccaggacggatccttcaccgcacc

SEQ ID NO: 109876 - DNA, 80 bp, synthetic construct
  misc_feature 1..80: note = Artificially Synthesized Probe
  source 1..80: mol_type = other DNA
cctgtgtatgggatgtgatttggaaatggtctccgaagagggaagccagttaaagatgaggccatcagagtggctcctaa

SEQ ID NO: 109877 - DNA, 80 bp, synthetic construct
  misc_feature 1..80: note = Artificially Synthesized Probe
  source 1..80: mol_type = other DNA
gaagagcacataattctgcagctctttctaaaaataggaaaggggggatggcgggtggccaactcccttcggttgactcg

SEQ ID NO: 109878 - DNA, 80 bp, synthetic construct
  misc_feature 1..80: note = Artificially Synthesized Probe
  source 1..80: mol_type = other DNA
gctggaggaggcaggaaggaccctctctggagccttcagagatgcacggccccgctaagaccttgatctcagaccctggg

SEQ ID NO: 109879 - DNA, 80 bp, synthetic construct
  misc_feature 1..80: note = Artificially Synthesized Probe
  source 1..80: mol_type = other DNA
cgttttctctctctgcaagccttctcctttctaaactgttgttgctaagtcagaaagagaagagaaggcatcacgttgaa

SEQ ID NO: 109880 - DNA, 80 bp, synthetic construct
  misc_feature 1..80: note = Artificially Synthesized Probe
  source 1..80: mol_type = other DNA
aaatgtaaaaacagagctgaatgtctgttctggaagactgtgtgatctgacagacgacctcgatctcaccgtgatggaga

SEQ ID NO: 109881 - DNA, 80 bp, synthetic construct
  misc_feature 1..80: note = Artificially Synthesized Probe
  source 1..80: mol_type = other DNA
ctcttaattgtcataaaatattcatttataaccaatatgtttgtgccaaattccgtcactctgtgagaatacagtgtacc

SEQ ID NO: 109882 - DNA, 80 bp, synthetic construct
  misc_feature 1..80: note = Artificially Synthesized Probe
  source 1..80: mol_type = other DNA
agacagcctcagccacactttccagaaggcatcgtaatcttcagtggatgttatactcatttatattttaaaaaaagaag

SEQ ID NO: 109883 - DNA, 80 bp, synthetic construct
  misc_feature 1..80: note = Artificially Synthesized Probe
  source 1..80: mol_type = other DNA
gctctgcagccggcgctccgggggcccgcgagcctctgaagtctctgggtctcctttgtttcttcttcatggtgcagaag

SEQ ID NO: 109884 - DNA, 80 bp, synthetic construct
  misc_feature 1..80: note = Artificially Synthesized Probe
  source 1..80: mol_type = other DNA
cctggccctggctaagcaaaaagccaaatggcattgcactcacatccaattaacttcccattttcagcaattattgcttc

SEQ ID NO: 109885 - DNA, 80 bp, synthetic construct
  misc_feature 1..80: note = Artificially Synthesized Probe
  source 1..80: mol_type = other DNA
gctgcatttggggcaagttctggtcagttctcatggtggaggagaattaaagttcagaggagggcaaaggcaaacaaaat

SEQ ID NO: 109886 - DNA, 80 bp, synthetic construct
  misc_feature 1..80: note = Artificially Synthesized Probe
  source 1..80: mol_type = other DNA
aaaggacgcattgtgcagtgagcagtgaattcatacaacgctaaatgcagagattctaaaatggcttagacctaaaatca

SEQ ID NO: 109887 - DNA, 80 bp, synthetic construct
  misc_feature 1..80: note = Artificially Synthesized Probe
  source 1..80: mol_type = other DNA
aggagctctgctgcaccacgctgggagagatgaataggctaagcttattgtcaaaaggcattactgcagaggaagggaaa

SEQ ID NO: 109888 - DNA, 80 bp, synthetic construct
  misc_feature 1..80: note = Artificially Synthesized Probe
  source 1..80: mol_type = other DNA
cagagaaataagaatttgctctggagtcagaatggtttagggctagaggcatgaatctgaaggatgtcagcctaagcggc

SEQ ID NO: 109889 - DNA, 80 bp, synthetic construct
  misc_feature 1..80: note = Artificially Synthesized Probe
  source 1..80: mol_type = other DNA
agctacagtcctgcctgcgggggcttctctgcgacagctgccctgtgcaccaggacatgactgggctggggacgcactgt

SEQ ID NO: 109890 - DNA, 80 bp, synthetic construct
  misc_feature 1..80: note = Artificially Synthesized Probe
  source 1..80: mol_type = other DNA
aggaagaaacgagtcggtgattagctggaatgataagtcgttttagccatgttgtgtgataaggagtttggctagccttg

SEQ ID NO: 109891 - DNA, 80 bp, synthetic construct
  misc_feature 1..80: note = Artificially Synthesized Probe
  source 1..80: mol_type = other DNA
ggctgtccacaccaaaaagaccaacaatgtgatgggtgagtgggggctctgagccgtgggatatagtctgatctcaggag

SEQ ID NO: 109892 - DNA, 80 bp, synthetic construct
  misc_feature 1..80: note = Artificially Synthesized Probe
  source 1..80: mol_type = other DNA
aaactctgcactctgagacccgggtgcacatccctggtcagcaatgctgtgtgtgtggctgactgcacgctgagacctcg

SEQ ID NO: 109893 - DNA, 80 bp, synthetic construct
  misc_feature 1..80: note = Artificially Synthesized Probe
  source 1..80: mol_type = other DNA
atagaaactctgcactctgagacctgggcgagcgtccctggtcagcaatgctctgtgtggctgcacactgagaccccatt

SEQ ID NO: 109894 - DNA, 80 bp, synthetic construct
  misc_feature 1..80: note = Artificially Synthesized Probe
  source 1..80: mol_type = other DNA
acctcaatagaaactctgcatgctgaggcccgggcaagcatccctggtcagcaatgctctgtgtgtggctggctgcacag

SEQ ID NO: 109895 - DNA, 80 bp, synthetic construct
  misc_feature 1..80: note = Artificially Synthesized Probe
  source 1..80: mol_type = other DNA
gtggttttataagggggagtttccctgcactttgcctgctgccatccatgtaagacgggacttgctcctccttgccttcc

SEQ ID NO: 109896 - DNA, 80 bp, synthetic construct
  misc_feature 1..80: note = Artificially Synthesized Probe
  source 1..80: mol_type = other DNA
ggcaggtgtgtgagtgtctcaccctgagtccagcacctcagtcccccaaacacaacagggctgagtcgagttgcatcgta

SEQ ID NO: 109897 - DNA, 80 bp, synthetic construct
  misc_feature 1..80: note = Artificially Synthesized Probe
  source 1..80: mol_type = other DNA
aaaccctatttgcaatgcttccctgctatctgccctgagcaaaacattagaaagctgggatcaatttagtaaattcttcc

SEQ ID NO: 109898 - DNA, 80 bp, synthetic construct
  misc_feature 1..80: note = Artificially Synthesized Probe
  source 1..80: mol_type = other DNA
agagagaggtggagagagacggagagaggtggagagagacggagagaggtggagagagacggagagaggtgaagagaggc

SEQ ID NO: 109899 - DNA, 80 bp, synthetic construct
  misc_feature 1..80: note = Artificially Synthesized Probe
  source 1..80: mol_type = other DNA
gcatcgtcacgatagtgtgtttacacgcatcagcatgacaatatatgcacttttaaatactctcacttcatagtcaacaa

SEQ ID NO: 109900 - DNA, 80 bp, synthetic construct
  misc_feature 1..80: note = Artificially Synthesized Probe
  source 1..80: mol_type = other DNA
agggacaggcacaaattttgaagcattagtaaacgtgaaaggaaggaaggagaaatcccagatgccagaacagagaaagc

SEQ ID NO: 109901 - DNA, 80 bp, synthetic construct
  misc_feature 1..80: note = Artificially Synthesized Probe
  source 1..80: mol_type = other DNA
tctggaaatgccgaggtcactgctgccggatctctcttttctgtttatagagacgtcttcatgtcactgtgccttcttta

SEQ ID NO: 109902 - DNA, 80 bp, synthetic construct
  misc_feature 1..80: note = Artificially Synthesized Probe
  source 1..80: mol_type = other DNA
tgcacaaaaggaatgccaacaacccgtccacaggcaggcgggcagaagagcctctctttctcaggctctggatgaaaaca

SEQ ID NO: 109903 - DNA, 80 bp, synthetic construct
  misc_feature 1..80: note = Artificially Synthesized Probe
  source 1..80: mol_type = other DNA
atgttggaggaacctttccaacaatgagagttcttgggacttccacaggattctcataagaaaagaaagacatcaaagac

SEQ ID NO: 109904 - DNA, 80 bp, synthetic construct
  misc_feature 1..80: note = Artificially Synthesized Probe
  source 1..80: mol_type = other DNA
aaactagagaattaaccccatctgacctggagataaaatgatagcctgagacttactggcagaaattaacaaaccagaaa

SEQ ID NO: 109905 - DNA, 80 bp, synthetic construct
  misc_feature 1..80: note = Artificially Synthesized Probe
  source 1..80: mol_type = other DNA
taggggcataacaataacatatacggagatatgcaaaaccacaagaaactgcaacgcacaacagaaacgtaattggaaga

SEQ ID NO: 109906 - DNA, 80 bp, synthetic construct
  misc_feature 1..80: note = Artificially Synthesized Probe
  source 1..80: mol_type = other DNA
aactctcataaacagcactaaagccaggtgacttaaacactgttactaaagcttcaagcaacatctgtttcctcctatgc

SEQ ID NO: 109907 - DNA, 80 bp, synthetic construct
  misc_feature 1..80: note = Artificially Synthesized Probe
  source 1..80: mol_type = other DNA
agtgaccaaaaaggtatatcccaaaaatgcaaaactggttctactccatgtaattcactttactaagagattaaagggag

SEQ ID NO: 109908 - DNA, 80 bp, synthetic construct
  misc_feature 1..80: note = Artificially Synthesized Probe
  source 1..80: mol_type = other DNA
gacattttcttaatgcttgggatagataatgaagccttccttgacccctttgattcaacactatttggaacaccctagat

SEQ ID NO: 109909 - DNA, 80 bp, synthetic construct
  misc_feature 1..80: note = Artificially Synthesized Probe
  source 1..80: mol_type = other DNA
aagattccttcaaagatacaggtcacaaggtcaaaatacaaaccaatgtgcctatatgccagcaacaaccaattatataa

SEQ ID NO: 109910 - DNA, 80 bp, synthetic construct
  misc_feature 1..80: note = Artificially Synthesized Probe
  source 1..80: mol_type = other DNA
ggcaaaggaatatctcactcagcgaagacacatgccatgtaagtacagaagtggatgggaagaccaaatgtcgtaaatac

SEQ ID NO: 109911 - DNA, 80 bp, synthetic construct
  misc_feature 1..80: note = Artificially Synthesized Probe
  source 1..80: mol_type = other DNA
ttgtaaccaatggtatgtatttgcgtatctaacctgcacagcttactgttactgttccgagtactgtaggcaacgctaac

SEQ ID NO: 109912 - DNA, 80 bp, synthetic construct
  misc_feature 1..80: note = Artificially Synthesized Probe
  source 1..80: mol_type = other DNA
ccctcatgtatgcagtcagtagttgactgaaacgctgttatgtggcaatgactgtacttttgtacagttttgtccaaact

SEQ ID NO: 109913 - DNA, 80 bp, synthetic construct
  misc_feature 1..80: note = Artificially Synthesized Probe
  source 1..80: mol_type = other DNA
attgtcagaacgattgagacaccaagtgtctactctgtaccacagcaggtgagtatcacagatgtatggtgagttagaga

SEQ ID NO: 109914 - DNA, 80 bp, synthetic construct
  misc_feature 1..80: note = Artificially Synthesized Probe
  source 1..80: mol_type = other DNA
tctattttaattgtagtaaaagatacctaacatataatttaccgtttgtaagtgcacagtgcagcggcagtaagggcctt

SEQ ID NO: 109915 - DNA, 80 bp, synthetic construct
  misc_feature 1..80: note = Artificially Synthesized Probe
  source 1..80: mol_type = other DNA
tgactacacagcacagtcaacaggctctgcactaagatgtgcacactttgtatatgttatactccagtagaaattcatgt

SEQ ID NO: 109916 - DNA, 80 bp, synthetic construct
  misc_feature 1..80: note = Artificially Synthesized Probe
  source 1..80: mol_type = other DNA
ctggatagacaaccaatgtgaagacatacactgcaggagaaagggtatttcaacaattaaatacaagggccaggacaact

SEQ ID NO: 109917 - DNA, 80 bp, synthetic construct
  misc_feature 1..80: note = Artificially Synthesized Probe
  source 1..80: mol_type = other DNA
gaaaacactgattaaaaagacaccataaaaaagataaaagataagctatatctctatttttataacatatataatgcact

SEQ ID NO: 109918 - DNA, 80 bp, synthetic construct
  misc_feature 1..80: note = Artificially Synthesized Probe
  source 1..80: mol_type = other DNA
ataaagtataaaatatagaaatataagattatacataatatgtaaaatatgtatttctagaataatgacacagatattaa

SEQ ID NO: 109919 - DNA, 80 bp, synthetic construct
  misc_feature 1..80: note = Artificially Synthesized Probe
  source 1..80: mol_type = other DNA
gtaataagatacaagtttatggccctccccctttggcataaactaaagagaggtctgataacacctaattaaattatatt

SEQ ID NO: 109920 - DNA, 80 bp, synthetic construct
  misc_feature 1..80: note = Artificially Synthesized Probe
  source 1..80: mol_type = other DNA
tcttgaaaggatagctacagcatgaaaccagtcatgaaataagtccagaatgttgtgggatggaaaatacccaattccaa

SEQ ID NO: 109921 - DNA, 80 bp, synthetic construct
  misc_feature 1..80: note = Artificially Synthesized Probe
  source 1..80: mol_type = other DNA
acagggctcccacataatgacaggggattacagataaaagaactgcacacatcagactttatttaaggagaagtctctag

SEQ ID NO: 109922 - DNA, 80 bp, synthetic construct
  misc_feature 1..80: note = Artificially Synthesized Probe
  source 1..80: mol_type = other DNA
cagtaaacagcctaactcacagccaggtaaagataaaacctaatgctaaaggccaatctgcctcagtttcttttatccaa

SEQ ID NO: 109923 - DNA, 80 bp, synthetic construct
  misc_feature 1..80: note = Artificially Synthesized Probe
  source 1..80: mol_type = other DNA
tctcaaatacccatgatgaatatgagaagtgctctagtgagaaaacggacaatgtgtaggaacagatgggtgatttgaga

SEQ ID NO: 109924 - DNA, 80 bp, synthetic construct
  misc_feature 1..80: note = Artificially Synthesized Probe
  source 1..80: mol_type = other DNA
gagaatgaggatctatcaataaaaactccccaagacaaaaagcaaagagagagagagaaaaaaaaagaaaaagacaaaac

SEQ ID NO: 109925 - DNA, 80 bp, synthetic construct
  misc_feature 1..80: note = Artificially Synthesized Probe
  source 1..80: mol_type = other DNA
aaactcagagaacaccaagaagggtaaatacaacacacacaaattcacactcacacacacagatgcacacacacggacac

SEQ ID NO: 109926 - DNA, 80 bp, synthetic construct
  misc_feature 1..80: note = Artificially Synthesized Probe
  source 1..80: mol_type = other DNA
tccggggaccccatgaggtggaatgatgggaggctcacgatggcttcatcgcagggtcaatggctcggccaaatgagatc

SEQ ID NO: 109927 - DNA, 80 bp, synthetic construct
  misc_feature 1..80: note = Artificially Synthesized Probe
  source 1..80: mol_type = other DNA
aaaaccttaccttacccatagaaaagcacggagagaattatgctggacttctttttaggaagaagcgagtagagaatgaa

SEQ ID NO: 109928 - DNA, 80 bp, synthetic construct
  misc_feature 1..80: note = Artificially Synthesized Probe
  source 1..80: mol_type = other DNA
ttttttttttgagatggaatctcactctattgctcgggctgaagtgcaatggcacaatctcagctcactgcaacctctgc

SEQ ID NO: 109929 - DNA, 80 bp, synthetic construct
  misc_feature 1..80: note = Artificially Synthesized Probe
  source 1..80: mol_type = other DNA
tcggcctcccaaagtgctgggatcacaggcgtgagccgccacgcccggtccacctgcttttcaagtagtgttaaaagaag

SEQ ID NO: 109930 - DNA, 80 bp, synthetic construct
  misc_feature 1..80: note = Artificially Synthesized Probe
  source 1..80: mol_type = other DNA
tacttggaagagatctactagttataaagggaagttcacagcaagaatacaaatgcatcatctgtattatcaataatagc

SEQ ID NO: 109931 - DNA, 80 bp, synthetic construct
  misc_feature 1..80: note = Artificially Synthesized Probe
  source 1..80: mol_type = other DNA
aaccctgtttccactaaaaatacaaaaattagcctggggtggtggtacacacctgtagtcccagctactcaggaggctga

SEQ ID NO: 109932 - DNA, 80 bp, synthetic construct
  misc_feature 1..80: note = Artificially Synthesized Probe
  source 1..80: mol_type = other DNA
tacaaatagtcaatatttagtctcttgaaaaatctatggccaaagagaaacctgcgtgcttgggtccaaaaaagcgaaac

SEQ ID NO: 109933 - DNA, 80 bp, synthetic construct
  misc_feature 1..80: note = Artificially Synthesized Probe
  source 1..80: mol_type = other DNA
cttgcaacactcttagtaatcacatcattttgaattctttatgtaaaaatgtacctgctttaagcctcagcaaagaccaa

SEQ ID NO: 109934 - DNA, 80 bp, synthetic construct
  misc_feature 1..80: note = Artificially Synthesized Probe
  source 1..80: mol_type = other DNA
gcatacttcatacccacagaaaccagagaatggatttccaaacgtccagaaaaaagaagtcaggggagtgaaacgcagag

SEQ ID NO: 109935 - DNA, 80 bp, synthetic construct
  misc_feature 1..80: note = Artificially Synthesized Probe
  source 1..80: mol_type = other DNA
gatccacgtcactctctgcagcacagggtaatgcactctctaccacacgcatgaatcatttattcagaaagagatgagag

SEQ ID NO: 109936 - DNA, 80 bp, synthetic construct
  misc_feature 1..80: note = Artificially Synthesized Probe
  source 1..80: mol_type = other DNA
atttactttccccgcacttaacatcttcgcagtatcccgtcacggctgagttcacgtttttgctgtgtgctgctggtatc

SEQ ID NO: 109937 - DNA, 80 bp, synthetic construct
  misc_feature 1..80: note = Artificially Synthesized Probe
  source 1..80: mol_type = other DNA
ggcgtctttgcagattaaaatacactttctagagaaaggctttctagagaaaggctatctgacaggtacccaaagccgca

SEQ ID NO: 109938 - DNA, 80 bp, synthetic construct
  misc_feature 1..80: note = Artificially Synthesized Probe
  source 1..80: mol_type = other DNA
actgtgccagggaagaaagggagtactggcttgcagagacttacggctgaaactactagaaaacaggttttatgaactgc

SEQ ID NO: 109939 - DNA, 80 bp, synthetic construct
  misc_feature 1..80: note = Artificially Synthesized Probe
  source 1..80: mol_type = other DNA
aaaaaatggaggaaagtttgggggaagttacagtgaaaagctcctgatgggcgtggtggccatgcccatagttccagcta

SEQ ID NO: 109940 - DNA, 80 bp, synthetic construct
  misc_feature 1..80: note = Artificially Synthesized Probe
  source 1..80: mol_type = other DNA
agggagcaaatcccaggttttaatcccatggacagaaaaaagtgtcacctttactaacaacattcttacctattagttaa

SEQ ID NO: 109941 - DNA, 80 bp, synthetic construct
  misc_feature 1..80: note = Artificially Synthesized Probe
  source 1..80: mol_type = other DNA
gtaagtttttcaacaaaaatactcaccaacaataatatctccccagcaccaagctcctgcaggagagaatggcatttggg

SEQ ID NO: 109942 - DNA, 80 bp, synthetic construct
  misc_feature 1..80: note = Artificially Synthesized Probe
  source 1..80: mol_type = other DNA
ccaagtaagcaagccttccttcccggcactgcagacacttctggaaagacccaccatttcttcagaaatgacacttcaca

SEQ ID NO: 109943 - DNA, 80 bp, synthetic construct
  misc_feature 1..80: note = Artificially Synthesized Probe
  source 1..80: mol_type = other DNA
cataaagagaaaggccacacgccgaggctgtgatgggcagtgaggatatgtaaatcttatgcttatggactacatcctgc

SEQ ID NO: 109944 - DNA, 80 bp, synthetic construct
  misc_feature 1..80: note = Artificially Synthesized Probe
  source 1..80: mol_type = other DNA
atgtccagaaagtcttggttaaataaaaaacacttaagtggcacagaggcaggagggggaatcctgaagctggtgcgtct

SEQ ID NO: 109945 - DNA, 80 bp, synthetic construct
  misc_feature 1..80: note = Artificially Synthesized Probe
  source 1..80: mol_type = other DNA
caaagcaagcactccaatgtgtgtgtctttctttttcctactaaatgggaacgtgttggagcttggtctaaattatctgc

SEQ ID NO: 109946 - DNA, 80 bp, synthetic construct
  misc_feature 1..80: note = Artificially Synthesized Probe
  source 1..80: mol_type = other DNA
acccgtgctgaagagaccacagctggtcccaggggaccaagatgggagctctgcctcagaaacagtgtccagggctcaag

SEQ ID NO: 109947 - DNA, 80 bp, synthetic construct
  misc_feature 1..80: note = Artificially Synthesized Probe
  source 1..80: mol_type = other DNA
ggatgggtatgaggtgttaagactccttatttagaagcattgaacaaaacagtaaaacctcacagccaaactcgtgttcc

SEQ ID NO: 109948 - DNA, 80 bp, synthetic construct
  misc_feature 1..80: note = Artificially Synthesized Probe
  source 1..80: mol_type = other DNA
tcacagacaggaaaaattataaacagtgaagggcagccccaaacaataacaacaacttctcttccttagacacccttgag

SEQ ID NO: 109949 - DNA, 80 bp, synthetic construct
  misc_feature 1..80: note = Artificially Synthesized Probe
  source 1..80: mol_type = other DNA
tgaattgatcagagattgatgctgaaaccacccaaaagcctccatgactggaagcttgatatctgacccggctttaaaga

SEQ ID NO: 109950 - DNA, 80 bp, synthetic construct
  misc_feature 1..80: note = Artificially Synthesized Probe
  source 1..80: mol_type = other DNA
gtttacattaatcagatttctaatttttcacttctccatggtaaagatcccagctatccagataaatgccactcagagca

SEQ ID NO: 109951 - DNA, 80 bp, synthetic construct
  misc_feature 1..80: note = Artificially Synthesized Probe
  source 1..80: mol_type = other DNA
tttcagagattgtttagcacagacatcctgttttatcatttgaaacctaaggaacagagagtgcaaagggcttgccaata

SEQ ID NO: 109952 - DNA, 80 bp, synthetic construct
  misc_feature 1..80: note = Artificially Synthesized Probe
  source 1..80: mol_type = other DNA
gcctcgttctgtccaggagcagaacctgcgatcctgacgtcctgatactgccttgttctgtccaggagcagaacctgcga

SEQ ID NO: 109953 - DNA, 80 bp, synthetic construct
  misc_feature 1..80: note = Artificially Synthesized Probe
  source 1..80: mol_type = other DNA
tgttctgtccaggagcagaacctgtgatcctggcgtcctgacactgcaatcctggtgtcctgacactgccttgttctgtc

SEQ ID NO: 109954 - DNA, 80 bp, synthetic construct
  misc_feature 1..80: note = Artificially Synthesized Probe
  source 1..80: mol_type = other DNA
tgttctgtccaggagcagaaactgcgatcctggcatcctgacgctgcgatcctggcatcctgacactgcgatcctggtgt

SEQ ID NO: 109955 - DNA, 80 bp, synthetic construct
  misc_feature 1..80: note = Artificially Synthesized Probe
  source 1..80: mol_type = other DNA
aagaaaattaggattttaaaaagaaagttttacgcaccaccaagtccagacgccagccgaggccaagtttccttgtgacg

SEQ ID NO: 109956 - DNA, 80 bp, synthetic construct
  misc_feature 1..80: note = Artificially Synthesized Probe
  source 1..80: mol_type = other DNA
cctgacactgcaatcctggcatcctgacactgtcttgttctgtgcactgcccttcagggactgaggcaatcccgcgattt

SEQ ID NO: 109957 - DNA, 80 bp, synthetic construct
  misc_feature 1..80: note = Artificially Synthesized Probe
  source 1..80: mol_type = other DNA
agaacacagggaaaagccatccctgttagccaccttggcatgctcttgagtttcctgaagcagatttcctaacctgacat

SEQ ID NO: 109958 - DNA, 80 bp, synthetic construct
  misc_feature 1..80: note = Artificially Synthesized Probe
  source 1..80: mol_type = other DNA
caaaaagtccatctaaatccatccatgcttatttttaatttaaccttaatcctgcaggatcagtacaggggcaggcaatc

SEQ ID NO: 109959 - DNA, 80 bp, synthetic construct
  misc_feature 1..80: note = Artificially Synthesized Probe
  source 1..80: mol_type = other DNA
catgcaaactcatctggtcacagagcatttgctgagtgcagactctgtgtgacacacactgctactttctgaggaacaca

SEQ ID NO: 109960 - DNA, 80 bp, synthetic construct
  misc_feature 1..80: note = Artificially Synthesized Probe
  source 1..80: mol_type = other DNA
gagaataaacaaggagtatacacacatcatgtccaagggcaatcttagtaaccacaaccaaagaggctggagccactgca

SEQ ID NO: 109961 - DNA, 80 bp, synthetic construct
  misc_feature 1..80: note = Artificially Synthesized Probe
  source 1..80: mol_type = other DNA
gtcactgagagtgcaagggctacctgcagtcactgagcatgtgagggctgcctgcagtcactgcgcttgggagaggaggc

SEQ ID NO: 109962 - DNA, 80 bp, synthetic construct
  misc_feature 1..80: note = Artificially Synthesized Probe
  source 1..80: mol_type = other DNA
cttttctcagtgcaaaatgggcaagccgggagctctcaagtgagtcagcaacccaccaatgtggcattacaggaggatga

SEQ ID NO: 109963 - DNA, 80 bp, synthetic construct
  misc_feature 1..80: note = Artificially Synthesized Probe
  source 1..80: mol_type = other DNA
ggtgcatacacactttcttctaaggacactttctgtctagatagaaactcatacatgaatacacatatgtatacacacac

SEQ ID NO: 109964 - DNA, 80 bp, synthetic construct
  misc_feature 1..80: note = Artificially Synthesized Probe
  source 1..80: mol_type = other DNA
aaactctccttatcttacagaccatgtagaaacatgtggggaaaagtcctacatgcatctataaatcaccaggtcctgct

SEQ ID NO: 109965 - DNA, 80 bp, synthetic construct
  misc_feature 1..80: note = Artificially Synthesized Probe
  source 1..80: mol_type = other DNA
tacataggaataatgtatatccctatcatcattgttactattgccatcatcaccatcaataagcatcataatcatatcat

SEQ ID NO: 109966 - DNA, 80 bp, synthetic construct
  misc_feature 1..80: note = Artificially Synthesized Probe
  source 1..80: mol_type = other DNA
tcagcaccctttttgaatttatgattgcagaaggaacatcatattccagatatcatcccagaatgaccagcagagaggac

SEQ ID NO: 109967 - DNA, 80 bp, synthetic construct
  misc_feature 1..80: note = Artificially Synthesized Probe
  source 1..80: mol_type = other DNA
accatcaccatcaccatcatatcaccaccatcaccatcatcactatcaccaacaccatcatcaccctcaccatcatcact

SEQ ID NO: 109968 - DNA, 80 bp, synthetic construct
  misc_feature 1..80: note = Artificially Synthesized Probe
  source 1..80: mol_type = other DNA
catcactatggtcccatcactaccatcatcatcatcactatcatcatcgttattaccatcacatcaccaccatcaccatc

SEQ ID NO: 109969 - DNA, 80 bp, synthetic construct
  misc_feature 1..80: note = Artificially Synthesized Probe
  source 1..80: mol_type = other DNA
cgccatcaacagcatcactatcatcatcatcatcatcattgtcatcagcatctccatctgactggtggccctggaactcc

SEQ ID NO: 109970 - DNA, 80 bp, synthetic construct
  misc_feature 1..80: note = Artificially Synthesized Probe
  source 1..80: mol_type = other DNA
cagctcttcatgctcatctcacctcctgaactgctgcctgagcatccacaggcctgaagccaggactcactctttcggac

SEQ ID NO: 109971 - DNA, 80 bp, synthetic construct
  misc_feature 1..80: note = Artificially Synthesized Probe
  source 1..80: mol_type = other DNA
gaggccgaggtgggtggatcacctgaggtcaggggttcaagaccagcctggccaacatggtgaaatcctgtctctactaa

SEQ ID NO: 109972 - DNA, 80 bp, synthetic construct
  misc_feature 1..80: note = Artificially Synthesized Probe
  source 1..80: mol_type = other DNA
tcaaaaaaaaaaatgcaacctgatagaaatgtggtgctcagttcttatttgttgcaatgtagctattacctttggttcct

SEQ ID NO: 109973 - DNA, 80 bp, synthetic construct
  misc_feature 1..80: note = Artificially Synthesized Probe
  source 1..80: mol_type = other DNA
aacaagcgtgttcctgaaaaggtacatcaaagtcagaatgcttttgaagtggcctcagaaaggttactgtttaaaacact

SEQ ID NO: 109974 - DNA, 80 bp, synthetic construct
  misc_feature 1..80: note = Artificially Synthesized Probe
  source 1..80: mol_type = other DNA
tgggtgcaattttccttcacatttctttggctcagtgtcctccagatttaccagtgacaacaaagtcacagcaacctcaa

SEQ ID NO: 109975 - DNA, 80 bp, synthetic construct
  misc_feature 1..80: note = Artificially Synthesized Probe
  source 1..80: mol_type = other DNA
aagatgcaggagccacccagcttgcatcccacagcctcccggcttccctcagctgcacaccctcccaggtgccaggagca

SEQ ID NO: 109976 - DNA, 80 bp, synthetic construct
  misc_feature 1..80: note = Artificially Synthesized Probe
  source 1..80: mol_type = other DNA
gtttatatgacaaaatgacaccctcaccccaaaatgggtattctttccttgagggatgttttatttctaggccagtttac

SEQ ID NO: 109977 - DNA, 80 bp, synthetic construct
  misc_feature 1..80: note = Artificially Synthesized Probe
  source 1..80: mol_type = other DNA
ctaccaagaaaataagtcctgttccttcctctgtgcacacctctttatgcaaagaggcactgaaagctcagaggcctcag

SEQ ID NO: 109978 - DNA, 80 bp, synthetic construct
  misc_feature 1..80: note = Artificially Synthesized Probe
  source 1..80: mol_type = other DNA
cttcctttgccagtctctgcccaaaagatgaaatgcagagatgtggtgtgtacatctgagaagccacagatgctagcagt

SEQ ID NO: 109979 - DNA, 80 bp, synthetic construct
  misc_feature 1..80: note = Artificially Synthesized Probe
  source 1..80: mol_type = other DNA
acagtgcagagagaggaaactgcctgatctccgttccagatgtaacccagttcttaggctattatgggactgtggggaca

SEQ ID NO: 109980 - DNA, 80 bp, synthetic construct
  misc_feature 1..80: note = Artificially Synthesized Probe
  source 1..80: mol_type = other DNA
acataccctccctgtgtcaggtgcaccaaggttcctggctgattagcaccaaggaggacaaaagcaggccttttgcagta

SEQ ID NO: 109981 - DNA, 80 bp, synthetic construct
  misc_feature 1..80: note = Artificially Synthesized Probe
  source 1..80: mol_type = other DNA
cttcattttttttagatgtgttttttattcagttcacagatgaatccaattagcatatcactgtgactgattaaatatgc

SEQ ID NO: 109982 - DNA, 80 bp, synthetic construct
  misc_feature 1..80: note = Artificially Synthesized Probe
  source 1..80: mol_type = other DNA
aggtagtgttactcatgcatgaggggagggaatgaatatagacatttgtctctctttgtctctgaagggaggccattgac

SEQ ID NO: 109983 - DNA, 80 bp, synthetic construct
  misc_feature 1..80: note = Artificially Synthesized Probe
  source 1..80: mol_type = other DNA
gacttctacgggaggaaatgtttttgtgaaacgtgctaatgtttattatgcattctccatcataagtgatcgcctttgat

SEQ ID NO: 109984 - DNA, 80 bp, synthetic construct
  misc_feature 1..80: note = Artificially Synthesized Probe
  source 1..80: mol_type = other DNA
tcttaaaataatgaaataaaattaagtgtggtttggccaccaagagcatcagcaccaaaggcacccagcctcctggggaa

SEQ ID NO: 109985 - DNA, 80 bp, synthetic construct
  misc_feature 1..80: note = Artificially Synthesized Probe
  source 1..80: mol_type = other DNA
ggagagggtagaggggggcggccactgctttgtctcgtgggggccgtggaggggtgccctttggacctcctggagagggt

SEQ ID NO: 109986 - DNA, 80 bp, synthetic construct
  misc_feature 1..80: note = Artificially Synthesized Probe
  source 1..80: mol_type = other DNA
tgggctacagggacagccctccctggccagtgccgcccttctgcgaactgcacctcgggggctcctgctggggtctgagg

SEQ ID NO: 109987 - DNA, 80 bp, synthetic construct
  misc_feature 1..80: note = Artificially Synthesized Probe
  source 1..80: mol_type = other DNA
aggaatttcttgatgtaagtcaaattttggaaatcaaattcttgaaatgcatccagtgtccatatagagctggttcactg

SEQ ID NO: 109988 - DNA, 80 bp, synthetic construct
  misc_feature 1..80: note = Artificially Synthesized Probe
  source 1..80: mol_type = other DNA
ataaactaacctagaggaatttttatggctggggagacacaggcttacctgggaatttctgagtgtgccttcatggttgg

SEQ ID NO: 109989 - DNA, 80 bp, synthetic construct
  misc_feature 1..80: note = Artificially Synthesized Probe
  source 1..80: mol_type = other DNA
acagcacagcgaactccgatgtggctctgactgtttaattaacgtgtagctaaagatcacagaaaaggggaaaacagcga

SEQ ID NO: 109990 - DNA, 80 bp, synthetic construct
  misc_feature 1..80: note = Artificially Synthesized Probe
  source 1..80: mol_type = other DNA
cacgtaaagaggttcaataggtttaatgtggtaaaaggagatgtatttaaacatggcaggcatttgcccgaagctgcttg

SEQ ID NO: 109991 - DNA, 80 bp, synthetic construct
  misc_feature 1..80: note = Artificially Synthesized Probe
  source 1..80: mol_type = other DNA
agagactccagagacgcagagactccagagaggcagagaccccagagatgcagagaccccagagacgcagagactccaga

SEQ ID NO: 109992 - DNA, 80 bp, synthetic construct
  misc_feature 1..80: note = Artificially Synthesized Probe
  source 1..80: mol_type = other DNA
agactccagagatgcagagaccccagagatgcagagatcctagagatggagagaccccagtgatgcagagactccagaga

SEQ ID NO: 109993 - DNA, 80 bp, synthetic construct
  misc_feature 1..80: note = Artificially Synthesized Probe
  source 1..80: mol_type = other DNA
ttcccatgcgtgggccgattcgactgtgtgcttgtcctgagaccaagaagaaaactgctgaagtcccaaagtgggacagg

SEQ ID NO: 109994 - DNA, 80 bp, synthetic construct
  misc_feature 1..80: note = Artificially Synthesized Probe
  source 1..80: mol_type = other DNA
atgccgtgagattattttctgcggttgattattcatgcaacgaacacgtcagaacaccttcaggtggcccatgggtgagg

SEQ ID NO: 109995 - DNA, 80 bp, synthetic construct
  misc_feature 1..80: note = Artificially Synthesized Probe
  source 1..80: mol_type = other DNA
tagtgtgccccgtagcaccgtcagccctgccttccatgattgcagctgatgtgcctgggggcgcgggcaccattaattcc

SEQ ID NO: 109996 - DNA, 80 bp, synthetic construct
  misc_feature 1..80: note = Artificially Synthesized Probe
  source 1..80: mol_type = other DNA
tcagagctgtgggcggtaagccacccaggtgccgaggcaagagactgagggcacgaactgttccagtgtaataaaatatg

SEQ ID NO: 109997 - DNA, 80 bp, synthetic construct
  misc_feature 1..80: note = Artificially Synthesized Probe
  source 1..80: mol_type = other DNA
tgaggggacacagtgagaagtgaccagaagacaagggtgtgagccttctgttatgcccagacagggccaccagagggctc

SEQ ID NO: 109998 - DNA, 80 bp, synthetic construct
  misc_feature 1..80: note = Artificially Synthesized Probe
  source 1..80: mol_type = other DNA
ccacctcttgtggagtcaggcccacccgcagttatccggaggcctaaccgtctccctgtgatgctgtgcttcagtggtca

SEQ ID NO: 109999 - DNA, 80 bp, synthetic construct
  misc_feature 1..80: note = Artificially Synthesized Probe
  source 1..80: mol_type = other DNA
agcatggagtgacctcgatgccccatgctcaccgaggggacttcccctgaacccgtcttccaggctccccccttctggac

SEQ ID NO: 110000 - DNA, 80 bp, synthetic construct
  misc_feature 1..80: note = Artificially Synthesized Probe
  source 1..80: mol_type = other DNA
ctgtccagtggacacgtaacccatgtgaccttacctatcactggagatggctcacactccttaccctgcccctttgtttt

SEQ ID NO: 110001 - DNA, 80 bp, synthetic construct
  misc_feature 1..80: note = Artificially Synthesized Probe
  source 1..80: mol_type = other DNA
cctgtggggctggaccctacacagagcgacacttctaacggggccctgttccagaccccactgcctgtgggtggagtccg

SEQ ID NO: 110002 - DNA, 80 bp, synthetic construct
  misc_feature 1..80: note = Artificially Synthesized Probe
  source 1..80: mol_type = other DNA
tgctaatctcgcctgaaaggtcacctctgccaaggagtgttaccctgccccagacaaggtcagatctccttaatggatgc

SEQ ID NO: 110003 - DNA, 80 bp, synthetic construct
  misc_feature 1..80: note = Artificially Synthesized Probe
  source 1..80: mol_type = other DNA
gcccaggggaaagtgttgggaaaaacacatttgtaaaaatcacttttgtgtgcatttttcaacagaacaaaatacttcca

SEQ ID NO: 110004 - DNA, 80 bp, synthetic construct
  misc_feature 1..80: note = Artificially Synthesized Probe
  source 1..80: mol_type = other DNA
gcttctccagcgtccagtgaggcctatttcttatagctacattttgccaatgcttttgagtgattcttgttcagtgccta

SEQ ID NO: 110005 - DNA, 80 bp, synthetic construct
  misc_feature 1..80: note = Artificially Synthesized Probe
  source 1..80: mol_type = other DNA
acatcgggacgcgtgctccactcgtggcattccaggctcacaatgtcgcccttatccgatgatcagccacctcggatgtg

SEQ ID NO: 110006 - DNA, 80 bp, synthetic construct
  misc_feature 1..80: note = Artificially Synthesized Probe
  source 1..80: mol_type = other DNA
cctctgcaattctattttatgataaatacagaaatgacccttaacccacctttccctcctttttgctttttcctattgac

SEQ ID NO: 110007 - DNA, 80 bp, synthetic construct
  misc_feature 1..80: note = Artificially Synthesized Probe
  source 1..80: mol_type = other DNA
gttacaggcagcaaagcccaatgatgatggtctctttttcaggacaagcatttggattccataacacagtcagtcacaga

SEQ ID NO: 110008 - DNA, 80 bp, synthetic construct
  misc_feature 1..80: note = Artificially Synthesized Probe
  source 1..80: mol_type = other DNA
ccaattagctgcttggaaaaggtcttttttcttcttagccattgtactgggtagaatcatgtacccccaaatccatgtcc

SEQ ID NO: 110009 - DNA, 80 bp, synthetic construct
  misc_feature 1..80: note = Artificially Synthesized Probe
  source 1..80: mol_type = other DNA
gagcaaagggaagtgggtgcatggaggaccccagagagcccaggccccacttcctcatgaggaaaaggaccacagcaaag

SEQ ID NO: 110010 - DNA, 80 bp, synthetic construct
  misc_feature 1..80: note = Artificially Synthesized Probe
  source 1..80: mol_type = other DNA
ggaacacgggccgtgaaggagttaaagtcctcaggtctacgaatacgacattatctttttttccttgtttcctgctaatc

SEQ ID NO: 110011 - DNA, 80 bp, synthetic construct
  misc_feature 1..80: note = Artificially Synthesized Probe
  source 1..80: mol_type = other DNA
ataaagaagagttttcttttcttccatgaaaatctagccacttactgcagtagaatcactacactccatctgcgcacggt

SEQ ID NO: 110012 - DNA, 80 bp, synthetic construct
  misc_feature 1..80: note = Artificially Synthesized Probe
  source 1..80: mol_type = other DNA
cagccacactccatctgcccacggtgagacatcactacagccacgctccatctgcccacggtgacacatcactgcagcca

SEQ ID NO: 110013 - DNA, 80 bp, synthetic construct
  misc_feature 1..80: note = Artificially Synthesized Probe
  source 1..80: mol_type = other DNA
acacggtgagacatcactgcagccacactccatctgcccacggtgagacatcactgcagccacactccatctgcccacgg

SEQ ID NO: 110014 - DNA, 80 bp, synthetic construct
  misc_feature 1..80: note = Artificially Synthesized Probe
  source 1..80: mol_type = other DNA
gcagccacactccatctgcacacagtgacgcatcactgcagccacactccatctgcacacggtgagacatcactgcagcc

SEQ ID NO: 110015 - DNA, 80 bp, synthetic construct
  misc_feature 1..80: note = Artificially Synthesized Probe
  source 1..80: mol_type = other DNA
cccacagtgagacaccactgcagccacactccatctgcccacggtgacacatcactgcagccacactccatctgcccaca

SEQ ID NO: 110016 - DNA, 80 bp, synthetic construct
  misc_feature 1..80: note = Artificially Synthesized Probe
  source 1..80: mol_type = other DNA
ctgatgtgtgagcgtggactgcgctacgcgtgacagaatccgtgtctgtcactccggtgctgtgctgggttgggaagata

SEQ ID NO: 110017 - DNA, 80 bp, synthetic construct
  misc_feature 1..80: note = Artificially Synthesized Probe
  source 1..80: mol_type = other DNA
tgcagccacactccatctgcacacagtgacacatcactgcagccacactccatctgcacacagtgacgcatcactgcagc

SEQ ID NO: 110018 - DNA, 80 bp, synthetic construct
  misc_feature 1..80: note = Artificially Synthesized Probe
  source 1..80: mol_type = other DNA
gcacacagtgacacatcactgcagccacactccatctgcagtgacacatcactgcagccacactccatctgcccacggtg

SEQ ID NO: 110019 - DNA, 80 bp, synthetic construct
  misc_feature 1..80: note = Artificially Synthesized Probe
  source 1..80: mol_type = other DNA
agccacactccatctgcccacggtgacgcatcactgcagccacactccatctgcccacggtgagacatcactgcagccac

SEQ ID NO: 110020 - DNA, 80 bp, synthetic construct
  misc_feature 1..80: note = Artificially Synthesized Probe
  source 1..80: mol_type = other DNA
aaaagctgtgtgacagggaggcagagatgagggggacacttcgaatcccccaaggagtgcacgggcctggggcagacacg

SEQ ID NO: 110021 - DNA, 80 bp, synthetic construct
  misc_feature 1..80: note = Artificially Synthesized Probe
  source 1..80: mol_type = other DNA
cacggtgagacatcactgcagccacactccatctgcacacggtgacacatcactgcagccacactccatctgcacacggt

SEQ ID NO: 110022 - DNA, 80 bp, synthetic construct
  misc_feature 1..80: note = Artificially Synthesized Probe
  source 1..80: mol_type = other DNA
cagccacactccatctgcacacggtgacacatcactgcagccacactccatctgcacacagtgacacatcactgcagcca

SEQ ID NO: 110023 - DNA, 80 bp, synthetic construct
  misc_feature 1..80: note = Artificially Synthesized Probe
  source 1..80: mol_type = other DNA
tgtctgcgcatggccgctctctgtgtctgtaccttcacgaggtgatcccctcttctgctaaggacacagtcatgttggat

SEQ ID NO: 110024 - DNA, 80 bp, synthetic construct
  misc_feature 1..80: note = Artificially Synthesized Probe
  source 1..80: mol_type = other DNA
cagagtgtccactgcacaccaggcagcctgctagagacattgcattcattacctttgcctatttatgaatatgggaaggt

SEQ ID NO: 110025 - DNA, 80 bp, synthetic construct
  misc_feature 1..80: note = Artificially Synthesized Probe
  source 1..80: mol_type = other DNA
cagcgcagtatttatgagctgcatttctttcaaaacattctatcaaactgacatttccttaaatcagactgaccttccac

SEQ ID NO: 110026 - DNA, 80 bp, synthetic construct
  misc_feature 1..80: note = Artificially Synthesized Probe
  source 1..80: mol_type = other DNA
agcaggccgccgtcgggcggtgactgattacaatcatttgttgtgatgcatcgcaaattaaagggacaagcccagccaag

SEQ ID NO: 110027 - DNA, 80 bp, synthetic construct
  misc_feature 1..80: note = Artificially Synthesized Probe
  source 1..80: mol_type = other DNA
cagacacctgttccgagggaatctctcccatccacctgccgctgtggctcagaccccaggcacaacacaagcgctcggca

SEQ ID NO: 110028 - DNA, 80 bp, synthetic construct
  misc_feature 1..80: note = Artificially Synthesized Probe
  source 1..80: mol_type = other DNA
attacttgtgtcgtccgtgagcacactggctgtggacggaggaaggctgtggctccaggattgtcatttcagcaccgctg

SEQ ID NO: 110029 - DNA, 80 bp, synthetic construct
  misc_feature 1..80: note = Artificially Synthesized Probe
  source 1..80: mol_type = other DNA
ccactagtgacagggcccttcgatccatgtggaagtgcctaatgccacttttttgatgagcaaaaatggcagctaataat

SEQ ID NO: 110030 - DNA, 80 bp, synthetic construct
  misc_feature 1..80: note = Artificially Synthesized Probe
  source 1..80: mol_type = other DNA
gagcaacctcattccacggggtgagcatctcgcaccttggtgcggaagcccagagcccacgctgacttctgcaatagcct

SEQ ID NO: 110031 - DNA, 80 bp, synthetic construct
  misc_feature 1..80: note = Artificially Synthesized Probe
  source 1..80: mol_type = other DNA
aggctatgggactgaaactcagtcctgtggacaccagccagggctgcaggtgctggctgtattcctgctgttacagtcag

SEQ ID NO: 110032 - DNA, 80 bp, synthetic construct
  misc_feature 1..80: note = Artificially Synthesized Probe
  source 1..80: mol_type = other DNA
accttcagtctgtgtcccgatccttggtcagcatctgagaatggtccagaatggggatgcaggaggagacggtcactcca

SEQ ID NO: 110033 - DNA, 80 bp, synthetic construct
  misc_feature 1..80: note = Artificially Synthesized Probe
  source 1..80: mol_type = other DNA
caccatgggagcccctctctgggctggccaaggcctgagccggctccctctgcttgtggggaggtgtggagggagaggca

SEQ ID NO: 110034 - DNA, 80 bp, synthetic construct
  misc_feature 1..80: note = Artificially Synthesized Probe
  source 1..80: mol_type = other DNA
gttcccccagcagtgccagcccaccagcactgcgctcaaattcttgctgggcctcagctgcctccccatggggcagggcg

SEQ ID NO: 110035 - DNA, 80 bp, synthetic construct
  misc_feature 1..80: note = Artificially Synthesized Probe
  source 1..80: mol_type = other DNA
gctccgcctgcggccctggtgcaggatccactaggtgaagccagttgggctcctgagtctagtgaggacttggagaacat

SEQ ID NO: 110036 - DNA, 80 bp, synthetic construct
  misc_feature 1..80: note = Artificially Synthesized Probe
  source 1..80: mol_type = other DNA
tatgtctagctaagggactgtaaatacaccaatcagcactcttgtgtctagctaatggtttgtaaacacaccaatcagca

SEQ ID NO: 110037 - DNA, 80 bp, synthetic construct
  misc_feature 1..80: note = Artificially Synthesized Probe
  source 1..80: mol_type = other DNA
tgggtggggccagataaggggaaaaaagcaggctgcccgagccagcagtggcaacccacttgggtcccctttcacattgt

SEQ ID NO: 110038 - DNA, 80 bp, synthetic construct
  misc_feature 1..80: note = Artificially Synthesized Probe
  source 1..80: mol_type = other DNA
catccaaacattagaaggaacaaactcgggacacaccgcctttaagaactgtaacactcactgcaagggtccgtggcttt

SEQ ID NO: 110039 - DNA, 80 bp, synthetic construct
  misc_feature 1..80: note = Artificially Synthesized Probe
  source 1..80: mol_type = other DNA
aagtgagacacactcagtgagagacacacactacatacaatcactcacacacacagtgagacacgggctcatacagcaag

SEQ ID NO: 110040 - DNA, 80 bp, synthetic construct
  misc_feature 1..80: note = Artificially Synthesized Probe
  source 1..80: mol_type = other DNA
ttccacatagttcatctaacaaacaggcatcccgagcaagttggggtttaaccgcattgactctggcaacctgaacatgt

SEQ ID NO: 110041 - DNA, 80 bp, synthetic construct
  misc_feature 1..80: note = Artificially Synthesized Probe
  source 1..80: mol_type = other DNA
ctgtggggccagagactggggtcacagccatgggggagccgggggagcctggggagcccagcgctgtgaggttgcttgga

SEQ ID NO: 110042 - DNA, 80 bp, synthetic construct
  misc_feature 1..80: note = Artificially Synthesized Probe
  source 1..80: mol_type = other DNA
ctcccactcaccaaagccccccctgtgccagtgatttccagaagctgactggtgggggggacattttctacttgcagggg

SEQ ID NO: 110043 - DNA, 80 bp, synthetic construct
  misc_feature 1..80: note = Artificially Synthesized Probe
  source 1..80: mol_type = other DNA
caaagagaaccctaactttgaatttttaagaatgtcaatcttggggcttactggtaagtattcaatgaagaacaacgcct

SEQ ID NO: 110044 - DNA, 80 bp, synthetic construct
  misc_feature 1..80: note = Artificially Synthesized Probe
  source 1..80: mol_type = other DNA
aattttatggatgatggatgcttcacctgcttccaaaggggctgcaggcagcgcaggcataaacactcagcttaataaag

SEQ ID NO: 110045 - DNA, 80 bp, synthetic construct
  misc_feature 1..80: note = Artificially Synthesized Probe
  source 1..80: mol_type = other DNA
cctgacatggcagtggctctgactgtctggtggcaggaaccatgcagttcaccaggaacaccaacgtctctcctggtcat

SEQ ID NO: 110046 - DNA, 80 bp, synthetic construct
  misc_feature 1..80: note = Artificially Synthesized Probe
  source 1..80: mol_type = other DNA
tactccaaaatgcaacgtgcagaatcctgcagtgagcaggggcatggtttgcggaatatgggcctccagaagcagctgtg

SEQ ID NO: 110047 - DNA, 80 bp, synthetic construct
  misc_feature 1..80: note = Artificially Synthesized Probe
  source 1..80: mol_type = other DNA
gggtcagaccaaggttttgtatttcacaaccagcggataatgagttgagttgttcactaaactgacgctcagaactctta

SEQ ID NO: 110048 - DNA, 80 bp, synthetic construct
  misc_feature 1..80: note = Artificially Synthesized Probe
  source 1..80: mol_type = other DNA
aaatggaaattaccccagagcatgggaatggcactgtctttctgtcttattttagaataagaaattatgtggccattcaa

SEQ ID NO: 110049 - DNA, 80 bp, synthetic construct
  misc_feature 1..80: note = Artificially Synthesized Probe
  source 1..80: mol_type = other DNA
tccatgcctcagtttacctatgtgtcccacgtccctctgacatgacgttgtatgtttccatttatttcctctgaaaatca

SEQ ID NO: 110050 - DNA, 80 bp, synthetic construct
  misc_feature 1..80: note = Artificially Synthesized Probe
  source 1..80: mol_type = other DNA
gaggtggatgagtcccctccattcaaggccttctctgcaaacagccacccttctggctccaggatgaaatgaggctctaa

SEQ ID NO: 110051 - DNA, 80 bp, synthetic construct
  misc_feature 1..80: note = Artificially Synthesized Probe
  source 1..80: mol_type = other DNA
agtgctcaaaggaacacagccttttcagctggtgtcacaagacatttacaaaacaccgtggagaaattccaaaaccaggc

SEQ ID NO: 110052 - DNA, 80 bp, synthetic construct
  misc_feature 1..80: note = Artificially Synthesized Probe
  source 1..80: mol_type = other DNA
aatacatccttacccagattgtatactttatgggaaaattaataatgccaagcagacggcaaggctggcaggtgactctg

SEQ ID NO: 110053 - DNA, 80 bp, synthetic construct
  misc_feature 1..80: note = Artificially Synthesized Probe
  source 1..80: mol_type = other DNA
atcttccttcaatatcagcaaatcccacaaaaattacagtagggagtagttataggttgaaaggttagagctggggagaa

SEQ ID NO: 110054 - DNA, 80 bp, synthetic construct
  misc_feature 1..80: note = Artificially Synthesized Probe
  source 1..80: mol_type = other DNA
gacgtggaagcaatgacgtcgtggtcagggacgtctgcagggagcaaaatgaagcgagtttctttagttcacaatttctc

SEQ ID NO: 110055 - DNA, 80 bp, synthetic construct
  misc_feature 1..80: note = Artificially Synthesized Probe
  source 1..80: mol_type = other DNA
atgggtggagggcaagggaagggttgagatgcaattcttatttccacgtatgtgataatgctgttgcaatgcttttcagc

SEQ ID NO: 110056 - DNA, 80 bp, synthetic construct
  misc_feature 1..80: note = Artificially Synthesized Probe
  source 1..80: mol_type = other DNA
aggagctcttggactgcagctgtgagtggtactcggctccagtgccattgaggtccctgggggctgctcccaatggcttg

SEQ ID NO: 110057 - DNA, 80 bp, synthetic construct
  misc_feature 1..80: note = Artificially Synthesized Probe
  source 1..80: mol_type = other DNA
aggctttgtgggtcgggcagtccaccgtgaccacgcagctctgcctgtggcgaaagctgccagagacaaggcgtgaagga

SEQ ID NO: 110058 - DNA, 80 bp, synthetic construct
  misc_feature 1..80: note = Artificially Synthesized Probe
  source 1..80: mol_type = other DNA
gggtcacgccgggccatgggcagcacaccagggcaggccgggtcatggtgtgcttagaatttggtgaggcggcagggtcg

SEQ ID NO: 110059 - DNA, 80 bp, synthetic construct
  misc_feature 1..80: note = Artificially Synthesized Probe
  source 1..80: mol_type = other DNA
ttggtgggggtccaggctgtgcagtcccaggggaagaacggcccatgccagcggccctgactgagcagagcaggccagag

SEQ ID NO: 110060 - DNA, 80 bp, synthetic construct
  misc_feature 1..80: note = Artificially Synthesized Probe
  source 1..80: mol_type = other DNA
acaggaggcccaggccacagctcccacgccaggaccattagggacccagtgcagtggctggactgcagctggggcaggag

SEQ ID NO: 110061 - DNA, 80 bp, synthetic construct
  misc_feature 1..80: note = Artificially Synthesized Probe
  source 1..80: mol_type = other DNA
ctattgaatgtgagcactcagcccaaatcatcactgtgaactaaggtatctacacctgcttcattctaaacagaaatgca

SEQ ID NO: 110062 - DNA, 80 bp, synthetic construct
  misc_feature 1..80: note = Artificially Synthesized Probe
  source 1..80: mol_type = other DNA
gcattcattgggggatgtcattttggtcggtcaagggctgtgaagctgatgggattttcaatttgtaccattttatacca

SEQ ID NO: 110063 - DNA, 80 bp, synthetic construct
  misc_feature 1..80: note = Artificially Synthesized Probe
  source 1..80: mol_type = other DNA
aggtctaattgtacatccacctttaatcagtgctaaaatatcaacacagattgaaacttcccttcccaagctgcctgcca

SEQ ID NO: 110064 - DNA, 80 bp, synthetic construct
  misc_feature 1..80: note = Artificially Synthesized Probe
  source 1..80: mol_type = other DNA
acctgatacctgctgtccgagatgtgtctcaaaattatcttgcatttcaccttgctttaaaatttgtctctacttatttc

SEQ ID NO: 110065 - DNA, 80 bp, synthetic construct
  misc_feature 1..80: note = Artificially Synthesized Probe
  source 1..80: mol_type = other DNA
agtgcctgacacggtgggtcttatcagctcaagatcctctcccattctttttaaacaaaatttttagagatagggtcacg

SEQ ID NO: 110066 - DNA, 80 bp, synthetic construct
  misc_feature 1..80: note = Artificially Synthesized Probe
  source 1..80: mol_type = other DNA
tgtggagatggggtctcactatgttgcccagcctggtctcaaactcctggtaagtgatgctcctgccttggcctcccaaa

SEQ ID NO: 110067 - DNA, 80 bp, synthetic construct
  misc_feature 1..80: note = Artificially Synthesized Probe
  source 1..80: mol_type = other DNA
attctttacccacaattgttgctattcttctaaccccatgacatcttactgtctgcttgtagccaagtaaagaacactac

SEQ ID NO: 110068 - DNA, 80 bp, synthetic construct
  misc_feature 1..80: note = Artificially Synthesized Probe
  source 1..80: mol_type = other DNA
ataaactgctcagactttacattttgctctcacatcaaattattcccacttcatttgatctgaatgcagcctcgcggagt

SEQ ID NO: 110069 - DNA, 80 bp, synthetic construct
  misc_feature 1..80: note = Artificially Synthesized Probe
  source 1..80: mol_type = other DNA
gcaaatagctgggagggtgctgtgaactcaagttctaaactccaagctcttgtttttccttcttccattttgccaacctc

SEQ ID NO: 110070 - DNA, 80 bp, synthetic construct
  misc_feature 1..80: note = Artificially Synthesized Probe
  source 1..80: mol_type = other DNA
tcagtaggtaagcagccaactgctgtagaggtgctcatggtgatggaggtgctcatggtggaggtgctcgtggtggtgga

SEQ ID NO: 110071 - DNA, 80 bp, synthetic construct
  misc_feature 1..80: note = Artificially Synthesized Probe
  source 1..80: mol_type = other DNA
tgcccgtggtggtggaggtgctcctggtggtggaggtgcccgtggtggtggaggtgctcctggtggtggaggtgctcctg

SEQ ID NO: 110072 - DNA, 80 bp, synthetic construct
  misc_feature 1..80: note = Artificially Synthesized Probe
  source 1..80: mol_type = other DNA
tggtggcggaggtgcctgtggtgtggaggtgcccgtggtggtggaggtgcccgtggtggtggaggtgctcatggtggagg

SEQ ID NO: 110073 - DNA, 80 bp, synthetic construct
  misc_feature 1..80: note = Artificially Synthesized Probe
  source 1..80: mol_type = other DNA
gaggtgcccgtggtggtggaggtgctcacggtggaggtgcccgtggtggtggaggtgctcatggtggtggaggtgctcgt

SEQ ID NO: 110074 - DNA, 80 bp, synthetic construct
  misc_feature 1..80: note = Artificially Synthesized Probe
  source 1..80: mol_type = other DNA
ataaacagtaagaaaaatggttcacgccttctattcactagccacaggaatctgggcacgctatgagcctctgagtctca

SEQ ID NO: 110075 - DNA, 80 bp, synthetic construct
  misc_feature 1..80: note = Artificially Synthesized Probe
  source 1..80: mol_type = other DNA
ggaggtgctcatggtggtggaggtgctcgtggtggtggaggtgcccgtggtggtggaggtgctcgtagtatggaggtgcc

SEQ ID NO: 110076 - DNA, 80 bp, synthetic construct
  misc_feature 1..80: note = Artificially Synthesized Probe
  source 1..80: mol_type = other DNA
gtggaggtgctcgtggtggtggaggtgctcgtggttgaggtgctcgtggtggtggaggttctcatggtgcaggtgctcct

SEQ ID NO: 110077 - DNA, 80 bp, synthetic construct
  misc_feature 1..80: note = Artificially Synthesized Probe
  source 1..80: mol_type = other DNA
ctcgtggtggtggaggtgctcctggtggaggtgcttgtggtggaggtgctcctggtggtggaggtgctcgtggtggtgga

SEQ ID NO: 110078 - DNA, 80 bp, synthetic construct
  misc_feature 1..80: note = Artificially Synthesized Probe
  source 1..80: mol_type = other DNA
ggaggtgcttgtggtggaggtgctcctggtggtggaggtgctcctggtggaggtgctcgtcgtatggaggtgcccgtggt

SEQ ID NO: 110079 - DNA, 80 bp, synthetic construct
  misc_feature 1..80: note = Artificially Synthesized Probe
  source 1..80: mol_type = other DNA
aaatgccattcagttgaaccttttggttctgctgaccagcgtgcatttaacccactcatcctcacccaaggactcttgtc

SEQ ID NO: 110080 - DNA, 80 bp, synthetic construct
  misc_feature 1..80: note = Artificially Synthesized Probe
  source 1..80: mol_type = other DNA
gtgaatcatcatgtaaattttcaagaatgggccttcagagctttggcattcccgtgctgggaggaaaagtgcaaagaatc

SEQ ID NO: 110081 - DNA, 80 bp, synthetic construct
  misc_feature 1..80: note = Artificially Synthesized Probe
  source 1..80: mol_type = other DNA
tcccaggcagctctcggacttcactgaacctcccctgccttccaaccaagagctgcttctccggagtcctggtgtcagga

SEQ ID NO: 110082 - DNA, 80 bp, synthetic construct
  misc_feature 1..80: note = Artificially Synthesized Probe
  source 1..80: mol_type = other DNA
atgccaacgggctggcggaacataattttttaaataattgagcccttcagagtctctcaaaagtcataatatttggacaa

SEQ ID NO: 110083 - DNA, 80 bp, synthetic construct
  misc_feature 1..80: note = Artificially Synthesized Probe
  source 1..80: mol_type = other DNA
tgtagctgaggcaggatctgctggggaggtaggtgcccagcaccatctttgcactctccatcacctttgcactcagcacc

SEQ ID NO: 110084 - DNA, 80 bp, synthetic construct
  misc_feature 1..80: note = Artificially Synthesized Probe
  source 1..80: mol_type = other DNA
ggcagacatcggcctcccctcagctcagagacagcctgtgagccgcggctgcaggaggaaggagcatggtgggcacctgt

SEQ ID NO: 110085 - DNA, 80 bp, synthetic construct
  misc_feature 1..80: note = Artificially Synthesized Probe
  source 1..80: mol_type = other DNA
tggatgtgggcatcatcgtggtcgttgagtgtggacgccgagaggcttcacacaggacggagggtggatgtggcacctgc

SEQ ID NO: 110086 - DNA, 80 bp, synthetic construct
  misc_feature 1..80: note = Artificially Synthesized Probe
  source 1..80: mol_type = other DNA
tgccctgcagaacacagccctgatttaaaatgagccactttctgctccggtataaagacactaccctttctatgcggaga

SEQ ID NO: 110087 - DNA, 80 bp, synthetic construct
  misc_feature 1..80: note = Artificially Synthesized Probe
  source 1..80: mol_type = other DNA
aggtatgaagacactgccctttctattcagaggtgagggaaagagtggaaacagcattcgcttatggacaaagaggaaaa

SEQ ID NO: 110088 - DNA, 80 bp, synthetic construct
  misc_feature 1..80: note = Artificially Synthesized Probe
  source 1..80: mol_type = other DNA
ggctcccctgggactcccctccagcacagctcatctccagtgggctaggacggctaccacaggaggacatacgtgtcctg

SEQ ID NO: 110089 - DNA, 80 bp, synthetic construct
  misc_feature 1..80: note = Artificially Synthesized Probe
  source 1..80: mol_type = other DNA
cctcctgcacatccagggtacagggccttctgctggatttcacctgccccggcagccgactgcaccagcatcacagcctc

SEQ ID NO: 110090 - DNA, 80 bp, synthetic construct
  misc_feature 1..80: note = Artificially Synthesized Probe
  source 1..80: mol_type = other DNA
agcctgcagagaatcccacgcacttcaaaactctcactcatgtttttcagaagcgggttttacaacttttggcatgaaaa

SEQ ID NO: 110091 - DNA, 80 bp, synthetic construct
  misc_feature 1..80: note = Artificially Synthesized Probe
  source 1..80: mol_type = other DNA
tctccctgatcagggtatgaattctaaatgaacgtgaaagtgaggatgaaatggaacctgctctccccagcagtgagttg

SEQ ID NO: 110092 - DNA, 80 bp, synthetic construct
  misc_feature 1..80: note = Artificially Synthesized Probe
  source 1..80: mol_type = other DNA
aaaagtggctgctgagcaacgcagtttcctagcccttggtttagcagtatccccgagtgtcccccacatgcggctcctgg

SEQ ID NO: 110093 - DNA, 80 bp, synthetic construct
  misc_feature 1..80: note = Artificially Synthesized Probe
  source 1..80: mol_type = other DNA
aggtcctgggtgctgccagccctgagctccactcctgcaaacacttgtcaaaatgccagaagtaattacctggctgttca

SEQ ID NO: 110094 - DNA, 80 bp, synthetic construct
  misc_feature 1..80: note = Artificially Synthesized Probe
  source 1..80: mol_type = other DNA
ctctccggcagcccaggggaggcgctcccgtgcaggtgggagttcttgttccatgtccagcccacgtggccctggacaca

SEQ ID NO: 110095 - DNA, 80 bp, synthetic construct
  misc_feature 1..80: note = Artificially Synthesized Probe
  source 1..80: mol_type = other DNA
tcttagaggctcctctttttagttactcctcatcgtctgtgtctgtgccgtgagtcagggatgttctaagagcaggagga

SEQ ID NO: 110096 - DNA, 80 bp, synthetic construct
  misc_feature 1..80: note = Artificially Synthesized Probe
  source 1..80: mol_type = other DNA
atcctggcagcagctcagctccatggaggacgtgacacagcggcccacgtgcagcggaacctggagccgggctgcccagg

SEQ ID NO: 110097 - DNA, 80 bp, synthetic construct
  misc_feature 1..80: note = Artificially Synthesized Probe
  source 1..80: mol_type = other DNA
ggagggtggacgtggcacctactgaaccgagggtggatgtgggcatcattgtggtcgttgagcgtggatgccgagagcct

SEQ ID NO: 110098 - DNA, 80 bp, synthetic construct
  misc_feature 1..80: note = Artificially Synthesized Probe
  source 1..80: mol_type = other DNA
cacatggaggcaattttctcagcaagtggctgttttgaacatttccaaagcatcctccttcatttctaataagagtgcaa

SEQ ID NO: 110099 - DNA, 80 bp, synthetic construct
  misc_feature 1..80: note = Artificially Synthesized Probe
  source 1..80: mol_type = other DNA
ctttaggccccactgctggtgaccagcatgcagctccacctggcgtggcctccctggggagctggtgcatgggagtcaga

SEQ ID NO: 110100 - DNA, 80 bp, synthetic construct
  misc_feature 1..80: note = Artificially Synthesized Probe
  source 1..80: mol_type = other DNA
tcaggcccaagtccttcttagtggctgctgaagatgaagttcccacactatgaagtccgattctgaattccaccttgcca

SEQ ID NO: 110101 - DNA, 80 bp, synthetic construct
  misc_feature 1..80: note = Artificially Synthesized Probe
  source 1..80: mol_type = other DNA
cgatgtgccatccactgcccctaagaactcccgtctgaacagccctggcaccggggttggggggagcttctggagggcag

SEQ ID NO: 110102 - DNA, 80 bp, synthetic construct
  misc_feature 1..80: note = Artificially Synthesized Probe
  source 1..80: mol_type = other DNA
tcactttgccattacgcttttcaaaataagcacgtttgtctgctttatgagaggccagaagcctgggcagcccttgctcc

SEQ ID NO: 110103 - DNA, 80 bp, synthetic construct
  misc_feature 1..80: note = Artificially Synthesized Probe
  source 1..80: mol_type = other DNA
cagcagcacagcagacacgaccctgttctgacactcaccagcttcacaaagatgccgaacaggcagaagcaggaggacgt

SEQ ID NO: 110104 - DNA, 80 bp, synthetic construct
  misc_feature 1..80: note = Artificially Synthesized Probe
  source 1..80: mol_type = other DNA
ggagccccccatgagcctcaccccaccattcagggtcagcacaggagccccctatgagccacacccccaccacacagggc

SEQ ID NO: 110105 - DNA, 80 bp, synthetic construct
  misc_feature 1..80: note = Artificially Synthesized Probe
  source 1..80: mol_type = other DNA
agactgggagccagcaaaagcaaacagtttctaaaggatgatgaatttccttttctttgaaaggagcaatacaaaaattg

SEQ ID NO: 110106 - DNA, 80 bp, synthetic construct
  misc_feature 1..80: note = Artificially Synthesized Probe
  source 1..80: mol_type = other DNA
aaacccacttatttttaatattcactaataccctgtgctcatacccaaggtcataaattagcagaattcccgggaaagca

SEQ ID NO: 110107 - DNA, 80 bp, synthetic construct
  misc_feature 1..80: note = Artificially Synthesized Probe
  source 1..80: mol_type = other DNA
ggttttgtatcattttgtataaaattagcaaaatgaatgccctttgaattctaccgccagggtgatctccccgcattaat

SEQ ID NO: 110108 - DNA, 80 bp, synthetic construct
  misc_feature 1..80: note = Artificially Synthesized Probe
  source 1..80: mol_type = other DNA
tgagtgtggatgccgagaggcttcacgcaggacggagggtggatgtggcacctgctgaatggagggtggatgtgggcatc

SEQ ID NO: 110109 - DNA, 80 bp, synthetic construct
  misc_feature 1..80: note = Artificially Synthesized Probe
  source 1..80: mol_type = other DNA
cacacgtccttccataggtgtccgcccatcaccacagggcgtttgtgatgacactattaggattccacatcatcttttaa

SEQ ID NO: 110110 - DNA, 80 bp, synthetic construct
  misc_feature 1..80: note = Artificially Synthesized Probe
  source 1..80: mol_type = other DNA
aggctgatgggccagtcactgtgctaagcactctcccaaggccaatgggcgagtcaccagtcaccaaccgtgctaagcgc

SEQ ID NO: 110111 - DNA, 80 bp, synthetic construct
  misc_feature 1..80: note = Artificially Synthesized Probe
  source 1..80: mol_type = other DNA
ccagtgatgcaatcttggctcactgcaacctctgcctcttgggtttaagtgattctcccacctcagcctcccgagtagct

SEQ ID NO: 110112 - DNA, 80 bp, synthetic construct
  misc_feature 1..80: note = Artificially Synthesized Probe
  source 1..80: mol_type = other DNA
ctaaaatgcagatgtgagacggcaggttggggagagtgacgcacgggcagcacgtggacatgcgaggggcctcccgtcca

SEQ ID NO: 110113 - DNA, 80 bp, synthetic construct
  misc_feature 1..80: note = Artificially Synthesized Probe
  source 1..80: mol_type = other DNA
ccaatctgtttcttatatagcatcaggcacgttcatgacaccatagaattattcaaaataattctttaaaaatcatgcat

SEQ ID NO: 110114 - DNA, 80 bp, synthetic construct
  misc_feature 1..80: note = Artificially Synthesized Probe
  source 1..80: mol_type = other DNA
atatgagactcaaatgtacatttcctatgtggctcccccttggtgcagcacttcgataaataacatgaacacatttgaaa

SEQ ID NO: 110115 - DNA, 80 bp, synthetic construct
  misc_feature 1..80: note = Artificially Synthesized Probe
  source 1..80: mol_type = other DNA
ggcattgctccccagtactggagaaactgccaatcatgggataattatcaatgcatttctgcataatacctgatcacgga

SEQ ID NO: 110116 - DNA, 80 bp, synthetic construct
  misc_feature 1..80: note = Artificially Synthesized Probe
  source 1..80: mol_type = other DNA
cattcctcttgcgtgggagtgtttggtatggatcccactgacttttcatgctgggaccgcactggaccgcccagctggag

SEQ ID NO: 110117 - DNA, 80 bp, synthetic construct
  misc_feature 1..80: note = Artificially Synthesized Probe
  source 1..80: mol_type = other DNA
gtttagtacaactttgcaaagcactgtatttcaaccacaaattctcagccccctaaatcaccaccttgagcaaaggagtt

SEQ ID NO: 110118 - DNA, 80 bp, synthetic construct
  misc_feature 1..80: note = Artificially Synthesized Probe
  source 1..80: mol_type = other DNA
gcctcaatcaacgagaactaagtattgaaatcccgaaataaaccagagtattttgctgcattttacactgggaaaaaaag

SEQ ID NO: 110119 - DNA, 80 bp, synthetic construct
  misc_feature 1..80: note = Artificially Synthesized Probe
  source 1..80: mol_type = other DNA
tgcggaatggccctaatgcactgaaaaccatcaggctaaggttctgttatgcttcctgtatttttcttactaggcaggaa

SEQ ID NO: 110120 - DNA, 80 bp, synthetic construct
  misc_feature 1..80: note = Artificially Synthesized Probe
  source 1..80: mol_type = other DNA
accgagggtggatgtgggcatcatcatggttgttgcgcgtggacaccgagagccttcacacaggatggtgggtggatgtg

SEQ ID NO: 110121 - DNA, 80 bp, synthetic construct
  misc_feature 1..80: note = Artificially Synthesized Probe
  source 1..80: mol_type = other DNA
ataacaaagattactcaagctctatctgtaagtacatctcaaaaatgtgtgattcgcaatgcccagaaccctgggctcta

SEQ ID NO: 110122 - DNA, 80 bp, synthetic construct
  misc_feature 1..80: note = Artificially Synthesized Probe
  source 1..80: mol_type = other DNA
gaaaaacctcaaagcaaaattgcacgtgctctgcacacactgggattactacaaacaccaaatcttgcttttccaaaagc

SEQ ID NO: 110123 - DNA, 80 bp, synthetic construct
  misc_feature 1..80: note = Artificially Synthesized Probe
  source 1..80: mol_type = other DNA
acaccagatttccacggaaaccgagaccttcctctgggttgccccatgtgggtagtgtgagtctctctctgccctggctg

SEQ ID NO: 110124 - DNA, 80 bp, synthetic construct
  misc_feature 1..80: note = Artificially Synthesized Probe
  source 1..80: mol_type = other DNA
gaagggataatttaaaataagttcataacgaagtctacgcgccacaccgcttttctgaaaacgacatggaaaacactggt

SEQ ID NO: 110125 - DNA, 80 bp, synthetic construct
  misc_feature 1..80: note = Artificially Synthesized Probe
  source 1..80: mol_type = other DNA
ctttgcttttccaaaacacacatcacagtgtaatatgctatcctaaaaaattcacatcaacctctgaacccagcaacagc

SEQ ID NO: 110126 - DNA, 80 bp, synthetic construct
  misc_feature 1..80: note = Artificially Synthesized Probe
  source 1..80: mol_type = other DNA
aagaactactctgtataaaaacaactggcagggaattgctagacaggaattatcaaaattgttcaaagctttttaaatgc

SEQ ID NO: 110127 - DNA, 80 bp, synthetic construct
  misc_feature 1..80: note = Artificially Synthesized Probe
  source 1..80: mol_type = other DNA
tccacagatgacagccatagatagctcttcctggaacagaccccttaaatgtcttctaagaagtaaatccctggaacaga

SEQ ID NO: 110128 - DNA, 80 bp, synthetic construct
  misc_feature 1..80: note = Artificially Synthesized Probe
  source 1..80: mol_type = other DNA
cacaggctcatcccaaggcagcatatgacacccaggctgtggattttgcacccaaaatcctttcaacctcacatgtattt

SEQ ID NO: 110129 - DNA, 80 bp, synthetic construct
  misc_feature 1..80: note = Artificially Synthesized Probe
  source 1..80: mol_type = other DNA
acaccatggctgaatattccatgtggacgtcttagcatcactttgaactcaacaaggtctcccttgaatcagcgcctgct

SEQ ID NO: 110130 - DNA, 80 bp, synthetic construct
  misc_feature 1..80: note = Artificially Synthesized Probe
  source 1..80: mol_type = other DNA
gccctgtcacagcagagctgagtgacttcctgcgtccagctctactgcatgcaaaatgtccttggaagccgcctccaggg

SEQ ID NO: 110131 - DNA, 80 bp, synthetic construct
  misc_feature 1..80: note = Artificially Synthesized Probe
  source 1..80: mol_type = other DNA
gctcatgagtgctgagttctaccccctctcaaagccctactcccgagtgagcactgtgagagtggctgattctccctgtc

SEQ ID NO: 110132 - DNA, 80 bp, synthetic construct
  misc_feature 1..80: note = Artificially Synthesized Probe
  source 1..80: mol_type = other DNA
acacatatttgggggcaccccatgccacacaaataagcacattttgggtaatgggttgaggtggatgaaaactccagtgg

SEQ ID NO: 110133 - DNA, 80 bp, synthetic construct
  misc_feature 1..80: note = Artificially Synthesized Probe
  source 1..80: mol_type = other DNA
atgatttctgccacggcctcacccacgcaggaggtgatcaattcatatttgtgaccggttcaacattttggttgaatggt

SEQ ID NO: 110134 - DNA, 80 bp, synthetic construct
  misc_feature 1..80: note = Artificially Synthesized Probe
  source 1..80: mol_type = other DNA
actggaatatcctaaacctaatttttccctcacgtgctgaaagttttctctaaaggctgtgaggaggttcttggttcctc

SEQ ID NO: 110135 - DNA, 80 bp, synthetic construct
  misc_feature 1..80: note = Artificially Synthesized Probe
  source 1..80: mol_type = other DNA
gagtgctcctgacaccctcggggtacatctcgcaggcggtgagcacccagtgaccatcgccgtcaggcccagcgagaccc

SEQ ID NO: 110136 - DNA, 80 bp, synthetic construct
  misc_feature 1..80: note = Artificially Synthesized Probe
  source 1..80: mol_type = other DNA
gctctgacgtgggaagaagtctctatcccgaggccccactacaggtctaactccatgagtcactgttctgtggccctcct

SEQ ID NO: 110137 - DNA, 80 bp, synthetic construct
  misc_feature 1..80: note = Artificially Synthesized Probe
  source 1..80: mol_type = other DNA
gagctgagctgctggctctgcccccagcaccatcagcagcagagatccctccccacaagaagaacttgccctggcatttg

SEQ ID NO: 110138 - DNA, 80 bp, synthetic construct
  misc_feature 1..80: note = Artificially Synthesized Probe
  source 1..80: mol_type = other DNA
gccatcttgttcagctttctgtctctttagacatttggggaaaattgaataaatcccatgtgcatattgccagcatcaaa

SEQ ID NO: 110139 - DNA, 80 bp, synthetic construct
  misc_feature 1..80: note = Artificially Synthesized Probe
  source 1..80: mol_type = other DNA
acgcccatccacacccacgacgcccatccacacccaccacgcccatccacacccacgacactcatccacacccacgatgc

SEQ ID NO: 110140 - DNA, 80 bp, synthetic construct
  misc_feature 1..80: note = Artificially Synthesized Probe
  source 1..80: mol_type = other DNA
gcccatccacacccaccacgcccatccacaccctcgacgcccatccacacccacgacgcccatccacacccacgacgccc

SEQ ID NO: 110141 - DNA, 80 bp, synthetic construct
  misc_feature 1..80: note = Artificially Synthesized Probe
  source 1..80: mol_type = other DNA
ccatccacaccctcgacgcccatccagatacccatccacacccacgacgcccatccacacccttgacgcccatccacaca

SEQ ID NO: 110142 - DNA, 80 bp, synthetic construct
  misc_feature 1..80: note = Artificially Synthesized Probe
  source 1..80: mol_type = other DNA
tgcccatccacacccacgacgcccatccacacccatgacgcccatccacacccacgacgcccatccacacggatgcccat

SEQ ID NO: 110143 - DNA, 80 bp, synthetic construct
  misc_feature 1..80: note = Artificially Synthesized Probe
  source 1..80: mol_type = other DNA
aggaaggcaggtgtgtgccatgcaaagaccttcctaccacgaaactcctgagacgatgggccccagggtgccatcttctc

SEQ ID NO: 110144 - DNA, 80 bp, synthetic construct
  misc_feature 1..80: note = Artificially Synthesized Probe
  source 1..80: mol_type = other DNA
acaccctcgacgcccatccacacagatacccatccacacccacgacgcccatccacacccatgacacccatccacacaga

SEQ ID NO: 110145 - DNA, 80 bp, synthetic construct
  misc_feature 1..80: note = Artificially Synthesized Probe
  source 1..80: mol_type = other DNA
acgcccatccacacctacgacgcccatccacacccacgacgcccatccacacatgcccatccacacccatgacgcccatc

SEQ ID NO: 110146 - DNA, 80 bp, synthetic construct
  misc_feature 1..80: note = Artificially Synthesized Probe
  source 1..80: mol_type = other DNA
tctccaccaggcgctccttacacagtgctcacctatctaattacagacctgcttagaaattccaggggccaattttcaaa

SEQ ID NO: 110147 - DNA, 80 bp, synthetic construct
  misc_feature 1..80: note = Artificially Synthesized Probe
  source 1..80: mol_type = other DNA
cactccacacagctccatgccttttcctccttaaacccctcactcagccacaaagggggaatggtctgttaaaggcatga

SEQ ID NO: 110148 - DNA, 80 bp, synthetic construct
  misc_feature 1..80: note = Artificially Synthesized Probe
  source 1..80: mol_type = other DNA
taaacaacaaaaccaccaacgaaaagcacaaaaaatgtggaaaatgtggcactcaatagaccataaagaggagccttgtt

SEQ ID NO: 110149 - DNA, 80 bp, synthetic construct
  misc_feature 1..80: note = Artificially Synthesized Probe
  source 1..80: mol_type = other DNA
cgaatgaacaggatcatcgactgcctagcatctgtgttgaagcgctttcacacacatcaataaccttattatcttcttca

SEQ ID NO: 110150 - DNA, 80 bp, synthetic construct
  misc_feature 1..80: note = Artificially Synthesized Probe
  source 1..80: mol_type = other DNA
catttttcaattttatactgtagagaggatgggagcactggagcttacaaggcttgagatccaattgtttgtttaaccgc

SEQ ID NO: 110151 - DNA, 80 bp, synthetic construct
  misc_feature 1..80: note = Artificially Synthesized Probe
  source 1..80: mol_type = other DNA
gaggggtctgctcctcctccaaattcttccataaaatccactctctaaattgactatggcttgtgtgggttcacacagtc

SEQ ID NO: 110152 - DNA, 80 bp, synthetic construct
  misc_feature 1..80: note = Artificially Synthesized Probe
  source 1..80: mol_type = other DNA
tgtcgtcccgatggtcgtgccaggcacatctatggtaagaagcgtctgatgcaagagcaggaagagtttctgagtcactg

SEQ ID NO: 110153 - DNA, 80 bp, synthetic construct
  misc_feature 1..80: note = Artificially Synthesized Probe
  source 1..80: mol_type = other DNA
cctgatgaaggagggagtcttcacacaaaccttcctcccctgatgaaggagggagtcttcacacaaaccttcttcccctg

SEQ ID NO: 110154 - DNA, 80 bp, synthetic construct
  misc_feature 1..80: note = Artificially Synthesized Probe
  source 1..80: mol_type = other DNA
gagggagtcttcacacaaaccttcttcccctgatgaaagagggagtcttcacacacatccttcttcccctgatgaaagag

SEQ ID NO: 110155 - DNA, 80 bp, synthetic construct
  misc_feature 1..80: note = Artificially Synthesized Probe
  source 1..80: mol_type = other DNA
tttattttcaatagtgtgaagacacaggcagacacaaagggcaggaggtcataccgatgtgtttcagatcctggcgtcat

SEQ ID NO: 110156 - DNA, 80 bp, synthetic construct
  misc_feature 1..80: note = Artificially Synthesized Probe
  source 1..80: mol_type = other DNA
cacacaaaccttcttcccctgaggaaagggggagtcttcacacaaaccttcttcccctgaggaaagagggagtcttcaca

SEQ ID NO: 110157 - DNA, 80 bp, synthetic construct
  misc_feature 1..80: note = Artificially Synthesized Probe
  source 1..80: mol_type = other DNA
cctcccctgatgaaagagggagtcttcacacaaacccttcttcccctgatgaaagagggagtcttcacacaaaccttctt

SEQ ID NO: 110158 - DNA, 80 bp, synthetic construct
  misc_feature 1..80: note = Artificially Synthesized Probe
  source 1..80: mol_type = other DNA
cgaaagagggagtcttcacacacatccttcttcccctgaggaaagagggagtcttcacataaaccttcttcccctgatga

SEQ ID NO: 110159 - DNA, 80 bp, synthetic construct
  misc_feature 1..80: note = Artificially Synthesized Probe
  source 1..80: mol_type = other DNA
gtcttcacacaaaccttcttcccctgatgaaagggggagtcttcacacacatccttcttcccctgacgaaagagggagtc

SEQ ID NO: 110160 - DNA, 80 bp, synthetic construct
  misc_feature 1..80: note = Artificially Synthesized Probe
  source 1..80: mol_type = other DNA
aaaccttcttcccctgatgaaagagggagtcttcacacaaaccttcttcccctgatgaaagggggagtcttcacacacat

SEQ ID NO: 110161 - DNA, 80 bp, synthetic construct
  misc_feature 1..80: note = Artificially Synthesized Probe
  source 1..80: mol_type = other DNA
cccctgatgaaggaaggagtcttcacacaaaccttcttcccctgatgaaagagggagtcttcacacaaaccttcttcccc

SEQ ID NO: 110162 - DNA, 80 bp, synthetic construct
  misc_feature 1..80: note = Artificially Synthesized Probe
  source 1..80: mol_type = other DNA
gagggagtcttcacacaaaccttcttcccctgatgaaagagggagtcttcacacaaaccttcttcccctgatgaaagagg

SEQ ID NO: 110163 - DNA, 80 bp, synthetic construct
  misc_feature 1..80: note = Artificially Synthesized Probe
  source 1..80: mol_type = other DNA
cacacaaatccttcttcccctgacgaaagagggagtcttcacacacatccttcctcccctgatgaaagagggagtcttca

SEQ ID NO: 110164 - DNA, 80 bp, synthetic construct
  misc_feature 1..80: note = Artificially Synthesized Probe
  source 1..80: mol_type = other DNA
aacccttcctcccctgacgaaagagggagtcttcacacaaacccttcctcccctgatgaaagagggggtcttcacacaca

SEQ ID NO: 110165 - DNA, 80 bp, synthetic construct
  misc_feature 1..80: note = Artificially Synthesized Probe
  source 1..80: mol_type = other DNA
gttcacatgggtcctatgaagaatatattaggagaaacaaaagctatttattgccgctaggagtcatctcccaattgggc

SEQ ID NO: 110166 - DNA, 80 bp, synthetic construct
  misc_feature 1..80: note = Artificially Synthesized Probe
  source 1..80: mol_type = other DNA
agagactgttctcaagggcagagagaggaggctccccttcctgtaatcggagtcacgcgaggctgacgggaaagccagga

SEQ ID NO: 110167 - DNA, 80 bp, synthetic construct
  misc_feature 1..80: note = Artificially Synthesized Probe
  source 1..80: mol_type = other DNA
ccatttattcctgagttctttatcactcagtggttccacttgatagtttactatatattgataattgctcatttcttttg

SEQ ID NO: 110168 - DNA, 80 bp, synthetic construct
  misc_feature 1..80: note = Artificially Synthesized Probe
  source 1..80: mol_type = other DNA
ctccatcaaccagactgttgagtgtaagagttctgcgtaaaaggccttttcttaactgaggactatttggaaatctcttt

SEQ ID NO: 110169 - DNA, 80 bp, synthetic construct
  misc_feature 1..80: note = Artificially Synthesized Probe
  source 1..80: mol_type = other DNA
tctgaatattagttttcagggcatgacactttaaccacaggaaagaaaacactgagctccatctgttcttagaccaaccg

SEQ ID NO: 110170 - DNA, 80 bp, synthetic construct
  misc_feature 1..80: note = Artificially Synthesized Probe
  source 1..80: mol_type = other DNA
gcttctatttggttgggttagtctgggggttgttatttctgtatagtaacgactatacagtcgatacataacacaggctt

SEQ ID NO: 110171 - DNA, 80 bp, synthetic construct
  misc_feature 1..80: note = Artificially Synthesized Probe
  source 1..80: mol_type = other DNA
gcctcaggtactagattcccttgactttttgtggataaaaagaagatagccaaggcatatatggcaacaaatatagtttt

SEQ ID NO: 110172 - DNA, 80 bp, synthetic construct
  misc_feature 1..80: note = Artificially Synthesized Probe
  source 1..80: mol_type = other DNA
cttgacagactgacctgtgctttatctatttgacacctggatttggagtgaagcccataacatgaatagatgggtgcgtg

SEQ ID NO: 110173 - DNA, 80 bp, synthetic construct
  misc_feature 1..80: note = Artificially Synthesized Probe
  source 1..80: mol_type = other DNA
tgaaagataggtgatggatgggtagagagatggttgggtgggtgaaggataggtgatagatggatgggtagagagatggt

SEQ ID NO: 110174 - DNA, 80 bp, synthetic construct
  misc_feature 1..80: note = Artificially Synthesized Probe
  source 1..80: mol_type = other DNA
gttgggtgggtgggtgggtgagggataggtgatagatggttgggtagagagatgggtgggtgagggataggtgatggata

SEQ ID NO: 110175 - DNA, 80 bp, synthetic construct
  misc_feature 1..80: note = Artificially Synthesized Probe
  source 1..80: mol_type = other DNA
cacatatatgtatatatatgcatacatatatacatgtgcatatatatacatatatgtgtgtgtgtatatatatgtaggtg

SEQ ID NO: 110176 - DNA, 80 bp, synthetic construct
  misc_feature 1..80: note = Artificially Synthesized Probe
  source 1..80: mol_type = other DNA
ataggtgggtggtttggtggatagagatatgtatatatttattgcttatattaattcaaacataattagacactttctca

SEQ ID NO: 110177 - DNA, 80 bp, synthetic construct
  misc_feature 1..80: note = Artificially Synthesized Probe
  source 1..80: mol_type = other DNA
tggatcgccaggaggctgcagcctgatcccagcgtcactgctgcgacaggcacctccctgcctggattctgccgcatggg

SEQ ID NO: 110178 - DNA, 80 bp, synthetic construct
  misc_feature 1..80: note = Artificially Synthesized Probe
  source 1..80: mol_type = other DNA
tttaagagacttactatatctggctgaacataatttgaggccaggtaaaacctggaagagctcactacacacagtacatg

SEQ ID NO: 110179 - DNA, 80 bp, synthetic construct
  misc_feature 1..80: note = Artificially Synthesized Probe
  source 1..80: mol_type = other DNA
actcatttggcaatcgctattttatagatgaataagttgaaacccttgtagttttaggtgctagctccaaatagtccaat

SEQ ID NO: 110180 - DNA, 80 bp, synthetic construct
  misc_feature 1..80: note = Artificially Synthesized Probe
  source 1..80: mol_type = other DNA
aggcctgcacctctgtcctttcctgactctgccgctggaccgaccccccacactgtagacccacacgcaggcctgcaccg

SEQ ID NO: 110181 - DNA, 80 bp, synthetic construct
  misc_feature 1..80: note = Artificially Synthesized Probe
  source 1..80: mol_type = other DNA
ccccacactgtttgtgcttttactccctgaattgttcctgatgataacttgcctcctccagtcttgttccttgttcactg

SEQ ID NO: 110182 - DNA, 80 bp, synthetic construct
  misc_feature 1..80: note = Artificially Synthesized Probe
  source 1..80: mol_type = other DNA
aaaactccggaattccacgtggatagcataatgcatacctactttccttacacacacttttaattttaccacatttcctg

SEQ ID NO: 110183 - DNA, 80 bp, synthetic construct
  misc_feature 1..80: note = Artificially Synthesized Probe
  source 1..80: mol_type = other DNA
cacaattgtgtattcctgcctctcgtacatgaggcaataacttcccaaaatatctagcctaagagcttacaaaggaggaa

SEQ ID NO: 110184 - DNA, 80 bp, synthetic construct
  misc_feature 1..80: note = Artificially Synthesized Probe
  source 1..80: mol_type = other DNA
tcttctttgcaattactttgccattacatgggatttgggaaatcctttctgtgccagggaatgtcttgccgcttactttt

SEQ ID NO: 110185 - DNA, 80 bp, synthetic construct
  misc_feature 1..80: note = Artificially Synthesized Probe
  source 1..80: mol_type = other DNA
cacaggggtgggccggatctcaccaggagcagcagaacgctcgccattcccgaaggaccagggccaccccatctgtgttt

SEQ ID NO: 110186 - DNA, 80 bp, synthetic construct
  misc_feature 1..80: note = Artificially Synthesized Probe
  source 1..80: mol_type = other DNA
caccatgctcagctaattttttttttaaaatagagatggcgtttcactatgttggccaggctggtctcgaactccagacc

SEQ ID NO: 110187 - DNA, 80 bp, synthetic construct
  misc_feature 1..80: note = Artificially Synthesized Probe
  source 1..80: mol_type = other DNA
tagaagtagaagcattcacccaagaattaggacccaggctttttcccgaagcctcagcagcttggccacagccttcggtg

SEQ ID NO: 110188 - DNA, 80 bp, synthetic construct
  misc_feature 1..80: note = Artificially Synthesized Probe
  source 1..80: mol_type = other DNA
ctcccgaaggcaactgccagccttcaaacaactccagtttgcaatcccaaatgaagtgtaacgcacactcatgggccagc

SEQ ID NO: 110189 - DNA, 80 bp, synthetic construct
  misc_feature 1..80: note = Artificially Synthesized Probe
  source 1..80: mol_type = other DNA
ctttgtcacgtggctggtgaggggagacccgggggcagctggagaaggaagaccccacctgccctctgcatgttgctcta

SEQ ID NO: 110190 - DNA, 80 bp, synthetic construct
  misc_feature 1..80: note = Artificially Synthesized Probe
  source 1..80: mol_type = other DNA
gtctctgactggagagacacattcggaagagtgaagtgatttttatttggtcctggtgagaaaaataagaataacgccaa

SEQ ID NO: 110191 - DNA, 80 bp, synthetic construct
  misc_feature 1..80: note = Artificially Synthesized Probe
  source 1..80: mol_type = other DNA
tatttggtgttaagtatctgcatacgcagggcatttaattctacaactctgatgtagacattatcgtctctactccatgg

SEQ ID NO: 110192 - DNA, 80 bp, synthetic construct
  misc_feature 1..80: note = Artificially Synthesized Probe
  source 1..80: mol_type = other DNA
ttcattcactcattcaacaaataagcccctgttatgggccagaaacactctagtcactgatgacgcatgattgagcaata

SEQ ID NO: 110193 - DNA, 80 bp, synthetic construct
  misc_feature 1..80: note = Artificially Synthesized Probe
  source 1..80: mol_type = other DNA
agccgccgcaccaggccaggagataaaagattcaagtcctatggatgaaagtgcctttacaagaaaactcagaactgcct

SEQ ID NO: 110194 - DNA, 80 bp, synthetic construct
  misc_feature 1..80: note = Artificially Synthesized Probe
  source 1..80: mol_type = other DNA
atgaaatagcgcaattgtccagctaacatgtattgcaaacctccacagcagacgttattctagtttttcctagagtctct

SEQ ID NO: 110195 - DNA, 80 bp, synthetic construct
  misc_feature 1..80: note = Artificially Synthesized Probe
  source 1..80: mol_type = other DNA
ggaaactgaggctcaggaaaataaggaaactgctctcctcctaaatggtcatatcatttcatactaggaaacaaggctcc

SEQ ID NO: 110196 - DNA, 80 bp, synthetic construct
  misc_feature 1..80: note = Artificially Synthesized Probe
  source 1..80: mol_type = other DNA
tctcatcttaaagacgggacggggagttttgacgtactgtgacatttccttgacattccttatttccaggaaaacctcat

SEQ ID NO: 110197 - DNA, 80 bp, synthetic construct
  misc_feature 1..80: note = Artificially Synthesized Probe
  source 1..80: mol_type = other DNA
acaggtagcaacattgcccgtgagggccggagtctgcaggtggtggatacaccacatccagatgcaaatgccatttaccc

SEQ ID NO: 110198 - DNA, 80 bp, synthetic construct
  misc_feature 1..80: note = Artificially Synthesized Probe
  source 1..80: mol_type = other DNA
aaaattatccagggctttatagtcatcgaggccacagggaaaaccagagagccaacccagggaatgaaggaccattctca

SEQ ID NO: 110199 - DNA, 80 bp, synthetic construct
  misc_feature 1..80: note = Artificially Synthesized Probe
  source 1..80: mol_type = other DNA
ggagaggggcaggcactggggaaggaggtggaggggcccgggcagcactggggttgtcacaggatcgagcaggcacaggc

SEQ ID NO: 110200 - DNA, 80 bp, synthetic construct
  misc_feature 1..80: note = Artificially Synthesized Probe
  source 1..80: mol_type = other DNA
gatcacagaattaggctgcgtgccccgaatgccccggcggtcctcgtggctgatgtgggagctccaccgaagccatctgg

SEQ ID NO: 110201 - DNA, 80 bp, synthetic construct
  misc_feature 1..80: note = Artificially Synthesized Probe
  source 1..80: mol_type = other DNA
atcataacaacgccatggacaacaggcacatttcaataacatggaatgacttactaactttatcctcgctgttttataaa

SEQ ID NO: 110202 - DNA, 80 bp, synthetic construct
  misc_feature 1..80: note = Artificially Synthesized Probe
  source 1..80: mol_type = other DNA
taaaaacccggctgcggtcactgccggtctgctggcataattacatcacatgctaatgcagttttaatggtctctaatga

SEQ ID NO: 110203 - DNA, 80 bp, synthetic construct
  misc_feature 1..80: note = Artificially Synthesized Probe
  source 1..80: mol_type = other DNA
agaacatgctctgacaggcagcaccgcgtggccgtgtctcccgcctgtcagagctgctcccctcgagacaccaacgaggc

SEQ ID NO: 110204 - DNA, 80 bp, synthetic construct
  misc_feature 1..80: note = Artificially Synthesized Probe
  source 1..80: mol_type = other DNA
tggggcagcctctgcctggccaggactggggacctcggagaagcgctggacgcagcaagaatcaggcttcagctccgcaa

SEQ ID NO: 110205 - DNA, 80 bp, synthetic construct
  misc_feature 1..80: note = Artificially Synthesized Probe
  source 1..80: mol_type = other DNA
gggagatgcccgagggtgacgcttacccaggactgagcctggcaaagcccagccctgctcccggaatgcggagaagccgt

SEQ ID NO: 110206 - DNA, 80 bp, synthetic construct
  misc_feature 1..80: note = Artificially Synthesized Probe
  source 1..80: mol_type = other DNA
ttttgctgagactctgtgaaggtgaatggggttgcttgggctcggggactggaagaagaaggacgtttatctcgtgaacg

SEQ ID NO: 110207 - DNA, 80 bp, synthetic construct
  misc_feature 1..80: note = Artificially Synthesized Probe
  source 1..80: mol_type = other DNA
cgttcctgggtccttgaggggagccgggcttctcagccttgaagacccacttcttctctggcctcattcctgggttccgc

SEQ ID NO: 110208 - DNA, 80 bp, synthetic construct
  misc_feature 1..80: note = Artificially Synthesized Probe
  source 1..80: mol_type = other DNA
ggctgcctccccttcctccccccaacacatcccgggtgcctccccttcctccccccacatcccggatgcctccccttcct

SEQ ID NO: 110209 - DNA, 80 bp, synthetic construct
  misc_feature 1..80: note = Artificially Synthesized Probe
  source 1..80: mol_type = other DNA
catcccggctgcctccccttcctccccccacatcccggctgcctccccttcctcccccaacatcccggctgcctcccctt

SEQ ID NO: 110210 - DNA, 80 bp, synthetic construct
  misc_feature 1..80: note = Artificially Synthesized Probe
  source 1..80: mol_type = other DNA
ctcccccaacatcccggctgcctccccttcctccccccatccccggctgcctccccttcctccccccaacacatcccggc

SEQ ID NO: 110211 - DNA, 80 bp, synthetic construct
  misc_feature 1..80: note = Artificially Synthesized Probe
  source 1..80: mol_type = other DNA
tcatgcttcacttcctctccccactcctccctcataaggatcattgtgttcatgaaataaacttattccttctttattta

SEQ ID NO: 110212 - DNA, 80 bp, synthetic construct
  misc_feature 1..80: note = Artificially Synthesized Probe
  source 1..80: mol_type = other DNA
aagtttgattggcctaatcagattcaagacatgattcgtgacccagttattgagatcttcttttcagaaagagagatttt

SEQ ID NO: 110213 - DNA, 80 bp, synthetic construct
  misc_feature 1..80: note = Artificially Synthesized Probe
  source 1..80: mol_type = other DNA
gctcccacttatgagtgagaacatatgatgtttggttttccattcctgagttacttcatttagaataatagtctccagtt

SEQ ID NO: 110214 - DNA, 80 bp, synthetic construct
  misc_feature 1..80: note = Artificially Synthesized Probe
  source 1..80: mol_type = other DNA
attgcaaattgtgctgctataaacgtgtgtgcaaatatctttctcgtataatgacttcttgtcctccaggtagataccca

SEQ ID NO: 110215 - DNA, 80 bp, synthetic construct
  misc_feature 1..80: note = Artificially Synthesized Probe
  source 1..80: mol_type = other DNA
gattatatccaatcttgcaggagtaaggtggtataacattgtggtttcgatttgcatttccctgatcattagtgatgttg

SEQ ID NO: 110216 - DNA, 80 bp, synthetic construct
  misc_feature 1..80: note = Artificially Synthesized Probe
  source 1..80: mol_type = other DNA
agattttttctcactctttgggttgtctgtatactgctgaaagaaatcacagatgacgcaaacaaatggaaacacatccc

SEQ ID NO: 110217 - DNA, 80 bp, synthetic construct
  misc_feature 1..80: note = Artificially Synthesized Probe
  source 1..80: mol_type = other DNA
gccaaagcaagactaagcaaaaagaacaacctggaggcatcacattacctgacttcaaactattctataaggctatagtc

SEQ ID NO: 110218 - DNA, 80 bp, synthetic construct
  misc_feature 1..80: note = Artificially Synthesized Probe
  source 1..80: mol_type = other DNA
gataattggcaagccacatgtagaagaataaaactggatcctcatctctccccttatccaaaaatcaactcaagatggat

SEQ ID NO: 110219 - DNA, 80 bp, synthetic construct
  misc_feature 1..80: note = Artificially Synthesized Probe
  source 1..80: mol_type = other DNA
tctgcacagcaaaagaaacaatcagcagaataaactcattccttcttccagtcatctagcccaaacaatcccactgtata

SEQ ID NO: 110220 - DNA, 80 bp, synthetic construct
  misc_feature 1..80: note = Artificially Synthesized Probe
  source 1..80: mol_type = other DNA
ggacagcaaagcccctggccaccctgaccgtccagctgttggccatgtggccaaccactcctcccttcttcattctggcc

SEQ ID NO: 110221 - DNA, 80 bp, synthetic construct
  misc_feature 1..80: note = Artificially Synthesized Probe
  source 1..80: mol_type = other DNA
cctctcctgtcctgaggatgaagtggttcctctcccaagccccagatcgcaaactggacccatgtggcaggcactgagcc

SEQ ID NO: 110222 - DNA, 80 bp, synthetic construct
  misc_feature 1..80: note = Artificially Synthesized Probe
  source 1..80: mol_type = other DNA
cagaagggctttgccagaggaaaatatggtaaactcaatgcacgcatcccgagctggcccgaggatgctttattccaaag

SEQ ID NO: 110223 - DNA, 80 bp, synthetic construct
  misc_feature 1..80: note = Artificially Synthesized Probe
  source 1..80: mol_type = other DNA
ctggaggttaggaagccagaaggttaggaaacccggaggttaggaagccaggacgttaagaaacccggaggttaggaaac

SEQ ID NO: 110224 - DNA, 80 bp, synthetic construct
  misc_feature 1..80: note = Artificially Synthesized Probe
  source 1..80: mol_type = other DNA
aggacaatctcacttttaactaaggaggcatccacacctccacacgttcatcagtaattgtgggccttggcagcaacagg

SEQ ID NO: 110225 - DNA, 80 bp, synthetic construct
  misc_feature 1..80: note = Artificially Synthesized Probe
  source 1..80: mol_type = other DNA
gttgttcaaggactcattgcatcacgcttgaatcacacttgcacttaagatgcaagtgtgcacttgcacacttctctgca

SEQ ID NO: 110226 - DNA, 80 bp, synthetic construct
  misc_feature 1..80: note = Artificially Synthesized Probe
  source 1..80: mol_type = other DNA
atcagagctgagtcctagacagggagcctgacgggacaggagctggggcatcagtccatggggaacccctccttctgaaa

SEQ ID NO: 110227 - DNA, 80 bp, synthetic construct
  misc_feature 1..80: note = Artificially Synthesized Probe
  source 1..80: mol_type = other DNA
tcttgagacgtgtggagggaaggaagggaagaacccatcatctaccacagaggcatggacgggagagaggggtgatttca

SEQ ID NO: 110228 - DNA, 80 bp, synthetic construct
  misc_feature 1..80: note = Artificially Synthesized Probe
  source 1..80: mol_type = other DNA
tgtgaggctcccacttaccacctgtggcctcatcctccctgtgcgcatggcctgggcccacgatgagttcctgagtccta

SEQ ID NO: 110229 - DNA, 80 bp, synthetic construct
  misc_feature 1..80: note = Artificially Synthesized Probe
  source 1..80: mol_type = other DNA
aacagcagtaggaaaaagaacgcgaagagccctgcacacaggtgagactcaaagaccatcaggaaaactgcactttctgg

SEQ ID NO: 110230 - DNA, 80 bp, synthetic construct
  misc_feature 1..80: note = Artificially Synthesized Probe
  source 1..80: mol_type = other DNA
gatttgtttgtctcatgagccaggtttcaaacagctcaggggcagggatgagtgttccccttcttacatgtcctgctctg

SEQ ID NO: 110231 - DNA, 80 bp, synthetic construct
  misc_feature 1..80: note = Artificially Synthesized Probe
  source 1..80: mol_type = other DNA
tattattattttttttttttgagatggagtcttgctctgttgcccaggctggagtgcagtggcgcgatctcagctcactg

SEQ ID NO: 110232 - DNA, 80 bp, synthetic construct
  misc_feature 1..80: note = Artificially Synthesized Probe
  source 1..80: mol_type = other DNA
tccacccgcctcagcctcccaaagttctgggattacaggcatgagccaccgtgcctggcctagagacagatttaaggcaa

SEQ ID NO: 110233 - DNA, 80 bp, synthetic construct
  misc_feature 1..80: note = Artificially Synthesized Probe
  source 1..80: mol_type = other DNA
taggaagcctggtgtttaggaagcccggaggttaggaagccaggaggttaggaagcctggtggttaggaagcccggaagt

SEQ ID NO: 110234 - DNA, 80 bp, synthetic construct
  misc_feature 1..80: note = Artificially Synthesized Probe
  source 1..80: mol_type = other DNA
aagacacataagaatcaagacaacttaagagcaaagataccgctgtgaaaatcagggatttgtggatggataaaaaagtc

SEQ ID NO: 110235 - DNA, 80 bp, synthetic construct
  misc_feature 1..80: note = Artificially Synthesized Probe
  source 1..80: mol_type = other DNA
aggagagcttgaggaagagccaacaaccacccatgatcacaaccatcccagctccatcccaaaatccatcccagctccaa

SEQ ID NO: 110236 - DNA, 80 bp, synthetic construct
  misc_feature 1..80: note = Artificially Synthesized Probe
  source 1..80: mol_type = other DNA
catcaaactccatcccagctccaccctcagctccttcccaactctactcagctccatcaaactccatcccagctccaccc

SEQ ID NO: 110237 - DNA, 80 bp, synthetic construct
  misc_feature 1..80: note = Artificially Synthesized Probe
  source 1..80: mol_type = other DNA
tctatcaaactccatcccagctccatcctcagctccttcccaaccctactaagtgtcatcatactccatcccagctccat

SEQ ID NO: 110238 - DNA, 80 bp, synthetic construct
  misc_feature 1..80: note = Artificially Synthesized Probe
  source 1..80: mol_type = other DNA
accctcagctccatcccaactctatcccaattccactcagtttcactgaactgcatccgagctccatcctcatcctagct

SEQ ID NO: 110239 - DNA, 80 bp, synthetic construct
  misc_feature 1..80: note = Artificially Synthesized Probe
  source 1..80: mol_type = other DNA
aaggcttcaataatccccagctccatgaacttccatccagctccattcctatccatccctactccatcccaagctgaacc

SEQ ID NO: 110240 - DNA, 80 bp, synthetic construct
  misc_feature 1..80: note = Artificially Synthesized Probe
  source 1..80: mol_type = other DNA
ctttatccttatctccatcaatttccatcctagctccatcttacgccatgcagccccatccagctccattgcagctccac

SEQ ID NO: 110241 - DNA, 80 bp, synthetic construct
  misc_feature 1..80: note = Artificially Synthesized Probe
  source 1..80: mol_type = other DNA
tcttctgttttattcccagctccttccatctccattccaactccattcagctctatcctagatcatcactgctccattct

SEQ ID NO: 110242 - DNA, 80 bp, synthetic construct
  misc_feature 1..80: note = Artificially Synthesized Probe
  source 1..80: mol_type = other DNA
ctccatttctgctctatctcatttttatccttattccttacaagtggcatctccagctcctttctgagcttcatctcagc

SEQ ID NO: 110243 - DNA, 80 bp, synthetic construct
  misc_feature 1..80: note = Artificially Synthesized Probe
  source 1..80: mol_type = other DNA
ggaagaagctatttccaccttttctgactcactgtttatcactgctcagaagtgtgccactttgggaatatccaaaacac

SEQ ID NO: 110244 - DNA, 80 bp, synthetic construct
  misc_feature 1..80: note = Artificially Synthesized Probe
  source 1..80: mol_type = other DNA
cgagccttgagcctgaaccactgcgtctgaaatgctttccttatacctgaggttgaggttctaagagcagcatcaacaga

SEQ ID NO: 110245 - DNA, 80 bp, synthetic construct
  misc_feature 1..80: note = Artificially Synthesized Probe
  source 1..80: mol_type = other DNA
tgatagagtgcctgttacatgattttcactagtgtcccaggtcacaggttcacagaagattaatccttgagtaatcacta

SEQ ID NO: 110246 - DNA, 80 bp, synthetic construct
  misc_feature 1..80: note = Artificially Synthesized Probe
  source 1..80: mol_type = other DNA
gaagattttaagatcctggaagcatctcagctctttcaggtcttgggagcttcttctattttcaacctctgtgaaatctg

SEQ ID NO: 110247 - DNA, 80 bp, synthetic construct
  misc_feature 1..80: note = Artificially Synthesized Probe
  source 1..80: mol_type = other DNA
ttctcttcccttacctccatctcctgatcccatcagaaactgggatcttgctgtccactgtacattaaggttatgtcata

SEQ ID NO: 110248 - DNA, 80 bp, synthetic construct
  misc_feature 1..80: note = Artificially Synthesized Probe
  source 1..80: mol_type = other DNA
cagtaccctcagtcacatcagaagttaaaacactgaagtatttcctaccaggtgggaaacagctgcagcccctgcccacc

SEQ ID NO: 110249 - DNA, 80 bp, synthetic construct
  misc_feature 1..80: note = Artificially Synthesized Probe
  source 1..80: mol_type = other DNA
tgtgtagatcaacacacactttgcactcagatctaccctcatccttgaagctgcctttctacaattcttcaaatcctgct

SEQ ID NO: 110250 - DNA, 80 bp, synthetic construct
  misc_feature 1..80: note = Artificially Synthesized Probe
  source 1..80: mol_type = other DNA
cacatggatccctgcacaccgtctgcccacagcaggcccatgtacctgccccctctctcacatggatctgggaaagtccc

SEQ ID NO: 110251 - DNA, 80 bp, synthetic construct
  misc_feature 1..80: note = Artificially Synthesized Probe
  source 1..80: mol_type = other DNA
ggatctctgcaaaccacctgcccactgcagccctgagtacgtgaccctttgctcacctggatgtctgcatgagcctgcca

SEQ ID NO: 110252 - DNA, 80 bp, synthetic construct
  misc_feature 1..80: note = Artificially Synthesized Probe
  source 1..80: mol_type = other DNA
cagggctgctctctctcagctctagtcagaccatctcactgtgttcaccctgtagggtcctctcactctacatactgggt

SEQ ID NO: 110253 - DNA, 80 bp, synthetic construct
  misc_feature 1..80: note = Artificially Synthesized Probe
  source 1..80: mol_type = other DNA
ttcctgtccatggacatttccttgaacctgctcattgcatatgtctgtaccctaggaacggtgtgggccacagtgagcag

SEQ ID NO: 110254 - DNA, 80 bp, synthetic construct
  misc_feature 1..80: note = Artificially Synthesized Probe
  source 1..80: mol_type = other DNA
ctccatgctaatgacccatacactcttctgtcttttcctaataaatggcagaattgaggcagggcccatgtatctcaaag

SEQ ID NO: 110255 - DNA, 80 bp, synthetic construct
  misc_feature 1..80: note = Artificially Synthesized Probe
  source 1..80: mol_type = other DNA
cctgtgtgaagagtcagtgagtgaatgacatcaccactgtgtgaaggagacagtgaatgaatgacatcacccctgtgtga

SEQ ID NO: 110256 - DNA, 80 bp, synthetic construct
  misc_feature 1..80: note = Artificially Synthesized Probe
  source 1..80: mol_type = other DNA
ttgctagagccacagggctggctggggtgaggctgagctccaagctctcaatggagagtgtgaacagggttcctccaggc

SEQ ID NO: 110257 - DNA, 80 bp, synthetic construct
  misc_feature 1..80: note = Artificially Synthesized Probe
  source 1..80: mol_type = other DNA
atgatgtcacccctgtgtgaaggagccagtgagtgaatgacataactcctgagtgaaggagacagtgagtgaatgacatc

SEQ ID NO: 110258 - DNA, 80 bp, synthetic construct
  misc_feature 1..80: note = Artificially Synthesized Probe
  source 1..80: mol_type = other DNA
agactctgtgagtgaatgatgtcaccccatatgtgaaagagacagtgagtgaatgacatcacccctgtgtgaaggggcca

SEQ ID NO: 110259 - DNA, 80 bp, synthetic construct
  misc_feature 1..80: note = Artificially Synthesized Probe
  source 1..80: mol_type = other DNA
tgaaaggctcagtgagtgatgtcacccctgtgtgagggagacagtgagtgaatgacgtcacccctgtgtgatgagtcact

SEQ ID NO: 110260 - DNA, 80 bp, synthetic construct
  misc_feature 1..80: note = Artificially Synthesized Probe
  source 1..80: mol_type = other DNA
gtgtgaagagtcagtgagtgaatgacgtcactctgtgggagccagtgagtgaatgacgtcacctgtgtgaagagtcactg

SEQ ID NO: 110261 - DNA, 80 bp, synthetic construct
  misc_feature 1..80: note = Artificially Synthesized Probe
  source 1..80: mol_type = other DNA
tgtcactctaccctccctcttctctctgacctctccacacccagctgtgcgctgtgggagctcctgcagcttctgcactc

SEQ ID NO: 110262 - DNA, 80 bp, synthetic construct
  misc_feature 1..80: note = Artificially Synthesized Probe
  source 1..80: mol_type = other DNA
tgccatggaagctgcagagactcgggatccaaagccaggtctccgaagggcagcgcattttcctgacagccagggacagg

SEQ ID NO: 110263 - DNA, 80 bp, synthetic construct
  misc_feature 1..80: note = Artificially Synthesized Probe
  source 1..80: mol_type = other DNA
ttcaggagattttcatccttccccttaaacactggtttccactgcctctaaataacttaccaaagctgctgaaatcacct

SEQ ID NO: 110264 - DNA, 80 bp, synthetic construct
  misc_feature 1..80: note = Artificially Synthesized Probe
  source 1..80: mol_type = other DNA
gtacttactccacgtcagcgaacgcactgctgggcacctgcaggaggcgggcgacgtcctccaccagccgccttccttcc

SEQ ID NO: 110265 - DNA, 80 bp, synthetic construct
  misc_feature 1..80: note = Artificially Synthesized Probe
  source 1..80: mol_type = other DNA
aaggagtcacctgagtttccagcaacaagacaaacagtgcagtgcggacggggctgtgggaatcgcaagtggcccaccgt

SEQ ID NO: 110266 - DNA, 80 bp, synthetic construct
  misc_feature 1..80: note = Artificially Synthesized Probe
  source 1..80: mol_type = other DNA
ggcacagccggtcagcctgggcctgggtctgtggcagagccggggcggaagggccttgctgggagtggcctcctgttctg

SEQ ID NO: 110267 - DNA, 80 bp, synthetic construct
  misc_feature 1..80: note = Artificially Synthesized Probe
  source 1..80: mol_type = other DNA
agcatctgtttttaatgggctcatttctgatgtgaaccaggccccagtgaggggcaatttaactacccaatggaagtgtg

SEQ ID NO: 110268 - DNA, 80 bp, synthetic construct
  misc_feature 1..80: note = Artificially Synthesized Probe
  source 1..80: mol_type = other DNA
tgactcatcctgaaggccagcattcaggttgaaagtcacaagttgcctgtgaaatcctgttagtaccactttaatggagt

SEQ ID NO: 110269 - DNA, 80 bp, synthetic construct
  misc_feature 1..80: note = Artificially Synthesized Probe
  source 1..80: mol_type = other DNA
ctcgaggggttcacattctagagatgctggtgaatagaaatcaatcatgctatgatgggttgaattatgtcacctaaaaa

SEQ ID NO: 110270 - DNA, 80 bp, synthetic construct
  misc_feature 1..80: note = Artificially Synthesized Probe
  source 1..80: mol_type = other DNA
atttggaaatagggctatcatagatttagttaagctgaggtcaatagggtgaaccctaagccaatatcactggtgtccgt

SEQ ID NO: 110271 - DNA, 80 bp, synthetic construct
  misc_feature 1..80: note = Artificially Synthesized Probe
  source 1..80: mol_type = other DNA
gggtcttggacttccagcctccaggacagggagaagatggatttcccactttggaagtgtgcgccagcagcccaggcaga

SEQ ID NO: 110272 - DNA, 80 bp, synthetic construct
  misc_feature 1..80: note = Artificially Synthesized Probe
  source 1..80: mol_type = other DNA
ggaaacagggtatcagacagtgagcagagaaggcaagggggccgcggtgccacatggtgaggaggtgaagtcacagagca

SEQ ID NO: 110273 - DNA, 80 bp, synthetic construct
  misc_feature 1..80: note = Artificially Synthesized Probe
  source 1..80: mol_type = other DNA
cagaagccccaggaaggcccagctgggagtggtgctgacagagtcaggagtttacatcctgcacacgtggacatggggac

SEQ ID NO: 110274 - DNA, 80 bp, synthetic construct
  misc_feature 1..80: note = Artificially Synthesized Probe
  source 1..80: mol_type = other DNA
cgatgtgcctgtgagtgcagaggtcagaggccacagcagggcgtccaggctgggtgctgggggcagtgcatcatgaatgc

SEQ ID NO: 110275 - DNA, 80 bp, synthetic construct
  misc_feature 1..80: note = Artificially Synthesized Probe
  source 1..80: mol_type = other DNA
atttagggcaatgaggggaactggcaaaagagaatgaaaaggactgtgacagaggcaagcagcgagctggcaagaattcc

SEQ ID NO: 110276 - DNA, 80 bp, synthetic construct
  misc_feature 1..80: note = Artificially Synthesized Probe
  source 1..80: mol_type = other DNA
tattacatttatttcgaagattaagcacagaaaaaagaacttgaggacaaagccttgagaggcaagcgagatttgagcac

SEQ ID NO: 110277 - DNA, 80 bp, synthetic construct
  misc_feature 1..80: note = Artificially Synthesized Probe
  source 1..80: mol_type = other DNA
tagggacctgcagcctgttcagcattggagggatggagagtaggaaaggagagatggggccaacactgtaagagctgccc

SEQ ID NO: 110278 - DNA, 80 bp, synthetic construct
  misc_feature 1..80: note = Artificially Synthesized Probe
  source 1..80: mol_type = other DNA
gaactggcaccagggctggagaccccaggcattctctatccatgacttacactcagggaccccttggggagaggacctca

SEQ ID NO: 110279 - DNA, 80 bp, synthetic construct
  misc_feature 1..80: note = Artificially Synthesized Probe
  source 1..80: mol_type = other DNA
acctgcaacaagaaagccatctgatggcgtcgacgctacaagctgttgttgtggccaccagggacacagcctaccatcct

SEQ ID NO: 110280 - DNA, 80 bp, synthetic construct
  misc_feature 1..80: note = Artificially Synthesized Probe
  source 1..80: mol_type = other DNA
gccacctggggagggtgtccaggcccatgcctgtcctgcccagccagtgtggctgcaactggagcccaggacagtgtatt

SEQ ID NO: 110281 - DNA, 80 bp, synthetic construct
  misc_feature 1..80: note = Artificially Synthesized Probe
  source 1..80: mol_type = other DNA
gactcaccaggatgggccaaggactcaccaggaatgcagatgccccagccaccctccagcgtttcggagtcaggaggcca

SEQ ID NO: 110282 - DNA, 80 bp, synthetic construct
  misc_feature 1..80: note = Artificially Synthesized Probe
  source 1..80: mol_type = other DNA
tcaggcaatctacacatcagttgggagggatgtggaagacgtgccgcgggaatgctctactcttcatctaagaaatactt

SEQ ID NO: 110283 - DNA, 80 bp, synthetic construct
  misc_feature 1..80: note = Artificially Synthesized Probe
  source 1..80: mol_type = other DNA
ccggccacggccctggggcctacatgggagcctggtccaggctggggtaagggagccccagaagggtccccaagaactac

SEQ ID NO: 110284 - DNA, 80 bp, synthetic construct
  misc_feature 1..80: note = Artificially Synthesized Probe
  source 1..80: mol_type = other DNA
gccaactacatgggtgctcctcacccattaagggattggagtttatcccaaatacaatggcgagctatcaacagggccta

SEQ ID NO: 110285 - DNA, 80 bp, synthetic construct
  misc_feature 1..80: note = Artificially Synthesized Probe
  source 1..80: mol_type = other DNA
cccacacctcccagaagcatctgcagagaccgacccccggagagccggatgctgcgctgggggaacctcaccttggggag

SEQ ID NO: 110286 - DNA, 80 bp, synthetic construct
  misc_feature 1..80: note = Artificially Synthesized Probe
  source 1..80: mol_type = other DNA
aataacaacaacaacaacaacaaaagttccctcccctggataaagaacaggttggagaccagaggagacagaagggaaac

SEQ ID NO: 110287 - DNA, 80 bp, synthetic construct
  misc_feature 1..80: note = Artificially Synthesized Probe
  source 1..80: mol_type = other DNA
cagcagagcagatgctgttttctgaagcaggctgctatgaactaattgtgacccctaaaatctgtatgttccaatcttta

SEQ ID NO: 110288 - DNA, 80 bp, synthetic construct
  misc_feature 1..80: note = Artificially Synthesized Probe
  source 1..80: mol_type = other DNA
aagaacccaaaaatctactggcatctggattccaacccctggaattgtgaggaagaaattcctattgcttctaagctgcc

SEQ ID NO: 110289 - DNA, 80 bp, synthetic construct
  misc_feature 1..80: note = Artificially Synthesized Probe
  source 1..80: mol_type = other DNA
aagatatgacaagactgggtgggccctcaactgtctgcactgagcccatccctcacactccaccctgtgccaccctcaga

SEQ ID NO: 110290 - DNA, 80 bp, synthetic construct
  misc_feature 1..80: note = Artificially Synthesized Probe
  source 1..80: mol_type = other DNA
ggacacaagtactcattccacaagtagattctacattggcattaactgcatgaatgaatgaacacgagaatgtcaaaaac

SEQ ID NO: 110291 - DNA, 80 bp, synthetic construct
  misc_feature 1..80: note = Artificially Synthesized Probe
  source 1..80: mol_type = other DNA
gtaggaaacaccaggaatctgtctcccacctgacaacactgtgctagtaggatctgtctgatgtaactgatccttgaact

SEQ ID NO: 110292 - DNA, 80 bp, synthetic construct
  misc_feature 1..80: note = Artificially Synthesized Probe
  source 1..80: mol_type = other DNA
agccagaacaggcaatacagatgttgtcctccaaatattgggaatctgcaatctcactgctgattgctgcttctcatcac

SEQ ID NO: 110293 - DNA, 80 bp, synthetic construct
  misc_feature 1..80: note = Artificially Synthesized Probe
  source 1..80: mol_type = other DNA
aaagaccagaatattcaaaagtaactgaatatacagggaaaattagaaagtcaccacacatgctcagggaaaggctcaga

SEQ ID NO: 110294 - DNA, 80 bp, synthetic construct
  misc_feature 1..80: note = Artificially Synthesized Probe
  source 1..80: mol_type = other DNA
caagaaacaaagaaacaagaaactacagcccattcaaaggaaaaaggtaagtcaacaataattgtctctaaaaaaagacc

SEQ ID NO: 110295 - DNA, 80 bp, synthetic construct
  misc_feature 1..80: note = Artificially Synthesized Probe
  source 1..80: mol_type = other DNA
taagaaaacatttctcaacacagtgaaaaatgagcaaattttaaccctatgcaattttaagccaacgcacgaggacatca

SEQ ID NO: 110296 - DNA, 80 bp, synthetic construct
  misc_feature 1..80: note = Artificially Synthesized Probe
  source 1..80: mol_type = other DNA
aaaacctaaaatataaaagaaattctgaagctcaaaatacaatagctgaaattaaaaagttcactagagagattcaaagg

SEQ ID NO: 110297 - DNA, 80 bp, synthetic construct
  misc_feature 1..80: note = Artificially Synthesized Probe
  source 1..80: mol_type = other DNA
ggataccactaagagaaccagtatatgaattgtgagaggaaattgtgcccaaaagaaaaaaaagagataaaggggcagag

SEQ ID NO: 110298 - DNA, 80 bp, synthetic construct
  misc_feature 1..80: note = Artificially Synthesized Probe
  source 1..80: mol_type = other DNA
atttgaaagcagcaagaaagaagcagttcatcacacaccaggctttccaaataatattatcagcagaaactttgcagaac

SEQ ID NO: 110299 - DNA, 80 bp, synthetic construct
  misc_feature 1..80: note = Artificially Synthesized Probe
  source 1..80: mol_type = other DNA
ctgccttgcaagaaatattccaaggagccctgcaggatgaaatgaaaggacactggacaataactcaaagccatataaaa

SEQ ID NO: 110300 - DNA, 80 bp, synthetic construct
  misc_feature 1..80: note = Artificially Synthesized Probe
  source 1..80: mol_type = other DNA
taactccacattttgttttctacataatttaagaaacgaataaattttaaacaattattagtttatatcctgggacatac

SEQ ID NO: 110301 - DNA, 80 bp, synthetic construct
  misc_feature 1..80: note = Artificially Synthesized Probe
  source 1..80: mol_type = other DNA
aagaaaatagctacataatacgtacaaaaagaagaaaggaatttaggcatttaatttttaaaaatctactaaacacaaaa

SEQ ID NO: 110302 - DNA, 80 bp, synthetic construct
  misc_feature 1..80: note = Artificially Synthesized Probe
  source 1..80: mol_type = other DNA
cagatcttttaaggactatttctatagtacacaacaagggatatctatttgcattaactataagcataaacatgacagtc

SEQ ID NO: 110303 - DNA, 80 bp, synthetic construct
  misc_feature 1..80: note = Artificially Synthesized Probe
  source 1..80: mol_type = other DNA
ccttgctaacttttctattttttgtagagatggggttttgccatgttgcccaggctggtctcaagctcctgggctcaaga

SEQ ID NO: 110304 - DNA, 80 bp, synthetic construct
  misc_feature 1..80: note = Artificially Synthesized Probe
  source 1..80: mol_type = other DNA
aaatatttacatcactatttaagaaacctcataatgtacctagcgtgtatagagtactcttaaaactcaacaacaaaaat

SEQ ID NO: 110305 - DNA, 80 bp, synthetic construct
  misc_feature 1..80: note = Artificially Synthesized Probe
  source 1..80: mol_type = other DNA
aggatggccactgtaagaagaaaaaaacccagaaaatagtaaacgttggcaaagatgtggctaaattggaactcctgtgc

SEQ ID NO: 110306 - DNA, 80 bp, synthetic construct
  misc_feature 1..80: note = Artificially Synthesized Probe
  source 1..80: mol_type = other DNA
atgttcaccataaaagaggggcgagcataaaggaacagatgtaagttattctcacagaacaacacggtgacgctagccgg

SEQ ID NO: 110307 - DNA, 80 bp, synthetic construct
  misc_feature 1..80: note = Artificially Synthesized Probe
  source 1..80: mol_type = other DNA
tcccccattagctgcagtttgttttctgtgttttaggtacctgaggtacagtacaagaagatatttgaaagagggagaga

SEQ ID NO: 110308 - DNA, 80 bp, synthetic construct
  misc_feature 1..80: note = Artificially Synthesized Probe
  source 1..80: mol_type = other DNA
ggtatgtatgtataggaaaagccatagtttatatagggttctgcactatctgaagtttcaagcatccactggggttcctg

SEQ ID NO: 110309 - DNA, 80 bp, synthetic construct
  misc_feature 1..80: note = Artificially Synthesized Probe
  source 1..80: mol_type = other DNA
aaagcgtggcctgcaccaaaagtagaatattatttagccctgaacaggaagaaattcagacacatgcgacaacagggatg

SEQ ID NO: 110310 - DNA, 80 bp, synthetic construct
  misc_feature 1..80: note = Artificially Synthesized Probe
  source 1..80: mol_type = other DNA
aaaggacaaattctgtgtgtctacccatgtgaggttcctagaatcctcaaattcagagagacacagagtagagtgaaggc

SEQ ID NO: 110311 - DNA, 80 bp, synthetic construct
  misc_feature 1..80: note = Artificially Synthesized Probe
  source 1..80: mol_type = other DNA
tgttatctatatgttaataaaatacaagaaattgggaagatgaaacaaggtgattagtataaaagcaccatgacgtgtgg

SEQ ID NO: 110312 - DNA, 80 bp, synthetic construct
  misc_feature 1..80: note = Artificially Synthesized Probe
  source 1..80: mol_type = other DNA
tttaaagtggatttttcaaggctgcattctgtgtaattttacaattgagaaacaagccattttcctttaaagagtggctg

SEQ ID NO: 110313 - DNA, 80 bp, synthetic construct
  misc_feature 1..80: note = Artificially Synthesized Probe
  source 1..80: mol_type = other DNA
ggccagaagggaggcaacagggaagggagccaggcggggctacaaagacaaactcaggctgcagctggacagagcaatga

SEQ ID NO: 110314 - DNA, 80 bp, synthetic construct
  misc_feature 1..80: note = Artificially Synthesized Probe
  source 1..80: mol_type = other DNA
ggttccttcctcccggctcctgtgctccccagcagcctgggcttttctctctgcctgggcctggtggtgactgctccaaa

SEQ ID NO: 110315 - DNA, 80 bp, synthetic construct
  misc_feature 1..80: note = Artificially Synthesized Probe
  source 1..80: mol_type = other DNA
acagaaactgctgctcttcaggctttccctaaaactccctgtgtgctttgatcagcaccactcagctcatgacttatttt

SEQ ID NO: 110316 - DNA, 80 bp, synthetic construct
  misc_feature 1..80: note = Artificially Synthesized Probe
  source 1..80: mol_type = other DNA
agcataagccaacttcccaatcaatgtttgctaccaaattccatgagtctccttttctagcatgtttcaaaccaagggga

SEQ ID NO: 110317 - DNA, 80 bp, synthetic construct
  misc_feature 1..80: note = Artificially Synthesized Probe
  source 1..80: mol_type = other DNA
caaggaagtccacaagcccagaatgtgtttgtgaacccgctgcctccacaagccaaggtgtccccagttatacaaagtgt

SEQ ID NO: 110318 - DNA, 80 bp, synthetic construct
  misc_feature 1..80: note = Artificially Synthesized Probe
  source 1..80: mol_type = other DNA
tgcttagcagaaataagttttgattttttgaaatatgcatttgttgggggtgacagctatttacagagacccctgtctct

SEQ ID NO: 110319 - DNA, 80 bp, synthetic construct
  misc_feature 1..80: note = Artificially Synthesized Probe
  source 1..80: mol_type = other DNA
agcagacaaacaagacagggctgactgtgctcacaatgatcacgcagccattcctatttcatctctaaagccacagccat

SEQ ID NO: 110320 - DNA, 80 bp, synthetic construct
  misc_feature 1..80: note = Artificially Synthesized Probe
  source 1..80: mol_type = other DNA
tacctggacactaatattgccgtagaagagaaacaggcatgagaacttttatggggtcagggtcagagctaggagtgcct

SEQ ID NO: 110321 - DNA, 80 bp, synthetic construct
  misc_feature 1..80: note = Artificially Synthesized Probe
  source 1..80: mol_type = other DNA
caagtttgtgacgtctctaagctcaaccacgttggacaagcctgttcctatggatctactgaatcagccacatgggaggc

SEQ ID NO: 110322 - DNA, 80 bp, synthetic construct
  misc_feature 1..80: note = Artificially Synthesized Probe
  source 1..80: mol_type = other DNA
atgactacgggagtgtcacccctaaaaatcagactagtgaaaagtacgtaggggtcggaaatataaagagtagtaaaaac

SEQ ID NO: 110323 - DNA, 80 bp, synthetic construct
  misc_feature 1..80: note = Artificially Synthesized Probe
  source 1..80: mol_type = other DNA
aactcccaggagaaaagctcaaacggaacactttatcattcaggctatgttccaacgtaggtgcccagaaaggtggggtg

SEQ ID NO: 110324 - DNA, 80 bp, synthetic construct
  misc_feature 1..80: note = Artificially Synthesized Probe
  source 1..80: mol_type = other DNA
tgctgaccatgctctgtgcttctgcagcttcaccagcccgatctgggacattttactatttactgcaaaacccaccagga

SEQ ID NO: 110325 - DNA, 80 bp, synthetic construct
  misc_feature 1..80: note = Artificially Synthesized Probe
  source 1..80: mol_type = other DNA
tttaaatcatcttataaagtagttaaaatgtttccagcccacgggaacctcccccatgcagagaagcaacgcttcgaggg

SEQ ID NO: 110326 - DNA, 80 bp, synthetic construct
  misc_feature 1..80: note = Artificially Synthesized Probe
  source 1..80: mol_type = other DNA
cttcctgcaggagtctaatgtcagggtctgggagaaggaggttttgatgctttgtgcacccaaactgaaccttcctcctg

SEQ ID NO: 110327 - DNA, 80 bp, synthetic construct
  misc_feature 1..80: note = Artificially Synthesized Probe
  source 1..80: mol_type = other DNA
ctgtactgctcactataaacactttttaaatgccagcagctaactaaagatctaggtacggaaggtctatatagcgtcac

SEQ ID NO: 110328 - DNA, 80 bp, synthetic construct
  misc_feature 1..80: note = Artificially Synthesized Probe
  source 1..80: mol_type = other DNA
tgccgacccaggcggagctggttctctaatctgattcagcctcagatcccgtgccgacccaggcggagctggttctctaa

SEQ ID NO: 110329 - DNA, 80 bp, synthetic construct
  misc_feature 1..80: note = Artificially Synthesized Probe
  source 1..80: mol_type = other DNA
taagtaggccctaaaggcacaagttacataaagaagtgccgccaatgccaacggtccccactcccgctatgctgccttct

SEQ ID NO: 110330 - DNA, 80 bp, synthetic construct
  misc_feature 1..80: note = Artificially Synthesized Probe
  source 1..80: mol_type = other DNA
aggtgattgaaagtaaaatgctggacagggttgcaggagggtcgataaggtgactgttgatttaggtctgagttgttaag

SEQ ID NO: 110331 - DNA, 80 bp, synthetic construct
  misc_feature 1..80: note = Artificially Synthesized Probe
  source 1..80: mol_type = other DNA
gacagcggtgaagggaaattctccaatgggcagaactataggctgtacatctggtttactttgcttggaaagagaaatag

SEQ ID NO: 110332 - DNA, 80 bp, synthetic construct
  misc_feature 1..80: note = Artificially Synthesized Probe
  source 1..80: mol_type = other DNA
gaaaattggtgacaaagagacttgggaaagaggggtgtggacagacctctctgaatggggagaagacgtgaacaggaagc

SEQ ID NO: 110333 - DNA, 80 bp, synthetic construct
  misc_feature 1..80: note = Artificially Synthesized Probe
  source 1..80: mol_type = other DNA
agtcacagccagattccaacaggagagggtgacggggccagatttggttttgtcgagtcctctttgggttcaacgtgcac

SEQ ID NO: 110334 - DNA, 80 bp, synthetic construct
  misc_feature 1..80: note = Artificially Synthesized Probe
  source 1..80: mol_type = other DNA
atggagggagccgggtggggcacagagcccactgagctgccgggctggcgagacatggctcaggcccaaccatggccacc

SEQ ID NO: 110335 - DNA, 80 bp, synthetic construct
  misc_feature 1..80: note = Artificially Synthesized Probe
  source 1..80: mol_type = other DNA
aagtccctcccagggccacctccctgcctcaagtccctcccacagccgccccctgcctcgcgtccctcccacggccaccc

SEQ ID NO: 110336 - DNA, 80 bp, synthetic construct
  misc_feature 1..80: note = Artificially Synthesized Probe
  source 1..80: mol_type = other DNA
accgtgaacatgtttacccatcggggctataaccccacaccacctgaaatcttcttaaatgataataaatccatcatgct

SEQ ID NO: 110337 - DNA, 80 bp, synthetic construct
  misc_feature 1..80: note = Artificially Synthesized Probe
  source 1..80: mol_type = other DNA
ctgccctggcgccagaaacacagaatccatcttcagcatcctcagggtttcctttactctaacaaggaaggacgagcagg

SEQ ID NO: 110338 - DNA, 80 bp, synthetic construct
  misc_feature 1..80: note = Artificially Synthesized Probe
  source 1..80: mol_type = other DNA
gggcggcggaacttcctctccgccacaccagcccccaggacagcgggcggcggaacttcctctccgccacaccagccccc

SEQ ID NO: 110339 - DNA, 80 bp, synthetic construct
  misc_feature 1..80: note = Artificially Synthesized Probe
  source 1..80: mol_type = other DNA
cacaccagcccccaggacagcgggcggcggaacttcctctccgccacaccagcccccaggacagcgggcggcggaacttc

SEQ ID NO: 110340 - DNA, 80 bp, synthetic construct
  misc_feature 1..80: note = Artificially Synthesized Probe
  source 1..80: mol_type = other DNA
ggcggcggaacttcctctccgccacaccagcccccggagagcgggcggcggaacttcctctccgccacaccagcccccag

SEQ ID NO: 110341 - DNA, 80 bp, synthetic construct
  misc_feature 1..80: note = Artificially Synthesized Probe
  source 1..80: mol_type = other DNA
gggccactgggaaggcgggaacagcatgatgatccgagtggtgacatgtgtcatcggtttcacaataattcaggagacaa

SEQ ID NO: 110342 - DNA, 80 bp, synthetic construct
  misc_feature 1..80: note = Artificially Synthesized Probe
  source 1..80: mol_type = other DNA
tgggtttcacatttcacatctcacagtgagccgaggaaggggctgggggaacctgcagggccagggcactcactgagggt

SEQ ID NO: 110343 - DNA, 80 bp, synthetic construct
  misc_feature 1..80: note = Artificially Synthesized Probe
  source 1..80: mol_type = other DNA
ggtaccatctgccattttgctgcttgccttctccgaggtgcaagaaagttttgtcataagaaacacttgaaggaagaaac

SEQ ID NO: 110344 - DNA, 80 bp, synthetic construct
  misc_feature 1..80: note = Artificially Synthesized Probe
  source 1..80: mol_type = other DNA
ggtgggtgtgtggatgtgtgtgggggtgtgcacagctgtgcaggtgtgtgggtgtgcagggtccatgactgtgtgtgggt

SEQ ID NO: 110345 - DNA, 80 bp, synthetic construct
  misc_feature 1..80: note = Artificially Synthesized Probe
  source 1..80: mol_type = other DNA
cctctttcaagcaacactgtgttcttcccactgctgacagaggctgctcatccgtgcacctgtgccctgcgtcctcctct

SEQ ID NO: 110346 - DNA, 80 bp, synthetic construct
  misc_feature 1..80: note = Artificially Synthesized Probe
  source 1..80: mol_type = other DNA
cattctaggtctcggggctgccgtgggaccctgaccctggatgccggacttccgtgggtcaagggcccaggccaccttct

SEQ ID NO: 110347 - DNA, 80 bp, synthetic construct
  misc_feature 1..80: note = Artificially Synthesized Probe
  source 1..80: mol_type = other DNA
aggcatgtgtgtgtgagccgtggtctctgaagctcttgcctctggatttagaaggcaggttcctctttgctgagaggtaa

SEQ ID NO: 110348 - DNA, 80 bp, synthetic construct
  misc_feature 1..80: note = Artificially Synthesized Probe
  source 1..80: mol_type = other DNA
aatggcaaaggattactgtgtccatcagaaaatgtgagagagaaaatcatgcctggaaaagccgagccctaccatcctcc

SEQ ID NO: 110349 - DNA, 80 bp, synthetic construct
  misc_feature 1..80: note = Artificially Synthesized Probe
  source 1..80: mol_type = other DNA
taagctgaaatctggtgaaaacttgcccaagagaatcacaaattattagtctgataatagggcaaaaacctcaatctcct

SEQ ID NO: 110350 - DNA, 80 bp, synthetic construct
  misc_feature 1..80: note = Artificially Synthesized Probe
  source 1..80: mol_type = other DNA
ttctttaacccactgctcataggaggtaaatattccagtccaaaaggcatggccggcaaacccactacaagaaaataaac

SEQ ID NO: 110351 - DNA, 80 bp, synthetic construct
  misc_feature 1..80: note = Artificially Synthesized Probe
  source 1..80: mol_type = other DNA
ggcacaggattgtcggctctgaaggttccctagcaaaccacaccggcctcctgctctccgggtgaacacctcggcatcca

SEQ ID NO: 110352 - DNA, 80 bp, synthetic construct
  misc_feature 1..80: note = Artificially Synthesized Probe
  source 1..80: mol_type = other DNA
tcgaggaaaagtcaagcaaatacttaactggccacacagagattttactacatttaaggttttcgggcaggataagtggc

SEQ ID NO: 110353 - DNA, 80 bp, synthetic construct
  misc_feature 1..80: note = Artificially Synthesized Probe
  source 1..80: mol_type = other DNA
gagaaaagagggctccagcacagagtgaggagacacaggcaaccaaacacacacacacacacacaacataccccacacca

SEQ ID NO: 110354 - DNA, 80 bp, synthetic construct
  misc_feature 1..80: note = Artificially Synthesized Probe
  source 1..80: mol_type = other DNA
acacacatacactacacaccacacacatacaacacataccacgccacacactacacaccacaaacagataagccacacag

SEQ ID NO: 110355 - DNA, 80 bp, synthetic construct
  misc_feature 1..80: note = Artificially Synthesized Probe
  source 1..80: mol_type = other DNA
acacaccacacactacacacaacagacatgcaacacataccacaccatgcagcatactacataccacacaccacatatac

SEQ ID NO: 110356 - DNA, 80 bp, synthetic construct
  misc_feature 1..80: note = Artificially Synthesized Probe
  source 1..80: mol_type = other DNA
acacatcactacattaccacacacacatcacataacacccacaccacacacaaagcagtgtttcctagggagggagacgt

SEQ ID NO: 110357 - DNA, 80 bp, synthetic construct
  misc_feature 1..80: note = Artificially Synthesized Probe
  source 1..80: mol_type = other DNA
catcacttagggcctgcctgtgattctccactgggcttgagagcaaagaaatgaacagccatgagaagttcctgactcta

SEQ ID NO: 110358 - DNA, 80 bp, synthetic construct
  misc_feature 1..80: note = Artificially Synthesized Probe
  source 1..80: mol_type = other DNA
taaagatacaactaagataatcacctacagctgaaaatcatcttaaattttaatttggctttgatacacactctgcggtt

SEQ ID NO: 110359 - DNA, 80 bp, synthetic construct
  misc_feature 1..80: note = Artificially Synthesized Probe
  source 1..80: mol_type = other DNA
ccagtgcgaatgatcctcaaaataagaggtacttcttcaccaaggaagaaatacccgaacagacgcacatcatactgata

SEQ ID NO: 110360 - DNA, 80 bp, synthetic construct
  misc_feature 1..80: note = Artificially Synthesized Probe
  source 1..80: mol_type = other DNA
ccaacacacacactcatacacacacacgtacatacagatacacacatctaccccacatacactcatatacacacatgcac

SEQ ID NO: 110361 - DNA, 80 bp, synthetic construct
  misc_feature 1..80: note = Artificially Synthesized Probe
  source 1..80: mol_type = other DNA
aatacacatctacctgacatactcatatacatacatgcacatatgcacaaaccaatactcatctacccaacacacacaca

SEQ ID NO: 110362 - DNA, 80 bp, synthetic construct
  misc_feature 1..80: note = Artificially Synthesized Probe
  source 1..80: mol_type = other DNA
acaaactgacacatctacccaacacacacatatacacaaacacacatatgcagaaatcgacacactacctgacatactca

SEQ ID NO: 110363 - DNA, 80 bp, synthetic construct
  misc_feature 1..80: note = Artificially Synthesized Probe
  source 1..80: mol_type = other DNA
ctcctactcatgactttccatttcattgcaacatactttttatttgtatgactgttatgttcccgacacaaactgcccgg

SEQ ID NO: 110364 - DNA, 80 bp, synthetic construct
  misc_feature 1..80: note = Artificially Synthesized Probe
  source 1..80: mol_type = other DNA
tacacacacaaatacccgaagatgcacatcataccaatacacatctacctgacatacacactcatatacacacacgtaca

SEQ ID NO: 110365 - DNA, 80 bp, synthetic construct
  misc_feature 1..80: note = Artificially Synthesized Probe
  source 1..80: mol_type = other DNA
ctcatacacacacgtatatacaaaccaatacacatctacccaacacacacacgaacatacaaactgaaacacatctacct

SEQ ID NO: 110366 - DNA, 80 bp, synthetic construct
  misc_feature 1..80: note = Artificially Synthesized Probe
  source 1..80: mol_type = other DNA
cccgacatacacactcatacacacatgcacatacacacaaaccgatacacatctacccgacacacactcatacacacatg

SEQ ID NO: 110367 - DNA, 80 bp, synthetic construct
  misc_feature 1..80: note = Artificially Synthesized Probe
  source 1..80: mol_type = other DNA
acaaactgatacacatctacctgacatacacacacatgggcatatacacaaaccaatacacatctacccgacacacatac

SEQ ID NO: 110368 - DNA, 80 bp, synthetic construct
  misc_feature 1..80: note = Artificially Synthesized Probe
  source 1..80: mol_type = other DNA
cacagatacacacacctatccaacacacatacacacacacgtacatacacagatacacatctaccaaacacacacacata

SEQ ID NO: 110369 - DNA, 80 bp, synthetic construct
  misc_feature 1..80: note = Artificially Synthesized Probe
  source 1..80: mol_type = other DNA
caaaccaatacacatctacccgacatacactcatacacacacatgcaaataagcacaaaccaatacacatctacccgaca

SEQ ID NO: 110370 - DNA, 80 bp, synthetic construct
  misc_feature 1..80: note = Artificially Synthesized Probe
  source 1..80: mol_type = other DNA
cacacatgcatacacagacatctatccaacactcatatagacacatgcatatgcacagatacatgtctacccaacataca

SEQ ID NO: 110371 - DNA, 80 bp, synthetic construct
  misc_feature 1..80: note = Artificially Synthesized Probe
  source 1..80: mol_type = other DNA
cattcatatacatacgcacagatacacatttacccaacatacactatacacacacgcacatacacatctacccaacacac

SEQ ID NO: 110372 - DNA, 80 bp, synthetic construct
  misc_feature 1..80: note = Artificially Synthesized Probe
  source 1..80: mol_type = other DNA
gtgtacatccaggcagacacgtccttctctttgaaacaccaattctatcacttgaagaaaacacaacacttgtacaaagc

SEQ ID NO: 110373 - DNA, 80 bp, synthetic construct
  misc_feature 1..80: note = Artificially Synthesized Probe
  source 1..80: mol_type = other DNA
tgaagggcgcccacgccaggatatttgggccactttggtgcaaaacagataaagcacctggagtccttcctaacaggcag

SEQ ID NO: 110374 - DNA, 80 bp, synthetic construct
  misc_feature 1..80: note = Artificially Synthesized Probe
  source 1..80: mol_type = other DNA
tgaccagtcaggaccaaaaacccaggaagggatttgcttggtttggttttgtttgatgcccttcagagaacggctctcca

SEQ ID NO: 110375 - DNA, 80 bp, synthetic construct
  misc_feature 1..80: note = Artificially Synthesized Probe
  source 1..80: mol_type = other DNA
tctccgggcctcagtctccatatctgtatggtgggtgagctcagggagtgaggagcttggatgatgcggtttctaagtgt

SEQ ID NO: 110376 - DNA, 80 bp, synthetic construct
  misc_feature 1..80: note = Artificially Synthesized Probe
  source 1..80: mol_type = other DNA
ctgctgggacaagccctccctcggcacacaggagcttagccagggctgctactcactctctgtctgtcacgatgtagccc

SEQ ID NO: 110377 - DNA, 80 bp, synthetic construct
  misc_feature 1..80: note = Artificially Synthesized Probe
  source 1..80: mol_type = other DNA
ccagcagatctttggaatacgtctggctcttgacgttctccactccggcagtctcctcttctgaagacagggaagactca

SEQ ID NO: 110378 - DNA, 80 bp, synthetic construct
  misc_feature 1..80: note = Artificially Synthesized Probe
  source 1..80: mol_type = other DNA
atgctgatgtgacacatgcaatcaagggctgcccgggacagagtcactgtggggatgacatgggcagcctggaaggagag

SEQ ID NO: 110379 - DNA, 80 bp, synthetic construct
  misc_feature 1..80: note = Artificially Synthesized Probe
  source 1..80: mol_type = other DNA
cagattttgtagagtttgtgtaggtctttggcattgatatttttaaaaataaactgtgtgatatcaagatcccaccccag

SEQ ID NO: 110380 - DNA, 80 bp, synthetic construct
  misc_feature 1..80: note = Artificially Synthesized Probe
  source 1..80: mol_type = other DNA
agttcacagaaggggagacggaggcacaaagcgattaacccacaagtgggcacatcacagggatgtgtaattgattctaa

SEQ ID NO: 110381 - DNA, 80 bp, synthetic construct
  misc_feature 1..80: note = Artificially Synthesized Probe
  source 1..80: mol_type = other DNA
ccccataaataaagggtgagtttcacctttaatttgtagactctggagtttacagaggttaaatatcaaattattggtac

SEQ ID NO: 110382 - DNA, 80 bp, synthetic construct
  misc_feature 1..80: note = Artificially Synthesized Probe
  source 1..80: mol_type = other DNA
caacccacggacacctcctggtgcatgtgatgccaaaagtcttatgtctacttggcagggtttttttccaaccatgaaat

SEQ ID NO: 110383 - DNA, 80 bp, synthetic construct
  misc_feature 1..80: note = Artificially Synthesized Probe
  source 1..80: mol_type = other DNA
tttaaacaaaatagtagtgtgataaaaacactgctcaaatttggatcctcaatgacaataggatgtagccgttgacgtta

SEQ ID NO: 110384 - DNA, 80 bp, synthetic construct
  misc_feature 1..80: note = Artificially Synthesized Probe
  source 1..80: mol_type = other DNA
ttgagaaacagaattgcttgaaaatacaccccaaacaacagagaactgagtcagaattccacgcatggaggatgaaaagc

SEQ ID NO: 110385 - DNA, 80 bp, synthetic construct
  misc_feature 1..80: note = Artificially Synthesized Probe
  source 1..80: mol_type = other DNA
ttctgatggatattcaaaaccagaactgctgatgttttcttcctgcacttgccaacaggcatggaaccactaaccagtaa

SEQ ID NO: 110386 - DNA, 80 bp, synthetic construct
  misc_feature 1..80: note = Artificially Synthesized Probe
  source 1..80: mol_type = other DNA
tgctgtcctcagtgaaccacagaaggaaggaaggatgctgcttcctcaagcacagagctgctgtgtcctccagtggtgtg

SEQ ID NO: 110387 - DNA, 80 bp, synthetic construct
  misc_feature 1..80: note = Artificially Synthesized Probe
  source 1..80: mol_type = other DNA
tgtattcacgaccaaaggttcttaaagggagagaaactaagaggctaaaagacttaacagggaaggccagtgtctagctc

SEQ ID NO: 110388 - DNA, 80 bp, synthetic construct
  misc_feature 1..80: note = Artificially Synthesized Probe
  source 1..80: mol_type = other DNA
acatgcgactaacgtgccgccgacctgaacccagtgcggccaaggcactgcatctttcatttatttaattttattcaatt

SEQ ID NO: 110389 - DNA, 80 bp, synthetic construct
  misc_feature 1..80: note = Artificially Synthesized Probe
  source 1..80: mol_type = other DNA
acaggctgccgtgtgataatcctggctgggaaattccaggaaaaattaattttcttctttgcatttaccacgactttcat

SEQ ID NO: 110390 - DNA, 80 bp, synthetic construct
  misc_feature 1..80: note = Artificially Synthesized Probe
  source 1..80: mol_type = other DNA
ttcccacaccatgaacaaaaagatcaccaacttccacatttaacatgaaacaaacaccagagacgtcatcttacctcttg

SEQ ID NO: 110391 - DNA, 80 bp, synthetic construct
  misc_feature 1..80: note = Artificially Synthesized Probe
  source 1..80: mol_type = other DNA
agtcctgccatagagtaaaccttttctgtttatagcacaaaatggcattctgtaaacttcgcgagagcggaggggactga

SEQ ID NO: 110392 - DNA, 80 bp, synthetic construct
  misc_feature 1..80: note = Artificially Synthesized Probe
  source 1..80: mol_type = other DNA
catgaaaaagcaaagtgaagccttcgccaaaaccacctcacaattaagatggcttcagaatccactgacttaggttattt

SEQ ID NO: 110393 - DNA, 80 bp, synthetic construct
  misc_feature 1..80: note = Artificially Synthesized Probe
  source 1..80: mol_type = other DNA
agcctggccaacaggcgaaaccccgtctctactaaaaatacaaaaaattagctgggcgtggtagtgcacacctgtaatcc

SEQ ID NO: 110394 - DNA, 80 bp, synthetic construct
  misc_feature 1..80: note = Artificially Synthesized Probe
  source 1..80: mol_type = other DNA
ttcagtgcccaaaggtgcgtgactcatggcacctgaacagtgcccctggagacagcacgcacaccagggcctcctgcatc

SEQ ID NO: 110395 - DNA, 80 bp, synthetic construct
  misc_feature 1..80: note = Artificially Synthesized Probe
  source 1..80: mol_type = other DNA
aggggcacgtctgtcatttggttttcagcacgtacttgtggggctgccatgtgtggggagctgagctaggtgctttcttg

SEQ ID NO: 110396 - DNA, 80 bp, synthetic construct
  misc_feature 1..80: note = Artificially Synthesized Probe
  source 1..80: mol_type = other DNA
ctcactccaagtgacttcatgaaaatcaacagccagaaggcaagtacaattaacagtataattctgtttttacttttttt

SEQ ID NO: 110397 - DNA, 80 bp, synthetic construct
  misc_feature 1..80: note = Artificially Synthesized Probe
  source 1..80: mol_type = other DNA
gaatgatcccctctcactctgctattcaaatatttgacaatattcaccggtacacagtccaaacacaacacttcccatca

SEQ ID NO: 110398 - DNA, 80 bp, synthetic construct
  misc_feature 1..80: note = Artificially Synthesized Probe
  source 1..80: mol_type = other DNA
aagttcaaacagataaaaatcattaatacagatccccatctccccagcagaaagcccacattgcacttggtgagccagca

SEQ ID NO: 110399 - DNA, 80 bp, synthetic construct
  misc_feature 1..80: note = Artificially Synthesized Probe
  source 1..80: mol_type = other DNA
gagctactccatggtccacgccttgcatcaggccagccatcagctcagccatgccgtccagctccaggccactcaggccc

SEQ ID NO: 110400 - DNA, 80 bp, synthetic construct
  misc_feature 1..80: note = Artificially Synthesized Probe
  source 1..80: mol_type = other DNA
gtggccacctagggccaggcgcaggccagtgctcagagaagattgggatattggacttgaatctcaaatccacctgaccc

SEQ ID NO: 110401 - DNA, 80 bp, synthetic construct
  misc_feature 1..80: note = Artificially Synthesized Probe
  source 1..80: mol_type = other DNA
cagaggataaaagaatgggatgagctgtgtccccctcacttggcagaaggagaaacaatgcctggcaaggacagcgccct

SEQ ID NO: 110402 - DNA, 80 bp, synthetic construct
  misc_feature 1..80: note = Artificially Synthesized Probe
  source 1..80: mol_type = other DNA
gcagggtctaggcccccacttcacacaagcagcaacagatgcaggaggaggcagaaaaacagaacccgaaattgagaata

SEQ ID NO: 110403 - DNA, 80 bp, synthetic construct
  misc_feature 1..80: note = Artificially Synthesized Probe
  source 1..80: mol_type = other DNA
tctgtaagtgaagagcacggcgtctgaaatttaaaatttatgtccattacgggtggacataacggaagaaacggtttgtg

SEQ ID NO: 110404 - DNA, 80 bp, synthetic construct
  misc_feature 1..80: note = Artificially Synthesized Probe
  source 1..80: mol_type = other DNA
ctctcaaatctgggaaggattgtcactcagggactcaagacagtcactaagttccacgataataaaatgcaaggagaacc

SEQ ID NO: 110405 - DNA, 80 bp, synthetic construct
  misc_feature 1..80: note = Artificially Synthesized Probe
  source 1..80: mol_type = other DNA
cgtatttcatacaatgtgcagagtcaggcatttgacgttacagataatgaatgccacatttgaagggttgaaagaaaaat

SEQ ID NO: 110406 - DNA, 80 bp, synthetic construct
  misc_feature 1..80: note = Artificially Synthesized Probe
  source 1..80: mol_type = other DNA
ctgggattacaggcgtgtgccaccacacccagctactttttgtatttttagtagagatggggtttcaccatattggccag

SEQ ID NO: 110407 - DNA, 80 bp, synthetic construct
  misc_feature 1..80: note = Artificially Synthesized Probe
  source 1..80: mol_type = other DNA
tgcgggaggagccaaaaagctcctgaaagggtaaatatgtggttacataaacaagaaagaccgtcttcttttctcctctt

SEQ ID NO: 110408 - DNA, 80 bp, synthetic construct
  misc_feature 1..80: note = Artificially Synthesized Probe
  source 1..80: mol_type = other DNA
aggagactgtttcaaaggcgccagggcgtttcaacagagaaaggaaagtcttttccaaaaggacatcttccgtattaccc

SEQ ID NO: 110409 - DNA, 80 bp, synthetic construct
  misc_feature 1..80: note = Artificially Synthesized Probe
  source 1..80: mol_type = other DNA
agaaattggactcgtaagtatttacccgagagaagtgaaacccgtaaccatgagagttaaatgagactgtgggtagcagc

SEQ ID NO: 110410 - DNA, 80 bp, synthetic construct
  misc_feature 1..80: note = Artificially Synthesized Probe
  source 1..80: mol_type = other DNA
ggtcaccagagaatccacagaatcctgttaacagaagatgaagttcaaggatgggcgaggtctgcccagggcaaccagag

SEQ ID NO: 110411 - DNA, 80 bp, synthetic construct
  misc_feature 1..80: note = Artificially Synthesized Probe
  source 1..80: mol_type = other DNA
agcaataaagactctgccctaaagaaggttcatgggcccatttccgagctttgaaggaaaacctgactttcttttgtatt

SEQ ID NO: 110412 - DNA, 80 bp, synthetic construct
  misc_feature 1..80: note = Artificially Synthesized Probe
  source 1..80: mol_type = other DNA
tgccaccctccacgctagaggggtctcaccacgaccctccaccctagacaggtcccgccgcaaccttctgccctagaggg

SEQ ID NO: 110413 - DNA, 80 bp, synthetic construct
  misc_feature 1..80: note = Artificially Synthesized Probe
  source 1..80: mol_type = other DNA
ctgcacagggctcgacagtggcactgcctgtggcacccccgttcactcagccgcacgtcccgtcctctctccacagcgca

SEQ ID NO: 110414 - DNA, 80 bp, synthetic construct
  misc_feature 1..80: note = Artificially Synthesized Probe
  source 1..80: mol_type = other DNA
aaattttttaagtgcagtctctcttgcccattaattgaagctggttcttcagggggcgtcttgctacacggctgtaagga

SEQ ID NO: 110415 - DNA, 80 bp, synthetic construct
  misc_feature 1..80: note = Artificially Synthesized Probe
  source 1..80: mol_type = other DNA
taagaccctctgatgtaaaggcctgaacgtccatgacaggcatttctgagacagcattatgtgtagtttagcatgggatg

SEQ ID NO: 110416 - DNA, 80 bp, synthetic construct
  misc_feature 1..80: note = Artificially Synthesized Probe
  source 1..80: mol_type = other DNA
gtctgtgttgactctgttatcccttggttgactgattcttatgaagatgtcatatgaactaggatgctagtgaggtgtgt

SEQ ID NO: 110417 - DNA, 80 bp, synthetic construct
  misc_feature 1..80: note = Artificially Synthesized Probe
  source 1..80: mol_type = other DNA
agacagtggcggcttctttaccttcgggttgaagtgtccgtattaaccccacatttctgatgctctgacatctggggccc

SEQ ID NO: 110418 - DNA, 80 bp, synthetic construct
  misc_feature 1..80: note = Artificially Synthesized Probe
  source 1..80: mol_type = other DNA
cctctgtgggctcagactccaggccgctgccctagtcaccctggggcaaggaccagacacgggcagcccctggccccgga

SEQ ID NO: 110419 - DNA, 80 bp, synthetic construct
  misc_feature 1..80: note = Artificially Synthesized Probe
  source 1..80: mol_type = other DNA
ctctcaaaatctgtaagtaacaaactgttgtttcaacagcagctgtacccagatctctcgggcttgccgtcctaaatcat

SEQ ID NO: 110420 - DNA, 80 bp, synthetic construct
  misc_feature 1..80: note = Artificially Synthesized Probe
  source 1..80: mol_type = other DNA
ccatgcattcactgatggaatgctaccttcaaagaaagcttccagcaacaaactcaggaaaatacatctcactttctcac

SEQ ID NO: 110421 - DNA, 80 bp, synthetic construct
  misc_feature 1..80: note = Artificially Synthesized Probe
  source 1..80: mol_type = other DNA
aagatgtgctccggaattaaaggtgcgtgtataccacagccctcggtgctgttttgaaaatgtgctgctcattgcagctt

SEQ ID NO: 110422 - DNA, 80 bp, synthetic construct
  misc_feature 1..80: note = Artificially Synthesized Probe
  source 1..80: mol_type = other DNA
acaggtccaatgctggcaacaaagggctcactcatcccaaagaaaatggaaataaggaagtgcagggatcgggaggaaga

SEQ ID NO: 110423 - DNA, 80 bp, synthetic construct
  misc_feature 1..80: note = Artificially Synthesized Probe
  source 1..80: mol_type = other DNA
gccctcggcattgggcatggctgtccccagcagtcggcgtcctccgtgcttaggaggcgagggatgtctccacacatgcc

SEQ ID NO: 110424 - DNA, 80 bp, synthetic construct
  misc_feature 1..80: note = Artificially Synthesized Probe
  source 1..80: mol_type = other DNA
ctaaggaaaggtccttcctgtggacacgaaccaatgaacacaggctcggctgcccagcggcctcctcatcaggtgagtgg

SEQ ID NO: 110425 - DNA, 80 bp, synthetic construct
  misc_feature 1..80: note = Artificially Synthesized Probe
  source 1..80: mol_type = other DNA
aaaggactctccacacactagcttggcacagcaggcaccacaaggcctgggagcctccacctgcatctgtagacaccgcc

SEQ ID NO: 110426 - DNA, 80 bp, synthetic construct
  misc_feature 1..80: note = Artificially Synthesized Probe
  source 1..80: mol_type = other DNA
aatttccccaatattccaaacaaagctcattttagaaatgaagcactcagcatgtcaggaccactggactgtgtcctgca

SEQ ID NO: 110427 - DNA, 80 bp, synthetic construct
  misc_feature 1..80: note = Artificially Synthesized Probe
  source 1..80: mol_type = other DNA
accgttcttctgcaaggccctgtgtttcctaagggggctgaaaagctggttgtgatattttgacaaatggtgagagaata

SEQ ID NO: 110428 - DNA, 80 bp, synthetic construct
  misc_feature 1..80: note = Artificially Synthesized Probe
  source 1..80: mol_type = other DNA
ttataaaaatgatgtgcacaggccagggtattcaattcagagtggctacagtgttgccagcaggaaaatgccaaaagaaa

SEQ ID NO: 110429 - DNA, 80 bp, synthetic construct
  misc_feature 1..80: note = Artificially Synthesized Probe
  source 1..80: mol_type = other DNA
tggtgtcaggcgcctgtaatcccagctatgcaggagactaaaccaggagaattgcttgaaccttgggggtggaggttgca

SEQ ID NO: 110430 - DNA, 80 bp, synthetic construct
  misc_feature 1..80: note = Artificially Synthesized Probe
  source 1..80: mol_type = other DNA
aagaggctgcggtctgtgtttctaacagcaaacaccgtcactgtcaacactgatgagtcctgcttaacacaaagacaggt

SEQ ID NO: 110431 - DNA, 80 bp, synthetic construct
  misc_feature 1..80: note = Artificially Synthesized Probe
  source 1..80: mol_type = other DNA
agaataccacggctcggcaagacttccctcacatcatcgcgagaaggttccagaataccacggctcggcaaggtttccct

SEQ ID NO: 110432 - DNA, 80 bp, synthetic construct
  misc_feature 1..80: note = Artificially Synthesized Probe
  source 1..80: mol_type = other DNA
cggtgagaaggttccagaataccacggcttggcaagacttccctcacatcatcgcgagaaggttccagaataccacagct

SEQ ID NO: 110433 - DNA, 80 bp, synthetic construct
  misc_feature 1..80: note = Artificially Synthesized Probe
  source 1..80: mol_type = other DNA
gagcagctgggaatgtagagtttggggaactggcaggcatccacccttgagaaactgaggctccatggtggaccaggaag

SEQ ID NO: 110434 - DNA, 80 bp, synthetic construct
  misc_feature 1..80: note = Artificially Synthesized Probe
  source 1..80: mol_type = other DNA
tgattattctagaatctgtagggtgttagctcacatttctttttccatcattgcagctaggaccttagacacatttaaag

SEQ ID NO: 110435 - DNA, 80 bp, synthetic construct
  misc_feature 1..80: note = Artificially Synthesized Probe
  source 1..80: mol_type = other DNA
ccatatctgtaaaatggtgacaagtgaggcatgggcccagcatactgtaagtgcttaataaattataactattatcatga

SEQ ID NO: 110436 - DNA, 80 bp, synthetic construct
  misc_feature 1..80: note = Artificially Synthesized Probe
  source 1..80: mol_type = other DNA
gctcagtcacacaagctgacaggcaccttccaacttgctcaagatctaattcaagattatgcattttgaaactattttct

SEQ ID NO: 110437 - DNA, 80 bp, synthetic construct
  misc_feature 1..80: note = Artificially Synthesized Probe
  source 1..80: mol_type = other DNA
tactctgaaatcttgcacagagaataagcacacacctcatctgtaggtatttctacctgcccacctctccacctgcccac

SEQ ID NO: 110438 - DNA, 80 bp, synthetic construct
  misc_feature 1..80: note = Artificially Synthesized Probe
  source 1..80: mol_type = other DNA
atccctccacccactaacctacccattgattgcaccaacctgtattgggcatctattgtgatcaaagcctgggaacaaac

SEQ ID NO: 110439 - DNA, 80 bp, synthetic construct
  misc_feature 1..80: note = Artificially Synthesized Probe
  source 1..80: mol_type = other DNA
cgtggtggcgggcgcctgtagtcccagctactcaggagcctgaggcagaagaatggtgtgaacccaggaggcggagctag

SEQ ID NO: 110440 - DNA, 80 bp, synthetic construct
  misc_feature 1..80: note = Artificially Synthesized Probe
  source 1..80: mol_type = other DNA
aaatgttttggaggccagagagacttgaccaatggatagaacaagcaaacagtttacagggaaaatacaccattaagatc

SEQ ID NO: 110441 - DNA, 80 bp, synthetic construct
  misc_feature 1..80: note = Artificially Synthesized Probe
  source 1..80: mol_type = other DNA
cccctcaatgacaccccatctcacgccacgtgtctttccccctcaatgacaccccatctcacgccacgtgtctttccccc

SEQ ID NO: 110442 - DNA, 80 bp, synthetic construct
  misc_feature 1..80: note = Artificially Synthesized Probe
  source 1..80: mol_type = other DNA
accccatctcatgccacgtgtctttccccctcaccgacaccccatctcacgccacgtatctttccccctcaatgacaccc

SEQ ID NO: 110443 - DNA, 80 bp, synthetic construct
  misc_feature 1..80: note = Artificially Synthesized Probe
  source 1..80: mol_type = other DNA
gccacgtgtcattccccctcactgacaccccatctcacgccacgtgtctttccccctcaatgacaccccatctcacgcca

SEQ ID NO: 110444 - DNA, 80 bp, synthetic construct
  misc_feature 1..80: note = Artificially Synthesized Probe
  source 1..80: mol_type = other DNA
tccccctcactgacaccccatttcacgccacacgtctttccccctcaatgacaccccatctcacgccacgtgtctttccc

SEQ ID NO: 110445 - DNA, 80 bp, synthetic construct
  misc_feature 1..80: note = Artificially Synthesized Probe
  source 1..80: mol_type = other DNA
acaccccatctcacgccacgtgtctttccccctcaatgacaccccatctcacgccacgtgtctttccccctcaatgacac

SEQ ID NO: 110446 - DNA, 80 bp, synthetic construct
  misc_feature 1..80: note = Artificially Synthesized Probe
  source 1..80: mol_type = other DNA
acgccacgtgtctttccccctcaatgacaccccatctcacgccacgtgtctttccccctcaatgacaccccatctcacgc

SEQ ID NO: 110447 - DNA, 80 bp, synthetic construct
  misc_feature 1..80: note = Artificially Synthesized Probe
  source 1..80: mol_type = other DNA
tttccccctcactgacaccccatctcacgccacaggtctttccccctcactgacaccccatctcacgccacatgtctttc

SEQ ID NO: 110448 - DNA, 80 bp, synthetic construct
  misc_feature 1..80: note = Artificially Synthesized Probe
  source 1..80: mol_type = other DNA
ctccacctgcccacctctccacctgcccacctctccacctgcctacctctccacctgcccacatctccacctgcccctct

SEQ ID NO: 110449 - DNA, 80 bp, synthetic construct
  misc_feature 1..80: note = Artificially Synthesized Probe
  source 1..80: mol_type = other DNA
tgacaccccatctcacgccacgtgtctttccccctcaatgacaccccatctcacgccacgtgtctttccccctcaatgac

SEQ ID NO: 110450 - DNA, 80 bp, synthetic construct
  misc_feature 1..80: note = Artificially Synthesized Probe
  source 1..80: mol_type = other DNA
tcacgccacacatctttccccctcaatgacatcccatctcacgccacgtgtctttccctctcactgacaccccatctcat

SEQ ID NO: 110451 - DNA, 80 bp, synthetic construct
  misc_feature 1..80: note = Artificially Synthesized Probe
  source 1..80: mol_type = other DNA
gctctccaagctggcaccaattatagtacagggaacccaatttccaaccaaaagacctccaaacttttataaagcaatgt

SEQ ID NO: 110452 - DNA, 80 bp, synthetic construct
  misc_feature 1..80: note = Artificially Synthesized Probe
  source 1..80: mol_type = other DNA
tatttttaatctctaacaaaggcaatccaattaactcactgatttttaaaaagataagcccggctgggcgcagtggctca

SEQ ID NO: 110453 - DNA, 80 bp, synthetic construct
  misc_feature 1..80: note = Artificially Synthesized Probe
  source 1..80: mol_type = other DNA
ggctaaggcaggagaattgcttgaacatgggagacggaggttgcggtgagctgagattgtgccattgcactccagcctga

SEQ ID NO: 110454 - DNA, 80 bp, synthetic construct
  misc_feature 1..80: note = Artificially Synthesized Probe
  source 1..80: mol_type = other DNA
atatgaaaaataaaaatagaaagtaagcaacacaattctttgctgtttgttaagcctcattacagacacatcagatttag

SEQ ID NO: 110455 - DNA, 80 bp, synthetic construct
  misc_feature 1..80: note = Artificially Synthesized Probe
  source 1..80: mol_type = other DNA
agtgtgtgtgagacccaccttcatgcttcaggaacactggccaaggcagaaaaatagatggatgtattcatgagagattt

SEQ ID NO: 110456 - DNA, 80 bp, synthetic construct
  misc_feature 1..80: note = Artificially Synthesized Probe
  source 1..80: mol_type = other DNA
ctccacatgcagggctgagatgtccaccctcagcagctcgaaaagtggcagctctgccgccctgacctggcactgacgca

SEQ ID NO: 110457 - DNA, 80 bp, synthetic construct
  misc_feature 1..80: note = Artificially Synthesized Probe
  source 1..80: mol_type = other DNA
agcatctatatggaaagaccttttctccttaagatctcggtgtcatctcctgcccctctaattccacccttgtgaacata

SEQ ID NO: 110458 - DNA, 80 bp, synthetic construct
  misc_feature 1..80: note = Artificially Synthesized Probe
  source 1..80: mol_type = other DNA
catgatggttgcaccccagccactctggcctcctttctgttcttccaacccaacgtgctggtggaattatcctactggtt

SEQ ID NO: 110459 - DNA, 80 bp, synthetic construct
  misc_feature 1..80: note = Artificially Synthesized Probe
  source 1..80: mol_type = other DNA
ccgcctttccactcttgcccctgcctgcccaaaccgcccgcctttctgctcctacccctgcccacaccgcccgcctttct

SEQ ID NO: 110460 - DNA, 80 bp, synthetic construct
  misc_feature 1..80: note = Artificially Synthesized Probe
  source 1..80: mol_type = other DNA
ccacctgcccacatctccacctgcctttcctaacatttaaagcaaattgcatgaaacgctttcttgaaaaccaccatttg

SEQ ID NO: 110461 - DNA, 80 bp, synthetic construct
  misc_feature 1..80: note = Artificially Synthesized Probe
  source 1..80: mol_type = other DNA
ttgtgggtgtctgtgggtgtgtgtgcaatgtgtgggtgtgcgcagtgtccgtggctgtgtgtaggtgtgcactgtgtgca

SEQ ID NO: 110462 - DNA, 80 bp, synthetic construct
  misc_feature 1..80: note = Artificially Synthesized Probe
  source 1..80: mol_type = other DNA
cctgcccacaccgcccaccttctattcctgcctctccctgcccacaccgcccgcctttctgctcctgcctctccctgccc

SEQ ID NO: 110463 - DNA, 80 bp, synthetic construct
  misc_feature 1..80: note = Artificially Synthesized Probe
  source 1..80: mol_type = other DNA
tgcaggcagcctcttactctgcctgtggtggggtggtggtggtgggtggtatgagccacgccctccccttcagggacaga

SEQ ID NO: 110464 - DNA, 80 bp, synthetic construct
  misc_feature 1..80: note = Artificially Synthesized Probe
  source 1..80: mol_type = other DNA
gcaccagctacctttgaaggcgcagagataaatccatgagcaaagtccttgcttttgtgtgacttccatctatgttagaa

SEQ ID NO: 110465 - DNA, 80 bp, synthetic construct
  misc_feature 1..80: note = Artificially Synthesized Probe
  source 1..80: mol_type = other DNA
aaaattagccgggcgtggtggcagacgcctgtagtcccagctactcaggaggctgaggcaggagaatggtgtgaacccgg

SEQ ID NO: 110466 - DNA, 80 bp, synthetic construct
  misc_feature 1..80: note = Artificially Synthesized Probe
  source 1..80: mol_type = other DNA
gggctggagcactgctctttcataccgcactgccagagaaagcctcattgagaaggtgaagtttcagcagaggcctgagg

SEQ ID NO: 110467 - DNA, 80 bp, synthetic construct
  misc_feature 1..80: note = Artificially Synthesized Probe
  source 1..80: mol_type = other DNA
gatatgggagtgctgggaaggggagagctggtccctttaaatgatatagaagtgtgaagggaagtgctgggttgaggaag

SEQ ID NO: 110468 - DNA, 80 bp, synthetic construct
  misc_feature 1..80: note = Artificially Synthesized Probe
  source 1..80: mol_type = other DNA
agtggctggatgtcaagaggagcacgttggcaaaagagcagaccaacagacaccagcatgccagcaggccaccgactggt

SEQ ID NO: 110469 - DNA, 80 bp, synthetic construct
  misc_feature 1..80: note = Artificially Synthesized Probe
  source 1..80: mol_type = other DNA
caagagcagaccgacagacaccagcatgccagcaggccaccgactggggggacaagagcagaccgacagacaccagcacg

SEQ ID NO: 110470 - DNA, 80 bp, synthetic construct
  misc_feature 1..80: note = Artificially Synthesized Probe
  source 1..80: mol_type = other DNA
atctgctgagagctacttctactcaaaacaaccttgcacttactctccaagcccacatatgatctgattcttccagtaca

SEQ ID NO: 110471 - DNA, 80 bp, synthetic construct
  misc_feature 1..80: note = Artificially Synthesized Probe
  source 1..80: mol_type = other DNA
aaacattcacccctagacactgccatggggtctgagcccacagcccacccgtctgtcagctcccctagaggtttgagcag

SEQ ID NO: 110472 - DNA, 80 bp, synthetic construct
  misc_feature 1..80: note = Artificially Synthesized Probe
  source 1..80: mol_type = other DNA
acctctccctcctgggttcaaatgtttcttctgcctcagctgggattacaggtatgcaccaccatgcctggctagtttct

SEQ ID NO: 110473 - DNA, 80 bp, synthetic construct
  misc_feature 1..80: note = Artificially Synthesized Probe
  source 1..80: mol_type = other DNA
ctgagtgtgatgagaagcccgtggtgtgctctgagcagtgggatatcatctgattgacaaatttacaagaaccactctgc

SEQ ID NO: 110474 - DNA, 80 bp, synthetic construct
  misc_feature 1..80: note = Artificially Synthesized Probe
  source 1..80: mol_type = other DNA
ctcggaaggcaggtacagcagggtctgccaacagactggacatggggggacagaaagaaaaggacctaaatggatagtgg

SEQ ID NO: 110475 - DNA, 80 bp, synthetic construct
  misc_feature 1..80: note = Artificially Synthesized Probe
  source 1..80: mol_type = other DNA
atgtcagggcagaaaccctaaaagattcactgccttccagaaaaggcagcgtaacgcagagacaggtgttctccggagtc

SEQ ID NO: 110476 - DNA, 80 bp, synthetic construct
  misc_feature 1..80: note = Artificially Synthesized Probe
  source 1..80: mol_type = other DNA
tctactacctgctaatgctcagtatttgttgacaggaagttgtgtcccctcttctaacaccgctgtaacatttaacaact

SEQ ID NO: 110477 - DNA, 80 bp, synthetic construct
  misc_feature 1..80: note = Artificially Synthesized Probe
  source 1..80: mol_type = other DNA
ggcctcttagaatcactataataggaaacatccaccttcaaaatggaataataaagtacaattccaaaaactacttcccc

SEQ ID NO: 110478 - DNA, 80 bp, synthetic construct
  misc_feature 1..80: note = Artificially Synthesized Probe
  source 1..80: mol_type = other DNA
cacagcattttatgaacatgctgagttatctcagaagcatccactacctgccatttgaagatgaagagaaatgaggaagt

SEQ ID NO: 110479 - DNA, 80 bp, synthetic construct
  misc_feature 1..80: note = Artificially Synthesized Probe
  source 1..80: mol_type = other DNA
gctccaactgggctctcataaggcaattacacaaaatgtcaggatattaaatgtgtaaagcctggagtaagagatcagct

SEQ ID NO: 110480 - DNA, 80 bp, synthetic construct
  misc_feature 1..80: note = Artificially Synthesized Probe
  source 1..80: mol_type = other DNA
acaacagcttttgctcctaagtgcctttacaaccatgtatatatgaaggtacacagttagccacatctgaacacccatca

SEQ ID NO: 110481 - DNA, 80 bp, synthetic construct
  misc_feature 1..80: note = Artificially Synthesized Probe
  source 1..80: mol_type = other DNA
acccagtcagcagattgacttttgaacttgaaatatttttatatcgtattcttaggagttgagatttacttaagtaaaat

SEQ ID NO: 110482 - DNA, 80 bp, synthetic construct
  misc_feature 1..80: note = Artificially Synthesized Probe
  source 1..80: mol_type = other DNA
caccatcatcaccatcatcatcaccatcaccatcaacactatcatcaccatcatcaccaccgtcatcattgccatcatca

SEQ ID NO: 110483 - DNA, 80 bp, synthetic construct
  misc_feature 1..80: note = Artificially Synthesized Probe
  source 1..80: mol_type = other DNA
catcacccaccatcatggggaatggactgtgctcctttggtttagaggacatacagcccatttaattgctggggtccaaa

SEQ ID NO: 110484 - DNA, 80 bp, synthetic construct
  misc_feature 1..80: note = Artificially Synthesized Probe
  source 1..80: mol_type = other DNA
tccaatatgagggggtaaggaatcacagctgagtagtgtgcatctctccctgactaatgaaaagtgcccatgctgcagcc

SEQ ID NO: 110485 - DNA, 80 bp, synthetic construct
  misc_feature 1..80: note = Artificially Synthesized Probe
  source 1..80: mol_type = other DNA
ggtgtggggattggcagtcaaatggctttctaaagactgcttcctttaggttcatgttagtgtgagtttgcacactcaga

SEQ ID NO: 110486 - DNA, 80 bp, synthetic construct
  misc_feature 1..80: note = Artificially Synthesized Probe
  source 1..80: mol_type = other DNA
tgggaacagttacctcgaaaagttctagaaatgccggtggagagggcaggtgaacacacagctgcagtcagacgctcggc

SEQ ID NO: 110487 - DNA, 80 bp, synthetic construct
  misc_feature 1..80: note = Artificially Synthesized Probe
  source 1..80: mol_type = other DNA
aatcagcggtctccattaaccaccagcgttcaggttggaactggggagatttggaaaagtgacaggaaggatgacatcat

SEQ ID NO: 110488 - DNA, 80 bp, synthetic construct
  misc_feature 1..80: note = Artificially Synthesized Probe
  source 1..80: mol_type = other DNA
ctctgaaaggcctacccattgtgcttacacagcggacagcacccccgttccatgtagctctggaaggcctccccattgtg

SEQ ID NO: 110489 - DNA, 80 bp, synthetic construct
  misc_feature 1..80: note = Artificially Synthesized Probe
  source 1..80: mol_type = other DNA
gctagtcagaacatccaacctctcttctttttctgaaaagccactctgtccctacatagttaaatgcattctgaattaaa

SEQ ID NO: 110490 - DNA, 80 bp, synthetic construct
  misc_feature 1..80: note = Artificially Synthesized Probe
  source 1..80: mol_type = other DNA
gacagtgaggtgcctttaggtgccctgccaattcctagtcagacagaggcaaatttcaacccaattctcaaagtaaaaat

SEQ ID NO: 110491 - DNA, 80 bp, synthetic construct
  misc_feature 1..80: note = Artificially Synthesized Probe
  source 1..80: mol_type = other DNA
aagcagtgactctgcactagtgcagaagtcggggagcctcctccccctgggagaagacatgagctgggtggagccgagca

SEQ ID NO: 110492 - DNA, 80 bp, synthetic construct
  misc_feature 1..80: note = Artificially Synthesized Probe
  source 1..80: mol_type = other DNA
agagtgacccccccagcaccccgggtgccctctcctgcgcctgctcccctgggagagagtgcgctgctgctgactccacg

SEQ ID NO: 110493 - DNA, 80 bp, synthetic construct
  misc_feature 1..80: note = Artificially Synthesized Probe
  source 1..80: mol_type = other DNA
ttatcagtggcttcctcctggagcagcctgtgagaggcggcctctgtgtgccagtgattaggtggccaattctcttctaa

SEQ ID NO: 110494 - DNA, 80 bp, synthetic construct
  misc_feature 1..80: note = Artificially Synthesized Probe
  source 1..80: mol_type = other DNA
gacagaagcattggtatcagttatttctgtgttataatctactgctgtcaccgtgaaaagtcaaagctttggttcagtgc

SEQ ID NO: 110495 - DNA, 80 bp, synthetic construct
  misc_feature 1..80: note = Artificially Synthesized Probe
  source 1..80: mol_type = other DNA
ttttggatgaggggagagaactgggagcggagcccatgtgattggccaggacttcgcaagtgctttctgagtgaatgagt

SEQ ID NO: 110496 - DNA, 80 bp, synthetic construct
  misc_feature 1..80: note = Artificially Synthesized Probe
  source 1..80: mol_type = other DNA
tgtgattggccgggacttcgcaagggctttctgaatgaatgagtgaactcggaagaatcaggagcccgtgtgattggccg

SEQ ID NO: 110497 - DNA, 80 bp, synthetic construct
  misc_feature 1..80: note = Artificially Synthesized Probe
  source 1..80: mol_type = other DNA
gaatgagtgaactcgggagaatcaggagcccgtgtgattggccgggacttcgcaagggcttcctgaatgaatgagtgaac

SEQ ID NO: 110498 - DNA, 80 bp, synthetic construct
  misc_feature 1..80: note = Artificially Synthesized Probe
  source 1..80: mol_type = other DNA
attggccgggactttgcaagtgctttctgaatgaatgagtgaacttgggaataaccacgcgaagcgttgcatggctggag

SEQ ID NO: 110499 - DNA, 80 bp, synthetic construct
  misc_feature 1..80: note = Artificially Synthesized Probe
  source 1..80: mol_type = other DNA
tgattaccttggccatacaagcgatagtataataagacacctgaatagaagaaatatcaggtatgttgggatgaggttgc

SEQ ID NO: 110500 - DNA, 80 bp, synthetic construct
  misc_feature 1..80: note = Artificially Synthesized Probe
  source 1..80: mol_type = other DNA
tcagtaataatcaggctgttttaaatgtagctcatgggtttctctctcagacaacctacgagggaaaacagaattcccat

SEQ ID NO: 110501 - DNA, 80 bp, synthetic construct
  misc_feature 1..80: note = Artificially Synthesized Probe
  source 1..80: mol_type = other DNA
tcaatgagcaaggattacaacagtggacaccccacacattatttgtcattggttcatttagaaaacggtgtctgatgcat

SEQ ID NO: 110502 - DNA, 80 bp, synthetic construct
  misc_feature 1..80: note = Artificially Synthesized Probe
  source 1..80: mol_type = other DNA
catggctagcaggacatgggtttggatcataatctcaaaagatacagtcccaattgccataatcccaaatagtgaaatcc

SEQ ID NO: 110503 - DNA, 80 bp, synthetic construct
  misc_feature 1..80: note = Artificially Synthesized Probe
  source 1..80: mol_type = other DNA
ttaaggagttgtgtgtgagtgccaagttgacaaggggtgaaactgtagacttcgttttaagtgtcaacttgactgggtta

SEQ ID NO: 110504 - DNA, 80 bp, synthetic construct
  misc_feature 1..80: note = Artificially Synthesized Probe
  source 1..80: mol_type = other DNA
agggtgaattaggctccctctgagtgctggggcagactttccttctgctgccctggacatcagagctccaggtttggcgg

SEQ ID NO: 110505 - DNA, 80 bp, synthetic construct
  misc_feature 1..80: note = Artificially Synthesized Probe
  source 1..80: mol_type = other DNA
agatctcagctcttcgactgtttatgcagcagtgacccatcagggtttttgactcatcttgtcaaaagccttaggttgtt

SEQ ID NO: 110506 - DNA, 80 bp, synthetic construct
  misc_feature 1..80: note = Artificially Synthesized Probe
  source 1..80: mol_type = other DNA
ctcataagtgtgatgcccatgcaactgtcgtcaagatatctgagggcttatgtctgcaaaaatacgaatgttattattgc

SEQ ID NO: 110507 - DNA, 80 bp, synthetic construct
  misc_feature 1..80: note = Artificially Synthesized Probe
  source 1..80: mol_type = other DNA
ttttagggaccttagggattttgatatttcaggatcttaacattcagaactatggcattcaggattgtgtctttcaggat

SEQ ID NO: 110508 - DNA, 80 bp, synthetic construct
  misc_feature 1..80: note = Artificially Synthesized Probe
  source 1..80: mol_type = other DNA
caacacaatactgaagaagaacaaaggcggaggacaacagcacccatcattaggatgcactacacccattgttacgactc

SEQ ID NO: 110509 - DNA, 80 bp, synthetic construct
  misc_feature 1..80: note = Artificially Synthesized Probe
  source 1..80: mol_type = other DNA
acaaatggtgctggacaactggatgtccacatgtacagaaacaattccagatgcagaccttacacctttcacaactaact

SEQ ID NO: 110510 - DNA, 80 bp, synthetic construct
  misc_feature 1..80: note = Artificially Synthesized Probe
  source 1..80: mol_type = other DNA
ttaaaataaaaactaatgctctgcaaaagacgctgtcaagagaatgaaaatacaagccacagactggagaaaatgtttac

SEQ ID NO: 110511 - DNA, 80 bp, synthetic construct
  misc_feature 1..80: note = Artificially Synthesized Probe
  source 1..80: mol_type = other DNA
tttcattcagctgctgctaggaaggtaattatcattgtaccttcagctatttcataaagaagaggcaccatcgatttctt

SEQ ID NO: 110512 - DNA, 80 bp, synthetic construct
  misc_feature 1..80: note = Artificially Synthesized Probe
  source 1..80: mol_type = other DNA
cctcaccacagaagatacacagatgaaaacaagcatgtgaagatgctctgcttcctccatcatcagggaaatgtgaatga

SEQ ID NO: 110513 - DNA, 80 bp, synthetic construct
  misc_feature 1..80: note = Artificially Synthesized Probe
  source 1..80: mol_type = other DNA
ggctgcttccaaaaccaaacattctcttactatgtgatccagtgattacactccttggtacttaaccagtagaagttaaa

SEQ ID NO: 110514 - DNA, 80 bp, synthetic construct
  misc_feature 1..80: note = Artificially Synthesized Probe
  source 1..80: mol_type = other DNA
gatgttcctcagtaggcgaataaactgtggcccatctatacaatggagtgttatggattataatgtaataatacaatact

SEQ ID NO: 110515 - DNA, 80 bp, synthetic construct
  misc_feature 1..80: note = Artificially Synthesized Probe
  source 1..80: mol_type = other DNA
ccacatattgtaaggttccaactccaggacattcaggaaaaggcaaactatggagacagcaacaaggtccatggttgcca

SEQ ID NO: 110516 - DNA, 80 bp, synthetic construct
  misc_feature 1..80: note = Artificially Synthesized Probe
  source 1..80: mol_type = other DNA
tgaataagtgaaggaagagagtctctttttaaagcttttaccaggtaaacttttgtcatatgcgttcagcccgcagcctc

SEQ ID NO: 110517 - DNA, 80 bp, synthetic construct
  misc_feature 1..80: note = Artificially Synthesized Probe
  source 1..80: mol_type = other DNA
agggtcctcccttcctgctcgggtgcagttgctctttgtgtgttgagaatgtctgtctagctagggcctcacatcttcag

SEQ ID NO: 110518 - DNA, 80 bp, synthetic construct
  misc_feature 1..80: note = Artificially Synthesized Probe
  source 1..80: mol_type = other DNA
gatgcctataccaggttctcaattctctctatttcttaggtgacgcctgtacggggttctcaatattctctgtgtgtttc

SEQ ID NO: 110519 - DNA, 80 bp, synthetic construct
  misc_feature 1..80: note = Artificially Synthesized Probe
  source 1..80: mol_type = other DNA
attctctgcgtgttttgtaggtgatacctgtacggggttctcaattctctcttcttatttcataggtgatcaatattctc

SEQ ID NO: 110520 - DNA, 80 bp, synthetic construct
  misc_feature 1..80: note = Artificially Synthesized Probe
  source 1..80: mol_type = other DNA
tctctgtgtatttcataggtgatgcctgtaccgggttctcaattctatttcataggtgacgcctgtacggggttctcaat

SEQ ID NO: 110521 - DNA, 80 bp, synthetic construct
  misc_feature 1..80: note = Artificially Synthesized Probe
  source 1..80: mol_type = other DNA
tctgcgtatttcctatttgccgttttacatgaggcttttctaaagcgcacagtgcagtttggaagtcagtttttatcaga

SEQ ID NO: 110522 - DNA, 80 bp, synthetic construct
  misc_feature 1..80: note = Artificially Synthesized Probe
  source 1..80: mol_type = other DNA
aagctccccggtgcataagaaaggcacacagaacaggagcgcgcaggaagggctcgcagagcaggagcgcacgcgtagga

SEQ ID NO: 110523 - DNA, 80 bp, synthetic construct
  misc_feature 1..80: note = Artificially Synthesized Probe
  source 1..80: mol_type = other DNA
tgcaggaattcatcccccaaacacacaccccctctggttcccacatgggatgaaagctgtccaccgtttccagctcgaca

SEQ ID NO: 110524 - DNA, 80 bp, synthetic construct
  misc_feature 1..80: note = Artificially Synthesized Probe
  source 1..80: mol_type = other DNA
gctcgcagagcaggagggtgcgtaggaaggacacgcagagcaggagcgcgcgcgtaggaagggctcgcagagcgggagcg

SEQ ID NO: 110525 - DNA, 80 bp, synthetic construct
  misc_feature 1..80: note = Artificially Synthesized Probe
  source 1..80: mol_type = other DNA
ttgctttctgttcccaataatgaggacagaggtgaatggggctttttaagctgtgggagatgggataggagagagaaaag

SEQ ID NO: 110526 - DNA, 80 bp, synthetic construct
  misc_feature 1..80: note = Artificially Synthesized Probe
  source 1..80: mol_type = other DNA
agctgaaggtcacctcagccatgtattcaccgcctgtggccaagggctgaggccacactgagctggaggagaacaggaag

SEQ ID NO: 110527 - DNA, 80 bp, synthetic construct
  misc_feature 1..80: note = Artificially Synthesized Probe
  source 1..80: mol_type = other DNA
aagacccctgatagcattcagtacccacgaaagcgcaggaggcagtgaagacccctgatggtgtctagtacacaaagagt

SEQ ID NO: 110528 - DNA, 80 bp, synthetic construct
  misc_feature 1..80: note = Artificially Synthesized Probe
  source 1..80: mol_type = other DNA
ggtttctcggagtagagcatggcttagaacagaggagacgtcgtcccagagggagaggtgctggagggaaagtggccact

SEQ ID NO: 110529 - DNA, 80 bp, synthetic construct
  misc_feature 1..80: note = Artificially Synthesized Probe
  source 1..80: mol_type = other DNA
ggtaatggtcacacgtccttccctctaattgcaatttcacattccttctatttaaaaactgccataacggctgcatgaac

SEQ ID NO: 110530 - DNA, 80 bp, synthetic construct
  misc_feature 1..80: note = Artificially Synthesized Probe
  source 1..80: mol_type = other DNA
ctcaggcaatgtttgtgaaattttagtatttgttatctccaaaagggaagtcatgttttatcagaacccactgcaggatg

SEQ ID NO: 110531 - DNA, 80 bp, synthetic construct
  misc_feature 1..80: note = Artificially Synthesized Probe
  source 1..80: mol_type = other DNA
tcgaggccgacactgttcagctagtgcatggtgagcagcatgaaatccagacagggggcttcggaggatgtggcaaaccg

SEQ ID NO: 110532 - DNA, 80 bp, synthetic construct
  misc_feature 1..80: note = Artificially Synthesized Probe
  source 1..80: mol_type = other DNA
atccatcagcttcagcagtagaattgtgaaatcataaaatctggggaagggatgaacaagaagtgagaagggaacacaca

SEQ ID NO: 110533 - DNA, 80 bp, synthetic construct
  misc_feature 1..80: note = Artificially Synthesized Probe
  source 1..80: mol_type = other DNA
tcctcacaccctcaggatcatctcctcctccccccgggtgccgcgttccctgtcctcacaccctcaggatcacctcccct

SEQ ID NO: 110534 - DNA, 80 bp, synthetic construct
  misc_feature 1..80: note = Artificially Synthesized Probe
  source 1..80: mol_type = other DNA
tggccgctgtgttcactgtcctcacaccctcagcagcgccttctccatcccactgtcaggatcacctcccgcctctcact

SEQ ID NO: 110535 - DNA, 80 bp, synthetic construct
  misc_feature 1..80: note = Artificially Synthesized Probe
  source 1..80: mol_type = other DNA
attctggcttcatcaaatggttcatctcagggaaaagggacctcaacatggcttttcttttccttcggacggtttcgtgt

SEQ ID NO: 110536 - DNA, 80 bp, synthetic construct
  misc_feature 1..80: note = Artificially Synthesized Probe
  source 1..80: mol_type = other DNA
cgtctgtcactgggaggggctggacagaggacagtcagcaaacaagaaacaccaagcggggctggctcaccatcgcctgt

SEQ ID NO: 110537 - DNA, 80 bp, synthetic construct
  misc_feature 1..80: note = Artificially Synthesized Probe
  source 1..80: mol_type = other DNA
ctgagggccgccatcagatggtgtctgtccacaccactgtccaccttagggctgagctcatctggctggagctggccgag

SEQ ID NO: 110538 - DNA, 80 bp, synthetic construct
  misc_feature 1..80: note = Artificially Synthesized Probe
  source 1..80: mol_type = other DNA
gctgggggcaccaagatgcccttcagtctcagttttcaaggtcctaaacagccctgggggtacaaagatgcccttcggtc

SEQ ID NO: 110539 - DNA, 80 bp, synthetic construct
  misc_feature 1..80: note = Artificially Synthesized Probe
  source 1..80: mol_type = other DNA
tttagtgtattcagagttgtgagacatcactactaagtccagaacatccgcatcacccaaaaagagactttgcagtgttc

SEQ ID NO: 110540 - DNA, 80 bp, synthetic construct
  misc_feature 1..80: note = Artificially Synthesized Probe
  source 1..80: mol_type = other DNA
ggggcatgggccaggacatccttcctctttcagccaagtactatcccactgcatgtatatcccacattttaaaaattcac

SEQ ID NO: 110541 - DNA, 80 bp, synthetic construct
  misc_feature 1..80: note = Artificially Synthesized Probe
  source 1..80: mol_type = other DNA
ggatattacatggtaactcgacatttaactgactgaggaactcccaagctgttttccagcacagcagcaccacaaacaat

SEQ ID NO: 110542 - DNA, 80 bp, synthetic construct
  misc_feature 1..80: note = Artificially Synthesized Probe
  source 1..80: mol_type = other DNA
tccaactcagctttaactaaaggtcctttgcacggcagctcggagttactgcattcacagcaatgagaggagctgctccc

SEQ ID NO: 110543 - DNA, 80 bp, synthetic construct
  misc_feature 1..80: note = Artificially Synthesized Probe
  source 1..80: mol_type = other DNA
tagctgaatctctctttcagcaaccctcagcagaggcctcaagtgccttgtctggaggtcttcactccaacttctttact

SEQ ID NO: 110544 - DNA, 80 bp, synthetic construct
  misc_feature 1..80: note = Artificially Synthesized Probe
  source 1..80: mol_type = other DNA
actcatttagtaaaattccgttaagaggacatgtcctcatcacactttgtgtcactagataaaccaaggcccagctgtcc

SEQ ID NO: 110545 - DNA, 80 bp, synthetic construct
  misc_feature 1..80: note = Artificially Synthesized Probe
  source 1..80: mol_type = other DNA
gtgtgtggacaccccagtttaaatcccatccgttcatattttctacttgcacctccttggggcacatgatcaatgtcatg

SEQ ID NO: 110546 - DNA, 80 bp, synthetic construct
  misc_feature 1..80: note = Artificially Synthesized Probe
  source 1..80: mol_type = other DNA
atcacatcttattaaggaagatgaatgaggatctttgaaacccacacggaaccaagcttgggagtcaacctctgctggaa

SEQ ID NO: 110547 - DNA, 80 bp, synthetic construct
  misc_feature 1..80: note = Artificially Synthesized Probe
  source 1..80: mol_type = other DNA
ttagatttttgagtagcaacctgggagttgggaagtgggttgatagaggttggggttgtttggtttttctgggttttttt

SEQ ID NO: 110548 - DNA, 80 bp, synthetic construct
  misc_feature 1..80: note = Artificially Synthesized Probe
  source 1..80: mol_type = other DNA
tgtgtgtgtgtgtgtgtgtgtgtgtgtgtgtgtgtgttttagtagaaatggggttttactatgttggccaggctggtctc

SEQ ID NO: 110549 - DNA, 80 bp, synthetic construct
  misc_feature 1..80: note = Artificially Synthesized Probe
  source 1..80: mol_type = other DNA
ttgggtaaattacttgacccctaaagactcaattttcttctgtcaaaaaaggaaatcggacattatctctaagatttttt

SEQ ID NO: 110550 - DNA, 80 bp, synthetic construct
  misc_feature 1..80: note = Artificially Synthesized Probe
  source 1..80: mol_type = other DNA
tttgtgtttttagtagagatggggtttcgccatgttggccaggctggtctcgaactcctgacctcaagtgatgggcctgc

SEQ ID NO: 110551 - DNA, 80 bp, synthetic construct
  misc_feature 1..80: note = Artificially Synthesized Probe
  source 1..80: mol_type = other DNA
taagaaagagaatatgtgagagagcaagagcgtgagaaagagcgagagcgagcgagcgagagacagtgaatgccaccaca

SEQ ID NO: 110552 - DNA, 80 bp, synthetic construct
  misc_feature 1..80: note = Artificially Synthesized Probe
  source 1..80: mol_type = other DNA
tggctttcccctcattgctatgaatgcagtaacctggagcttccacgcaaagggcctttaattaaagttgagttggaagc

SEQ ID NO: 110553 - DNA, 80 bp, synthetic construct
  misc_feature 1..80: note = Artificially Synthesized Probe
  source 1..80: mol_type = other DNA
gcctgtagaaataatagcaaacatcggtttttgcaagccactccggctactcaatagatgattgcagacactggggtgtt

SEQ ID NO: 110554 - DNA, 80 bp, synthetic construct
  misc_feature 1..80: note = Artificially Synthesized Probe
  source 1..80: mol_type = other DNA
caatgctacgagcttaatgacctttgcttcagcacactatttaagtaatctgtaaaacaaggataataataatagtatct

SEQ ID NO: 110555 - DNA, 80 bp, synthetic construct
  misc_feature 1..80: note = Artificially Synthesized Probe
  source 1..80: mol_type = other DNA
atacacattatatacacatatatatacacacatatatatatacacatatatatacacacatatatacacatatatacaca

SEQ ID NO: 110556 - DNA, 80 bp, synthetic construct
  misc_feature 1..80: note = Artificially Synthesized Probe
  source 1..80: mol_type = other DNA
atacacacatatatatatatatatatatatatatatatatatatatatacacacacacatttttttaagacatagtctcg

SEQ ID NO: 110557 - DNA, 80 bp, synthetic construct
  misc_feature 1..80: note = Artificially Synthesized Probe
  source 1..80: mol_type = other DNA
gctcaggcatgtggacatcttcccagcgtgctttatcccacaggtgtgctgagaccagcagagccgagagctgagcaccc

SEQ ID NO: 110558 - DNA, 80 bp, synthetic construct
  misc_feature 1..80: note = Artificially Synthesized Probe
  source 1..80: mol_type = other DNA
gggtttcaccatgttggtcaggctggtctcaaactcctgacctcaagtgatctgcccgccttggcctcccaaagtgctgg

SEQ ID NO: 110559 - DNA, 80 bp, synthetic construct
  misc_feature 1..80: note = Artificially Synthesized Probe
  source 1..80: mol_type = other DNA
tgtgaagatgttttcagtctcagttcaacataccaatgaagggaggtttcctaagacaatgtggaataatttttaagacc

SEQ ID NO: 110560 - DNA, 80 bp, synthetic construct
  misc_feature 1..80: note = Artificially Synthesized Probe
  source 1..80: mol_type = other DNA
cgagagcttctgccaaagtctgatgatgtttaagctgacatgatattctactgggaatattcttcaacccactgcatttc

SEQ ID NO: 110561 - DNA, 80 bp, synthetic construct
  misc_feature 1..80: note = Artificially Synthesized Probe
  source 1..80: mol_type = other DNA
actagaaaaataattctgttttctttaaaagccactgtgaggattagggagagtataggtaaaagtgccttgctcagcac

SEQ ID NO: 110562 - DNA, 80 bp, synthetic construct
  misc_feature 1..80: note = Artificially Synthesized Probe
  source 1..80: mol_type = other DNA
tcaatagcagcatccccaccatcatcacttccaccatcaacaacagcatctccactatctccaccatccacaacagcatc

SEQ ID NO: 110563 - DNA, 80 bp, synthetic construct
  misc_feature 1..80: note = Artificially Synthesized Probe
  source 1..80: mol_type = other DNA
agcaggatccccaccatcatcttcaccattcacagcagcatcccaccatcatcatcttcaccatcagcatcatcccacca

SEQ ID NO: 110564 - DNA, 80 bp, synthetic construct
  misc_feature 1..80: note = Artificially Synthesized Probe
  source 1..80: mol_type = other DNA
tcatcgacagcagcatcccaccaatatcatcttcaccatccatagcaggatccccaccatcatcaccccaatcatcaaca

SEQ ID NO: 110565 - DNA, 80 bp, synthetic construct
  misc_feature 1..80: note = Artificially Synthesized Probe
  source 1..80: mol_type = other DNA
catcatcacttcctattgggggaaccagcccccaatatttcaacacaggttcttttctattttccctaagtgttggccag

SEQ ID NO: 110566 - DNA, 80 bp, synthetic construct
  misc_feature 1..80: note = Artificially Synthesized Probe
  source 1..80: mol_type = other DNA
taggtcacagggatcacatgcttcagagggcaataaaagatcacaaggcagggggtgaaattagaattactgatgagtgt

SEQ ID NO: 110567 - DNA, 80 bp, synthetic construct
  misc_feature 1..80: note = Artificially Synthesized Probe
  source 1..80: mol_type = other DNA
ctgcataagacagacactcccagaacggccattcatagacctacccctgggaatgcattccttccccaggattattcctt

SEQ ID NO: 110568 - DNA, 80 bp, synthetic construct
  misc_feature 1..80: note = Artificially Synthesized Probe
  source 1..80: mol_type = other DNA
gccactgagaccagcagagctgagagctgagcaccctccaccatcagtgaccgctgagaccagcagagctgagagctgag

SEQ ID NO: 110569 - DNA, 80 bp, synthetic construct
  misc_feature 1..80: note = Artificially Synthesized Probe
  source 1..80: mol_type = other DNA
ttcatattgttcaaacacatgttttacagtttgtaccattaatgcaatcatcacaggatcccgaggtgacatacatcctc

SEQ ID NO: 110570 - DNA, 80 bp, synthetic construct
  misc_feature 1..80: note = Artificially Synthesized Probe
  source 1..80: mol_type = other DNA
aactgataaatgtccatgaagtcttcacaatttatgttttgccgcagcttcagccggtccctccatttggggtccctgac

SEQ ID NO: 110571 - DNA, 80 bp, synthetic construct
  misc_feature 1..80: note = Artificially Synthesized Probe
  source 1..80: mol_type = other DNA
catcatcatcttcaccatccacagcagcatccccaccattatcacttccaccatcaacatgatccctgccatcatcacct

SEQ ID NO: 110572 - DNA, 80 bp, synthetic construct
  misc_feature 1..80: note = Artificially Synthesized Probe
  source 1..80: mol_type = other DNA
gaataactcagatgtggccctgtcctcaaacatcttgcagactgaactaggagttgagtcatagacattaacaaccgtaa

SEQ ID NO: 110573 - DNA, 80 bp, synthetic construct
  misc_feature 1..80: note = Artificially Synthesized Probe
  source 1..80: mol_type = other DNA
ctgctgaggaagtgactctcctcgctcccaactttactggggccgggagtaccagagctaaaaatcaggcctcttccttt

SEQ ID NO: 110574 - DNA, 80 bp, synthetic construct
  misc_feature 1..80: note = Artificially Synthesized Probe
  source 1..80: mol_type = other DNA
tcagctattctcctgcaccgaggatccaaaacaaattaggaagcccaagttgggacatcttttgaccacataacacacgt

SEQ ID NO: 110575 - DNA, 80 bp, synthetic construct
  misc_feature 1..80: note = Artificially Synthesized Probe
  source 1..80: mol_type = other DNA
gtggatgtatgcatgggtgtgtgcaggtgtgtgggtgtgcagtgtccctggctgcgtgtgggtgtgcgcagtgtgcaggt

SEQ ID NO: 110576 - DNA, 80 bp, synthetic construct
  misc_feature 1..80: note = Artificially Synthesized Probe
  source 1..80: mol_type = other DNA
tgcagctccggctccggctcgtgaatgtggggttgggatgacttcactgtgcctttctgtctcgggccttagagaggtga

SEQ ID NO: 110577 - DNA, 80 bp, synthetic construct
  misc_feature 1..80: note = Artificially Synthesized Probe
  source 1..80: mol_type = other DNA
attcttaccaacagtgctgtcgccaagacaaaataacttttttgcattcagggaagcaggggggtctcacacgagcgtat

SEQ ID NO: 110578 - DNA, 80 bp, synthetic construct
  misc_feature 1..80: note = Artificially Synthesized Probe
  source 1..80: mol_type = other DNA
aatgtgaactcctggatatctgctaatgatgatgcattctgagagtctggaattatctgaagactcgtgacaccatgagg

SEQ ID NO: 110579 - DNA, 80 bp, synthetic construct
  misc_feature 1..80: note = Artificially Synthesized Probe
  source 1..80: mol_type = other DNA
cagcccaccctactttgcccgccactcttccttctgtcactcttctggctcctgtttgcgttttggcctttccagaagct

SEQ ID NO: 110580 - DNA, 80 bp, synthetic construct
  misc_feature 1..80: note = Artificially Synthesized Probe
  source 1..80: mol_type = other DNA
cagtggccgtggcctgcaggcagttgggccaatactttcatccaaagctccctatggacgagcaaagaaactttgggaca

SEQ ID NO: 110581 - DNA, 80 bp, synthetic construct
  misc_feature 1..80: note = Artificially Synthesized Probe
  source 1..80: mol_type = other DNA
cactgagtgctacaccaggctgttttcggctttacatgccttaattttctctaaccctttcaatgactcgatggtacaga

SEQ ID NO: 110582 - DNA, 80 bp, synthetic construct
  misc_feature 1..80: note = Artificially Synthesized Probe
  source 1..80: mol_type = other DNA
gccgagtgaacagaggaaccgtaagcaggtcggcttccatggagcacaggtctgggtgtggagggactgctagtgcaggg

SEQ ID NO: 110583 - DNA, 80 bp, synthetic construct
  misc_feature 1..80: note = Artificially Synthesized Probe
  source 1..80: mol_type = other DNA
ggccaattttccaccagagctccgcttcccaccaaaggtcataagaacaatcacatgagggggcaaacttttaaaaaact

SEQ ID NO: 110584 - DNA, 80 bp, synthetic construct
  misc_feature 1..80: note = Artificially Synthesized Probe
  source 1..80: mol_type = other DNA
ctatctctgcacaatctctctaggtggccctcctccagaaacagggataggggaaggtgggcttgttgaccacatctggg

SEQ ID NO: 110585 - DNA, 80 bp, synthetic construct
  misc_feature 1..80: note = Artificially Synthesized Probe
  source 1..80: mol_type = other DNA
ggacagacgtatctttagcctttaagcagcttccaaatacaggttataacagcttgcattgcattccccctaatttgaga

SEQ ID NO: 110586 - DNA, 80 bp, synthetic construct
  misc_feature 1..80: note = Artificially Synthesized Probe
  source 1..80: mol_type = other DNA
ttcaaagtttttatacatttttgcatgggattgcttgcctcttttccctttggagcactactgagatataattgacatac

SEQ ID NO: 110587 - DNA, 80 bp, synthetic construct
  misc_feature 1..80: note = Artificially Synthesized Probe
  source 1..80: mol_type = other DNA
ccaaactggaattataacaatagctcctcttttgtcttttggtcaacagaaatgagactcactgtgctgtttcatgcatc

SEQ ID NO: 110588 - DNA, 80 bp, synthetic construct
  misc_feature 1..80: note = Artificially Synthesized Probe
  source 1..80: mol_type = other DNA
accatgaagatacgtgtgtaaatctttgaatgcacacatgctttcgtttgtcttgagtagaagtgggatggagggatcac

SEQ ID NO: 110589 - DNA, 80 bp, synthetic construct
  misc_feature 1..80: note = Artificially Synthesized Probe
  source 1..80: mol_type = other DNA
ggcatatgagaggtccagctcctccacctccttgccaatacataggatggtcagtttgtattttgtttttttaaatttta

SEQ ID NO: 110590 - DNA, 80 bp, synthetic construct
  misc_feature 1..80: note = Artificially Synthesized Probe
  source 1..80: mol_type = other DNA
ttttggggtacgcatggtttgggtcacatgtatgaatttaatagtggtgaagtctcagatattaatgcacccatcatcca

SEQ ID NO: 110591 - DNA, 80 bp, synthetic construct
  misc_feature 1..80: note = Artificially Synthesized Probe
  source 1..80: mol_type = other DNA
ctttcctgagttacttcacttagaataatggcttccagctccatctaagtggctgcaagagacattattacattcttttt

SEQ ID NO: 110592 - DNA, 80 bp, synthetic construct
  misc_feature 1..80: note = Artificially Synthesized Probe
  source 1..80: mol_type = other DNA
aagggggaaacatgacaaccagtgtccgccataaatctgcatggagccccagcctctccaccactggtttaaagtgccat

SEQ ID NO: 110593 - DNA, 80 bp, synthetic construct
  misc_feature 1..80: note = Artificially Synthesized Probe
  source 1..80: mol_type = other DNA
gattctcctccttcagcctcccaagtagctgggactacaggcacccgccaccacgcctggctaattttttgtatttttag

SEQ ID NO: 110594 - DNA, 80 bp, synthetic construct
  misc_feature 1..80: note = Artificially Synthesized Probe
  source 1..80: mol_type = other DNA
caattgtgaattgtgctgcaataaacatatatctacaggtgcctttttgatatattgatttcttttcctttggatactca

SEQ ID NO: 110595 - DNA, 80 bp, synthetic construct
  misc_feature 1..80: note = Artificially Synthesized Probe
  source 1..80: mol_type = other DNA
ttttaataatagtcattcttgcaggagtatggtggtatctcattgtggttttaatttgcatttccttgatgattagtgat

SEQ ID NO: 110596 - DNA, 80 bp, synthetic construct
  misc_feature 1..80: note = Artificially Synthesized Probe
  source 1..80: mol_type = other DNA
tttgcaaatattttctcccattctgtgggttttctgataatttcttttgctatatgaagcttttcagtttaattaggtcc

SEQ ID NO: 110597 - DNA, 80 bp, synthetic construct
  misc_feature 1..80: note = Artificially Synthesized Probe
  source 1..80: mol_type = other DNA
ataaggtaagagataatgaggtaggaggcaggactcaacttcagaggccgggctgggttactgaaccaaattgaggacta

SEQ ID NO: 110598 - DNA, 80 bp, synthetic construct
  misc_feature 1..80: note = Artificially Synthesized Probe
  source 1..80: mol_type = other DNA
tcctctcccgggagggaaatgctcgcagccctctccgagttgccctgatctccttctctcccaggagggaaatgtcccct

SEQ ID NO: 110599 - DNA, 80 bp, synthetic construct
  misc_feature 1..80: note = Artificially Synthesized Probe
  source 1..80: mol_type = other DNA
gcataaaccactcttaaccctcatgtaattaaaagtagctataaatatgactgcaaagcttccctgagctgctactctct

SEQ ID NO: 110600 - DNA, 80 bp, synthetic construct
  misc_feature 1..80: note = Artificially Synthesized Probe
  source 1..80: mol_type = other DNA
ttggggctccttaccctgcatcaatagagatccagtttcattcttctacatgtggctatccagttttaccaaaaccattt

SEQ ID NO: 110601 - DNA, 80 bp, synthetic construct
  misc_feature 1..80: note = Artificially Synthesized Probe
  source 1..80: mol_type = other DNA
tgtagtatagtttggagtcaggtaatgtgatgcctccagatctgttctttttgtttaggattgcttttgctatttgggct

SEQ ID NO: 110602 - DNA, 80 bp, synthetic construct
  misc_feature 1..80: note = Artificially Synthesized Probe
  source 1..80: mol_type = other DNA
agtgtcttgtagttctctgtatagagatctttcacctccttggttaagtatattgataggtattttatttattttctgaa

SEQ ID NO: 110603 - DNA, 80 bp, synthetic construct
  misc_feature 1..80: note = Artificially Synthesized Probe
  source 1..80: mol_type = other DNA
gtaggtatatcatatcattggcaaacagcaatagtttgacttcctcttttccattttggatgccctttatttccttctgt

SEQ ID NO: 110604 - DNA, 80 bp, synthetic construct
  misc_feature 1..80: note = Artificially Synthesized Probe
  source 1..80: mol_type = other DNA
ggctgcaaacctccccattcagccctgctcccccgacaggtcatgacagggaagggggatgcccagagttaaatagggtg

SEQ ID NO: 110605 - DNA, 80 bp, synthetic construct
  misc_feature 1..80: note = Artificially Synthesized Probe
  source 1..80: mol_type = other DNA
tgaggtaagtcccttctgtgccgagtttgttgagagtttttatcatgaagtgatgctgggttttattgaatgcttttcct

SEQ ID NO: 110606 - DNA, 80 bp, synthetic construct
  misc_feature 1..80: note = Artificially Synthesized Probe
  source 1..80: mol_type = other DNA
agtatttcgtagagggtttttgcctctatgttcatcagggatattggtctatagtttgcttttgttcattattttatccc

SEQ ID NO: 110607 - DNA, 80 bp, synthetic construct
  misc_feature 1..80: note = Artificially Synthesized Probe
  source 1..80: mol_type = other DNA
tgggcaatttttaagttactgattcaatctcactgcttgttattagtctgttcagggtttttattccttcctaatttaat

SEQ ID NO: 110608 - DNA, 80 bp, synthetic construct
  misc_feature 1..80: note = Artificially Synthesized Probe
  source 1..80: mol_type = other DNA
aatctagctaatggtccatcaattttgtttatattttcaaaaaaccaattttttgtttcatcttttgtatttgtttcttt

SEQ ID NO: 110609 - DNA, 80 bp, synthetic construct
  misc_feature 1..80: note = Artificially Synthesized Probe
  source 1..80: mol_type = other DNA
tcctcttagcattgcttttgccatatcccagaggttttgataacttgtgtcactattatcattcatttcaaagaatttgt

SEQ ID NO: 110610 - DNA, 80 bp, synthetic construct
  misc_feature 1..80: note = Artificially Synthesized Probe
  source 1..80: mol_type = other DNA
aaatttattgagacttgttttgtagcctagtatacagtctttttttgtttcattactttttcttctaaaaagacgggata

SEQ ID NO: 110611 - DNA, 80 bp, synthetic construct
  misc_feature 1..80: note = Artificially Synthesized Probe
  source 1..80: mol_type = other DNA
tcaactaccacttatatgtgagaacatgcagtgtttgattttctgttcctgtgttagtttgttgaggatgatggcttcta

SEQ ID NO: 110612 - DNA, 80 bp, synthetic construct
  misc_feature 1..80: note = Artificially Synthesized Probe
  source 1..80: mol_type = other DNA
tgttatgtaaatatctgttagatccatttgttctagagtgtagactaagtccattgtttccttgttgactttctgtctca

SEQ ID NO: 110613 - DNA, 80 bp, synthetic construct
  misc_feature 1..80: note = Artificially Synthesized Probe
  source 1..80: mol_type = other DNA
tggcccttttatcatcatttaatgaccttctttgtctctttttactgttgttgctttaaagtctgttttatctgatatta

SEQ ID NO: 110614 - DNA, 80 bp, synthetic construct
  misc_feature 1..80: note = Artificially Synthesized Probe
  source 1..80: mol_type = other DNA
aatggaggatttaggccatttacattcaacactaatattgagatgtgagatattgtcccaatcatcatggagacaggaag

SEQ ID NO: 110615 - DNA, 80 bp, synthetic construct
  misc_feature 1..80: note = Artificially Synthesized Probe
  source 1..80: mol_type = other DNA
aacagccagcaaacggtctctttcataagaaacagggtcccattcactggaaatacttcaggaaaacgaacctgaaattc

SEQ ID NO: 110616 - DNA, 80 bp, synthetic construct
  misc_feature 1..80: note = Artificially Synthesized Probe
  source 1..80: mol_type = other DNA
tcaacccgtggccactgactgagttggttggcagacttccgcaaggtcccctgtgaggcagaatggcttccccaatccat

SEQ ID NO: 110617 - DNA, 80 bp, synthetic construct
  misc_feature 1..80: note = Artificially Synthesized Probe
  source 1..80: mol_type = other DNA
attctccagtgggggtgcatatcttggaggcagtgtctccccctcacactgtggggcttacagttctttgcttggctcac

SEQ ID NO: 110618 - DNA, 80 bp, synthetic construct
  misc_feature 1..80: note = Artificially Synthesized Probe
  source 1..80: mol_type = other DNA
atccactgtcttgaaaaaaaatgcccatttttaatgtgctgcttttttagtttttagagatttttatacattctgaaatt

SEQ ID NO: 110619 - DNA, 80 bp, synthetic construct
  misc_feature 1..80: note = Artificially Synthesized Probe
  source 1..80: mol_type = other DNA
tgtatcatattgataccaatttggaggtaatttctaccttaacactattgagtctttagacacatgaccatgtatatatc

SEQ ID NO: 110620 - DNA, 80 bp, synthetic construct
  misc_feature 1..80: note = Artificially Synthesized Probe
  source 1..80: mol_type = other DNA
aatttttgtgtgctgactttgcactctacagcattgctatatttactagttttagtagcttttctgtaggttccaccaaa

SEQ ID NO: 110621 - DNA, 80 bp, synthetic construct
  misc_feature 1..80: note = Artificially Synthesized Probe
  source 1..80: mol_type = other DNA
ggccaacatggtgaaacctagtctctactgaaaatgcaaaaattagccgggcatggtggtgggtgcctataatcccagct

SEQ ID NO: 110622 - DNA, 80 bp, synthetic construct
  misc_feature 1..80: note = Artificially Synthesized Probe
  source 1..80: mol_type = other DNA
aaaaaaaagatcttcaatgcagtgttgaattgaagaggtaagagcagacatcctcgtctaatgccagattttaagtggaa

SEQ ID NO: 110623 - DNA, 80 bp, synthetic construct
  misc_feature 1..80: note = Artificially Synthesized Probe
  source 1..80: mol_type = other DNA
gtaactatggtgagttatgttggttgatgtttaaatgttcgatataccctgcatatctgggataaatctgccttgattat

SEQ ID NO: 110624 - DNA, 80 bp, synthetic construct
  misc_feature 1..80: note = Artificially Synthesized Probe
  source 1..80: mol_type = other DNA
gcccagcatttgatctagtttgggaaatattctatataacatactcaaaaagaatgtgtgtttagcagtttttaggtgta

SEQ ID NO: 110625 - DNA, 80 bp, synthetic construct
  misc_feature 1..80: note = Artificially Synthesized Probe
  source 1..80: mol_type = other DNA
taatgatcatgatcgacctgtatgttcctctctttagtactctcatatatttcctttatgtatttgaagctctgaaattg

SEQ ID NO: 110626 - DNA, 80 bp, synthetic construct
  misc_feature 1..80: note = Artificially Synthesized Probe
  source 1..80: mol_type = other DNA
aacctctcctaaaagccatgtcttctagtcaggaaactgtccagtcaccattgctggatgttctacaagtcacggaaccc

SEQ ID NO: 110627 - DNA, 80 bp, synthetic construct
  misc_feature 1..80: note = Artificially Synthesized Probe
  source 1..80: mol_type = other DNA
accagctttcctgcctttcgagtttccatcgtacacattttccatcctttaggtctaagttgccttcttcgcccaggctt

SEQ ID NO: 110628 - DNA, 80 bp, synthetic construct
  misc_feature 1..80: note = Artificially Synthesized Probe
  source 1..80: mol_type = other DNA
ttagaaagattcaacagatctttttccaccatgctcccttgtccccagtcttcagaaggccacatggggcactccataga

SEQ ID NO: 110629 - DNA, 80 bp, synthetic construct
  misc_feature 1..80: note = Artificially Synthesized Probe
  source 1..80: mol_type = other DNA
tttcttaaaatttaggccgaattctccccacttcctgtgactggcttctgcttcttccattccaatgcgcatgaaagaag

SEQ ID NO: 110630 - DNA, 80 bp, synthetic construct
  misc_feature 1..80: note = Artificially Synthesized Probe
  source 1..80: mol_type = other DNA
gggagggggatagtctcctggcagatttctcccgggggctcactcatgtggtcggggtgggaggagaatgggctcctgac

SEQ ID NO: 110631 - DNA, 80 bp, synthetic construct
  misc_feature 1..80: note = Artificially Synthesized Probe
  source 1..80: mol_type = other DNA
cacctgccccctccgtcagaagcccgcctgggccacctgccccctctggcatgaacgcacctgggcccacctgccccctc

SEQ ID NO: 110632 - DNA, 80 bp, synthetic construct
  misc_feature 1..80: note = Artificially Synthesized Probe
  source 1..80: mol_type = other DNA
tttctgtgttccctccatcacagcacttgctttaattttttaattatattttttgcttgcttgttttctccctcctaccc

SEQ ID NO: 110633 - DNA, 80 bp, synthetic construct
  misc_feature 1..80: note = Artificially Synthesized Probe
  source 1..80: mol_type = other DNA
tcagtaacagagtggacagggaatttatggtgttctgcatgatgagttcaaggactgtgaactggtgctaccacagtcaa

SEQ ID NO: 110634 - DNA, 80 bp, synthetic construct
  misc_feature 1..80: note = Artificially Synthesized Probe
  source 1..80: mol_type = other DNA
aaataaaataattctgttatgacgtcaccagcatgaaggccctgaaaggcaatatgtttaggatatttctccatctacgc

SEQ ID NO: 110635 - DNA, 80 bp, synthetic construct
  misc_feature 1..80: note = Artificially Synthesized Probe
  source 1..80: mol_type = other DNA
atctctaagtccctatatttacggggcagcaaaatctgcacggcagcgctgcagcctctggtcacgcacttcctgtgctt

SEQ ID NO: 110636 - DNA, 80 bp, synthetic construct
  misc_feature 1..80: note = Artificially Synthesized Probe
  source 1..80: mol_type = other DNA
gtgctcattttctgaataaccgtttgacagctgtgctaaatgtctgtgtgctggaatgaccacggagctcattaattcaa

SEQ ID NO: 110637 - DNA, 80 bp, synthetic construct
  misc_feature 1..80: note = Artificially Synthesized Probe
  source 1..80: mol_type = other DNA
tttgccgcgtccgtgccacccaagggaaagcctggggcccctgtcccggcagtgcacttacgatggggctagcgttgatg

SEQ ID NO: 110638 - DNA, 80 bp, synthetic construct
  misc_feature 1..80: note = Artificially Synthesized Probe
  source 1..80: mol_type = other DNA
ttatcagaaggtggaccctggctgctggtggaatatttgacatgaccggtgcccacgcccctctcccattcctctttctt

SEQ ID NO: 110639 - DNA, 80 bp, synthetic construct
  misc_feature 1..80: note = Artificially Synthesized Probe
  source 1..80: mol_type = other DNA
accacgctcgccccctgtactgggaaggccgccacgctcgccccgcgatggggaaggccgccacgctcgccgcctgatgg

SEQ ID NO: 110640 - DNA, 80 bp, synthetic construct
  misc_feature 1..80: note = Artificially Synthesized Probe
  source 1..80: mol_type = other DNA
gctcgccccgcgatggggaaggccgccacgctcgccccctgatggggaaggccgccacgctcgcccccgatggggaaggc

SEQ ID NO: 110641 - DNA, 80 bp, synthetic construct
  misc_feature 1..80: note = Artificially Synthesized Probe
  source 1..80: mol_type = other DNA
cctgatggggaaggccgccacgctcgccccctgatggggaaggccgccacgctcgccccctgtactggaaaggccgccac

SEQ ID NO: 110642 - DNA, 80 bp, synthetic construct
  misc_feature 1..80: note = Artificially Synthesized Probe
  source 1..80: mol_type = other DNA
agacttcagtaaatacaactggttagtgtgacgaggccacgggccctttggcctaatgagcactgagctgctgagtccag

SEQ ID NO: 110643 - DNA, 80 bp, synthetic construct
  misc_feature 1..80: note = Artificially Synthesized Probe
  source 1..80: mol_type = other DNA
aattgctcaatatctaccaaagaccttcactctcaacgagttcctgcaatttgctacggtttgtttctaatgtgtggatg

SEQ ID NO: 110644 - DNA, 80 bp, synthetic construct
  misc_feature 1..80: note = Artificially Synthesized Probe
  source 1..80: mol_type = other DNA
aataactgaaaccgaaggaggagcatgatgatgggttcaaaatggaacaactgaggctcccattgaatgaaaccaaatgc

SEQ ID NO: 110645 - DNA, 80 bp, synthetic construct
  misc_feature 1..80: note = Artificially Synthesized Probe
  source 1..80: mol_type = other DNA
aaactgcttcacagaaaagtgtcaactgatttcccttctctcaaacttcttccgagtctctgaaacttttaatgacgcct

SEQ ID NO: 110646 - DNA, 80 bp, synthetic construct
  misc_feature 1..80: note = Artificially Synthesized Probe
  source 1..80: mol_type = other DNA
cttctgataaagacacagcggggcagaggaggaggacaaagcaatgatttcagagctggaggtgctaaattaccaacgtt

SEQ ID NO: 110647 - DNA, 80 bp, synthetic construct
  misc_feature 1..80: note = Artificially Synthesized Probe
  source 1..80: mol_type = other DNA
ctcaacctaatttctatttcattttttaaagattattttatcaacgatagttacggttacagctattgctgactgggcac

SEQ ID NO: 110648 - DNA, 80 bp, synthetic construct
  misc_feature 1..80: note = Artificially Synthesized Probe
  source 1..80: mol_type = other DNA
ccagcctccagggtccatcacacagcagtgtgggactcccaaacagcctccagggcctatagcccagcagtgtgggaccc

SEQ ID NO: 110649 - DNA, 80 bp, synthetic construct
  misc_feature 1..80: note = Artificially Synthesized Probe
  source 1..80: mol_type = other DNA
ccttctgcatccacaaaatccagcaggatgtctggcgcaccagacgtgcttagttgctctcagttaatgaataaaaactt

SEQ ID NO: 110650 - DNA, 80 bp, synthetic construct
  misc_feature 1..80: note = Artificially Synthesized Probe
  source 1..80: mol_type = other DNA
taaatttagcctgtttaaaatagtgttaagtggaccagaccctctagggttaggcccacacagagagactcccacaggct

SEQ ID NO: 110651 - DNA, 80 bp, synthetic construct
  misc_feature 1..80: note = Artificially Synthesized Probe
  source 1..80: mol_type = other DNA
ctgaagacccccaccctccaccatgaggggtgatttcaaccaaccaggaaacacagtccatgatcaggaaaaacacaaat

SEQ ID NO: 110652 - DNA, 80 bp, synthetic construct
  misc_feature 1..80: note = Artificially Synthesized Probe
  source 1..80: mol_type = other DNA
ctgaagaggcaaggccacagcaaagatggctgcccaggagctgccctcggaaaggctccagagaaccatggggccaaggc

SEQ ID NO: 110653 - DNA, 80 bp, synthetic construct
  misc_feature 1..80: note = Artificially Synthesized Probe
  source 1..80: mol_type = other DNA
ggattgagcttagtggccacgcgtcctctgggaggactctacctttcgaggtctgtgggggttgcccagagttaacttaa

SEQ ID NO: 110654 - DNA, 80 bp, synthetic construct
  misc_feature 1..80: note = Artificially Synthesized Probe
  source 1..80: mol_type = other DNA
cttagaaaggaaagtgtgtcaaattagagctgatgtaactaacgtttggcagaaaaggagtgtgtgagcgtcgccatcaa

SEQ ID NO: 110655 - DNA, 80 bp, synthetic construct
  misc_feature 1..80: note = Artificially Synthesized Probe
  source 1..80: mol_type = other DNA
aggcaatgtgggacctgtgaactctggcctaacaagtcgtcataaaaatcatgcctgcttttccatttacaaaatttact

SEQ ID NO: 110656 - DNA, 80 bp, synthetic construct
  misc_feature 1..80: note = Artificially Synthesized Probe
  source 1..80: mol_type = other DNA
tcaccttgtgttttggtgcccagaccctcatgcccacaggcagatggagcccttacgctgccctgggctgcccccggggc

SEQ ID NO: 110657 - DNA, 80 bp, synthetic construct
  misc_feature 1..80: note = Artificially Synthesized Probe
  source 1..80: mol_type = other DNA
tcctctacctccctggtgtgcatctgtggtttaaatggtgggctttctggagtcacgacaccttgtcccaagaaagatcc

SEQ ID NO: 110658 - DNA, 80 bp, synthetic construct
  misc_feature 1..80: note = Artificially Synthesized Probe
  source 1..80: mol_type = other DNA
aacaggcgcaaagccaagaggagccagcgactaaggaaacatgcccaggtacctgcaccctgaaggaaaagccaaccccg

SEQ ID NO: 110659 - DNA, 80 bp, synthetic construct
  misc_feature 1..80: note = Artificially Synthesized Probe
  source 1..80: mol_type = other DNA
acctcctctcgctgccaacgctgtgttttgagggcctgaaaaagcaaaagaaaccagacatcaaccgcatgtttgctggt

SEQ ID NO: 110660 - DNA, 80 bp, synthetic construct
  misc_feature 1..80: note = Artificially Synthesized Probe
  source 1..80: mol_type = other DNA
gctcagcagaatggagatatcctggtgttttcccccacgtggagttcacacaccaaggtcaggggttcctctgcagaatt

SEQ ID NO: 110661 - DNA, 80 bp, synthetic construct
  misc_feature 1..80: note = Artificially Synthesized Probe
  source 1..80: mol_type = other DNA
gcctcgtggttgtggggatggacgattgacccctgctgagagcagaagacaggaagcaaaagcaatacatgggaaacaag

SEQ ID NO: 110662 - DNA, 80 bp, synthetic construct
  misc_feature 1..80: note = Artificially Synthesized Probe
  source 1..80: mol_type = other DNA
aagctggaaaaggcaggaaccaggttctcgcctgataaatgtgcattgttttaggccttaggttgatgtacttcgccaca

SEQ ID NO: 110663 - DNA, 80 bp, synthetic construct
  misc_feature 1..80: note = Artificially Synthesized Probe
  source 1..80: mol_type = other DNA
caaacacatgggacgcttcccgtgggcagacacatgtggtgcccaccctgctgagggcggcaggggtagggccagcgagg

SEQ ID NO: 110664 - DNA, 80 bp, synthetic construct
  misc_feature 1..80: note = Artificially Synthesized Probe
  source 1..80: mol_type = other DNA
atcaccagcttgtgcagccacacggaaaggaagagcagaaccagggagattcactggaaaagtcgcggtaacgcccaaca

SEQ ID NO: 110665 - DNA, 80 bp, synthetic construct
  misc_feature 1..80: note = Artificially Synthesized Probe
  source 1..80: mol_type = other DNA
gctgtggcggagagcttgcctgagccacggggcagcgtctcagcctgggacacgatgggcatggcctccctagggatggg

SEQ ID NO: 110666 - DNA, 80 bp, synthetic construct
  misc_feature 1..80: note = Artificially Synthesized Probe
  source 1..80: mol_type = other DNA
taggagacgcctctaccagccaggtttaagaacacctgcgtgagtgactgcaccccacctccacattccagcaaggctct

SEQ ID NO: 110667 - DNA, 80 bp, synthetic construct
  misc_feature 1..80: note = Artificially Synthesized Probe
  source 1..80: mol_type = other DNA
caggcaacagaggaagaccctgtttcaacaacaacaaaaaaagtgtgtgcacgcgcgcgcatgtgcgtgtgtgagtttgt

SEQ ID NO: 110668 - DNA, 80 bp, synthetic construct
  misc_feature 1..80: note = Artificially Synthesized Probe
  source 1..80: mol_type = other DNA
ttagtttgtataattaattgagtgcgtcatttatgtccataaaagaacgggcatcaccattaaaaagatgggccagtctg

SEQ ID NO: 110669 - DNA, 80 bp, synthetic construct
  misc_feature 1..80: note = Artificially Synthesized Probe
  source 1..80: mol_type = other DNA
acgccacaggccccggcgtcatgccccactgccagcacaagactcaggcctccctcataacaggctttacaggtgcggtc

SEQ ID NO: 110670 - DNA, 80 bp, synthetic construct
  misc_feature 1..80: note = Artificially Synthesized Probe
  source 1..80: mol_type = other DNA
ccaaattacagatagtgtataactgtcacgtttaactgaccacaggttgcctccaagggacatcacaccacttaacatat

SEQ ID NO: 110671 - DNA, 80 bp, synthetic construct
  misc_feature 1..80: note = Artificially Synthesized Probe
  source 1..80: mol_type = other DNA
catctatcggtggatgcagttgccttcgcgtgttctctcattggtttccatctggcacctttcccttctgccagaacggc

SEQ ID NO: 110672 - DNA, 80 bp, synthetic construct
  misc_feature 1..80: note = Artificially Synthesized Probe
  source 1..80: mol_type = other DNA
gagtaagagacaaataaaatgcagataaagaggaaatggaggaaaaatgtactggtggagactggcataaaaactcgctc

SEQ ID NO: 110673 - DNA, 80 bp, synthetic construct
  misc_feature 1..80: note = Artificially Synthesized Probe
  source 1..80: mol_type = other DNA
tttaaaaatgctttccatcgtcttctggcctggagcattctcaaggagaaacctgcagtggccttcatcatctcatctct

SEQ ID NO: 110674 - DNA, 80 bp, synthetic construct
  misc_feature 1..80: note = Artificially Synthesized Probe
  source 1..80: mol_type = other DNA
aaacaattttcctcattatttcttcaaatgatttttctgttcctgtctctcccgccttgggactccagttatacagatat

SEQ ID NO: 110675 - DNA, 80 bp, synthetic construct
  misc_feature 1..80: note = Artificially Synthesized Probe
  source 1..80: mol_type = other DNA
tcctgtctcctacttattgtgtctgtgtcagttctgtgtctacactgatgaattttatgagttgcattttcctgctcctt

SEQ ID NO: 110676 - DNA, 80 bp, synthetic construct
  misc_feature 1..80: note = Artificially Synthesized Probe
  source 1..80: mol_type = other DNA
gggaccagttcaaccctctcggttcttacttttaagtcttgtttggcagtatcagagcagcaattatctatgacaaatta

SEQ ID NO: 110677 - DNA, 80 bp, synthetic construct
  misc_feature 1..80: note = Artificially Synthesized Probe
  source 1..80: mol_type = other DNA
actgtttgctctcatttttttggatggttcttttccctcatagacacaaggtcatcagtcatctaccaaatcctcagcag

SEQ ID NO: 110678 - DNA, 80 bp, synthetic construct
  misc_feature 1..80: note = Artificially Synthesized Probe
  source 1..80: mol_type = other DNA
cgccacacagctgcgtcccctcccaaaatggccctccaccatgggggtctgcctcacccacgtttataccccatctaggg

SEQ ID NO: 110679 - DNA, 80 bp, synthetic construct
  misc_feature 1..80: note = Artificially Synthesized Probe
  source 1..80: mol_type = other DNA
acagagtctgctgtccagacacccaaccgagatgtagctccccgggcacccctggggccctgcccacggctagtgaggat

SEQ ID NO: 110680 - DNA, 80 bp, synthetic construct
  misc_feature 1..80: note = Artificially Synthesized Probe
  source 1..80: mol_type = other DNA
aaatacaaaggtagacttatggctctcttagaaatacgacactgaaggacatcatccccagcagagctccacaatgaggg

SEQ ID NO: 110681 - DNA, 80 bp, synthetic construct
  misc_feature 1..80: note = Artificially Synthesized Probe
  source 1..80: mol_type = other DNA
ctttcacagaatttgatgctacattctgaacaaaatcgtattcagaaaaagtctgggtatgtctccaaacacagcactgt

SEQ ID NO: 110682 - DNA, 80 bp, synthetic construct
  misc_feature 1..80: note = Artificially Synthesized Probe
  source 1..80: mol_type = other DNA
cttgctgtggccgccctcctctttgctctgtttttagaaacttcgacaagcagagctcacagaggagtggaagccgcaag

SEQ ID NO: 110683 - DNA, 80 bp, synthetic construct
  misc_feature 1..80: note = Artificially Synthesized Probe
  source 1..80: mol_type = other DNA
aagaagtgtcttctatccaaacatgaccatctggtacttgtatatgggtctttagtgtgatttagaaacactttaggaaa

SEQ ID NO: 110684 - DNA, 80 bp, synthetic construct
  misc_feature 1..80: note = Artificially Synthesized Probe
  source 1..80: mol_type = other DNA
taggtgtgtgatacctgcatggggcttataaaaaaaatcccatttttgcttgattatctcaattgataaacccaccatgt

SEQ ID NO: 110685 - DNA, 80 bp, synthetic construct
  misc_feature 1..80: note = Artificially Synthesized Probe
  source 1..80: mol_type = other DNA
cacacccttcttcacaaggtggcaggagagagaagtgcaaggagcaaaggggaaagagtcccttataaaaccatcagatc

SEQ ID NO: 110686 - DNA, 80 bp, synthetic construct
  misc_feature 1..80: note = Artificially Synthesized Probe
  source 1..80: mol_type = other DNA
aagttacactgatacagatgtaacaggcatataaattaccaaggcttttgcagttctttgcatctcaaatcatggctata

SEQ ID NO: 110687 - DNA, 80 bp, synthetic construct
  misc_feature 1..80: note = Artificially Synthesized Probe
  source 1..80: mol_type = other DNA
atgcaaatggaaccacctcataaatgtatctttaaattgtcgtattcatctttgcttcgcctctgtccatgcctggggac

SEQ ID NO: 110688 - DNA, 80 bp, synthetic construct
  misc_feature 1..80: note = Artificially Synthesized Probe
  source 1..80: mol_type = other DNA
aatgttttacacttagtagctattcccttctccattggcacacactggccttaggctcacgataatatgagatagtctag

SEQ ID NO: 110689 - DNA, 80 bp, synthetic construct
  misc_feature 1..80: note = Artificially Synthesized Probe
  source 1..80: mol_type = other DNA
tggtatttgttgtccctgttcctgcctcaggagcatttagcatgatccctggttctctttagccattagcatgatccctg

SEQ ID NO: 110690 - DNA, 80 bp, synthetic construct
  misc_feature 1..80: note = Artificially Synthesized Probe
  source 1..80: mol_type = other DNA
cccttagcatgttcttctcaggttctggcttctcaggtcctccttagcccttagcatgttcttctcaggttctggcttct

SEQ ID NO: 110691 - DNA, 80 bp, synthetic construct
  misc_feature 1..80: note = Artificially Synthesized Probe
  source 1..80: mol_type = other DNA
tcccaggttcttggttatcttagcccttagcatgttctcaagttctcagttctcaggttccccttccttgactctcttag

SEQ ID NO: 110692 - DNA, 80 bp, synthetic construct
  misc_feature 1..80: note = Artificially Synthesized Probe
  source 1..80: mol_type = other DNA
cgctggtgaaacattttctattcgacccaaattccagggaggaaacagctctcctgaggggcatcttttttaccacaacg

SEQ ID NO: 110693 - DNA, 80 bp, synthetic construct
  misc_feature 1..80: note = Artificially Synthesized Probe
  source 1..80: mol_type = other DNA
tagcgtgttctcaggttcctggttctcaggttctcttagcctttagcatgttctcaggttcctggtgaccccttaggtgc

SEQ ID NO: 110694 - DNA, 80 bp, synthetic construct
  misc_feature 1..80: note = Artificially Synthesized Probe
  source 1..80: mol_type = other DNA
tggtaagcccaaaaacagggctggggattctgaagacttcattctaatgtcgcctttatttcatgaatggatgattggtt

SEQ ID NO: 110695 - DNA, 80 bp, synthetic construct
  misc_feature 1..80: note = Artificially Synthesized Probe
  source 1..80: mol_type = other DNA
ggccacgtttggctcacactaccagcctgggtcccatgcctgccaagggcgagtcaggcatggagtggcgaggggtgtgt

SEQ ID NO: 110696 - DNA, 80 bp, synthetic construct
  misc_feature 1..80: note = Artificially Synthesized Probe
  source 1..80: mol_type = other DNA
atggagtggagaaagccaggtgacattcttcgttagtgtagctacccatgcaagaattcaaaggcttgggcagatcacgc

SEQ ID NO: 110697 - DNA, 80 bp, synthetic construct
  misc_feature 1..80: note = Artificially Synthesized Probe
  source 1..80: mol_type = other DNA
cagaacatgatccctttaatgaggaatgaaacaaatccattactataaaatcgcttgaaaatctagaggtgatggccaca

SEQ ID NO: 110698 - DNA, 80 bp, synthetic construct
  misc_feature 1..80: note = Artificially Synthesized Probe
  source 1..80: mol_type = other DNA
acccaaggggctttggaaacaccacttgatcttataaaagctgagtttcaaacagaaccagtctcaaaggtcaaattctg

SEQ ID NO: 110699 - DNA, 80 bp, synthetic construct
  misc_feature 1..80: note = Artificially Synthesized Probe
  source 1..80: mol_type = other DNA
agcccccgtgtgctaagcagcagagcctcagagcctatgaagctaaacacatcaacccccaaagaaaactcacagattac

SEQ ID NO: 110700 - DNA, 80 bp, synthetic construct
  misc_feature 1..80: note = Artificially Synthesized Probe
  source 1..80: mol_type = other DNA
aagcgccaattgaagattaagtatggtatcaattaggccaaagaaaacctcaaaattaccaaagagtaaaagttgaacaa

SEQ ID NO: 110701 - DNA, 80 bp, synthetic construct
  misc_feature 1..80: note = Artificially Synthesized Probe
  source 1..80: mol_type = other DNA
tgacaattacagataatttagaacaaaagcaagtgagaattcatcagttatagaatgatgttaaaattatgctcaaaagc

SEQ ID NO: 110702 - DNA, 80 bp, synthetic construct
  misc_feature 1..80: note = Artificially Synthesized Probe
  source 1..80: mol_type = other DNA
tttttttttgagacagggtctcactctctctcccaggctagagtgctgtgtgtgatcatgactcactgcagcctcaatcc

SEQ ID NO: 110703 - DNA, 80 bp, synthetic construct
  misc_feature 1..80: note = Artificially Synthesized Probe
  source 1..80: mol_type = other DNA
cttgtccaaattcctatctaagaggtctgggaagtcataccccacaaaccataaattctcatcagatgggttttatttga

SEQ ID NO: 110704 - DNA, 80 bp, synthetic construct
  misc_feature 1..80: note = Artificially Synthesized Probe
  source 1..80: mol_type = other DNA
tactttcccctttgttttccttccttcctttccagatccaggagataatcaaccaagagccaggcacccttttaggtcca

SEQ ID NO: 110705 - DNA, 80 bp, synthetic construct
  misc_feature 1..80: note = Artificially Synthesized Probe
  source 1..80: mol_type = other DNA
ttgaattcacctatagcctggaagcccctgctttgagttgtcccaccttctgaaccaaaccaatgtatttgattgatgtc

SEQ ID NO: 110706 - DNA, 80 bp, synthetic construct
  misc_feature 1..80: note = Artificially Synthesized Probe
  source 1..80: mol_type = other DNA
tcctggaagtttggagataccaggaaccacagggtcccaaagatggagtcacaggcctagctccgggagctcccaggtct

SEQ ID NO: 110707 - DNA, 80 bp, synthetic construct
  misc_feature 1..80: note = Artificially Synthesized Probe
  source 1..80: mol_type = other DNA
caagagaatagcatccactacactgcatttacaaatgtggaaatcgctattaaaggatagcttataaatatcccaaatca

SEQ ID NO: 110708 - DNA, 80 bp, synthetic construct
  misc_feature 1..80: note = Artificially Synthesized Probe
  source 1..80: mol_type = other DNA
aaatgttaggaaaaaaagaaaaacgatcacatttccatgaggaaatactgtgggcaactgttgaggaagacgatgggcca

SEQ ID NO: 110709 - DNA, 80 bp, synthetic construct
  misc_feature 1..80: note = Artificially Synthesized Probe
  source 1..80: mol_type = other DNA
ggcctggggaagagctggggaacatgcccagactcctctgccctccatgctgggtgcagcttgttccaaaccccaccaaa

SEQ ID NO: 110710 - DNA, 80 bp, synthetic construct
  misc_feature 1..80: note = Artificially Synthesized Probe
  source 1..80: mol_type = other DNA
aacactcacaaagaaagaatttagaaatccaacctacagaatggtaagagctgtttttatttgtaaccatagctagtgcc

SEQ ID NO: 110711 - DNA, 80 bp, synthetic construct
  misc_feature 1..80: note = Artificially Synthesized Probe
  source 1..80: mol_type = other DNA
attccaatctcggccagatgtggtggctcatgcctgtaatcctagcactctgggaggccaaggtgggcggatcatgaggt

SEQ ID NO: 110712 - DNA, 80 bp, synthetic construct
  misc_feature 1..80: note = Artificially Synthesized Probe
  source 1..80: mol_type = other DNA
aagatcgtgccactgcactccggcctaggtgatgaagcaagagccaaaaaaaaaaaaaaaaaaaaaaaaaagaagaggaa

SEQ ID NO: 110713 - DNA, 80 bp, synthetic construct
  misc_feature 1..80: note = Artificially Synthesized Probe
  source 1..80: mol_type = other DNA
aaactggcaatttttccaaatgaccacatttaacgttgtttagaaggcacaatccaggcgcctctccatggttgttgctg

SEQ ID NO: 110714 - DNA, 80 bp, synthetic construct
  misc_feature 1..80: note = Artificially Synthesized Probe
  source 1..80: mol_type = other DNA
tcccttgcttggttttcccaattcttccagccctctattttttgcccttcttggccgtccaacccatccctatacttgat

SEQ ID NO: 110715 - DNA, 80 bp, synthetic construct
  misc_feature 1..80: note = Artificially Synthesized Probe
  source 1..80: mol_type = other DNA
ataacagcacattctctttgataaaggaggtattaaaggtagatacaccaggcacagaagcacaaagaggcagcccctgc

SEQ ID NO: 110716 - DNA, 80 bp, synthetic construct
  misc_feature 1..80: note = Artificially Synthesized Probe
  source 1..80: mol_type = other DNA
cctcggtgtgcgccgcttgctggggaaagacgcagcccccgccctcagtgtgtgcggcgttctggggaaagaagcagccg

SEQ ID NO: 110717 - DNA, 80 bp, synthetic construct
  misc_feature 1..80: note = Artificially Synthesized Probe
  source 1..80: mol_type = other DNA
acaagtggaggatgagcaagatgaagaggggtttatcgagcaatagaacagctcagtctcccacagggggcagctccttt

SEQ ID NO: 110718 - DNA, 80 bp, synthetic construct
  misc_feature 1..80: note = Artificially Synthesized Probe
  source 1..80: mol_type = other DNA
cagttctccacacgttctcactcttgatcctgccaggacacttaactgctttccctatcagatggccatgagcatgaaag

SEQ ID NO: 110719 - DNA, 80 bp, synthetic construct
  misc_feature 1..80: note = Artificially Synthesized Probe
  source 1..80: mol_type = other DNA
tttaaaaaacatgaaaaatagcacaatggctcaggaatccgacagtgccagctttcttactgtggtttgtctttagacta

SEQ ID NO: 110720 - DNA, 80 bp, synthetic construct
  misc_feature 1..80: note = Artificially Synthesized Probe
  source 1..80: mol_type = other DNA
agtatacgttgctatgctctgggaaaggatgataaagactttcacaattctgttttttgtctaaagcaaaaataatttct

SEQ ID NO: 110721 - DNA, 80 bp, synthetic construct
  misc_feature 1..80: note = Artificially Synthesized Probe
  source 1..80: mol_type = other DNA
cttacagacatcctaactttctgaaacgtctgcaccagaaagatggtgggtgctttgctacattaaaacaaacaaacaaa

SEQ ID NO: 110722 - DNA, 80 bp, synthetic construct
  misc_feature 1..80: note = Artificially Synthesized Probe
  source 1..80: mol_type = other DNA
tgcaagttcctggtccatcacatactgagtatagtcatcctgccacgtgaaacctgtggacaaaaattgcaaaaattatg

SEQ ID NO: 110723 - DNA, 80 bp, synthetic construct
  misc_feature 1..80: note = Artificially Synthesized Probe
  source 1..80: mol_type = other DNA
aaaaagaaaactgatgctctgctgcattaatagtaataaaaaggcttgggtgagagtggagaaagctggccaaatagaag

SEQ ID NO: 110724 - DNA, 80 bp, synthetic construct
  misc_feature 1..80: note = Artificially Synthesized Probe
  source 1..80: mol_type = other DNA
gaattgctgatgtcacccctcacccatccccctgcagtggctgtgtgccccagagagagaacgcatgcacttgggagaga

SEQ ID NO: 110725 - DNA, 80 bp, synthetic construct
  misc_feature 1..80: note = Artificially Synthesized Probe
  source 1..80: mol_type = other DNA
agcctcaccaccatgggctaaagtgctctggggtcctaaataaacttgaaggctgcctatgatggaaggactacaattcc

SEQ ID NO: 110726 - DNA, 80 bp, synthetic construct
  misc_feature 1..80: note = Artificially Synthesized Probe
  source 1..80: mol_type = other DNA
ttgaggagaggagagggaagagtaaagaggactttatcttacaacttagataactgctcagccaagtaggatagggcact

SEQ ID NO: 110727 - DNA, 80 bp, synthetic construct
  misc_feature 1..80: note = Artificially Synthesized Probe
  source 1..80: mol_type = other DNA
acagtggtacccaggcagtaccccatgggccttgggtaagactcagagatgtcctggcttcaggtctgatctggtacagt

SEQ ID NO: 110728 - DNA, 80 bp, synthetic construct
  misc_feature 1..80: note = Artificially Synthesized Probe
  source 1..80: mol_type = other DNA
atccaagactgccaaggtgatacatctgtgagtctgaaacagccatgaaattactgggctttgagtggcccctaatgcag

SEQ ID NO: 110729 - DNA, 80 bp, synthetic construct
  misc_feature 1..80: note = Artificially Synthesized Probe
  source 1..80: mol_type = other DNA
cccacgagtggccgtgggcaggcctggaaaaggcaccatgagttcccactctgatccacaggacttgcagcccagccccc

SEQ ID NO: 110730 - DNA, 80 bp, synthetic construct
  misc_feature 1..80: note = Artificially Synthesized Probe
  source 1..80: mol_type = other DNA
ggttagttacatacgtatacatgtgccatgctggtgtgctgcacccactaactcgtcatctagcattaggtatatctccc

SEQ ID NO: 110731 - DNA, 80 bp, synthetic construct
  misc_feature 1..80: note = Artificially Synthesized Probe
  source 1..80: mol_type = other DNA
tggttttttgttcttgcgatagtttactgagaatgatggtttccaatttcatccatgtccctacaaaggacatgcactca

SEQ ID NO: 110732 - DNA, 80 bp, synthetic construct; identical to SEQ ID NO: 28003
  misc_feature 1..80: note = Artificially Synthesized Probe
  source 1..80: mol_type = other DNA

SEQ ID NO: 110733 - DNA, 80 bp, synthetic construct
  misc_feature 1..80: note = Artificially Synthesized Probe
  source 1..80: mol_type = other DNA
agtgaacaggcaacctacaaaatgggagaaaattttcgcaacctactcatctgacaaagggctaatatccagaatctaca

SEQ ID NO: 110734 - DNA, 80 bp, synthetic construct
  misc_feature 1..80: note = Artificially Synthesized Probe
  source 1..80: mol_type = other DNA
agagcatcaagactatccaggaaaacatgacctcaccaaacgaactaaataaggcaccagggaccaatcctggagagaca

SEQ ID NO: 110735 - DNA, 80 bp, synthetic construct
  misc_feature 1..80: note = Artificially Synthesized Probe
  source 1..80: mol_type = other DNA
ttgaaaaacataactgacccattgcagaatgcctcagactctcttgacagcagagttgaccaagcaagacaaagaattag

SEQ ID NO: 110736 - DNA, 80 bp, synthetic construct
  misc_feature 1..80: note = Artificially Synthesized Probe
  source 1..80: mol_type = other DNA
agaaagtttagttgaaaggataataatgagaacttctcgaacctagagaaagatgtcagtgttcaagtataggaaggcta

SEQ ID NO: 110737 - DNA, 80 bp, synthetic construct
  misc_feature 1..80: note = Artificially Synthesized Probe
  source 1..80: mol_type = other DNA
ttttcagtggaaactttacaggccaggaaacgggattgttatttaaagtgttaaaggaaagaaacccttttattctgaaa

SEQ ID NO: 110738 - DNA, 80 bp, synthetic construct
  misc_feature 1..80: note = Artificially Synthesized Probe
  source 1..80: mol_type = other DNA
catctaaaggtacaaaactcactggtaatagtaagtacacagaaaaacacagaatatcataacactgtaattgtggtgtg

SEQ ID NO: 110739 - DNA, 80 bp, synthetic construct
  misc_feature 1..80: note = Artificially Synthesized Probe
  source 1..80: mol_type = other DNA
ttgttagtttgcttatgtaatcaatgttaagttgtcatccgtttaaaataatgggttataagatgttatttgcaagcctt

SEQ ID NO: 110740 - DNA, 80 bp, synthetic construct
  misc_feature 1..80: note = Artificially Synthesized Probe
  source 1..80: mol_type = other DNA
cttccctcccatgcttgttggtgcccaaagtccagagggggctgaggtggcagggggctggtgtgtcagcactgcccaga

SEQ ID NO: 110741 - DNA, 80 bp, synthetic construct
  misc_feature 1..80: note = Artificially Synthesized Probe
  source 1..80: mol_type = other DNA
atggcaagagtaagttcttacctatcaataataacaaatacacatggactaaactctccaatcaaaacacacagagtggt

SEQ ID NO: 110742 - DNA, 80 bp, synthetic construct
  misc_feature 1..80: note = Artificially Synthesized Probe
  source 1..80: mol_type = other DNA
tagatttcaagacaaaactagcaaaagagacaaagaaggtcataatgataaaggggtaaattgagcaagaggacataaca

SEQ ID NO: 110743 - DNA, 80 bp, synthetic construct
  misc_feature 1..80: note = Artificially Synthesized Probe
  source 1..80: mol_type = other DNA
atatattgaccaagctgcactgttaaccaaatggactgaattgacatttacagaacatttcattcaatggctatgaaatc

SEQ ID NO: 110744 - DNA, 80 bp, synthetic construct
  misc_feature 1..80: note = Artificially Synthesized Probe
  source 1..80: mol_type = other DNA
ggaaactatacaaacacatggaaattaaacaatatgcttctgaatgaccagtgggtcaatgaggaaattaaggagaaaat

SEQ ID NO: 110745 - DNA, 80 bp, synthetic construct
  misc_feature 1..80: note = Artificially Synthesized Probe
  source 1..80: mol_type = other DNA
tttttttttttttgagacggagtctcgctctgtcgcccaggctggagtgcagtggcgcgatctcggctcactgcaagctc

SEQ ID NO: 110746 - DNA, 80 bp, synthetic construct
  misc_feature 1..80: note = Artificially Synthesized Probe
  source 1..80: mol_type = other DNA
cgcctcggcctcccaaagtgatgcatcttaaagaactagaaaagcaagagcaaaccaaacccaaaattagtaaaagaaaa

SEQ ID NO: 110747 - DNA, 80 bp, synthetic construct
  misc_feature 1..80: note = Artificially Synthesized Probe
  source 1..80: mol_type = other DNA
atgaaaaaggagacattacaactaatactgcagtaattcaaaggatcattagaggctactatgagcaactacatgccagt

SEQ ID NO: 110748 - DNA, 80 bp, synthetic construct
  misc_feature 1..80: note = Artificially Synthesized Probe
  source 1..80: mol_type = other DNA
ttcactgctgaattttaccaaatatttaaagaagaatcttgctcaaactattccaaaagatagaggaggaggaaacactt

SEQ ID NO: 110749 - DNA, 80 bp, synthetic construct
  misc_feature 1..80: note = Artificially Synthesized Probe
  source 1..80: mol_type = other DNA
tgggaagactggataaccacatgcagaagaatgaaactagactcctatctcttcctatacaaaaatcacataaaaatgga

SEQ ID NO: 110750 - DNA, 80 bp, synthetic construct
  misc_feature 1..80: note = Artificially Synthesized Probe
  source 1..80: mol_type = other DNA
aaagcaaaactggacagatgggatcacatcaagtgaaaaaacctctgcacagcaaaggaaacaatcaacaaagtgaagag

SEQ ID NO: 110751 - DNA, 80 bp, synthetic construct
  misc_feature 1..80: note = Artificially Synthesized Probe
  source 1..80: mol_type = other DNA
ctgggtctgcagctacggtttgggcagctgtagctcctccccagcgtgggggtgggggtggggtcctgcctgccgcgtgg

SEQ ID NO: 110752 - DNA, 80 bp, synthetic construct
  misc_feature 1..80: note = Artificially Synthesized Probe
  source 1..80: mol_type = other DNA
aagacattcagacggcaaacaggcgtatgaaaaggtgctcaacatcactgatcatcagagaaatgcaaatcaaacctaca

SEQ ID NO: 110753 - DNA, 80 bp, synthetic construct
  misc_feature 1..80: note = Artificially Synthesized Probe
  source 1..80: mol_type = other DNA
aagctgaaaatagagctataatataatccagcaatcccactgctaggtttatacccaaaaggtaatcagtgtatcaaatt

SEQ ID NO: 110754 - DNA, 80 bp, synthetic construct
  misc_feature 1..80: note = Artificially Synthesized Probe
  source 1..80: mol_type = other DNA
aacaacatggatggaactgaaaatcattatgttaagtgaaataagccagacatagaaagacaaactttgcatgttctcac

SEQ ID NO: 110755 - DNA, 80 bp, synthetic construct
  misc_feature 1..80: note = Artificially Synthesized Probe
  source 1..80: mol_type = other DNA
taagatctggtacttgatagcacaacagggtaactacagtcaacaataatttattgtacatttacaaataactaagagta

SEQ ID NO: 110756 - DNA, 80 bp, synthetic construct
  misc_feature 1..80: note = Artificially Synthesized Probe
  source 1..80: mol_type = other DNA
aaaatagacttaatgggtgctgactatggctagacagcaaggagccttacaccaaatacaagtttagttagaagacagat

SEQ ID NO: 110757 - DNA, 80 bp, synthetic construct
  misc_feature 1..80: note = Artificially Synthesized Probe
  source 1..80: mol_type = other DNA
aaatcttaaaagacagcaattggaatggaataaggggtattgttactgtgaaagcaattatcatggggcttaatgtactg

SEQ ID NO: 110758 - DNA, 80 bp, synthetic construct
  misc_feature 1..80: note = Artificially Synthesized Probe
  source 1..80: mol_type = other DNA
tcaagaataattattatgcaatttgtacatgttagatcttatggtaacactttagcacttagaactaccccatgcaatta

SEQ ID NO: 110759 - DNA, 80 bp, synthetic construct
  misc_feature 1..80: note = Artificially Synthesized Probe
  source 1..80: mol_type = other DNA
agtccagaacatgatgagaaccacatattctggatggaattaaaagagctcagtaaatataagctatcttcatgaacaca

SEQ ID NO: 110760 - DNA, 80 bp, synthetic construct
  misc_feature 1..80: note = Artificially Synthesized Probe
  source 1..80: mol_type = other DNA
aggaaaattcaccattaggatggcctccaacttactctaagctgctctagttggaatatatcacttagagtataggtcgc

SEQ ID NO: 110761 - DNA, 80 bp, synthetic construct
  misc_feature 1..80: note = Artificially Synthesized Probe
  source 1..80: mol_type = other DNA
gccgtttgtcccagggaaaacctcttggtgctgcacacaacaccaatttccatcttttctgagaaaacaaaagcaccctc

SEQ ID NO: 110762 - DNA, 80 bp, synthetic construct
  misc_feature 1..80: note = Artificially Synthesized Probe
  source 1..80: mol_type = other DNA
caactgaaagcacatttgcaatgttagtataatatctattattgtggatttagaaataaggatattttaaccacgccatt

SEQ ID NO: 110763 - DNA, 80 bp, synthetic construct
  misc_feature 1..80: note = Artificially Synthesized Probe
  source 1..80: mol_type = other DNA
gatctatgataaaggctcagttcttccagaacaacagttggtcaactactcagaatcatctgtactgggcagtctgagag

SEQ ID NO: 110764 - DNA, 80 bp, synthetic construct
  misc_feature 1..80: note = Artificially Synthesized Probe
  source 1..80: mol_type = other DNA
gggaagaaggaatccactcccagagatgacatacgtcttcccactaagtacaactaaaatctctgagcatacgtaaaaca

SEQ ID NO: 110765 - DNA, 80 bp, synthetic construct
  misc_feature 1..80: note = Artificially Synthesized Probe
  source 1..80: mol_type = other DNA
cacacacacacaactaaagcagcctctctctaatcaaggagtcaggaaagaatcaactcagcaagacagaaaaatattag

SEQ ID NO: 110766 - DNA, 80 bp, synthetic construct
  misc_feature 1..80: note = Artificially Synthesized Probe
  source 1..80: mol_type = other DNA
gggatccagaactttcatctccattgggttgtaattaccacaacccctgcagtgccagcagagaccatctgggaagttga

SEQ ID NO: 110767 - DNA, 80 bp, synthetic construct
  misc_feature 1..80: note = Artificially Synthesized Probe
  source 1..80: mol_type = other DNA
ccccttacccccagaagaggagtgtccaaaaagagacagttaaaatgcaaggtttaaatgagatccagaatcatgacata

SEQ ID NO: 110768 - DNA, 80 bp, synthetic construct
  misc_feature 1..80: note = Artificially Synthesized Probe
  source 1..80: mol_type = other DNA
acaatccacagaaaccaacactgagatgaccgagatgttaaaattgcctgagaaagattttaaaccagttacgataaaaa

SEQ ID NO: 110769 - DNA, 80 bp, synthetic construct
  misc_feature 1..80: note = Artificially Synthesized Probe
  source 1..80: mol_type = other DNA
agacagaggaaagaatcagtgaagtgaggataaaacagtaggaattactcaatgtcaacaacacagagaaaatagtagaa

SEQ ID NO: 110770 - DNA, 80 bp, synthetic construct
  misc_feature 1..80: note = Artificially Synthesized Probe
  source 1..80: mol_type = other DNA
atggagcagtgtggtggtggtgaagctgcacggactctgcttctctacgcaattctttcatttttcttggagattttact

SEQ ID NO: 110771 - DNA, 80 bp, synthetic construct
  misc_feature 1..80: note = Artificially Synthesized Probe
  source 1..80: mol_type = other DNA
gaacctaaaactttaagaagctaagcataccccaaacagggtaaacccaaatctcctccaagacacataataattaagtt

SEQ ID NO: 110772 - DNA, 80 bp, synthetic construct
  misc_feature 1..80: note = Artificially Synthesized Probe
  source 1..80: mol_type = other DNA
acccagaatcccacaagtctatcaatccagatacccagtgaagttatccttcaggaatcagggggaaataaagatatccc

SEQ ID NO: 110773 - DNA, 80 bp, synthetic construct
  misc_feature 1..80: note = Artificially Synthesized Probe
  source 1..80: mol_type = other DNA
acatggcaagcaacaacctgagtaagtacaataagcattccttgagttttatgcttgacagttcaattaaacaccatact

SEQ ID NO: 110774 - DNA, 80 bp, synthetic construct
  misc_feature 1..80: note = Artificially Synthesized Probe
  source 1..80: mol_type = other DNA
tatatgaatattatatctagaacaataaataaaagaaagctatcaaagacatacactcaaaaacatagataaagtggatt

SEQ ID NO: 110775 - DNA, 80 bp, synthetic construct
  misc_feature 1..80: note = Artificially Synthesized Probe
  source 1..80: mol_type = other DNA
ctgagtgggttttttttaaaaaaagactcaactatacactatatgaagctcactttgaataaaatgatataggatggttg

SEQ ID NO: 110776 - DNA, 80 bp, synthetic construct
  misc_feature 1..80: note = Artificially Synthesized Probe
  source 1..80: mol_type = other DNA
gttaacatttagagtaaagaaaatggctacagagaagggaattacagagttataaataggtcaacccactaagaagatac

SEQ ID NO: 110777 - DNA, 80 bp, synthetic construct
  misc_feature 1..80: note = Artificially Synthesized Probe
  source 1..80: mol_type = other DNA
cccaacaagagcagagtatatgttcttttcaattgctcatagaacacaaaccatgatagacttaatgctgggccataaaa

SEQ ID NO: 110778 - DNA, 80 bp, synthetic construct
  misc_feature 1..80: note = Artificially Synthesized Probe
  source 1..80: mol_type = other DNA
aaagcacaacatatcaaaattcatggcacatacagttaaaactgtgctaagtgaaatttttagcactaaatgcttacatt

SEQ ID NO: 110779 - DNA, 80 bp, synthetic construct
  misc_feature 1..80: note = Artificially Synthesized Probe
  source 1..80: mol_type = other DNA
ccagcagcctagctgcaccttgacctcccagtgaagctggtactaaagctcaaggggccagaggacaaagccacaggcct

SEQ ID NO: 110780 - DNA, 80 bp, synthetic construct
  misc_feature 1..80: note = Artificially Synthesized Probe
  source 1..80: mol_type = other DNA
cccaggacagcaacttcaaaaggataaaagaacatcagcactcacagatgagaaaacagcacaagaactctggcagttct

SEQ ID NO: 110781 - DNA, 80 bp, synthetic construct
  misc_feature 1..80: note = Artificially Synthesized Probe
  source 1..80: mol_type = other DNA
aaatgatttgagagttgaaagacaacatagccattttaagaataaccaaactgaacttctgaaatttaaaattcaatata

SEQ ID NO: 110782 - DNA, 80 bp, synthetic construct
  misc_feature 1..80: note = Artificially Synthesized Probe
  source 1..80: mol_type = other DNA
gacaagatgggataagataaaacatctagagagaggagaagaatgcatgtgtacatacgcacatgctctatgcagctgaa

SEQ ID NO: 110783 - DNA, 80 bp, synthetic construct
  misc_feature 1..80: note = Artificially Synthesized Probe
  source 1..80: mol_type = other DNA
tatgtaaagtgaccaaaactatgactcactggcatttctgaaagagaaggagagagagtaagcaacttggaaaacatagt

SEQ ID NO: 110784 - DNA, 80 bp, synthetic construct
  misc_feature 1..80: note = Artificially Synthesized Probe
  source 1..80: mol_type = other DNA
gcagctatagagaaagggcaggtcagttacaaagagaacccaccaggctgatagcagacatgtcagaaaaaagcttacaa

SEQ ID NO: 110785 - DNA, 80 bp, synthetic construct
  misc_feature 1..80: note = Artificially Synthesized Probe
  source 1..80: mol_type = other DNA
ttacaaaggtccttaagggagtgctaaacatggaaacaagaaagatacctgcctccacaaaaacacaaatacgtagctca

SEQ ID NO: 110786 - DNA, 80 bp, synthetic construct
  misc_feature 1..80: note = Artificially Synthesized Probe
  source 1..80: mol_type = other DNA
cttaaaaggcatagattgacaagttggataaagaggcaagacccaactgtctgctgtcttcaagaacccatctcacatgt

SEQ ID NO: 110787 - DNA, 80 bp, synthetic construct
  misc_feature 1..80: note = Artificially Synthesized Probe
  source 1..80: mol_type = other DNA
atcaaaaagaacaaagaggggctttacataatgaaaaagggttcaattcaacaagaagacttaactaccctaaatattta

SEQ ID NO: 110788 - DNA, 80 bp, synthetic construct
  misc_feature 1..80: note = Artificially Synthesized Probe
  source 1..80: mol_type = other DNA
agaggcagaaaacaaagatattctggactcaaactcaacccttgatcaactgggtcttctagatgtctacagactaccca

SEQ ID NO: 110789 - DNA, 80 bp, synthetic construct
  misc_feature 1..80: note = Artificially Synthesized Probe
  source 1..80: mol_type = other DNA
ttggcccacatgtaatataaatacaaataaaaaacaagaagatctctcaaaactatccagttacatcaaaattaaacatt

SEQ ID NO: 110790 - DNA, 80 bp, synthetic construct
  misc_feature 1..80: note = Artificially Synthesized Probe
  source 1..80: mol_type = other DNA
agttagaaagatctcaaattaacaacataacattacacctggaagaactagaaaaaaaaagaacaaaccaatcccaaagc

SEQ ID NO: 110791 - DNA, 80 bp, synthetic construct
  misc_feature 1..80: note = Artificially Synthesized Probe
  source 1..80: mol_type = other DNA
aatgacaacggtgatattacaagaaaaccttttaggttttctgggttttttccatttcttctagaacaccttgaagaaat

SEQ ID NO: 110792 - DNA, 80 bp, synthetic construct
  misc_feature 1..80: note = Artificially Synthesized Probe
  source 1..80: mol_type = other DNA
cagacatagaaagcagagctagtaacaatcctactaaaattacttcaaaaaaccaaaaagtaggaactcctccctaaatc

SEQ ID NO: 110793 - DNA, 80 bp, synthetic construct
  misc_feature 1..80: note = Artificially Synthesized Probe
  source 1..80: mol_type = other DNA
agatccatcaattacaaacccaaaggcaacatcatattgaacaggcaaaagttggaagcatttcctgtgagaactggaat

SEQ ID NO: 110794 - DNA, 80 bp, synthetic construct
  misc_feature 1..80: note = Artificially Synthesized Probe
  source 1..80: mol_type = other DNA
cagaaaaaaactggttgactctgacatctgaacaccccacacacactactccaaacattgattccagaaacccagtttca

SEQ ID NO: 110795 - DNA, 80 bp, synthetic construct
  misc_feature 1..80: note = Artificially Synthesized Probe
  source 1..80: mol_type = other DNA
aaaactctgccaaaagacttctagaactaataaatgacttcagtaaagtttcaggaaaaaaatatcaatgtataaaaacc

SEQ ID NO: 110796 - DNA, 80 bp, synthetic construct
  misc_feature 1..80: note = Artificially Synthesized Probe
  source 1..80: mol_type = other DNA
ccaagaaagtgaaagatctctacaagaattaaaaaacactgcagagataatacaaacaaatggaacaacattccacgctc

SEQ ID NO: 110797 - DNA, 80 bp, synthetic construct
  misc_feature 1..80: note = Artificially Synthesized Probe
  source 1..80: mol_type = other DNA
atagccaaagcaaccctaagcaaaaagaacaaagctggaggaatcacactacctgacttcaaaatatactataaggccat

SEQ ID NO: 110798 - DNA, 80 bp, synthetic construct
  misc_feature 1..80: note = Artificially Synthesized Probe
  source 1..80: mol_type = other DNA
tgctaggatagctggttagccgtatgcagaagattgaaacttgactccttccttttaccatatacaaaaatcaatttaag

SEQ ID NO: 110799 - DNA, 80 bp, synthetic construct
  misc_feature 1..80: note = Artificially Synthesized Probe
  source 1..80: mol_type = other DNA
aaagcgcttctgaacaacaaaagcaactattaacaggtaaatagacaacctatagggtaggaaaaaatatttgcaaacta

SEQ ID NO: 110800 - DNA, 80 bp, synthetic construct
  misc_feature 1..80: note = Artificially Synthesized Probe
  source 1..80: mol_type = other DNA
aaaagagagaatgaatgccaagcggaaagggtttccttcggatccatcagatctcatgagacttattcactaacatgaga

SEQ ID NO: 110801 - DNA, 80 bp, synthetic construct
  misc_feature 1..80: note = Artificially Synthesized Probe
  source 1..80: mol_type = other DNA
aggaacttaaattattcaacaagaaaaaagcagccccattaaaaaatgggtaggagacatgaacagacacttcttaaaag

SEQ ID NO: 110802 - DNA, 80 bp, synthetic construct
  misc_feature 1..80: note = Artificially Synthesized Probe
  source 1..80: mol_type = other DNA
cagggaatgcttatacactgctggtgggaatgtaaagtagttcagctggtgtagaaagcagtttggaaatttctcagaga

SEQ ID NO: 110803 - DNA, 80 bp, synthetic construct
  misc_feature 1..80: note = Artificially Synthesized Probe
  source 1..80: mol_type = other DNA
tggactggaaaaagaaaatacggtacacatacaccatggaatactacacagccataaaaataatgaaatcatgtcctttg

SEQ ID NO: 110804 - DNA, 80 bp, synthetic construct
  misc_feature 1..80: note = Artificially Synthesized Probe
  source 1..80: mol_type = other DNA
gggtgggaggaagacgtgggttgaaaagctataagggactaggttcactacctgggtggcaggattgttatcacaccaaa

SEQ ID NO: 110805 - DNA, 80 bp, synthetic construct
  misc_feature 1..80: note = Artificially Synthesized Probe
  source 1..80: mol_type = other DNA
cctttaggcacttgtgagaccagcaactgcggaccgttcttacgtgtctgagaaggcattaccaagagcagggtcaggag

SEQ ID NO: 110806 - DNA, 80 bp, synthetic construct
  misc_feature 1..80: note = Artificially Synthesized Probe
  source 1..80: mol_type = other DNA
ataataaggataagaaaagaaatcaatgtaatttaagtgagaaaaaaatagagaagataaatgacaatgaaagctggttc

SEQ ID NO: 110807 - DNA, 80 bp, synthetic construct
  misc_feature 1..80: note = Artificially Synthesized Probe
  source 1..80: mol_type = other DNA
aacctgacaacatagatgaaatggatcgactccttgaaatccacaagttacctcaattcatccaatgtgaaatcaataat

SEQ ID NO: 110808 - DNA, 80 bp, synthetic construct
  misc_feature 1..80: note = Artificially Synthesized Probe
  source 1..80: mol_type = other DNA
agcattcagattggacagcagcattttgcccaaataatttttctatctttgtgaaactgaacttgtaggggaagtttagt

SEQ ID NO: 110809 - DNA, 80 bp, synthetic construct
  misc_feature 1..80: note = Artificially Synthesized Probe
  source 1..80: mol_type = other DNA
gaaacagttcccaatttattttatgtagctaatattaacccgataccaaaagcaaacaaagacagtaaaaagaaacctac

SEQ ID NO: 110810 - DNA, 80 bp, synthetic construct
  misc_feature 1..80: note = Artificially Synthesized Probe
  source 1..80: mol_type = other DNA
aataggctaaagaagaaaaaaatcacatgattacagcaatcgatgcagaaaagacatttaaaaaattcaacactcattca

SEQ ID NO: 110811 - DNA, 80 bp, synthetic construct
  misc_feature 1..80: note = Artificially Synthesized Probe
  source 1..80: mol_type = other DNA
ttattcaacataaagctggaagttccagccagtgcaatagggcaagataaaaaaaaaataaaagatatgcagacacaaag

SEQ ID NO: 110812 - DNA, 80 bp, synthetic construct
  misc_feature 1..80: note = Artificially Synthesized Probe
  source 1..80: mol_type = other DNA
cactcaaagaatacctaggtgtaaatttaacaaaccacgtacaggacctatgtgctgaaacacaaacaatggtgatgaaa

SEQ ID NO: 110813 - DNA, 80 bp, synthetic construct
  misc_feature 1..80: note = Artificially Synthesized Probe
  source 1..80: mol_type = other DNA
tatggaagagcaaaggaactagagtagctaaaacaatttgggaaaataaaaataaagtggaaggagtgatcatatataat

SEQ ID NO: 110814 - DNA, 80 bp, synthetic construct
  misc_feature 1..80: note = Artificially Synthesized Probe
  source 1..80: mol_type = other DNA
ttttcaacaaatggtcctggagtgattggacatccacaggcaaaaacaggaacctctatgtaagcttcacagtctacaca

SEQ ID NO: 110815 - DNA, 80 bp, synthetic construct
  misc_feature 1..80: note = Artificially Synthesized Probe
  source 1..80: mol_type = other DNA
attaaaaacttttgctctgtggaaaggccctcttaagagctgaaacaatgagcgcagagttggagaaatattggcaaacc

SEQ ID NO: 110816 - DNA, 80 bp, synthetic construct
  misc_feature 1..80: note = Artificially Synthesized Probe
  source 1..80: mol_type = other DNA
tgatggcaaataaccacacgaagagatgctgaccatcatctcatcagggaaatgtcaattacacccacaatgagatgcca

SEQ ID NO: 110817 - DNA, 80 bp, synthetic construct
  misc_feature 1..80: note = Artificially Synthesized Probe
  source 1..80: mol_type = other DNA
agctgaggggtccctgctgccaggccctgtgagcaacaggccacggggaaagtggccactgccattggactcagcagaca

SEQ ID NO: 110818 - DNA, 80 bp, synthetic construct
  misc_feature 1..80: note = Artificially Synthesized Probe
  source 1..80: mol_type = other DNA
aactaaacatatacttatcataagacacaaaaattgaacccctgaccattcatcccaaagaaatgaagacttatgttcaa

SEQ ID NO: 110819 - DNA, 80 bp, synthetic construct
  misc_feature 1..80: note = Artificially Synthesized Probe
  source 1..80: mol_type = other DNA
tcgctgaatctccccggaactgtgctgaggcaaaaagccaattcaagaaggatagatgctatataatttcatctagacaa

SEQ ID NO: 110820 - DNA, 80 bp, synthetic construct
  misc_feature 1..80: note = Artificially Synthesized Probe
  source 1..80: mol_type = other DNA
caaactgctaagggaatagagaaatgaagaggtgaatttgtgttggaaagttaagaaagtttcatagaaacaagtggtat

SEQ ID NO: 110821 - DNA, 80 bp, synthetic construct
  misc_feature 1..80: note = Artificially Synthesized Probe
  source 1..80: mol_type = other DNA
gtgcaggaacagagggaggggagttgcatagtcacaggaggacgtcaaagctacatcaggaagcaccggtgcatctgtgc

SEQ ID NO: 110822 - DNA, 80 bp, synthetic construct
  misc_feature 1..80: note = Artificially Synthesized Probe
  source 1..80: mol_type = other DNA
tgctgagccttaactatgagccagcactattctaagtccttcctattttaatcctcaggatttgtgaataatgaattaaa

SEQ ID NO: 110823 - DNA, 80 bp, synthetic construct
  misc_feature 1..80: note = Artificially Synthesized Probe
  source 1..80: mol_type = other DNA
aaggttaactgcaagagaggttggctaggtcactggggaagaggaaatcacaaagaaggaaggctgggaacacaccaggt

SEQ ID NO: 110824 - DNA, 80 bp, synthetic construct
  misc_feature 1..80: note = Artificially Synthesized Probe
  source 1..80: mol_type = other DNA
catgcaacacgtcaacacttaagcaggcaagggcatagcaaggacagaaaccaaggtgcacgctgcatatgaggaacgaa

SEQ ID NO: 110825 - DNA, 80 bp, synthetic construct
  misc_feature 1..80: note = Artificially Synthesized Probe
  source 1..80: mol_type = other DNA
cttctgtctcactttttaaaatttctggctgcaacaccctaaaactctctcagggtcattaatgggctgtggcttgcagt

SEQ ID NO: 110826 - DNA, 80 bp, synthetic construct
  misc_feature 1..80: note = Artificially Synthesized Probe
  source 1..80: mol_type = other DNA
gaatggaggcctcagagctactcatcagagagtgcactgtgcgtggataaatgggaggagggaggtcagttgggagaagg

SEQ ID NO: 110827 - DNA, 80 bp, synthetic construct
  misc_feature 1..80: note = Artificially Synthesized Probe
  source 1..80: mol_type = other DNA
gaagagagagcttcaagggtgagagagaggcggtattcatttcaaacgcggtaatactgagagataaatcagagtgataa

SEQ ID NO: 110828 - DNA, 80 bp, synthetic construct
  misc_feature 1..80: note = Artificially Synthesized Probe
  source 1..80: mol_type = other DNA
ccatgggcttcttggtggaaaattgttttagccgaattcatttcccccgaggtcaccctttaaagatggcactgagtcaa

SEQ ID NO: 110829 - DNA, 80 bp, synthetic construct
  misc_feature 1..80: note = Artificially Synthesized Probe
  source 1..80: mol_type = other DNA
gggaaaggcggtggtcagcacattgcaggatctagattttatgagtagaattcacgactatataaaaaaatacagtggca

SEQ ID NO: 110830 - DNA, 80 bp, synthetic construct
  misc_feature 1..80: note = Artificially Synthesized Probe
  source 1..80: mol_type = other DNA
agaagatgacgtgaagtcaattaaagggatcaggtgggctctccttcccaatcagagaagacagggtcatagttccattc

SEQ ID NO: 110831 - DNA, 80 bp, synthetic construct
  misc_feature 1..80: note = Artificially Synthesized Probe
  source 1..80: mol_type = other DNA
aatggaacctatacattcaagacattaaaaagctctatgcgtattcaaaggtggtagcattgttggtgatattttatgtc

SEQ ID NO: 110832 - DNA, 80 bp, synthetic construct
  misc_feature 1..80: note = Artificially Synthesized Probe
  source 1..80: mol_type = other DNA
gggatgcaaataacttatttatcccacctggtatcaactaactttatgccacatcctcatgcatctgccttcaaaaagaa

SEQ ID NO: 110833 - DNA, 80 bp, synthetic construct
  misc_feature 1..80: note = Artificially Synthesized Probe
  source 1..80: mol_type = other DNA
tacacctgttggaaatttctactaggagggacttctggtcccaaaatggtggtgcagtagaagcaaggtgacttcactct

SEQ ID NO: 110834 - DNA, 80 bp, synthetic construct
  misc_feature 1..80: note = Artificially Synthesized Probe
  source 1..80: mol_type = other DNA
cataatctgtttggcatcaagagtatgggaaatttcccctcaactcatagcttctatgctggaaaaagtgagggtgaggt

SEQ ID NO: 110835 - DNA, 80 bp, synthetic construct
  misc_feature 1..80: note = Artificially Synthesized Probe
  source 1..80: mol_type = other DNA
ctctgcaactcggtcaaagaggcactccatcagagtggctgctcacagcaccaccctgtagcaggaatgctccacaggtc

SEQ ID NO: 110836 - DNA, 80 bp, synthetic construct
  misc_feature 1..80: note = Artificially Synthesized Probe
  source 1..80: mol_type = other DNA
tctagtgccgaaaaggagacagggacctagaagggggagaaaaagaaattccacaggtaaattatgtgactctctaagca

SEQ ID NO: 110837 - DNA, 80 bp, synthetic construct
  misc_feature 1..80: note = Artificially Synthesized Probe
  source 1..80: mol_type = other DNA
cttctcaaatggacaaagtaaggaactagcaattggccctaataagatggcaatatgtgagttctcggaccaagaattca

SEQ ID NO: 110838 - DNA, 80 bp, synthetic construct
  misc_feature 1..80: note = Artificially Synthesized Probe
  source 1..80: mol_type = other DNA
tccgtcacccaagctcaagtgcagtggcacaatattggatcactgcaacctccacctctcgggttcaagtgattctcctg

SEQ ID NO: 110839 - DNA, 80 bp, synthetic construct
  misc_feature 1..80: note = Artificially Synthesized Probe
  source 1..80: mol_type = other DNA
atacatttgctgaactgaaaaattcattatagcctctcaaaagcagaatggatcaagcagaggaaggaatcagtgagctc

SEQ ID NO: 110840 - DNA, 80 bp, synthetic construct
  misc_feature 1..80: note = Artificially Synthesized Probe
  source 1..80: mol_type = other DNA
cagaaaattacctcaaaacatcaaatataagaatgattgatgttcaaggggaagctgagcaagaacaaggggtagaaagc

SEQ ID NO: 110841 - DNA, 80 bp, synthetic construct
  misc_feature 1..80: note = Artificially Synthesized Probe
  source 1..80: mol_type = other DNA
cctaaaagcagcaagagaaaagaagcaaggaatatttaaagcagctctcatttgtctggcaaccaactactcaacagaaa

SEQ ID NO: 110842 - DNA, 80 bp, synthetic construct
  misc_feature 1..80: note = Artificially Synthesized Probe
  source 1..80: mol_type = other DNA
accactactagtcctgtgttacaaatcatgctaaagagagttcttcagtctgaaagaaaaaaaagtaacatgcaaaaaga

SEQ ID NO: 110843 - DNA, 80 bp, synthetic construct
  misc_feature 1..80: note = Artificially Synthesized Probe
  source 1..80: mol_type = other DNA
gagataggcagcatacaaatatgtagattgagacaataggaagtcaaagtgtggggggatggacttaaaatacagagggg

SEQ ID NO: 110844 - DNA, 80 bp, synthetic construct
  misc_feature 1..80: note = Artificially Synthesized Probe
  source 1..80: mol_type = other DNA
acatactagcagagaaaatcactttaccacaaagtaagacagaaagcaagcaaggcaacaagaatgaggagttacaaaac

SEQ ID NO: 110845 - DNA, 80 bp, synthetic construct
  misc_feature 1..80: note = Artificially Synthesized Probe
  source 1..80: mol_type = other DNA
gacccaactataagctgcccacaataaaccagccatatctataaagatggacattgactgaaaggaatagaaaaatatat

SEQ ID NO: 110846 - DNA, 80 bp, synthetic construct
  misc_feature 1..80: note = Artificially Synthesized Probe
  source 1..80: mol_type = other DNA
tataaaaaaatcaaaaattagccgggcatggtggcatgtgcctgtggtctcagctacttgggatgctgaggtgggaggat

SEQ ID NO: 110847 - DNA, 80 bp, synthetic construct
  misc_feature 1..80: note = Artificially Synthesized Probe
  source 1..80: mol_type = other DNA
aatagactgcaagtcaaagactgcaaaaagcaacaaagaacatcactatatagtgataaaagggtcaatcagcaagagga

SEQ ID NO: 110848 - DNA, 80 bp, synthetic construct
  misc_feature 1..80: note = Artificially Synthesized Probe
  source 1..80: mol_type = other DNA
acaaagaaactttagagttaaactatacactacaccaaataggcttgactgacatttatatcatttcacccgactgctac

SEQ ID NO: 110849 - DNA, 80 bp, synthetic construct
  misc_feature 1..80: note = Artificially Synthesized Probe
  source 1..80: mol_type = other DNA
cccagaaactacataaacacatgggaattaaacctccttctaaatggccaatgagtcaatgaagaagttaagaaggaaat

SEQ ID NO: 110850 - DNA, 80 bp, synthetic construct
  misc_feature 1..80: note = Artificially Synthesized Probe
  source 1..80: mol_type = other DNA
tacaggcatgagccactgtgcctggccagcaaaatcattgtgtttgtaatatggggtcatttggaacctccgggaaatgc

SEQ ID NO: 110851 - DNA, 80 bp, synthetic construct
  misc_feature 1..80: note = Artificially Synthesized Probe
  source 1..80: mol_type = other DNA
aaagcaagaacaagccaaacctaaaatgagtagaaggaaagaaataatacaaatcagagcagaaataaatgaaattaaga

SEQ ID NO: 110852 - DNA, 80 bp, synthetic construct
  misc_feature 1..80: note = Artificially Synthesized Probe
  source 1..80: mol_type = other DNA
gatcattagagacaattataaacaactgcatgctaagaaatgggaaaacctagaagaaataggtacattcctggacacta

SEQ ID NO: 110853 - DNA, 80 bp, synthetic construct
  misc_feature 1..80: note = Artificially Synthesized Probe
  source 1..80: mol_type = other DNA
ctcaaactcttcaaaaaattgaagaggagggaatacctccaaactcattctatgaggtcagtgttaccctgaaaccaaaa

SEQ ID NO: 110854 - DNA, 80 bp, synthetic construct
  misc_feature 1..80: note = Artificially Synthesized Probe
  source 1..80: mol_type = other DNA
tatcaataaacataatacatcacattaacagaattaagaacaaaactacatgatcatttcaatagatgctaaaaaagcat

SEQ ID NO: 110855 - DNA, 80 bp, synthetic construct
  misc_feature 1..80: note = Artificially Synthesized Probe
  source 1..80: mol_type = other DNA
caaggatgttcactttcaccatttttatacaacatagcactgaagtcctgaccacagcaattaggcaagagaaagaaata

SEQ ID NO: 110856 - DNA, 80 bp, synthetic construct
  misc_feature 1..80: note = Artificially Synthesized Probe
  source 1..80: mol_type = other DNA
tttatatatgccaacagcaaacaatctaaaaaacaataaagtaaccctatttccaatagctaaacataatataagatacc

SEQ ID NO: 110857 - DNA, 80 bp, synthetic construct
  misc_feature 1..80: note = Artificially Synthesized Probe
  source 1..80: mol_type = other DNA
tgacagattcaatgcagtccctattagatgagatggggcttgttcagggtgggcatggctgtagacatcagtgtagtccc

SEQ ID NO: 110858 - DNA, 80 bp, synthetic construct
  misc_feature 1..80: note = Artificially Synthesized Probe
  source 1..80: mol_type = other DNA
caaataagcatagtactggcataaaaacagacacacagaccaatggaacagaatagagaatccaggtataaattcacacg

SEQ ID NO: 110859 - DNA, 80 bp, synthetic construct
  misc_feature 1..80: note = Artificially Synthesized Probe
  source 1..80: mol_type = other DNA
attttgtgattctcttactttttatgagatgttttgagagcaaataggatgatgccatccagttcccgagtcccctaaag

SEQ ID NO: 110860 - DNA, 80 bp, synthetic construct
  misc_feature 1..80: note = Artificially Synthesized Probe
  source 1..80: mol_type = other DNA
taaaggcttaaatataagacccgaaactatgaaaccgctaaaagaaaacactaaggaaacactccaggacattgatcagg

SEQ ID NO: 110861 - DNA, 80 bp, synthetic construct
  misc_feature 1..80: note = Artificially Synthesized Probe
  source 1..80: mol_type = other DNA
aacccacagaatggagaaaatatatgtaaacgatccatctgacaagggattaataaccagaatatataaagagctcaaaa

SEQ ID NO: 110862 - DNA, 80 bp, synthetic construct
  misc_feature 1..80: note = Artificially Synthesized Probe
  source 1..80: mol_type = other DNA
aatggccaacagatatagtcatcaaataaaaacacacaaatggtaaacagatatagtcatcaaataaaaacatacaaatg

SEQ ID NO: 110863 - DNA, 80 bp, synthetic construct
  misc_feature 1..80: note = Artificially Synthesized Probe
  source 1..80: mol_type = other DNA
gatatagtcatcaaataaaaacttacaaatggccaacagatatagtcatcagagaaatacaaatcaaaatcacaatgaga

SEQ ID NO: 110864 - DNA, 80 bp, synthetic construct
  misc_feature 1..80: note = Artificially Synthesized Probe
  source 1..80: mol_type = other DNA
tacaggcacctgccaccacacccggctaattttttgtatttttagtagagacggggtttcaccatgttggccaggctggt

SEQ ID NO: 110865 - DNA, 80 bp, synthetic construct
  misc_feature 1..80: note = Artificially Synthesized Probe
  source 1..80: mol_type = other DNA
tgggaatgtaaattagcgcagccactatagagaatagtatggaggttgctcagaaaaaagtgaaactagaactaacatat

SEQ ID NO: 110866 - DNA, 80 bp, synthetic construct
  misc_feature 1..80: note = Artificially Synthesized Probe
  source 1..80: mol_type = other DNA
agaatatatacacaatggaatagtattctgccataaaaaagggtgcaagcctgtcataggcaccaacatgggaaactgga

SEQ ID NO: 110867 - DNA, 80 bp, synthetic construct
  misc_feature 1..80: note = Artificially Synthesized Probe
  source 1..80: mol_type = other DNA
cattgactaatggctacaaatagacagaagaaataaaacctagtgtttgatagatcaacagggtgactagagttaacaat

SEQ ID NO: 110868 - DNA, 80 bp, synthetic construct
  misc_feature 1..80: note = Artificially Synthesized Probe
  source 1..80: mol_type = other DNA
atcgattctgtatcaatatagaaaagctttctagagagcccatttttctacactcggcacctccacaacaagcaggaagc

SEQ ID NO: 110869 - DNA, 80 bp, synthetic construct
  misc_feature 1..80: note = Artificially Synthesized Probe
  source 1..80: mol_type = other DNA
gggtgagctgtgagtagatcccaggcaccatcaccatcgtccttgccattgctggccgtcatctctggtcatcgcaaaca

SEQ ID NO: 110870 - DNA, 80 bp, synthetic construct
  misc_feature 1..80: note = Artificially Synthesized Probe
  source 1..80: mol_type = other DNA
aggctgctcccttctgttgtcaaatgaaatatcagacctccctggggaggcaacacagagcaatggcgggaaccacaggg

SEQ ID NO: 110871 - DNA, 80 bp, synthetic construct
  misc_feature 1..80: note = Artificially Synthesized Probe
  source 1..80: mol_type = other DNA
ttgtgctcccttggggcatgaaggaaaaacttcacgcaggccacccctctagccaccgtgctcattcagaagccacacca

SEQ ID NO: 110872 - DNA, 80 bp, synthetic construct
  misc_feature 1..80: note = Artificially Synthesized Probe
  source 1..80: mol_type = other DNA
agtatgtcttcatggagccgccgtgaagacgtgatggcactcagtgggactccccacagggccagtggaacctgtccctg

SEQ ID NO: 110873 - DNA, 80 bp, synthetic construct
  misc_feature 1..80: note = Artificially Synthesized Probe
  source 1..80: mol_type = other DNA
tactgtgtctgtgtagaaagaagtagacataggagactccattttgttatgtactaagaaaaattcttctgccttgagat

SEQ ID NO: 110874 - DNA, 80 bp, synthetic construct
  misc_feature 1..80: note = Artificially Synthesized Probe
  source 1..80: mol_type = other DNA
agtacccagggacacaaaaactgcggaaggccgcagggacctctgcctaggaaagccaggtattgtccaaggtttctccc

SEQ ID NO: 110875 - DNA, 80 bp, synthetic construct
  misc_feature 1..80: note = Artificially Synthesized Probe
  source 1..80: mol_type = other DNA
tgggcaatggaatgtctcggtataaaacccgattgtatgctccatctactgagatagggaaaaaccgccttagggctgga

SEQ ID NO: 110876 - DNA, 80 bp, synthetic construct
  misc_feature 1..80: note = Artificially Synthesized Probe
  source 1..80: mol_type = other DNA
ccctgacacatccccctcttcgagaaacacccacagatgatcaataaatactaagggaactcagaggctggcgggatcct

SEQ ID NO: 110877 - DNA, 80 bp, synthetic construct
  misc_feature 1..80: note = Artificially Synthesized Probe
  source 1..80: mol_type = other DNA
atgctgccattgcactgatgctggcttctcgtttcctgctccccctctttctgaacaccccccggcagacacagcgctta

SEQ ID NO: 110878 - DNA, 80 bp, synthetic construct
  misc_feature 1..80: note = Artificially Synthesized Probe
  source 1..80: mol_type = other DNA
aggccagctgttccggcagggctggggcacacacacaatctccacagtgcagccgcggcctcctgctgggaacgtccgcc

SEQ ID NO: 110879 - DNA, 80 bp, synthetic construct
  misc_feature 1..80: note = Artificially Synthesized Probe
  source 1..80: mol_type = other DNA
ggagcccagcacacctgatggccatcgcagatcaggaaaccgtcctcccctccctcctgccctgggccaagcaggtcctg

SEQ ID NO: 110880 - DNA, 80 bp, synthetic construct
  misc_feature 1..80: note = Artificially Synthesized Probe
  source 1..80: mol_type = other DNA
ccacattcacggtttctgtatcacccaaaacatcatgtttgttggaacttattttattttagattcaggtcttgttaacc

SEQ ID NO: 110881 - DNA, 80 bp, synthetic construct
  misc_feature 1..80: note = Artificially Synthesized Probe
  source 1..80: mol_type = other DNA
aattaacccactgtgcacgttccttttctgaccctttactgtgtttatcatgcgttagtgccttgttcaacaatatttca

SEQ ID NO: 110882 - DNA, 80 bp, synthetic construct
  misc_feature 1..80: note = Artificially Synthesized Probe
  source 1..80: mol_type = other DNA
agggaccgacggattcagtcctgaggggcagaccaggtcctggtaggtacagcaaggaggactcccctgcaagtctggag

SEQ ID NO: 110883 - DNA, 80 bp, synthetic construct
  misc_feature 1..80: note = Artificially Synthesized Probe
  source 1..80: mol_type = other DNA
gaagagggtgctggcctcagaggctctcgtgagggccgtggaggggagcggaaagccaggcaggcagctgccacccgagc

SEQ ID NO: 110884 - DNA, 80 bp, synthetic construct
  misc_feature 1..80: note = Artificially Synthesized Probe
  source 1..80: mol_type = other DNA
taaaacccgtcagctattccccttggggcactgtctctctgtgcagggaagagtcagcagttctctctgttggagcagac

SEQ ID NO: 110885 - DNA, 80 bp, synthetic construct
  misc_feature 1..80: note = Artificially Synthesized Probe
  source 1..80: mol_type = other DNA
gcaaactattcaaagtcccctggccgtcagaaggttccagagggtgtgcagtcactttcctccccattctcacagcagca

SEQ ID NO: 110886 - DNA, 80 bp, synthetic construct
  misc_feature 1..80: note = Artificially Synthesized Probe
  source 1..80: mol_type = other DNA
gcacaaaataagattctgttatcaagcaacgctgcacttcccacatctggatgcacgccaagacaagacgtcagtcattt

SEQ ID NO: 110887 - DNA, 80 bp, synthetic construct
  misc_feature 1..80: note = Artificially Synthesized Probe
  source 1..80: mol_type = other DNA
aagggaacgtagatgacacgttgagggtgtggtgcgggcaatacacagactaagagtgggaactggcgaagtgagctata

SEQ ID NO: 110888 - DNA, 80 bp, synthetic construct
  misc_feature 1..80: note = Artificially Synthesized Probe
  source 1..80: mol_type = other DNA
ttatgtgcattatttgatggaacaagcagtgtctttgtttcttaggatggccatttttatctttttgataagtgtggagg

SEQ ID NO: 110889 - DNA, 80 bp, synthetic construct
  misc_feature 1..80: note = Artificially Synthesized Probe
  source 1..80: mol_type = other DNA
aaagaatactacccaatattagtccagacctcgaatacgaccaggacagcctgccacagcagaaagaccaggtgtgtggg

SEQ ID NO: 110890 - DNA, 80 bp, synthetic construct
  misc_feature 1..80: note = Artificially Synthesized Probe
  source 1..80: mol_type = other DNA
accacacccggctaatttttgtatttttagtagagacagggtttcaccatgttggccaggttggtcttgaactcctgacc

SEQ ID NO: 110891 - DNA, 80 bp, synthetic construct
  misc_feature 1..80: note = Artificially Synthesized Probe
  source 1..80: mol_type = other DNA
aaaaatacaaaaattagccaggcgtggtggtgggcggctgtaatcccagctacttgggaggctgaggcaggagaattgct

SEQ ID NO: 110892 - DNA, 80 bp, synthetic construct
  misc_feature 1..80: note = Artificially Synthesized Probe
  source 1..80: mol_type = other DNA
acagcaaagaagaaaaacatcattgaataattgagatacaattctcagtctaaggccatcaaactgtttgtggacaggaa

SEQ ID NO: 110893 - DNA, 80 bp, synthetic construct
  misc_feature 1..80: note = Artificially Synthesized Probe
  source 1..80: mol_type = other DNA
gggccagccagcatccagttccagcttcatggtggaagcatcaaagtgttcttggttaacccattttagaaattccttca

SEQ ID NO: 110894 - DNA, 80 bp, synthetic construct
  misc_feature 1..80: note = Artificially Synthesized Probe
  source 1..80: mol_type = other DNA
ggttaggagttcaagaccagcctggccaacatggcaaaaccctatctctacaaaaaatacaaaattagccgggcatgatg

SEQ ID NO: 110895 - DNA, 80 bp, synthetic construct
  misc_feature 1..80: note = Artificially Synthesized Probe
  source 1..80: mol_type = other DNA
tttaaatttaaattttaaaaaaatccttcacttcccctgacacagactttaaagtacgaatcatcacacccaaattcagc

SEQ ID NO: 110896 - DNA, 80 bp, synthetic construct
  misc_feature 1..80: note = Artificially Synthesized Probe
  source 1..80: mol_type = other DNA
tcctccccaaatgatcactgagtaagaaaacatcttgggaccttttttaagtcaaggaaatgatacagatggctcgaatg

SEQ ID NO: 110897 - DNA, 80 bp, synthetic construct
  misc_feature 1..80: note = Artificially Synthesized Probe
  source 1..80: mol_type = other DNA
cttcactaaactagctttgcttttgctgtggagccttgtttgcttgcttctgttattgtccaaatcttaactgactctga

SEQ ID NO: 110898 - DNA, 80 bp, synthetic construct
  misc_feature 1..80: note = Artificially Synthesized Probe
  source 1..80: mol_type = other DNA
tcccatcgtttattttcatttccatctccagtcttctatctcaagctccactttccacctgcctaggcatggacttctcc

SEQ ID NO: 110899 - DNA, 80 bp, synthetic construct
  misc_feature 1..80: note = Artificially Synthesized Probe
  source 1..80: mol_type = other DNA
tgagaatctcctctaaagattgcaatcagtggccaagagtgagggagggaattcacaaagttcaactcctttcagaaaac

SEQ ID NO: 110900 - DNA, 80 bp, synthetic construct
  misc_feature 1..80: note = Artificially Synthesized Probe
  source 1..80: mol_type = other DNA
tgttttggaagagtttgagaagatgggtattagttcttctggaagtgtctggtaggattcagcaatgaaaacatccgttc

SEQ ID NO: 110901 - DNA, 80 bp, synthetic construct
  misc_feature 1..80: note = Artificially Synthesized Probe
  source 1..80: mol_type = other DNA
ttcaaatttctcagatgttccatattttcacggattagatcctcttctctcatcctggacccagtggccatcctggacca

SEQ ID NO: 110902 - DNA, 80 bp, synthetic construct
  misc_feature 1..80: note = Artificially Synthesized Probe
  source 1..80: mol_type = other DNA
catttcttccagattgtccaatgtcttggcgtataaatgtccacagtggtctcatgacccttggtgtttctgtggtatcc

SEQ ID NO: 110903 - DNA, 80 bp, synthetic construct
  misc_feature 1..80: note = Artificially Synthesized Probe
  source 1..80: mol_type = other DNA
tctctaatcattgttatttccttccttccactaactttgggcttagtttgttcttcatttcctagtgccttggggtgtaa

SEQ ID NO: 110904 - DNA, 80 bp, synthetic construct
  misc_feature 1..80: note = Artificially Synthesized Probe
  source 1..80: mol_type = other DNA
gaaagcaggaaagctttcatttccatataccagactcagagctgaaaagaggcaaagaaagtcttctctcccaaaattaa

SEQ ID NO: 110905 - DNA, 80 bp, synthetic construct
  misc_feature 1..80: note = Artificially Synthesized Probe
  source 1..80: mol_type = other DNA
taaaagtctggtcactgtagtgagaggaaaaaaagatctgtctggtttcatgagaagaaatgctcagtggagagatggtt

SEQ ID NO: 110906 - DNA, 80 bp, synthetic construct
  misc_feature 1..80: note = Artificially Synthesized Probe
  source 1..80: mol_type = other DNA
caggctctgctccttggcagtagtctctacttagtgctaagtactaagtacctcctaagttgtagtctctgcttagtact

SEQ ID NO: 110907 - DNA, 80 bp, synthetic construct
  misc_feature 1..80: note = Artificially Synthesized Probe
  source 1..80: mol_type = other DNA
aactacctcctaagtagcagtctttgcttagttctaagtactgctaaatactaagtacttcctaagtcacagtccctact

SEQ ID NO: 110908 - DNA, 80 bp, synthetic construct
  misc_feature 1..80: note = Artificially Synthesized Probe
  source 1..80: mol_type = other DNA
accaccaatgcagcacccagtccctgggaagagaacaagctgcctccttcccccaggacttccatggtggttcctgctca

SEQ ID NO: 110909 - DNA, 80 bp, synthetic construct
  misc_feature 1..80: note = Artificially Synthesized Probe
  source 1..80: mol_type = other DNA
aagaaaaaggctgaacaagcctcaaaaacacacctttcaggtattcatgaaaaaggaacagatacacagagtgtctgtag

SEQ ID NO: 110910 - DNA, 80 bp, synthetic construct
  misc_feature 1..80: note = Artificially Synthesized Probe
  source 1..80: mol_type = other DNA
agcgtgagttttgtctgagttgtgtgtacaagctatgtatgtgttttgtgtgagctgacttgtgattgttttgtgtgtca

SEQ ID NO: 110911 - DNA, 80 bp, synthetic construct
  misc_feature 1..80: note = Artificially Synthesized Probe
  source 1..80: mol_type = other DNA
agtgtgagttgtgcacatgtgagtgtatggggggcgtgtgttatataaaatattaaactttttctctgagctcagtgtct

SEQ ID NO: 110912 - DNA, 80 bp, synthetic construct
  misc_feature 1..80: note = Artificially Synthesized Probe
  source 1..80: mol_type = other DNA
tgagatgaggcgtccagccctgcatctgcagcgtggtcagcacagaggctgacatccatggtcatgccggaatccgtggt

SEQ ID NO: 110913 - DNA, 80 bp, synthetic construct
  misc_feature 1..80: note = Artificially Synthesized Probe
  source 1..80: mol_type = other DNA
agtgttcggagaatgcaggatgataacatacaactcacagcactgttgtggtaaatggcacgcagcaagcaatgaggagc

SEQ ID NO: 110914 - DNA, 80 bp, synthetic construct
  misc_feature 1..80: note = Artificially Synthesized Probe
  source 1..80: mol_type = other DNA
gtcatgccagaatccgtggtcatgccggaatccactgatggtgcacgtgacccacgatgggaaaagtcacaagacagctt

SEQ ID NO: 110915 - DNA, 80 bp, synthetic construct
  misc_feature 1..80: note = Artificially Synthesized Probe
  source 1..80: mol_type = other DNA
tcttgacgtagagtcaggtctccttgccgagagtgggacctgcaccctgatccattactaggtggagggagttttccaga

SEQ ID NO: 110916 - DNA, 80 bp, synthetic construct
  misc_feature 1..80: note = Artificially Synthesized Probe
  source 1..80: mol_type = other DNA
ctcagggccggcacacagtaggtcgcttgtgcgtggccaccatgctatccgccaaccccggtgccatggttatccctatg

SEQ ID NO: 110917 - DNA, 80 bp, synthetic construct
  misc_feature 1..80: note = Artificially Synthesized Probe
  source 1..80: mol_type = other DNA
ccacctgcgacaataaacaccgcatgatgttaccctccagggatgacccaggattgtgtgaaaccaaaattcattaaaaa

SEQ ID NO: 110918 - DNA, 80 bp, synthetic construct
  misc_feature 1..80: note = Artificially Synthesized Probe
  source 1..80: mol_type = other DNA
cacatgaataaaattatcacttgaaaaaactcatcacttgaaggaagagggggaaaaatccatgttatggaaatggcagc

SEQ ID NO: 110919 - DNA, 80 bp, synthetic construct
  misc_feature 1..80: note = Artificially Synthesized Probe
  source 1..80: mol_type = other DNA
tctcactgcccccagctctaactccgtgtggtccacaggacaggaagtcccacacgggagaaggaggatgctggggctgc

SEQ ID NO: 110920 - DNA, 80 bp, synthetic construct
  misc_feature 1..80: note = Artificially Synthesized Probe
  source 1..80: mol_type = other DNA
acctttttaaagacttatgcagaaagtgactgcaaccaaaagcatatggttttattgctaattcaaccttacagagctga

SEQ ID NO: 110921 - DNA, 80 bp, synthetic construct
  misc_feature 1..80: note = Artificially Synthesized Probe
  source 1..80: mol_type = other DNA
tcacaagacagcttcagagctggtcaaacaggactgagaggggctacaccaggaatgcgcggcctgttgagtttctgtga

SEQ ID NO: 110922 - DNA, 80 bp, synthetic construct
  misc_feature 1..80: note = Artificially Synthesized Probe
  source 1..80: mol_type = other DNA
ggaatgaggaggtgtgggcttcccggctgcccatccccatatctgcacatagcccctgcatctcactacacagagcgtgg

SEQ ID NO: 110923 - DNA, 80 bp, synthetic construct
  misc_feature 1..80: note = Artificially Synthesized Probe
  source 1..80: mol_type = other DNA
ggacgcccagtccaagaaggaagcagctaggaagctgactctgttatctggagtgcagaaaacggagcttcgggtcacca

SEQ ID NO: 110924 - DNA, 80 bp, synthetic construct
  misc_feature 1..80: note = Artificially Synthesized Probe
  source 1..80: mol_type = other DNA
aggtggggaagtggggaggagggcgctcttgaccgtgtctgcgtgtctaagcaaaggatacaggggcgcaaagggaagga

SEQ ID NO: 110925 - DNA, 80 bp, synthetic construct
  misc_feature 1..80: note = Artificially Synthesized Probe
  source 1..80: mol_type = other DNA
caaagagccttgggagatggcccagctaagcatgctagaggacgcggcggtatagtcattaatcatgatctagaacctcc

SEQ ID NO: 110926 - DNA, 80 bp, synthetic construct
  misc_feature 1..80: note = Artificially Synthesized Probe
  source 1..80: mol_type = other DNA
aaacacagcaaaggggacttgggtgtctgcggtttttttgtttgtttgtttttaagatggagtttcattcttgtggccca

SEQ ID NO: 110927 - DNA, 80 bp, synthetic construct
  misc_feature 1..80: note = Artificially Synthesized Probe
  source 1..80: mol_type = other DNA
ggccaggctggtctcgaactcctcacctcaggtgatccacccaccttggcctcccaaagtgctgggattacaggcatgat

SEQ ID NO: 110928 - DNA, 80 bp, synthetic construct
  misc_feature 1..80: note = Artificially Synthesized Probe
  source 1..80: mol_type = other DNA
aattagagactccttgaaaatgggagagaatgagtgatgctttaacaagcttctaagatgaaatcctaaagctggggctt

SEQ ID NO: 110929 - DNA, 80 bp, synthetic construct
  misc_feature 1..80: note = Artificially Synthesized Probe
  source 1..80: mol_type = other DNA
agctatgcagcaagcacctgcgtaccccaagatgcagccaggaaggagtggggtaccccgaccacgtggggacacagccc

SEQ ID NO: 110930 - DNA, 80 bp, synthetic construct
  misc_feature 1..80: note = Artificially Synthesized Probe
  source 1..80: mol_type = other DNA
acacatatcacatatgtgcatatatacaccacacagtgcacacatgccacacacggacccacatcacatacatgcacata

SEQ ID NO: 110931 - DNA, 80 bp, synthetic construct
  misc_feature 1..80: note = Artificially Synthesized Probe
  source 1..80: mol_type = other DNA
cacacgcacacacatcacacatatgtgcacatcgcacacatcacatatgtgcatatagatgacacacgtgcacacatgcc

SEQ ID NO: 110932 - DNA, 80 bp, synthetic construct
  misc_feature 1..80: note = Artificially Synthesized Probe
  source 1..80: mol_type = other DNA
cacatatgcacacatcacacatgcagcacatatgtgcatacataaacacacgtgcacacatgccacacacgtgcacccac

SEQ ID NO: 110933 - DNA, 80 bp, synthetic construct
  misc_feature 1..80: note = Artificially Synthesized Probe
  source 1..80: mol_type = other DNA
gcatacatacacgtatctaccacacatcctgcatgcacacgcatcacacacatgcacaccatacacacatgcatacatat

SEQ ID NO: 110934 - DNA, 80 bp, synthetic construct
  misc_feature 1..80: note = Artificially Synthesized Probe
  source 1..80: mol_type = other DNA
atacacatatctaccacacctgcacacacacaccctgcatgcacatgcatcacacacatgcacaccatacatgcatacat

SEQ ID NO: 110935 - DNA, 80 bp, synthetic construct
  misc_feature 1..80: note = Artificially Synthesized Probe
  source 1..80: mol_type = other DNA
acacgcatcacacacatgcaccatacctgtgagttggattggctgatgagtctcccagttgtgacgtctatgcagccaat

SEQ ID NO: 110936 - DNA, 80 bp, synthetic construct
  misc_feature 1..80: note = Artificially Synthesized Probe
  source 1..80: mol_type = other DNA
aagcatcattcactcataactttgacagacatgcactgaatgcattcccatttaaactgcttctcctgtgctccagcaag

SEQ ID NO: 110937 - DNA, 80 bp, synthetic construct
  misc_feature 1..80: note = Artificially Synthesized Probe
  source 1..80: mol_type = other DNA
ccagcacatgggctccacggtgctgctgtttggaggatgcgtgaggccatctgtgaagccactgctgagtccaggggcct

SEQ ID NO: 110938 - DNA, 80 bp, synthetic construct
  misc_feature 1..80: note = Artificially Synthesized Probe
  source 1..80: mol_type = other DNA
acgagtttcctacacttgacactcagatgcatttatggtctactcttaccaaagtaaaaagcaacagatgaattgttgaa

SEQ ID NO: 110939 - DNA, 80 bp, synthetic construct
  misc_feature 1..80: note = Artificially Synthesized Probe
  source 1..80: mol_type = other DNA
ctgcctctaacctgagctcagataaagtaggacacttaagccctcatttttaggatgtatgaatgtggatattctctcat

SEQ ID NO: 110940 - DNA, 80 bp, synthetic construct
  misc_feature 1..80: note = Artificially Synthesized Probe
  source 1..80: mol_type = other DNA
catcccctctccatctgctcttaacccagactcaggttttgcttttctgcatacatgtacacacccatgtacacacacat

SEQ ID NO: 110941 - DNA, 80 bp, synthetic construct
  misc_feature 1..80: note = Artificially Synthesized Probe
  source 1..80: mol_type = other DNA
gtgatgcaaaacatgtttgaatgttgcgccgtagtcctgattccttcaaatcaacatcagctgactcttagcagcactgt

SEQ ID NO: 110942 - DNA, 80 bp, synthetic construct
  misc_feature 1..80: note = Artificially Synthesized Probe
  source 1..80: mol_type = other DNA
ggtgaaattacgcacagtgagatgagcacatttttacttgattgtaacaagtacggaagttaaagccccctggaaatctc

SEQ ID NO: 110943 - DNA, 80 bp, synthetic construct
  misc_feature 1..80: note = Artificially Synthesized Probe
  source 1..80: mol_type = other DNA
caagaaccacacagcatgacggtaataatgtgctcatcttcaggagaatgggaacaagtgctcagggtcaaagaactggg

SEQ ID NO: 110944 - DNA, 80 bp, synthetic construct
  misc_feature 1..80: note = Artificially Synthesized Probe
  source 1..80: mol_type = other DNA
gtgcaatggatgtatacagtgcatgtggggcgtgtgcaggtgtgcaatggatgtatatggtgcatgtggggtgtgtgcag

SEQ ID NO: 110945 - DNA, 80 bp, synthetic construct
  misc_feature 1..80: note = Artificially Synthesized Probe
  source 1..80: mol_type = other DNA
gcaatggatgtctatggtgcacatgtggtgtgcacaggtgtgcaatggatgtctatggtgcacgtgtggtgtgtgcaggt

SEQ ID NO: 110946 - DNA, 80 bp, synthetic construct
  misc_feature 1..80: note = Artificially Synthesized Probe
  source 1..80: mol_type = other DNA
caccttaataaagcccagagtatgctcagcacagtaagtgtgcaaatcctgaaacgctgtaaaactggacctgtgacttg

SEQ ID NO: 110947 - DNA, 80 bp, synthetic construct
  misc_feature 1..80: note = Artificially Synthesized Probe
  source 1..80: mol_type = other DNA
gctctggcctcctcatcgtctgtgggacacgcccattttaccagaaacacaaagttggtccctccatccatccttcgcct

SEQ ID NO: 110948 - DNA, 80 bp, synthetic construct
  misc_feature 1..80: note = Artificially Synthesized Probe
  source 1..80: mol_type = other DNA
agtcgcagaagctcctgccacaccactcccataatctctcagtgccaattacttggaggaaaaatggaatcatccccgtg

SEQ ID NO: 110949 - DNA, 80 bp, synthetic construct
  misc_feature 1..80: note = Artificially Synthesized Probe
  source 1..80: mol_type = other DNA
tcttcttcatgttgatggtgtggcctgtggagaggtggagccggtgtcttgctcctagagggagtcctgactccagcaga

SEQ ID NO: 110950 - DNA, 80 bp, synthetic construct
  misc_feature 1..80: note = Artificially Synthesized Probe
  source 1..80: mol_type = other DNA
cctatccctcactaccccccagccccagccctgcaccagttaccaaagacaaacaagagacacgtttctccaaaggatgg

SEQ ID NO: 110951 - DNA, 80 bp, synthetic construct
  misc_feature 1..80: note = Artificially Synthesized Probe
  source 1..80: mol_type = other DNA
gaggctgacagcccagttagatcgagtccaagcagcaaaatcacacagcacatcccgacaatcagccgcatcacatgcaa

SEQ ID NO: 110952 - DNA, 80 bp, synthetic construct
  misc_feature 1..80: note = Artificially Synthesized Probe
  source 1..80: mol_type = other DNA
gattaacatgccggaaaacgaccccatatcacaaagcagagcctggtttctcaaaggagaccttaatcttccctcaccct

SEQ ID NO: 110953 - DNA, 80 bp, synthetic construct
  misc_feature 1..80: note = Artificially Synthesized Probe
  source 1..80: mol_type = other DNA
gctttaaatatgtgtcaagcactaatgctgggaggacttaaataaatacatgagccttttcttctaataaactggcagat

SEQ ID NO: 110954 - DNA, 80 bp, synthetic construct
  misc_feature 1..80: note = Artificially Synthesized Probe
  source 1..80: mol_type = other DNA
tgcccattaaatacactttcgcgtgtttcttttaacaacgtgctcctttcacagaagtgttttatgctgcatttcgtaga

SEQ ID NO: 110955 - DNA, 80 bp, synthetic construct
  misc_feature 1..80: note = Artificially Synthesized Probe
  source 1..80: mol_type = other DNA
cccacaggaatctgtcccctcccctcggcggtggtcaggttggccttgagtcttccatgagaatctgcagaatgcggcac

SEQ ID NO: 110956 - DNA, 80 bp, synthetic construct
  misc_feature 1..80: note = Artificially Synthesized Probe
  source 1..80: mol_type = other DNA
ctcgagccgctggcatccatatttatcgagcagaggaagcatccctgtaactgcacggcggcacagagccactgcccacg

SEQ ID NO: 110957 - DNA, 80 bp, synthetic construct
  misc_feature 1..80: note = Artificially Synthesized Probe
  source 1..80: mol_type = other DNA
ctccatctccacgttcaggagcatccctgtaactggacagcagcacagagccactgcccacggcatgacccgccctccat

SEQ ID NO: 110958 - DNA, 80 bp, synthetic construct
  misc_feature 1..80: note = Artificially Synthesized Probe
  source 1..80: mol_type = other DNA
caggagcatccctgtaactggacagtggcacagagccactgcccacggcacgacccgccctccatctccacgttcaggag

SEQ ID NO: 110959 - DNA, 80 bp, synthetic construct
  misc_feature 1..80: note = Artificially Synthesized Probe
  source 1..80: mol_type = other DNA
tggacagtggcacagagccactgcccacggcacgacctgccctccatctccacgttcaggagcatccctgtaactggaca

SEQ ID NO: 110960 - DNA, 80 bp, synthetic construct
  misc_feature 1..80: note = Artificially Synthesized Probe
  source 1..80: mol_type = other DNA
acacacagaaaggcctttgaacttgtcatagttgaggcaaaggaataaatgatcggaccacgtttgtttcaatactctga

SEQ ID NO: 110961 - DNA, 80 bp, synthetic construct
  misc_feature 1..80: note = Artificially Synthesized Probe
  source 1..80: mol_type = other DNA
tccctacaggacaggaaactacgacagtcatctttgcacctgaagaaacaaattatttaaactttctcatcctgcagttt

SEQ ID NO: 110962 - DNA, 80 bp, synthetic construct
  misc_feature 1..80: note = Artificially Synthesized Probe
  source 1..80: mol_type = other DNA
gacatcccttccctgctcacccacgtccaggacctgttctttgtatagaggttcctgtcttctggtgttgagtgacacag

SEQ ID NO: 110963 - DNA, 80 bp, synthetic construct
  misc_feature 1..80: note = Artificially Synthesized Probe
  source 1..80: mol_type = other DNA
tatctgaccgtttctacaagcatctctcaaatcacaccacagaggaaaccaaaaggcctggttcagcctccaggggccgg

SEQ ID NO: 110964 - DNA, 80 bp, synthetic construct
  misc_feature 1..80: note = Artificially Synthesized Probe
  source 1..80: mol_type = other DNA
cttcaggattaaaagtggttcacggatttggggaactgcagaggacagtatgtgtgtacagagaattacacaatcatgta

SEQ ID NO: 110965 - DNA, 80 bp, synthetic construct
  misc_feature 1..80: note = Artificially Synthesized Probe
  source 1..80: mol_type = other DNA
ccatgcaccaagctcctggccactcttttctggctgccctgggctcgccagctgatgaggccaatgggccctcctgtccc

SEQ ID NO: 110966 - DNA, 80 bp, synthetic construct
  misc_feature 1..80: note = Artificially Synthesized Probe
  source 1..80: mol_type = other DNA
gaaaccccttgctgggagagccagtgctgactccagcttctcagcgggtttgattttggatgccgtgatcagaaccctgc

SEQ ID NO: 110967 - DNA, 80 bp, synthetic construct
  misc_feature 1..80: note = Artificially Synthesized Probe
  source 1..80: mol_type = other DNA
tttggaccaagctctgtcccccacacaatggactgacctcttgggactcagagtctgatgccgactggctgaggaaagtg

SEQ ID NO: 110968 - DNA, 80 bp, synthetic construct
  misc_feature 1..80: note = Artificially Synthesized Probe
  source 1..80: mol_type = other DNA
taaaaagttttagatggtggaccattggcagttttagaaatacactaaggccccggaagacctacctattggttcaggta

SEQ ID NO: 110969 - DNA, 80 bp, synthetic construct
  misc_feature 1..80: note = Artificially Synthesized Probe
  source 1..80: mol_type = other DNA
ggcttgagagcaatagaatttgcccgagcttaaaattaaactcagccctaataggaagtttatggaatgattcaccatct

SEQ ID NO: 110970 - DNA, 80 bp, synthetic construct
  misc_feature 1..80: note = Artificially Synthesized Probe
  source 1..80: mol_type = other DNA
gatgtgagtttattctgccaaaacgaggaataaggtccttcaagctaccagctttttgccgtctgggagcttgggtttca

SEQ ID NO: 110971 - DNA, 80 bp, synthetic construct
  misc_feature 1..80: note = Artificially Synthesized Probe
  source 1..80: mol_type = other DNA
tcagatccctgctttccctgggatctgggttgaaatggagttgaatgagggacccggacaaccagaatcatgctcaaaga

SEQ ID NO: 110972 - DNA, 80 bp, synthetic construct
  misc_feature 1..80: note = Artificially Synthesized Probe
  source 1..80: mol_type = other DNA
tgctcagctcaagctataaagctcatcgaacatttaggaaagtcagctgagtgtcattcagggcctccgcagctcagcat

SEQ ID NO: 110973 - DNA, 80 bp, synthetic construct
  misc_feature 1..80: note = Artificially Synthesized Probe
  source 1..80: mol_type = other DNA
tcaggtttgatcacagaaacctgtggcgtgtttctggggtaggatccttcctttaaataaaaacttacacaggaaccaaa

SEQ ID NO: 110974 - DNA, 80 bp, synthetic construct
  misc_feature 1..80: note = Artificially Synthesized Probe
  source 1..80: mol_type = other DNA
attcgaatccagtcaggcatcctgtattcaatctggaactctgctcttccttctggggggccctcaagctctgggaatca

SEQ ID NO: 110975 - DNA, 80 bp, synthetic construct
  misc_feature 1..80: note = Artificially Synthesized Probe
  source 1..80: mol_type = other DNA
ggaggactgaccaagacctgcggcggtgactgcccccgcccagccccacggcgctgacctggaactgccctgatgatgag

SEQ ID NO: 110976 - DNA, 80 bp, synthetic construct
  misc_feature 1..80: note = Artificially Synthesized Probe
  source 1..80: mol_type = other DNA
tcacatgagctgagagtgggatgggtctcatcatagctaccttctatccattcttttttacctaaggctttcttgagagg

SEQ ID NO: 110977 - DNA, 80 bp, synthetic construct
  misc_feature 1..80: note = Artificially Synthesized Probe
  source 1..80: mol_type = other DNA
cagcatggctgccccggctccttctcacctgggatttctcctggagcattcccgacgtccacacaccacatttcctccgc

SEQ ID NO: 110978 - DNA, 80 bp, synthetic construct
  misc_feature 1..80: note = Artificially Synthesized Probe
  source 1..80: mol_type = other DNA
ctccagttcttaagttcttgtcttttctgttgtctgcatttaatttaaatttctatgaatcgccgcgagacgaccctgtg

SEQ ID NO: 110979 - DNA, 80 bp, synthetic construct
  misc_feature 1..80: note = Artificially Synthesized Probe
  source 1..80: mol_type = other DNA
ctttgggggagatttcagaggtttcagggccttccctgaagcctttcctggaaggtggattctcttgctttttcagcaac

SEQ ID NO: 110980 - DNA, 80 bp, synthetic construct
  misc_feature 1..80: note = Artificially Synthesized Probe
  source 1..80: mol_type = other DNA
ccacgcgaggtctgtccacgaggcctgcactgcgtggtcgtgctgggtagacacaccggctaggagacgaatgtggaaga

SEQ ID NO: 110981 - DNA, 80 bp, synthetic construct
  misc_feature 1..80: note = Artificially Synthesized Probe
  source 1..80: mol_type = other DNA
tgatgctgcaaacgtctcttgagtgagagctcagtttccaaatggagtgacaaggagcagaacttctagacaccggaagt

SEQ ID NO: 110982 - DNA, 80 bp, synthetic construct
  misc_feature 1..80: note = Artificially Synthesized Probe
  source 1..80: mol_type = other DNA
caggacacggagaagagccagggaagcaggtggcccatgcagggcacagagccacccttccgggcagggcaagcggcctc

SEQ ID NO: 110983 - DNA, 80 bp, synthetic construct
  misc_feature 1..80: note = Artificially Synthesized Probe
  source 1..80: mol_type = other DNA
ggcttccacactggacgcgtcaaaagcaggtcccagaggagcaacagtggccccaaatggcatggtcacaaggctggttt

SEQ ID NO: 110984 - DNA, 80 bp, synthetic construct
  misc_feature 1..80: note = Artificially Synthesized Probe
  source 1..80: mol_type = other DNA
cggcaccaacggctggcatgttccttgggaaattagaggagggcgtgtctgccaaaggtggatttataacaagagcccaa

SEQ ID NO: 110985 - DNA, 80 bp, synthetic construct
  misc_feature 1..80: note = Artificially Synthesized Probe
  source 1..80: mol_type = other DNA
gtccatgagtacacatatgtgcatgtgtttgtgtccatgtgtctctggtatacacgtatttgtccacgtgtccctttgtg

SEQ ID NO: 110986 - DNA, 80 bp, synthetic construct
  misc_feature 1..80: note = Artificially Synthesized Probe
  source 1..80: mol_type = other DNA
ggtatacacatatgtatttgtccacgcgtccctttgtgtacacatatgtgaatgtgtttgtgtgtccatgtgtccctggt

SEQ ID NO: 110987 - DNA, 80 bp, synthetic construct
  misc_feature 1..80: note = Artificially Synthesized Probe
  source 1..80: mol_type = other DNA
tcagtacagtcaccaggctgcctaaaacacgacaaagcaaagccaattagcaatgctgaggactctcaggccaggatgcc

SEQ ID NO: 110988 - DNA, 80 bp, synthetic construct
  misc_feature 1..80: note = Artificially Synthesized Probe
  source 1..80: mol_type = other DNA
atgtatagtaatgcatgcattcataaatcatggttaacagaagcagagacacaaccggatacgacttcttcagaaggcct

SEQ ID NO: 110989 - DNA, 80 bp, synthetic construct
  misc_feature 1..80: note = Artificially Synthesized Probe
  source 1..80: mol_type = other DNA
ctgatagtaaggttaaaatccccgtccacataacacacccacacacaaacacaaactggctgttgccactagcgctccgt

SEQ ID NO: 110990 - DNA, 80 bp, synthetic construct
  misc_feature 1..80: note = Artificially Synthesized Probe
  source 1..80: mol_type = other DNA
atgccctgccactctggcaggtcctcaggcaggagtgtgagctcctaatgtctcaggagagacaggggaggagagaggag

SEQ ID NO: 110991 - DNA, 80 bp, synthetic construct
  misc_feature 1..80: note = Artificially Synthesized Probe
  source 1..80: mol_type = other DNA
gagtctgtgtcagcgtcagcaacagtgcccatcccgagctctttcccagcgcaccccaggacatggtggaaggtggaaga

SEQ ID NO: 110992 - DNA, 80 bp, synthetic construct
  misc_feature 1..80: note = Artificially Synthesized Probe
  source 1..80: mol_type = other DNA
cccctgggaaataataaagcacacgaacttgtgagacacaatcccttccccagattcccaactgtgtgatcctggcaggg

SEQ ID NO: 110993 - DNA, 80 bp, synthetic construct
  misc_feature 1..80: note = Artificially Synthesized Probe
  source 1..80: mol_type = other DNA
cagccacccatcctgagccagaatgtggacgtccactccatagagcacacgaagaggataaaacagcagggtgcactccg

SEQ ID NO: 110994 - DNA, 80 bp, synthetic construct
  misc_feature 1..80: note = Artificially Synthesized Probe
  source 1..80: mol_type = other DNA
aacctgtgtctgttgcatttcgaatattctgacggggcttcccgttatttcaggagaagctaattccccacacagttagt

SEQ ID NO: 110995 - DNA, 80 bp, synthetic construct
  misc_feature 1..80: note = Artificially Synthesized Probe
  source 1..80: mol_type = other DNA
ttaacccacactagtctcatctcaggcatctgtgtagaaggaactccccaggcagggctatgcgggggcagaatgcaggg

SEQ ID NO: 110996 - DNA, 80 bp, synthetic construct
  misc_feature 1..80: note = Artificially Synthesized Probe
  source 1..80: mol_type = other DNA
cctacggttcccagagcacgaagagctcctacgtccagcaggggatgttaagggtcacaccctcgaggccacagtgactg

SEQ ID NO: 110997 - DNA, 80 bp, synthetic construct
  misc_feature 1..80: note = Artificially Synthesized Probe
  source 1..80: mol_type = other DNA
acattcacacactgcacacacattcacacacactgcacacatattcacacacactgcaaacattcactgcacacacatac

SEQ ID NO: 110998 - DNA, 80 bp, synthetic construct
  misc_feature 1..80: note = Artificially Synthesized Probe
  source 1..80: mol_type = other DNA
attcacacactgcacacactacacacacattcacacacagcacacacattcacacacattcacacacactgcacacacac

SEQ ID NO: 110999 - DNA, 80 bp, synthetic construct
  misc_feature 1..80: note = Artificially Synthesized Probe
  source 1..80: mol_type = other DNA
ctacacacatacacattcacacactacacacattcacactgcacacattcacacactacacacacatacatacattcaca

SEQ ID NO: 111000 - DNA, 80 bp, synthetic construct
  misc_feature 1..80: note = Artificially Synthesized Probe
  source 1..80: mol_type = other DNA
acagattcacacacattgcacacacacattcacacacagtgcacacatacatattcacaaaatgcacatatacattcaca

SEQ ID NO: 111001 - DNA, 80 bp, synthetic construct
  misc_feature 1..80: note = Artificially Synthesized Probe
  source 1..80: mol_type = other DNA
acacattcacacacactgcacatgcggtacctgtgtgcacccgcatgtgcctactgtatgcatgcatttacacacttgtg

SEQ ID NO: 111002 - DNA, 80 bp, synthetic construct
  misc_feature 1..80: note = Artificially Synthesized Probe
  source 1..80: mol_type = other DNA
tacatgtgtacacatatgagcacacacatgcacactgtacacacacgtgcacatccacattcatccacaatgcacaaaca

SEQ ID NO: 111003 - DNA, 80 bp, synthetic construct
  misc_feature 1..80: note = Artificially Synthesized Probe
  source 1..80: mol_type = other DNA
ccatcgctctgccacagagcctctgggtgctgggtgagggtctacttccaaattcctctcccgggcattccagctcctgg

SEQ ID NO: 111004 - DNA, 80 bp, synthetic construct
  misc_feature 1..80: note = Artificially Synthesized Probe
  source 1..80: mol_type = other DNA
aggcacttgaaaatgtgaaagcaaggctgcaatgacggccgagccagagagcagcacctccctagcacaccctgcaccca

SEQ ID NO: 111005 - DNA, 80 bp, synthetic construct
  misc_feature 1..80: note = Artificially Synthesized Probe
  source 1..80: mol_type = other DNA
agcggcaaacggttattatttagaaggaggtcacatggtgaaagtccaagcctcctcaccttctagtcaaggcttgctga

SEQ ID NO: 111006 - DNA, 80 bp, synthetic construct
  misc_feature 1..80: note = Artificially Synthesized Probe
  source 1..80: mol_type = other DNA
atagggtctttacagaggtaagcgagcggagggcatttgggcggccctaatgcaatatgactggcgtgctgttaggaaga

SEQ ID NO: 111007 - DNA, 80 bp, synthetic construct
  misc_feature 1..80: note = Artificially Synthesized Probe
  source 1..80: mol_type = other DNA
tggcacactgacatctcaagttagacaatcatttaccactcaaagcaccgtggagtgaaggtagcttcccagggcagttt

SEQ ID NO: 111008 - DNA, 80 bp, synthetic construct
  misc_feature 1..80: note = Artificially Synthesized Probe
  source 1..80: mol_type = other DNA
cagcagccggtggcagcaggtgacagtggggaccatcgagatggcccttgcaacagtctaggaagagactcactgcccca

SEQ ID NO: 111009 - DNA, 80 bp, synthetic construct
  misc_feature 1..80: note = Artificially Synthesized Probe
  source 1..80: mol_type = other DNA
gcaccttcttgttcctggtagggttccagaacagcgatgctgcttctcacgtggggtccctggtccttgctggcactttc

SEQ ID NO: 111010 - DNA, 80 bp, synthetic construct
  misc_feature 1..80: note = Artificially Synthesized Probe
  source 1..80: mol_type = other DNA
aggccccacagcccccaagcctggtgacattcccccaggtcactttctatctgctccaggtaggctacctcccagccccc

SEQ ID NO: 111011 - DNA, 80 bp, synthetic construct
  misc_feature 1..80: note = Artificially Synthesized Probe
  source 1..80: mol_type = other DNA
tcagagtggtccccagaggcccctgacacagacacgagcacatacctgcaggcacacacctgcaggggcacacttgtgga

SEQ ID NO: 111012 - DNA, 80 bp, synthetic construct
  misc_feature 1..80: note = Artificially Synthesized Probe
  source 1..80: mol_type = other DNA
ccacaggtgcatatatccccccatgtccaccctctgcacagcccccttgccaggctgccctctgcacatttctgtttggt

SEQ ID NO: 111013 - DNA, 80 bp, synthetic construct
  misc_feature 1..80: note = Artificially Synthesized Probe
  source 1..80: mol_type = other DNA
atgagcagaggcaccatgaggacatggtccaggcacacatcaaaggcggtggccagaggccgcctggctccccatcagca

SEQ ID NO: 111014 - DNA, 80 bp, synthetic construct
  misc_feature 1..80: note = Artificially Synthesized Probe
  source 1..80: mol_type = other DNA
ggggttggggacccctggtctggaggaccagtggggacagtgtctgctgcggtgtgatgtctggcagtgaggctggggac

SEQ ID NO: 111015 - DNA, 80 bp, synthetic construct
  misc_feature 1..80: note = Artificially Synthesized Probe
  source 1..80: mol_type = other DNA
ctggggacggcgtctgctgcggggtattgtctggcagtgaggctggggacggcgtctgctgcggggtattgtctggcagt

SEQ ID NO: 111016 - DNA, 80 bp, synthetic construct
  misc_feature 1..80: note = Artificially Synthesized Probe
  source 1..80: mol_type = other DNA
ctggcagtgaagctggggacggtgtccgctgcagtgtgatgtctggcagtgaggctggggacggtgtctgctgcggtgtg

SEQ ID NO: 111017 - DNA, 80 bp, synthetic construct
  misc_feature 1..80: note = Artificially Synthesized Probe
  source 1..80: mol_type = other DNA
agacagccgcagtcatgctggggacacgcggagggagagcgcccgtgtgaagacgaagacagccgcagtcatgctgggga

SEQ ID NO: 111018 - DNA, 80 bp, synthetic construct
  misc_feature 1..80: note = Artificially Synthesized Probe
  source 1..80: mol_type = other DNA
tcccggctttaacctgggcagagagatgagagttctgtaatttttgaagattgaattcagtctgataaataattcaaagt

SEQ ID NO: 111019 - DNA, 80 bp, synthetic construct
  misc_feature 1..80: note = Artificially Synthesized Probe
  source 1..80: mol_type = other DNA
gcctccaccccagctccctcccacgtctacatccaagatgtctggcttccactttccgtgtcactaaagggcggggaagc

SEQ ID NO: 111020 - DNA, 80 bp, synthetic construct
  misc_feature 1..80: note = Artificially Synthesized Probe
  source 1..80: mol_type = other DNA
ggaaggagccagtcaggaaaagggacctgccaacctgcttgttagccgagcagcgaggcactgtgagcacacgggatgat

SEQ ID NO: 111021 - DNA, 80 bp, synthetic construct
  misc_feature 1..80: note = Artificially Synthesized Probe
  source 1..80: mol_type = other DNA
gtgtgagtgttgattgtggacaacgcccagaccctgcctgcagcacagaggaattccaggtgtcaaagcgataggaattc

SEQ ID NO: 111022 - DNA, 80 bp, synthetic construct
  misc_feature 1..80: note = Artificially Synthesized Probe
  source 1..80: mol_type = other DNA
cagcctaagcttctgcaggccttctctctcacctctctcatatccttccatcatttaagtagattaaactcagaaacatt

SEQ ID NO: 111023 - DNA, 80 bp, synthetic construct
  misc_feature 1..80: note = Artificially Synthesized Probe
  source 1..80: mol_type = other DNA
acctccctgccacctccagcccgtaatttagagagaagctgatgcagttgactcttcccagcttgccatttaaacgcaca

SEQ ID NO: 111024 - DNA, 80 bp, synthetic construct
  misc_feature 1..80: note = Artificially Synthesized Probe
  source 1..80: mol_type = other DNA
agtctgtgtctcacctgcaatcacagctcattgagccgccagctaattagagagcccctaagtgaatcagtgacacaatg

SEQ ID NO: 111025 - DNA, 80 bp, synthetic construct
  misc_feature 1..80: note = Artificially Synthesized Probe
  source 1..80: mol_type = other DNA
gtgaaatatcccagctgcacgcacacagagtggggtgtgaaatatcccagccgcacgcacacagggcgagtgtgtaatat

SEQ ID NO: 111026 - DNA, 80 bp, synthetic construct
  misc_feature 1..80: note = Artificially Synthesized Probe
  source 1..80: mol_type = other DNA
ggcgggtgtgaaatatcccagccgcaggcacacagggcgggtgtgaaatatcccagccgcacacacacagggcgggtgtg

SEQ ID NO: 111027 - DNA, 80 bp, synthetic construct
  misc_feature 1..80: note = Artificially Synthesized Probe
  source 1..80: mol_type = other DNA
cacacagggtgggtgtgaaatatcccagccgcacacacacagggcgggtgtgaaatatcccagccgcacgcacacagagt

SEQ ID NO: 111028 - DNA, 80 bp, synthetic construct
  misc_feature 1..80: note = Artificially Synthesized Probe
  source 1..80: mol_type = other DNA
ctccccggctttgttttctaggaaggacgtggcggctgctgcccaactttgaacggaggagcacaggaggagctccaagg

SEQ ID NO: 111029 - DNA, 80 bp, synthetic construct
  misc_feature 1..80: note = Artificially Synthesized Probe
  source 1..80: mol_type = other DNA
cgctctgtccctgcagccctccaggcccagagcacctggagcgacctgggtttggcttcccatgccctgagcagcacctg

SEQ ID NO: 111030 - DNA, 80 bp, synthetic construct
  misc_feature 1..80: note = Artificially Synthesized Probe
  source 1..80: mol_type = other DNA
gaacaaggagacggccctcacctagcagtgtaaccctgaatgccaaggccatgcctggtgcagaaaggcccaaacaccag

SEQ ID NO: 111031 - DNA, 80 bp, synthetic construct
  misc_feature 1..80: note = Artificially Synthesized Probe
  source 1..80: mol_type = other DNA
ctggggaagacattctgcagctctaattttaaaactatttggcattttcaaatccagttttcaagtccctggggtgggta

SEQ ID NO: 111032 - DNA, 80 bp, synthetic construct
  misc_feature 1..80: note = Artificially Synthesized Probe
  source 1..80: mol_type = other DNA
gagacagagagagacagagacagaggaacagagacagagagagagacaaagggagcaggagagggacagagacagagata

SEQ ID NO: 111033 - DNA, 80 bp, synthetic construct
  misc_feature 1..80: note = Artificially Synthesized Probe
  source 1..80: mol_type = other DNA
cacagggagacagagagaaagaatcagagacagagatagccagagaacagcagagacagagtcccagcagttgcccgtcc

SEQ ID NO: 111034 - DNA, 80 bp, synthetic construct
  misc_feature 1..80: note = Artificially Synthesized Probe
  source 1..80: mol_type = other DNA
gacagacgccccacagcaaaagccaggacacctgaactggtcaggccagcagtgactcagggcctggagagccccgtggg

SEQ ID NO: 111035 - DNA, 80 bp, synthetic construct
  misc_feature 1..80: note = Artificially Synthesized Probe
  source 1..80: mol_type = other DNA
ctccttggccccactccatgtcactggtgactggtcaacaaggtgcaagctgctaccttcacagagggtgatcctaccgg

SEQ ID NO: 111036 - DNA, 80 bp, synthetic construct
  misc_feature 1..80: note = Artificially Synthesized Probe
  source 1..80: mol_type = other DNA
caggggaaactgagtcctttcagggcagtaataagggaaggtttcgaccactgttagctgcagaagggccaaccccttta

SEQ ID NO: 111037 - DNA, 80 bp, synthetic construct
  misc_feature 1..80: note = Artificially Synthesized Probe
  source 1..80: mol_type = other DNA
cctccacctggatgaccccctcacctggaccgcccccccacctggaccgccccctccacctggatgaccccctccacctg

SEQ ID NO: 111038 - DNA, 80 bp, synthetic construct
  misc_feature 1..80: note = Artificially Synthesized Probe
  source 1..80: mol_type = other DNA
ccaccccctccacctggacgaccccctccacctgggctgccccctccacctggaccaccccctccacctggggtgtgcca

SEQ ID NO: 111039 - DNA, 80 bp, synthetic construct
  misc_feature 1..80: note = Artificially Synthesized Probe
  source 1..80: mol_type = other DNA
gaggaattaagctccgcatgcattagctatcatcctgatgctccccatcccccttccccactgacaggccccagtgtgtg

SEQ ID NO: 111040 - DNA, 80 bp, synthetic construct
  misc_feature 1..80: note = Artificially Synthesized Probe
  source 1..80: mol_type = other DNA
atatcctctccacacactgcataattaactgaatatccgacaatcggcagatccatactgttgaagctggactagccaca

SEQ ID NO: 111041 - DNA, 80 bp, synthetic construct
  misc_feature 1..80: note = Artificially Synthesized Probe
  source 1..80: mol_type = other DNA
tcagacaggcagggccacgctgtctgcacggctccaccgagaggccgtccatcgacactgatgacgaatctcgtctgtgc

SEQ ID NO: 111042 - DNA, 80 bp, synthetic construct
  misc_feature 1..80: note = Artificially Synthesized Probe
  source 1..80: mol_type = other DNA
ggggcaatccagcttctctgcagacactgctggcttttagtttgtgccaaattttaataaacgttaataactcacttgat

SEQ ID NO: 111043 - DNA, 80 bp, synthetic construct
  misc_feature 1..80: note = Artificially Synthesized Probe
  source 1..80: mol_type = other DNA
aaggggtgaagaagcgtcctgaggcctctttcagaagcgcattagcccatccgtgaggctcttcctcagggcctcagcgc

SEQ ID NO: 111044 - DNA, 80 bp, synthetic construct
  misc_feature 1..80: note = Artificially Synthesized Probe
  source 1..80: mol_type = other DNA
ggttaaaagctgcaccatcaaaagacggtcaggttgttccctcctcatttaagccaattttaaaacgatttttcctccta

SEQ ID NO: 111045 - DNA, 80 bp, synthetic construct
  misc_feature 1..80: note = Artificially Synthesized Probe
  source 1..80: mol_type = other DNA
ccggggcccgggcaggccctgtggtctccctgcctgggctgtacttgctcagccttttgcaactgcccggtaccaacggt

SEQ ID NO: 111046 - DNA, 80 bp, synthetic construct
  misc_feature 1..80: note = Artificially Synthesized Probe
  source 1..80: mol_type = other DNA
cagaaaatacagtctgcatggaacttccacatcccctcactctctaccagaacggcagcccacctcaaagacaccgcacg

SEQ ID NO: 111047 - DNA, 80 bp, synthetic construct
  misc_feature 1..80: note = Artificially Synthesized Probe
  source 1..80: mol_type = other DNA
cctttcaccagactgcagagtgaggtgaaaccagggcctcataggtgtgagggccatcggggaggtgccgccggcagaag

SEQ ID NO: 111048 - DNA, 80 bp, synthetic construct
  misc_feature 1..80: note = Artificially Synthesized Probe
  source 1..80: mol_type = other DNA
ttattgagcatcagggaatatgaaagtggccatgggcctccaaacagctcagaatgtaaaggggaagagctctgtgctgt

SEQ ID NO: 111049 - DNA, 80 bp, synthetic construct
  misc_feature 1..80: note = Artificially Synthesized Probe
  source 1..80: mol_type = other DNA
ccagggccctgcgtgtgctgtttctctgtcttgaaaatgacaccgaacgtttatggccagtgagcacccaccgcaagccc

SEQ ID NO: 111050 - DNA, 80 bp, synthetic construct
  misc_feature 1..80: note = Artificially Synthesized Probe
  source 1..80: mol_type = other DNA
cagggggagccgcaggcacagggggagccgcaggcacagggggagccgcagacagacatgggaggagccgcagacacggg

SEQ ID NO: 111051 - DNA, 80 bp, synthetic construct
  misc_feature 1..80: note = Artificially Synthesized Probe
  source 1..80: mol_type = other DNA
agggggagctgcagacacaggaggagacacacaaggagccgcagacacagggggagccacagacagacatgggaggagcc

SEQ ID NO: 111052 - DNA, 80 bp, synthetic construct
  misc_feature 1..80: note = Artificially Synthesized Probe
  source 1..80: mol_type = other DNA
tgagattaacgcccgttttgtggatcgggggcagaagctgcacctgtgaccgacggtcttggggctgccaggggagccgc

SEQ ID NO: 111053 - DNA, 80 bp, synthetic construct
  misc_feature 1..80: note = Artificially Synthesized Probe
  source 1..80: mol_type = other DNA
gacacagggggagctgcagacagacatgggaggagccgcagacacagggagccgcagacacagggagccgcagacacagg

SEQ ID NO: 111054 - DNA, 80 bp, synthetic construct
  misc_feature 1..80: note = Artificially Synthesized Probe
  source 1..80: mol_type = other DNA
gacacacgaggagccgcagacacagggggagccgcagacagacatgggaggagccacagacacgggagccgcagacacgg

SEQ ID NO: 111055 - DNA, 80 bp, synthetic construct
  misc_feature 1..80: note = Artificially Synthesized Probe
  source 1..80: mol_type = other DNA
cgcagacagacatgggaggagccgcagacacggggagccgcagacacaggaggagacacacgaggagccgcaggcacagg

SEQ ID NO: 111056 - DNA, 80 bp, synthetic construct
  misc_feature 1..80: note = Artificially Synthesized Probe
  source 1..80: mol_type = other DNA
cctgctgcctgggacgacattactgcatctgcatttgaggtgtggggcccagaggggctcaggtaccctacggggggagt

SEQ ID NO: 111057 - DNA, 80 bp, synthetic construct
  misc_feature 1..80: note = Artificially Synthesized Probe
  source 1..80: mol_type = other DNA
atcagggataagatctcgacaaagaccatctcctggctgccttttatattcaaatccaccacagatcaactcctggggcg

SEQ ID NO: 111058 - DNA, 80 bp, synthetic construct
  misc_feature 1..80: note = Artificially Synthesized Probe
  source 1..80: mol_type = other DNA
ctcaagccagtggccaagcctggaccagcctccagcagggacagcaccgtggctgtggggacagtggggacagcgcctcg

SEQ ID NO: 111059 - DNA, 80 bp, synthetic construct
  misc_feature 1..80: note = Artificially Synthesized Probe
  source 1..80: mol_type = other DNA
ttttttctacattgcctagagttcggctatttttctcttcccaaagagcctacccagcaaattttactggacaaagtgcc

SEQ ID NO: 111060 - DNA, 80 bp, synthetic construct
  misc_feature 1..80: note = Artificially Synthesized Probe
  source 1..80: mol_type = other DNA
ataatttaaaattgctaattgcacgtaatcgcaagtaatttttgttctttggtgagaatcgaggtactacgttatgtggg

SEQ ID NO: 111061 - DNA, 80 bp, synthetic construct
  misc_feature 1..80: note = Artificially Synthesized Probe
  source 1..80: mol_type = other DNA
gacaacaggtggccaagggggtgaccttcccaaggagctggtccctccgccatcctgagaacagtgaatttgtatttgca

SEQ ID NO: 111062 - DNA, 80 bp, synthetic construct
  misc_feature 1..80: note = Artificially Synthesized Probe
  source 1..80: mol_type = other DNA
tcctctcagcttcctcttccatctgaaccttccctccctccccaagtgttcgtcccttgtccacctggaaagcctctctg

SEQ ID NO: 111063 - DNA, 80 bp, synthetic construct
  misc_feature 1..80: note = Artificially Synthesized Probe
  source 1..80: mol_type = other DNA
cgggagcaactcacttccgccgcacgggaggggtcgcggtcaaagggcatccacagaggcgctggggtgaagcggggaag

SEQ ID NO: 111064 - DNA, 80 bp, synthetic construct
  misc_feature 1..80: note = Artificially Synthesized Probe
  source 1..80: mol_type = other DNA
ggccccgacaggctgtaaggcagcacccccacaccccggccccaacaggctgtatcaccccccacaccccggccccgaca

SEQ ID NO: 111065 - DNA, 80 bp, synthetic construct
  misc_feature 1..80: note = Artificially Synthesized Probe
  source 1..80: mol_type = other DNA
cgcatggccttgttggtagcttccttctttattaacttggccccatttattaaccaccagcttcctgagggatgaaacca

SEQ ID NO: 111066 - DNA, 80 bp, synthetic construct
  misc_feature 1..80: note = Artificially Synthesized Probe
  source 1..80: mol_type = other DNA
ggcctggggacgctcagctggcaggatatgcctccccaggtgtgcgggcggcctcctcgtagtggaggcaggggcggagg

SEQ ID NO: 111067 - DNA, 80 bp, synthetic construct
  misc_feature 1..80: note = Artificially Synthesized Probe
  source 1..80: mol_type = other DNA
cgtcccctctaacagggtggggtggggggcactgactggtcggaccctgcaagatccccacgggcaagagtggctgatca

SEQ ID NO: 111068 - DNA, 80 bp, synthetic construct
  misc_feature 1..80: note = Artificially Synthesized Probe
  source 1..80: mol_type = other DNA
cgtcgcagtggatttctcttgcactgttgctttaagaactgtcagagcggtgagatgacggcagcctgtgcgaatcggcc

SEQ ID NO: 111069 - DNA, 80 bp, synthetic construct
  misc_feature 1..80: note = Artificially Synthesized Probe
  source 1..80: mol_type = other DNA
cacggacgtttgtacctgaagccctcaagtctgccctataaaggagatgaaccctgaaaacactgacccctgaaatcagc

SEQ ID NO: 111070 - DNA, 80 bp, synthetic construct
  misc_feature 1..80: note = Artificially Synthesized Probe
  source 1..80: mol_type = other DNA
ctctggccttgcctccaagtctgtctccaaaacaatgagctggggaagagaaactctgtacggtcctccctactcccttg

SEQ ID NO: 111071 - DNA, 80 bp, synthetic construct
  misc_feature 1..80: note = Artificially Synthesized Probe
  source 1..80: mol_type = other DNA
agagaaaggctctcagccgggcaggaccaccaggcacacaagggggggatgggagttagaggtgccagccctgctcctga

SEQ ID NO: 111072 - DNA, 80 bp, synthetic construct
  misc_feature 1..80: note = Artificially Synthesized Probe
  source 1..80: mol_type = other DNA
cgtaacatgtctagaacattcctagagccagaaggatgtaggaacttccttccagaatacacttcccagtggacagggaa

SEQ ID NO: 111073 - DNA, 80 bp, synthetic construct
  misc_feature 1..80: note = Artificially Synthesized Probe
  source 1..80: mol_type = other DNA
tgggcacctgtaatcccagctacgcgggaggctgcgggtgaaggtgggcgcctgtaatcccagctacgtgggaggctgca

SEQ ID NO: 111074 - DNA, 80 bp, synthetic construct
  misc_feature 1..80: note = Artificially Synthesized Probe
  source 1..80: mol_type = other DNA
tcttggtctcgctgacttcaagaatgaagccgcggaccctcgcggtgagtgttacagtttttaaagatggtgtgtccaga

SEQ ID NO: 111075 - DNA, 80 bp, synthetic construct
  misc_feature 1..80: note = Artificially Synthesized Probe
  source 1..80: mol_type = other DNA
gccggggtgcttccggcctgggtggccggaggaggaggcagggagagccctgcggctgaacagggcagcgccccccgcat

SEQ ID NO: 111076 - DNA, 80 bp, synthetic construct
  misc_feature 1..80: note = Artificially Synthesized Probe
  source 1..80: mol_type = other DNA
tggcttcaagagtgaagctgaagaccctcacagtgagtgttacagctcataaaggtagcatatccggagttgttcattcc

SEQ ID NO: 111077 - DNA, 80 bp, synthetic construct
  misc_feature 1..80: note = Artificially Synthesized Probe
  source 1..80: mol_type = other DNA
ccaaccggtttgctgctgctggctctggcagcctgcttttatccccatatctggccgcacctacatcctgctgattggtc

SEQ ID NO: 111078 - DNA, 80 bp, synthetic construct
  misc_feature 1..80: note = Artificially Synthesized Probe
  source 1..80: mol_type = other DNA
caatcctttagctagacagaaaacttctccaagtccccaccctcccagcagcccagccagcttcacctctcactggtact

SEQ ID NO: 111079 - DNA, 80 bp, synthetic construct
  misc_feature 1..80: note = Artificially Synthesized Probe
  source 1..80: mol_type = other DNA
atccagcctccaatcaagcccagcaggtgccggccagtcccacggagtgccaggcccgctaagcccgtgcccacccggaa

SEQ ID NO: 111080 - DNA, 80 bp, synthetic construct
  misc_feature 1..80: note = Artificially Synthesized Probe
  source 1..80: mol_type = other DNA
cagagcagacaccgaggcagagaaggcgcccagagtgagcgagggctgctagcacgttatcacctctcaatgtggacttg

SEQ ID NO: 111081 - DNA, 80 bp, synthetic construct
  misc_feature 1..80: note = Artificially Synthesized Probe
  source 1..80: mol_type = other DNA
aactgcaccaagacacagcagtttgctctcaagcagtttaaactcgtctaatgctttaactggcctgtcaaatcattgtt

SEQ ID NO: 111082 - DNA, 80 bp, synthetic construct
  misc_feature 1..80: note = Artificially Synthesized Probe
  source 1..80: mol_type = other DNA
ctgaagctgcgaagagaggcagcagccatgagaaggtggctaaccccgtcgggggccatggctgcctaggggaggccggc

SEQ ID NO: 111083 - DNA, 80 bp, synthetic construct
  misc_feature 1..80: note = Artificially Synthesized Probe
  source 1..80: mol_type = other DNA
gctcagcctctgcacacaaaccatccttctgcgtttaattggtcctctccaggggatgttttttgaaactaggtctttga

SEQ ID NO: 111084 - DNA, 80 bp, synthetic construct
  misc_feature 1..80: note = Artificially Synthesized Probe
  source 1..80: mol_type = other DNA
ccttttttgctgaggaacgtgttatcaattttaaaattttcccaaatgttgaacaatggaagtgttgtttgcagagagag

SEQ ID NO: 111085 - DNA, 80 bp, synthetic construct
  misc_feature 1..80: note = Artificially Synthesized Probe
  source 1..80: mol_type = other DNA
cataggctagcgagagtctaaagaggtggtgcaggctcaaagccatgtgctcgtcatcacagcttccatttaaatcttga

SEQ ID NO: 111086 - DNA, 80 bp, synthetic construct
  misc_feature 1..80: note = Artificially Synthesized Probe
  source 1..80: mol_type = other DNA
gtccttcgtttccgctgtcagctcagcaggtgacttattcccagtgctgctcttctcacagacacaaaaccaacagttcc

SEQ ID NO: 111087 - DNA, 80 bp, synthetic construct
  misc_feature 1..80: note = Artificially Synthesized Probe
  source 1..80: mol_type = other DNA
aaaaatacaaaagttagccgcgcttataatcccagctgcttgggagagtgaggcaggagaatcacttgaaccggggaggc

SEQ ID NO: 111088 - DNA, 80 bp, synthetic construct
  misc_feature 1..80: note = Artificially Synthesized Probe
  source 1..80: mol_type = other DNA
caaaggcaaataggaataccaggagtgcatgctttgtgtgttttcatcaagaacatagtcaccaaaatccaagcggatgg

SEQ ID NO: 111089 - DNA, 80 bp, synthetic construct
  misc_feature 1..80: note = Artificially Synthesized Probe
  source 1..80: mol_type = other DNA
tgtggtgtgcgtggtgccctgcgcatttgtgctggctttgcacccccctcctgccacgtcccgtgcaaacgctcaggtgt

SEQ ID NO: 111090 - DNA, 80 bp, synthetic construct
  misc_feature 1..80: note = Artificially Synthesized Probe
  source 1..80: mol_type = other DNA
ggaagtttcttgacaaaggtctgagtcaaccatgggtaaagccagaataaaccctgctagttcttttgaggtgtgaacag

SEQ ID NO: 111091 - DNA, 80 bp, synthetic construct
  misc_feature 1..80: note = Artificially Synthesized Probe
  source 1..80: mol_type = other DNA
gacattttgggtcgcatggaaatctgcctcttaagagacctggcctcctgtctagggttagagaacactgtgttcccaga

SEQ ID NO: 111092 - DNA, 80 bp, synthetic construct
  misc_feature 1..80: note = Artificially Synthesized Probe
  source 1..80: mol_type = other DNA
tcagcatagtaaacccaagatataaaaaccaacaattgagtaactggtcttttccgtctgtcttgggaaagtagcttatc

SEQ ID NO: 111093 - DNA, 80 bp, synthetic construct
  misc_feature 1..80: note = Artificially Synthesized Probe
  source 1..80: mol_type = other DNA
ggctcagatgtccacagccaggaagccgcgggcagagcagcggggtcgaggctgcggctgagtttgtgagctgtggcagc

SEQ ID NO: 111094 - DNA, 80 bp, synthetic construct
  misc_feature 1..80: note = Artificially Synthesized Probe
  source 1..80: mol_type = other DNA
agacggctgatccctcctcgtgctcccacatgcagcagccagacacagacggctcatccctcctcgtgctcccacacaca

SEQ ID NO: 111095 - DNA, 80 bp, synthetic construct
  misc_feature 1..80: note = Artificially Synthesized Probe
  source 1..80: mol_type = other DNA
ctcatgctcccacacagcagcgggatatagacggtggtccctcctcgtgctcccacgcagcagcaggacatagacggctc

SEQ ID NO: 111096 - DNA, 80 bp, synthetic construct
  misc_feature 1..80: note = Artificially Synthesized Probe
  source 1..80: mol_type = other DNA
aacacgcatgaaaaaaaacacttcttgttacgttcatgccatgcttttgtattcgccacaataagaaaaccaagcaagta

SEQ ID NO: 111097 - DNA, 80 bp, synthetic construct
  misc_feature 1..80: note = Artificially Synthesized Probe
  source 1..80: mol_type = other DNA
cccagcctcttgtagccaagacggggcaggagacagagcaaaaccactgagaccaccactgagagggtaaccaggcttct

SEQ ID NO: 111098 - DNA, 80 bp, synthetic construct
  misc_feature 1..80: note = Artificially Synthesized Probe
  source 1..80: mol_type = other DNA
cctcaggcccaggagagcagggtccggggcgcgtcctcagaagccggcagggcgggctcctcgctgagccgcagggcgag

SEQ ID NO: 111099 - DNA, 80 bp, synthetic construct
  misc_feature 1..80: note = Artificially Synthesized Probe
  source 1..80: mol_type = other DNA
tggaagctttaatcatcaacggtgttggccgccaatggcataatgaccggacctcaccccacccgcagccctagtggaca

SEQ ID NO: 111100 - DNA, 80 bp, synthetic construct
  misc_feature 1..80: note = Artificially Synthesized Probe
  source 1..80: mol_type = other DNA
gggtgacagcatgtctcagaacacactgtgagcacagacctagaatcaccacgtcgttcagaatcgccacctcacagaga

SEQ ID NO: 111101 - DNA, 80 bp, synthetic construct
  misc_feature 1..80: note = Artificially Synthesized Probe
  source 1..80: mol_type = other DNA
aagaacgcctgaaagacatgttcatagctatattcgatgtcgttggattttccaacatggactgatgctcttcaattctc

SEQ ID NO: 111102 - DNA, 80 bp, synthetic construct
  misc_feature 1..80: note = Artificially Synthesized Probe
  source 1..80: mol_type = other DNA
cactgttgtgtgccaggaactctccgagtcagccaggcactgggcactgttgtgggctgggcactctccaagtcagccgg

SEQ ID NO: 111103 - DNA, 80 bp, synthetic construct
  misc_feature 1..80: note = Artificially Synthesized Probe
  source 1..80: mol_type = other DNA
actctggtaataggaagagtgagaatttgagctcaggcagagccactgtcggtggttttgacagaaattatggactcttt

SEQ ID NO: 111104 - DNA, 80 bp, synthetic construct
  misc_feature 1..80: note = Artificially Synthesized Probe
  source 1..80: mol_type = other DNA
tctgcccgcatccaatggagtgagcaggtgcaggcgatgaatgtactatcaccaataattttggaacttctactacatat

SEQ ID NO: 111105 - DNA, 80 bp, synthetic construct
  misc_feature 1..80: note = Artificially Synthesized Probe
  source 1..80: mol_type = other DNA
ttatcctccactgggtacaaaaaggatgacaggaaccctcctcatcacgctcgtcatctcagtaattccctgggagcttt

SEQ ID NO: 111106 - DNA, 80 bp, synthetic construct
  misc_feature 1..80: note = Artificially Synthesized Probe
  source 1..80: mol_type = other DNA
gctgttgctctcagtggaaaacatacaatatttctgacgtgcccaggctttgggccatgctgcaaatgtatcctgccatt

SEQ ID NO: 111107 - DNA, 80 bp, synthetic construct
  misc_feature 1..80: note = Artificially Synthesized Probe
  source 1..80: mol_type = other DNA
agcattgctaactaatgcaaggctgcaggagagaccagcaaatgacaatagccactctcctcagaaggacagggatgtgc

SEQ ID NO: 111108 - DNA, 80 bp, synthetic construct
  misc_feature 1..80: note = Artificially Synthesized Probe
  source 1..80: mol_type = other DNA
tcctgtgtcccagccctgcctccacagcttctcctcatcaggcctgccattcccacaccacagagcatgctgctgtaaga

SEQ ID NO: 111109 - DNA, 80 bp, synthetic construct
  misc_feature 1..80: note = Artificially Synthesized Probe
  source 1..80: mol_type = other DNA
ctctgagctagggaagtagagatgctctatacctgtgtccacacccctcagaggacaccaaaggtttcacagagagagct

SEQ ID NO: 111110 - DNA, 80 bp, synthetic construct
  misc_feature 1..80: note = Artificially Synthesized Probe
  source 1..80: mol_type = other DNA
gagcaaacctgcacccgcggcagcctgaactgccgtttgtcgcgtagtcctcgagtctcggagcgcaggggtcccgaggg

SEQ ID NO: 111111 - DNA, 80 bp, synthetic construct
  misc_feature 1..80: note = Artificially Synthesized Probe
  source 1..80: mol_type = other DNA
atgttctccaggctccctgggcaaatggagtcctaagtattttatattttttgagctactataaatgggattattatctg

SEQ ID NO: 111112 - DNA, 80 bp, synthetic construct
  misc_feature 1..80: note = Artificially Synthesized Probe
  source 1..80: mol_type = other DNA
ttaggattctatatgtaagatcatgtcatctgcaaacagggacaattttaacttcttttgttccaatttggatgcctttt

SEQ ID NO: 111113 - DNA, 80 bp, synthetic construct
  misc_feature 1..80: note = Artificially Synthesized Probe
  source 1..80: mol_type = other DNA
cattgcgtatgatgttatctgtgagtttgtcatatatggtctttattatgttgaagcacatcccttctacagtatatcta

SEQ ID NO: 111114 - DNA, 80 bp, synthetic construct
  misc_feature 1..80: note = Artificially Synthesized Probe
  source 1..80: mol_type = other DNA
ccagttgatcgtggtgaatgatccttttcatgagctgttgaattcagtctgctggtattctttcgagggtttttgcatct

SEQ ID NO: 111115 - DNA, 80 bp, synthetic construct
  misc_feature 1..80: note = Artificially Synthesized Probe
  source 1..80: mol_type = other DNA
aatgttaggtaagatcagcagtaaagccatcaggtcctgaactctttttatgggagactttttattactaatcaaatctc

SEQ ID NO: 111116 - DNA, 80 bp, synthetic construct
  misc_feature 1..80: note = Artificially Synthesized Probe
  source 1..80: mol_type = other DNA
aatgtttcctccttcatttctcattccacttgacttttctcttttttcttagtctaaaggttttcaattttgtttatcat

SEQ ID NO: 111117 - DNA, 80 bp, synthetic construct
  misc_feature 1..80: note = Artificially Synthesized Probe
  source 1..80: mol_type = other DNA
tggattctttcttcttttctgatgtaggcatttatcactataaacatccctcttagacctgcttctgctgcatcccatag

SEQ ID NO: 111118 - DNA, 80 bp, synthetic construct
  misc_feature 1..80: note = Artificially Synthesized Probe
  source 1..80: mol_type = other DNA
ataccaggatgttcagaaaagatgcttaatgtgatttgaatcttcttaaatttattaatgtgttttgtggcataatgtga

SEQ ID NO: 111119 - DNA, 80 bp, synthetic construct
  misc_feature 1..80: note = Artificially Synthesized Probe
  source 1..80: mol_type = other DNA
gaaagtgggtattgaagtcccctactgctacattacagtccatctctctttcttcagacatattaatatttgctttacat

SEQ ID NO: 111120 - DNA, 80 bp, synthetic construct
  misc_feature 1..80: note = Artificially Synthesized Probe
  source 1..80: mol_type = other DNA
taagtatagcacttctactctcttttggtcttcatttgcatgaaatatctttttcatcccttcgctttcagtctatgtcc

SEQ ID NO: 111121 - DNA, 80 bp, synthetic construct
  misc_feature 1..80: note = Artificially Synthesized Probe
  source 1..80: mol_type = other DNA
cagggctggcctccacattcttgctggtggaagaccacaagcaacgggatgccttggaaagcatcgttctgcagcaggac

SEQ ID NO: 111122 - DNA, 80 bp, synthetic construct
  misc_feature 1..80: note = Artificially Synthesized Probe
  source 1..80: mol_type = other DNA
ggtattttctaagtcctttttcctttcatcctctgtgtctgtcttcccttatgattgggtgattttctctagtgatatgc

SEQ ID NO: 111123 - DNA, 80 bp, synthetic construct
  misc_feature 1..80: note = Artificially Synthesized Probe
  source 1..80: mol_type = other DNA
aactttgatcacatttttaaaatctctacacatttactccacccaccccacgcataaactttaatgtcacaattcatatc

SEQ ID NO: 111124 - DNA, 80 bp, synthetic construct
  misc_feature 1..80: note = Artificially Synthesized Probe
  source 1..80: mol_type = other DNA
tgtatgttttcatgttgctagttagcattcttttctttcagcttgaagaactctctttagaatttcttgtaggacagctc

SEQ ID NO: 111125 - DNA, 80 bp, synthetic construct
  misc_feature 1..80: note = Artificially Synthesized Probe
  source 1..80: mol_type = other DNA
ctgctgagaagtctgctataaaccttcctgtaactcctttatatgtgatttgcttcttttctctcactgcttttaagatc

SEQ ID NO: 111126 - DNA, 80 bp, synthetic construct
  misc_feature 1..80: note = Artificially Synthesized Probe
  source 1..80: mol_type = other DNA
tcccttggtctctcttctccttcttgaatacctgtaactcaaatatttgatcttttggtgttatctcacaaatcccataa

SEQ ID NO: 111127 - DNA, 80 bp, synthetic construct
  misc_feature 1..80: note = Artificially Synthesized Probe
  source 1..80: mol_type = other DNA
atttttaaaaaataatttatacctctctgtggaatttctaattgcagtcatttactgttttcctgattttattgaattgt

SEQ ID NO: 111128 - DNA, 80 bp, synthetic construct
  misc_feature 1..80: note = Artificially Synthesized Probe
  source 1..80: mol_type = other DNA
ttgttgttgttgccttacgttgatgtctgcacattttgggaagtagggacttattctattctttgtagaatggcttcgcc

SEQ ID NO: 111129 - DNA, 80 bp, synthetic construct
  misc_feature 1..80: note = Artificially Synthesized Probe
  source 1..80: mol_type = other DNA
tgagtctgcaagggtgaacttagagcctggcatccgttaaggcaggactggtgctagggtaggccatatacctgagtctg

SEQ ID NO: 111130 - DNA, 80 bp, synthetic construct
  misc_feature 1..80: note = Artificially Synthesized Probe
  source 1..80: mol_type = other DNA
ggcctggactctgagttctggagcctggagcactggggaccagcctggatcctgagtccacagggacactcctggagccc

SEQ ID NO: 111131 - DNA, 80 bp, synthetic construct
  misc_feature 1..80: note = Artificially Synthesized Probe
  source 1..80: mol_type = other DNA
actgggcaggtgtggggcctgggcctgcatgatcctacctggtattggggcaggcctgaagcctccgtccttgggtacca

SEQ ID NO: 111132 - DNA, 80 bp, synthetic construct
  misc_feature 1..80: note = Artificially Synthesized Probe
  source 1..80: mol_type = other DNA
gcaaggtcgcagagcaggctggtcatgttcctacagcatcgtggagacctgtacactccgggttcttgggaaacgggggt

SEQ ID NO: 111133 - DNA, 80 bp, synthetic construct
  misc_feature 1..80: note = Artificially Synthesized Probe
  source 1..80: mol_type = other DNA
tgggtgagaggggacccagtcatgcaaaactgttttttctgccttttcagtgcatcttatttctgtgccatgcccaggtg

SEQ ID NO: 111134 - DNA, 80 bp, synthetic construct
  misc_feature 1..80: note = Artificially Synthesized Probe
  source 1..80: mol_type = other DNA
taaaatattcagggaaaggagcatctgattctttaagaagtcagcagataaaatgtggatgctctttgacagaggaggag

SEQ ID NO: 111135 - DNA, 80 bp, synthetic construct
  misc_feature 1..80: note = Artificially Synthesized Probe
  source 1..80: mol_type = other DNA
aatgtactcaccaggatcaacccacttggtcttcatgactcttttgatgtggatctagctgtgttgctttgtattattca

SEQ ID NO: 111136 - DNA, 80 bp, synthetic construct
  misc_feature 1..80: note = Artificially Synthesized Probe
  source 1..80: mol_type = other DNA
tgtttgggtttttttagtctaagctctaggagcttcccctcccccaattgttataaattaactagattttggttgatttc

SEQ ID NO: 111137 - DNA, 80 bp, synthetic construct
  misc_feature 1..80: note = Artificially Synthesized Probe
  source 1..80: mol_type = other DNA
tttgtaataatttctgaggctgaatacagtgttaaatgaaattccctgtctgcaccaatgttcctgcactttgtaactcg

SEQ ID NO: 111138 - DNA, 80 bp, synthetic construct
  misc_feature 1..80: note = Artificially Synthesized Probe
  source 1..80: mol_type = other DNA
tgaaagagggagagaaagaagaggggagtgtaaaagccatttccaaaacaagaggcccagacatcaatttgtaattatct

SEQ ID NO: 111139 - DNA, 80 bp, synthetic construct
  misc_feature 1..80: note = Artificially Synthesized Probe
  source 1..80: mol_type = other DNA
cttaagacaagattacattccatacagcccgcaaatggatccctcctctccccaccttcctgcttctttcagaaatgcca

SEQ ID NO: 111140 - DNA, 80 bp, synthetic construct
  misc_feature 1..80: note = Artificially Synthesized Probe
  source 1..80: mol_type = other DNA
agatggagcccgcctcctggtgaggcttttccattaacactaaagaatgccctaaatcaagcttttcagttttaaatagg

SEQ ID NO: 111141 - DNA, 80 bp, synthetic construct
  misc_feature 1..80: note = Artificially Synthesized Probe
  source 1..80: mol_type = other DNA
agtagtacagttgcattgcttaatggtaggggtacattctgagtaattcctcattaggtgatcctgtcactgtgcaaaca

SEQ ID NO: 111142 - DNA, 80 bp, synthetic construct
  misc_feature 1..80: note = Artificially Synthesized Probe
  source 1..80: mol_type = other DNA
tacattaaaaggtgcagtaaaaatatggtataaaagataaaaatgggccgggcatggtggctcacgcctgtaatcccagc

SEQ ID NO: 111143 - DNA, 80 bp, synthetic construct
  misc_feature 1..80: note = Artificially Synthesized Probe
  source 1..80: mol_type = other DNA
tcacttgaaccacggaggcagaggttgcagtgagtcaagatcacgtcactgcactccagcctgggcaacagagtgacatt

SEQ ID NO: 111144 - DNA, 80 bp, synthetic construct
  misc_feature 1..80: note = Artificially Synthesized Probe
  source 1..80: mol_type = other DNA
aaaattaaaaagacgaaagagacacaaaacccaaaatgcaatgatgaatcttgactgcatcctggtggaaaaaacaaaac

SEQ ID NO: 111145 - DNA, 80 bp, synthetic construct
  misc_feature 1..80: note = Artificially Synthesized Probe
  source 1..80: mol_type = other DNA
gtatacttaggctacactaaatttataaaaatgttttttcttcaataataaattacctttaaatagtaactttgggctgg

SEQ ID NO: 111146 - DNA, 80 bp, synthetic construct
  misc_feature 1..80: note = Artificially Synthesized Probe
  source 1..80: mol_type = other DNA
aggtactcgggaggctgaggcaggagaatcgttcaaacctaggaggcagaggttgcagtgagctgagatcgcaccactgt

SEQ ID NO: 111147 - DNA, 80 bp, synthetic construct
  misc_feature 1..80: note = Artificially Synthesized Probe
  source 1..80: mol_type = other DNA
attctataagctttttcctatttacacttttcttccacttttaaaacttttttgttaaaaaaaaaaaaactaagacacaa

SEQ ID NO: 111148 - DNA, 80 bp, synthetic construct
  misc_feature 1..80: note = Artificially Synthesized Probe
  source 1..80: mol_type = other DNA
acctgcctgagtctgtgtgagtgttagttttgctttttaataagtaaaaagagtgcattctaaaataatgataaaagtac

SEQ ID NO: 111149 - DNA, 80 bp, synthetic construct
  misc_feature 1..80: note = Artificially Synthesized Probe
  source 1..80: mol_type = other DNA
tacaaccatatgggaccaccatcatgtacgcgatctgctgctggtggaaacattgttatgttgtgcttgctgtttacagt

SEQ ID NO: 111150 - DNA, 80 bp, synthetic construct
  misc_feature 1..80: note = Artificially Synthesized Probe
  source 1..80: mol_type = other DNA
gtaagtttttcatgtaaattaaaggtttactctggcgtcaactattccctcctggcctggaatcacagacgttccatttc

SEQ ID NO: 111151 - DNA, 80 bp, synthetic construct
  misc_feature 1..80: note = Artificially Synthesized Probe
  source 1..80: mol_type = other DNA
agtgttcccgggggagagtgagaggcaggaaagacatccagccacaaggagacctgggagcacgggtcgcccagaattca

SEQ ID NO: 111152 - DNA, 80 bp, synthetic construct
  misc_feature 1..80: note = Artificially Synthesized Probe
  source 1..80: mol_type = other DNA
tgcccagacactgcgccactttccacgcgcgtggttcacccacctttctgagggtccaagcccacggcgcccgctgaccc

SEQ ID NO: 111153 - DNA, 80 bp, synthetic construct
  misc_feature 1..80: note = Artificially Synthesized Probe
  source 1..80: mol_type = other DNA
tggctgcatagtcttccatggtgtatatgtgccacattttctttatccagtctatcattgatgggcatttgcgttggttc

SEQ ID NO: 111154 - DNA, 80 bp, synthetic construct
  misc_feature 1..80: note = Artificially Synthesized Probe
  source 1..80: mol_type = other DNA
gctgaccctgcctgtctgcccagacactgcaccacatcgtggttcacctgcctttctgagggtctaagcccatggggccc

SEQ ID NO: 111155 - DNA, 80 bp, synthetic construct
  misc_feature 1..80: note = Artificially Synthesized Probe
  source 1..80: mol_type = other DNA
tggggcccgctgaccctgcctgcctgcccagacactgcaccactctccatgcgcgtggttcacccacctttccgagggtc

SEQ ID NO: 111156 - DNA, 80 bp, synthetic construct
  misc_feature 1..80: note = Artificially Synthesized Probe
  source 1..80: mol_type = other DNA
tagagaggccagtaagtgaaggtgaggtcctgagggggggcctagtgcagtgggtctgctgtccttaaacaaaggggacc

SEQ ID NO: 111157 - DNA, 80 bp, synthetic construct
  misc_feature 1..80: note = Artificially Synthesized Probe
  source 1..80: mol_type = other DNA
catctttatgagggtctaagcccatggggcccgctgaccctgcctgtctgcccagacactgcaccacatcgtggttcacc

SEQ ID NO: 111158 - DNA, 80 bp, synthetic construct
  misc_feature 1..80: note = Artificially Synthesized Probe
  source 1..80: mol_type = other DNA
catagcacccagttgtgcactagcagctgaggtgagctgtcgaatcctcattttctcacttttcattttcacatcatcag

SEQ ID NO: 111159 - DNA, 80 bp, synthetic construct
  misc_feature 1..80: note = Artificially Synthesized Probe
  source 1..80: mol_type = other DNA
catttttgtttttgtgcccaaatgttgcatttcccaagaccaccctggtccaccatgcctctatcctgtgcctataaaaa

SEQ ID NO: 111160 - DNA, 80 bp, synthetic construct
  misc_feature 1..80: note = Artificially Synthesized Probe
  source 1..80: mol_type = other DNA
gactccaggggaaaactgccttcccagtccatctccctctggctcctgctgagagttacttccactctataaaaccttgc

SEQ ID NO: 111161 - DNA, 80 bp, synthetic construct
  misc_feature 1..80: note = Artificially Synthesized Probe
  source 1..80: mol_type = other DNA
acaagccgcccacagacggcgaaactaaaaaagcaccctgtaacacacgcccactggggctttaggagctgtaagcattc

SEQ ID NO: 111162 - DNA, 80 bp, synthetic construct
  misc_feature 1..80: note = Artificially Synthesized Probe
  source 1..80: mol_type = other DNA
tcctgacccactctcttctgggtggcagttggcctttctgaggcagcagatggagccaagcatgtaggctgtggtcacag

SEQ ID NO: 111163 - DNA, 80 bp, synthetic construct
  misc_feature 1..80: note = Artificially Synthesized Probe
  source 1..80: mol_type = other DNA
atgtccatggatagcattccatccaaacacaaacgtgcgccttactagttcctctgcttctgaagcggtaacggtgaaaa

SEQ ID NO: 111164 - DNA, 80 bp, synthetic construct
  misc_feature 1..80: note = Artificially Synthesized Probe
  source 1..80: mol_type = other DNA
ctcttcatttcagattgatcatcattcagagagagctgctaactctctggctttcagccgttctgtcctggtgttaacaa

SEQ ID NO: 111165 - DNA, 80 bp, synthetic construct
  misc_feature 1..80: note = Artificially Synthesized Probe
  source 1..80: mol_type = other DNA
tttgtgatacggtatctccttgtggttcagcaaccctcagcccatgacctggtgagcttgacttgaggcttcattcttca

SEQ ID NO: 111166 - DNA, 80 bp, synthetic construct
  misc_feature 1..80: note = Artificially Synthesized Probe
  source 1..80: mol_type = other DNA
aaaacagagaatggccaatgtttagaggttaagagtgctacaggtgcacaccacacgtgcctatgtttaaaataactaac

SEQ ID NO: 111167 - DNA, 80 bp, synthetic construct
  misc_feature 1..80: note = Artificially Synthesized Probe
  source 1..80: mol_type = other DNA
acagctgggtgttagagggcactgagggattgttgttaattttcttagttataacggggctgcagctacctaggagaagg

SEQ ID NO: 111168 - DNA, 80 bp, synthetic construct
  misc_feature 1..80: note = Artificially Synthesized Probe
  source 1..80: mol_type = other DNA
ttaaggaatgcatgttttaatgaatatagactaactcaagttttctttactttttgagtcacttttatcaacttacaggt

SEQ ID NO: 111169 - DNA, 80 bp, synthetic construct
  misc_feature 1..80: note = Artificially Synthesized Probe
  source 1..80: mol_type = other DNA
aagtcttttcaaagacccagagatatttctgctgtttgtgttcttgatgcttgccctcatttcttcgtacctatttcagt

SEQ ID NO: 111170 - DNA, 80 bp, synthetic construct
  misc_feature 1..80: note = Artificially Synthesized Probe
  source 1..80: mol_type = other DNA
gtgctttggatttcagatatgtttggatttattctggaatatttgcatgtacataatgaaatatcttggggacaggaccc

SEQ ID NO: 111171 - DNA, 80 bp, synthetic construct
  misc_feature 1..80: note = Artificially Synthesized Probe
  source 1..80: mol_type = other DNA
ggaatggccgagaaacttcccaagtgaaaaagctgtgaggcttcagattggaggagggcgcaagggcccagcaggatgtg

SEQ ID NO: 111172 - DNA, 80 bp, synthetic construct
  misc_feature 1..80: note = Artificially Synthesized Probe
  source 1..80: mol_type = other DNA
gggtaaaattcatgtcatcacttcttcctgggccagcacccaaatacctcctgagccacaggaacacgatgcctctgtgg

SEQ ID NO: 111173 - DNA, 80 bp, synthetic construct
  misc_feature 1..80: note = Artificially Synthesized Probe
  source 1..80: mol_type = other DNA
agtgcattattaaattcaaactggaggggaagttttgacactaatcaatgctttttatcccacccaagactggcatattc

SEQ ID NO: 111174 - DNA, 80 bp, synthetic construct
  misc_feature 1..80: note = Artificially Synthesized Probe
  source 1..80: mol_type = other DNA
aggctggagtgcaatggcatggtcttggctcactgcaacctctgcctcccaggttcaagcaattctcctgcctcagcctc

SEQ ID NO: 111175 - DNA, 80 bp, synthetic construct
  misc_feature 1..80: note = Artificially Synthesized Probe
  source 1..80: mol_type = other DNA
ccaccacgcctgaccaggaagcaattttttttagctcattaacatggcaaagacagatagccagggccttctgagagctg

SEQ ID NO: 111176 - DNA, 80 bp, synthetic construct
  misc_feature 1..80: note = Artificially Synthesized Probe
  source 1..80: mol_type = other DNA
agagcagttggcggttcccaggccccccagggaagccctggcaggtgcttgctggggttgggtctttaccccagaaccca

SEQ ID NO: 111177 - DNA, 80 bp, synthetic construct
  misc_feature 1..80: note = Artificially Synthesized Probe
  source 1..80: mol_type = other DNA
gggtcagagcaggcaaaacgagcaccatttcctcccaagaaacacatttttcccactgtctgacagttgaaaatatttgt

SEQ ID NO: 111178 - DNA, 80 bp, synthetic construct
  misc_feature 1..80: note = Artificially Synthesized Probe
  source 1..80: mol_type = other DNA
ccatttcatagaaacaaatgcggaaatgattgtaattatgagggatgggcccactgtggcatttcccaatggtgacagtc

SEQ ID NO: 111179 - DNA, 80 bp, synthetic construct
  misc_feature 1..80: note = Artificially Synthesized Probe
  source 1..80: mol_type = other DNA
gcgatgccacgctaccccttccacttgagtgtttaaaactcttgtaataaaaagtgggggaggaagtcatgctaagccag

SEQ ID NO: 111180 - DNA, 80 bp, synthetic construct
  misc_feature 1..80: note = Artificially Synthesized Probe
  source 1..80: mol_type = other DNA
ggtagtcgccaggggcctgtgtgcagaaaaatttctcatttgctttgacacgctgctgttgctgtcttgaaattctcaaa

SEQ ID NO: 111181 - DNA, 80 bp, synthetic construct
  misc_feature 1..80: note = Artificially Synthesized Probe
  source 1..80: mol_type = other DNA
gccctaagaggccactcctctgcttacccagagcttgctgcaaaccacaaagtgcaacagtgttctaagaaacacaaacg

SEQ ID NO: 111182 - DNA, 80 bp, synthetic construct
  misc_feature 1..80: note = Artificially Synthesized Probe
  source 1..80: mol_type = other DNA
aagggaaataaacacagccgagtgagtttcacacagcatttccaccgctgtaatgagaatgaaatacatatgcatgtttg

SEQ ID NO: 111183 - DNA, 80 bp, synthetic construct
  misc_feature 1..80: note = Artificially Synthesized Probe
  source 1..80: mol_type = other DNA
aaataaaaatcccatgacaagtcaagacggagattgtgaaaggaaacatcttatactataactagttcctttaggggcac

SEQ ID NO: 111184 - DNA, 80 bp, synthetic construct
  misc_feature 1..80: note = Artificially Synthesized Probe
  source 1..80: mol_type = other DNA
gttctgatctgtttgcattaatatgcgctcaattgtaagaagctgaacagatgtatttattcagaattcccaagcagcta

SEQ ID NO: 111185 - DNA, 80 bp, synthetic construct
  misc_feature 1..80: note = Artificially Synthesized Probe
  source 1..80: mol_type = other DNA
atgtgaaccttcaacatcattagggaagcttctaccacacttagtactgataagcaaagtgcattcacacttcctgagga

SEQ ID NO: 111186 - DNA, 80 bp, synthetic construct
  misc_feature 1..80: note = Artificially Synthesized Probe
  source 1..80: mol_type = other DNA
tctgccaaaaaatacgaaaattagctgggcatggtggtttgcacctgtagtttcaactacttgggaggctgaggtgggag

SEQ ID NO: 111187 - DNA, 80 bp, synthetic construct
  misc_feature 1..80: note = Artificially Synthesized Probe
  source 1..80: mol_type = other DNA
agaccattactctagtactgctaaggaaaaacaaacccgctggcagttaaactatgatgtgctatttataaaagatgcct

SEQ ID NO: 111188 - DNA, 80 bp, synthetic construct
  misc_feature 1..80: note = Artificially Synthesized Probe
  source 1..80: mol_type = other DNA
tcaccacctgagcccaagggaacagccactccctaagttacagtctcttgctccctggaggtgaaccaccatcagtgatc

SEQ ID NO: 111189 - DNA, 80 bp, synthetic construct
  misc_feature 1..80: note = Artificially Synthesized Probe
  source 1..80: mol_type = other DNA
tgtacgggggttaccccagatcacccccagtcaccgactgcatgcaaatctctgtctcagagtttggtcccagcacattc

SEQ ID NO: 111190 - DNA, 80 bp, synthetic construct
  misc_feature 1..80: note = Artificially Synthesized Probe
  source 1..80: mol_type = other DNA
tgtttcgaggatgaaaaggaggtgtttagccccgagcctcacgtggaaacatctgatgagcctttgccaatatgctcggg

SEQ ID NO: 111191 - DNA, 80 bp, synthetic construct
  misc_feature 1..80: note = Artificially Synthesized Probe
  source 1..80: mol_type = other DNA
cagagcacagcctgcaactgtaagaggcccctaagctctttcaagtggtccatgaggccaaaactattttcataaaatac

SEQ ID NO: 111192 - DNA, 80 bp, synthetic construct
  misc_feature 1..80: note = Artificially Synthesized Probe
  source 1..80: mol_type = other DNA
acacagaatgagtgggaggcagagatgagaatccaagtgttttctgttaaatgaaacaatgagatatgcaaaagcgtgaa

SEQ ID NO: 111193 - DNA, 80 bp, synthetic construct
  misc_feature 1..80: note = Artificially Synthesized Probe
  source 1..80: mol_type = other DNA
aacagcttttctaaagtgttggcaattttaatttctaaggtaacaaatgtggatagcactaacccaccaaaaaaaaaaaa

SEQ ID NO: 111194 - DNA, 80 bp, synthetic construct
  misc_feature 1..80: note = Artificially Synthesized Probe
  source 1..80: mol_type = other DNA
gtgattccgtctctttaatctgctaaataaagagatgtaacttccctacagcaaaaggaaagcaccagtagaattctgta

SEQ ID NO: 111195 - DNA, 80 bp, synthetic construct
  misc_feature 1..80: note = Artificially Synthesized Probe
  source 1..80: mol_type = other DNA
cattaagcttgcaatgtgtaaaccttaaaacagctggataaaaatttaagacaggaataagaagaaagccattcatattg

SEQ ID NO: 111196 - DNA, 80 bp, synthetic construct
  misc_feature 1..80: note = Artificially Synthesized Probe
  source 1..80: mol_type = other DNA
tgagacaaatcaattcagaatctttgaagggtaagccccagacaccatggtttccgaggctcccaagttattttaatata

SEQ ID NO: 111197 - DNA, 80 bp, synthetic construct
  misc_feature 1..80: note = Artificially Synthesized Probe
  source 1..80: mol_type = other DNA
tggatttctacacactagggaggcataagacatccaacaatacactaagatgtgcacaggcttggatttctacatgctag

SEQ ID NO: 111198 - DNA, 80 bp, synthetic construct
  misc_feature 1..80: note = Artificially Synthesized Probe
  source 1..80: mol_type = other DNA
gtacacaggcttggatttctacatgctagggaggcataaaacacccgtcaatacactaagatgtacacaggcttggattt

SEQ ID NO: 111199 - DNA, 80 bp, synthetic construct
  misc_feature 1..80: note = Artificially Synthesized Probe
  source 1..80: mol_type = other DNA
atttctacatgctagggaggcataagacacccgtcaatacactaagatgtacacaggcttggatttctacattctaggga

SEQ ID NO: 111200 - DNA, 80 bp, synthetic construct
  misc_feature 1..80: note = Artificially Synthesized Probe
  source 1..80: mol_type = other DNA
ttggatttctacatgctagagaggcataagacacccatcaataccctaagatgtacacaggcttggtccagaaagatggg

SEQ ID NO: 111201 - DNA, 80 bp, synthetic construct
  misc_feature 1..80: note = Artificially Synthesized Probe
  source 1..80: mol_type = other DNA
cactggtcctgcggaatgtgtttttatcaatgacttgacgacgtgaaaaacatgtttataaaacgagcagatggtgccga

SEQ ID NO: 111202 - DNA, 80 bp, synthetic construct
  misc_feature 1..80: note = Artificially Synthesized Probe
  source 1..80: mol_type = other DNA
aggttgcaggcttcagagagaatagatggtcaatgtttatcagacttgaaaaggtgccagactcttaattaattccctct

SEQ ID NO: 111203 - DNA, 80 bp, synthetic construct
  misc_feature 1..80: note = Artificially Synthesized Probe
  source 1..80: mol_type = other DNA
accttatagctgcaaaaggtctgctttgtctgtcttcacgcctctgttccaatgttaacgctggtcagctgtgcctggac

SEQ ID NO: 111204 - DNA, 80 bp, synthetic construct
  misc_feature 1..80: note = Artificially Synthesized Probe
  source 1..80: mol_type = other DNA
ccaagagtggcttctttccttcagtgcagaggaatccaacggatatttttaacaaggaaaggacaacagaaaaaataggg

SEQ ID NO: 111205 - DNA, 80 bp, synthetic construct
  misc_feature 1..80: note = Artificially Synthesized Probe
  source 1..80: mol_type = other DNA
gcattgtttttgggtattccccaattcccacataaaacagacggagcaactagacaaggaaatcaacaaaccaagatcac

SEQ ID NO: 111206 - DNA, 80 bp, synthetic construct
  misc_feature 1..80: note = Artificially Synthesized Probe
  source 1..80: mol_type = other DNA
agagaaaagcagccttaggaagtagctgtagacatcagtgaaaatggcaaagaaccttaaacattccctccttcataaaa

SEQ ID NO: 111207 - DNA, 80 bp, synthetic construct
  misc_feature 1..80: note = Artificially Synthesized Probe
  source 1..80: mol_type = other DNA
agaaagaaatggctgaatctcagcaagaacagcgaacttcctggcatcttaactcaccctatttccagctccctctcctc

SEQ ID NO: 111208 - DNA, 80 bp, synthetic construct
  misc_feature 1..80: note = Artificially Synthesized Probe
  source 1..80: mol_type = other DNA
tctggaggctgaacgagaatcggttacaggagatgaacacaaggctcgattctcctgttaaacttgactgtcaccaacgg

SEQ ID NO: 111209 - DNA, 80 bp, synthetic construct
  misc_feature 1..80: note = Artificially Synthesized Probe
  source 1..80: mol_type = other DNA
actggaaaggctgtctttatttcatccaactcaaagctcacatatgtgaaaagtctttccctgggggcatttgttgaaaa

SEQ ID NO: 111210 - DNA, 80 bp, synthetic construct
  misc_feature 1..80: note = Artificially Synthesized Probe
  source 1..80: mol_type = other DNA
caacacatggagggctgtgtgcctgcccaggctgtgcacactcagggaagacatgaggctctaagctctcaccactggct

SEQ ID NO: 111211 - DNA, 80 bp, synthetic construct
  misc_feature 1..80: note = Artificially Synthesized Probe
  source 1..80: mol_type = other DNA
taaccaaactgagcagagacttggtggccacacatgatgaaaaaacacaaactttacagaattagttcagaatagtcact

SEQ ID NO: 111212 - DNA, 80 bp, synthetic construct
  misc_feature 1..80: note = Artificially Synthesized Probe
  source 1..80: mol_type = other DNA
ttgaggcattcaaagaaacatgcaaatgtgcctcttccacaggaaaacaatagaagctgttcttggggaagccaaatggc

SEQ ID NO: 111213 - DNA, 80 bp, synthetic construct
  misc_feature 1..80: note = Artificially Synthesized Probe
  source 1..80: mol_type = other DNA
ctcagcctcccaagtaactgggattacaggcatgcaccaccatgcccagctaatttttgtatttttagtagagacggggt

SEQ ID NO: 111214 - DNA, 80 bp, synthetic construct
  misc_feature 1..80: note = Artificially Synthesized Probe
  source 1..80: mol_type = other DNA
ttaatgtgctccaaaaactgtaagaacaatgtctaaagagctaaataaaagtaggaaaatagtgtctcatcaaatagaga

SEQ ID NO: 111215 - DNA, 80 bp, synthetic construct
  misc_feature 1..80: note = Artificially Synthesized Probe
  source 1..80: mol_type = other DNA
aaaattagaaacctgtgagagaccatccaatgtactgagatacacgtaaaggaagtcccagatgtaggagaggaagaatg

SEQ ID NO: 111216 - DNA, 80 bp, synthetic construct
  misc_feature 1..80: note = Artificially Synthesized Probe
  source 1..80: mol_type = other DNA
caaagtaaatctaatgaaagcagtaagagagaagcaacttgtcacacatgttatggactagatatttgtcccctccaaaa

SEQ ID NO: 111217 - DNA, 80 bp, synthetic construct
  misc_feature 1..80: note = Artificially Synthesized Probe
  source 1..80: mol_type = other DNA
gggttatcacaagaggggacctggtgactttctaagaagaggaagggagacctgagctagcacactagcatgctcagcct

SEQ ID NO: 111218 - DNA, 80 bp, synthetic construct
  misc_feature 1..80: note = Artificially Synthesized Probe
  source 1..80: mol_type = other DNA
gtaacttctggtggataaagtgggaggcctgatccaggaagaagcacaccgtggcctggggcccctctggagggtaggtc

SEQ ID NO: 111219 - DNA, 80 bp, synthetic construct
  misc_feature 1..80: note = Artificially Synthesized Probe
  source 1..80: mol_type = other DNA
tctgtgataagcaacagaaaataggcaatgatcctcaataatattaacaactaatttctcatctgagactatgaaggcca

SEQ ID NO: 111220 - DNA, 80 bp, synthetic construct
  misc_feature 1..80: note = Artificially Synthesized Probe
  source 1..80: mol_type = other DNA
ttctaaatggagtactttaggcaaaaatgaaaggacattagacagtgagttgtatccagatgaagaaataaacagcacca

SEQ ID NO: 111221 - DNA, 80 bp, synthetic construct
  misc_feature 1..80: note = Artificially Synthesized Probe
  source 1..80: mol_type = other DNA
acagcacaaaggagggaaagagaaaaaatgacagagagtgtttgaaaattaagttggtattaattcaactagattattat

SEQ ID NO: 111222 - DNA, 80 bp, synthetic construct
  misc_feature 1..80: note = Artificially Synthesized Probe
  source 1..80: mol_type = other DNA
caaggactatacagaaatactataagtaatcatatgccaacaaactagataatctaggtgaaattgacaaattcctatga

SEQ ID NO: 111223 - DNA, 80 bp, synthetic construct
  misc_feature 1..80: note = Artificially Synthesized Probe
  source 1..80: mol_type = other DNA
attaacatcattctttcacagtcttccaaaaaaaataaagaaagaatactcttcaattaacttgatgtgatggttaatat

SEQ ID NO: 111224 - DNA, 80 bp, synthetic construct
  misc_feature 1..80: note = Artificially Synthesized Probe
  source 1..80: mol_type = other DNA
agaataaaagcaggcagaagaacacaaaagtagtttagtcttccagcctacacgctactcccctgcgggatgcttcctgc

SEQ ID NO: 111225 - DNA, 80 bp, synthetic construct
  misc_feature 1..80: note = Artificially Synthesized Probe
  source 1..80: mol_type = other DNA
agaaccctgactaatgcatttgacaagttatgtattactataataccaaaaccaaagatatcaaaagattaagagatatc

SEQ ID NO: 111226 - DNA, 80 bp, synthetic construct
  misc_feature 1..80: note = Artificially Synthesized Probe
  source 1..80: mol_type = other DNA
gaatacacatgctatgatacagactgaatgttgacatcctccccaaacgtacgtgctggaattctgatccccagtgtgac

SEQ ID NO: 111227 - DNA, 80 bp, synthetic construct
  misc_feature 1..80: note = Artificially Synthesized Probe
  source 1..80: mol_type = other DNA
cccaccaccagacaccaaatatgggggagcctccagagctctgagaaatcaatgtttgctgtttcagccacccacgccat

SEQ ID NO: 111228 - DNA, 80 bp, synthetic construct
  misc_feature 1..80: note = Artificially Synthesized Probe
  source 1..80: mol_type = other DNA
ggatgaatttttaaaagtgcttgtgttgagagatcaaaaggaagacaaagcagtatctcttagagaacagctcggccatc

SEQ ID NO: 111229 - DNA, 80 bp, synthetic construct
  misc_feature 1..80: note = Artificially Synthesized Probe
  source 1..80: mol_type = other DNA
aggccagacatcttaccaacctatcggttcagttttaagaaagagagcaaagaggatctaaaatctgaactttgagcagc

SEQ ID NO: 111230 - DNA, 80 bp, synthetic construct
  misc_feature 1..80: note = Artificially Synthesized Probe
  source 1..80: mol_type = other DNA
gaatgcgttcatgctctgggctcctgtggaaggtagagcttgtgaatgaggaattggaaacagtgcacctcagtggcaga

SEQ ID NO: 111231 - DNA, 80 bp, synthetic construct
  misc_feature 1..80: note = Artificially Synthesized Probe
  source 1..80: mol_type = other DNA
gcgagccctgagccggacagagcgcaagtcccacggagggcaagccctgagccggacagagcgcaagtcccacggagggc

SEQ ID NO: 111232 - DNA, 80 bp, synthetic construct
  misc_feature 1..80: note = Artificially Synthesized Probe
  source 1..80: mol_type = other DNA
acgtgagccagacgttctccctccccaaccccacaccacacatctgcctggaggtcgggtagggggtggatctcagctcc

SEQ ID NO: 111233 - DNA, 80 bp, synthetic construct
  misc_feature 1..80: note = Artificially Synthesized Probe
  source 1..80: mol_type = other DNA
ggatgccatcccagccaggacccgtgcggccagccttggatttctgtgttccagtccacattatttagggatttattttc

SEQ ID NO: 111234 - DNA, 80 bp, synthetic construct
  misc_feature 1..80: note = Artificially Synthesized Probe
  source 1..80: mol_type = other DNA
aagtcagaagattcttaccaggaaatgaatccacagtcgttttcatgacagcaaattgcatgccaacgagtgacatttaa

SEQ ID NO: 111235 - DNA, 80 bp, synthetic construct
  misc_feature 1..80: note = Artificially Synthesized Probe
  source 1..80: mol_type = other DNA
acacagtgaacgtattttgttctgtgatgtacacatctacctggaggaagaaggttgtgaaattaactcccatttaccct

SEQ ID NO: 111236 - DNA, 80 bp, synthetic construct
  misc_feature 1..80: note = Artificially Synthesized Probe
  source 1..80: mol_type = other DNA
gtttcaagcgcagttaccaagacagaatcatttctggaatcctgaaaaacctgcatatgaacatgctcacgtgtagacac

SEQ ID NO: 111237 - DNA, 80 bp, synthetic construct
  misc_feature 1..80: note = Artificially Synthesized Probe
  source 1..80: mol_type = other DNA
agacacccacacacatgcacacacacctgcacattcacatgctcacgtgtagagacacacacatgcacacacgtgctcac

SEQ ID NO: 111238 - DNA, 80 bp, synthetic construct
  misc_feature 1..80: note = Artificially Synthesized Probe
  source 1..80: mol_type = other DNA
cagacacccacacacatgcacacacacctgcacacgcactcacgtgctcacatgtagacacgcacacatgcacacacatg

SEQ ID NO: 111239 - DNA, 80 bp, synthetic construct
  misc_feature 1..80: note = Artificially Synthesized Probe
  source 1..80: mol_type = other DNA
cacgtggatacccacacatgtacacacacgtgctcacgtgtagacacccacacacacgcacagacacctgcacacacatg

SEQ ID NO: 111240 - DNA, 80 bp, synthetic construct
  misc_feature 1..80: note = Artificially Synthesized Probe
  source 1..80: mol_type = other DNA
gactctgtagatctcttcctaaaaaagaatcctcagtctctggcagaacagctgcccagaacagcttctgcctgtgaggt

SEQ ID NO: 111241 - DNA, 80 bp, synthetic construct
  misc_feature 1..80: note = Artificially Synthesized Probe
  source 1..80: mol_type = other DNA
attcacgtgctcacatatagatacccacacacacacacctgcacactcattcacgtgctcatgtgtagatacccacacac

SEQ ID NO: 111242 - DNA, 80 bp, synthetic construct
  misc_feature 1..80: note = Artificially Synthesized Probe
  source 1..80: mol_type = other DNA
tgtgcaggggtgtgtgcgtgtgtgcatgtctacatgtgagcatgtgtgtgtgcaggtgagtgtgcaggtgtgtgcgtgtg

SEQ ID NO: 111243 - DNA, 80 bp, synthetic construct
  misc_feature 1..80: note = Artificially Synthesized Probe
  source 1..80: mol_type = other DNA
atgcccaccttccagaagcctgcatcctggactagacacaccaatggccctggcaaccaaagaggcctcctgccacaggg

SEQ ID NO: 111244 - DNA, 80 bp, synthetic construct
  misc_feature 1..80: note = Artificially Synthesized Probe
  source 1..80: mol_type = other DNA
ggacacacagtccctggggatggagctgggcagagggctccagctgcccaggccatgggcagttctgatacacctgggca

SEQ ID NO: 111245 - DNA, 80 bp, synthetic construct
  misc_feature 1..80: note = Artificially Synthesized Probe
  source 1..80: mol_type = other DNA
tcttatcctcaagaacaggtgccaggaatgtggacatagcctgacactcggcacaatattaattttctctgagatggttt

SEQ ID NO: 111246 - DNA, 80 bp, synthetic construct
  misc_feature 1..80: note = Artificially Synthesized Probe
  source 1..80: mol_type = other DNA
ccctccttttgaaactcaccttaaatttcttggtttttttctagtttgtcaggctgagagtcttgtgcattctctggttt

SEQ ID NO: 111247 - DNA, 80 bp, synthetic construct
  misc_feature 1..80: note = Artificially Synthesized Probe
  source 1..80: mol_type = other DNA
agcacagaaacgtgatgatgttcagtgccagttgccagcacatggtgatagctacatacatacctagagccgggctgaaa

SEQ ID NO: 111248 - DNA, 80 bp, synthetic construct
  misc_feature 1..80: note = Artificially Synthesized Probe
  source 1..80: mol_type = other DNA
acagagtaaggctcacaagacaagcaaactcagaaaatgtgacacagttgaatatttacacaaccttccttcaatatggc

SEQ ID NO: 111249 - DNA, 80 bp, synthetic construct
  misc_feature 1..80: note = Artificially Synthesized Probe
  source 1..80: mol_type = other DNA
ctggaggctcccgtggggaaagggctcaggagtccagtgtggcctggagtgtgcatcagggagctgcccggcgccctggc

SEQ ID NO: 111250 - DNA, 80 bp, synthetic construct
  misc_feature 1..80: note = Artificially Synthesized Probe
  source 1..80: mol_type = other DNA
tgctgggaccccctgaaggacagaggtgaacccggaacccctgtaggacagaggtgaacccgggacccccttaaggacag

SEQ ID NO: 111251 - DNA, 80 bp, synthetic construct
  misc_feature 1..80: note = Artificially Synthesized Probe
  source 1..80: mol_type = other DNA
gccctcaaggacagaggtgaacccgggaccccctaaaggacagaggtgaacccgggaccccctgaaggacagaggtgaac

SEQ ID NO: 111252 - DNA, 80 bp, synthetic construct
  misc_feature 1..80: note = Artificially Synthesized Probe
  source 1..80: mol_type = other DNA
ttggcgaggtgacatatatgcccagaacctttttctatggaaggaaaaagaaaaccctggcttaatcatcagagttagga

SEQ ID NO: 111253 - DNA, 80 bp, synthetic construct
  misc_feature 1..80: note = Artificially Synthesized Probe
  source 1..80: mol_type = other DNA
ggacagaggtgaacccgggaccccctgaaggacagaggtgaacccgggacgccctcaaggacagaggtgaacccgggacc

SEQ ID NO: 111254 - DNA, 80 bp, synthetic construct
  misc_feature 1..80: note = Artificially Synthesized Probe
  source 1..80: mol_type = other DNA
tgaacccgggacccctgaagaacagaggtgattggaaaccctcctgtgagcagaatctccagcagtgcacctggctggtg

SEQ ID NO: 111255 - DNA, 80 bp, synthetic construct
  misc_feature 1..80: note = Artificially Synthesized Probe
  source 1..80: mol_type = other DNA
aagggcaactggggaagagacatattagatagacgtctatgaagtggtatgaagtactaagatatgaatgtcccgtgtga

SEQ ID NO: 111256 - DNA, 80 bp, synthetic construct
  misc_feature 1..80: note = Artificially Synthesized Probe
  source 1..80: mol_type = other DNA
gcctgggctcccactcaacaaggccagccctgctgtggccacccttgagtccccagtcagccaccacaaagaccatccct

SEQ ID NO: 111257 - DNA, 80 bp, synthetic construct
  misc_feature 1..80: note = Artificially Synthesized Probe
  source 1..80: mol_type = other DNA
actccagatgtggatttcccttccctacgcacagtgctcctgccagaactaccctccgtggagtcagaacgccttatcca

SEQ ID NO: 111258 - DNA, 80 bp, synthetic construct
  misc_feature 1..80: note = Artificially Synthesized Probe
  source 1..80: mol_type = other DNA
cccctgcagggaccacctgcaacaaaaatttcacaacagtgacaggcagaggctgattctctccaggccgagccacgcct

SEQ ID NO: 111259 - DNA, 80 bp, synthetic construct
  misc_feature 1..80: note = Artificially Synthesized Probe
  source 1..80: mol_type = other DNA
agcacccatgagcccagcgcccggctcccacctgccccttccaccaccacactcgtggattcagtccgtcccagctcctc

SEQ ID NO: 111260 - DNA, 80 bp, synthetic construct
  misc_feature 1..80: note = Artificially Synthesized Probe
  source 1..80: mol_type = other DNA
cggaaccttctggcaccttccaaacactccatctgtgagaagggaaggagataagacagaacgagacgtttcattttcag

SEQ ID NO: 111261 - DNA, 80 bp, synthetic construct
  misc_feature 1..80: note = Artificially Synthesized Probe
  source 1..80: mol_type = other DNA
tttgtgagataaaaaccgagcatcacggaaaacacaaatgccaaggtggagagaaagtccagtgtggctgcaatgttgtc

SEQ ID NO: 111262 - DNA, 80 bp, synthetic construct
  misc_feature 1..80: note = Artificially Synthesized Probe
  source 1..80: mol_type = other DNA
agttttccagatgaaaaacagaacacccaggaaatataaatattactttgcaggagctacaaggatcggcggagacgcct

SEQ ID NO: 111263 - DNA, 80 bp, synthetic construct
  misc_feature 1..80: note = Artificially Synthesized Probe
  source 1..80: mol_type = other DNA
ctgagtattctaaggaaagctatgcttagccaaagtgcttcagcccttgtacatgtttcaaatacttctgtagaagtttg

SEQ ID NO: 111264 - DNA, 80 bp, synthetic construct
  misc_feature 1..80: note = Artificially Synthesized Probe
  source 1..80: mol_type = other DNA
catttgtctgaaatggcagactctgctcatcaacatcctttccaaccacaccttctaattaatttagtccccaattagtc

SEQ ID NO: 111265 - DNA, 80 bp, synthetic construct
  misc_feature 1..80: note = Artificially Synthesized Probe
  source 1..80: mol_type = other DNA
ttttattgttcactaggtttcgccgtgcagcttggctgaagaaagccattcaaatgcaacaagtgtaattagcagaaaca

SEQ ID NO: 111266 - DNA, 80 bp, synthetic construct
  misc_feature 1..80: note = Artificially Synthesized Probe
  source 1..80: mol_type = other DNA
ctggcagctgcgcgggcgggcggacaatggcaaggaggagacgccaggcccgcgccgtttccctccgtgcagcccggccg

SEQ ID NO: 111267 - DNA, 80 bp, synthetic construct
  misc_feature 1..80: note = Artificially Synthesized Probe
  source 1..80: mol_type = other DNA
cttcctcagacacgcaccattcagtgcaagcaggagtgggaaaggggggaggagggagaaaggggcaaagagggaaaata

SEQ ID NO: 111268 - DNA, 80 bp, synthetic construct
  misc_feature 1..80: note = Artificially Synthesized Probe
  source 1..80: mol_type = other DNA
gggccccagaggagggagtgagccacgggccaggaagaaccaaaagccaggttcctggacccccaagcggggcccaagtc

SEQ ID NO: 111269 - DNA, 80 bp, synthetic construct
  misc_feature 1..80: note = Artificially Synthesized Probe
  source 1..80: mol_type = other DNA
gccggctgcctgcagctccccggcctcttgcgcacattggaaaatgcacccccggggtggacgtgcgtggccagctcagg

SEQ ID NO: 111270 - DNA, 80 bp, synthetic construct
  misc_feature 1..80: note = Artificially Synthesized Probe
  source 1..80: mol_type = other DNA
atcattcagcttttcataaagaaaaatggcccaggacaattcctatcaattttggaacgttccaagcaaagcatttctca

SEQ ID NO: 111271 - DNA, 80 bp, synthetic construct
  misc_feature 1..80: note = Artificially Synthesized Probe
  source 1..80: mol_type = other DNA
gccaggaagggcttgttctggcgaacaggatacatacaatgggaggcttggagggtttgctccttgtgatttttttcact

SEQ ID NO: 111272 - DNA, 80 bp, synthetic construct
  misc_feature 1..80: note = Artificially Synthesized Probe
  source 1..80: mol_type = other DNA
agctaataattttagctacttgacagttgaaataaactaaccattgattctctttgccttagactatccctgtgctgaat

SEQ ID NO: 111273 - DNA, 80 bp, synthetic construct
  misc_feature 1..80: note = Artificially Synthesized Probe
  source 1..80: mol_type = other DNA
cacacacacacacacagcctccctcacacacgcacacagcctccctcacacacaagcacagcctccctcacactcacaca

SEQ ID NO: 111274 - DNA, 80 bp, synthetic construct
  misc_feature 1..80: note = Artificially Synthesized Probe
  source 1..80: mol_type = other DNA
ttcttgtcggccaagtgggggggtttcttgtgaggaccagaggtggcacatccacgggcatgggggacgctggctcacga

SEQ ID NO: 111275 - DNA, 80 bp, synthetic construct
  misc_feature 1..80: note = Artificially Synthesized Probe
  source 1..80: mol_type = other DNA
acagcctccctcacacacacagcctctctcacacagcctccctcatacacacagcctccctcacacacactcacagtctc

SEQ ID NO: 111276 - DNA, 80 bp, synthetic construct
  misc_feature 1..80: note = Artificially Synthesized Probe
  source 1..80: mol_type = other DNA
acagcctccctcacacacacacagcctccctcacacacacacacagcctccctcacacacacacagcctccctcacacac

SEQ ID NO: 111277 - DNA, 80 bp, synthetic construct
  misc_feature 1..80: note = Artificially Synthesized Probe
  source 1..80: mol_type = other DNA
cctcccttgtacacacacagcctccctcgtacacacacagcctccctcgtacacacacagcctccctcacacacacacac

SEQ ID NO: 111278 - DNA, 80 bp, synthetic construct
  misc_feature 1..80: note = Artificially Synthesized Probe
  source 1..80: mol_type = other DNA
atttttcactcccagcagctgcgatggcacccccatcgcccatgtcctcaccacagtgacaatcagcctaacggtggccg

SEQ ID NO: 111279 - DNA, 80 bp, synthetic construct
  misc_feature 1..80: note = Artificially Synthesized Probe
  source 1..80: mol_type = other DNA
ccagcgtttggctgctgtcataggtgtgtatcggtatctcatgattttttatccaatgcatttttcaacaatgatattca

SEQ ID NO: 111280 - DNA, 80 bp, synthetic construct
  misc_feature 1..80: note = Artificially Synthesized Probe
  source 1..80: mol_type = other DNA
gggatactggattcccccaaatatggatacgtgcctagcagtgaaatagaaaattaaggaaatttctaaatacatctggt

SEQ ID NO: 111281 - DNA, 80 bp, synthetic construct
  misc_feature 1..80: note = Artificially Synthesized Probe
  source 1..80: mol_type = other DNA
cggagtcgggacgccaggggtgatctacacagcaggggtgccggagccagagaaccaaagctcccaccagtccaggctga

SEQ ID NO: 111282 - DNA, 80 bp, synthetic construct
  misc_feature 1..80: note = Artificially Synthesized Probe
  source 1..80: mol_type = other DNA
gacacagccaggaccccacctgggatctgagcttgcttggggtttcctcatgaactctcttctacttcggactctgtttc

SEQ ID NO: 111283 - DNA, 80 bp, synthetic construct
  misc_feature 1..80: note = Artificially Synthesized Probe
  source 1..80: mol_type = other DNA
cgagactttcagaaccagggtcctgctcttcgtccagaacgggcattccatgcgcaaccttaattccaagtctcactgct

SEQ ID NO: 111284 - DNA, 80 bp, synthetic construct
  misc_feature 1..80: note = Artificially Synthesized Probe
  source 1..80: mol_type = other DNA
aaacacgtgcacagctgctaactcatacacgcacataagcacagccgctaacgtgtttaactgccaaacttactgtgcgt

SEQ ID NO: 111285 - DNA, 80 bp, synthetic construct
  misc_feature 1..80: note = Artificially Synthesized Probe
  source 1..80: mol_type = other DNA
gccgtggttaggacgccgttcacgcagctgcagcgcagagcacgggcgacgctggctcacgatgccccagtgatgccgtg

SEQ ID NO: 111286 - DNA, 80 bp, synthetic construct
  misc_feature 1..80: note = Artificially Synthesized Probe
  source 1..80: mol_type = other DNA
tcatcatctctgtccccagcattgcctgagccttgcaaagccccttcctgttctgggagcaggtcagtgctatgcctgct

SEQ ID NO: 111287 - DNA, 80 bp, synthetic construct
  misc_feature 1..80: note = Artificially Synthesized Probe
  source 1..80: mol_type = other DNA
gatgttcaccactgatggttcggttataattgtggacaggctgcaaaaaagggcacgagagcacctgacagagggcactg

SEQ ID NO: 111288 - DNA, 80 bp, synthetic construct
  misc_feature 1..80: note = Artificially Synthesized Probe
  source 1..80: mol_type = other DNA
aggagggagcagctccgtgcatggcagcacctggccccagtgggcaacggggagggagcagctccgtgcatggcagcacc

SEQ ID NO: 111289 - DNA, 80 bp, synthetic construct
  misc_feature 1..80: note = Artificially Synthesized Probe
  source 1..80: mol_type = other DNA
ccacttgggtggtgttccaggcagggcaggctcttgaatgggtctgcgttttaaaacagatctccctggcaagggctgga

SEQ ID NO: 111290 - DNA, 80 bp, synthetic construct
  misc_feature 1..80: note = Artificially Synthesized Probe
  source 1..80: mol_type = other DNA
aggcctttccacatgctacccagcccatgcacagacaggcttgtgggggaggggaatattctgggagacgttctgtagaa

SEQ ID NO: 111291 - DNA, 80 bp, synthetic construct
  misc_feature 1..80: note = Artificially Synthesized Probe
  source 1..80: mol_type = other DNA
gatgcaacccccttcactgtgcagacagaaggctggaccccacagaactccaatctcagggactcagtgaaccagggggc

SEQ ID NO: 111292 - DNA, 80 bp, synthetic construct
  misc_feature 1..80: note = Artificially Synthesized Probe
  source 1..80: mol_type = other DNA
aaagctttgaggagcaaaaggtttgcttagagacacttttattaacagtaatctagaattgggtggtcagtttctttcat

SEQ ID NO: 111293 - DNA, 80 bp, synthetic construct
  misc_feature 1..80: note = Artificially Synthesized Probe
  source 1..80: mol_type = other DNA
aagtaatttcattcgcaagcgtcactgtccccaaaacacaaacacaggcctcctccaggaccaagcttccagcccacttc

SEQ ID NO: 111294 - DNA, 80 bp, synthetic construct
  misc_feature 1..80: note = Artificially Synthesized Probe
  source 1..80: mol_type = other DNA
gcacccacgtgaacattccaacacatgtacacacacacaagtgtgcacacactcatttgcatgcacttgattatgcagac

SEQ ID NO: 111295 - DNA, 80 bp, synthetic construct
  misc_feature 1..80: note = Artificially Synthesized Probe
  source 1..80: mol_type = other DNA
acgcgtacgctcacacacagtctccgcatagacaagacggcacctcgcctctaccgccctgcaggaccaccctctccccg

SEQ ID NO: 111296 - DNA, 80 bp, synthetic construct
  misc_feature 1..80: note = Artificially Synthesized Probe
  source 1..80: mol_type = other DNA
ctcaagcagctgcagcgcagggccagtgtggtgaccctgactcctgggaacggtgatcagctgggcctctgcctcactgg

SEQ ID NO: 111297 - DNA, 80 bp, synthetic construct
  misc_feature 1..80: note = Artificially Synthesized Probe
  source 1..80: mol_type = other DNA
actggtattttcccatttgtctaaaagaaaatggagatgtccgtggaagtgtttaagaccatcagctagaagcctcattt

SEQ ID NO: 111298 - DNA, 80 bp, synthetic construct
  misc_feature 1..80: note = Artificially Synthesized Probe
  source 1..80: mol_type = other DNA
cgtactgtctctctgcttgggctcagagggccgattgacccccagcatttctatccccagctccataagtgaagcaggtg

SEQ ID NO: 111299 - DNA, 80 bp, synthetic construct
  misc_feature 1..80: note = Artificially Synthesized Probe
  source 1..80: mol_type = other DNA
gaacaaggtggctttgataccctgtgaggaaagtactcttgccacactttgcttaggtgatacgcccaggcctgcactaa

SEQ ID NO: 111300 - DNA, 80 bp, synthetic construct
  misc_feature 1..80: note = Artificially Synthesized Probe
  source 1..80: mol_type = other DNA
ccacagagatccacagggggtcccccaggccccacaattctccccagagatccacagggggtcctccagtccccacaatt

SEQ ID NO: 111301 - DNA, 80 bp, synthetic construct
  misc_feature 1..80: note = Artificially Synthesized Probe
  source 1..80: mol_type = other DNA
ccagtgaactaaccatctgcttttcccctttttctaatatctttacctacttttacttatatgtctttttttttttaaca

SEQ ID NO: 111302 - DNA, 80 bp, synthetic construct
  misc_feature 1..80: note = Artificially Synthesized Probe
  source 1..80: mol_type = other DNA
aggtaaatggtatgcacgtgaaaactgatttatctcagctgcctggaaactatcagaacaaagttcttgaattgtgagca

SEQ ID NO: 111303 - DNA, 80 bp, synthetic construct
  misc_feature 1..80: note = Artificially Synthesized Probe
  source 1..80: mol_type = other DNA
cagggactgcgaccatttctagaatcgtcacaaagccatcgctgagacagacactcaggtttgcagaatactgtctacag

SEQ ID NO: 111304 - DNA, 80 bp, synthetic construct
  misc_feature 1..80: note = Artificially Synthesized Probe
  source 1..80: mol_type = other DNA
agaaacagcaacgttgcagggctcagggcgcactttccagagagaatgggaccacatccagggccccacaggccataccc

SEQ ID NO: 111305 - DNA, 80 bp, synthetic construct
  misc_feature 1..80: note = Artificially Synthesized Probe
  source 1..80: mol_type = other DNA
gcaccaagcagcaccagtgacccctcgtggctgcctccctgcagtgccagttcttcatccgagacatcgctcaggagccc

SEQ ID NO: 111306 - DNA, 80 bp, synthetic construct
  misc_feature 1..80: note = Artificially Synthesized Probe
  source 1..80: mol_type = other DNA
tgcacacacaatgtatgcagacacatgcacatatgcagacacacaaccacataatgcatgcacattctcacatacacgtc

SEQ ID NO: 111307 - DNA, 80 bp, synthetic construct
  misc_feature 1..80: note = Artificially Synthesized Probe
  source 1..80: mol_type = other DNA
cgttgtctctgtcttgtctctctgcattgtttgtcctggttctctctctctctctcgttattacaacatagagccaaaaa

SEQ ID NO: 111308 - DNA, 80 bp, synthetic construct
  misc_feature 1..80: note = Artificially Synthesized Probe
  source 1..80: mol_type = other DNA
tgcacattctcacatgcacgtttcacacatgctcacacactcacatgcacacacatgcacattctcacacatgcacacat

SEQ ID NO: 111309 - DNA, 80 bp, synthetic construct
  misc_feature 1..80: note = Artificially Synthesized Probe
  source 1..80: mol_type = other DNA
atacacattctcagatgcacacacatgcattctcacatatatacacattctcacacatgcacatgtacacattctcatct

SEQ ID NO: 111310 - DNA, 80 bp, synthetic construct
  misc_feature 1..80: note = Artificially Synthesized Probe
  source 1..80: mol_type = other DNA
gtaaacattctcatatccacatacatgcacacattctcacatgcacacacgtgctcacacatgctcacacatgtacacat

SEQ ID NO: 111311 - DNA, 80 bp, synthetic construct
  misc_feature 1..80: note = Artificially Synthesized Probe
  source 1..80: mol_type = other DNA
atgtacacgttctcacacatacattctcacatgcacaagttctcacacacatgaacattctcacacacatgcacatgtac

SEQ ID NO: 111312 - DNA, 80 bp, synthetic construct
  misc_feature 1..80: note = Artificially Synthesized Probe
  source 1..80: mol_type = other DNA
cccctgctggggtccctcaggaccctgcctctctcccactgccccctcctggtggaggctgccttgccaaagtaccttca

SEQ ID NO: 111313 - DNA, 80 bp, synthetic construct
  misc_feature 1..80: note = Artificially Synthesized Probe
  source 1..80: mol_type = other DNA
cagcaacaagaaaaaaatctccccagctatttttggaggagggaaaagtaattacagctcagaatcactgccctgttgaa

SEQ ID NO: 111314 - DNA, 80 bp, synthetic construct
  misc_feature 1..80: note = Artificially Synthesized Probe
  source 1..80: mol_type = other DNA
ccattctcagggagtagaaactgctgtcatggcatccagtcataactgctgcaaaaattccaggaggccaaaggtgaatc

SEQ ID NO: 111315 - DNA, 80 bp, synthetic construct
  misc_feature 1..80: note = Artificially Synthesized Probe
  source 1..80: mol_type = other DNA
gtctgagcagcttagttcgtaatgaaacctgaagataagccgagaccctatatcgctggaaattcctttattttcaagga

SEQ ID NO: 111316 - DNA, 80 bp, synthetic construct
  misc_feature 1..80: note = Artificially Synthesized Probe
  source 1..80: mol_type = other DNA
gagcctcactgtccggagaggccagcttcccttgtgtgaggagcagggcccccattcctcccaccacccagatcccagtg

SEQ ID NO: 111317 - DNA, 80 bp, synthetic construct
  misc_feature 1..80: note = Artificially Synthesized Probe
  source 1..80: mol_type = other DNA
gttaagttctttaaacttctgagataatacaactagacctagcatggtgccagccaagcattgcataatgtgtgtttcct

SEQ ID NO: 111318 - DNA, 80 bp, synthetic construct
  misc_feature 1..80: note = Artificially Synthesized Probe
  source 1..80: mol_type = other DNA
agggaggcctgggacagtaaatccaggagatcccagcttccctgagcgacaagcgggacctctgttcctctcgccaccca

SEQ ID NO: 111319 - DNA, 80 bp, synthetic construct
  misc_feature 1..80: note = Artificially Synthesized Probe
  source 1..80: mol_type = other DNA
agtcactatgagtggggcctccattcctcccgccacccagggatcccagtgaggcctgggatggcaaatccagcggcgca

SEQ ID NO: 111320 - DNA, 80 bp, synthetic construct
  misc_feature 1..80: note = Artificially Synthesized Probe
  source 1..80: mol_type = other DNA
aggcccttctgggaggtgaggagcaggctaggaggggaggacagtgaagacagtgccgagaacacagccagtcatgcctc

SEQ ID NO: 111321 - DNA, 80 bp, synthetic construct
  misc_feature 1..80: note = Artificially Synthesized Probe
  source 1..80: mol_type = other DNA
aggaggtggggccttccttacacaggccccaaggacggctcacgctccagccacatgaggacacgtgaggaggcaccgtc

SEQ ID NO: 111322 - DNA, 80 bp, synthetic construct
  misc_feature 1..80: note = Artificially Synthesized Probe
  source 1..80: mol_type = other DNA
ggtactttgagcagccttcatggactaagacactgcgtattattatcccattgacgccatgtggaaattaaggcacaggg

SEQ ID NO: 111323 - DNA, 80 bp, synthetic construct
  misc_feature 1..80: note = Artificially Synthesized Probe
  source 1..80: mol_type = other DNA
acatggagtgactggcagagtgtcctattctgcaaccaactcacaaaatcctcaggtcttgtatggcgactctcaccata

SEQ ID NO: 111324 - DNA, 80 bp, synthetic construct
  misc_feature 1..80: note = Artificially Synthesized Probe
  source 1..80: mol_type = other DNA
actcacacccacactctcaccctaagaggtgacacccgcagacgtcactcacacccacactctcaccataagagctgaca

SEQ ID NO: 111325 - DNA, 80 bp, synthetic construct
  misc_feature 1..80: note = Artificially Synthesized Probe
  source 1..80: mol_type = other DNA
actctcaccataagagctgacacctgcagacgtcactcacaccaacactctcaccataagagctgacacccgcagacgtc

SEQ ID NO: 111326 - DNA, 80 bp, synthetic construct
  misc_feature 1..80: note = Artificially Synthesized Probe
  source 1..80: mol_type = other DNA
taagaggtgacatctgcagacgtcactcacacccacactctcacaataagagctgaggcacaaagaggtcactcacatcc

SEQ ID NO: 111327 - DNA, 80 bp, synthetic construct
  misc_feature 1..80: note = Artificially Synthesized Probe
  source 1..80: mol_type = other DNA
tgcccgcagacgtcattcacacccaaactctcaccataagagctgacacctgcagacgtcactcacacccacactctcac

SEQ ID NO: 111328 - DNA, 80 bp, synthetic construct
  misc_feature 1..80: note = Artificially Synthesized Probe
  source 1..80: mol_type = other DNA
gttcccggtgagcacgcggaaaggacgcggtgggagcggcaggtgcagagggaggacttgaaggttccatccctaacaga

SEQ ID NO: 111329 - DNA, 80 bp, synthetic construct
  misc_feature 1..80: note = Artificially Synthesized Probe
  source 1..80: mol_type = other DNA
cgtcactcacacccacactctcaccataagagctgacgcccgcagacgtcactcacacccacactctcaccagaagagct

SEQ ID NO: 111330 - DNA, 80 bp, synthetic construct
  misc_feature 1..80: note = Artificially Synthesized Probe
  source 1..80: mol_type = other DNA
acccatactctcaccataagagctgacacccgcagaagtcactcacacccacactctcaccataagagctgaggcccaca

SEQ ID NO: 111331 - DNA, 80 bp, synthetic construct
  misc_feature 1..80: note = Artificially Synthesized Probe
  source 1..80: mol_type = other DNA
tcaccataagagctgaggaccacagaggtcacttacagccatactctcaccataagaggtgacacctgcagacgtcactc

SEQ ID NO: 111332 - DNA, 80 bp, synthetic construct
  misc_feature 1..80: note = Artificially Synthesized Probe
  source 1..80: mol_type = other DNA
aggtgacacccgcagacgacactaacaaccagattctcaccataagagctgacacccgcagacgtcactcacacccacac

SEQ ID NO: 111333 - DNA, 80 bp, synthetic construct
  misc_feature 1..80: note = Artificially Synthesized Probe
  source 1..80: mol_type = other DNA
tgcagacgacactcacacccacactctcaccataagagctgaggcccacagaggtcactcacacccatactcccaccata

SEQ ID NO: 111334 - DNA, 80 bp, synthetic construct
  misc_feature 1..80: note = Artificially Synthesized Probe
  source 1..80: mol_type = other DNA
actcacacccacactctcaccataagagctgaggcccacagaggacactcacacccacactctcaccataagaggtgaca

SEQ ID NO: 111335 - DNA, 80 bp, synthetic construct
  misc_feature 1..80: note = Artificially Synthesized Probe
  source 1..80: mol_type = other DNA
atactctcaccataagaggtgacacctgcagacgtcactcacacccacactctcaccataagaagtgacacctgcagatg

SEQ ID NO: 111336 - DNA, 80 bp, synthetic construct
  misc_feature 1..80: note = Artificially Synthesized Probe
  source 1..80: mol_type = other DNA
cataagagctgatgcctgcagacgtcactcacgtacacacttctcaccataagaggtgacacatgcaaacgtcactcaca

SEQ ID NO: 111337 - DNA, 80 bp, synthetic construct
  misc_feature 1..80: note = Artificially Synthesized Probe
  source 1..80: mol_type = other DNA
tgaaacctgcagacgtcactcacacccacactctcaccataagaagtgacacctgcaaatgtcactcacacccacgctct

SEQ ID NO: 111338 - DNA, 80 bp, synthetic construct
  misc_feature 1..80: note = Artificially Synthesized Probe
  source 1..80: mol_type = other DNA
aggagtcactcacacccacactctcaccataagaggtgacatctgcagacgtcactcacacccacactgtcaccataaga

SEQ ID NO: 111339 - DNA, 80 bp, synthetic construct
  misc_feature 1..80: note = Artificially Synthesized Probe
  source 1..80: mol_type = other DNA
gagccacagggaagccagtcctcctggaccgtgtgtggctgttttggagccagttgtgtcctgtgaagagcgcagcggcc

SEQ ID NO: 111340 - DNA, 80 bp, synthetic construct
  misc_feature 1..80: note = Artificially Synthesized Probe
  source 1..80: mol_type = other DNA
cacacccacactctcaccataagacctgacactcgcagacgtcactcacacccacactctcaccataagagctgatgccg

SEQ ID NO: 111341 - DNA, 80 bp, synthetic construct
  misc_feature 1..80: note = Artificially Synthesized Probe
  source 1..80: mol_type = other DNA
ctctcaccataagagctgacacccgcagacatcactcacacacacactctcaccataagagctgaggcccacagaggtca

SEQ ID NO: 111342 - DNA, 80 bp, synthetic construct
  misc_feature 1..80: note = Artificially Synthesized Probe
  source 1..80: mol_type = other DNA
agagccgacacccgcagacatcactcacacacacacgcgtcactcacactcacactctagccataagagctgacgcccgc

SEQ ID NO: 111343 - DNA, 80 bp, synthetic construct
  misc_feature 1..80: note = Artificially Synthesized Probe
  source 1..80: mol_type = other DNA
tgtcactcacacccacactctcaccataagagctgacacatgcagacgtcactcacacccacactctcaccataagagct

SEQ ID NO: 111344 - DNA, 80 bp, synthetic construct
  misc_feature 1..80: note = Artificially Synthesized Probe
  source 1..80: mol_type = other DNA
ccatagacgtcactcacacccacacacgtcactcacacccacactctcaccataagaggtgacacctgcagacgtcactc

SEQ ID NO: 111345 - DNA, 80 bp, synthetic construct
  misc_feature 1..80: note = Artificially Synthesized Probe
  source 1..80: mol_type = other DNA
aggtgacacctgcagacgtcacacccacactctcaccataagaggtgacgcccgcagacatcactcacacccacactctc

SEQ ID NO: 111346 - DNA, 80 bp, synthetic construct
  misc_feature 1..80: note = Artificially Synthesized Probe
  source 1..80: mol_type = other DNA
gcgtcactcacacccacactctcaccataagcgctgacacctgctgacgtcactcacacccacactgtcaccataagagc

SEQ ID NO: 111347 - DNA, 80 bp, synthetic construct
  misc_feature 1..80: note = Artificially Synthesized Probe
  source 1..80: mol_type = other DNA
cacccacactgtcaccataagagctgatgcctgcagacgtcactcacacccacactctcaccataagaggtgacacctgc

SEQ ID NO: 111348 - DNA, 80 bp, synthetic construct
  misc_feature 1..80: note = Artificially Synthesized Probe
  source 1..80: mol_type = other DNA
ctcaaccataagaggtgacacatgcagatgtcactcacacccacgctgtcaccataagagctgatgcctgcagacgtcac

SEQ ID NO: 111349 - DNA, 80 bp, synthetic construct
  misc_feature 1..80: note = Artificially Synthesized Probe
  source 1..80: mol_type = other DNA
aagaggtgacacatgcaaacgtcactcacacccacactctcaccataagaagtgacacctgcaaacgtcactcacaccca

SEQ ID NO: 111350 - DNA, 80 bp, synthetic construct
  misc_feature 1..80: note = Artificially Synthesized Probe
  source 1..80: mol_type = other DNA
ctcagaataaacctatgtgttcatgaaaatatttctatctagggttctcccaggaggtgaacttgccgttctctgtcttc

SEQ ID NO: 111351 - DNA, 80 bp, synthetic construct
  misc_feature 1..80: note = Artificially Synthesized Probe
  source 1..80: mol_type = other DNA
tgcaaatgtcactcacacccacactatcaccataagaagtgacacctgcagacatcactcacacccacagtctcaccata

SEQ ID NO: 111352 - DNA, 80 bp, synthetic construct
  misc_feature 1..80: note = Artificially Synthesized Probe
  source 1..80: mol_type = other DNA
actcacacccacattctcaccataagagctgtcgcccgcagaggtcactcacacccacaatctcaccataagagccgacg

SEQ ID NO: 111353 - DNA, 80 bp, synthetic construct
  misc_feature 1..80: note = Artificially Synthesized Probe
  source 1..80: mol_type = other DNA
gcagacgtcactcacacccacactctcacaataattggtgacacctgcagacgtcactcacacccacacatgtcactcac

SEQ ID NO: 111354 - DNA, 80 bp, synthetic construct
  misc_feature 1..80: note = Artificially Synthesized Probe
  source 1..80: mol_type = other DNA
gacacatgcagacgtcactcacacccacacgtcactcacacccacactctcaccataagagctgacgcccgcagacgtca

SEQ ID NO: 111355 - DNA, 80 bp, synthetic construct
  misc_feature 1..80: note = Artificially Synthesized Probe
  source 1..80: mol_type = other DNA
gagctgtcgcccgcacaggtcactcacacccacactctcaccataagatccgacgcccgcagacgtcactcacacccaca

SEQ ID NO: 111356 - DNA, 80 bp, synthetic construct
  misc_feature 1..80: note = Artificially Synthesized Probe
  source 1..80: mol_type = other DNA
tcaccataagagctgaggcccacagaggtcacttacagccatactctcaccataagaggtgacacctgcagacgtcactc

SEQ ID NO: 111357 - DNA, 80 bp, synthetic construct
  misc_feature 1..80: note = Artificially Synthesized Probe
  source 1..80: mol_type = other DNA
aggtgacacctgcagacgtccctcacacccacactctcaccataagaggtaacacctgcagacgtccctcacacccacac

SEQ ID NO: 111358 - DNA, 80 bp, synthetic construct
  misc_feature 1..80: note = Artificially Synthesized Probe
  source 1..80: mol_type = other DNA
tgcagacgtcactcacacccacactctcaccataagaggagacacctgcagacgtcattcacacccacactctcaccata

SEQ ID NO: 111359 - DNA, 80 bp, synthetic construct
  misc_feature 1..80: note = Artificially Synthesized Probe
  source 1..80: mol_type = other DNA
actcacacccacacacgtcactcacactcacactctcaccataagagtgtgacacctgcagacgtcactcacacccacac

SEQ ID NO: 111360 - DNA, 80 bp, synthetic construct
  misc_feature 1..80: note = Artificially Synthesized Probe
  source 1..80: mol_type = other DNA
tgcagacgtcacacccacactctcaccataagaggtgatgcccgcagacatcactcacacccacactctcaccatagagc

SEQ ID NO: 111361 - DNA, 80 bp, synthetic construct
  misc_feature 1..80: note = Artificially Synthesized Probe
  source 1..80: mol_type = other DNA
gggcagggctgtcctgatccccatgagaacatcaggcgcccatccacatgtggccaccctgttggcaccggctgctacct

SEQ ID NO: 111362 - DNA, 80 bp, synthetic construct
  misc_feature 1..80: note = Artificially Synthesized Probe
  source 1..80: mol_type = other DNA
cacccacactgtcaccataagagctgacacccgcagacgtcactcacatccacactctcaccataagaggtgacacctgc

SEQ ID NO: 111363 - DNA, 80 bp, synthetic construct
  misc_feature 1..80: note = Artificially Synthesized Probe
  source 1..80: mol_type = other DNA
ctcaccataagaggtgacacctgcagacgtcactcacacccacactctcaccataagagctgaggcccacagaggacact

SEQ ID NO: 111364 - DNA, 80 bp, synthetic construct
  misc_feature 1..80: note = Artificially Synthesized Probe
  source 1..80: mol_type = other DNA
agaagtgacacctgcagacatcactcacacccacagtctcaccataagaggtgacacctgcagacgtcactcacacccac

SEQ ID NO: 111365 - DNA, 80 bp, synthetic construct
  misc_feature 1..80: note = Artificially Synthesized Probe
  source 1..80: mol_type = other DNA
cctgcagacgtcactcacacccacactctcaccataagagctgtcgcccgcagacgtgactcacacccacactctcccca

SEQ ID NO: 111366 - DNA, 80 bp, synthetic construct
  misc_feature 1..80: note = Artificially Synthesized Probe
  source 1..80: mol_type = other DNA
tcactcacacccatactctcaccataagagctgacacctgcatacgtcactcacacccacactctcaaccataagaggtg

SEQ ID NO: 111367 - DNA, 80 bp, synthetic construct
  misc_feature 1..80: note = Artificially Synthesized Probe
  source 1..80: mol_type = other DNA
cccatactctcaccataaaagctgatgcctgcagacgtcactcacgtacacacttctcaccataagaggtgacacatgca

SEQ ID NO: 111368 - DNA, 80 bp, synthetic construct
  misc_feature 1..80: note = Artificially Synthesized Probe
  source 1..80: mol_type = other DNA
tcaccataagagctgacacctgcagacgtcactcacacccacactctcaccataagaagtgacacctgcaaatgtcactc

SEQ ID NO: 111369 - DNA, 80 bp, synthetic construct
  misc_feature 1..80: note = Artificially Synthesized Probe
  source 1..80: mol_type = other DNA
agctgtcgcccgcagaagtcactcacacccacactctcactataagaggtgacatatgcagacgtcactcacacccacac

SEQ ID NO: 111370 - DNA, 80 bp, synthetic construct
  misc_feature 1..80: note = Artificially Synthesized Probe
  source 1..80: mol_type = other DNA
ggcacacgtcactcacacccacactctcactataagaggtgacacctacagacatcactcacacccacattctcaccata

SEQ ID NO: 111371 - DNA, 80 bp, synthetic construct
  misc_feature 1..80: note = Artificially Synthesized Probe
  source 1..80: mol_type = other DNA
actcacatccacactctcaccataataggtgacacctgcagacgtcactcacacccacattctcaccataagagctgtcg

SEQ ID NO: 111372 - DNA, 80 bp, synthetic construct
  misc_feature 1..80: note = Artificially Synthesized Probe
  source 1..80: mol_type = other DNA
ctgtctttggggagggcgtgctgtcagatgaatatttaccatgaaacacctcacaatctaagtaaatgaccagacacaca

SEQ ID NO: 111373 - DNA, 80 bp, synthetic construct
  misc_feature 1..80: note = Artificially Synthesized Probe
  source 1..80: mol_type = other DNA
gcagacgtcactcacacccacactcaccataagaggtgacacatgcagacgtcacacacacccacactctcaccataatt

SEQ ID NO: 111374 - DNA, 80 bp, synthetic construct
  misc_feature 1..80: note = Artificially Synthesized Probe
  source 1..80: mol_type = other DNA
tctcaccataagagctgacgcccgcagatgtcactcacacccacactctcaccataagaggtgaaacctgcagacgtcac

SEQ ID NO: 111375 - DNA, 80 bp, synthetic construct
  misc_feature 1..80: note = Artificially Synthesized Probe
  source 1..80: mol_type = other DNA
cactctcaccataagaggtaacacctgcagacgtcattcacacccacactctcaccataattggtgacacctgcagacgt

SEQ ID NO: 111376 - DNA, 80 bp, synthetic construct
  misc_feature 1..80: note = Artificially Synthesized Probe
  source 1..80: mol_type = other DNA
tcacacccacactctcaccataagaggtaacaccttcagacgtcattcacacccacactctcaccataattggtgacacg

SEQ ID NO: 111377 - DNA, 80 bp, synthetic construct
  misc_feature 1..80: note = Artificially Synthesized Probe
  source 1..80: mol_type = other DNA
actctcaccataagagctgtcgcccgcagaggtcactcacacccacactctcaccatagagctgacgcccgcagacgtca

SEQ ID NO: 111378 - DNA, 80 bp, synthetic construct
  misc_feature 1..80: note = Artificially Synthesized Probe
  source 1..80: mol_type = other DNA
agctgacacctgcagacgtcactcacacccacattctcaccataagagctgtcgcccgcagacgtcactcacacccacac

SEQ ID NO: 111379 - DNA, 80 bp, synthetic construct
  misc_feature 1..80: note = Artificially Synthesized Probe
  source 1..80: mol_type = other DNA
cgcagaggtcactcacacccacactctcaccataagagccgacgcccacagacgtcactcacacccacacacgtcactca

SEQ ID NO: 111380 - DNA, 80 bp, synthetic construct
  misc_feature 1..80: note = Artificially Synthesized Probe
  source 1..80: mol_type = other DNA
ctgacatctgcagacgtcactcacacccacactctcaccataagagctgacacctgcagacgtcactcacacccacactc

SEQ ID NO: 111381 - DNA, 80 bp, synthetic construct
  misc_feature 1..80: note = Artificially Synthesized Probe
  source 1..80: mol_type = other DNA
cagacatcactcacacagtcaactcagtcagtccttatgataacccttagtggcataaactgtcatggtccccattccat

SEQ ID NO: 111382 - DNA, 80 bp, synthetic construct
  misc_feature 1..80: note = Artificially Synthesized Probe
  source 1..80: mol_type = other DNA
accattccagaccaccgggagctcaggaaacctcatcatcgtgctcacttgagccaagatccaggaaatattaagtcctt

SEQ ID NO: 111383 - DNA, 80 bp, synthetic construct
  misc_feature 1..80: note = Artificially Synthesized Probe
  source 1..80: mol_type = other DNA
atgtaaccatcaaaattaaaacttctgtgcatcaaaggacactattagcagcaggaaaaggcagccagggagtggggaaa

SEQ ID NO: 111384 - DNA, 80 bp, synthetic construct
  misc_feature 1..80: note = Artificially Synthesized Probe
  source 1..80: mol_type = other DNA
ggccaggcccccagagcctgttagtagcccccgacacagggccggtgcttagtaaatatctgttagttggctaatgggat

SEQ ID NO: 111385 - DNA, 80 bp, synthetic construct
  misc_feature 1..80: note = Artificially Synthesized Probe
  source 1..80: mol_type = other DNA
gcagaggtgtggggaggaaactactttgaatttagatttcctggggcttatcccagagtgggcctcactgtggagtcacg

SEQ ID NO: 111386 - DNA, 80 bp, synthetic construct
  misc_feature 1..80: note = Artificially Synthesized Probe
  source 1..80: mol_type = other DNA
cagagaagatgtacaaacagctgaaagcacagggaaggcgcccagcatcaccagcgtcaaggcaacgcaaatcaaaacca

SEQ ID NO: 111387 - DNA, 80 bp, synthetic construct
  misc_feature 1..80: note = Artificially Synthesized Probe
  source 1..80: mol_type = other DNA
gaaaagttcaatgtggaagtagcagatgatccgacagccccatttgattttacacccaatacctgcaagcagggctcgcg

SEQ ID NO: 111388 - DNA, 80 bp, synthetic construct
  misc_feature 1..80: note = Artificially Synthesized Probe
  source 1..80: mol_type = other DNA
cagccatgctcgtggcacgtgggctgtcgcggctgctcccggtggaatcagccccctttctgattttacacccaacacct

SEQ ID NO: 111389 - DNA, 80 bp, synthetic construct
  misc_feature 1..80: note = Artificially Synthesized Probe
  source 1..80: mol_type = other DNA
agactgcatttccaggcaccaggatgagtttaaattcagctcccaaagaagaccagtgaacacaccaatgaacatacact

SEQ ID NO: 111390 - DNA, 80 bp, synthetic construct
  misc_feature 1..80: note = Artificially Synthesized Probe
  source 1..80: mol_type = other DNA
gaagccgtgacaacgagcagcaaagcgcagggcctcacccaagagatacccaggacagcacagacgggggaagctccagc

SEQ ID NO: 111391 - DNA, 80 bp, synthetic construct
  misc_feature 1..80: note = Artificially Synthesized Probe
  source 1..80: mol_type = other DNA
aagggaggctgtttcaagtttaggcctccagaagaggcagctcctcgaccaaactgaagacacataatttcctgttaaat

SEQ ID NO: 111392 - DNA, 80 bp, synthetic construct
  misc_feature 1..80: note = Artificially Synthesized Probe
  source 1..80: mol_type = other DNA
gtggaaaaccagacttttctagcccaagaatgagtgagatgtaaaaatcaaagaggtcccacacgtaacccaccaagaaa

SEQ ID NO: 111393 - DNA, 80 bp, synthetic construct
  misc_feature 1..80: note = Artificially Synthesized Probe
  source 1..80: mol_type = other DNA
tctgatgagaaatcaggcaccagcttgtgcatctgtttccctggaaatcactgcttccctgttggtttgcacatgtcctg

SEQ ID NO: 111394 - DNA, 80 bp, synthetic construct
  misc_feature 1..80: note = Artificially Synthesized Probe
  source 1..80: mol_type = other DNA
acctgggaccgcagtgggcgggagaaattctggaggataaaatgttgggccccagtgctccatctctgagggtggaccct

SEQ ID NO: 111395 - DNA, 80 bp, synthetic construct
  misc_feature 1..80: note = Artificially Synthesized Probe
  source 1..80: mol_type = other DNA
aactgcctgtctcctggccaacgggaagacaggttttttgtcttactttgggttttgtcttaatttgggttttttgtggg

SEQ ID NO: 111396 - DNA, 80 bp, synthetic construct
  misc_feature 1..80: note = Artificially Synthesized Probe
  source 1..80: mol_type = other DNA
caagagaaagaacaaagacaaaggccaccggttttggaagccccaggtagaaggagacagggtcttccacccccgtggaa

SEQ ID NO: 111397 - DNA, 80 bp, synthetic construct
  misc_feature 1..80: note = Artificially Synthesized Probe
  source 1..80: mol_type = other DNA
cacaggtctgcagtgccccaggttagtttctgaagcaaaacaagattccagcttctcactgttctgacctgtaacacttc

SEQ ID NO: 111398 - DNA, 80 bp, synthetic construct
  misc_feature 1..80: note = Artificially Synthesized Probe
  source 1..80: mol_type = other DNA
atgggtgtccattttcacacagctataaagaactacccaagactaagtaatttttgaagaaaagagatttaattgactca

SEQ ID NO: 111399 - DNA, 80 bp, synthetic construct
  misc_feature 1..80: note = Artificially Synthesized Probe
  source 1..80: mol_type = other DNA
acagcgtggtggaaaccacccgcatgatccagtcacctcccaccaggtccctccccaacgctggggattacaactcaagg

SEQ ID NO: 111400 - DNA, 80 bp, synthetic construct
  misc_feature 1..80: note = Artificially Synthesized Probe
  source 1..80: mol_type = other DNA
ctcagcagttttgagatgtataaccgtctactgttatcttcatcacactgtacaatcgaactcaaaaaattgcccctgag

SEQ ID NO: 111401 - DNA, 80 bp, synthetic construct
  misc_feature 1..80: note = Artificially Synthesized Probe
  source 1..80: mol_type = other DNA
gtaatgctttccaattccatccatgatgctggaaatcacagaattccttcctttttaagactgaatagtatcccactgtg

SEQ ID NO: 111402 - DNA, 80 bp, synthetic construct
  misc_feature 1..80: note = Artificially Synthesized Probe
  source 1..80: mol_type = other DNA
tagtttgttgtttgagaggcctccatacagttctccataatgactgtaccgatttagattcccaatagtgcacaagattt

SEQ ID NO: 111403 - DNA, 80 bp, synthetic construct
  misc_feature 1..80: note = Artificially Synthesized Probe
  source 1..80: mol_type = other DNA
ttttgagaaatatctactcagattctttacctgtcttttaattgggtttttcattttcatgctattgagttgtttgagct

SEQ ID NO: 111404 - DNA, 80 bp, synthetic construct
  misc_feature 1..80: note = Artificially Synthesized Probe
  source 1..80: mol_type = other DNA
gtgctttggggatcaaataaaaaaaattgttgcccaggataatgttatgtcattttgccctgtgatttcttctagtagtt

SEQ ID NO: 111405 - DNA, 80 bp, synthetic construct
  misc_feature 1..80: note = Artificially Synthesized Probe
  source 1..80: mol_type = other DNA
ttttgctgaaaatgaattgagcataaatgcatggattcatttcctggctctctattctgttccattagttgatgtgtcta

SEQ ID NO: 111406 - DNA, 80 bp, synthetic construct
  misc_feature 1..80: note = Artificially Synthesized Probe
  source 1..80: mol_type = other DNA
ttttctatttctgtaaaaaaaatgccattggaattttgataggggttgcactgaaactatagattgctctaggtagtacg

SEQ ID NO: 111407 - DNA, 80 bp, synthetic construct
  misc_feature 1..80: note = Artificially Synthesized Probe
  source 1..80: mol_type = other DNA
gttaaattaattcctatctattgcagtcacacatttttttagtggcagcactcaccttcttgagtgaaccatggaggttg

SEQ ID NO: 111408 - DNA, 80 bp, synthetic construct
  misc_feature 1..80: note = Artificially Synthesized Probe
  source 1..80: mol_type = other DNA
acaggggacactggtcccgcctgatgctgagctgaaagtgagtgtggccgagtggtgctctcgaagtgtgagctgacgaa

SEQ ID NO: 111409 - DNA, 80 bp, synthetic construct
  misc_feature 1..80: note = Artificially Synthesized Probe
  source 1..80: mol_type = other DNA
cccattccaaaccacggccccctcctacatgcttttctctggtggaagattctctcttttcatgcagattggttgctaag

SEQ ID NO: 111410 - DNA, 80 bp, synthetic construct
  misc_feature 1..80: note = Artificially Synthesized Probe
  source 1..80: mol_type = other DNA
ccctgggttcgccattcacagccccagagccaccctgggttccccattcacagccccagagccaccctggggtccccatt

SEQ ID NO: 111411 - DNA, 80 bp, synthetic construct
  misc_feature 1..80: note = Artificially Synthesized Probe
  source 1..80: mol_type = other DNA
cacagccccagagccaccctggggtccccattcacagtccagtatgccccacgtgagtctgtgttggcttctgtcacttg

SEQ ID NO: 111412 - DNA, 80 bp, synthetic construct
  misc_feature 1..80: note = Artificially Synthesized Probe
  source 1..80: mol_type = other DNA
cagcacaggacttctcaaagagaccgtcactgtgtctcctgccccaacaaggtgaacagttctgggatgctaatccccac

SEQ ID NO: 111413 - DNA, 80 bp, synthetic construct
  misc_feature 1..80: note = Artificially Synthesized Probe
  source 1..80: mol_type = other DNA
cctgagggcagtgctgagggtggcccacgtcactgcacccctgggtggtccctgagggcagtgctgagggtggcccacgt

SEQ ID NO: 111414 - DNA, 80 bp, synthetic construct
  misc_feature 1..80: note = Artificially Synthesized Probe
  source 1..80: mol_type = other DNA
ctgggtggcccctgagggcagtgctgaggatggcccacgtcactgtgctccctgggtggtccctgagggcagtgctgagg

SEQ ID NO: 111415 - DNA, 80 bp, synthetic construct
  misc_feature 1..80: note = Artificially Synthesized Probe
  source 1..80: mol_type = other DNA
tcactgcacccctgggtggtccctgagggcagtgctgagggtggcccacgtcactgcacccctgggtggtccctgagggc

SEQ ID NO: 111416 - DNA, 80 bp, synthetic construct
  misc_feature 1..80: note = Artificially Synthesized Probe
  source 1..80: mol_type = other DNA
gtggcccacgtcactgcacccctgggtggcccctgagggcagtgctgaggatggcccacgtcactgtgctccctgggtgg

SEQ ID NO: 111417 - DNA, 80 bp, synthetic construct
  misc_feature 1..80: note = Artificially Synthesized Probe
  source 1..80: mol_type = other DNA
gccccccgggccacatgaggcccacccccttcctgatgtccaagaacaagggcgttactagcgctcacgtgttccccttt

SEQ ID NO: 111418 - DNA, 80 bp, synthetic construct
  misc_feature 1..80: note = Artificially Synthesized Probe
  source 1..80: mol_type = other DNA
tatgggatctgtaccaagacatgggtaaaaagaaggccctggcatgttcacctgattgttactcaaaagccccacagatg

SEQ ID NO: 111419 - DNA, 80 bp, synthetic construct
  misc_feature 1..80: note = Artificially Synthesized Probe
  source 1..80: mol_type = other DNA
cccttcctcctggcgggtgggtttataaccaatcaaagtgtggaaccttcattggaacctgctatacacatagaggatga

SEQ ID NO: 111420 - DNA, 80 bp, synthetic construct
  misc_feature 1..80: note = Artificially Synthesized Probe
  source 1..80: mol_type = other DNA
gtgttcccaggaaacatgtacagggtacctgcttcacccaggaagtgcagggaggttggaatgaaacctcagaaggatgg

SEQ ID NO: 111421 - DNA, 80 bp, synthetic construct
  misc_feature 1..80: note = Artificially Synthesized Probe
  source 1..80: mol_type = other DNA
ctggagacaaatagtgacttagagtcccataacacatttgtccccatcaccccattggatctcagggctgcctgtgagcc

SEQ ID NO: 111422 - DNA, 80 bp, synthetic construct
  misc_feature 1..80: note = Artificially Synthesized Probe
  source 1..80: mol_type = other DNA
agatgaggaaacagacccagaaggagcaagtagctggattctaggctatcaacaaaatgccaaaggcagaaaaaaccctg

SEQ ID NO: 111423 - DNA, 80 bp, synthetic construct
  misc_feature 1..80: note = Artificially Synthesized Probe
  source 1..80: mol_type = other DNA
cggcacacctgagcctcttccagagcccacagttatcccattacgaaatgaaaagctgctttggggaatgctgtgttgat

SEQ ID NO: 111424 - DNA, 80 bp, synthetic construct
  misc_feature 1..80: note = Artificially Synthesized Probe
  source 1..80: mol_type = other DNA
tcacccgctggcaccattggccactgcacactattccccagctccctcctactgcaccccatgagccaccctcagttggg

SEQ ID NO: 111425 - DNA, 80 bp, synthetic construct
  misc_feature 1..80: note = Artificially Synthesized Probe
  source 1..80: mol_type = other DNA
gaaagtaagtggccttttaaagaatgctaaaacattacgggcactttagccccgcgtttcttactacacgaaacatggtt

SEQ ID NO: 111426 - DNA, 80 bp, synthetic construct
  misc_feature 1..80: note = Artificially Synthesized Probe
  source 1..80: mol_type = other DNA
agtgacagatatcattttcattcaggggggcttgaactctggccatcagaagagctggttactacaaaggtagcagaaca

SEQ ID NO: 111427 - DNA, 80 bp, synthetic construct
  misc_feature 1..80: note = Artificially Synthesized Probe
  source 1..80: mol_type = other DNA
cctcctgtccgctcccctcctgtccgctcccctcctgaccgctcccctcctgtccgctcccctcctgaccgctcccctcc

SEQ ID NO: 111428 - DNA, 80 bp, synthetic construct
  misc_feature 1..80: note = Artificially Synthesized Probe
  source 1..80: mol_type = other DNA
cctcctgtccgctcccctcctgtccgctcccctcctgactgctcccctcctgtccactcccctcctgtctgctcccctct

SEQ ID NO: 111429 - DNA, 80 bp, synthetic construct
  misc_feature 1..80: note = Artificially Synthesized Probe
  source 1..80: mol_type = other DNA
aactgctggcttatatttccattttctggcagtgatccctagctaggtagtaggtgctcagtttgtggaaataattgtaa

SEQ ID NO: 111430 - DNA, 80 bp, synthetic construct
  misc_feature 1..80: note = Artificially Synthesized Probe
  source 1..80: mol_type = other DNA
acccaaggatcagcttcgataggcattttccagaagtgcattagaatggctgcttcaccctcctgtgatgatgcctggac

SEQ ID NO: 111431 - DNA, 80 bp, synthetic construct
  misc_feature 1..80: note = Artificially Synthesized Probe
  source 1..80: mol_type = other DNA
ctggtattggtaatcctgagtacaatattgattgacaaaaacgaatcacacctgagcctcaaagctcttagcccttccct

SEQ ID NO: 111432 - DNA, 80 bp, synthetic construct
  misc_feature 1..80: note = Artificially Synthesized Probe
  source 1..80: mol_type = other DNA
caatcccttcaatctaaatgtttcaggtgagagcagagatagatttttcgaatggagacattaacctttctgagctgcag

SEQ ID NO: 111433 - DNA, 80 bp, synthetic construct
  misc_feature 1..80: note = Artificially Synthesized Probe
  source 1..80: mol_type = other DNA
actcgctcctattccgggtctcctaacagcaggccaacagatcacaccctgttagtatttagaataatcaagatttttat

SEQ ID NO: 111434 - DNA, 80 bp, synthetic construct
  misc_feature 1..80: note = Artificially Synthesized Probe
  source 1..80: mol_type = other DNA
ccctgatggggcactctagcatcccactgttttccttaatagaaaacaacacaatagaagttaaggtcagagtcaaaaga

SEQ ID NO: 111435 - DNA, 80 bp, synthetic construct
  misc_feature 1..80: note = Artificially Synthesized Probe
  source 1..80: mol_type = other DNA
tgctgtcttctgagttctattaaaggacaatgagaaaacagcaattgaaatggggtttctggttccaaacggcaggacag

SEQ ID NO: 111436 - DNA, 80 bp, synthetic construct
  misc_feature 1..80: note = Artificially Synthesized Probe
  source 1..80: mol_type = other DNA
gaaccagacccccacatctgcaaggcccctccccataacctgcctggcatccagtacacaaaagattttcccttgacaca

SEQ ID NO: 111437 - DNA, 80 bp, synthetic construct
  misc_feature 1..80: note = Artificially Synthesized Probe
  source 1..80: mol_type = other DNA
tgtccccagccctggaaactctgctctgcaactcggccaaaggaggcactcaatcagagtggccactcgcagccccacgc

SEQ ID NO: 111438 - DNA, 80 bp, synthetic construct
  misc_feature 1..80: note = Artificially Synthesized Probe
  source 1..80: mol_type = other DNA
cctagcaagaaaacactccacaggtaaatcacaaagaatctttaagcaaacataccccagaaaaaccaaaacacccagac

SEQ ID NO: 111439 - DNA, 80 bp, synthetic construct
  misc_feature 1..80: note = Artificially Synthesized Probe
  source 1..80: mol_type = other DNA
aattacagatgtgacgtggaggctccaagaggttcaggaacatgtctcaagtcactcggtgacagagaacaatagagctg

SEQ ID NO: 111440 - DNA, 80 bp, synthetic construct
  misc_feature 1..80: note = Artificially Synthesized Probe
  source 1..80: mol_type = other DNA
aaaatggcagccctaaggaaactcggtgatccccaagataacaccaggaaatcaattcagaaagttaacaacagattgaa

SEQ ID NO: 111441 - DNA, 80 bp, synthetic construct
  misc_feature 1..80: note = Artificially Synthesized Probe
  source 1..80: mol_type = other DNA
acaacctacaagatagagaaaattacctcaaaacaccaaatccaagaattactggtgttcaagagggagctgagtgagaa

SEQ ID NO: 111442 - DNA, 80 bp, synthetic construct
  misc_feature 1..80: note = Artificially Synthesized Probe
  source 1..80: mol_type = other DNA
aaagagaagaccccaaaggaagcaaataacatctaaaggagctccaatttgtttgtcaacagacatctcaatggaaaaca

SEQ ID NO: 111443 - DNA, 80 bp, synthetic construct
  misc_feature 1..80: note = Artificially Synthesized Probe
  source 1..80: mol_type = other DNA
caccaaacccaccttacaataaatgctgaagagatctcttcattcagaaagaacaaaaatacatcgaatggggcactaag

SEQ ID NO: 111444 - DNA, 80 bp, synthetic construct
  misc_feature 1..80: note = Artificially Synthesized Probe
  source 1..80: mol_type = other DNA
ctttccaatcaaatgttctgtgtttgcatgatgatagctagggtgctgcagcataagtgtctgtaatttagcttttgtga

SEQ ID NO: 111445 - DNA, 80 bp, synthetic construct
  misc_feature 1..80: note = Artificially Synthesized Probe
  source 1..80: mol_type = other DNA
ggcaggctgggccccagaagcacgcagtggagaagcccgcagcagtgcagagggatgtccttatgagccaggacagagtc

SEQ ID NO: 111446 - DNA, 80 bp, synthetic construct
  misc_feature 1..80: note = Artificially Synthesized Probe
  source 1..80: mol_type = other DNA
aacgcaggggaagagcgtgagcgtgaaccccaagatgatggggtgagacctcgctcacaggcagatgcgaatcctccacg

SEQ ID NO: 111447 - DNA, 80 bp, synthetic construct
  misc_feature 1..80: note = Artificially Synthesized Probe
  source 1..80: mol_type = other DNA
gggcccacagtgattgagccctcaatcaaagcttttttattattatggaaaattacaagttttttcacaatgagttttca

SEQ ID NO: 111448 - DNA, 80 bp, synthetic construct
  misc_feature 1..80: note = Artificially Synthesized Probe
  source 1..80: mol_type = other DNA
ttcctcgggaatctaaaataaccaacaagtcactcatttccctttgtctaacctactacatgcattttttatttataaag

SEQ ID NO: 111449 - DNA, 80 bp, synthetic construct
  misc_feature 1..80: note = Artificially Synthesized Probe
  source 1..80: mol_type = other DNA
agggggcaagtctgctgcaggcggggggtgccgggaaggagaagcggagggctttgcagaccctcaggatggggctgttt

SEQ ID NO: 111450 - DNA, 80 bp, synthetic construct
  misc_feature 1..80: note = Artificially Synthesized Probe
  source 1..80: mol_type = other DNA
tctttttgttgcttccttgggtttttttggacaaggaaagttgaacataatcaaaaacaacagtggtgaagtcctcaccc

SEQ ID NO: 111451 - DNA, 80 bp, synthetic construct
  misc_feature 1..80: note = Artificially Synthesized Probe
  source 1..80: mol_type = other DNA
gcctgtgctgcaaggagcccacattttatttgaggggccagataggtcacaattcataacataacaaagcaaaaggtgaa

SEQ ID NO: 111452 - DNA, 80 bp, synthetic construct
  misc_feature 1..80: note = Artificially Synthesized Probe
  source 1..80: mol_type = other DNA
ttttctcttagcttttctatggggaaatcaggagaaatggactgactgggagaaagcttctggggaccaagtaaaaccca

SEQ ID NO: 111453 - DNA, 80 bp, synthetic construct
  misc_feature 1..80: note = Artificially Synthesized Probe
  source 1..80: mol_type = other DNA
aggaacatctccaattccgaaattccatggtcctgtgcaaacaaccagaaaatagaaaccaagatttgaggacggaagag

SEQ ID NO: 111454 - DNA, 80 bp, synthetic construct
  misc_feature 1..80: note = Artificially Synthesized Probe
  source 1..80: mol_type = other DNA
cggcaccacccaaaggcgagggccaggctgtcgttgacgccctgtggcagcacctcagtgatttcaggggtggttttgac

SEQ ID NO: 111455 - DNA, 80 bp, synthetic construct
  misc_feature 1..80: note = Artificially Synthesized Probe
  source 1..80: mol_type = other DNA
tttgctgcgcagcccaggcccacccaaatcactgagggcgtcacacaggcaccgtcagctgcgggtgctaagaaaagcgg

SEQ ID NO: 111456 - DNA, 80 bp, synthetic construct
  misc_feature 1..80: note = Artificially Synthesized Probe
  source 1..80: mol_type = other DNA
aggcaggaggcgcattgcgtccagcaggggtgtcccattgggacagtggcggctctcagaacccagccgccagccctcaa

SEQ ID NO: 111457 - DNA, 80 bp, synthetic construct
  misc_feature 1..80: note = Artificially Synthesized Probe
  source 1..80: mol_type = other DNA
ctctggccctcccacaaggcttaaggtggctccttagaatggaaggcccaactttgtgagttactcgaatacatgaactc

SEQ ID NO: 111458 - DNA, 80 bp, synthetic construct
  misc_feature 1..80: note = Artificially Synthesized Probe
  source 1..80: mol_type = other DNA
gggctgaggtagccatggggggccctctttcctgccctcagcttcacctttttcaggagcatggcctggaagctcagcca

SEQ ID NO: 111459 - DNA, 80 bp, synthetic construct
  misc_feature 1..80: note = Artificially Synthesized Probe
  source 1..80: mol_type = other DNA
taccagacttgaaagcaatgactcaaagaaatacgtgtatgtacccccacgcacacagcatgttattcacagaagccaga

SEQ ID NO: 111460 - DNA, 80 bp, synthetic construct
  misc_feature 1..80: note = Artificially Synthesized Probe
  source 1..80: mol_type = other DNA
cgggactggtatgtacaggtcagcatggccagtttccccctcctgtcaccctggccacctgcccccggggctggtatgta

SEQ ID NO: 111461 - DNA, 80 bp, synthetic construct
  misc_feature 1..80: note = Artificially Synthesized Probe
  source 1..80: mol_type = other DNA
tgcagccgggcacatgctccgattgcactgatacgtggcccccagatggtcaggttcacagaaggtacactgagtgcagc

SEQ ID NO: 111462 - DNA, 80 bp, synthetic construct
  misc_feature 1..80: note = Artificially Synthesized Probe
  source 1..80: mol_type = other DNA
taagttactgaaagtctttaagaagtgataaaaggtttactgaataaatgagaaactggatgggagggacgccatcccca

SEQ ID NO: 111463 - DNA, 80 bp, synthetic construct
  misc_feature 1..80: note = Artificially Synthesized Probe
  source 1..80: mol_type = other DNA
gcgagtccctgctcagaccccagaaatccaaagtgattcacgcacaggtgggaagacgctatcaatactcacaactttaa

SEQ ID NO: 111464 - DNA, 80 bp, synthetic construct
  misc_feature 1..80: note = Artificially Synthesized Probe
  source 1..80: mol_type = other DNA
aaacttaatttggtatcacattggccaagaggtcatttggcgaggccaacacacagtcacaaaggaaaggtggtcctcag

SEQ ID NO: 111465 - DNA, 80 bp, synthetic construct
  misc_feature 1..80: note = Artificially Synthesized Probe
  source 1..80: mol_type = other DNA
ctgaggacaactttcagcaacaccgcgacactctaggttgttttttcaaagattaaacataataataattctgtaaaacc

SEQ ID NO: 111466 - DNA, 80 bp, synthetic construct
  misc_feature 1..80: note = Artificially Synthesized Probe
  source 1..80: mol_type = other DNA
aatggcagcccaagcgagagcccagatgcctgaagaaggcattcctgatggaatggccttcttcctctgacagtttttaa

SEQ ID NO: 111467 - DNA, 80 bp, synthetic construct
  misc_feature 1..80: note = Artificially Synthesized Probe
  source 1..80: mol_type = other DNA
agacaacccacagatcccaagtccacccacacccaggacgacgcacagaccccacatccaccctcacccaggatgacgca

SEQ ID NO: 111468 - DNA, 80 bp, synthetic construct
  misc_feature 1..80: note = Artificially Synthesized Probe
  source 1..80: mol_type = other DNA
acccaggacgacgcacagaccccacatccaccctcacccaggatgacgcacagaccccacatccaccctcacccaggatg

SEQ ID NO: 111469 - DNA, 80 bp, synthetic construct
  misc_feature 1..80: note = Artificially Synthesized Probe
  source 1..80: mol_type = other DNA
ccctcacccaggatgacgcacagaccccacatccacccacacccaggatgacgcacagaccccacatccaccctcaccca

SEQ ID NO: 111470 - DNA, 80 bp, synthetic construct
  misc_feature 1..80: note = Artificially Synthesized Probe
  source 1..80: mol_type = other DNA
ctggtacacacaggtcagcacggccagtttcctccgcccggaaccctggcctcctgccctcgggcctggtatgtacaggt

SEQ ID NO: 111471 - DNA, 80 bp, synthetic construct
  misc_feature 1..80: note = Artificially Synthesized Probe
  source 1..80: mol_type = other DNA
atccaccctcacccaggatgacgcacagaccccacatccaccctcacccaggacgacgcacagaccccacatccaccctc

SEQ ID NO: 111472 - DNA, 80 bp, synthetic construct
  misc_feature 1..80: note = Artificially Synthesized Probe
  source 1..80: mol_type = other DNA
cccacatccaccctcacccaggacgatgcacagaccccacatccaccctcacccaggacgacgcacagaccccacatcca

SEQ ID NO: 111473 - DNA, 80 bp, synthetic construct
  misc_feature 1..80: note = Artificially Synthesized Probe
  source 1..80: mol_type = other DNA
tccaccctcacctggggtgacccacagaccctgcatccaccctcaccaaggatgatgcgcagaccccacaccctggcaac

SEQ ID NO: 111474 - DNA, 80 bp, synthetic construct
  misc_feature 1..80: note = Artificially Synthesized Probe
  source 1..80: mol_type = other DNA
acgctgtgaaaacctcttttgctctttcttgctgctcaggccatccacacctggcagaaatccccactgcccagttccac

SEQ ID NO: 111475 - DNA, 80 bp, synthetic construct
  misc_feature 1..80: note = Artificially Synthesized Probe
  source 1..80: mol_type = other DNA
gggatcctaggcaggcatggatctgtgttcccccaacacagataccaacaagggccccaggaaggtcagtgcctggagcc

SEQ ID NO: 111476 - DNA, 80 bp, synthetic construct
  misc_feature 1..80: note = Artificially Synthesized Probe
  source 1..80: mol_type = other DNA
ggagctcatccccgcttctctcctcccttcgtttcttggccctgaatcccagccccttccccatcgtgggttccatcttt

SEQ ID NO: 111477 - DNA, 80 bp, synthetic construct
  misc_feature 1..80: note = Artificially Synthesized Probe
  source 1..80: mol_type = other DNA
ccagctctcctaactcagctctgggctgtccagaggaggaggcagaagaggccgcccctgcccgcccggcctcagcctgg

SEQ ID NO: 111478 - DNA, 80 bp, synthetic construct
  misc_feature 1..80: note = Artificially Synthesized Probe
  source 1..80: mol_type = other DNA
aattaaagatggcctaattaaggcaatgtgacaattctgcccatcagacctcagaaaggcaaaggactttgtgggataac

SEQ ID NO: 111479 - DNA, 80 bp, synthetic construct
  misc_feature 1..80: note = Artificially Synthesized Probe
  source 1..80: mol_type = other DNA
ctggatgtgcgtataaaaccgtaagtcaggtttgtccatcacaaccacgctcatcctggtgaaaatgcagagaatcaggg

SEQ ID NO: 111480 - DNA, 80 bp, synthetic construct
  misc_feature 1..80: note = Artificially Synthesized Probe
  source 1..80: mol_type = other DNA
cttgagtcagaattaagagtcagaattaaagagaagtctcaaaacgacgccactggagacacaatcgcaattcaggccac

SEQ ID NO: 111481 - DNA, 80 bp, synthetic construct
  misc_feature 1..80: note = Artificially Synthesized Probe
  source 1..80: mol_type = other DNA
actccttctccagccggttcttgttcttcaggtggtcctccatgtaggactgaaagggaaacacagggtcaggagcgcac

SEQ ID NO: 111482 - DNA, 80 bp, synthetic construct
  misc_feature 1..80: note = Artificially Synthesized Probe
  source 1..80: mol_type = other DNA
gacagcagctcgccagccttcgctgagcctccaccagagaggcaaggggaggacactagggaggccaggagaggctacgg

SEQ ID NO: 111483 - DNA, 80 bp, synthetic construct
  misc_feature 1..80: note = Artificially Synthesized Probe
  source 1..80: mol_type = other DNA
cacacccacgctggaaccactgcgagcccaatttcggaaaaaacaaaacatacaagtgaaactcagcccacagctctgaa

SEQ ID NO: 111484 - DNA, 80 bp, synthetic construct
  misc_feature 1..80: note = Artificially Synthesized Probe
  source 1..80: mol_type = other DNA
gcatgctgatacagtgagacaggcagggtgccagaactccgaggtgagacacttagggtgtcccagggcgctcggccccc

SEQ ID NO: 111485 - DNA, 80 bp, synthetic construct
  misc_feature 1..80: note = Artificially Synthesized Probe
  source 1..80: mol_type = other DNA
agtctctggtgttgatcacagtggactagaatatgacagaaaaggggacttcaggctggcagacaaccacacacacacat

SEQ ID NO: 111486 - DNA, 80 bp, synthetic construct
  misc_feature 1..80: note = Artificially Synthesized Probe
  source 1..80: mol_type = other DNA
aaaaaccctgcctctcaccatgcttcccccagcagggtctgcagagcccccatcctcacttcatctgcctctcgccatgc

SEQ ID NO: 111487 - DNA, 80 bp, synthetic construct
  misc_feature 1..80: note = Artificially Synthesized Probe
  source 1..80: mol_type = other DNA
tctcgccatgcttcccccagcagggtatgcagagcccccatcctcacttcacctgcctctcgccatgcttcccacagcag

SEQ ID NO: 111488 - DNA, 80 bp, synthetic construct
  misc_feature 1..80: note = Artificially Synthesized Probe
  source 1..80: mol_type = other DNA
ggcagacagatgttcaattaaacatcagacttcacgctgacacgctgagagtgaggatctccatgcataattctccgtcc

SEQ ID NO: 111489 - DNA, 80 bp, synthetic construct
  misc_feature 1..80: note = Artificially Synthesized Probe
  source 1..80: mol_type = other DNA
aggactgtggcctggaaagtcataggcacttgacttctaccaaaaaagaaataacggaacggcatgagaatggtcacacc

SEQ ID NO: 111490 - DNA, 80 bp, synthetic construct
  misc_feature 1..80: note = Artificially Synthesized Probe
  source 1..80: mol_type = other DNA
tcaaattgggtggtttactccacactattttaataaatagccttcactcttcagacacaatctgaaaaaaccccagactc

SEQ ID NO: 111491 - DNA, 80 bp, synthetic construct
  misc_feature 1..80: note = Artificially Synthesized Probe
  source 1..80: mol_type = other DNA
cctcatcggcacttctgacaacggcaatttttgtgctcctcacaaccaacgagggtgtgatttttcccatctgtcttccc

SEQ ID NO: 111492 - DNA, 80 bp, synthetic construct
  misc_feature 1..80: note = Artificially Synthesized Probe
  source 1..80: mol_type = other DNA
tgtgcattgttaacacacattttacatatgtaaatataaactccggtgtttgggaatcagtttaccgctgagatgacaac

SEQ ID NO: 111493 - DNA, 80 bp, synthetic construct
  misc_feature 1..80: note = Artificially Synthesized Probe
  source 1..80: mol_type = other DNA
ctcaggtgttgttgaagcccgttagaactggcatgcgtggagtctgctcccatgcatgcatgcacacgcacacacaccca

SEQ ID NO: 111494 - DNA, 80 bp, synthetic construct
  misc_feature 1..80: note = Artificially Synthesized Probe
  source 1..80: mol_type = other DNA
acacacccacacacacacagcatccctgggagaagccgcagaccagtgcatgcgtgcacacacacacacccacacacaca

SEQ ID NO: 111495 - DNA, 80 bp, synthetic construct
  misc_feature 1..80: note = Artificially Synthesized Probe
  source 1..80: mol_type = other DNA
aaatacacacacacacagcatccctagaagctgcagcccaatgcacgcgtgcacacacacacgcacacacacacagcatc

SEQ ID NO: 111496 - DNA, 80 bp, synthetic construct
  misc_feature 1..80: note = Artificially Synthesized Probe
  source 1..80: mol_type = other DNA
cacccacacacccacagcatccctgggagaagctgcagcccaatgcacgtgtgcaaatgcacacacacacccacagcatc

SEQ ID NO: 111497 - DNA, 80 bp, synthetic construct
  misc_feature 1..80: note = Artificially Synthesized Probe
  source 1..80: mol_type = other DNA
tgccaataccctgcacacggctctgtgactggagataatgaggaatcgccatggcaacccgggaacaagcccacagcgcc

SEQ ID NO: 111498 - DNA, 80 bp, synthetic construct
  misc_feature 1..80: note = Artificially Synthesized Probe
  source 1..80: mol_type = other DNA
ccagggttctcattcctgaatttttgtctttgcttctggttaccagagatccaaagctgcagtcgtttagctggtttctg

SEQ ID NO: 111499 - DNA, 80 bp, synthetic construct
  misc_feature 1..80: note = Artificially Synthesized Probe
  source 1..80: mol_type = other DNA
acccaggactggaaaagcatagcttaggggttcaggggagaaacagtgacctctgcatcagaaaagtcctagataagttg

SEQ ID NO: 111500 - DNA, 80 bp, synthetic construct
  misc_feature 1..80: note = Artificially Synthesized Probe
  source 1..80: mol_type = other DNA
tcttttactgctaggcagccagtacaggaggatggtcagtgcggcaagatggacccttccaaggttggacccttccatgg

SEQ ID NO: 111501 - DNA, 80 bp, synthetic construct
  misc_feature 1..80: note = Artificially Synthesized Probe
  source 1..80: mol_type = other DNA
aattgggaagtatggcgggggcacagatgccccaggtggacggccaggcctctggtccacacacaggcattcactcccca

SEQ ID NO: 111502 - DNA, 80 bp, synthetic construct
  misc_feature 1..80: note = Artificially Synthesized Probe
  source 1..80: mol_type = other DNA
cgcagtggttcacaggatggaggcaccaactgggaggctgggcggtggcactcacactgtgctggagtcaggctggctcc

SEQ ID NO: 111503 - DNA, 80 bp, synthetic construct
  misc_feature 1..80: note = Artificially Synthesized Probe
  source 1..80: mol_type = other DNA
agtaaaaaataagctcttgaacccatccatggctatcagaatgaaggaaaagtcgtttgacctccttggcccagagccca

SEQ ID NO: 111504 - DNA, 80 bp, synthetic construct
  misc_feature 1..80: note = Artificially Synthesized Probe
  source 1..80: mol_type = other DNA
tctgatctgtgcaaaatgcgggacagcttctagcatgaaacaaacacaaatggatggaagcaaatattttaacccttggc

SEQ ID NO: 111505 - DNA, 80 bp, synthetic construct
  misc_feature 1..80: note = Artificially Synthesized Probe
  source 1..80: mol_type = other DNA
ccatgttcctgtttcaagacaccaaattcctgagtttgactttcccttctgcaagtttcccagaggaggaaaacctttaa

SEQ ID NO: 111506 - DNA, 80 bp, synthetic construct
  misc_feature 1..80: note = Artificially Synthesized Probe
  source 1..80: mol_type = other DNA
cctgtaattccataacttcaacagggcaaacgtttacagtacaggttgattctagagcctcctgcaccggcctcccagga

SEQ ID NO: 111507 - DNA, 80 bp, synthetic construct
  misc_feature 1..80: note = Artificially Synthesized Probe
  source 1..80: mol_type = other DNA
actttcttgaaaaagaaaaaatggtattcctaccagcatcactggctgggctagcactgatcacagtgatgaccaggtag

SEQ ID NO: 111508 - DNA, 80 bp, synthetic construct
  misc_feature 1..80: note = Artificially Synthesized Probe
  source 1..80: mol_type = other DNA
tttgctgcacagggacgtccaaggaccaaggcacagagcagctggggggctccccagggaggaaggacagcactcagccc

SEQ ID NO: 111509 - DNA, 80 bp, synthetic construct
  misc_feature 1..80: note = Artificially Synthesized Probe
  source 1..80: mol_type = other DNA
ggaaccagagtgtgatggttaacactgagtgtcaacttgattggattgaaggatggaaagtattgatcctgggtgtgtct

SEQ ID NO: 111510 - DNA, 80 bp, synthetic construct
  misc_feature 1..80: note = Artificially Synthesized Probe
  source 1..80: mol_type = other DNA
cctacatctttctcccatgctggatgcttcttgcccttgaacattggactccaagttcttcagccttgggacctggactg

SEQ ID NO: 111511 - DNA, 80 bp, synthetic construct
  misc_feature 1..80: note = Artificially Synthesized Probe
  source 1..80: mol_type = other DNA
atatatatatatctgcccctctagagaaccctgactaatacacagagtgtccaaaagtgaatcactcaacacatggtgag

SEQ ID NO: 111512 - DNA, 80 bp, synthetic construct
  misc_feature 1..80: note = Artificially Synthesized Probe
  source 1..80: mol_type = other DNA
cattcaccaatctgtttattggtaaatatcagccctgattacacatttcccgttataaggataaaaacgtgaaaacatag

SEQ ID NO: 111513 - DNA, 80 bp, synthetic construct
  misc_feature 1..80: note = Artificially Synthesized Probe
  source 1..80: mol_type = other DNA
gcatctgatttgtgttctcaaatttaagaaaatgacaaccataaaaagcaagataacagcactccagaagtccccgacct

SEQ ID NO: 111514 - DNA, 80 bp, synthetic construct
  misc_feature 1..80: note = Artificially Synthesized Probe
  source 1..80: mol_type = other DNA
cggttcttattcatctgtaccgttgagaacaagccctgattttaagaaagaacatttcaaaggaccaaacccagctgcac

SEQ ID NO: 111515 - DNA, 80 bp, synthetic construct
  misc_feature 1..80: note = Artificially Synthesized Probe
  source 1..80: mol_type = other DNA
ggaacgaggtgatcaacactgcaggagaaactggtgcacggcggtgactgactggggatttggcataaggacaactgcct

SEQ ID NO: 111516 - DNA, 80 bp, synthetic construct
  misc_feature 1..80: note = Artificially Synthesized Probe
  source 1..80: mol_type = other DNA
ggtgacacacctgtagtcccagttactcgagaggctgaggcaggagaattgcttgaacctgggaggcagaggttgcagtg

SEQ ID NO: 111517 - DNA, 80 bp, synthetic construct
  misc_feature 1..80: note = Artificially Synthesized Probe
  source 1..80: mol_type = other DNA
aggagactgagaccatcctggccaacacggtgaaaccccgtctctactaaaaatacaataaattagctgggcgtggtggt

SEQ ID NO: 111518 - DNA, 80 bp, synthetic construct
  misc_feature 1..80: note = Artificially Synthesized Probe
  source 1..80: mol_type = other DNA
ataaaggctgggagaaccagaataaatgaaagaaagcaacatgcaaaagtggaatacaaaaaaacttccacttccaaaga

SEQ ID NO: 111519 - DNA, 80 bp, synthetic construct
  misc_feature 1..80: note = Artificially Synthesized Probe
  source 1..80: mol_type = other DNA
tgtagcagcaattgtcatttgggaaatatgagaaaaaataatctcactcggtcataacgaaaaattttcagatacctagg

SEQ ID NO: 111520 - DNA, 80 bp, synthetic construct
  misc_feature 1..80: note = Artificially Synthesized Probe
  source 1..80: mol_type = other DNA
aaaaggaaggaaaaaattaggtgaatagttatcagatcctataataagagagacttcctaaacaagcaaaggaaagcaaa

SEQ ID NO: 111521 - DNA, 80 bp, synthetic construct
  misc_feature 1..80: note = Artificially Synthesized Probe
  source 1..80: mol_type = other DNA
cacaggttccaagtgtgtccacacgagaaaataaagcatgcatgtgtacacatggtcctttgctgcaaagcggccacgca

SEQ ID NO: 111522 - DNA, 80 bp, synthetic construct
  misc_feature 1..80: note = Artificially Synthesized Probe
  source 1..80: mol_type = other DNA
aaaacgaggaggcatattttcctacacaattaaaattcttcactaataaacatccacattgatgaccttgtgacgcaaca

SEQ ID NO: 111523 - DNA, 80 bp, synthetic construct
  misc_feature 1..80: note = Artificially Synthesized Probe
  source 1..80: mol_type = other DNA
gcttactaagaatcagacattgagaaacaaaggaatttccaaccgtaggtgaataattaaattacaccacattaaagatc

SEQ ID NO: 111524 - DNA, 80 bp, synthetic construct
  misc_feature 1..80: note = Artificially Synthesized Probe
  source 1..80: mol_type = other DNA
tgagtcacgccacagacaccctctgccatcagccctcctgggcgctggctgtgtgcggaagaccccctcgcagggccaca

SEQ ID NO: 111525 - DNA, 80 bp, synthetic construct
  misc_feature 1..80: note = Artificially Synthesized Probe
  source 1..80: mol_type = other DNA
cccaggctggaccccggagctggcctccccagtgctggtccccagagctgatccccccaacgctggtccccggagctggt

SEQ ID NO: 111526 - DNA, 80 bp, synthetic construct
  misc_feature 1..80: note = Artificially Synthesized Probe
  source 1..80: mol_type = other DNA
gagctgatccccccaatgctggtccccagagctggtctcccatgagctggtacccggagctggtccccccatgctggtcc

SEQ ID NO: 111527 - DNA, 80 bp, synthetic construct
  misc_feature 1..80: note = Artificially Synthesized Probe
  source 1..80: mol_type = other DNA
cccagcatctagtcaccctctgattcagcttcatgggcatctcccttttggtttttatttctgttttttatacagcttgc

SEQ ID NO: 111528 - DNA, 80 bp, synthetic construct
  misc_feature 1..80: note = Artificially Synthesized Probe
  source 1..80: mol_type = other DNA
tagggctgctaagactccccgacctgacagcttccgggcatccctcctgcaatctggggccacctggccactctagaaca

SEQ ID NO: 111529 - DNA, 80 bp, synthetic construct
  misc_feature 1..80: note = Artificially Synthesized Probe
  source 1..80: mol_type = other DNA
aactcctgtggccacacccccaagatggctttgtctgtaaaggagcgttaacatcggcatttataagactaatatgacag

SEQ ID NO: 111530 - DNA, 80 bp, synthetic construct
  misc_feature 1..80: note = Artificially Synthesized Probe
  source 1..80: mol_type = other DNA
gttttttgctataatttgctcttgcctttgctaaaaggttgaaggcacttctattccaactgagtgtgagtaacgctaat

SEQ ID NO: 111531 - DNA, 80 bp, synthetic construct
  misc_feature 1..80: note = Artificially Synthesized Probe
  source 1..80: mol_type = other DNA
ctttgtatcacacacagttactaagggttcctttgcttaatctcttcagaggaaaaacagaccagctgccactgaagcaa

SEQ ID NO: 111532 - DNA, 80 bp, synthetic construct
  misc_feature 1..80: note = Artificially Synthesized Probe
  source 1..80: mol_type = other DNA
accggatgaaagttgaagaaggagcaggattggaaatattcaaataaatagcaactgtttcagcccatgcacctgcagag

SEQ ID NO: 111533 - DNA, 80 bp, synthetic construct
  misc_feature 1..80: note = Artificially Synthesized Probe
  source 1..80: mol_type = other DNA
cacggcgaggcgggaatctcaggtcatcgtgccgtctagtggaagttttgaccacagccaacctgaacccatgcagcaaa

SEQ ID NO: 111534 - DNA, 80 bp, synthetic construct
  misc_feature 1..80: note = Artificially Synthesized Probe
  source 1..80: mol_type = other DNA
tctcaaatgcacagatgagaagatgagacgctgtgggtgctgggctgggccctgagggaaacgggcagagtgtgatgact

SEQ ID NO: 111535 - DNA, 80 bp, synthetic construct
  misc_feature 1..80: note = Artificially Synthesized Probe
  source 1..80: mol_type = other DNA
ttgctctgggtccaagcagcagtgaaggggaagagctgggtctcaaacaccaaaaatccaatcacaaagctcccttgtca

SEQ ID NO: 111536 - DNA, 80 bp, synthetic construct
  misc_feature 1..80: note = Artificially Synthesized Probe
  source 1..80: mol_type = other DNA
atagacacacacctcaatatcaacagcgcagaaactccactcctggacactagcccgagagaaacaaaacacgatctgta

SEQ ID NO: 111537 - DNA, 80 bp, synthetic construct
  misc_feature 1..80: note = Artificially Synthesized Probe
  source 1..80: mol_type = other DNA
cacacagcaagtggacagatggaggctggaggcagaaattaaagaatgccctgcggaaatccagaacagcaagctttaga

SEQ ID NO: 111538 - DNA, 80 bp, synthetic construct
  misc_feature 1..80: note = Artificially Synthesized Probe
  source 1..80: mol_type = other DNA
ctgcatgctgggtgcatttgccaaaactcacagaattgaatacttcaagtctacagatttctactatatgtaacatttaa

SEQ ID NO: 111539 - DNA, 80 bp, synthetic construct
  misc_feature 1..80: note = Artificially Synthesized Probe
  source 1..80: mol_type = other DNA
aggctcagcagcagacgtatttcatgggggaaaccagctctcagctgcttcacgtggcagtgagaccctaaatatgagag

SEQ ID NO: 111540 - DNA, 80 bp, synthetic construct
  misc_feature 1..80: note = Artificially Synthesized Probe
  source 1..80: mol_type = other DNA
ggcttgtcatgtgattcactgctcatttagtccctcattcagcaaatgtttacagagtacccaggacacaggcatagtcc

SEQ ID NO: 111541 - DNA, 80 bp, synthetic construct
  misc_feature 1..80: note = Artificially Synthesized Probe
  source 1..80: mol_type = other DNA
gtgggacagcacagctgaacattaaatccattgcaactacagttttccctgagaaaagcatcactgatatgggcaggtgg

SEQ ID NO: 111542 - DNA, 80 bp, synthetic construct
  misc_feature 1..80: note = Artificially Synthesized Probe
  source 1..80: mol_type = other DNA
aagccccaggctccactagtggaagagcggaggaacagaagagtggcgtgtcagggaaggagagaagagaaggagcgtgt

SEQ ID NO: 111543 - DNA, 80 bp, synthetic construct
  misc_feature 1..80: note = Artificially Synthesized Probe
  source 1..80: mol_type = other DNA
ccatccttcaatttgtccctgtgacctgattcttcctggacgccagataagaacctgggtatcaacagggcactgagctg

SEQ ID NO: 111544 - DNA, 80 bp, synthetic construct
  misc_feature 1..80: note = Artificially Synthesized Probe
  source 1..80: mol_type = other DNA
ctcccttccctaaggctctttgagcacgcagcagccaaacagatgagccacacccgtcacacgtcctgcatgcagggtca

SEQ ID NO: 111545 - DNA, 80 bp, synthetic construct
  misc_feature 1..80: note = Artificially Synthesized Probe
  source 1..80: mol_type = other DNA
tgtcactgtcacccccaccatggccctgcttgagctagttgggaaaagcagagggactccagtgccgttgagaagccgca

SEQ ID NO: 111546 - DNA, 80 bp, synthetic construct
  misc_feature 1..80: note = Artificially Synthesized Probe
  source 1..80: mol_type = other DNA
tacgtcctgagggaggggttcaggggactctcccacatccctgtcacacgtcctgagaggggggtcagtggactccccta

SEQ ID NO: 111547 - DNA, 80 bp, synthetic construct
  misc_feature 1..80: note = Artificially Synthesized Probe
  source 1..80: mol_type = other DNA
ggggtcaggggactcccccacagccctgtcacacgtcctgcacgcggggtcaggggactctcccacagccctgtcacacg

SEQ ID NO: 111548 - DNA, 80 bp, synthetic construct
  misc_feature 1..80: note = Artificially Synthesized Probe
  source 1..80: mol_type = other DNA
ccccacagccctgtcacacgtcctgcacgcggggtcaggggactcccccacagccctgtcacacgtcctgcacgcggggt

SEQ ID NO: 111549 - DNA, 80 bp, synthetic construct
  misc_feature 1..80: note = Artificially Synthesized Probe
  source 1..80: mol_type = other DNA
acacgtcctgagaggggggtcaggggactcccccacagccctgtcacacgtcctgagaggggggtcaggggactccccca

SEQ ID NO: 111550 - DNA, 80 bp, synthetic construct
  misc_feature 1..80: note = Artificially Synthesized Probe
  source 1..80: mol_type = other DNA
gttaaatgtaaaatgtatcggtcttcaccaaagaagagcaagggatggccagtaagtgcaggaagagacagccagcatca

SEQ ID NO: 111551 - DNA, 80 bp, synthetic construct
  misc_feature 1..80: note = Artificially Synthesized Probe
  source 1..80: mol_type = other DNA
caggctttgtcatggacccaagaggaatgaaaatggagttcacaggaaaccggcatcggtggtttatcacagctttacgc

SEQ ID NO: 111552 - DNA, 80 bp, synthetic construct
  misc_feature 1..80: note = Artificially Synthesized Probe
  source 1..80: mol_type = other DNA
cacagtccacacagcacagggcccgtggctacaacacagacacagcaagcacagcacagaaccagatccatgagggcaag

SEQ ID NO: 111553 - DNA, 80 bp, synthetic construct
  misc_feature 1..80: note = Artificially Synthesized Probe
  source 1..80: mol_type = other DNA
cctccagctgtgcacttagaaaccgcattttactgcatacaaatcatatgattatacaaacctgaacaaacctgacacaa

SEQ ID NO: 111554 - DNA, 80 bp, synthetic construct
  misc_feature 1..80: note = Artificially Synthesized Probe
  source 1..80: mol_type = other DNA
cccaggcacctccttcttggtgcaggagggccctggacccactagggacttaagctccttttccacagaaacacagcaat

SEQ ID NO: 111555 - DNA, 80 bp, synthetic construct
  misc_feature 1..80: note = Artificially Synthesized Probe
  source 1..80: mol_type = other DNA
ttatgctgaaaaccccactcttggttctctgccttgatatcaccacgtttccaaagaaagtgtgcaaaactcctgggctt

SEQ ID NO: 111556 - DNA, 80 bp, synthetic construct
  misc_feature 1..80: note = Artificially Synthesized Probe
  source 1..80: mol_type = other DNA
tttccttgtgcatggaagaagcaccccacagagatgtctcgagttgtgaaattaggcaaaattcaaatggctcaatctag

SEQ ID NO: 111557 - DNA, 80 bp, synthetic construct
  misc_feature 1..80: note = Artificially Synthesized Probe
  source 1..80: mol_type = other DNA
aggcaggcacatttgtcaaagaggtgttttaatcaatacattgaagataatgataattccttccatgcagcactggtatt

SEQ ID NO: 111558 - DNA, 80 bp, synthetic construct
  misc_feature 1..80: note = Artificially Synthesized Probe
  source 1..80: mol_type = other DNA
gtcatctgtgaatttgttattaataagtatttattgacagtgcatctgcacgcactcctgtctctcagagctgtggaggg

SEQ ID NO: 111559 - DNA, 80 bp, synthetic construct
  misc_feature 1..80: note = Artificially Synthesized Probe
  source 1..80: mol_type = other DNA
ggtcaggtgtccacacgtaggatgctccctccagcagcctgcagaaggggctgcggaccccagggtgggggtgactgggg

SEQ ID NO: 111560 - DNA, 80 bp, synthetic construct
  misc_feature 1..80: note = Artificially Synthesized Probe
  source 1..80: mol_type = other DNA
agagccacactaattacacaggaaggaaaagctgcatcctcagaaactgcagccaaactcacactcacagcccacaggtg

SEQ ID NO: 111561 - DNA, 80 bp, synthetic construct
  misc_feature 1..80: note = Artificially Synthesized Probe
  source 1..80: mol_type = other DNA
ctaagaaacagcacagatgaaacagaaagactccaagaaggccaaagtcagtagacccacaagaggttcatgggggttca

SEQ ID NO: 111562 - DNA, 80 bp, synthetic construct
  misc_feature 1..80: note = Artificially Synthesized Probe
  source 1..80: mol_type = other DNA
gtcacatctcacatggatgacagcaggcaaagagagcttgtatggggaaactcccccttataaaaccatcagatcttgtg

SEQ ID NO: 111563 - DNA, 80 bp, synthetic construct
  misc_feature 1..80: note = Artificially Synthesized Probe
  source 1..80: mol_type = other DNA
gcctctcccaaatctcacgtcctcacattttaaaaccaatcatatcttcccaacagccccccaaagtcttaactcatttc

SEQ ID NO: 111564 - DNA, 80 bp, synthetic construct
  misc_feature 1..80: note = Artificially Synthesized Probe
  source 1..80: mol_type = other DNA
ccaaaacaaagaggctacaggccccacgcaagtctgaaatctagcagggcagtcaaatcttaaagctccaaaatgatctc

SEQ ID NO: 111565 - DNA, 80 bp, synthetic construct
  misc_feature 1..80: note = Artificially Synthesized Probe
  source 1..80: mol_type = other DNA
ccagttgttggtagatctaccattttggggtctggaggaccgtggccctcttctcacagctccactagacagtgccccag

SEQ ID NO: 111566 - DNA, 80 bp, synthetic construct
  misc_feature 1..80: note = Artificially Synthesized Probe
  source 1..80: mol_type = other DNA
aaaatactgaccagctcatctagcccaaatctggtgtgtgagggaagctgggaggttgatagttatggtgaaaggatagt

SEQ ID NO: 111567 - DNA, 80 bp, synthetic construct
  misc_feature 1..80: note = Artificially Synthesized Probe
  source 1..80: mol_type = other DNA
acttgacttctgtgcacctgcaggctcaacactatgtggaagctgccaaggcttggggcttgcccccctctgaagccaca

SEQ ID NO: 111568 - DNA, 80 bp, synthetic construct
  misc_feature 1..80: note = Artificially Synthesized Probe
  source 1..80: mol_type = other DNA
aagacctctgacatgccctggagacattttccctattgtctcagggattcacatttggctccttgttacttaggcaaatt

SEQ ID NO: 111569 - DNA, 80 bp, synthetic construct
  misc_feature 1..80: note = Artificially Synthesized Probe
  source 1..80: mol_type = other DNA
cataccctaaatcatcttgctcaagttcaaagttccacaaatgtctaggacaggggcaaaatgctgccagtctatttgct

SEQ ID NO: 111570 - DNA, 80 bp, synthetic construct
  misc_feature 1..80: note = Artificially Synthesized Probe
  source 1..80: mol_type = other DNA
tgtcttctgctgagccctccaaactgttccaacccctgcctgttacccaggtccaaagttgcttccacatttttggttat

SEQ ID NO: 111571 - DNA, 80 bp, synthetic construct
  misc_feature 1..80: note = Artificially Synthesized Probe
  source 1..80: mol_type = other DNA
accaagggatgtcttacatggcagcaggtaagagagagtttgtgcagagaaactcccccttatagaaccatcagatcttg

SEQ ID NO: 111572 - DNA, 80 bp, synthetic construct
  misc_feature 1..80: note = Artificially Synthesized Probe
  source 1..80: mol_type = other DNA
aggcaggtgccagttacattgtctcaccagagcaccctgagagccacagccaggagagaaatggtgggcaggacccacta

SEQ ID NO: 111573 - DNA, 80 bp, synthetic construct
  misc_feature 1..80: note = Artificially Synthesized Probe
  source 1..80: mol_type = other DNA
aagacccctccaccatgtcctgggtaagccacacaacctcacccactttttggtgtaaaacaggtaaaacagcatggaat

SEQ ID NO: 111574 - DNA, 80 bp, synthetic construct
  misc_feature 1..80: note = Artificially Synthesized Probe
  source 1..80: mol_type = other DNA
catgaaccagtacaagaaccaggccacacagcaggaggtgagcagcaggtgtgcgagcattcccgcctgagttctgctgc

SEQ ID NO: 111575 - DNA, 80 bp, synthetic construct
  misc_feature 1..80: note = Artificially Synthesized Probe
  source 1..80: mol_type = other DNA
acacagattaacatgaacagagaggtctgactgcacagagatcacaatcaatcaattgcttgcagacacatatgaaaacc

SEQ ID NO: 111576 - DNA, 80 bp, synthetic construct
  misc_feature 1..80: note = Artificially Synthesized Probe
  source 1..80: mol_type = other DNA
ttacagcctattgataaatggcacactccgtcagtatcccacagtacattaatgttcatcatgacatgatgcctggagaa

SEQ ID NO: 111577 - DNA, 80 bp, synthetic construct
  misc_feature 1..80: note = Artificially Synthesized Probe
  source 1..80: mol_type = other DNA
cagtaaaacatgatgggttctaaaatgatgaaccctagcaggtttaatccaatcgaaaatattatctgcaaaagaggcac

SEQ ID NO: 111578 - DNA, 80 bp, synthetic construct
  misc_feature 1..80: note = Artificially Synthesized Probe
  source 1..80: mol_type = other DNA
atcagaggcaaaagcagcatgcagggtcaggcacttctattagtgaatgtatctatttgatataatccacagggccagta

SEQ ID NO: 111579 - DNA, 80 bp, synthetic construct
  misc_feature 1..80: note = Artificially Synthesized Probe
  source 1..80: mol_type = other DNA
ctttgtggctgccagtttaaagtgcagagttttgccatggaatgccctttcaattttttattaattacatggaaccaaag

SEQ ID NO: 111580 - DNA, 80 bp, synthetic construct
  misc_feature 1..80: note = Artificially Synthesized Probe
  source 1..80: mol_type = other DNA
caaaagaactttaagtggtcaggaaagaaaggtgtgggtttgtgttcaattgcagaagagtctcagggtgagagtttatg

SEQ ID NO: 111581 - DNA, 80 bp, synthetic construct
  misc_feature 1..80: note = Artificially Synthesized Probe
  source 1..80: mol_type = other DNA
ttacgtaataacgtcattagtattttaaaccctttggcatatgagagccactatgctccggaaagcgtgatcacactgaa

SEQ ID NO: 111582 - DNA, 80 bp, synthetic construct
  misc_feature 1..80: note = Artificially Synthesized Probe
  source 1..80: mol_type = other DNA
actcatgatttgcgtgcaccaactgtatcacaacctgctgggctcgctcaaggtacttggcacacatgtctatttgtctg

SEQ ID NO: 111583 - DNA, 80 bp, synthetic construct
  misc_feature 1..80: note = Artificially Synthesized Probe
  source 1..80: mol_type = other DNA
cagacaccaacacatctctcaggagcacaacacagggcagaagcagccgggatgtggggaccgcgggctgtaaactatta

SEQ ID NO: 111584 - DNA, 80 bp, synthetic construct
  misc_feature 1..80: note = Artificially Synthesized Probe
  source 1..80: mol_type = other DNA
gaagaaggcgcttcaacaggcacaggtgttactgcttaagccaagacagatgagtataatgtagagaaaccctgtattac

SEQ ID NO: 111585 - DNA, 80 bp, synthetic construct
  misc_feature 1..80: note = Artificially Synthesized Probe
  source 1..80: mol_type = other DNA
gtaaaagttaccaaaggtaccaaaactgaaatactaattgccagaagacattttcacgagtcagagggccgaccaaacac

SEQ ID NO: 111586 - DNA, 80 bp, synthetic construct
  misc_feature 1..80: note = Artificially Synthesized Probe
  source 1..80: mol_type = other DNA
ctggtgtgacttccattcagtgcatcaacgtcccctaatggagtttctgatgtttaaattttccgttccacactcccacc

SEQ ID NO: 111587 - DNA, 80 bp, synthetic construct
  misc_feature 1..80: note = Artificially Synthesized Probe
  source 1..80: mol_type = other DNA
aacaaaagctactttaatataaaattctgggaacaattccagagacaagagtcccaaccaattaaggcaagaaagacacc

SEQ ID NO: 111588 - DNA, 80 bp, synthetic construct
  misc_feature 1..80: note = Artificially Synthesized Probe
  source 1..80: mol_type = other DNA
ctactttaaaatctcactgtatagcaagcaaagagagctgttttgagataaaatggaaaatcagaagtttgggcatccat

SEQ ID NO: 111589 - DNA, 80 bp, synthetic construct
  misc_feature 1..80: note = Artificially Synthesized Probe
  source 1..80: mol_type = other DNA
ggaagaggtagatactgacgcgatgttttttcacggagaatgaagtcatctgcagaggcacgtgactctattaaaactga

SEQ ID NO: 111590 - DNA, 80 bp, synthetic construct
  misc_feature 1..80: note = Artificially Synthesized Probe
  source 1..80: mol_type = other DNA
tttcccttttaatggggtttagatattactcaaagtttacaaatgctggcatacagaaaagcacaagttcaggcctgcta

SEQ ID NO: 111591 - DNA, 80 bp, synthetic construct
  misc_feature 1..80: note = Artificially Synthesized Probe
  source 1..80: mol_type = other DNA
gcagatgtgcccctcctcccatgccccgagtccctccttccgtgctcctcctccctcctcccattccccgagtccctcct

SEQ ID NO: 111592 - DNA, 80 bp, synthetic construct
  misc_feature 1..80: note = Artificially Synthesized Probe
  source 1..80: mol_type = other DNA
cctcctcccatgcccagagtccctcctcccatgccccaagtccctcctcccatgccctgagtccctcctcctgtgcccca

SEQ ID NO: 111593 - DNA, 80 bp, synthetic construct
  misc_feature 1..80: note = Artificially Synthesized Probe
  source 1..80: mol_type = other DNA
acccctcctccctcctcccgtgccccaagtccctcctcccgtgccccaagtccctcctcccatgcccagagtccctcctc

SEQ ID NO: 111594 - DNA, 80 bp, synthetic construct
  misc_feature 1..80: note = Artificially Synthesized Probe
  source 1..80: mol_type = other DNA
ggggacatgaacctggagaaagcataactgaacacactgtcgatcatccaaatgcccaaacatttaacctggaaaaaaat

SEQ ID NO: 111595 - DNA, 80 bp, synthetic construct
  misc_feature 1..80: note = Artificially Synthesized Probe
  source 1..80: mol_type = other DNA
actcccagctcttgctgtggtggtttcaagtgttaatgcagctctccagagttttagcaaatctgctaccctaggagatg

SEQ ID NO: 111596 - DNA, 80 bp, synthetic construct
  misc_feature 1..80: note = Artificially Synthesized Probe
  source 1..80: mol_type = other DNA
gatcgcgtctgcccaggctcttttgatgacgcgtctctgtggcagcatgtgttctagaacacgggaggctctgcccaaat

SEQ ID NO: 111597 - DNA, 80 bp, synthetic construct
  misc_feature 1..80: note = Artificially Synthesized Probe
  source 1..80: mol_type = other DNA
gaactgtaaacacagatgcccaattcacatagacactgaaatcacatctgcaagccaaataggtcagggagggctcatcc

SEQ ID NO: 111598 - DNA, 80 bp, synthetic construct
  misc_feature 1..80: note = Artificially Synthesized Probe
  source 1..80: mol_type = other DNA
ggttacgatgttggaaagcactctctgggtcctggggggactggactccagggggctgcggcatccctgtcagctcagct

SEQ ID NO: 111599 - DNA, 80 bp, synthetic construct
  misc_feature 1..80: note = Artificially Synthesized Probe
  source 1..80: mol_type = other DNA
ctgaaggagatggaatcctgctgtagatggcggcaacatgaagagctgtcaaagtctccaagccgctgccctgtgggatt

SEQ ID NO: 111600 - DNA, 80 bp, synthetic construct
  misc_feature 1..80: note = Artificially Synthesized Probe
  source 1..80: mol_type = other DNA
gagtcttttttctctttcatggcttgtagataagatgcttttcatctgtgagtctgtggggaagctaggccttcatagca

SEQ ID NO: 111601 - DNA, 80 bp, synthetic construct
  misc_feature 1..80: note = Artificially Synthesized Probe
  source 1..80: mol_type = other DNA
tatttatacacacacatctctatttatacacacatacaaaccccctgctgagtctgtttctctggagaaccccagctcca

SEQ ID NO: 111602 - DNA, 80 bp, synthetic construct
  misc_feature 1..80: note = Artificially Synthesized Probe
  source 1..80: mol_type = other DNA
ctgatccacggccacatcctccacgggaagccacggttcacgtcaatcccggcaccaaggtcccagaattcacagcttct

SEQ ID NO: 111603 - DNA, 80 bp, synthetic construct
  misc_feature 1..80: note = Artificially Synthesized Probe
  source 1..80: mol_type = other DNA
tttctttggatgacacagaacttgggaaagcacttcactcaccatcactagctcttataaaggacacagctcaaggagag

SEQ ID NO: 111604 - DNA, 80 bp, synthetic construct
  misc_feature 1..80: note = Artificially Synthesized Probe
  source 1..80: mol_type = other DNA
aaatcactggccattggtgattaaccccccaagagttgggggggcctgaaaggcccaaccatctaatggtgccttggcct

SEQ ID NO: 111605 - DNA, 80 bp, synthetic construct
  misc_feature 1..80: note = Artificially Synthesized Probe
  source 1..80: mol_type = other DNA
acaaaacttctttttcaccctccaatgctcagtgctgagctcagctgtgatcgatctgaaggaataggtcaaccctaagg

SEQ ID NO: 111606 - DNA, 80 bp, synthetic construct
  misc_feature 1..80: note = Artificially Synthesized Probe
  source 1..80: mol_type = other DNA
ggccacacctgggccctgaagccctcggcaggaggcaggtgcggccactgaggccacaccacacttcagtgagtgattcc

SEQ ID NO: 111607 - DNA, 80 bp, synthetic construct
  misc_feature 1..80: note = Artificially Synthesized Probe
  source 1..80: mol_type = other DNA
aatgcaagttcattagaaaagagatgtattgtgccttctttctgtggtggcccctcaattaatcctctggtcattgaaga

SEQ ID NO: 111608 - DNA, 80 bp, synthetic construct
  misc_feature 1..80: note = Artificially Synthesized Probe
  source 1..80: mol_type = other DNA
tgggatctgcgaaagatcaatacacaagaaaggtacatttgcaataacggctgccgccgtcacaaatgcaattctagact

SEQ ID NO: 111609 - DNA, 80 bp, synthetic construct
  misc_feature 1..80: note = Artificially Synthesized Probe
  source 1..80: mol_type = other DNA
ttcacaaacgggctcttggagaaaagaggtgagagcctcagcaaaggttgtgggatgttaatggacacatccagaaagca

SEQ ID NO: 111610 - DNA, 80 bp, synthetic construct
  misc_feature 1..80: note = Artificially Synthesized Probe
  source 1..80: mol_type = other DNA
cgatactcagctgcgtttattcaaaccgatcttctttgtgccccagctccatccccgccccaccaccctgtcctctcatc

SEQ ID NO: 111611 - DNA, 80 bp, synthetic construct
  misc_feature 1..80: note = Artificially Synthesized Probe
  source 1..80: mol_type = other DNA
aaggctgaggcgggtggatcacctgaggccaggagttcgagaccagcctggccaacatggtgaaaccttgtctctactaa

SEQ ID NO: 111612 - DNA, 80 bp, synthetic construct
  misc_feature 1..80: note = Artificially Synthesized Probe
  source 1..80: mol_type = other DNA
caatgaactcgactaagaagttattcccatgcagcgagtggcactaagtcgcagccgaaccaatttgcttcatgggaaac

SEQ ID NO: 111613 - DNA, 80 bp, synthetic construct
  misc_feature 1..80: note = Artificially Synthesized Probe
  source 1..80: mol_type = other DNA
gctggagggcctcggccaaggtaggagggaacacaggcatctggacaccgagtggccgcaatgctgctcactgtggctct

SEQ ID NO: 111614 - DNA, 80 bp, synthetic construct
  misc_feature 1..80: note = Artificially Synthesized Probe
  source 1..80: mol_type = other DNA
actgtcagctccactctacaaatgtcctctcaaaatgcgaagctcaaggtgggtatgtcatgccccaaagaggctacgaa

SEQ ID NO: 111615 - DNA, 80 bp, synthetic construct
  misc_feature 1..80: note = Artificially Synthesized Probe
  source 1..80: mol_type = other DNA
cttccaaattcgaggggtggaaatcatcctaactacagactagattttcttccctcttgcgacggttgtaacgcaacagc

SEQ ID NO: 111616 - DNA, 80 bp, synthetic construct
  misc_feature 1..80: note = Artificially Synthesized Probe
  source 1..80: mol_type = other DNA
acacatgccgaatgctgttgtgaacaagcagaaggaaagacagacatgtgcacagtcccagcttctccccgcgggacact

SEQ ID NO: 111617 - DNA, 80 bp, synthetic construct
  misc_feature 1..80: note = Artificially Synthesized Probe
  source 1..80: mol_type = other DNA
aaggggctgtgagcccacgccatccctccaagcctggaagcccaggcgccaccctcccttgtctgaaaccgcgctccctc

SEQ ID NO: 111618 - DNA, 80 bp, synthetic construct
  misc_feature 1..80: note = Artificially Synthesized Probe
  source 1..80: mol_type = other DNA
cttcctgaggcttaaggtcaccatgaggaggatacaaatgtctcattttatgatgagaaatgcccacctaccccgcagga

SEQ ID NO: 111619 - DNA, 80 bp, synthetic construct
  misc_feature 1..80: note = Artificially Synthesized Probe
  source 1..80: mol_type = other DNA
gaccagctgcccaggctggatgcagccctgcagccctggggatgggaggaggcaggaggtttccccagtgccaggccctg

SEQ ID NO: 111620 - DNA, 80 bp, synthetic construct
  misc_feature 1..80: note = Artificially Synthesized Probe
  source 1..80: mol_type = other DNA
ctgggatgacgccctcaggaatgagcacctttgagacagggagcccgcctgtgagtcgagagtcctccaccaggccccca

SEQ ID NO: 111621 - DNA, 80 bp, synthetic construct
  misc_feature 1..80: note = Artificially Synthesized Probe
  source 1..80: mol_type = other DNA
gagggaatgagggtggacctcccctctccctcccttcatctcctgtccatcctcagggtgaggactctgatgtggccatg

SEQ ID NO: 111622 - DNA, 80 bp, synthetic construct
  misc_feature 1..80: note = Artificially Synthesized Probe
  source 1..80: mol_type = other DNA
caagtgttctgtccatgcgtcagctcacacgaggagagggcggcggggatctgctgcacacccagcgttgtctggggaac

SEQ ID NO: 111623 - DNA, 80 bp, synthetic construct
  misc_feature 1..80: note = Artificially Synthesized Probe
  source 1..80: mol_type = other DNA
accacatcaaggtgctacagaaacacattgtagatcaatgtgtttcaccaactgcgaagacacaaagccgggccctgggt

SEQ ID NO: 111624 - DNA, 80 bp, synthetic construct
  misc_feature 1..80: note = Artificially Synthesized Probe
  source 1..80: mol_type = other DNA
caaaaaaaaaaaaagtgcattgaacacaggtaacctactgagtgtcacagctgagcctagcctgccttacacatgctcag

SEQ ID NO: 111625 - DNA, 80 bp, synthetic construct
  misc_feature 1..80: note = Artificially Synthesized Probe
  source 1..80: mol_type = other DNA
cagcccctctcggtagaattttagaaataacttccttccattaaggaagaacagggtgatgagaactcctcgagcacgcc

SEQ ID NO: 111626 - DNA, 80 bp, synthetic construct
  misc_feature 1..80: note = Artificially Synthesized Probe
  source 1..80: mol_type = other DNA
aaggggagtcctttccaggggcctctgcaccccaggtggccctggtcttactcgatgttggctggaaaggagactgggca

SEQ ID NO: 111627 - DNA, 80 bp, synthetic construct
  misc_feature 1..80: note = Artificially Synthesized Probe
  source 1..80: mol_type = other DNA
aagagactcaaatgctgcgtgataaatttagaaaggtcaagtgtacttaacacgctctgccacgaacactgaaggaaaat

SEQ ID NO: 111628 - DNA, 80 bp, synthetic construct
  misc_feature 1..80: note = Artificially Synthesized Probe
  source 1..80: mol_type = other DNA
aaatggttcccagaacaaaaaaggacactctgagcctgacaggggatggaggtgtttccctcagacaacataaaggtctc

SEQ ID NO: 111629 - DNA, 80 bp, synthetic construct
  misc_feature 1..80: note = Artificially Synthesized Probe
  source 1..80: mol_type = other DNA
aatgcttttcattataatctcatcgcctaacactggtgaagaaggaatcatgacgtgattgcaacacacttcaaggaagc

SEQ ID NO: 111630 - DNA, 80 bp, synthetic construct
  misc_feature 1..80: note = Artificially Synthesized Probe
  source 1..80: mol_type = other DNA
cacaatcaaacccaaaccccaaggacaccactgctctgggacccccacccttcatctctcaccccttaaactgtgccatc

SEQ ID NO: 111631 - DNA, 80 bp, synthetic construct
  misc_feature 1..80: note = Artificially Synthesized Probe
  source 1..80: mol_type = other DNA
tcaacccctctgtccccgacggacacctggaccccctctgtcccccacggatgcgtggttcccctatgtcccccacagat

SEQ ID NO: 111632 - DNA, 80 bp, synthetic construct
  misc_feature 1..80: note = Artificially Synthesized Probe
  source 1..80: mol_type = other DNA
gaagtgtgagaggcacaggtgtgtgcagggaacacctgtggaactgctgtcccagcctgcgacggggatgctgctgcctc

SEQ ID NO: 111633 - DNA, 80 bp, synthetic construct
  misc_feature 1..80: note = Artificially Synthesized Probe
  source 1..80: mol_type = other DNA
tgtcaaggcacaaaactcactcattgatgaggggagcagatttttgctgctgggggcctaagaaaggaagacgagctagc

SEQ ID NO: 111634 - DNA, 80 bp, synthetic construct
  misc_feature 1..80: note = Artificially Synthesized Probe
  source 1..80: mol_type = other DNA
tgcatgggtacttgaagttcagtttctatttaatgcgtgttgcttctgcactgtaaagtcaaaccatcataagttggggg

SEQ ID NO: 111635 - DNA, 80 bp, synthetic construct
  misc_feature 1..80: note = Artificially Synthesized Probe
  source 1..80: mol_type = other DNA
cacctcctaaacagccctgaccagaggcatttaccgtgtgcccaaaagagaccgaatcgtcacagggacagtgggacagc

SEQ ID NO: 111636 - DNA, 80 bp, synthetic construct
  misc_feature 1..80: note = Artificially Synthesized Probe
  source 1..80: mol_type = other DNA
gctgtaaaacttcggctcctctacctgcctgagtctttgccaagcacgagggacagtgactgacccctcgttcccgccag

SEQ ID NO: 111637 - DNA, 80 bp, synthetic construct
  misc_feature 1..80: note = Artificially Synthesized Probe
  source 1..80: mol_type = other DNA
gcccagggctgtccctgcacaagtgaggggtgaggggtgaggggcgaggggtgaggggcgaggggcgaggggcgaggcgc

SEQ ID NO: 111638 - DNA, 80 bp, synthetic construct
  misc_feature 1..80: note = Artificially Synthesized Probe
  source 1..80: mol_type = other DNA
gaggggcgaggcgcgaggggccaggggtgaggggtgaggggtgaggcgcgaggggccaggggcgaggggcgaggcgcgag

SEQ ID NO: 111639 - DNA, 80 bp, synthetic construct
  misc_feature 1..80: note = Artificially Synthesized Probe
  source 1..80: mol_type = other DNA
ggggcgaggggtgaggcgcgaggggcgaggggtgaggcgcgaggggcgaggggtgaggcgcgaggggcgaggggcgaggg

SEQ ID NO: 111640 - DNA, 80 bp, synthetic construct
  misc_feature 1..80: note = Artificially Synthesized Probe
  source 1..80: mol_type = other DNA
ccagtcccgccgcgacccatggggcagagctgctgccctggcccaggcacgcacagcttctcaacagccacatcgcaggc

SEQ ID NO: 111641 - DNA, 80 bp, synthetic construct
  misc_feature 1..80: note = Artificially Synthesized Probe
  source 1..80: mol_type = other DNA
gtcaaaggccttttgagcattttcacacacacacacaaagaagccgtttaaaacaataaaagtgtagtgctggggaaatg

SEQ ID NO: 111642 - DNA, 80 bp, synthetic construct
  misc_feature 1..80: note = Artificially Synthesized Probe
  source 1..80: mol_type = other DNA
aaattaacatgtaatttaaacagtatttgtggcttttccctggtagtgggcatttagctataggtgtttttaaaactgac

SEQ ID NO: 111643 - DNA, 80 bp, synthetic construct
  misc_feature 1..80: note = Artificially Synthesized Probe
  source 1..80: mol_type = other DNA
cacgtgtgtgtgcatgaatgtgtcacgtgtgtgcacgcgtgtacatgcatgtgattttgttcacatgcatgcacatgtgg

SEQ ID NO: 111644 - DNA, 80 bp, synthetic construct
  misc_feature 1..80: note = Artificially Synthesized Probe
  source 1..80: mol_type = other DNA
gtgtgtgctttgtgtgcacgtgtgtgtgcatgtttgtgtgtgcacatgtgtgcatgtgtgtgtgtgcgcataccatctcc

SEQ ID NO: 111645 - DNA, 80 bp, synthetic construct
  misc_feature 1..80: note = Artificially Synthesized Probe
  source 1..80: mol_type = other DNA
caagacaaggaaaaagtacacgagcttgtgacatgatggtacaatggcctcaaggaaattgcagctttggaaagaaactt

SEQ ID NO: 111646 - DNA, 80 bp, synthetic construct
  misc_feature 1..80: note = Artificially Synthesized Probe
  source 1..80: mol_type = other DNA
cctcaaaacttacacttcagcattttttccttccttgcgtaatctcaaagcaaacaagattcagagaggctcacttcctg

SEQ ID NO: 111647 - DNA, 80 bp, synthetic construct
  misc_feature 1..80: note = Artificially Synthesized Probe
  source 1..80: mol_type = other DNA
cccccgagcagttgtgaaccagcctcagggttgccctccaagtggccaggggacagggctgacatgaagcaggtcctcag

SEQ ID NO: 111648 - DNA, 80 bp, synthetic construct
  misc_feature 1..80: note = Artificially Synthesized Probe
  source 1..80: mol_type = other DNA
aggtctgggcctgtcctgccactccctccccaccccccagtcactctgtgcctccacttccacatgacaacaacatccct

SEQ ID NO: 111649 - DNA, 80 bp, synthetic construct
  misc_feature 1..80: note = Artificially Synthesized Probe
  source 1..80: mol_type = other DNA
acaactgtgcaaagcaaaacaaaacaaattgaaaagcacaagcagggtgccacggcctgacagtaacaatcaaacaggag

SEQ ID NO: 111650 - DNA, 80 bp, synthetic construct
  misc_feature 1..80: note = Artificially Synthesized Probe
  source 1..80: mol_type = other DNA
tagtgctgatacatccacacattccatggtcctgagggacactgtctagcttacaaatccatctgtaactgttcaaccag

SEQ ID NO: 111651 - DNA, 80 bp, synthetic construct
  misc_feature 1..80: note = Artificially Synthesized Probe
  source 1..80: mol_type = other DNA
agattgagtatgcccagtaaatgctagatattattatcccactagacactgaaaacggtcccctttcctgggttgtgttg

SEQ ID NO: 111652 - DNA, 80 bp, synthetic construct
  misc_feature 1..80: note = Artificially Synthesized Probe
  source 1..80: mol_type = other DNA
ataaagtacattctttgttctgttattgccgttgtcaaagttaactctctcttcttattttagggtttatttttaaacat

SEQ ID NO: 111653 - DNA, 80 bp, synthetic construct
  misc_feature 1..80: note = Artificially Synthesized Probe
  source 1..80: mol_type = other DNA
cacaatgcaataccaccttcctcctgcaagaatggccataaccaaaaaatcaataaacagtagatgttggtgtggatgca

SEQ ID NO: 111654 - DNA, 80 bp, synthetic construct
  misc_feature 1..80: note = Artificially Synthesized Probe
  source 1..80: mol_type = other DNA
tcacgttgccatttctcagctttcagatttaggatgtatctattttctgactgctacagaagatgggcctacctctccat

SEQ ID NO: 111655 - DNA, 80 bp, synthetic construct
  misc_feature 1..80: note = Artificially Synthesized Probe
  source 1..80: mol_type = other DNA
ttgttttccctggagttataaatgtcttatgtatttgcttagtgtccacagtgtctcttcctttcacagtgtcttcttgt

SEQ ID NO: 111656 - DNA, 80 bp, synthetic construct
  misc_feature 1..80: note = Artificially Synthesized Probe
  source 1..80: mol_type = other DNA
acaaagagctgatttagaattgtgtcacctggtgaattgttgaaagtgggtgtcagtataggagaccctgctgagcagtt

SEQ ID NO: 111657 - DNA, 80 bp, synthetic construct
  misc_feature 1..80: note = Artificially Synthesized Probe
  source 1..80: mol_type = other DNA
gggccacaaagtgagatctctgtctctataaaatcatttttaaaaattagccaggcatggtagctcctgcctgtggtctc

SEQ ID NO: 111658 - DNA, 80 bp, synthetic construct
  misc_feature 1..80: note = Artificially Synthesized Probe
  source 1..80: mol_type = other DNA
aaggggaggggagaggaggaaatttttaaaagaaaaaaagtgtgacaaggaaggttgggtttccagtgaaaggtgcatca

SEQ ID NO: 111659 - DNA, 80 bp, synthetic construct
  misc_feature 1..80: note = Artificially Synthesized Probe
  source 1..80: mol_type = other DNA
aagctgggaggggcggcgagtctgcagaccagcaccagtctgggtttgccaaactccctgcatgcaagagatctgctgtg

SEQ ID NO: 111660 - DNA, 80 bp, synthetic construct
  misc_feature 1..80: note = Artificially Synthesized Probe
  source 1..80: mol_type = other DNA
tagaggttttaatgaggatgcctaaacttacgaggcccccacaaacatcaagaattttgccaaaagaaatgacgtaactg

SEQ ID NO: 111661 - DNA, 80 bp, synthetic construct
  misc_feature 1..80: note = Artificially Synthesized Probe
  source 1..80: mol_type = other DNA
ggctggagcagcattctggctttgtttttgttttgctttattgctctgtgtctaccagacacacagctcctcagaaactg

SEQ ID NO: 111662 - DNA, 80 bp, synthetic construct
  misc_feature 1..80: note = Artificially Synthesized Probe
  source 1..80: mol_type = other DNA
gcatcattatgaagccaacacacatctaacaagaacacaagatgcgctttgtcatctcagctacgattctccttggggtg

SEQ ID NO: 111663 - DNA, 80 bp, synthetic construct
  misc_feature 1..80: note = Artificially Synthesized Probe
  source 1..80: mol_type = other DNA
tacacaaacggaggcagccctgctccatgcctgccatgcagctgagacggatcctcaggacacgtcctgcctgcaggtga

SEQ ID NO: 111664 - DNA, 80 bp, synthetic construct
  misc_feature 1..80: note = Artificially Synthesized Probe
  source 1..80: mol_type = other DNA
gccgctcatcacccaggaaccgacacgcacgagatgcagaatctaaaagagaaagcggcaccgccaccagcaagcacaag

SEQ ID NO: 111665 - DNA, 80 bp, synthetic construct
  misc_feature 1..80: note = Artificially Synthesized Probe
  source 1..80: mol_type = other DNA
cgaaaaatatacttgcacatgcatgtttatagcagcacaattcacagctataaaattgtggaacaaacccaaatgcttat

SEQ ID NO: 111666 - DNA, 80 bp, synthetic construct
  misc_feature 1..80: note = Artificially Synthesized Probe
  source 1..80: mol_type = other DNA
atcccctcgtttgttatttttactgggcttcttcctctttttccagcagtgaaaaatcttcagagacctccaccagggag

SEQ ID NO: 111667 - DNA, 80 bp, synthetic construct
  misc_feature 1..80: note = Artificially Synthesized Probe
  source 1..80: mol_type = other DNA
cgtggaggcagagagaccctggcctagtgcaggagtggggctgccatgggacagccccatggttgccatgacacactggg

SEQ ID NO: 111668 - DNA, 80 bp, synthetic construct
  misc_feature 1..80: note = Artificially Synthesized Probe
  source 1..80: mol_type = other DNA
tgcacaaaattattcccgagacaaaatttgaaggggctgaaaggaaaacaaaaggacgaatggctggtaattcctaaggg

SEQ ID NO: 111669 - DNA, 80 bp, synthetic construct
  misc_feature 1..80: note = Artificially Synthesized Probe
  source 1..80: mol_type = other DNA
agtcaagttcccatctgggaaagggggtctggccggtgcccagagccagggagaggtgggaaacggggtgtgaaagagag

SEQ ID NO: 111670 - DNA, 80 bp, synthetic construct
  misc_feature 1..80: note = Artificially Synthesized Probe
  source 1..80: mol_type = other DNA
cacaacaagtccacatacatcttgtgggactcagggaccagccagacacaggaccagggtatacaggtgctgacttttga

SEQ ID NO: 111671 - DNA, 80 bp, synthetic construct
  misc_feature 1..80: note = Artificially Synthesized Probe
  source 1..80: mol_type = other DNA
agtgcaccccacgccctcttctctgctaattttgcatctgcactgaatttacgttggtgggagtcagcgccctccaactc

SEQ ID NO: 111672 - DNA, 80 bp, synthetic construct
  misc_feature 1..80: note = Artificially Synthesized Probe
  source 1..80: mol_type = other DNA
cttccaatgcagctgtccatgcggccttgggcaagccctgcgatgttcctgcagggaagggaaggtctgggtgtctgcag

SEQ ID NO: 111673 - DNA, 80 bp, synthetic construct
  misc_feature 1..80: note = Artificially Synthesized Probe
  source 1..80: mol_type = other DNA
ccagcagaaagcaaaactctgatgagggagaatcatggggtgcaggggcagcaggtcagaaaagaaaagcctcctctgtg

SEQ ID NO: 111674 - DNA, 80 bp, synthetic construct
  misc_feature 1..80: note = Artificially Synthesized Probe
  source 1..80: mol_type = other DNA
ggtgaaaatccccccacattaaggtctggaccaccttcaagctgtgcacttgggaggttgagcagacagaatgcacgtgg

SEQ ID NO: 111675 - DNA, 80 bp, synthetic construct
  misc_feature 1..80: note = Artificially Synthesized Probe
  source 1..80: mol_type = other DNA
ctgaagagcatgtctccaccaggctgcaggcaggagtggcaaggattccaccctgacatgcaggccccaccccagcaacc

SEQ ID NO: 111676 - DNA, 80 bp, synthetic construct
  misc_feature 1..80: note = Artificially Synthesized Probe
  source 1..80: mol_type = other DNA
tctcactaatatgtgggagctaagctatgaggatgcagaggcataagaaagatacaatggactttggggacttgagggga

SEQ ID NO: 111677 - DNA, 80 bp, synthetic construct
  misc_feature 1..80: note = Artificially Synthesized Probe
  source 1..80: mol_type = other DNA
gtcaatcaccacagagaggtcacttctgttcacgctgcctgtcggactggaagtgggctaaggtgggcagcaggcaggca

SEQ ID NO: 111678 - DNA, 80 bp, synthetic construct
  misc_feature 1..80: note = Artificially Synthesized Probe
  source 1..80: mol_type = other DNA
ctttggaaaaaaccatgatggctggaaagggggaaatgaatatttgctttatgcctttagctagcacaaaaagtcaccta

SEQ ID NO: 111679 - DNA, 80 bp, synthetic construct
  misc_feature 1..80: note = Artificially Synthesized Probe
  source 1..80: mol_type = other DNA
gtcttttcctggtgatttgcagcctctggactttctataataaaaggtatcgccgtgacaataggagagatcaactttac

SEQ ID NO: 111680 - DNA, 80 bp, synthetic construct
  misc_feature 1..80: note = Artificially Synthesized Probe
  source 1..80: mol_type = other DNA
ccaggaacacatgcggacagactttgatgggaggatgctgaggagacagagattctgtgtgtgcctttgaaggttctcca

SEQ ID NO: 111681 - DNA, 80 bp, synthetic construct
  misc_feature 1..80: note = Artificially Synthesized Probe
  source 1..80: mol_type = other DNA
gctgcattccttaaatccctgtttggttatatccaccccaacaacaccagtcactcgggagtcctgtgccagaaacacaa

SEQ ID NO: 111682 - DNA, 80 bp, synthetic construct
  misc_feature 1..80: note = Artificially Synthesized Probe
  source 1..80: mol_type = other DNA
ccggcttccagctccccggcctcagctccccggcccccagctctccggcctccagctccctggcccccagctccccggcc

SEQ ID NO: 111683 - DNA, 80 bp, synthetic construct
  misc_feature 1..80: note = Artificially Synthesized Probe
  source 1..80: mol_type = other DNA
gctccccagctcccagctccctggcctccagctcctcagcctcagctccccagcctccagctcctcggcctcagctcccc

SEQ ID NO: 111684 - DNA, 80 bp, synthetic construct
  misc_feature 1..80: note = Artificially Synthesized Probe
  source 1..80: mol_type = other DNA
taggatgcctggagtccacatcctcccggggtgcctgggagatctctagaattcctgggtgtcacatcccctaggatttt

SEQ ID NO: 111685 - DNA, 80 bp, synthetic construct
  misc_feature 1..80: note = Artificially Synthesized Probe
  source 1..80: mol_type = other DNA
gggctgaaatcctcccatttaaaacctctgaaaatcttgcctttcacaaacagccccctggaggaaatgtttttttagca

SEQ ID NO: 111686 - DNA, 80 bp, synthetic construct
  misc_feature 1..80: note = Artificially Synthesized Probe
  source 1..80: mol_type = other DNA
agatatttttaataactacttttctgaatccaaccaagatccggccctctatactcttaatacagtgaaacttatctgtg

SEQ ID NO: 111687 - DNA, 80 bp, synthetic construct
  misc_feature 1..80: note = Artificially Synthesized Probe
  source 1..80: mol_type = other DNA
gctcatccgtgagacacgtgtccgcacactgagatcccgcagtggctcatccgtgagacacgtggccgcacactgagatc

SEQ ID NO: 111688 - DNA, 80 bp, synthetic construct
  misc_feature 1..80: note = Artificially Synthesized Probe
  source 1..80: mol_type = other DNA
gttagctcagaaaaaaaaccttgacatttaaattcttttattttatagatgagtgcatgtgtgagagagtgtggtggtgg

SEQ ID NO: 111689 - DNA, 80 bp, synthetic construct
  misc_feature 1..80: note = Artificially Synthesized Probe
  source 1..80: mol_type = other DNA
cgcacactgagatcccggtggctcatccgtgagacacgtggccgcacactgagatcccgcagtggctcatccatgagaca

SEQ ID NO: 111690 - DNA, 80 bp, synthetic construct
  misc_feature 1..80: note = Artificially Synthesized Probe
  source 1..80: mol_type = other DNA
gtgagacatttggctgcacactgagatcccgcagtggctcatccgtgagacatgtggctgcacactgagatcctgcagtg

SEQ ID NO: 111691 - DNA, 80 bp, synthetic construct
  misc_feature 1..80: note = Artificially Synthesized Probe
  source 1..80: mol_type = other DNA
ggtgccgctctggaagcctccccagtctctcccgcggacctgagtcctgctgcagccactcgctggcatgtgacactgac

SEQ ID NO: 111692 - DNA, 80 bp, synthetic construct
  misc_feature 1..80: note = Artificially Synthesized Probe
  source 1..80: mol_type = other DNA
tttgtttttttgtattagatttgtgtttcggctcatttcgttcctctgctgttataaacagaccctggatgacagagctc

SEQ ID NO: 111693 - DNA, 80 bp, synthetic construct
  misc_feature 1..80: note = Artificially Synthesized Probe
  source 1..80: mol_type = other DNA
tgccagccctgaacaatgagcaaggctgagcgtgctcaggctgtcagcaaggaaccctccagggagacccagcaagagaa

SEQ ID NO: 111694 - DNA, 80 bp, synthetic construct
  misc_feature 1..80: note = Artificially Synthesized Probe
  source 1..80: mol_type = other DNA
cgtcctgggtcctgggtcctgggtcctgcgtcctgggtcctgggtcctgggtcctgggtcctgggtcctgggtcctgcgt

SEQ ID NO: 111695 - DNA, 80 bp, synthetic construct
  misc_feature 1..80: note = Artificially Synthesized Probe
  source 1..80: mol_type = other DNA
tcctgcgtcctgcgtcctgggtcctgggtcctgggtcctgcgtcctgggtcctgcgtcctgcgtcctgcgtcctgggtcc

SEQ ID NO: 111696 - DNA, 80 bp, synthetic construct
  misc_feature 1..80: note = Artificially Synthesized Probe
  source 1..80: mol_type = other DNA
ctgcatcctgcgtcctgggtcctggattgagacagaagaccctgggccgctcaagcagagcccggctgcagccccaacct

SEQ ID NO: 111697 - DNA, 80 bp, synthetic construct
  misc_feature 1..80: note = Artificially Synthesized Probe
  source 1..80: mol_type = other DNA
aattcccttaaagtccctcctcatcttcagaagatatccaatgactcaagtctatggagcttgtgtgcaaattcccttaa

SEQ ID NO: 111698 - DNA, 80 bp, synthetic construct
  misc_feature 1..80: note = Artificially Synthesized Probe
  source 1..80: mol_type = other DNA
ttcagtgttagaagagaaacacacgagatcctgtgatctgaaacacacatgatcaaatgtgcctttgcattttctttggt

SEQ ID NO: 111699 - DNA, 80 bp, synthetic construct
  misc_feature 1..80: note = Artificially Synthesized Probe
  source 1..80: mol_type = other DNA
gctttggacatcctcaacagaatacaatttactgctttaaagtgaaaaaatgcagagatgaggctcacatcttacagata

SEQ ID NO: 111700 - DNA, 80 bp, synthetic construct
  misc_feature 1..80: note = Artificially Synthesized Probe
  source 1..80: mol_type = other DNA
cttcttcctaggccaaatcttcttaaggagcagattacagtagctttctctacagtggaatttttcaaatagacttttaa

SEQ ID NO: 111701 - DNA, 80 bp, synthetic construct
  misc_feature 1..80: note = Artificially Synthesized Probe
  source 1..80: mol_type = other DNA
aaaatcaaaatcataaaacaagcaatttgatgggctcagaaaaagtccaaatgataagaaaaggtaaattgcataatata

SEQ ID NO: 111702 - DNA, 80 bp, synthetic construct
  misc_feature 1..80: note = Artificially Synthesized Probe
  source 1..80: mol_type = other DNA
aacgtcaacactggactcaccccagtcatattaacattgacacgactcaccccagtcatattaacattgacaccaaacac

SEQ ID NO: 111703 - DNA, 80 bp, synthetic construct
  misc_feature 1..80: note = Artificially Synthesized Probe
  source 1..80: mol_type = other DNA
acacaatcatatcattttcgtaacaccctgaaagttctgttttcattcatgagaagcccccgcaggtaatgcttggttta

SEQ ID NO: 111704 - DNA, 80 bp, synthetic construct
  misc_feature 1..80: note = Artificially Synthesized Probe
  source 1..80: mol_type = other DNA
agcatatggggagatgtgtgcaggagcaggcagtgagcaggctggggaggtgggcagtcctcagcttaggagaggaccta

SEQ ID NO: 111705 - DNA, 80 bp, synthetic construct
  misc_feature 1..80: note = Artificially Synthesized Probe
  source 1..80: mol_type = other DNA
atgaacatgcctgaaaaggaccgtggttaaagcagctcaaactccggcaggagaatttacgaagcatccaagcccctcct

SEQ ID NO: 111706 - DNA, 80 bp, synthetic construct
  misc_feature 1..80: note = Artificially Synthesized Probe
  source 1..80: mol_type = other DNA
ccgacattcagaactgtcctgcagaatctggcaagtgttttaagaattgacataaagagctgagaagatgtgttgacgtc

SEQ ID NO: 111707 - DNA, 80 bp, synthetic construct
  misc_feature 1..80: note = Artificially Synthesized Probe
  source 1..80: mol_type = other DNA
tagtgtttttttgagcagcttccatgaacttgccttccaaagttttctgaaaacttgagaagatggggtgtgcccccaca

SEQ ID NO: 111708 - DNA, 80 bp, synthetic construct
  misc_feature 1..80: note = Artificially Synthesized Probe
  source 1..80: mol_type = other DNA
aaaaagaaaaacagcccatgtctgagccacctccccaaaccctctctgccttcaagcatctgacaagctaccctcaccac

SEQ ID NO: 111709 - DNA, 80 bp, synthetic construct
  misc_feature 1..80: note = Artificially Synthesized Probe
  source 1..80: mol_type = other DNA
cccaggtgactacagacaggagaattaatctccttctcgtgggatgaagtgacagagtagacacctgtgagcccacttcc

SEQ ID NO: 111710 - DNA, 80 bp, synthetic construct
  misc_feature 1..80: note = Artificially Synthesized Probe
  source 1..80: mol_type = other DNA
taagcttcggtttccccaacttcggtaaagtgaaataacaaaaccacgagtggctcttaacttctctgggaatgtccagc

SEQ ID NO: 111711 - DNA, 80 bp, synthetic construct
  misc_feature 1..80: note = Artificially Synthesized Probe
  source 1..80: mol_type = other DNA
ccagttgctttttcactgaacgaccaggttggcgtttctggtgcaaaatataacctatttaaaaaaattaccaagggtgc

SEQ ID NO: 111712 - DNA, 80 bp, synthetic construct
  misc_feature 1..80: note = Artificially Synthesized Probe
  source 1..80: mol_type = other DNA
tggtggagtcacgggtgggaggccccggagggacagtgcagacaagtgcccaggtgaccccagacacggagacacaggga

SEQ ID NO: 111713 - DNA, 80 bp, synthetic construct
  misc_feature 1..80: note = Artificially Synthesized Probe
  source 1..80: mol_type = other DNA
gccctctcctccctggcacagccttattttcactcctgcagctcccgagaggaggcctcgctcttccacctgtttctgtg

SEQ ID NO: 111714 - DNA, 80 bp, synthetic construct
  misc_feature 1..80: note = Artificially Synthesized Probe
  source 1..80: mol_type = other DNA
atgggggacgtgggacacgcctagacaagagacgttccacaaagagcaaggccgctggcgctctagaagacctcacagcc

SEQ ID NO: 111715 - DNA, 80 bp, synthetic construct
  misc_feature 1..80: note = Artificially Synthesized Probe
  source 1..80: mol_type = other DNA
tcccttccccacgtaaagatgtgtgcagccacagctttccggccaccttgaaatgaggtgacatctccagtcgcttcccg

SEQ ID NO: 111716 - DNA, 80 bp, synthetic construct
  misc_feature 1..80: note = Artificially Synthesized Probe
  source 1..80: mol_type = other DNA
ctagactagcattgtcctttttctgaatttccttttactaatctgatactttctatcccataagactgcttctcagcctt

SEQ ID NO: 111717 - DNA, 80 bp, synthetic construct
  misc_feature 1..80: note = Artificially Synthesized Probe
  source 1..80: mol_type = other DNA
agccaaggcacctgcaagtcctgctgtcgtcccgggaacaggggtccccttcccgtgggagatgggatcccccaggtaac

SEQ ID NO: 111718 - DNA, 80 bp, synthetic construct
  misc_feature 1..80: note = Artificially Synthesized Probe
  source 1..80: mol_type = other DNA
tggtctcaggggccagggcccaggtcttatccagactcagctgctctgtgacccaggtcagtcactggccttcctcccgg

SEQ ID NO: 111719 - DNA, 80 bp, synthetic construct
  misc_feature 1..80: note = Artificially Synthesized Probe
  source 1..80: mol_type = other DNA
cacagcaccctcctcagctgcagggcccatcacagcaccctcctcagctccagggcccatccagtgccctcctcagcacc

SEQ ID NO: 111720 - DNA, 80 bp, synthetic construct
  misc_feature 1..80: note = Artificially Synthesized Probe
  source 1..80: mol_type = other DNA
agcaccctcctcagcaccagggcccatctcagcaccctcctcagcaccagggcccatctcagcaccctcctcaacaccag

SEQ ID NO: 111721 - DNA, 80 bp, synthetic construct
  misc_feature 1..80: note = Artificially Synthesized Probe
  source 1..80: mol_type = other DNA
gccctcctcagcaccagggcccatctcagcaccctcctcagcaccagggcccatccagcaccctcctcagcaccagggcc

SEQ ID NO: 111722 - DNA, 80 bp, synthetic construct
  misc_feature 1..80: note = Artificially Synthesized Probe
  source 1..80: mol_type = other DNA
ctcctcagctccagggcccatccagcgccctcctcagcaccagggcccagctcagcaccctcctcagcaccagggcccat

SEQ ID NO: 111723 - DNA, 80 bp, synthetic construct
  misc_feature 1..80: note = Artificially Synthesized Probe
  source 1..80: mol_type = other DNA
cagcaccagggcccatctcagcaccctcctcagctccagggcccatccagcaccctcctcagcaccagggcccatccagt

SEQ ID NO: 111724 - DNA, 80 bp, synthetic construct
  misc_feature 1..80: note = Artificially Synthesized Probe
  source 1..80: mol_type = other DNA
cttgataacagatgcaagctcgttccagacccacaagaaaatccacagcaagacaaattttgtgccaaagttgggttcaa

SEQ ID NO: 111725 - DNA, 80 bp, synthetic construct
  misc_feature 1..80: note = Artificially Synthesized Probe
  source 1..80: mol_type = other DNA
acccgaatgcacacaaaaaaataaaacattgtctttaaggaaataaaatgcagtgggcctaacatggcccccaattggcc

SEQ ID NO: 111726 - DNA, 80 bp, synthetic construct
  misc_feature 1..80: note = Artificially Synthesized Probe
  source 1..80: mol_type = other DNA
gaggcctgaacgggaaagccccgtgtgggctccatggcgacctcagcaggcgagcccacccctctcccgggaggactaac

SEQ ID NO: 111727 - DNA, 80 bp, synthetic construct
  misc_feature 1..80: note = Artificially Synthesized Probe
  source 1..80: mol_type = other DNA
acttgtgtgtccaggcccagcggtcctgacccagccttttcagctcaacctgggccacccttaaacatggaggcaagggc

SEQ ID NO: 111728 - DNA, 80 bp, synthetic construct
  misc_feature 1..80: note = Artificially Synthesized Probe
  source 1..80: mol_type = other DNA
aacccaccccccacatcaaacagttactacttcaaacatacgtctctgtggcattcgtcacattcttcctgttgctttaa

SEQ ID NO: 111729 - DNA, 80 bp, synthetic construct
  misc_feature 1..80: note = Artificially Synthesized Probe
  source 1..80: mol_type = other DNA
tcgtgccactgcacttcagcctgggtgacagagacagcctctatctcaaaaaaaaaaaaaaaaaaaaaaaggaagcaagg

SEQ ID NO: 111730 - DNA, 80 bp, synthetic construct
  misc_feature 1..80: note = Artificially Synthesized Probe
  source 1..80: mol_type = other DNA
gcagcactaaaccatgaggttaagacaaaggggctgacagggagcagtcacctgtgagaatttaaagagcagaattaacg

SEQ ID NO: 111731 - DNA, 80 bp, synthetic construct
  misc_feature 1..80: note = Artificially Synthesized Probe
  source 1..80: mol_type = other DNA
agctgcaaaggaaattagatgttctccgggctcagctgtaagtcatacatcagagccacccactgagaattcccattagg

SEQ ID NO: 111732 - DNA, 80 bp, synthetic construct
  misc_feature 1..80: note = Artificially Synthesized Probe
  source 1..80: mol_type = other DNA
tgaacgctgggagctgtgttgaaagtgggggaggggcatccactgatgaagcttccggagcatctccatccagccagctc

SEQ ID NO: 111733 - DNA, 80 bp, synthetic construct
  misc_feature 1..80: note = Artificially Synthesized Probe
  source 1..80: mol_type = other DNA
atacaaccagctactttcctgatgatacaaccagctactttcctgatgatacaaccagctacttctctgatgatacaacc

SEQ ID NO: 111734 - DNA, 80 bp, synthetic construct
  misc_feature 1..80: note = Artificially Synthesized Probe
  source 1..80: mol_type = other DNA
ggccccagcgacagtattggtgaagagacgcaaagctgatgaatgacgtcaaacaaacaaaaacaacctgtagcaggtgg

SEQ ID NO: 111735 - DNA, 80 bp, synthetic construct
  misc_feature 1..80: note = Artificially Synthesized Probe
  source 1..80: mol_type = other DNA
aatgcaggtgcctgggccccacctccaccagattcagatgtcactgctccggagtgcggcctgcttaccagacttatctg

SEQ ID NO: 111736 - DNA, 80 bp, synthetic construct
  misc_feature 1..80: note = Artificially Synthesized Probe
  source 1..80: mol_type = other DNA
aatcctcgtcaaagaccctcaatgaagtatgcaggccacccatgcctcttcctcattcaattgataaatgagaaagtttc

SEQ ID NO: 111737 - DNA, 80 bp, synthetic construct
  misc_feature 1..80: note = Artificially Synthesized Probe
  source 1..80: mol_type = other DNA
tgtggctggggctccacatccccatgacgtgtctggtggcagccaccacagtcctgtctcttctaggaatctaagtgtta

SEQ ID NO: 111738 - DNA, 80 bp, synthetic construct
  misc_feature 1..80: note = Artificially Synthesized Probe
  source 1..80: mol_type = other DNA
ctgtgaaggtccactttggggcccaggaatgggaatccagcttcactccatagtcagccaggcttgggacaactgtggtg

SEQ ID NO: 111739 - DNA, 80 bp, synthetic construct
  misc_feature 1..80: note = Artificially Synthesized Probe
  source 1..80: mol_type = other DNA
cattttattttgatgatgggcatccaaaacactgcctttgaatcttctgaaacttggaagaacttctccaaaaaggagca

SEQ ID NO: 111740 - DNA, 80 bp, synthetic construct
  misc_feature 1..80: note = Artificially Synthesized Probe
  source 1..80: mol_type = other DNA
atgttaaccgagtaactacataaagtacaaagtgtgctgccaggtgtaggcaacaaaccaccacatgttaacagccatgt

SEQ ID NO: 111741 - DNA, 80 bp, synthetic construct
  misc_feature 1..80: note = Artificially Synthesized Probe
  source 1..80: mol_type = other DNA
gaagtgaattatcagaagaaagaacagacaaacaaagatataagtgcaccagagaatgaaaagggatggtgctggaagtg

SEQ ID NO: 111742 - DNA, 80 bp, synthetic construct
  misc_feature 1..80: note = Artificially Synthesized Probe
  source 1..80: mol_type = other DNA
gaaatggggcaataagaccttcacagtaaagggacactcagaggcacttcaccaccacaaaatggcaaagcacaaaatgt

SEQ ID NO: 111743 - DNA, 80 bp, synthetic construct
  misc_feature 1..80: note = Artificially Synthesized Probe
  source 1..80: mol_type = other DNA
tcaagatgctgcagctctcagtgtcccactgtgttaagttgtggtgtactacatcaagatgccgtagctctcagtgtcct

SEQ ID NO: 111744 - DNA, 80 bp, synthetic construct
  misc_feature 1..80: note = Artificially Synthesized Probe
  source 1..80: mol_type = other DNA
gtgttaagtcatggtgtactacatcgagatgctgaagctttcagtgtcccgctgtgctgtcatggtgtactacatcgaga

SEQ ID NO: 111745 - DNA, 80 bp, synthetic construct
  misc_feature 1..80: note = Artificially Synthesized Probe
  source 1..80: mol_type = other DNA
tgctgtagctctcactgtcccactctattaagtcatgatgtcctacatcgagatgctctagctctcagtgtcccactgtg

SEQ ID NO: 111746 - DNA, 80 bp, synthetic construct
  misc_feature 1..80: note = Artificially Synthesized Probe
  source 1..80: mol_type = other DNA
tcacggtgtactacatcgagatgctctagctttcagtgtcccgctgtgttaagtcacagtgtactacatcgagatgctct

SEQ ID NO: 111747 - DNA, 80 bp, synthetic construct
  misc_feature 1..80: note = Artificially Synthesized Probe
  source 1..80: mol_type = other DNA
gctctcagtgtcccgctgtgttaagtcatggtgtactacatcgagatgctctagctttcagtgtcccactgtgttaagtc

SEQ ID NO: 111748 - DNA, 80 bp, synthetic construct
  misc_feature 1..80: note = Artificially Synthesized Probe
  source 1..80: mol_type = other DNA
gtgtactacatcgagatgctgtagctctccgtgtcctgctgtggtaagtcatggtgtactacatcgagatgctctagctc

SEQ ID NO: 111749 - DNA, 80 bp, synthetic construct
  misc_feature 1..80: note = Artificially Synthesized Probe
  source 1..80: mol_type = other DNA
ttaagtcatggtgtactacatcgacatgctctagctctccgtgtcccactgtgttaagtcacagtgtactacatcgagat

SEQ ID NO: 111750 - DNA, 80 bp, synthetic construct
  misc_feature 1..80: note = Artificially Synthesized Probe
  source 1..80: mol_type = other DNA
tgtccccctgtgttaagtcacggtgtactacatcgagatgctgtagctctcagtgtcccactgtgttaagtcacggtgta

SEQ ID NO: 111751 - DNA, 80 bp, synthetic construct
  misc_feature 1..80: note = Artificially Synthesized Probe
  source 1..80: mol_type = other DNA
caacagttcagagagctcttctctacaagtctcctccacaactcttctccttttttcacatctccctcattctccacagt

SEQ ID NO: 111752 - DNA, 80 bp, synthetic construct
  misc_feature 1..80: note = Artificially Synthesized Probe
  source 1..80: mol_type = other DNA
tgtagctctcactgtcccactgtgttgtcacagtgtactacatcattgtcagactcactgttttcatttccatacacact

SEQ ID NO: 111753 - DNA, 80 bp, synthetic construct
  misc_feature 1..80: note = Artificially Synthesized Probe
  source 1..80: mol_type = other DNA
tcttgccatcttttgtaaggttctgtgtttaaatattgcatttcaggcagctgtggtgttgccagccttgaggcagggtt

SEQ ID NO: 111754 - DNA, 80 bp, synthetic construct
  misc_feature 1..80: note = Artificially Synthesized Probe
  source 1..80: mol_type = other DNA
ttatataagctgtcaccagcaagaattccgtcactgcaagaattccttcactgcaagaattccatcattgcaagaattct

SEQ ID NO: 111755 - DNA, 80 bp, synthetic construct
  misc_feature 1..80: note = Artificially Synthesized Probe
  source 1..80: mol_type = other DNA
gactcacacagccctccttccatgtcacgccaggagcctcaccacgcagcactgcagctggaatgagtgaaatacctgat

SEQ ID NO: 111756 - DNA, 80 bp, synthetic construct
  misc_feature 1..80: note = Artificially Synthesized Probe
  source 1..80: mol_type = other DNA
ttattatctccaaatccaaaagaagtggcagtcattacttcaaagcccactcctgaaggaaaaggcccactgacaccagt

SEQ ID NO: 111757 - DNA, 80 bp, synthetic construct
  misc_feature 1..80: note = Artificially Synthesized Probe
  source 1..80: mol_type = other DNA
cataacgtagaaatcaatattttaacattaaaaacacatctcaatgttggggtgcatctgtaactttgcaaaggtgaggt

SEQ ID NO: 111758 - DNA, 80 bp, synthetic construct
  misc_feature 1..80: note = Artificially Synthesized Probe
  source 1..80: mol_type = other DNA
tggggcattttatcagaggttcctgccacatttgtgtccagcacaacagtgagtaaagaactgggaacatgttctccctc

SEQ ID NO: 111759 - DNA, 80 bp, synthetic construct
  misc_feature 1..80: note = Artificially Synthesized Probe
  source 1..80: mol_type = other DNA
ggcacagcttcagccctctgactcttgctgaccacgggttaccttggatcttctctcctttgagggcaactgagccacat

SEQ ID NO: 111760 - DNA, 80 bp, synthetic construct
  misc_feature 1..80: note = Artificially Synthesized Probe
  source 1..80: mol_type = other DNA
gaagagttatttacaaaaagagatggcttgacaaatatcgtgcataagcaatcccaccagtgcgcattgcccctgagttc

SEQ ID NO: 111761 - DNA, 80 bp, synthetic construct
  misc_feature 1..80: note = Artificially Synthesized Probe
  source 1..80: mol_type = other DNA
atcccagtgactgagtggttcctgcctcccttctccggccacatttgtgaaatatgtaagcagcatgtcttccatggaag

SEQ ID NO: 111762 - DNA, 80 bp, synthetic construct
  misc_feature 1..80: note = Artificially Synthesized Probe
  source 1..80: mol_type = other DNA
ttcttgatcggacccataacatcttagaaagcacaatatactcagttctgcccatgtcatcctctgctcaagtatctgag

SEQ ID NO: 111763 - DNA, 80 bp, synthetic construct
  misc_feature 1..80: note = Artificially Synthesized Probe
  source 1..80: mol_type = other DNA
tctgggctctccgtcagtgcctctgagttgaagctttatgaagaaagctctagaatgagctgactgaggctgacaatacc

SEQ ID NO: 111764 - DNA, 80 bp, synthetic construct
  misc_feature 1..80: note = Artificially Synthesized Probe
  source 1..80: mol_type = other DNA
aggcctttggttgaaaagctgactggaatcacacttgaaaaaagagctcagcctgtggatattagtgacacccaccctgg

SEQ ID NO: 111765 - DNA, 80 bp, synthetic construct
  misc_feature 1..80: note = Artificially Synthesized Probe
  source 1..80: mol_type = other DNA
attttcctctttgtagtttctccaagtgagatatgtcaagaagcagctttcctgtgatgtgcctcagaaataaatggaaa

SEQ ID NO: 111766 - DNA, 80 bp, synthetic construct
  misc_feature 1..80: note = Artificially Synthesized Probe
  source 1..80: mol_type = other DNA
cgtggagtaaattgctagttttctccgcagcatgttctgggctgctttgggagccatatgctctgtttgatgtaaatgag

SEQ ID NO: 111767 - DNA, 80 bp, synthetic construct
  misc_feature 1..80: note = Artificially Synthesized Probe
  source 1..80: mol_type = other DNA
ttcaggtctgtgaaatattcaagcaacagatgctgaagctagagaccaagttactgatgagggaggtagtttggttcttg

SEQ ID NO: 111768 - DNA, 80 bp, synthetic construct
  misc_feature 1..80: note = Artificially Synthesized Probe
  source 1..80: mol_type = other DNA
aggagctagactacaaggaactgaatttcagtcaaccttttaagaaatgcagatcagaatgcaaatcctaggtaggttct

SEQ ID NO: 111769 - DNA, 80 bp, synthetic construct
  misc_feature 1..80: note = Artificially Synthesized Probe
  source 1..80: mol_type = other DNA
gaattgagccggaaaactctgaatgctgccagattctcatttcagatgcacacacatactcttacatgtctcaaagaaag

SEQ ID NO: 111770 - DNA, 80 bp, synthetic construct
  misc_feature 1..80: note = Artificially Synthesized Probe
  source 1..80: mol_type = other DNA
gtcacacccaggctgacgctgccggcttctggggccaccattcggatgtggtctcagtcacacccaggctgacactgccg

SEQ ID NO: 111771 - DNA, 80 bp, synthetic construct
  misc_feature 1..80: note = Artificially Synthesized Probe
  source 1..80: mol_type = other DNA
agtagagacaaagaaaggcttcaaagccactgcacactcctgctgctctccagagataaagcgaggagagggtgacgata

SEQ ID NO: 111772 - DNA, 80 bp, synthetic construct
  misc_feature 1..80: note = Artificially Synthesized Probe
  source 1..80: mol_type = other DNA
agtgcttagggaagttggagttgctgtctgttccctgatccttaggaagcgtttggaggtgtgtctttcgtcttttagag

SEQ ID NO: 111773 - DNA, 80 bp, synthetic construct
  misc_feature 1..80: note = Artificially Synthesized Probe
  source 1..80: mol_type = other DNA
gcaaagaaatgagccttgatccgtgaataaactgtatacatcaactcatctgggaaacaagcaagaaacccaagagaaac

SEQ ID NO: 111774 - DNA, 80 bp, synthetic construct
  misc_feature 1..80: note = Artificially Synthesized Probe
  source 1..80: mol_type = other DNA
cctcgtggggacacggtgaaccctagggacatgaaatggtcccgccctagcttcctctccagtgccctgcctgtcctgcc

SEQ ID NO: 111775 - DNA, 80 bp, synthetic construct
  misc_feature 1..80: note = Artificially Synthesized Probe
  source 1..80: mol_type = other DNA
cctcctaggttcaagcgattctcctgcctcagcctcctgagtagctgagattactagtttttgtatttttagtagagacg

SEQ ID NO: 111776 - DNA, 80 bp, synthetic construct
  misc_feature 1..80: note = Artificially Synthesized Probe
  source 1..80: mol_type = other DNA
cggccaacactggaatggaatcctgaaaactgctttgcacggagttctgctgtggtctgtagtttgcatgtatcatttcc

SEQ ID NO: 111777 - DNA, 80 bp, synthetic construct
  misc_feature 1..80: note = Artificially Synthesized Probe
  source 1..80: mol_type = other DNA
tgatttctccagggtggacacaggcttacgtgtggcgcaggagtgctctgtgacgtacacaaggcgcatcccacaggtgg

SEQ ID NO: 111778 - DNA, 80 bp, synthetic construct
  misc_feature 1..80: note = Artificially Synthesized Probe
  source 1..80: mol_type = other DNA
aggagcaaagcgaggcgttttcagaaactctgcctgttaacgtttattgctcccaaagtctgattataacacactagctc

SEQ ID NO: 111779 - DNA, 80 bp, synthetic construct
  misc_feature 1..80: note = Artificially Synthesized Probe
  source 1..80: mol_type = other DNA
cacatgccagcacgcgtaatgcccagtggtcagaaaatgctcttcaaaccggggactgagacgcccgcagagcgcggccc

SEQ ID NO: 111780 - DNA, 80 bp, synthetic construct
  misc_feature 1..80: note = Artificially Synthesized Probe
  source 1..80: mol_type = other DNA
ccggggacctcggggcccaggggcattaaccatcagcttaatctcccacgccaggtgtgctcagcaccctcaagaaggtc

SEQ ID NO: 111781 - DNA, 80 bp, synthetic construct
  misc_feature 1..80: note = Artificially Synthesized Probe
  source 1..80: mol_type = other DNA
ccatcacttgaggccttaagacaaaaacaatcatgttcattgctgctaagaacccaaaacaataggctgaaagtcctgct

SEQ ID NO: 111782 - DNA, 80 bp, synthetic construct
  misc_feature 1..80: note = Artificially Synthesized Probe
  source 1..80: mol_type = other DNA
gagtgaaaaggtgtctccaaccttctcaaattctcatacttcctgagggcctagacatgatgtgcttgtggaagagtgaa

SEQ ID NO: 111783 - DNA, 80 bp, synthetic construct
  misc_feature 1..80: note = Artificially Synthesized Probe
  source 1..80: mol_type = other DNA
cgggaaagacccagagtccgagaccagcctagctgaggcctgcgcaccgccgggaaagacgcggtgtccgagtccagcct

SEQ ID NO: 111784 - DNA, 80 bp, synthetic construct
  misc_feature 1..80: note = Artificially Synthesized Probe
  source 1..80: mol_type = other DNA
tgcgcaccgccgggaaagacgcggggtccgagaccagcctagctgaggcctgcgcaccgccgggaaagacccagagtccg

SEQ ID NO: 111785 - DNA, 80 bp, synthetic construct
  misc_feature 1..80: note = Artificially Synthesized Probe
  source 1..80: mol_type = other DNA
agctgaggcctgcgcaccgccgggaaagacgcggggtccgagaccagcctagctgaggcctgcgcaccgccgggaaagac

SEQ ID NO: 111786 - DNA, 80 bp, synthetic construct
  misc_feature 1..80: note = Artificially Synthesized Probe
  source 1..80: mol_type = other DNA
accagcctagctggggcctgcgcaccgccgggaaagacgcggggtccgagtccagcctagctgaggcctgcgcaccgccg

SEQ ID NO: 111787 - DNA, 80 bp, synthetic construct
  misc_feature 1..80: note = Artificially Synthesized Probe
  source 1..80: mol_type = other DNA
ggggtccaagtgcagcctagctgaggcctgcgcaccgccgggaaagacgcagagtccgagaccagcctagctggggcctg

SEQ ID NO: 111788 - DNA, 80 bp, synthetic construct
  misc_feature 1..80: note = Artificially Synthesized Probe
  source 1..80: mol_type = other DNA
ggaaagacgcggggtccgagtccagcctagctgaggcctgcgcaccgccgggaaagacgcggggtccgagtccagcctag

SEQ ID NO: 111789 - DNA, 80 bp, synthetic construct
  misc_feature 1..80: note = Artificially Synthesized Probe
  source 1..80: mol_type = other DNA
cgcaccgccgggaaagacgcggggtccgagtccagcctagctgaggcctgcgcaccgccgggaaagacgcggtgtccgag

SEQ ID NO: 111790 - DNA, 80 bp, synthetic construct
  misc_feature 1..80: note = Artificially Synthesized Probe
  source 1..80: mol_type = other DNA
ctgaggcctgcgcaccgccgggaaagacgcggggtccgagtccagcctagctgaggcctgcgcaccgccgggaaagacgc

SEQ ID NO: 111791 - DNA, 80 bp, synthetic construct
  misc_feature 1..80: note = Artificially Synthesized Probe
  source 1..80: mol_type = other DNA
ccagcctagctgaggcctgcgcaccgccgggaaagacccagagtccaagtccagcctagctggggcctgcgcaccgccgg

SEQ ID NO: 111792 - DNA, 80 bp, synthetic construct
  misc_feature 1..80: note = Artificially Synthesized Probe
  source 1..80: mol_type = other DNA
gggtccgagtccagcctagctgaggcctgcgcaccgccgggaaagacgcggggtccgagtccagcctagctgaggcctgc

SEQ ID NO: 111793 - DNA, 80 bp, synthetic construct
  misc_feature 1..80: note = Artificially Synthesized Probe
  source 1..80: mol_type = other DNA
ctttgagaatgacaccatcagcgctcacataatctactttgttagagatatgaactcaatctaaggtttcccctgtcatc

SEQ ID NO: 111794 - DNA, 80 bp, synthetic construct
  misc_feature 1..80: note = Artificially Synthesized Probe
  source 1..80: mol_type = other DNA
gaaagacgcggggtccgagtccagcctagctgaggcctgcgcaccgccgggaaagacgcggtgtccgagaccagcctagc

SEQ ID NO: 111795 - DNA, 80 bp, synthetic construct
  misc_feature 1..80: note = Artificially Synthesized Probe
  source 1..80: mol_type = other DNA
gcaccgccgggaaagacgcggggtccgagaccagcctagctgaggcctgcacagcgccgggaaagacgcagagtccgaga

SEQ ID NO: 111796 - DNA, 80 bp, synthetic construct
  misc_feature 1..80: note = Artificially Synthesized Probe
  source 1..80: mol_type = other DNA
tgtaagagggcaggggagctggggcactctctcatcccaaaatggaaaaacattcatttttaacagtaataaaacatgag

SEQ ID NO: 111797 - DNA, 80 bp, synthetic construct
  misc_feature 1..80: note = Artificially Synthesized Probe
  source 1..80: mol_type = other DNA
caccgggttgtccttttaaacgatgtgtgccaccgcacagaaactgcaaaggagaaaactaaaattatttgtaacccacc

SEQ ID NO: 111798 - DNA, 80 bp, synthetic construct
  misc_feature 1..80: note = Artificially Synthesized Probe
  source 1..80: mol_type = other DNA
cttaagaaactcctaagaagtataattttagtacctgcaaggtatctgtcacagagtcaccattactcgaccaggcctct

SEQ ID NO: 111799 - DNA, 80 bp, synthetic construct
  misc_feature 1..80: note = Artificially Synthesized Probe
  source 1..80: mol_type = other DNA
ggtcttttccaataaagacagctatttttcatggcaatggaaattataaaagcagctaccgtcatgcagatcgtcctggg

SEQ ID NO: 111800 - DNA, 80 bp, synthetic construct
  misc_feature 1..80: note = Artificially Synthesized Probe
  source 1..80: mol_type = other DNA
actggctgtctcgcttgctaaaccgtaatagtctcatctaactgctctgtactaagaacatgcttccggatccaaccgat

SEQ ID NO: 111801 - DNA, 80 bp, synthetic construct
  misc_feature 1..80: note = Artificially Synthesized Probe
  source 1..80: mol_type = other DNA
acagccggcacaaaggaaaccttaggaaggtggtgctaggctctccacgctggtccttagcagctgttcctcctgcagct

SEQ ID NO: 111802 - DNA, 80 bp, synthetic construct
  misc_feature 1..80: note = Artificially Synthesized Probe
  source 1..80: mol_type = other DNA
gctccctcattcccggcctgggagagcctggcctggtcccacctccctcctgccaccctccgctcaagcacatggccatc

SEQ ID NO: 111803 - DNA, 80 bp, synthetic construct
  misc_feature 1..80: note = Artificially Synthesized Probe
  source 1..80: mol_type = other DNA
cataacaggccatggatggtgagctaatggcctgaaatgtcaagtccaaatctccaaacaaaagtgatcatttaaaagga

SEQ ID NO: 111804 - DNA, 80 bp, synthetic construct
  misc_feature 1..80: note = Artificially Synthesized Probe
  source 1..80: mol_type = other DNA
gcaaaccaactggcttccacatttaatggaatcattatacacagaaccccaaaatttgtgtaacaaaagtgtgattgcca

SEQ ID NO: 111805 - DNA, 80 bp, synthetic construct
  misc_feature 1..80: note = Artificially Synthesized Probe
  source 1..80: mol_type = other DNA
cctcagcctcctgagtagctgggattacaggtgcacgctaccacgcccagctaatttttgtatttttagtagagatgggg

SEQ ID NO: 111806 - DNA, 80 bp, synthetic construct
  misc_feature 1..80: note = Artificially Synthesized Probe
  source 1..80: mol_type = other DNA
cttaaacaacaatgctttgtaaggatcccaagcagcagaagaatccaactgaattgaaagtgggctaaagagtgcacaaa

SEQ ID NO: 111807 - DNA, 80 bp, synthetic construct
  misc_feature 1..80: note = Artificially Synthesized Probe
  source 1..80: mol_type = other DNA
catgttcccagaagcgctctgtggtttgcggggcctcgcacggctcagcgcggcaccccctccctgtggattcccgctct

SEQ ID NO: 111808 - DNA, 80 bp, synthetic construct
  misc_feature 1..80: note = Artificially Synthesized Probe
  source 1..80: mol_type = other DNA
gaagccgcagcccggcctggatttccaggaagcaaggccagctcagcacagacacaactcccatgacagcttgaacccag

SEQ ID NO: 111809 - DNA, 80 bp, synthetic construct
  misc_feature 1..80: note = Artificially Synthesized Probe
  source 1..80: mol_type = other DNA
agacatgtttgagcagaaccagagcagacatgtttgactccagtcagcccttgagggagctggctaacgaggaccaccca

SEQ ID NO: 111810 - DNA, 80 bp, synthetic construct
  misc_feature 1..80: note = Artificially Synthesized Probe
  source 1..80: mol_type = other DNA
actgcctcacagcgggctcacactgggcccacactggcttacactgggtatacactgggctcacactggctcacactggg

SEQ ID NO: 111811 - DNA, 80 bp, synthetic construct
  misc_feature 1..80: note = Artificially Synthesized Probe
  source 1..80: mol_type = other DNA
acactggctcacaccaggcacacactgcctcacacgacacacactgggcacatactgggcacacactggcttgcactggg

SEQ ID NO: 111812 - DNA, 80 bp, synthetic construct
  misc_feature 1..80: note = Artificially Synthesized Probe
  source 1..80: mol_type = other DNA
cactggctcacactgggcacatactggccacacactggctcacactgggcacatactggctcacactggctcacactggc

SEQ ID NO: 111813 - DNA, 80 bp, synthetic construct
  misc_feature 1..80: note = Artificially Synthesized Probe
  source 1..80: mol_type = other DNA
ctgctcgtccctctctctgacctgcctgctggacaccaacaccagccctcaagtgccagcagtgacaagcccacctgagc

SEQ ID NO: 111814 - DNA, 80 bp, synthetic construct
  misc_feature 1..80: note = Artificially Synthesized Probe
  source 1..80: mol_type = other DNA
ttctcgctggacctttaatgacgtgtgagggagaagagaaacacgacacggtcagggagacgtcacaggttttccccaga

SEQ ID NO: 111815 - DNA, 80 bp, synthetic construct
  misc_feature 1..80: note = Artificially Synthesized Probe
  source 1..80: mol_type = other DNA
gcaagagcaccttctcttcaggagaggaaccaccctgtcactcgcagagatgaacatggaaaggagcttctgtggaacag

SEQ ID NO: 111816 - DNA, 80 bp, synthetic construct
  misc_feature 1..80: note = Artificially Synthesized Probe
  source 1..80: mol_type = other DNA
gctcagatagcggatttcaaacgttttgttcatgaaaatgtaacctctgtgtcgtcttggaacagtgttcaggaggggga

SEQ ID NO: 111817 - DNA, 80 bp, synthetic construct
  misc_feature 1..80: note = Artificially Synthesized Probe
  source 1..80: mol_type = other DNA
attagaaatatcactttacaaactttttgttgagatactatgcattccaaagcgttcaccagtgagaagtacacagcttg

SEQ ID NO: 111818 - DNA, 80 bp, synthetic construct
  misc_feature 1..80: note = Artificially Synthesized Probe
  source 1..80: mol_type = other DNA
aaacaggaacgaggaagggggaagaggccccgcgccctgacaaatgtttacagaacaaacactcccacccagacatagat

SEQ ID NO: 111819 - DNA, 80 bp, synthetic construct
  misc_feature 1..80: note = Artificially Synthesized Probe
  source 1..80: mol_type = other DNA
ctgtgtggctctgtacaacagtagctggtggttttttattgctctgtagtatttaattgcatggaacatcccacagttat

SEQ ID NO: 111820 - DNA, 80 bp, synthetic construct
  misc_feature 1..80: note = Artificially Synthesized Probe
  source 1..80: mol_type = other DNA
gtactcataggagtgggattactagaccataaaagacagatatattcagcttccacagatacgaaccaagctgctaggca

SEQ ID NO: 111821 - DNA, 80 bp, synthetic construct
  misc_feature 1..80: note = Artificially Synthesized Probe
  source 1..80: mol_type = other DNA
ttctgaagtttacaggcaaaagctgctgatgatacggattgatagcgatgtccacttttcattcctggcactggtaagtt

SEQ ID NO: 111822 - DNA, 80 bp, synthetic construct
  misc_feature 1..80: note = Artificially Synthesized Probe
  source 1..80: mol_type = other DNA
tttctgttctttttctacactctttagacatatgtcattttcaccttttcttcttttctaataaaagcatctaaggttat

SEQ ID NO: 111823 - DNA, 80 bp, synthetic construct
  misc_feature 1..80: note = Artificially Synthesized Probe
  source 1..80: mol_type = other DNA
caaatggggtatttagaagagtactgcttaatttccaaacatttagattttctagggatttttttttccatttgttttta

SEQ ID NO: 111824 - DNA, 80 bp, synthetic construct
  misc_feature 1..80: note = Artificially Synthesized Probe
  source 1..80: mol_type = other DNA
tgtgtgcactggaaaagaacacaggttctattttgatagttgcagtgtgtccattagatcaaggccattaatcccgttct

SEQ ID NO: 111825 - DNA, 80 bp, synthetic construct
  misc_feature 1..80: note = Artificially Synthesized Probe
  source 1..80: mol_type = other DNA
actgtgtgttcctgatagaccaacccttatatttattatggccctttttatctcggaaaatgcttcctgccttaacatct

SEQ ID NO: 111826 - DNA, 80 bp, synthetic construct
  misc_feature 1..80: note = Artificially Synthesized Probe
  source 1..80: mol_type = other DNA
tatatctcaacattgaaggtggtcccttgcaagcagtgtggttttgttttttagtgacaatctttaatttttgagtggag

SEQ ID NO: 111827 - DNA, 80 bp, synthetic construct
  misc_feature 1..80: note = Artificially Synthesized Probe
  source 1..80: mol_type = other DNA
gtaacctggtcatcacagctcacaggggagagccagagtctatgttcccaaggaggttttgaggggtgatgcgtgaatat

SEQ ID NO: 111828 - DNA, 80 bp, synthetic construct
  misc_feature 1..80: note = Artificially Synthesized Probe
  source 1..80: mol_type = other DNA
cttagcttgttagctattctttttgtggctattctagaaataataacacgggaccttgatttatcatggtgcaacacaca

SEQ ID NO: 111829 - DNA, 80 bp, synthetic construct
  misc_feature 1..80: note = Artificially Synthesized Probe
  source 1..80: mol_type = other DNA
acacctgaacctgtaaaccgcctagaaggaaatataggaaaaaaccttcatgacattggtcttagcaattattttttgga

SEQ ID NO: 111830 - DNA, 80 bp, synthetic construct
  misc_feature 1..80: note = Artificially Synthesized Probe
  source 1..80: mol_type = other DNA
cgctgtggttatgtgaggtgttcacatttggggaaacttggtggagggttggtggattatttctgcattttatttatatt

SEQ ID NO: 111831 - DNA, 80 bp, synthetic construct
  misc_feature 1..80: note = Artificially Synthesized Probe
  source 1..80: mol_type = other DNA
aatgtataaggaactgctgcaacccaataaccaaaaacaaaataacctgattttttaaacgggcaaaaggacctaaatag

SEQ ID NO: 111832 - DNA, 80 bp, synthetic construct
  misc_feature 1..80: note = Artificially Synthesized Probe
  source 1..80: mol_type = other DNA
ggatacctattatcagaaaaaaaaaagatgagtattggtgaagactgtatactgttgtgggaatgcaaaaggtccttatg

SEQ ID NO: 111833 - DNA, 80 bp, synthetic construct
  misc_feature 1..80: note = Artificially Synthesized Probe
  source 1..80: mol_type = other DNA
aaaagagtcaaaatcaagatctccaaagagatacttgcattcccacactaactgtggcattatttgcaatatccaagatg

SEQ ID NO: 111834 - DNA, 80 bp, synthetic construct
  misc_feature 1..80: note = Artificially Synthesized Probe
  source 1..80: mol_type = other DNA
acagaaaagataacactgatgatttcacttagacgaggcatctaaaatagtccaatgcgtagacccagagagaagaatgg

SEQ ID NO: 111835 - DNA, 80 bp, synthetic construct
  misc_feature 1..80: note = Artificially Synthesized Probe
  source 1..80: mol_type = other DNA
ctcatgttatatgttctttccacaaaaaaggacatggatccctgacttattagtgtaacacgcattatcgcatcctggat

SEQ ID NO: 111836 - DNA, 80 bp, synthetic construct
  misc_feature 1..80: note = Artificially Synthesized Probe
  source 1..80: mol_type = other DNA
tgtgggtttactttcctcctgccagaagcccctgcagtcttttcccaagagtcatctgttgatggagtctctcgagttct

SEQ ID NO: 111837 - DNA, 80 bp, synthetic construct
  misc_feature 1..80: note = Artificially Synthesized Probe
  source 1..80: mol_type = other DNA
gagtcatctgttgatggagtctctcgagttctgtctgtcttttcctaagagtcatctgttgatggagtctctcgagttct

SEQ ID NO: 111838 - DNA, 80 bp, synthetic construct
  misc_feature 1..80: note = Artificially Synthesized Probe
  source 1..80: mol_type = other DNA
ttctggtctccatggtttctggtgaaacaattcatcaatagagattaatttcctatgatttttctctgcttgctttccag

SEQ ID NO: 111839 - DNA, 80 bp, synthetic construct
  misc_feature 1..80: note = Artificially Synthesized Probe
  source 1..80: mol_type = other DNA
aagctttggtgtctttcttcaggtttgaaaaaaatcatagctctcatcgcctcaaacattgcttctaagctgttttcctt

SEQ ID NO: 111840 - DNA, 80 bp, synthetic construct
  misc_feature 1..80: note = Artificially Synthesized Probe
  source 1..80: mol_type = other DNA
acaacatgtccactctcttctgttcacttcttttttgaagagggaaatatttcatggcctgtcttcaggagaggaaatcc

SEQ ID NO: 111841 - DNA, 80 bp, synthetic construct
  misc_feature 1..80: note = Artificially Synthesized Probe
  source 1..80: mol_type = other DNA
gggaccttcttccagctcactcatctgctcttccttcatactcaatgttttgtgatgcccatctattgagttattagatt

SEQ ID NO: 111842 - DNA, 80 bp, synthetic construct
  misc_feature 1..80: note = Artificially Synthesized Probe
  source 1..80: mol_type = other DNA
gtttttgtgtcttggtcttgcttcttgacaactgaaattcagacattacatatgaaactgcagagactctgggtgagtct

SEQ ID NO: 111843 - DNA, 80 bp, synthetic construct
  misc_feature 1..80: note = Artificially Synthesized Probe
  source 1..80: mol_type = other DNA
tgggatgtgtgcgatggcccctctttcttagaagttcctgaattccagtttcatctcttcagcattatgagactgccaga

SEQ ID NO: 111844 - DNA, 80 bp, synthetic construct
  misc_feature 1..80: note = Artificially Synthesized Probe
  source 1..80: mol_type = other DNA
aacatctatttgtgtgttgatgaccctatgaggttgccaagtgctctgtgggtttcactgcctcttctccacagcccttg

SEQ ID NO: 111845 - DNA, 80 bp, synthetic construct
  misc_feature 1..80: note = Artificially Synthesized Probe
  source 1..80: mol_type = other DNA
gctgaggtgggcggatcacctgaggtcaggaatttgagaccagcctggccaacatggtgaaaccccgtctctactaaaaa

SEQ ID NO: 111846 - DNA, 80 bp, synthetic construct
  misc_feature 1..80: note = Artificially Synthesized Probe
  source 1..80: mol_type = other DNA
agttttattttatttttaattgacaaataattgtacatatttatgggctacggtgtgatgtttcaacacatatatacatt

SEQ ID NO: 111847 - DNA, 80 bp, synthetic construct
  misc_feature 1..80: note = Artificially Synthesized Probe
  source 1..80: mol_type = other DNA
agaaggtcagttctgatcgttgttgattttcctggaatttgctaatgatgaatcgtgctgtgtgaaaatacactttaggc

SEQ ID NO: 111848 - DNA, 80 bp, synthetic construct
  misc_feature 1..80: note = Artificially Synthesized Probe
  source 1..80: mol_type = other DNA
caaaatctccaggctaaagggaaaagtcaagctgggaactgctcagggcaaacctgcctcccattctgttcaaagtcacc

SEQ ID NO: 111849 - DNA, 80 bp, synthetic construct
  misc_feature 1..80: note = Artificially Synthesized Probe
  source 1..80: mol_type = other DNA
cctggaagccgccatttccagtcatcccgccttactggactgaaccaaagtatgtcttacacatattgattgacgtctca

SEQ ID NO: 111850 - DNA, 80 bp, synthetic construct
  misc_feature 1..80: note = Artificially Synthesized Probe
  source 1..80: mol_type = other DNA
ccaaaatactttctaaattgactgagacctttctcagatattttgtgctcacaagcctttgagctaagaatggtttttat

SEQ ID NO: 111851 - DNA, 80 bp, synthetic construct
  misc_feature 1..80: note = Artificially Synthesized Probe
  source 1..80: mol_type = other DNA
gctgccacctctgagtactggggtagtgcatctggagacttgtaaagggtccagatgtggttccatgtgaatcccgtcca

SEQ ID NO: 111852 - DNA, 80 bp, synthetic construct
  misc_feature 1..80: note = Artificially Synthesized Probe
  source 1..80: mol_type = other DNA
tatcatttggtcctttacagataaagcttgccaactcaagttcatgaccatctctaattcttttaaatatcaagtcatga

SEQ ID NO: 111853 - DNA, 80 bp, synthetic construct
  misc_feature 1..80: note = Artificially Synthesized Probe
  source 1..80: mol_type = other DNA
tagtgcccacaaggaagctagatcttttggaaataattctgcaatgtggaaataattttgcaacgtggaaatactgaggc

SEQ ID NO: 111854 - DNA, 80 bp, synthetic construct
  misc_feature 1..80: note = Artificially Synthesized Probe
  source 1..80: mol_type = other DNA
aacctcctggcctctcaccctaatgagtcctcatttctgagtggacatttctcccaaattcagttgcaacaacagatggt

SEQ ID NO: 111855 - DNA, 80 bp, synthetic construct
  misc_feature 1..80: note = Artificially Synthesized Probe
  source 1..80: mol_type = other DNA
cagctcccaaaagctagatggattgtccgttccattcgggcttcaaatcagaggctgtggtggctgtggtatctcaggac

SEQ ID NO: 111856 - DNA, 80 bp, synthetic construct
  misc_feature 1..80: note = Artificially Synthesized Probe
  source 1..80: mol_type = other DNA
atggtaataggggtgatagtggtgatgtggtaatgatggtggtggtggcagtggcggcggtggtggtgataatgatagtg

SEQ ID NO: 111857 - DNA, 80 bp, synthetic construct
  misc_feature 1..80: note = Artificially Synthesized Probe
  source 1..80: mol_type = other DNA
tggtggtgacagtggtggtggtgatgttagtgatagtggtgatggtgatgggggtggtagtggtgatggtggtagtagta

SEQ ID NO: 111858 - DNA, 80 bp, synthetic construct
  misc_feature 1..80: note = Artificially Synthesized Probe
  source 1..80: mol_type = other DNA
ggtggtggtgatggcagtgatgggggtggtggtagtcgtggtggtggtgacagtggtagtagtgatggtggtagtgatgg

SEQ ID NO: 111859 - DNA, 80 bp, synthetic construct
  misc_feature 1..80: note = Artificially Synthesized Probe
  source 1..80: mol_type = other DNA
gatagtaatggtgatggcaatgaaggtgatggtgatggtgatggtgatagtgatggtgatggtggtggtggtgatggtga

SEQ ID NO: 111860 - DNA, 80 bp, synthetic construct
  misc_feature 1..80: note = Artificially Synthesized Probe
  source 1..80: mol_type = other DNA
tagtgatggtcatggcagtggtggtgatggtgatagtgatggtgatggcagtggtggcagtggtggtgatggtaatagtg

SEQ ID NO: 111861 - DNA, 80 bp, synthetic construct
  misc_feature 1..80: note = Artificially Synthesized Probe
  source 1..80: mol_type = other DNA
tcagctccattcagagtcacagaaattaggttattttggcatctatctgttggctgtaacaatgaagaagtgagatactg

SEQ ID NO: 111862 - DNA, 80 bp, synthetic construct
  misc_feature 1..80: note = Artificially Synthesized Probe
  source 1..80: mol_type = other DNA
gtggcagtggtggtgatggtgatagcgatggtgatggcagtggtggtgatagtgatagtgatggtcatggcagtggtggt

SEQ ID NO: 111863 - DNA, 80 bp, synthetic construct
  misc_feature 1..80: note = Artificially Synthesized Probe
  source 1..80: mol_type = other DNA
gtggtggtgatagtgatagtgatggtcatggcagtggtggtggtggtgatagtgatggtcatggcagtggtggtgatagt

SEQ ID NO: 111864 - DNA, 80 bp, synthetic construct
  misc_feature 1..80: note = Artificially Synthesized Probe
  source 1..80: mol_type = other DNA
atggtgatagtaatggtcatggcagtggtgatggtggcagcaaggaaatcattctctgattacctgacatggttaaaaat

SEQ ID NO: 111865 - DNA, 80 bp, synthetic construct
  misc_feature 1..80: note = Artificially Synthesized Probe
  source 1..80: mol_type = other DNA
acctattcatggttatcatctgcatgatgaagaaacactgcaacctaccttttctccactagagggttggttcactagat

SEQ ID NO: 111866 - DNA, 80 bp, synthetic construct
  misc_feature 1..80: note = Artificially Synthesized Probe
  source 1..80: mol_type = other DNA
atttacccgaatgttcttcaccatgattattttggggctttaggatcgtaaggaggtgattctgattttgtggcttgtac

SEQ ID NO: 111867 - DNA, 80 bp, synthetic construct
  misc_feature 1..80: note = Artificially Synthesized Probe
  source 1..80: mol_type = other DNA
agttaaaacagattttatctcctgccaccattcttgccttacggacaagaggaggacagggcctccaagcaaatgagcac

SEQ ID NO: 111868 - DNA, 80 bp, synthetic construct
  misc_feature 1..80: note = Artificially Synthesized Probe
  source 1..80: mol_type = other DNA
actcttaacctggtcaacaagcacattgcaaatgtcttgttcccactaggtggccacaggtcactgggcgagcgggtctt

SEQ ID NO: 111869 - DNA, 80 bp, synthetic construct
  misc_feature 1..80: note = Artificially Synthesized Probe
  source 1..80: mol_type = other DNA
aatccaagggtaggtttatatcaaatcagcagacaaacttgacttctgggtaaaggctaaaatgaatcaacggagaactg

SEQ ID NO: 111870 - DNA, 80 bp, synthetic construct
  misc_feature 1..80: note = Artificially Synthesized Probe
  source 1..80: mol_type = other DNA
aatgagcaaaagccggtccatctggcattatttctcatcaatcaaaccactcgtgcagtggaaagtgagtccccacggat

SEQ ID NO: 111871 - DNA, 80 bp, synthetic construct
  misc_feature 1..80: note = Artificially Synthesized Probe
  source 1..80: mol_type = other DNA
cccaacagggggagcagcgtggagcaaatcttcctgatgggggagcggcgtggggcaaatcttcctgccaagcgtgcgag

SEQ ID NO: 111872 - DNA, 80 bp, synthetic construct
  misc_feature 1..80: note = Artificially Synthesized Probe
  source 1..80: mol_type = other DNA
tgggtgacggtgtcagagtggactgttggccaccagcaacggggctgcctgggacggccaggggcagagctgctcccatg

SEQ ID NO: 111873 - DNA, 80 bp, synthetic construct
  misc_feature 1..80: note = Artificially Synthesized Probe
  source 1..80: mol_type = other DNA
cactgcacggggaggtgctagagaagggagggggcctgtgggcactgccactcacccctccaacaggcagggagacaggc

SEQ ID NO: 111874 - DNA, 80 bp, synthetic construct
  misc_feature 1..80: note = Artificially Synthesized Probe
  source 1..80: mol_type = other DNA
gtgagccccagccggccgtgagccccagcgcccaggcgcctcctcccctgttgcagccccactgggtccccaagtcccca

SEQ ID NO: 111875 - DNA, 80 bp, synthetic construct
  misc_feature 1..80: note = Artificially Synthesized Probe
  source 1..80: mol_type = other DNA
cccaggccaaaaccctgttagagcagcttagacacagcaccaagacccccctagacccagagtgagcctaaaatgaaaag

SEQ ID NO: 111876 - DNA, 80 bp, synthetic construct
  misc_feature 1..80: note = Artificially Synthesized Probe
  source 1..80: mol_type = other DNA
atgcacagaagccaggtcctctcctacggccatttttgggatcccaagaaagcccccagtgtcccctcactgctgtgcag

SEQ ID NO: 111877 - DNA, 80 bp, synthetic construct
  misc_feature 1..80: note = Artificially Synthesized Probe
  source 1..80: mol_type = other DNA
ccaccgtgacttctccccaaaagggcctgagctgggcttaaccaggagggctggggagagctggatgcccttcaccctcg

SEQ ID NO: 111878 - DNA, 80 bp, synthetic construct
  misc_feature 1..80: note = Artificially Synthesized Probe
  source 1..80: mol_type = other DNA
gccctgagcttgttctcaccaccaaaggaagagccaagcgcccccacctgctcacctctgccctgactgtcctcaccctg

SEQ ID NO: 111879 - DNA, 80 bp, synthetic construct
  misc_feature 1..80: note = Artificially Synthesized Probe
  source 1..80: mol_type = other DNA
gaccccgcggcctctcgggaacaggtcagaggctctggagggccttcaggttcgtctggccctaatctccacccacccct

SEQ ID NO: 111880 - DNA, 80 bp, synthetic construct
  misc_feature 1..80: note = Artificially Synthesized Probe
  source 1..80: mol_type = other DNA
gctctgccccaagtcagcctgtccctcctttgccccagatggctcctgctcccacctcctcctgtccccgtgagccacag

SEQ ID NO: 111881 - DNA, 80 bp, synthetic construct
  misc_feature 1..80: note = Artificially Synthesized Probe
  source 1..80: mol_type = other DNA
gtcattactgggaaggctatacttctcttttctacaatggcgcctattgcagcacaatgccctttaatttactgaacatt

SEQ ID NO: 111882 - DNA, 80 bp, synthetic construct
  misc_feature 1..80: note = Artificially Synthesized Probe
  source 1..80: mol_type = other DNA
ggtaaacccgggcgcccaggtgagccttcggaccaccccacgtgagaactcaggacacgtgagaacccaggacactcagc

SEQ ID NO: 111883 - DNA, 80 bp, synthetic construct
  misc_feature 1..80: note = Artificially Synthesized Probe
  source 1..80: mol_type = other DNA
gtgggtgtgtgcctgaatgtgtgagagacagagaaaaattacccccaatctataagctataggtaagaaaaagtacattt

SEQ ID NO: 111884 - DNA, 80 bp, synthetic construct
  misc_feature 1..80: note = Artificially Synthesized Probe
  source 1..80: mol_type = other DNA
agctggagccccacccaagccacagctgcccccggcaggcaggccccacccaggctctgcaatggacacacggagaccca

SEQ ID NO: 111885 - DNA, 80 bp, synthetic construct
  misc_feature 1..80: note = Artificially Synthesized Probe
  source 1..80: mol_type = other DNA
cttgaaaatccaatggtccctggtgtaatttcctcagagattacttggttgatgagaaaagcagtaagttttgttgtttg

SEQ ID NO: 111886 - DNA, 80 bp, synthetic construct
  misc_feature 1..80: note = Artificially Synthesized Probe
  source 1..80: mol_type = other DNA
atctggcttctgtggactgaaggcggccggcctgcagcctcctagctcctgttcccacggcctcacggcatccgtcactt

SEQ ID NO: 111887 - DNA, 80 bp, synthetic construct
  misc_feature 1..80: note = Artificially Synthesized Probe
  source 1..80: mol_type = other DNA
ttaaaatttttgctctgaaacactgaaacattccttcccaagcaaggacagagccatgaatccacagccaatctggagtt

SEQ ID NO: 111888 - DNA, 80 bp, synthetic construct
  misc_feature 1..80: note = Artificially Synthesized Probe
  source 1..80: mol_type = other DNA
ttggctgtataaattccccaaatggaattctttggcaccaaaaaaaaagaggaaggcagctaataaccactacagagcac

SEQ ID NO: 111889 - DNA, 80 bp, synthetic construct
  misc_feature 1..80: note = Artificially Synthesized Probe
  source 1..80: mol_type = other DNA
cgctgccagagcctcttccccacctctccaggaaacaaagccacctgcacgggtacccggcctgccttgcgtcctgccag

SEQ ID NO: 111890 - DNA, 80 bp, synthetic construct
  misc_feature 1..80: note = Artificially Synthesized Probe
  source 1..80: mol_type = other DNA
ggcagtgctgaagcccctgctgccatccacaaaggggcctcagagggttggaaatgacaagccacggtcttgccccaccc

SEQ ID NO: 111891 - DNA, 80 bp, synthetic construct
  misc_feature 1..80: note = Artificially Synthesized Probe
  source 1..80: mol_type = other DNA
taagctgcttccactgccacttggggaaatgatgaccttttctttctttaaaaataaacacagtcacctgtcttcattaa

SEQ ID NO: 111892 - DNA, 80 bp, synthetic construct
  misc_feature 1..80: note = Artificially Synthesized Probe
  source 1..80: mol_type = other DNA
cccagcatggcgtgccccactccagccactccaccgccagggctgctttctgggaccactcccaggatgaatctcacagg

SEQ ID NO: 111893 - DNA, 80 bp, synthetic construct
  misc_feature 1..80: note = Artificially Synthesized Probe
  source 1..80: mol_type = other DNA
tttctaaatgtttcataatagccatgtattgcttcttaattagagaaaatagtaagttagcatgaaaaccccccaaaaag

SEQ ID NO: 111894 - DNA, 80 bp, synthetic construct
  misc_feature 1..80: note = Artificially Synthesized Probe
  source 1..80: mol_type = other DNA
ggggagggggtcccctccagaggagctgagtcttcactggcgcctgatgctgaatttgaggcccccaggggagcccctca

SEQ ID NO: 111895 - DNA, 80 bp, synthetic construct
  misc_feature 1..80: note = Artificially Synthesized Probe
  source 1..80: mol_type = other DNA
catttccagcctaagacgggttcaaggcaaccccactccagtccagccactagaacgagactggactgtccaggtgctcc

SEQ ID NO: 111896 - DNA, 80 bp, synthetic construct
  misc_feature 1..80: note = Artificially Synthesized Probe
  source 1..80: mol_type = other DNA
acagatgttcaggacatgaagggccgtgacaggcagcacgtgcccactcagctggattccaggttcctttgtgggactcg

SEQ ID NO: 111897 - DNA, 80 bp, synthetic construct
  misc_feature 1..80: note = Artificially Synthesized Probe
  source 1..80: mol_type = other DNA
aatgacagataccaaaaccaacaattccaggtacatgtcaatcccacaactcaagctcaagaagcttccagaggaagcaa

SEQ ID NO: 111898 - DNA, 80 bp, synthetic construct
  misc_feature 1..80: note = Artificially Synthesized Probe
  source 1..80: mol_type = other DNA
gtcaccaagagaggacgatgcacagattcccacaacagcaagacacacagcgcagtctgagtccaaacaaacaccaatag

SEQ ID NO: 111899 - DNA, 80 bp, synthetic construct
  misc_feature 1..80: note = Artificially Synthesized Probe
  source 1..80: mol_type = other DNA
tcatagtcaggaacatttggaggagttcagcccttacttctttgccttagtgatttccaaactcatggatgccacttcag

SEQ ID NO: 111900 - DNA, 80 bp, synthetic construct
  misc_feature 1..80: note = Artificially Synthesized Probe
  source 1..80: mol_type = other DNA
tacaaagttaagcaaaggcaaagctacaacacaaaacgttgctgtagtacagacgaatccaaggtggccacagcacagat

SEQ ID NO: 111901 - DNA, 80 bp, synthetic construct
  misc_feature 1..80: note = Artificially Synthesized Probe
  source 1..80: mol_type = other DNA
gcacacacagctatgggggcttcgggagcagcaaacccttgatgagaaggtattttattgtctgtagattgctgcatctg

SEQ ID NO: 111902 - DNA, 80 bp, synthetic construct
  misc_feature 1..80: note = Artificially Synthesized Probe
  source 1..80: mol_type = other DNA
ccgcctggcttctcaccgcgtccttacatggaggagagaggactcttcctcttcttacgagagcactggtcccttcacgg

SEQ ID NO: 111903 - DNA, 80 bp, synthetic construct
  misc_feature 1..80: note = Artificially Synthesized Probe
  source 1..80: mol_type = other DNA
agcaccatcccctgggggtttggccttctacacactgagttcaatgagacacattcagtccataaccgctgcctcagaga

SEQ ID NO: 111904 - DNA, 80 bp, synthetic construct
  misc_feature 1..80: note = Artificially Synthesized Probe
  source 1..80: mol_type = other DNA
gcaaacaatattaagtgaatattcatccaaacagcactcaagaaatagtcccgccagcagctggaacccccacccctgct

SEQ ID NO: 111905 - DNA, 80 bp, synthetic construct
  misc_feature 1..80: note = Artificially Synthesized Probe
  source 1..80: mol_type = other DNA
tccactgttccattgtatgaaaataaaataatcttcctctcctccaccaccaaagtgcatgtgggtcacgtccagcctgg

SEQ ID NO: 111906 - DNA, 80 bp, synthetic construct
  misc_feature 1..80: note = Artificially Synthesized Probe
  source 1..80: mol_type = other DNA
gaggagctcagaggttgtgtatcacagccaggtgcttccaggaactccccgccccacgtcgcagctgcacctggagctgg

SEQ ID NO: 111907 - DNA, 80 bp, synthetic construct
  misc_feature 1..80: note = Artificially Synthesized Probe
  source 1..80: mol_type = other DNA
cttcgttgccttgttctcagtgatttgtcagggtcctctctgttttgaacgtgagatctttgtcggttacatgtcattta

SEQ ID NO: 111908 - DNA, 80 bp, synthetic construct
  misc_feature 1..80: note = Artificially Synthesized Probe
  source 1..80: mol_type = other DNA
cctctccgccctaaagtcatgaaacattatattctcagttgaaaacctttatagtcttgcctttcacacccatgagcaca

SEQ ID NO: 111909 - DNA, 80 bp, synthetic construct
  misc_feature 1..80: note = Artificially Synthesized Probe
  source 1..80: mol_type = other DNA
gtgtttagaacgctcgcggttttttcctatgataatgtttcacagaatcattgcgcatttggttctttacacccaggcct

SEQ ID NO: 111910 - DNA, 80 bp, synthetic construct
  misc_feature 1..80: note = Artificially Synthesized Probe
  source 1..80: mol_type = other DNA
agatagtttcactatttcttagtttaagaaagctcttcctgaaacaggaatcccgacccatacgaccatattcaacttgc

SEQ ID NO: 111911 - DNA, 80 bp, synthetic construct
  misc_feature 1..80: note = Artificially Synthesized Probe
  source 1..80: mol_type = other DNA
attatatttttaagtctctgtgccatctggattttattttggggtaaggagtttgggagggacccagctatgtattttcc

SEQ ID NO: 111912 - DNA, 80 bp, synthetic construct
  misc_feature 1..80: note = Artificially Synthesized Probe
  source 1..80: mol_type = other DNA
ctggcttaagtgtcccatcactgcaaagcactgagtgtgcaagactcaacgccccacacacaactttctttttcataact

SEQ ID NO: 111913 - DNA, 80 bp, synthetic construct
  misc_feature 1..80: note = Artificially Synthesized Probe
  source 1..80: mol_type = other DNA
ctgttgtgataacttacatgtataggtttattcagagagaattcatatccttacagaattaaaccttctcacccagaagc

SEQ ID NO: 111914 - DNA, 80 bp, synthetic construct
  misc_feature 1..80: note = Artificially Synthesized Probe
  source 1..80: mol_type = other DNA
cggcctcctgccaccccaccgatttcccctcccactcacagactgtggcatctcaaggtgaccttgggctggagagccag

SEQ ID NO: 111915 - DNA, 80 bp, synthetic construct
  misc_feature 1..80: note = Artificially Synthesized Probe
  source 1..80: mol_type = other DNA
caaagaaaaactatgcaagaagagaaagtcccaacaccacagttagaagtggcacatttggggcggctgttgcaggatga

SEQ ID NO: 111916 - DNA, 80 bp, synthetic construct
  misc_feature 1..80: note = Artificially Synthesized Probe
  source 1..80: mol_type = other DNA
acccatcactgcagctgcagggctgggcatgatgcttttaacttgacagtgtgaaaactaaatgttggctaacacagcct

SEQ ID NO: 111917 - DNA, 80 bp, synthetic construct
  misc_feature 1..80: note = Artificially Synthesized Probe
  source 1..80: mol_type = other DNA
gggaattgaaagaggacagtcctcaccgtacggtgcagggggcaccacagggttggctaacacagcctggacgtagggga

SEQ ID NO: 111918 - DNA, 80 bp, synthetic construct
  misc_feature 1..80: note = Artificially Synthesized Probe
  source 1..80: mol_type = other DNA
agaacagtcctcaccctacagtgcagggggcaccacaggggctacacagaggaggactgagtcaactcctgatgagatgg

SEQ ID NO: 111919 - DNA, 80 bp, synthetic construct
  misc_feature 1..80: note = Artificially Synthesized Probe
  source 1..80: mol_type = other DNA
tgtcacacaaattaactgaggaaaattgaaagcctcatgtctcctaagtactaagcattcaactgacatttgttgtgcac

SEQ ID NO: 111920 - DNA, 80 bp, synthetic construct
  misc_feature 1..80: note = Artificially Synthesized Probe
  source 1..80: mol_type = other DNA
tggaattacgggtcttactcaacagctgaaacaggcattgttccggctctccaaacaagcaacttgagatgcagggcaga

SEQ ID NO: 111921 - DNA, 80 bp, synthetic construct
  misc_feature 1..80: note = Artificially Synthesized Probe
  source 1..80: mol_type = other DNA
acacacaatcaccgatgtcaggactggggacggttgctatggaggacagacaagacacaacgcacacaatcaccgatgtc

SEQ ID NO: 111922 - DNA, 80 bp, synthetic construct
  misc_feature 1..80: note = Artificially Synthesized Probe
  source 1..80: mol_type = other DNA
caacgcacacaatcactgatgtgaggattggggatggttgctacagaggacagacaagacacaacgcacacaatcactga

SEQ ID NO: 111923 - DNA, 80 bp, synthetic construct
  misc_feature 1..80: note = Artificially Synthesized Probe
  source 1..80: mol_type = other DNA
gacacaacacacacaatcactgatgtgaggattggggacggttgctacagaggacagacaagatacaacacacacaatca

SEQ ID NO: 111924 - DNA, 80 bp, synthetic construct
  misc_feature 1..80: note = Artificially Synthesized Probe
  source 1..80: mol_type = other DNA
acaagacacaacacacacaatcactgatgtcaggattggggatggttgctatagacaaagaagagatgaagagggtgcag

SEQ ID NO: 111925 - DNA, 80 bp, synthetic construct
  misc_feature 1..80: note = Artificially Synthesized Probe
  source 1..80: mol_type = other DNA
gtgttcaaaaacagagatgacggctgttgcatggaacagacatacacagcctcagcgaccccccgggggcccctcgaaat

SEQ ID NO: 111926 - DNA, 80 bp, synthetic construct
  misc_feature 1..80: note = Artificially Synthesized Probe
  source 1..80: mol_type = other DNA
agaaacaccacacctccaggcagccagcacagtaagcttttcacttaagtttttattatagaaatgttcaaacatacacg

SEQ ID NO: 111927 - DNA, 80 bp, synthetic construct
  misc_feature 1..80: note = Artificially Synthesized Probe
  source 1..80: mol_type = other DNA
agaagacaacggcacggacgccatcggccacggccacccatcgctctgcagagaagacaacggcacggacgccatcggcc

SEQ ID NO: 111928 - DNA, 80 bp, synthetic construct
  misc_feature 1..80: note = Artificially Synthesized Probe
  source 1..80: mol_type = other DNA
cccatcgctctgcagagaagacaacggcacggacgccatcggccacggccacccatcgctctgcagagaagacaacggca

SEQ ID NO: 111929 - DNA, 80 bp, synthetic construct
  misc_feature 1..80: note = Artificially Synthesized Probe
  source 1..80: mol_type = other DNA
gccacccattactctgcagagaacataacggcacagatgccatcggccacggccacccattgctctgcagagaacataac

SEQ ID NO: 111930 - DNA, 80 bp, synthetic construct
  misc_feature 1..80: note = Artificially Synthesized Probe
  source 1..80: mol_type = other DNA
atccgtacaaagccaaaaagaagtagaaatgggacccaaggaattaacaagagtgtgtgaaagaccattcatggggtctt

SEQ ID NO: 111931 - DNA, 80 bp, synthetic construct
  misc_feature 1..80: note = Artificially Synthesized Probe
  source 1..80: mol_type = other DNA
cacggccacccattgctctgcagagaacataacagcatggacgccatcagccacagccccccatcgctctgcagagaaga

SEQ ID NO: 111932 - DNA, 80 bp, synthetic construct
  misc_feature 1..80: note = Artificially Synthesized Probe
  source 1..80: mol_type = other DNA
cccccatcgctctgcagagaacgtaacggcacggatgccatcggccacggccccccattgctccacagagaagataatgg

SEQ ID NO: 111933 - DNA, 80 bp, synthetic construct
  misc_feature 1..80: note = Artificially Synthesized Probe
  source 1..80: mol_type = other DNA
gccatcggcaatggccccccattgctctgcagagaacataacggcacggatgccatcggccatggccccccatcgctctg

SEQ ID NO: 111934 - DNA, 80 bp, synthetic construct
  misc_feature 1..80: note = Artificially Synthesized Probe
  source 1..80: mol_type = other DNA
ttgagggtggagtcagttagagaaaatctactacaccatattctgtgtatctctagcaaatgaggacttatctcatttta

SEQ ID NO: 111935 - DNA, 80 bp, synthetic construct
  misc_feature 1..80: note = Artificially Synthesized Probe
  source 1..80: mol_type = other DNA
aaaaatgtcatcacaaacccagtatcacaccagcaacattagttaacagcaactggtctttaataatgttctagtatccg

SEQ ID NO: 111936 - DNA, 80 bp, synthetic construct
  misc_feature 1..80: note = Artificially Synthesized Probe
  source 1..80: mol_type = other DNA
gtgtttgtggtttgctatgaatctgatgagccaccaagaatccaggctgagtcttctgacccctttcctgatgcttattt

SEQ ID NO: 111937 - DNA, 80 bp, synthetic construct
  misc_feature 1..80: note = Artificially Synthesized Probe
  source 1..80: mol_type = other DNA
tctaccctggccttgataagcagacaccactagccctgaaagcaaaggtgctacctcggcctgcgggaccacagcggatg

SEQ ID NO: 111938 - DNA, 80 bp, synthetic construct
  misc_feature 1..80: note = Artificially Synthesized Probe
  source 1..80: mol_type = other DNA
ggccccagtcagcacacggtgaggggcgttaacaccaaaactcccgctccagggcgagcctggcctggggggagtcacag

SEQ ID NO: 111939 - DNA, 80 bp, synthetic construct
  misc_feature 1..80: note = Artificially Synthesized Probe
  source 1..80: mol_type = other DNA
agccaccgtcaaaactccttccaagttcattatttacaccctgagtgttctcagcagggccaaaacttcacacctctgac

SEQ ID NO: 111940 - DNA, 80 bp, synthetic construct
  misc_feature 1..80: note = Artificially Synthesized Probe
  source 1..80: mol_type = other DNA
agttttagaaattgggagtgagaagacgtggttgaaaactgaggtgaaagctctaagagaaagttaatttggtgtctcct

SEQ ID NO: 111941 - DNA, 80 bp, synthetic construct
  misc_feature 1..80: note = Artificially Synthesized Probe
  source 1..80: mol_type = other DNA
tccgcttcctcctttcctgccccagacgccacagcaaacgttatttccccgacatctggtggttttcaaaggacaatgct

SEQ ID NO: 111942 - DNA, 80 bp, synthetic construct
  misc_feature 1..80: note = Artificially Synthesized Probe
  source 1..80: mol_type = other DNA
caccacaactggcttccctgatggatgtgaattaatgccatttattccaagctctttctctgagagttttgtctccagct

SEQ ID NO: 111943 - DNA, 80 bp, synthetic construct
  misc_feature 1..80: note = Artificially Synthesized Probe
  source 1..80: mol_type = other DNA
cctcattccctgaattctgatttgtcaagaggtgtggcctgaccacccggatcttttaaagctcccccggtttttaaaag

SEQ ID NO: 111944 - DNA, 80 bp, synthetic construct
  misc_feature 1..80: note = Artificially Synthesized Probe
  source 1..80: mol_type = other DNA
ggagagctgaaagttgcacagttatttactgagtagatttgggattcaaatccaaatcctactgtgaagccggtaccccc

SEQ ID NO: 111945 - DNA, 80 bp, synthetic construct
  misc_feature 1..80: note = Artificially Synthesized Probe
  source 1..80: mol_type = other DNA
gtgcaccctccacgcagcacaggccagacaagggaaactgcagggagcactggcaaaggacacatgtggggaagacacga

SEQ ID NO: 111946 - DNA, 80 bp, synthetic construct
  misc_feature 1..80: note = Artificially Synthesized Probe
  source 1..80: mol_type = other DNA
cactgtccagaggaagacaccaaggcttgaggctgtggctccaagtgcacacagttgcacaagcacacatgcatgctgca

SEQ ID NO: 111947 - DNA, 80 bp, synthetic construct
  misc_feature 1..80: note = Artificially Synthesized Probe
  source 1..80: mol_type = other DNA
cgaataaaatatagtgtcccaagacttacaaagaactttcacaaaatcacgtgatggtcctaccagttgcacagagaggg

SEQ ID NO: 111948 - DNA, 80 bp, synthetic construct
  misc_feature 1..80: note = Artificially Synthesized Probe
  source 1..80: mol_type = other DNA
ggctccagaatccagagccctcgcctgggacgaacgggatccagaatccagagcccctgcctgggacgaacgggctccag

SEQ ID NO: 111949 - DNA, 80 bp, synthetic construct
  misc_feature 1..80: note = Artificially Synthesized Probe
  source 1..80: mol_type = other DNA
tcacaggatctccctaaatgtccagtggcccctgtccagccgctgtggctgcccacatcatggtgctgggccctgccgtt

SEQ ID NO: 111950 - DNA, 80 bp, synthetic construct
  misc_feature 1..80: note = Artificially Synthesized Probe
  source 1..80: mol_type = other DNA
gttcctgctagagggtctgtgtgccgagagcacaggagggtcatccagctacaggatgggactctatctacaagttcctg

SEQ ID NO: 111951 - DNA, 80 bp, synthetic construct
  misc_feature 1..80: note = Artificially Synthesized Probe
  source 1..80: mol_type = other DNA
tgccgtcagcacaggagggtcatccagctgcaggatgggactctatctacatgctcctcctagaggggctgtgtgccgtg

SEQ ID NO: 111952 - DNA, 80 bp, synthetic construct
  misc_feature 1..80: note = Artificially Synthesized Probe
  source 1..80: mol_type = other DNA
attcaactgtaggatcggactctatctacatgttcctgctacaggggctgtgtgccatgagcacaggagggtcatccagc

SEQ ID NO: 111953 - DNA, 80 bp, synthetic construct
  misc_feature 1..80: note = Artificially Synthesized Probe
  source 1..80: mol_type = other DNA
ctatctacatgttcctgctacgggggctgtgtgccgtcagcacaggagggtcatccagctgtccggaaatgaaaactcac

SEQ ID NO: 111954 - DNA, 80 bp, synthetic construct
  misc_feature 1..80: note = Artificially Synthesized Probe
  source 1..80: mol_type = other DNA
gagaaaagttcaaatacttcaaaatggaatcttccggagaaagtccccagttggtatgcagttcgggtggagaaggtgaa

SEQ ID NO: 111955 - DNA, 80 bp, synthetic construct
  misc_feature 1..80: note = Artificially Synthesized Probe
  source 1..80: mol_type = other DNA
ggctggcaaagcctgcctagaaatatacaagaacagatagtagttccagtaaagcacagagtacctcaaaatagaagaca

SEQ ID NO: 111956 - DNA, 80 bp, synthetic construct
  misc_feature 1..80: note = Artificially Synthesized Probe
  source 1..80: mol_type = other DNA
tctactatggaggattctgcccgacagtcatgtggcttcacttaagatcagaagtgacctggtcaagaagcatagaagaa

SEQ ID NO: 111957 - DNA, 80 bp, synthetic construct
  misc_feature 1..80: note = Artificially Synthesized Probe
  source 1..80: mol_type = other DNA
ctggctaacacagtgaaaccccgtctctactaaaaatacaaaaaaattaaccgggcgtggtggcaggcgcctgtagtccc

SEQ ID NO: 111958 - DNA, 80 bp, synthetic construct
  misc_feature 1..80: note = Artificially Synthesized Probe
  source 1..80: mol_type = other DNA
aaatggtgaaaaaaaatatcattctaggtgcattttcttccagtgttttccaaagcataattacgtactttttccaaagc

SEQ ID NO: 111959 - DNA, 80 bp, synthetic construct
  misc_feature 1..80: note = Artificially Synthesized Probe
  source 1..80: mol_type = other DNA
actgttccctgctatgcttggtcatatgggttgttttaaagtttttcaacattataaataaagctgtaacaaacgtgctt

SEQ ID NO: 111960 - DNA, 80 bp, synthetic construct
  misc_feature 1..80: note = Artificially Synthesized Probe
  source 1..80: mol_type = other DNA
cttgggtgaacgcctcccgtccttggatagaaccgcctgggtgcttcggttcgtacttctccttccatgctttcagaccc

SEQ ID NO: 111961 - DNA, 80 bp, synthetic construct
  misc_feature 1..80: note = Artificially Synthesized Probe
  source 1..80: mol_type = other DNA
aaataaattgttgggttctttctggaggagtttgggtgagcttgtttatcccaggatgtcacttctcaaaggcagtgcag

SEQ ID NO: 111962 - DNA, 80 bp, synthetic construct
  misc_feature 1..80: note = Artificially Synthesized Probe
  source 1..80: mol_type = other DNA
ctgctctcacatgatgcgataccgtacttgcatttgacagaaaacacacagagtcctagagatgatatgtgaaaattaag

SEQ ID NO: 111963 - DNA, 80 bp, synthetic construct
  misc_feature 1..80: note = Artificially Synthesized Probe
  source 1..80: mol_type = other DNA
caagtcatttactgccttaaaactaagacaaaaaggagtggttcctcaatgaattcctctcccctccttccaccctgaga

SEQ ID NO: 111964 - DNA, 80 bp, synthetic construct
  misc_feature 1..80: note = Artificially Synthesized Probe
  source 1..80: mol_type = other DNA
aattcactcactgagaattaagaatcccagcactttgggaggctgaggcgggcggatcacgaggtcaggagatcgagacc

SEQ ID NO: 111965 - DNA, 80 bp, synthetic construct
  misc_feature 1..80: note = Artificially Synthesized Probe
  source 1..80: mol_type = other DNA
ttgaaggttgggacacagaccccttcaggcaaatccacacacagctcagttttattgaagaaaatcaataacataaatta

SEQ ID NO: 111966 - DNA, 80 bp, synthetic construct
  misc_feature 1..80: note = Artificially Synthesized Probe
  source 1..80: mol_type = other DNA
ttttagcagtgatgatttgaactcagatcattagtttcatgtttccccagcctggctgcacattacagtcaactgtacta

SEQ ID NO: 111967 - DNA, 80 bp, synthetic construct
  misc_feature 1..80: note = Artificially Synthesized Probe
  source 1..80: mol_type = other DNA
ccaaaagggcaggtgagcccatcatcccctaactccatcttttctcatttctgtcccccaccccaaatcatcaccattgt

SEQ ID NO: 111968 - DNA, 80 bp, synthetic construct
  misc_feature 1..80: note = Artificially Synthesized Probe
  source 1..80: mol_type = other DNA
cattaccaccatcatcaccatcatcattaccattaccatcaccaccatcatcaccatcattgtcatcaccatatcatcat

SEQ ID NO: 111969 - DNA, 80 bp, synthetic construct
  misc_feature 1..80: note = Artificially Synthesized Probe
  source 1..80: mol_type = other DNA
tcatccttaccatcgccatcattgccatgccatttagtaaacaatcacttcatcatcaccgtcatcatccttaccatcgc

SEQ ID NO: 111970 - DNA, 80 bp, synthetic construct
  misc_feature 1..80: note = Artificially Synthesized Probe
  source 1..80: mol_type = other DNA
tcatcatcaccgtcatcatccttaccatcgccatcattgccatgccatttagtaaataatccttcatcatcaccatcatc

SEQ ID NO: 111971 - DNA, 80 bp, synthetic construct
  misc_feature 1..80: note = Artificially Synthesized Probe
  source 1..80: mol_type = other DNA
gtaaataatccttcatcatcaccatcatcatccttaccatcgccatcattgccatgccatttagtaaataatccttcatc

SEQ ID NO: 111972 - DNA, 80 bp, synthetic construct
  misc_feature 1..80: note = Artificially Synthesized Probe
  source 1..80: mol_type = other DNA
ccatgccatttagtaaataatccttcatcaccaccgtcatcatccttaccatcgccatcattgccatgccatttaataaa

SEQ ID NO: 111973 - DNA, 80 bp, synthetic construct
  misc_feature 1..80: note = Artificially Synthesized Probe
  source 1..80: mol_type = other DNA
catcaccatcattgccatgccatttagtaaataatccttcatcaccaccgtcatcatccttaccatcgccatcattgcca

SEQ ID NO: 111974 - DNA, 80 bp, synthetic construct
  misc_feature 1..80: note = Artificially Synthesized Probe
  source 1..80: mol_type = other DNA
attgccatgccaatgagtaaatatcaccagtgccagattctgtgctacacccttatgctcattatcattgaccttcagat

SEQ ID NO: 111975 - DNA, 80 bp, synthetic construct
  misc_feature 1..80: note = Artificially Synthesized Probe
  source 1..80: mol_type = other DNA
tctctgctaaaaatacaaaaaattagccaggcgtggtggtgggcacctgtagtcccagctacacaggaggctgaggcagg

SEQ ID NO: 111976 - DNA, 80 bp, synthetic construct
  misc_feature 1..80: note = Artificially Synthesized Probe
  source 1..80: mol_type = other DNA
gtgtggctgtggacatttcctaaagcatgctgggcctcctctcctgggccttgtatgtggagatactaagagtgcccatc

SEQ ID NO: 111977 - DNA, 80 bp, synthetic construct
  misc_feature 1..80: note = Artificially Synthesized Probe
  source 1..80: mol_type = other DNA
tcttggttcttcattcataccacaccccttactcccttactgtatctcctgtacacatcatttatttaccactttatccc

SEQ ID NO: 111978 - DNA, 80 bp, synthetic construct
  misc_feature 1..80: note = Artificially Synthesized Probe
  source 1..80: mol_type = other DNA
tgctatgcttactttagagacaagcaaactgaggcttagaaagagtcagtacttggaagcactgaaaggctcagctctca

SEQ ID NO: 111979 - DNA, 80 bp, synthetic construct
  misc_feature 1..80: note = Artificially Synthesized Probe
  source 1..80: mol_type = other DNA
tgtgtgctggacttgggctgggcaaaaacaaacctggtctctgatcacgtaagcctagaacccagaaagccagcagttat

SEQ ID NO: 111980 - DNA, 80 bp, synthetic construct
  misc_feature 1..80: note = Artificially Synthesized Probe
  source 1..80: mol_type = other DNA
ttcctgttgcatgatgcatccatgcagtaataaaatggacatccttaaagcagataacaaaatccaactcatcattttgt

SEQ ID NO: 111981 - DNA, 80 bp, synthetic construct
  misc_feature 1..80: note = Artificially Synthesized Probe
  source 1..80: mol_type = other DNA
tctgggcaaattaccagtaaacaatccaatgttgttactacatacagtcctcacgctgtgcattaggcccctgggctcac

SEQ ID NO: 111982 - DNA, 80 bp, synthetic construct
  misc_feature 1..80: note = Artificially Synthesized Probe
  source 1..80: mol_type = other DNA
ctttctgtgcctggcttatttcacttacttcacactatttacaacatcatgtcctccaggttcatccatgttttgaaaat

SEQ ID NO: 111983 - DNA, 80 bp, synthetic construct
  misc_feature 1..80: note = Artificially Synthesized Probe
  source 1..80: mol_type = other DNA
aatgagcatcagggtgcagacacctcttctgcccatttaatttcttctggatctataaccaaaagaggcgttgatggtag

SEQ ID NO: 111984 - DNA, 80 bp, synthetic construct
  misc_feature 1..80: note = Artificially Synthesized Probe
  source 1..80: mol_type = other DNA
tgaaaccccatctctactaaaaatataaaaattagctaggcatggtggcacatgtctgtaatcccagctactcgggaggc

SEQ ID NO: 111985 - DNA, 80 bp, synthetic construct
  misc_feature 1..80: note = Artificially Synthesized Probe
  source 1..80: mol_type = other DNA
ccattctcacaggtgtgagagggtaagtcactggggctctgatgtgcgtttccaatgattagtgatgctcagcacctttc

SEQ ID NO: 111986 - DNA, 80 bp, synthetic construct
  misc_feature 1..80: note = Artificially Synthesized Probe
  source 1..80: mol_type = other DNA
tatattttagatattaacaccttatagatctatggtttttcaacattttctcccgccctgtaggctgccttttcattttg

SEQ ID NO: 111987 - DNA, 80 bp, synthetic construct
  misc_feature 1..80: note = Artificially Synthesized Probe
  source 1..80: mol_type = other DNA
ttttcaaagtcctgttagaaaaacactgtaagaggacagattccttgcctctaatagaggcactgggacatgatcacaga

SEQ ID NO: 111988 - DNA, 80 bp, synthetic construct
  misc_feature 1..80: note = Artificially Synthesized Probe
  source 1..80: mol_type = other DNA
cttgtgtttgggtctttaaccaattttgggcagatttttgagaacggtgtaaggtaaggtcccatttcattcttttgagt

SEQ ID NO: 111989 - DNA, 80 bp, synthetic construct
  misc_feature 1..80: note = Artificially Synthesized Probe
  source 1..80: mol_type = other DNA
tcatccttttacatggcgtgtgtttaagtcactggccaaaacttgggtaattctgctgccaaagacctgggagcccccgg

SEQ ID NO: 111990 - DNA, 80 bp, synthetic construct
  misc_feature 1..80: note = Artificially Synthesized Probe
  source 1..80: mol_type = other DNA
aaaatctcccgtaaattataactcacactgcatgtataagcaaaaattgtggcatttttacagtcttcctacatcttcag

SEQ ID NO: 111991 - DNA, 80 bp, synthetic construct
  misc_feature 1..80: note = Artificially Synthesized Probe
  source 1..80: mol_type = other DNA
tgtttttgctaacaaaccatagaagtaataatgaggaaactgaattccctcaccgcacctttggctttgttacacaaagc

SEQ ID NO: 111992 - DNA, 80 bp, synthetic construct
  misc_feature 1..80: note = Artificially Synthesized Probe
  source 1..80: mol_type = other DNA
tgacattctgattcactggcgccagtttatgtctgggcatcactatttttcaaagcttccaggtgtttccaggtgttacc

SEQ ID NO: 111993 - DNA, 80 bp, synthetic construct
  misc_feature 1..80: note = Artificially Synthesized Probe
  source 1..80: mol_type = other DNA
ctctattgtgcatacaggcatgcacaccccccacccacacacactcccggtggagcaacagcgtgcacacccacgcacac

SEQ ID NO: 111994 - DNA, 80 bp, synthetic construct
  misc_feature 1..80: note = Artificially Synthesized Probe
  source 1..80: mol_type = other DNA
acacccatgcacactcccggtggatcaacactatgcacacccacacacactccgggtggatcaacactatgcacacccac

SEQ ID NO: 111995 - DNA, 80 bp, synthetic construct
  misc_feature 1..80: note = Artificially Synthesized Probe
  source 1..80: mol_type = other DNA
catttgaggtcaggagtttgagaccagcctggccaacatggtgaaatcctgtctctactaaaatacaaaaatgagccagt

SEQ ID NO: 111996 - DNA, 80 bp, synthetic construct
  misc_feature 1..80: note = Artificially Synthesized Probe
  source 1..80: mol_type = other DNA
aacaacactagtccacaatgaacacaccaaaaaaatgtgtaaagtgtgggtctagttcttttgcatctttttaaagaaag

SEQ ID NO: 111997 - DNA, 80 bp, synthetic construct
  misc_feature 1..80: note = Artificially Synthesized Probe
  source 1..80: mol_type = other DNA
aagatgctcctcaatcattaaaaacaccaaagagcatctgttcgtgccccagcaagtgagagagaaaacctggccaaaaa

SEQ ID NO: 111998 - DNA, 80 bp, synthetic construct
  misc_feature 1..80: note = Artificially Synthesized Probe
  source 1..80: mol_type = other DNA
ggatttgtcctagtgcatcataaaagaattgggagctgggatttgtcctattgcatcataacgggctgttgccataacag

SEQ ID NO: 111999 - DNA, 80 bp, synthetic construct
  misc_feature 1..80: note = Artificially Synthesized Probe
  source 1..80: mol_type = other DNA
agtccagagttgtaagaaatcacactgacaaaggagttcttacacaatgcccaggtgacctgcagggtacttcctggagt

SEQ ID NO: 112000 - DNA, 80 bp, synthetic construct
  misc_feature 1..80: note = Artificially Synthesized Probe
  source 1..80: mol_type = other DNA
ggatctgtcctagtgcatcacaacgggctgccatcataacagggcctgacatggtggaaaatcgtcaagtagaaataaaa

SEQ ID NO: 112001 - DNA, 80 bp, synthetic construct
  misc_feature 1..80: note = Artificially Synthesized Probe
  source 1..80: mol_type = other DNA
ttgactgttagagagacaacaatacattttcctagtgacttgtgggataaaccgcttgttgcttgtttttattttttaca

SEQ ID NO: 112002 - DNA, 80 bp, synthetic construct
  misc_feature 1..80: note = Artificially Synthesized Probe
  source 1..80: mol_type = other DNA
atgctcacagcagccaaatgctgggaacaacctgtgtgggtacaagcaagacgtggtgtgtccctcgacggagcacgact

SEQ ID NO: 112003 - DNA, 80 bp, synthetic construct
  misc_feature 1..80: note = Artificially Synthesized Probe
  source 1..80: mol_type = other DNA
cttgaccagtcttcaaaaaattaaaaaggaacaaatgtatacagtgggaggtgaggcaagagggggtcggagcattcacc

SEQ ID NO: 112004 - DNA, 80 bp, synthetic construct
  misc_feature 1..80: note = Artificially Synthesized Probe
  source 1..80: mol_type = other DNA
tcagctcactgcaaactctgcctccaaggttcaagcgattctcctgcctcaacctcccaagtagctgggattacgtgcgt

SEQ ID NO: 112005 - DNA, 80 bp, synthetic construct
  misc_feature 1..80: note = Artificially Synthesized Probe
  source 1..80: mol_type = other DNA
aattgcactcctgtccaacctcacagtgctcttttaattggtgagaagctgagcaaagcttcctcctctctgaaggacaa

SEQ ID NO: 112006 - DNA, 80 bp, synthetic construct
  misc_feature 1..80: note = Artificially Synthesized Probe
  source 1..80: mol_type = other DNA
agcactgctggtctccagtctctgggatttcttctaattctgaggacaagtttaaaaccttactaatggctgggcgcagt

SEQ ID NO: 112007 - DNA, 80 bp, synthetic construct
  misc_feature 1..80: note = Artificially Synthesized Probe
  source 1..80: mol_type = other DNA
gggaggctgaggcaggagaatcgcttgaacccgggagtcagaagttgtggcgagctgagattgcgccactgcactccagc

SEQ ID NO: 112008 - DNA, 80 bp, synthetic construct
  misc_feature 1..80: note = Artificially Synthesized Probe
  source 1..80: mol_type = other DNA
tctgacaattggcgggcgccccggccccagggcccctctcaggctgggtgcgtgtctgttgcccgttctgtcggctgaga

SEQ ID NO: 112009 - DNA, 80 bp, synthetic construct
  misc_feature 1..80: note = Artificially Synthesized Probe
  source 1..80: mol_type = other DNA
ggcatttcatgtaatgcaattattcttccctgcaacattcatctgaccaatacgtgaccatttcctctcttttgccagca

SEQ ID NO: 112010 - DNA, 80 bp, synthetic construct
  misc_feature 1..80: note = Artificially Synthesized Probe
  source 1..80: mol_type = other DNA
tgataaagacttaacaacaaaaaccccaatggaagatgttaatagtgaacacattgtgttctagaaatgttctaattaat

SEQ ID NO: 112011 - DNA, 80 bp, synthetic construct
  misc_feature 1..80: note = Artificially Synthesized Probe
  source 1..80: mol_type = other DNA
gatcagtgtggttccagatcagattctgcctgtgtgtcacccacatttaacactaagggaccaagtttgtcatctgttaa

SEQ ID NO: 112012 - DNA, 80 bp, synthetic construct
  misc_feature 1..80: note = Artificially Synthesized Probe
  source 1..80: mol_type = other DNA
catttcagtcacaagagcaggtgctgggtgttattccagctcaagaatatctcaaagcacccaggcctggaatagagaga

SEQ ID NO: 112013 - DNA, 80 bp, synthetic construct
  misc_feature 1..80: note = Artificially Synthesized Probe
  source 1..80: mol_type = other DNA
agaatgattagacggcgcctctaaaataacaaggccgttgcatgcaagggcccgagagctggccgtccacatttcctccc

SEQ ID NO: 112014 - DNA, 80 bp, synthetic construct
  misc_feature 1..80: note = Artificially Synthesized Probe
  source 1..80: mol_type = other DNA
aggcctgaaattagttatgggttttacccacgcaccgaaagacatgtgtttgttgtatgcataatctttagaatccacgt

SEQ ID NO: 112015 - DNA, 80 bp, synthetic construct
  misc_feature 1..80: note = Artificially Synthesized Probe
  source 1..80: mol_type = other DNA
aatgaaccaaaattaaatcaggatttggcagatttctctaaacactgcagccactcagagtcctgctaaggagaaagagc

SEQ ID NO: 112016 - DNA, 80 bp, synthetic construct
  misc_feature 1..80: note = Artificially Synthesized Probe
  source 1..80: mol_type = other DNA
gtgcaccctgattgagaagcctgcgtatcagagacctccaagtgccggctcgcctctccctcgtccataatttagtgaca

SEQ ID NO: 112017 - DNA, 80 bp, synthetic construct
  misc_feature 1..80: note = Artificially Synthesized Probe
  source 1..80: mol_type = other DNA
caaacttgacctcagctttgaaaaccacacagccatccaactgtctaacagtcaaccatgatagattggggggaaaaaaa

SEQ ID NO: 112018 - DNA, 80 bp, synthetic construct
  misc_feature 1..80: note = Artificially Synthesized Probe
  source 1..80: mol_type = other DNA
ctttcacacaggcccatgacaacccttcatggtaaaagcaaaaaaaaaatccctttctcctacgtcagtgacatttctag

SEQ ID NO: 112019 - DNA, 80 bp, synthetic construct
  misc_feature 1..80: note = Artificially Synthesized Probe
  source 1..80: mol_type = other DNA
aacccaagaggcacagcgaactctacaggactccacattcaaaacttgctccttcatcaaaaagcggagtaaaccgggag

SEQ ID NO: 112020 - DNA, 80 bp, synthetic construct
  misc_feature 1..80: note = Artificially Synthesized Probe
  source 1..80: mol_type = other DNA
tatcctctcaaatctctgaaatttaagggtttagaaagttaatttgataaatgggaaagtcaacccagcagataaaaggg

SEQ ID NO: 112021 - DNA, 80 bp, synthetic construct
  misc_feature 1..80: note = Artificially Synthesized Probe
  source 1..80: mol_type = other DNA
ggcgggtgcccgtctgagagggacccttttcccaaggtcagctaagaggcgggtgcccatctgagagggaccctcttccc

SEQ ID NO: 112022 - DNA, 80 bp, synthetic construct
  misc_feature 1..80: note = Artificially Synthesized Probe
  source 1..80: mol_type = other DNA
tgcagaaagactaagaaagaagctgtttaataatggggatgatgacagaggcatcactttgtatttcaggctgtcattct

SEQ ID NO: 112023 - DNA, 80 bp, synthetic construct
  misc_feature 1..80: note = Artificially Synthesized Probe
  source 1..80: mol_type = other DNA
ctgcagacatgggcatcctggacagctgaaaacagggcaatgatgcaaactggcatttgcgcctcctggtgccccacgga

SEQ ID NO: 112024 - DNA, 80 bp, synthetic construct
  misc_feature 1..80: note = Artificially Synthesized Probe
  source 1..80: mol_type = other DNA
gtggcaggcgggagggctcaggacccgaaaagcaacaagctcccagaggagcagcctgtggatgccaccaacgagcacag

SEQ ID NO: 112025 - DNA, 80 bp, synthetic construct
  misc_feature 1..80: note = Artificially Synthesized Probe
  source 1..80: mol_type = other DNA
gattcaggcacccccggccactctcccagcgagaccatgaagatgaggatgctggagaaaggtgaccttgtgcacgcttc

SEQ ID NO: 112026 - DNA, 80 bp, synthetic construct
  misc_feature 1..80: note = Artificially Synthesized Probe
  source 1..80: mol_type = other DNA
ttttaggacatgcccctgctgggctcactctccagcttccttgaatcctacctcccctctcaggcctgtggggtcaagca

SEQ ID NO: 112027 - DNA, 80 bp, synthetic construct
  misc_feature 1..80: note = Artificially Synthesized Probe
  source 1..80: mol_type = other DNA
tcattaaggcagtctcacggggaagaagtttgggagtcagatattagaacttcattgtgcagaaacacaaaacccagagt

SEQ ID NO: 112028 - DNA, 80 bp, synthetic construct
  misc_feature 1..80: note = Artificially Synthesized Probe
  source 1..80: mol_type = other DNA
gagtgcaaaggcttaatcactgcaacctcctcttcctgggctcaagtgatcctcccacctcagcctcccgagtagctgag

SEQ ID NO: 112029 - DNA, 80 bp, synthetic construct
  misc_feature 1..80: note = Artificially Synthesized Probe
  source 1..80: mol_type = other DNA
gtcccactgttaatttagaaccagacacatcgtttctccactatttatgactttagttacaaagccacaccagatagcac

SEQ ID NO: 112030 - DNA, 80 bp, synthetic construct
  misc_feature 1..80: note = Artificially Synthesized Probe
  source 1..80: mol_type = other DNA
agacgccgctcgggagggagaggagagagaggggccccagcaggcaccctcaccctgtctgtgccgccaaggggcctgag

SEQ ID NO: 112031 - DNA, 80 bp, synthetic construct
  misc_feature 1..80: note = Artificially Synthesized Probe
  source 1..80: mol_type = other DNA
tctggttctgttcctcccgcttctccttcctcccagcaaacttctgaggagagaaaagtctggaaagtttgaggagcgaa

SEQ ID NO: 112032 - DNA, 80 bp, synthetic construct
  misc_feature 1..80: note = Artificially Synthesized Probe
  source 1..80: mol_type = other DNA
agcttcacatagttcaattcagtcattcgtttccatctccttttaggttttattcattggaatttgggagtgcaatgaga

SEQ ID NO: 112033 - DNA, 80 bp, synthetic construct
  misc_feature 1..80: note = Artificially Synthesized Probe
  source 1..80: mol_type = other DNA
tgtacagctattaatatttaaatttagggcaaaagaggtctgcttggcattctaagtgaaatgtgaatgcctcatctggt

SEQ ID NO: 112034 - DNA, 80 bp, synthetic construct
  misc_feature 1..80: note = Artificially Synthesized Probe
  source 1..80: mol_type = other DNA
ttagaccatttcagggccctggctgctagattttcttcattaagcacatatcatgcagtcctgtctgacattttaacacg

SEQ ID NO: 112035 - DNA, 80 bp, synthetic construct
  misc_feature 1..80: note = Artificially Synthesized Probe
  source 1..80: mol_type = other DNA
tgattttaattgacacacctgaaagagaaaagtgggtaatactgtaatggccaacatcttcccttttcataaaatcagac

SEQ ID NO: 112036 - DNA, 80 bp, synthetic construct
  misc_feature 1..80: note = Artificially Synthesized Probe
  source 1..80: mol_type = other DNA
atagtgtatgcttcctgtaagttcaagaaatccatgtctatttccaaggcagcatcacccacccctcaccccaggttttc

SEQ ID NO: 112037 - DNA, 80 bp, synthetic construct
  misc_feature 1..80: note = Artificially Synthesized Probe
  source 1..80: mol_type = other DNA
acatccacccttggccaggaaagagggaggcacctgaagacagagaaggggagagagcgctggtcagcggagcagggaca

SEQ ID NO: 112038 - DNA, 80 bp, synthetic construct
  misc_feature 1..80: note = Artificially Synthesized Probe
  source 1..80: mol_type = other DNA
gcttgaatgaagaaggctcagcccatgactgctacgtctggtccccaggacccaaactgtccagaaatcagccagcactc

SEQ ID NO: 112039 - DNA, 80 bp, synthetic construct
  misc_feature 1..80: note = Artificially Synthesized Probe
  source 1..80: mol_type = other DNA
agtgggaaaggaaggctcagcacgtcggtaacgaatgaggaggcagaggcccgctctgcgtctcaaagaacgggtgggat

SEQ ID NO: 112040 - DNA, 80 bp, synthetic construct
  misc_feature 1..80: note = Artificially Synthesized Probe
  source 1..80: mol_type = other DNA
aaagagggagccactgaaggtttcatatcaggatgactgtggggggcagacgagaaacacaacttataaaagtgggctct

SEQ ID NO: 112041 - DNA, 80 bp, synthetic construct
  misc_feature 1..80: note = Artificially Synthesized Probe
  source 1..80: mol_type = other DNA
cagaagcagaggtgaaagtggccccacaggacatgaaaacacgtgtcaccgcgacagtcactggggaaacacacatctaa

SEQ ID NO: 112042 - DNA, 80 bp, synthetic construct
  misc_feature 1..80: note = Artificially Synthesized Probe
  source 1..80: mol_type = other DNA
atgacctaggttcgggagcacagtagttagctggccaaagaccctgtcctcatgtggctcatttctttagtttcttttct

SEQ ID NO: 112043 - DNA, 80 bp, synthetic construct
  misc_feature 1..80: note = Artificially Synthesized Probe
  source 1..80: mol_type = other DNA
ggcctagaacaagtcaccgaactcttctgaattccaatttcctcaccctaaggctgtgaatggggctcatgttactcaat

SEQ ID NO: 112044 - DNA, 80 bp, synthetic construct
  misc_feature 1..80: note = Artificially Synthesized Probe
  source 1..80: mol_type = other DNA
ctaaagccttcttgaagtctggaggaagcagagtgaacgcttccgttggatgagctcagaactttttttcctctccattt

SEQ ID NO: 112045 - DNA, 80 bp, synthetic construct
  misc_feature 1..80: note = Artificially Synthesized Probe
  source 1..80: mol_type = other DNA
gaataataacttttgacacctgggaggctgcggaaaagcacaatgggtttgaaaaacagatgaggtagcaactgagagat

SEQ ID NO: 112046 - DNA, 80 bp, synthetic construct
  misc_feature 1..80: note = Artificially Synthesized Probe
  source 1..80: mol_type = other DNA
ccctccagtgcccgaaggctgattctcggagagctcacagggtactacggggtggcgggcgcaagccagctctgcggcgc

SEQ ID NO: 112047 - DNA, 80 bp, synthetic construct
  misc_feature 1..80: note = Artificially Synthesized Probe
  source 1..80: mol_type = other DNA
atttcccaattgggattctagattccaagaaggtagggtctggcaactgtttctgcagcacaaattgaattcactgcttg

SEQ ID NO: 112048 - DNA, 80 bp, synthetic construct
  misc_feature 1..80: note = Artificially Synthesized Probe
  source 1..80: mol_type = other DNA
tctctgtgctaccttttggtaatttccacagtgttggatccctgagctgtgatccgtgatctttggtgttactgtcattg

SEQ ID NO: 112049 - DNA, 80 bp, synthetic construct
  misc_feature 1..80: note = Artificially Synthesized Probe
  source 1..80: mol_type = other DNA
ttagcaaccctacagtggcctctaagtgttcatgtgaaagaaagagccgcacctctctcactttaaatcagaagctagaa

SEQ ID NO: 112050 - DNA, 80 bp, synthetic construct
  misc_feature 1..80: note = Artificially Synthesized Probe
  source 1..80: mol_type = other DNA
tgctcatattgagaaagtctgagtggtctggatagaccaagccagccacaatattcccttaagccagagcctaatccaga

SEQ ID NO: 112051 - DNA, 80 bp, synthetic construct
  misc_feature 1..80: note = Artificially Synthesized Probe
  source 1..80: mol_type = other DNA
ctgcagcaagctctccagaagatctggctgagatcagtgacgaaggtggctgctctaacaacagattttcaatgtagatg

SEQ ID NO: 112052 - DNA, 80 bp, synthetic construct
  misc_feature 1..80: note = Artificially Synthesized Probe
  source 1..80: mol_type = other DNA
ctcccaagtagctaggactacaggtgcaaaccatcatacgaaaacgaaatttttgtatttttagtagagacagggtttta

SEQ ID NO: 112053 - DNA, 80 bp, synthetic construct
  misc_feature 1..80: note = Artificially Synthesized Probe
  source 1..80: mol_type = other DNA
cttaagaatcatgctaaatctatggctgcctgtgctctgtcactggaacaaagctggatgacagcacatctgtttacagc

SEQ ID NO: 112054 - DNA, 80 bp, synthetic construct
  misc_feature 1..80: note = Artificially Synthesized Probe
  source 1..80: mol_type = other DNA
ccattctgcagcccagggatcaaaaaataatttccatttcaagacatatatacaaatattttgaggtagagtcttgctct

SEQ ID NO: 112055 - DNA, 80 bp, synthetic construct
  misc_feature 1..80: note = Artificially Synthesized Probe
  source 1..80: mol_type = other DNA
gcccggctaatttttgtatttttagtagagacagggtttcaccatcttggccaggctggtcttgaactcctgaccttgtg

SEQ ID NO: 112056 - DNA, 80 bp, synthetic construct
  misc_feature 1..80: note = Artificially Synthesized Probe
  source 1..80: mol_type = other DNA
tctgactgatctgggtaaagtaaattgaaaacctcctggaaaaaattcaccgttctagatgccattgagaacacttgcga

SEQ ID NO: 112057 - DNA, 80 bp, synthetic construct
  misc_feature 1..80: note = Artificially Synthesized Probe
  source 1..80: mol_type = other DNA
gatgtgaccaaattgccacaatctcatgataaaactttaacaggtgaggagttgcttcctagggacgagcaaagaaagtg

SEQ ID NO: 112058 - DNA, 80 bp, synthetic construct
  misc_feature 1..80: note = Artificially Synthesized Probe
  source 1..80: mol_type = other DNA
gctaccaaacagcattgcgttctgcaaagaaatctttcatgaaggaagagtcaactgatgcagtcaattttatttgtctt

SEQ ID NO: 112059 - DNA, 80 bp, synthetic construct
  misc_feature 1..80: note = Artificially Synthesized Probe
  source 1..80: mol_type = other DNA
gaaggcctgtacattgttttttagacatagtgctattacacacttaatagaccacagcctagtaaaatgtaacttttata

SEQ ID NO: 112060 - DNA, 80 bp, synthetic construct
  misc_feature 1..80: note = Artificially Synthesized Probe
  source 1..80: mol_type = other DNA
cttgggcaatttctgaagcacacttttgggaattgatatgcaatgtttatatagactggattcagaacacgctacctcaa

SEQ ID NO: 112061 - DNA, 80 bp, synthetic construct
  misc_feature 1..80: note = Artificially Synthesized Probe
  source 1..80: mol_type = other DNA
gctagaagactccagacaggccttgctgagcccttcagcctatgacatcagagcacgccctttgccctccgatcacactt

SEQ ID NO: 112062 - DNA, 80 bp, synthetic construct
  misc_feature 1..80: note = Artificially Synthesized Probe
  source 1..80: mol_type = other DNA
ggagggcagaccatctgcaagtagataaacacagctttaaaaagtgatttcagacaacagtgagtagtaagaagatgcgg

SEQ ID NO: 112063 - DNA, 80 bp, synthetic construct
  misc_feature 1..80: note = Artificially Synthesized Probe
  source 1..80: mol_type = other DNA
cagcaagcatgagggattttgggtgctcaaggatgctgtgccctgggggcctccacaaagcgcaggccccggagaggccg

SEQ ID NO: 112064 - DNA, 80 bp, synthetic construct
  misc_feature 1..80: note = Artificially Synthesized Probe
  source 1..80: mol_type = other DNA
gagaaattactttttccccactatggtatataaatcttttatttgagggctatgggggtgtctcttgtgccatgaaagca

SEQ ID NO: 112065 - DNA, 80 bp, synthetic construct
  misc_feature 1..80: note = Artificially Synthesized Probe
  source 1..80: mol_type = other DNA
acactctggatttgaatattctaaagtcttccactttggggacaacgctagtgcttttagtacctaagttgcaatgggag

SEQ ID NO: 112066 - DNA, 80 bp, synthetic construct
  misc_feature 1..80: note = Artificially Synthesized Probe
  source 1..80: mol_type = other DNA
ttattaaagaaatgcaattctctggctatatccttcactatgcttacctccttgcctaactgtatcctcagttctttttt

SEQ ID NO: 112067 - DNA, 80 bp, synthetic construct
  misc_feature 1..80: note = Artificially Synthesized Probe
  source 1..80: mol_type = other DNA
tagcctgggaaacatagtgagactccatcactgcaaaaaaaaaattttttttaaatagccaggcatgatggtgtgtgctt

SEQ ID NO: 112068 - DNA, 80 bp, synthetic construct
  misc_feature 1..80: note = Artificially Synthesized Probe
  source 1..80: mol_type = other DNA
cttaaaaaaaacaaaaaactgtaagagtcaacggttttctgaatgttcagagttccgtgaccacctcaccgtccacctca

SEQ ID NO: 112069 - DNA, 80 bp, synthetic construct
  misc_feature 1..80: note = Artificially Synthesized Probe
  source 1..80: mol_type = other DNA
tggacttatttacttatttatttacttatttatttatttagagacagagtctcactctgttgctcagactggagtgcaat

SEQ ID NO: 112070 - DNA, 80 bp, synthetic construct
  misc_feature 1..80: note = Artificially Synthesized Probe
  source 1..80: mol_type = other DNA
gtgaactcctgatctcaagtgatctgcccgcctcggcctcctgaagtgctgggattacagggtgagcctccgccctggcc

SEQ ID NO: 112071 - DNA, 80 bp, synthetic construct
  misc_feature 1..80: note = Artificially Synthesized Probe
  source 1..80: mol_type = other DNA
tcggttcctggtggttttctgccctcttcagtggagaaagggcttggaatagaagaagctgcagttggagacgtgaaggc

SEQ ID NO: 112072 - DNA, 80 bp, synthetic construct
  misc_feature 1..80: note = Artificially Synthesized Probe
  source 1..80: mol_type = other DNA
cagacaccctgcaacggcccgcaggcccgtgtcacctgggccaccgagcgcagggcttgtgggtcgtcacagcataattc

SEQ ID NO: 112073 - DNA, 80 bp, synthetic construct
  misc_feature 1..80: note = Artificially Synthesized Probe
  source 1..80: mol_type = other DNA
cctggacgtccgggatttccgcccctgggctccagcgctatggtgtggtcgtcctgacgcactcttagaagctcggccac

SEQ ID NO: 112074 - DNA, 80 bp, synthetic construct
  misc_feature 1..80: note = Artificially Synthesized Probe
  source 1..80: mol_type = other DNA
gcagtgaaggctggagcccagggcaggagggcgtggccactccgggaggagggaaggtcggggctgcagagaaggaatgg

SEQ ID NO: 112075 - DNA, 80 bp, synthetic construct
  misc_feature 1..80: note = Artificially Synthesized Probe
  source 1..80: mol_type = other DNA
gctcggccacccctctctgcgcccctcctgctcggccacccctctctgcgcccctcctgctcggccacccctctctgcgc

SEQ ID NO: 112076 - DNA, 80 bp, synthetic construct
  misc_feature 1..80: note = Artificially Synthesized Probe
  source 1..80: mol_type = other DNA
ctccttcccacctctcttgtccttttagcaggaacatgctcacgtgaaaaactggaaaaccagagaaatatgaagaaaat

SEQ ID NO: 112077 - DNA, 80 bp, synthetic construct
  misc_feature 1..80: note = Artificially Synthesized Probe
  source 1..80: mol_type = other DNA
cggctgtcatcgtattagatgctcagttttggatcctgagtttttcatttactttctcccacctgcattttccgacgtta

SEQ ID NO: 112078 - DNA, 80 bp, synthetic construct
  misc_feature 1..80: note = Artificially Synthesized Probe
  source 1..80: mol_type = other DNA
ttcaagttttctttagtattttgggtaatggattattttattggggcatattctcacacatcagattgccgggtcacggg

SEQ ID NO: 112079 - DNA, 80 bp, synthetic construct
  misc_feature 1..80: note = Artificially Synthesized Probe
  source 1..80: mol_type = other DNA
gtggagtagttgattattatgcctttagaatgtttaggacataccacctgtgtttggatgtgtcccatttaaagttatca

SEQ ID NO: 112080 - DNA, 80 bp, synthetic construct
  misc_feature 1..80: note = Artificially Synthesized Probe
  source 1..80: mol_type = other DNA
tctataataaccaaagttactccagagttatgaattaccaaggaattgacccccagggtcactttaaagtttccaatcac

SEQ ID NO: 112081 - DNA, 80 bp, synthetic construct
  misc_feature 1..80: note = Artificially Synthesized Probe
  source 1..80: mol_type = other DNA
cagttcggtggtgttaattacattcacactgttgatcagtcatcaccaccgtctattcccagaactcttccatcgtccca

SEQ ID NO: 112082 - DNA, 80 bp, synthetic construct
  misc_feature 1..80: note = Artificially Synthesized Probe
  source 1..80: mol_type = other DNA
cataacagcctcaagctccccccatgtttcagcgagtgtcagcactcacttcctcttcaaggctgcgtactattccatca

SEQ ID NO: 112083 - DNA, 80 bp, synthetic construct
  misc_feature 1..80: note = Artificially Synthesized Probe
  source 1..80: mol_type = other DNA
ctgcttcctgtgttatggggtacgtacccagaagtggggttgctgaggcaaattaaaaactctatttttaattttttagg

SEQ ID NO: 112084 - DNA, 80 bp, synthetic construct
  misc_feature 1..80: note = Artificially Synthesized Probe
  source 1..80: mol_type = other DNA
tttctttttattaataacctctgttgggcttttaaaaaacatatccaagcttgataagattatatattcctacacgtacc

SEQ ID NO: 112085 - DNA, 80 bp, synthetic construct
  misc_feature 1..80: note = Artificially Synthesized Probe
  source 1..80: mol_type = other DNA
aaccataaatctgagccagcacaggaaccacttctcctatcgctccccgtcagcctcgcaaagcgcagttttctaagact

SEQ ID NO: 112086 - DNA, 80 bp, synthetic construct
  misc_feature 1..80: note = Artificially Synthesized Probe
  source 1..80: mol_type = other DNA
tggcagtgcaggatgcaagtcaggactgctgcagcccaccatggaagagcaggcagtggctgtggcatggggaacagcgc

SEQ ID NO: 112087 - DNA, 80 bp, synthetic construct
  misc_feature 1..80: note = Artificially Synthesized Probe
  source 1..80: mol_type = other DNA
cctttccaaggaatccacagtcattatctggatatgatgttgagacgactctatgtctgggaggcaagtcaaggttgagg

SEQ ID NO: 112088 - DNA, 80 bp, synthetic construct
  misc_feature 1..80: note = Artificially Synthesized Probe
  source 1..80: mol_type = other DNA
cacacacctgcttccattatcatcaaaagctgttgagtccaggcagacgacgtaggattttcaatatcgctatttttctt

SEQ ID NO: 112089 - DNA, 80 bp, synthetic construct
  misc_feature 1..80: note = Artificially Synthesized Probe
  source 1..80: mol_type = other DNA
tgtcacactcggcacaggaatctcccgaaagaagagaaaacagcagaagctgccgccgctgaggacctgctctcctcttg

SEQ ID NO: 112090 - DNA, 80 bp, synthetic construct
  misc_feature 1..80: note = Artificially Synthesized Probe
  source 1..80: mol_type = other DNA
ctcggctccccctggatgcaccagtgcaggggaggcctgtcctgaaaggccccaggagggcggcaccccaggccagcgcc

SEQ ID NO: 112091 - DNA, 80 bp, synthetic construct
  misc_feature 1..80: note = Artificially Synthesized Probe
  source 1..80: mol_type = other DNA
cgctcagtgcgccccgggcccacacgcagcccctgacttggagaaaggcggctccgcccagcgcttttctgaggatactg

SEQ ID NO: 112092 - DNA, 80 bp, synthetic construct
  misc_feature 1..80: note = Artificially Synthesized Probe
  source 1..80: mol_type = other DNA
gtcctcatgggctttcagcccaacctgaaaacacagcgtttgcactgttttcttatccgcctgataagagaggaaaatca

SEQ ID NO: 112093 - DNA, 80 bp, synthetic construct
  misc_feature 1..80: note = Artificially Synthesized Probe
  source 1..80: mol_type = other DNA
gccgggtgcagtggcgcacgcctgtaatcccagctactcaggaggctgaggcaggagaatcgcttgagcccaggaggcga

SEQ ID NO: 112094 - DNA, 80 bp, synthetic construct
  misc_feature 1..80: note = Artificially Synthesized Probe
  source 1..80: mol_type = other DNA
aacccgggcaacctcttctccccacccaccgaggccgcagcccatggctccggggttccatccgcctcctctcggcagcg

SEQ ID NO: 112095 - DNA, 80 bp, synthetic construct
  misc_feature 1..80: note = Artificially Synthesized Probe
  source 1..80: mol_type = other DNA
gcagcctgcggggaaacagagaagagacgcggtcagctggaggggaggaggggggtgcccccgaggctgccttcctggcc

SEQ ID NO: 112096 - DNA, 80 bp, synthetic construct
  misc_feature 1..80: note = Artificially Synthesized Probe
  source 1..80: mol_type = other DNA
ggcccacagctctgggctgagggtcaagccggcgtcatcacaggagactctctggccgcgggagcagcagcggggccggg

SEQ ID NO: 112097 - DNA, 80 bp, synthetic construct
  misc_feature 1..80: note = Artificially Synthesized Probe
  source 1..80: mol_type = other DNA
cgtggcgtccgtggccacagacaagagacgcaggagagggtcgggagaggaaaggaggcagcggaggcagcagagacgaa

SEQ ID NO: 112098 - DNA, 80 bp, synthetic construct
  misc_feature 1..80: note = Artificially Synthesized Probe
  source 1..80: mol_type = other DNA
tgtttaaactcttcacccctcacagaaccacagcaaggaaagaccctaatgatttgatctgagaagcaaggtcataccta

SEQ ID NO: 112099 - DNA, 80 bp, synthetic construct
  misc_feature 1..80: note = Artificially Synthesized Probe
  source 1..80: mol_type = other DNA
gcaaaggttggcgttcggctccacgtccacgcctgtcttaaacacagagagatgggtccagaaagcaccaccccgctagg

SEQ ID NO: 112100 - DNA, 80 bp, synthetic construct
  misc_feature 1..80: note = Artificially Synthesized Probe
  source 1..80: mol_type = other DNA
accagccgacaaacgcctgttcatccgctaagatccctgtggaagccccagactctcccggggctgcccaggcgtccttt

SEQ ID NO: 112101 - DNA, 80 bp, synthetic construct
  misc_feature 1..80: note = Artificially Synthesized Probe
  source 1..80: mol_type = other DNA
caaagaaactgaggaatctggagaaagttatgaattactgagggattcacccccagggtcacgttaaagtttccagtcac

SEQ ID NO: 112102 - DNA, 80 bp, synthetic construct
  misc_feature 1..80: note = Artificially Synthesized Probe
  source 1..80: mol_type = other DNA
cctcgctcgtctcacaacagcttcacgagccttccacagttgcagggcggcccctggctgggatctgcttcctcccagga

SEQ ID NO: 112103 - DNA, 80 bp, synthetic construct
  misc_feature 1..80: note = Artificially Synthesized Probe
  source 1..80: mol_type = other DNA
tgttttgttttgaaataacaatctcatgaaaaacagatttttttttttgatggagtcttgctcttatcacccaggctgga

SEQ ID NO: 112104 - DNA, 80 bp, synthetic construct
  misc_feature 1..80: note = Artificially Synthesized Probe
  source 1..80: mol_type = other DNA
gctggtctcgaactcctgacctcaagtgatccacctgcctcggcctcccaaagtgctgggattacaggcgtgagccaccg

SEQ ID NO: 112105 - DNA, 80 bp, synthetic construct
  misc_feature 1..80: note = Artificially Synthesized Probe
  source 1..80: mol_type = other DNA
acacctggcacttgaacagcaggaggagaggcagacaccactccccacaaaagcagtgaccttgaaaaggtcagcatgga

SEQ ID NO: 112106 - DNA, 80 bp, synthetic construct
  misc_feature 1..80: note = Artificially Synthesized Probe
  source 1..80: mol_type = other DNA
gtgctggaggttagtccgatgtcgtggaacgtccctggtcccggctctggcaggagctgcaggactctgctcaggattct

SEQ ID NO: 112107 - DNA, 80 bp, synthetic construct
  misc_feature 1..80: note = Artificially Synthesized Probe
  source 1..80: mol_type = other DNA
tcccatctctgccttaatcgtggctgacagttagatgtgatctgaatgagatgtgcatcaaatgatctcttggatcctga

SEQ ID NO: 112108 - DNA, 80 bp, synthetic construct
  misc_feature 1..80: note = Artificially Synthesized Probe
  source 1..80: mol_type = other DNA
ttcacccagccagtggatatgctaatttgactgctaagttatttgttctaaaattacgaaagagcaaatttcattttaag

SEQ ID NO: 112109 - DNA, 80 bp, synthetic construct
  misc_feature 1..80: note = Artificially Synthesized Probe
  source 1..80: mol_type = other DNA
accatagaaaattaactgcccatagctaaaccccaaatttaaaatgtaaagacaaccgaatcactaacctaacctgggac

SEQ ID NO: 112110 - DNA, 80 bp, synthetic construct
  misc_feature 1..80: note = Artificially Synthesized Probe
  source 1..80: mol_type = other DNA
tgtgtaccctgtcggctcacagactgcatacactaaggtccagatgtcattctgaggccaagaagctaaatccacaagga

SEQ ID NO: 112111 - DNA, 80 bp, synthetic construct
  misc_feature 1..80: note = Artificially Synthesized Probe
  source 1..80: mol_type = other DNA
tgctcaggggttcctcctcactctgtattcacagggtatccctcctgcttcagcacagagacaagcacatccagtcatga

SEQ ID NO: 112112 - DNA, 80 bp, synthetic construct
  misc_feature 1..80: note = Artificially Synthesized Probe
  source 1..80: mol_type = other DNA
acactcatacatgtgagcatacacctgcagacacgtacacgtatgcacacacgtacatgggtacactcatgcatgcatgc

SEQ ID NO: 112113 - DNA, 80 bp, synthetic construct
  misc_feature 1..80: note = Artificially Synthesized Probe
  source 1..80: mol_type = other DNA
atgcccattcacaggcacactcatgcctgcacacatacacacacgcacacctgcatgcatacacacatgcacacactcat

SEQ ID NO: 112114 - DNA, 80 bp, synthetic construct
  misc_feature 1..80: note = Artificially Synthesized Probe
  source 1..80: mol_type = other DNA
gcatacacctgcagacacgtacacatatgcatgcacgtacatgggtgcacgtatgcacacgtacatgggtacactcatgc

SEQ ID NO: 112115 - DNA, 80 bp, synthetic construct
  misc_feature 1..80: note = Artificially Synthesized Probe
  source 1..80: mol_type = other DNA
actcctaagagatgtttatggagagtttgttgttcattgtggaaatacagtaaatgtgaacagagcccaccacctctctc

SEQ ID NO: 112116 - DNA, 80 bp, synthetic construct
  misc_feature 1..80: note = Artificially Synthesized Probe
  source 1..80: mol_type = other DNA
caggcttctcgcctgactgccatgagggcagagaaaggctgtcatcagcagcaggatgcacacgccttctgaaatgtgtg

SEQ ID NO: 112117 - DNA, 80 bp, synthetic construct
  misc_feature 1..80: note = Artificially Synthesized Probe
  source 1..80: mol_type = other DNA
ctggccactcactaatcacccttcctgagaggggctcactgaagaccctgctttgaggctggaatgaccaaggccctggg

SEQ ID NO: 112118 - DNA, 80 bp, synthetic construct
  misc_feature 1..80: note = Artificially Synthesized Probe
  source 1..80: mol_type = other DNA
tcacctgtgtcagcaccactcacttggtacaaggaacacacacagatttcctcatctaaaaaatataacgaagcagagtg

SEQ ID NO: 112119 - DNA, 80 bp, synthetic construct
  misc_feature 1..80: note = Artificially Synthesized Probe
  source 1..80: mol_type = other DNA
gtccccctctacagccttaaaaaaaaccatgccagcaccccaggaaccccagtccctactgcctggagcaggtcctttga

SEQ ID NO: 112120 - DNA, 80 bp, synthetic construct
  misc_feature 1..80: note = Artificially Synthesized Probe
  source 1..80: mol_type = other DNA
tccagaccccccgggctccagttattaaatgactcctgcaatcatgaactgctttccaaagaacacaaaacaattctgtg

SEQ ID NO: 112121 - DNA, 80 bp, synthetic construct
  misc_feature 1..80: note = Artificially Synthesized Probe
  source 1..80: mol_type = other DNA
ggcttacgacagcctgaggctctggggttatgttaaatcacattttttcctaggaacgaacgcatcatcatagaaaagga

SEQ ID NO: 112122 - DNA, 80 bp, synthetic construct
  misc_feature 1..80: note = Artificially Synthesized Probe
  source 1..80: mol_type = other DNA
acctggcaaagcctcccttctcccttgcattctcagatgtaaatgaggatgcgccctgcccactgcagggggggtaagag

SEQ ID NO: 112123 - DNA, 80 bp, synthetic construct
  misc_feature 1..80: note = Artificially Synthesized Probe
  source 1..80: mol_type = other DNA
tttctaaatgtttccatcggatcgaaaacaacgtgttaaaccagggcggcatccaggcaggaatagaaagccatttccac

SEQ ID NO: 112124 - DNA, 80 bp, synthetic construct
  misc_feature 1..80: note = Artificially Synthesized Probe
  source 1..80: mol_type = other DNA
ccaaggctcaaatgaaagctgtgattgcaatttcaaagacaaaaggaagagggagagagggaggaggaaggctcctccca

SEQ ID NO: 112125 - DNA, 80 bp, synthetic construct
  misc_feature 1..80: note = Artificially Synthesized Probe
  source 1..80: mol_type = other DNA
agcggcctggacggaagccagcccacctccacatgagagggactgactgcttccctgaaagcccagtcccagtctgggga

SEQ ID NO: 112126 - DNA, 80 bp, synthetic construct
  misc_feature 1..80: note = Artificially Synthesized Probe
  source 1..80: mol_type = other DNA
tgtgcccccttccctgcgccccttccccacgccccttcccccttccctgcgccccccttctgagccccctccccttccct

SEQ ID NO: 112127 - DNA, 80 bp, synthetic construct
  misc_feature 1..80: note = Artificially Synthesized Probe
  source 1..80: mol_type = other DNA
ctcccccttccctgcagcatcccccttccctgcgcccctccccttccctgcgccccctccaccttccctgagccgccctc

SEQ ID NO: 112128 - DNA, 80 bp, synthetic construct
  misc_feature 1..80: note = Artificially Synthesized Probe
  source 1..80: mol_type = other DNA
gtttgagaaaaccagaatttttaagagatgaaaactgcacatctgcagtggacgtggtcacctgcctgttgtccttggac

SEQ ID NO: 112129 - DNA, 80 bp, synthetic construct
  misc_feature 1..80: note = Artificially Synthesized Probe
  source 1..80: mol_type = other DNA
ctccccttccctgcaccccttgctcttccctgcaccccctccccttccctgtgccccctccccctttcctgcaggcctcc

SEQ ID NO: 112130 - DNA, 80 bp, synthetic construct
  misc_feature 1..80: note = Artificially Synthesized Probe
  source 1..80: mol_type = other DNA
cctgcaccccctctcccttccctgcgccccctccccttccctgcgccccctcccccttccctgctccctctcctccttcc

SEQ ID NO: 112131 - DNA, 80 bp, synthetic construct
  misc_feature 1..80: note = Artificially Synthesized Probe
  source 1..80: mol_type = other DNA
agccccaccctgcccactgcacgtaggggtgggtgttgctcagtccccttcacctgccgatccagagtatggagcccccc

SEQ ID NO: 112132 - DNA, 80 bp, synthetic construct
  misc_feature 1..80: note = Artificially Synthesized Probe
  source 1..80: mol_type = other DNA
ggtagcaggaggagggataatcacccagaagattctggaaacttcagcctcaatgcctcagagagcaggaagatgggtgc

SEQ ID NO: 112133 - DNA, 80 bp, synthetic construct
  misc_feature 1..80: note = Artificially Synthesized Probe
  source 1..80: mol_type = other DNA
catgagggcctgccccctgcacagcctctgggccctgttcctgcggggacacctgtccgtcccctgtgctgggaggaggg

SEQ ID NO: 112134 - DNA, 80 bp, synthetic construct
  misc_feature 1..80: note = Artificially Synthesized Probe
  source 1..80: mol_type = other DNA
ccatacgcctggtcagtccgctccatcacaacggtgatgtgtgtgctcagcagaggctgaaatggccaaggtcctcctca

SEQ ID NO: 112135 - DNA, 80 bp, synthetic construct
  misc_feature 1..80: note = Artificially Synthesized Probe
  source 1..80: mol_type = other DNA
actccaccctggaagaagggcagcgagctgggtaccaggacaaccatcaagtcctgtcatttatttttaggaaaaacaaa

SEQ ID NO: 112136 - DNA, 80 bp, synthetic construct
  misc_feature 1..80: note = Artificially Synthesized Probe
  source 1..80: mol_type = other DNA
catgctacacattcctccttcattcgtttgaagacattaagagcagcaacctcaactatatttattctaaatggcacgtg

SEQ ID NO: 112137 - DNA, 80 bp, synthetic construct
  misc_feature 1..80: note = Artificially Synthesized Probe
  source 1..80: mol_type = other DNA
tttgaaaaagtatctgatgaaaatccttgaacattaaatactgcaggtgcaggtagccaggctatgccggggatgaaatg

SEQ ID NO: 112138 - DNA, 80 bp, synthetic construct
  misc_feature 1..80: note = Artificially Synthesized Probe
  source 1..80: mol_type = other DNA
ctaccctgctgtaaacgtgaactttagacatgtggtacttcagacacataatttaaaaggtaaacaagctttttagcagt

SEQ ID NO: 112139 - DNA, 80 bp, synthetic construct
  misc_feature 1..80: note = Artificially Synthesized Probe
  source 1..80: mol_type = other DNA
cacagcgacacgggctctaaccagccaacgccacgtatattgagtcagtgccattggttcagtgggaagaatcatgagga

SEQ ID NO: 112140 - DNA, 80 bp, synthetic construct
  misc_feature 1..80: note = Artificially Synthesized Probe
  source 1..80: mol_type = other DNA
catcatggaaacagcctctcccacactttgatgtgcatgtgaaccagctgggccctgttaaatgagtatttctattccct

SEQ ID NO: 112141 - DNA, 80 bp, synthetic construct
  misc_feature 1..80: note = Artificially Synthesized Probe
  source 1..80: mol_type = other DNA
tttaacaaactctttacaatttgttttctggatccaaattcttcatcacccggataacaaatgattggccttatacaaat

SEQ ID NO: 112142 - DNA, 80 bp, synthetic construct
  misc_feature 1..80: note = Artificially Synthesized Probe
  source 1..80: mol_type = other DNA
cttgggaggctgaagcaggagaatcacttgaacctgggaggtggaggtttcagtgagccaagaatgtgccactgcactcc

SEQ ID NO: 112143 - DNA, 80 bp, synthetic construct
  misc_feature 1..80: note = Artificially Synthesized Probe
  source 1..80: mol_type = other DNA
ctaatttttacaaatgtattaggttcagttttaagactggatgtatatttaaatatacattgtaatttaattaagattta

SEQ ID NO: 112144 - DNA, 80 bp, synthetic construct
  misc_feature 1..80: note = Artificially Synthesized Probe
  source 1..80: mol_type = other DNA
cgcattgtgggtgagaggaatctgcacttacaataatgaaaagacaaattagatccaattgttactacagtttccccttt

SEQ ID NO: 112145 - DNA, 80 bp, synthetic construct
  misc_feature 1..80: note = Artificially Synthesized Probe
  source 1..80: mol_type = other DNA
ctcttgagctcgctacatttccagtgtgctgggaattactaccgtccactgtagatacaggttaattgacacagaacaaa

SEQ ID NO: 112146 - DNA, 80 bp, synthetic construct
  misc_feature 1..80: note = Artificially Synthesized Probe
  source 1..80: mol_type = other DNA
aacatttgaaaaatgtgagttgaagtttcacacactcttctctgtggaactccgaaccttcactattccaaagggccacg

SEQ ID NO: 112147 - DNA, 80 bp, synthetic construct
  misc_feature 1..80: note = Artificially Synthesized Probe
  source 1..80: mol_type = other DNA
tcttaagcccctgcagggcctgttagaacaaagctgcggggcccagtccccgagtttctgacctaatgcgtccggagcag

SEQ ID NO: 112148 - DNA, 80 bp, synthetic construct
  misc_feature 1..80: note = Artificially Synthesized Probe
  source 1..80: mol_type = other DNA
gctcggagtccaaatgtgtgaggctcggagcactcagggcgcccttccggtaatgggaatgttatcagctttatgaagtc

SEQ ID NO: 112149 - DNA, 80 bp, synthetic construct
  misc_feature 1..80: note = Artificially Synthesized Probe
  source 1..80: mol_type = other DNA
ggatgaactcagggtacaggcacccacggaatttcattgtgggaatgtgggagtgcctcccagtttctgatcaaaggcct

SEQ ID NO: 112150 - DNA, 80 bp, synthetic construct
  misc_feature 1..80: note = Artificially Synthesized Probe
  source 1..80: mol_type = other DNA
ttatcctcagaccctctccccgcccggggctacagccaagcaaacagagcactgcccagggactccaagggtctcagagc

SEQ ID NO: 112151 - DNA, 80 bp, synthetic construct
  misc_feature 1..80: note = Artificially Synthesized Probe
  source 1..80: mol_type = other DNA
ctgaggctgaggctgccttcttgtgaatcttccaaccctgtccccagtctgggaggcagatccaagaagacagctctgtc

SEQ ID NO: 112152 - DNA, 80 bp, synthetic construct
  misc_feature 1..80: note = Artificially Synthesized Probe
  source 1..80: mol_type = other DNA
cgcgtgtttcggcagccctggattttttgaagttttatttattgaggatatgttgacccgcctggagctttcattatcga

SEQ ID NO: 112153 - DNA, 80 bp, synthetic construct
  misc_feature 1..80: note = Artificially Synthesized Probe
  source 1..80: mol_type = other DNA
cagcactgaacacaaagcctcaggagtgataaagccgtcacggagtaaaacgcaccatcctctcctcgttccgactctct

SEQ ID NO: 112154 - DNA, 80 bp, synthetic construct
  misc_feature 1..80: note = Artificially Synthesized Probe
  source 1..80: mol_type = other DNA
acacagccacgcccacttgcttacagattgcctatggccacttttgtcctataataattcaatagttgtgacagagactg

SEQ ID NO: 112155 - DNA, 80 bp, synthetic construct
  misc_feature 1..80: note = Artificially Synthesized Probe
  source 1..80: mol_type = other DNA
agcaccatcacatctggaccagccctggacacagccacccctcaggggtccatggccaccagccccacccctgctcctcg

SEQ ID NO: 112156 - DNA, 80 bp, synthetic construct
  misc_feature 1..80: note = Artificially Synthesized Probe
  source 1..80: mol_type = other DNA
acaatagaaaatagattcttttcttgtcaaattcacgctgagccacttttccctcacccccagccactgtgtccatcaac

SEQ ID NO: 112157 - DNA, 80 bp, synthetic construct
  misc_feature 1..80: note = Artificially Synthesized Probe
  source 1..80: mol_type = other DNA
cactgtgtccatcaactactgtgtccatcagccactgtgtccatcagccactgtgtccatcagccactgtgtccatcaac

SEQ ID NO: 112158 - DNA, 80 bp, synthetic construct
  misc_feature 1..80: note = Artificially Synthesized Probe
  source 1..80: mol_type = other DNA
tactgtgtccatcagccactgtgtccatatgactttcaccactggccccttgactccaggatgggactctcttctcatcc

SEQ ID NO: 112159 - DNA, 80 bp, synthetic construct
  misc_feature 1..80: note = Artificially Synthesized Probe
  source 1..80: mol_type = other DNA
acaggtccttgatgtcttcatctgactcactgaaacaagtaggaaaaaagaaagcagaagaggtggatggaaggatggca

SEQ ID NO: 112160 - DNA, 80 bp, synthetic construct
  misc_feature 1..80: note = Artificially Synthesized Probe
  source 1..80: mol_type = other DNA
ccaatatttgtcattcaccatctaaaatcaagtgaacaatcagagggggagaagggtacagatctgggacaataaaccaa

SEQ ID NO: 112161 - DNA, 80 bp, synthetic construct
  misc_feature 1..80: note = Artificially Synthesized Probe
  source 1..80: mol_type = other DNA
cctggttacgaacaaaaagttacagatattagtcatgttaccatggacaaatcactcactctgtctgcacctgttcactt

SEQ ID NO: 112162 - DNA, 80 bp, synthetic construct
  misc_feature 1..80: note = Artificially Synthesized Probe
  source 1..80: mol_type = other DNA
cgtggtggtgtgtgcctataatcccagctacttggggggccaaggcaggagaatcgcttgaacccgggagtcggaggttg

SEQ ID NO: 112163 - DNA, 80 bp, synthetic construct
  misc_feature 1..80: note = Artificially Synthesized Probe
  source 1..80: mol_type = other DNA
cctagagataaattccttgttaatattttggttttcagctacttttctttgcatatatgaaagacctggggtcatactgt

SEQ ID NO: 112164 - DNA, 80 bp, synthetic construct
  misc_feature 1..80: note = Artificially Synthesized Probe
  source 1..80: mol_type = other DNA
tgggtatttaggccagcgtccattagcaattattcctgtgctctccctgcccacccccacaacaggtgcccagtctgtgt

SEQ ID NO: 112165 - DNA, 80 bp, synthetic construct
  misc_feature 1..80: note = Artificially Synthesized Probe
  source 1..80: mol_type = other DNA
atccatgtccctgcaaaggacatgatctcactcttttctacggctgcatagtagtccatggtgtgtacgtatgtaccaca

SEQ ID NO: 112166 - DNA, 80 bp, synthetic construct
  misc_feature 1..80: note = Artificially Synthesized Probe
  source 1..80: mol_type = other DNA
taactatttctacacatgcacatcatctagctaaccaattccctcttgaagaaactttacattgtttccaatatttccca

SEQ ID NO: 112167 - DNA, 80 bp, synthetic construct
  misc_feature 1..80: note = Artificially Synthesized Probe
  source 1..80: mol_type = other DNA
agactttcaaaatatcttgccaaattgccctgtcaccaacagaatatgagtgaaccttgaaacctcagcttcttaatttg

SEQ ID NO: 112168 - DNA, 80 bp, synthetic construct
  misc_feature 1..80: note = Artificially Synthesized Probe
  source 1..80: mol_type = other DNA
ctcagggacctgcctcttttttcccactatatcactgaggcataagtctgaaccactgttagtcaaaaaaatgcataaat

SEQ ID NO: 112169 - DNA, 80 bp, synthetic construct
  misc_feature 1..80: note = Artificially Synthesized Probe
  source 1..80: mol_type = other DNA
gcgtgcagaattctctctgttggctggttcccaggccattccttctctacaaaggtgacatctaatcatgcacaatggaa

SEQ ID NO: 112170 - DNA, 80 bp, synthetic construct
  misc_feature 1..80: note = Artificially Synthesized Probe
  source 1..80: mol_type = other DNA
tattttattttcttagccttagctgttttctctggctagcttacagactctcaccccagccaggatatttggattttcta

SEQ ID NO: 112171 - DNA, 80 bp, synthetic construct
  misc_feature 1..80: note = Artificially Synthesized Probe
  source 1..80: mol_type = other DNA
catttaatttgaaagcatgtatttctgcctctgccttttggtttagaggacttcattctgccctggacagtgagaagagg

SEQ ID NO: 112172 - DNA, 80 bp, synthetic construct
  misc_feature 1..80: note = Artificially Synthesized Probe
  source 1..80: mol_type = other DNA
ggggttcaatgtggtgctaaataacatgagcccaaatagtgcctgccataagcaggcatccagtaatcccaagtggtggc

SEQ ID NO: 112173 - DNA, 80 bp, synthetic construct
  misc_feature 1..80: note = Artificially Synthesized Probe
  source 1..80: mol_type = other DNA
agagggcttgggacgtgctctggtacagggcacacaaggccggtgctgagacactgtgcagctgggagagggcgagttct

SEQ ID NO: 112174 - DNA, 80 bp, synthetic construct
  misc_feature 1..80: note = Artificially Synthesized Probe
  source 1..80: mol_type = other DNA
agcaatcatgaagaacatggccaaggctgcgggctccacagtgaggctgaggattgaacctgagtttgagcccagctttg

SEQ ID NO: 112175 - DNA, 80 bp, synthetic construct
  misc_feature 1..80: note = Artificially Synthesized Probe
  source 1..80: mol_type = other DNA
acctcccgcctagcacctactgcatctaatacccacacttcatttattttgcttaacatccgtcttctccttgaatggga

SEQ ID NO: 112176 - DNA, 80 bp, synthetic construct
  misc_feature 1..80: note = Artificially Synthesized Probe
  source 1..80: mol_type = other DNA
ctagctgtgacatgacaaggcggatgccgggggcctccgaaggcctgggtgtctcctcactcccccgcccctccgccatc

SEQ ID NO: 112177 - DNA, 80 bp, synthetic construct
  misc_feature 1..80: note = Artificially Synthesized Probe
  source 1..80: mol_type = other DNA
ggattccaacctgactagagaggccccagcatggtcagctgaggaacatcaggaggttactggggggaatgggctctgag

SEQ ID NO: 112178 - DNA, 80 bp, synthetic construct
  misc_feature 1..80: note = Artificially Synthesized Probe
  source 1..80: mol_type = other DNA
aggtgttgcaggaaacgccagtggacctttgggggcccagaagtgaccccgcccatgcaaggccggcatggacgaggccg

SEQ ID NO: 112179 - DNA, 80 bp, synthetic construct
  misc_feature 1..80: note = Artificially Synthesized Probe
  source 1..80: mol_type = other DNA
aggaaattgcacacagagaggtcagtgaggactgtccaggggatagcgctgcagtgtgcaggagactgcacacaagaagg

SEQ ID NO: 112180 - DNA, 80 bp, synthetic construct
  misc_feature 1..80: note = Artificially Synthesized Probe
  source 1..80: mol_type = other DNA
aatcacacacatgaaggtcagtgaggaacatccaggggacagccctgcgctgggcgggaaatcacacacatgaaggtgag

SEQ ID NO: 112181 - DNA, 80 bp, synthetic construct
  misc_feature 1..80: note = Artificially Synthesized Probe
  source 1..80: mol_type = other DNA
acacacatgaaggtgagtgaggaatatccaggggacagccccatgctaggcaggaaattgcacacacagaggtcagtgag

SEQ ID NO: 112182 - DNA, 80 bp, synthetic construct
  misc_feature 1..80: note = Artificially Synthesized Probe
  source 1..80: mol_type = other DNA
atttgcaccctgctgtcaaatgtagacaaagtcacatgaagtatcaggaaatcgctattttaatggcaaatacttcccca

SEQ ID NO: 112183 - DNA, 80 bp, synthetic construct
  misc_feature 1..80: note = Artificially Synthesized Probe
  source 1..80: mol_type = other DNA
aatcacacacatggaggtcagtgaggaccatccggggaacagccccgtgctaggcaggaaattgcatacacagaggtcag

SEQ ID NO: 112184 - DNA, 80 bp, synthetic construct
  misc_feature 1..80: note = Artificially Synthesized Probe
  source 1..80: mol_type = other DNA
acagccccacggtgggcagaaggcaggtgggcaggcggcaggagaccacaggcatggaggtcagtgaggaccgtccaggg

SEQ ID NO: 112185 - DNA, 80 bp, synthetic construct
  misc_feature 1..80: note = Artificially Synthesized Probe
  source 1..80: mol_type = other DNA
gaggggacatctgagaaggtgtatgtggcacctgtccaagctgattagaacaaggagagtcaggagtgaggaggatgcat

SEQ ID NO: 112186 - DNA, 80 bp, synthetic construct
  misc_feature 1..80: note = Artificially Synthesized Probe
  source 1..80: mol_type = other DNA
tggctccgctcctgtgggtgtcggggcaacgtgggacgctcggagcaggtgcggaagtggctccgctcctgtgggtgtcg

SEQ ID NO: 112187 - DNA, 80 bp, synthetic construct
  misc_feature 1..80: note = Artificially Synthesized Probe
  source 1..80: mol_type = other DNA
tgtgggtgtcggggcaacgtgggacgctcggagcaggtgcggaagtggctccgctcctgtgggtgtcggggcaacgtggg

SEQ ID NO: 112188 - DNA, 80 bp, synthetic construct
  misc_feature 1..80: note = Artificially Synthesized Probe
  source 1..80: mol_type = other DNA
ttctaaagataagaaggggaggaagaagatggggactgggaggggagagggagagagagagcagaaggatgagcttctgt

SEQ ID NO: 112189 - DNA, 80 bp, synthetic construct
  misc_feature 1..80: note = Artificially Synthesized Probe
  source 1..80: mol_type = other DNA
cctttccttgccggcccgtcagtcacagcatcggaagaatgaatagtgctccctgatccctaacgtgcaatcggggctgg

SEQ ID NO: 112190 - DNA, 80 bp, synthetic construct
  misc_feature 1..80: note = Artificially Synthesized Probe
  source 1..80: mol_type = other DNA
tcatctcttctttctagaaacccaagttaaagatcaaggtgacacagaaccagagcttagcagccaaaatcagaatagca

SEQ ID NO: 112191 - DNA, 80 bp, synthetic construct
  misc_feature 1..80: note = Artificially Synthesized Probe
  source 1..80: mol_type = other DNA
tgcccaggcctgaggccacacgggcagagtggcagtggagggctggcatgcacacagaggatggtgacttgcagtgctct

SEQ ID NO: 112192 - DNA, 80 bp, synthetic construct
  misc_feature 1..80: note = Artificially Synthesized Probe
  source 1..80: mol_type = other DNA
gggagcacgaagatagaggacgagacacaagtcaagccttaaaaagccattctctcggcagagaagaacaggcacacaca

SEQ ID NO: 112193 - DNA, 80 bp, synthetic construct
  misc_feature 1..80: note = Artificially Synthesized Probe
  source 1..80: mol_type = other DNA
ctaaacctgtttcctggtgtgcggggacacatttagctgggcccggttctatcagggaatatttaacatagtttcaatgt

SEQ ID NO: 112194 - DNA, 80 bp, synthetic construct
  misc_feature 1..80: note = Artificially Synthesized Probe
  source 1..80: mol_type = other DNA
catctctggcttcattaatggtaaattgcatggaagtctgaagcataagtcagctttgatacatctcaaaatgcaatttc

SEQ ID NO: 112195 - DNA, 80 bp, synthetic construct
  misc_feature 1..80: note = Artificially Synthesized Probe
  source 1..80: mol_type = other DNA
accaggtgctcatagacagctgctaaagaaatgagtgaattaatgacgctttctcaaattcgcaccccacaaaaacctca

SEQ ID NO: 112196 - DNA, 80 bp, synthetic construct
  misc_feature 1..80: note = Artificially Synthesized Probe
  source 1..80: mol_type = other DNA
ttcttaaaaagattctacccttctttgcatccttttgaactccctcttctattcctaaccctgttctcttttattttcat

SEQ ID NO: 112197 - DNA, 80 bp, synthetic construct
  misc_feature 1..80: note = Artificially Synthesized Probe
  source 1..80: mol_type = other DNA
aaaactatgagtaggtcggatgtgaatgtaaagaataagccgacaggtcggatgtgaatgtaaagaataagccgacagga

SEQ ID NO: 112198 - DNA, 80 bp, synthetic construct
  misc_feature 1..80: note = Artificially Synthesized Probe
  source 1..80: mol_type = other DNA
atggggttggcaaagaaccttccttgagtaatagaactatcatcaataggtgatttgaatttgtttttctcaagttaaaa

SEQ ID NO: 112199 - DNA, 80 bp, synthetic construct
  misc_feature 1..80: note = Artificially Synthesized Probe
  source 1..80: mol_type = other DNA
gagaggcagctggatgcgctggtgtggtcaggatggctacgcaatgctatttgcacttcaagttttaccccctatcctgg

SEQ ID NO: 112200 - DNA, 80 bp, synthetic construct
  misc_feature 1..80: note = Artificially Synthesized Probe
  source 1..80: mol_type = other DNA
aaaccatccacatcttgtagaacaaagaacaagggtcccaacacgaaaaaggaggccatccacacaggctggtgccatcc

SEQ ID NO: 112201 - DNA, 80 bp, synthetic construct
  misc_feature 1..80: note = Artificially Synthesized Probe
  source 1..80: mol_type = other DNA
ccagtgcaagacacggtgggaggcagcatgctcacagctccttgggtacaaacgggttgttctcacagaggccggaaaga

SEQ ID NO: 112202 - DNA, 80 bp, synthetic construct
  misc_feature 1..80: note = Artificially Synthesized Probe
  source 1..80: mol_type = other DNA
tgaggctatttctatgttactgtaactgtggataaatgacatgcatttatcaaagcccactgaacttcacagcacaaaga

SEQ ID NO: 112203 - DNA, 80 bp, synthetic construct
  misc_feature 1..80: note = Artificially Synthesized Probe
  source 1..80: mol_type = other DNA
tctggaaacgagcagagcctgtaaaactgaaaggaaaagatcctgtctataagcactgtgctctagctgataaacttgtt

SEQ ID NO: 112204 - DNA, 80 bp, synthetic construct
  misc_feature 1..80: note = Artificially Synthesized Probe
  source 1..80: mol_type = other DNA
gcctggagttggagacgtgaataagagctcatggttagcttggtatagatacagatggtaacagaaatatttataaatat

SEQ ID NO: 112205 - DNA, 80 bp, synthetic construct
  misc_feature 1..80: note = Artificially Synthesized Probe
  source 1..80: mol_type = other DNA
tccccgcagtaatgagcacacaccacgcccagcacttgatttccaaaaccattctcagatagaagggactgggactgctt

SEQ ID NO: 112206 - DNA, 80 bp, synthetic construct
  misc_feature 1..80: note = Artificially Synthesized Probe
  source 1..80: mol_type = other DNA
acaacaacaattgacagtgtgatgattttaataccagactgcagctacttcgattaaaacaagtctaatgaaaaattaat

SEQ ID NO: 112207 - DNA, 80 bp, synthetic construct
  misc_feature 1..80: note = Artificially Synthesized Probe
  source 1..80: mol_type = other DNA
aagatgagcctaaagcctcttgtagtgtcagaaaggaaggaagtgttttcaaaaagccataaagatggacgtattcaaag

SEQ ID NO: 112208 - DNA, 80 bp, synthetic construct
  misc_feature 1..80: note = Artificially Synthesized Probe
  source 1..80: mol_type = other DNA
aacaatttctgtctatcctctgccttcaaggaagcagagcatgacgcgtcactcacgagtgtgggtttacactgtgcctt

SEQ ID NO: 112209 - DNA, 80 bp, synthetic construct
  misc_feature 1..80: note = Artificially Synthesized Probe
  source 1..80: mol_type = other DNA
tcctccccagaactcaaacacatcagacaaatccaggccaggggacattctacagactgaccaggcctcctcaaaactgt

SEQ ID NO: 112210 - DNA, 80 bp, synthetic construct
  misc_feature 1..80: note = Artificially Synthesized Probe
  source 1..80: mol_type = other DNA
agttaacagtcacataacagtcattggttccttaattatgacaaactgtgtactaatgtaggaagttaattgggaaactg

SEQ ID NO: 112211 - DNA, 80 bp, synthetic construct
  misc_feature 1..80: note = Artificially Synthesized Probe
  source 1..80: mol_type = other DNA
ataggtttatgctacattaagttttaaaaaacaagatgtaaatgtggaagatagaaaaggcagccccgaaacttaccagt

SEQ ID NO: 112212 - DNA, 80 bp, synthetic construct
  misc_feature 1..80: note = Artificially Synthesized Probe
  source 1..80: mol_type = other DNA
atacactaagttgatatttcaaagggtgtgattttgaagccctctcactacaggctttatcaacgcacgatgactgcaca

SEQ ID NO: 112213 - DNA, 80 bp, synthetic construct
  misc_feature 1..80: note = Artificially Synthesized Probe
  source 1..80: mol_type = other DNA
tagaaggattattcagggggccctaatctttctcttctgtctgctgaggatggtcttacctcatcacaggtatacctggt

SEQ ID NO: 112214 - DNA, 80 bp, synthetic construct
  misc_feature 1..80: note = Artificially Synthesized Probe
  source 1..80: mol_type = other DNA
ttcctcagaatgacgtgggctgcccagtccctgaacaagcatgggcctggcaggggtgttcctcagatgtttgtgatgca

SEQ ID NO: 112215 - DNA, 80 bp, synthetic construct
  misc_feature 1..80: note = Artificially Synthesized Probe
  source 1..80: mol_type = other DNA
acgggtgcgtcaaagagaaacaaaagaaggatacctactttccaaacacatcatccatcaacatgcatgcagctgtttac

SEQ ID NO: 112216 - DNA, 80 bp, synthetic construct
  misc_feature 1..80: note = Artificially Synthesized Probe
  source 1..80: mol_type = other DNA
tgccccatccatttggttaacaggaaaacatctcgcagatgtaacagccatggctgacttccagaactgtcaccatccgc

SEQ ID NO: 112217 - DNA, 80 bp, synthetic construct
  misc_feature 1..80: note = Artificially Synthesized Probe
  source 1..80: mol_type = other DNA
ctaatttgtgccgaacatttacgatgacaaagacgatgatccgaaaacagcaggcagaacaaggttgcactatggcgagg

SEQ ID NO: 112218 - DNA, 80 bp, synthetic construct
  misc_feature 1..80: note = Artificially Synthesized Probe
  source 1..80: mol_type = other DNA
ggtgtcttctttataccaggatctgcggtcatcacctttatagatgaatggaaaacactggagaactttggagaaatggc

SEQ ID NO: 112219 - DNA, 80 bp, synthetic construct
  misc_feature 1..80: note = Artificially Synthesized Probe
  source 1..80: mol_type = other DNA
accgcaacctctgcctcctgggttcaagtgattctcctgcctcagtctcccgagtagctgggattacaggcacgtgccac

SEQ ID NO: 112220 - DNA, 80 bp, synthetic construct
  misc_feature 1..80: note = Artificially Synthesized Probe
  source 1..80: mol_type = other DNA
tttaaaatccagcatctcaacatcaggaagaactttacagaccagtttcccttctcactcaatttggctgcatcacccac

SEQ ID NO: 112221 - DNA, 80 bp, synthetic construct
  misc_feature 1..80: note = Artificially Synthesized Probe
  source 1..80: mol_type = other DNA
tccttcctgtttccctactctccatcctcctctcctgattcctttccttggcttgttttcacccacgtgccactgaaata

SEQ ID NO: 112222 - DNA, 80 bp, synthetic construct
  misc_feature 1..80: note = Artificially Synthesized Probe
  source 1..80: mol_type = other DNA
aagagttccaccttcatagtccagtctttctggacgttgtaacctctatcacacaaacatttcatacttgatactctaag

SEQ ID NO: 112223 - DNA, 80 bp, synthetic construct
  misc_feature 1..80: note = Artificially Synthesized Probe
  source 1..80: mol_type = other DNA
cttgcctcaaaggcctcctaaggagtctccatagcattaagtaatttaccttccaattcattctcctctctcctacaatt

SEQ ID NO: 112224 - DNA, 80 bp, synthetic construct
  misc_feature 1..80: note = Artificially Synthesized Probe
  source 1..80: mol_type = other DNA
aaataaatgaaaatcctccaataacatgcagcctcttctgtatgaagccaaaacttccttacaaggcacaaaggtgcttt

SEQ ID NO: 112225 - DNA, 80 bp, synthetic construct
  misc_feature 1..80: note = Artificially Synthesized Probe
  source 1..80: mol_type = other DNA
cctattgttcttcgtgctgttcttggtgctcctgcctattgttcctggtgctgttcttggtgctcctgcctattgttctt

SEQ ID NO: 112226 - DNA, 80 bp, synthetic construct
  misc_feature 1..80: note = Artificially Synthesized Probe
  source 1..80: mol_type = other DNA
tattgttcttggtgccgttcttggtgcttctgcctattgttcttggtgctgttcttggtgcttctgcctattgttcctgg

SEQ ID NO: 112227 - DNA, 80 bp, synthetic construct
  misc_feature 1..80: note = Artificially Synthesized Probe
  source 1..80: mol_type = other DNA
tggtgcctcactgattttggactgggcacaacacgattcatccaaacaccacttgacaaaggccagcaggacagaacagt

SEQ ID NO: 112228 - DNA, 80 bp, synthetic construct
  misc_feature 1..80: note = Artificially Synthesized Probe
  source 1..80: mol_type = other DNA
tgcgggcagcgccccctcacagaaccgcagcaacgacacctatcaccgcccaccacaggcgcactgtgggctgatggggt

SEQ ID NO: 112229 - DNA, 80 bp, synthetic construct
  misc_feature 1..80: note = Artificially Synthesized Probe
  source 1..80: mol_type = other DNA
tgctaacctttacaaagaaagtaaatatcttctaagcctttgatgaggaagagaaatcggaatattataaccagaaaaag

SEQ ID NO: 112230 - DNA, 80 bp, synthetic construct
  misc_feature 1..80: note = Artificially Synthesized Probe
  source 1..80: mol_type = other DNA
ctgcccctctgcaatctcctccaacagccgccaggatcatctttacaaaatgcaaaggtcatattgctcctgagctgcaa

SEQ ID NO: 112231 - DNA, 80 bp, synthetic construct
  misc_feature 1..80: note = Artificially Synthesized Probe
  source 1..80: mol_type = other DNA
caccacagccaggcaggcctccccaggcacctccatccccttcgtcacacatcccacacaccccggtttgttcccaccag

SEQ ID NO: 112232 - DNA, 80 bp, synthetic construct
  misc_feature 1..80: note = Artificially Synthesized Probe
  source 1..80: mol_type = other DNA
gactctccctggcccagctctcgccaactgcattgtgattacttaagaacttgctcctcccttaaaagaaaatagactcc

SEQ ID NO: 112233 - DNA, 80 bp, synthetic construct
  misc_feature 1..80: note = Artificially Synthesized Probe
  source 1..80: mol_type = other DNA
tcacagggtgggagaaggatatgaacattaatagagacgatacggatttcacggggtgggagaaggatatgaacattaat

SEQ ID NO: 112234 - DNA, 80 bp, synthetic construct
  misc_feature 1..80: note = Artificially Synthesized Probe
  source 1..80: mol_type = other DNA
cagaggctaaaggatacggctcaagctccacctttaaaagagggtaggactgagatcaacagaggatataaacagattac

SEQ ID NO: 112235 - DNA, 80 bp, synthetic construct
  misc_feature 1..80: note = Artificially Synthesized Probe
  source 1..80: mol_type = other DNA
ttgggaggctgaaacaggtgaattgcttgagctcaggagttcaagaccagcctgggcaacatggcgaaaccccgtctcta

SEQ ID NO: 112236 - DNA, 80 bp, synthetic construct
  misc_feature 1..80: note = Artificially Synthesized Probe
  source 1..80: mol_type = other DNA
ctgtctctaaacaaacaaacaaaaaaacaatacttgggctccaggatgcccatcatcctgcagcagtttgcactgagctc

SEQ ID NO: 112237 - DNA, 80 bp, synthetic construct
  misc_feature 1..80: note = Artificially Synthesized Probe
  source 1..80: mol_type = other DNA
aagagggagaaaacattaaaagaagtcccttagtgctgacactgtcctgccagccagcacatctcctcattttatgaagt

SEQ ID NO: 112238 - DNA, 80 bp, synthetic construct
  misc_feature 1..80: note = Artificially Synthesized Probe
  source 1..80: mol_type = other DNA
caggtggctctcagggcatgggggaccaagctgtgtttgagcctttgctttgcatgggtggctctgaaggtgatggaatg

SEQ ID NO: 112239 - DNA, 80 bp, synthetic construct
  misc_feature 1..80: note = Artificially Synthesized Probe
  source 1..80: mol_type = other DNA
ccttattcaatgagaaaagaatttgactctagcttcgaacatatccctttgacatatgaaatatagtttaagccatgagt

SEQ ID NO: 112240 - DNA, 80 bp, synthetic construct
  misc_feature 1..80: note = Artificially Synthesized Probe
  source 1..80: mol_type = other DNA
caatgctgctgatgctgtttcccatcatataaggactttctcccatcccaagcagccaagggaaagaagtgactcacctc

SEQ ID NO: 112241 - DNA, 80 bp, synthetic construct
  misc_feature 1..80: note = Artificially Synthesized Probe
  source 1..80: mol_type = other DNA
ttcctgttcagtgcaatgactactctgccaaacacacaagttctgaacaggacatgtgccatgggaaacatttcgattta

SEQ ID NO: 112242 - DNA, 80 bp, synthetic construct
  misc_feature 1..80: note = Artificially Synthesized Probe
  source 1..80: mol_type = other DNA
ctgacacggaggcagaaggacttccatcccctaagaaaaacagagtttgggatcttgaacaaggtgcattggcagcctgg

SEQ ID NO: 112243 - DNA, 80 bp, synthetic construct
  misc_feature 1..80: note = Artificially Synthesized Probe
  source 1..80: mol_type = other DNA
actacaatttaaaacagttcatgcccttcggtagacagtttctagacgagtctttcctggatgtttgaagcaggttctcc

SEQ ID NO: 112244 - DNA, 80 bp, synthetic construct
  misc_feature 1..80: note = Artificially Synthesized Probe
  source 1..80: mol_type = other DNA
ttccactgttttgtgggtggtgataattccatttaaagtagcacttacatggttttttagaaaagactataactcctgga

SEQ ID NO: 112245 - DNA, 80 bp, synthetic construct
  misc_feature 1..80: note = Artificially Synthesized Probe
  source 1..80: mol_type = other DNA
ttcactctcatgagggtgcagcaaagattcagcaggaggatacacatggatacgctgggcaaaccacaggcaccctgcag

SEQ ID NO: 112246 - DNA, 80 bp, synthetic construct
  misc_feature 1..80: note = Artificially Synthesized Probe
  source 1..80: mol_type = other DNA
tcctgccccagctggaatgctgtctgcgtagtcatactataattttatttgtattatttttattgttgtattgttatttt

SEQ ID NO: 112247 - DNA, 80 bp, synthetic construct
  misc_feature 1..80: note = Artificially Synthesized Probe
  source 1..80: mol_type = other DNA
gagttagagacagtactaggtgtctggcttcccaacagggtgaattatttctggaaattgttttttctccctgcatctaa

SEQ ID NO: 112248 - DNA, 80 bp, synthetic construct
  misc_feature 1..80: note = Artificially Synthesized Probe
  source 1..80: mol_type = other DNA
aggtccacgtcacaatggtggactgtccaggtagtggctcaggagggaggtccacgtcacaatggtggactgtccaggtg

SEQ ID NO: 112249 - DNA, 80 bp, synthetic construct
  misc_feature 1..80: note = Artificially Synthesized Probe
  source 1..80: mol_type = other DNA
cacgtcacaatggtggactgtccgggtagtggctcgggagggaggtccacgtcacaatggtggactgtccaggtactggc

SEQ ID NO: 112250 - DNA, 80 bp, synthetic construct
  misc_feature 1..80: note = Artificially Synthesized Probe
  source 1..80: mol_type = other DNA
ctaggagaagagcagaatctctaaagtgaacagcagcccctgtcatcccagctctgtgacaagcagccctgggtggggga

SEQ ID NO: 112251 - DNA, 80 bp, synthetic construct
  misc_feature 1..80: note = Artificially Synthesized Probe
  source 1..80: mol_type = other DNA
cacaatggtggactgtccaggtgctggctcaggagggaggtccacgtcacaatggtggactgtccaggtgctggctcagg

SEQ ID NO: 112252 - DNA, 80 bp, synthetic construct
  misc_feature 1..80: note = Artificially Synthesized Probe
  source 1..80: mol_type = other DNA
tggtggactgtccgggtagtggctcgggagggaggtccacgtcacaatggtggactgtccaggtgctggctcgggaggga

SEQ ID NO: 112253 - DNA, 80 bp, synthetic construct
  misc_feature 1..80: note = Artificially Synthesized Probe
  source 1..80: mol_type = other DNA
ggtgtgttctggcaccactgtgtgtgtacagcgaatcgctctctgtaacctggcccctggtgaccagatgcacttacaac

SEQ ID NO: 112254 - DNA, 80 bp, synthetic construct
  misc_feature 1..80: note = Artificially Synthesized Probe
  source 1..80: mol_type = other DNA
cattggctttccttgtcttgagagcagctcaccatcacgagttcttccaacagcccaagtcttcatttccacacacttgc

SEQ ID NO: 112255 - DNA, 80 bp, synthetic construct
  misc_feature 1..80: note = Artificially Synthesized Probe
  source 1..80: mol_type = other DNA
acacttagatttagggattgtcagcatcaccgtggctgctgacatcttgaaaactggaaaatggggtctcagaagaacaa

SEQ ID NO: 112256 - DNA, 80 bp, synthetic construct
  misc_feature 1..80: note = Artificially Synthesized Probe
  source 1..80: mol_type = other DNA
gtggtgcagacacgtcccacggtgagggctggtgcggacaagagattagccaaaggagcagccaccatgctgccgacagc

SEQ ID NO: 112257 - DNA, 80 bp, synthetic construct
  misc_feature 1..80: note = Artificially Synthesized Probe
  source 1..80: mol_type = other DNA
ctggagtggagtcgtctgccctggagcagagtctgccctggaatggagtcctctgccctggagtggagtcgtctgccctg

SEQ ID NO: 112258 - DNA, 80 bp, synthetic construct
  misc_feature 1..80: note = Artificially Synthesized Probe
  source 1..80: mol_type = other DNA
agtcgtctgccctggagtggagtctgccctggagtggagtcgtctgccctggagtggagtcgtctaccctggagtggagt

SEQ ID NO: 112259 - DNA, 80 bp, synthetic construct
  misc_feature 1..80: note = Artificially Synthesized Probe
  source 1..80: mol_type = other DNA
tgtggagtcgtctgccctggagtggagtcggccctggagtggagtctgccctggagtggagtcgtctaccctggagtgga

SEQ ID NO: 112260 - DNA, 80 bp, synthetic construct
  misc_feature 1..80: note = Artificially Synthesized Probe
  source 1..80: mol_type = other DNA
tgccctggagtggagtctgccctggagtggagtcgtctaccctggagtggagtcgtctaccctggagtggagtcgtctac

SEQ ID NO: 112261 - DNA, 80 bp, synthetic construct
  misc_feature 1..80: note = Artificially Synthesized Probe
  source 1..80: mol_type = other DNA
ccctgatggtcacctacaaagcccatatggccaaaacggtatgatcagattctctcagagaccagactcctttgctggca

SEQ ID NO: 112262 - DNA, 80 bp, synthetic construct
  misc_feature 1..80: note = Artificially Synthesized Probe
  source 1..80: mol_type = other DNA
tctgccctggagtggagtcgtctgccctggagcggagtctgccctggagtggagtcgtctaccctggagcggagtctgcc

SEQ ID NO: 112263 - DNA, 80 bp, synthetic construct
  misc_feature 1..80: note = Artificially Synthesized Probe
  source 1..80: mol_type = other DNA
cagaactcgtagatggatgtccccagcccagtgcctcagaaggtgactgcgtttggaaatcaggtttttgcaggaaaaat

SEQ ID NO: 112264 - DNA, 80 bp, synthetic construct
  misc_feature 1..80: note = Artificially Synthesized Probe
  source 1..80: mol_type = other DNA
tgatccatatttggttggaaagatccatgaataaatgagttcagacccatgttgtcccagggcccactgtagttccgatg

SEQ ID NO: 112265 - DNA, 80 bp, synthetic construct
  misc_feature 1..80: note = Artificially Synthesized Probe
  source 1..80: mol_type = other DNA
ccctccatgcgaagaaatgctgcgtcccaggccctgcacagtgctggacttcccagctccaggctctggagccggctgca

SEQ ID NO: 112266 - DNA, 80 bp, synthetic construct
  misc_feature 1..80: note = Artificially Synthesized Probe
  source 1..80: mol_type = other DNA
gcagcagaaggtagcacgggcaggatgctaggccccaggggccatgggctacgcacgggccaggtttccagcctgccagc

SEQ ID NO: 112267 - DNA, 80 bp, synthetic construct
  misc_feature 1..80: note = Artificially Synthesized Probe
  source 1..80: mol_type = other DNA
gaggtcctacgggatggagtattaatagtgccgtgtttaattattattcagcataatcacacatattacggggattttta

SEQ ID NO: 112268 - DNA, 80 bp, synthetic construct
  misc_feature 1..80: note = Artificially Synthesized Probe
  source 1..80: mol_type = other DNA
gctccacagccacctctctctgctgtgctcacacagtgtggaagctcccgcttcagcaagaggaaagccccgatgataca

SEQ ID NO: 112269 - DNA, 80 bp, synthetic construct
  misc_feature 1..80: note = Artificially Synthesized Probe
  source 1..80: mol_type = other DNA
actctcccctctggctggcattgtgcagtccttccttcctcagcagcgctgtgtgggaagggggactatctgcccagtcc

SEQ ID NO: 112270 - DNA, 80 bp, synthetic construct
  misc_feature 1..80: note = Artificially Synthesized Probe
  source 1..80: mol_type = other DNA
ctccctgcccacctgtggcggcgaagggaactgacaccactccttcccggtgagctcggcagggctgcatctctcccgtg

SEQ ID NO: 112271 - DNA, 80 bp, synthetic construct
  misc_feature 1..80: note = Artificially Synthesized Probe
  source 1..80: mol_type = other DNA
ggaaactgactcggttgttctccattcctgatcccatttcctgtttgtgggtgtgatggctgagttgtgcaccccaaagt

SEQ ID NO: 112272 - DNA, 80 bp, synthetic construct
  misc_feature 1..80: note = Artificially Synthesized Probe
  source 1..80: mol_type = other DNA
cagcagcattctctattctgtgccaacgatgtactcattacgattttctgatgaagtttttaggaagaataaagagttcc

SEQ ID NO: 112273 - DNA, 80 bp, synthetic construct
  misc_feature 1..80: note = Artificially Synthesized Probe
  source 1..80: mol_type = other DNA
gatggacaaccctgtggggcacagggaggagacggcatctgccagccaaggggagaggcctctgggggaacctgccctgc

SEQ ID NO: 112274 - DNA, 80 bp, synthetic construct
  misc_feature 1..80: note = Artificially Synthesized Probe
  source 1..80: mol_type = other DNA
tcaaaccttcataaaggcataacttgtaacaacacaagttatggtttgtgacaaatatcaccagaagccccaagcagagt

SEQ ID NO: 112275 - DNA, 80 bp, synthetic construct
  misc_feature 1..80: note = Artificially Synthesized Probe
  source 1..80: mol_type = other DNA
ccccacacccagcttctccaccagctccccaggcctcctccccacaaggcgcgtcctgggcctccctgaccccggccatg

SEQ ID NO: 112276 - DNA, 80 bp, synthetic construct
  misc_feature 1..80: note = Artificially Synthesized Probe
  source 1..80: mol_type = other DNA
gacacatgtgatgagcaggtgaaggaacatgtctgacctcctgcttcagtgccatggaggcctcaccagccccaggccat

SEQ ID NO: 112277 - DNA, 80 bp, synthetic construct
  misc_feature 1..80: note = Artificially Synthesized Probe
  source 1..80: mol_type = other DNA
gctccgaggtgtgggctccactctgtgggggggtctcacagcagccacacagagctggccattccctcaccgtgacctct

SEQ ID NO: 112278 - DNA, 80 bp, synthetic construct
  misc_feature 1..80: note = Artificially Synthesized Probe
  source 1..80: mol_type = other DNA
aaccaccttcctgtgtagcagggaccacctacctgtgttgcttgtgctatgtctgttggtttaaagcccatctctgatcc

SEQ ID NO: 112279 - DNA, 80 bp, synthetic construct
  misc_feature 1..80: note = Artificially Synthesized Probe
  source 1..80: mol_type = other DNA
tgtgtaacagctgccaagtaacacatcatgtttccacagagctccagaggcatcagcctaaacaagaggctcccgagaag

SEQ ID NO: 112280 - DNA, 80 bp, synthetic construct
  misc_feature 1..80: note = Artificially Synthesized Probe
  source 1..80: mol_type = other DNA
gccgtctcttgccctgtgaaatgcacatttacaaagcgtcacctggtgtatcaggaacaggttcacttgctgtctcagac

SEQ ID NO: 112281 - DNA, 80 bp, synthetic construct
  misc_feature 1..80: note = Artificially Synthesized Probe
  source 1..80: mol_type = other DNA
ctaaaaatacaaaaaaaaaaaaaattagccaggtgtggtggcgggtgcctgtacttccagctactcgggaggctgaggca

SEQ ID NO: 112282 - DNA, 80 bp, synthetic construct
  misc_feature 1..80: note = Artificially Synthesized Probe
  source 1..80: mol_type = other DNA
acaggaagcaaacaaggattaaagtgcccggaattggaagacacaacatttcctacacagcctgagtctaaggtgatgag

SEQ ID NO: 112283 - DNA, 80 bp, synthetic construct
  misc_feature 1..80: note = Artificially Synthesized Probe
  source 1..80: mol_type = other DNA
cagctctgcagcctgagaaaagtcacccaaatgcctcaatccccttctcagacaggcagacagacaataataacaatgat

SEQ ID NO: 112284 - DNA, 80 bp, synthetic construct
  misc_feature 1..80: note = Artificially Synthesized Probe
  source 1..80: mol_type = other DNA
aacccacaggctatatgcacatgagcaataatacaagaaaaggggaacaaaacaactgacaaggtgatggcaccaaaaat

SEQ ID NO: 112285 - DNA, 80 bp, synthetic construct
  misc_feature 1..80: note = Artificially Synthesized Probe
  source 1..80: mol_type = other DNA
tacttctgaatattttcacattttaaaatcatctccattttgctttggaatgcgtggcatctctgctgtgcaggtgctga

SEQ ID NO: 112286 - DNA, 80 bp, synthetic construct
  misc_feature 1..80: note = Artificially Synthesized Probe
  source 1..80: mol_type = other DNA
tgcaaactcacatcgctgcctctggaaccacagagtgctctgtattagatattttgtgcatttttgaccaaaatgagtca

SEQ ID NO: 112287 - DNA, 80 bp, synthetic construct
  misc_feature 1..80: note = Artificially Synthesized Probe
  source 1..80: mol_type = other DNA
tccaccagccccaggggctgtggggaggggcggtcaccagaaggggccaggcgggagcaggaccagctcacagtctcccc

SEQ ID NO: 112288 - DNA, 80 bp, synthetic construct
  misc_feature 1..80: note = Artificially Synthesized Probe
  source 1..80: mol_type = other DNA
cacagcacacatatgcacgctaccacacacatgcacacatgtatctcacataccacacacaagcatgcacgccacacatg

SEQ ID NO: 112289 - DNA, 80 bp, synthetic construct
  misc_feature 1..80: note = Artificially Synthesized Probe
  source 1..80: mol_type = other DNA
tagaacatggaattagtgatttggttccctggctagtccatcaaagcctgtcgatccaaaatacaatttaaatgccacat

SEQ ID NO: 112290 - DNA, 80 bp, synthetic construct
  misc_feature 1..80: note = Artificially Synthesized Probe
  source 1..80: mol_type = other DNA
atttgcggaggctctgcaggagctcctgggaatgctggggacctggacatcccacgccggcctccccgtgtgccacagac

SEQ ID NO: 112291 - DNA, 80 bp, synthetic construct
  misc_feature 1..80: note = Artificially Synthesized Probe
  source 1..80: mol_type = other DNA
ctgtgagcacccatgtgtgcatatatgtgtgcccatgtgaggtgtatgtgtgcaggtttacactaacatatgaaacagag

SEQ ID NO: 112292 - DNA, 80 bp, synthetic construct
  misc_feature 1..80: note = Artificially Synthesized Probe
  source 1..80: mol_type = other DNA
aggaaggacgttcactcagcagagcaggggaatggcaggctggggggagctagtgatcaagtgccctcaaaacatacacg

SEQ ID NO: 112293 - DNA, 80 bp, synthetic construct
  misc_feature 1..80: note = Artificially Synthesized Probe
  source 1..80: mol_type = other DNA
tgtgcacacaaacaaaaacaaaccacaacagactgtgttcaaagcgagaggatccctaagctgcgatgagggaactgaat

SEQ ID NO: 112294 - DNA, 80 bp, synthetic construct
  misc_feature 1..80: note = Artificially Synthesized Probe
  source 1..80: mol_type = other DNA
agtgctccagggtcgctgcgatatcaatctctttagcacctgcaacaaaccacaaattgggctgagttcagagcacaaga

SEQ ID NO: 112295 - DNA, 80 bp, synthetic construct
  misc_feature 1..80: note = Artificially Synthesized Probe
  source 1..80: mol_type = other DNA
gaagccaaggctgtcagttcacatctccctctccagagtcgagctcaagcccgcggctgccaccctccatgaactgatgg

SEQ ID NO: 112296 - DNA, 80 bp, synthetic construct
  misc_feature 1..80: note = Artificially Synthesized Probe
  source 1..80: mol_type = other DNA
gaggggtcagtctatgtgcgagacaaagttaatatccagctcttcaccaaccaaacgtgctcacaaggaactgagcctgg

SEQ ID NO: 112297 - DNA, 80 bp, synthetic construct
  misc_feature 1..80: note = Artificially Synthesized Probe
  source 1..80: mol_type = other DNA
gcctcctcacgaggcagacgggtgtttgctgtggtggacagatgcccacatctcacgcgcagcctcctggaaggcagcag

SEQ ID NO: 112298 - DNA, 80 bp, synthetic construct
  misc_feature 1..80: note = Artificially Synthesized Probe
  source 1..80: mol_type = other DNA
ccctctgctcatagaaagaacgtggtgaacaggagcatattttacacaaacacatgcctcctcccagccacgctggctcc

SEQ ID NO: 112299 - DNA, 80 bp, synthetic construct
  misc_feature 1..80: note = Artificially Synthesized Probe
  source 1..80: mol_type = other DNA
aaaccggcttattttattcttagaataggtttttgccacagtgaaaactgaataaacaacaaagtcagaaaggggcgtgt

SEQ ID NO: 112300 - DNA, 80 bp, synthetic construct
  misc_feature 1..80: note = Artificially Synthesized Probe
  source 1..80: mol_type = other DNA
tctgctcttggcctctgtccattctcaagccacgtcacgtctctatgaccaggctcttagatgcccaaaagcgacattgg

SEQ ID NO: 112301 - DNA, 80 bp, synthetic construct
  misc_feature 1..80: note = Artificially Synthesized Probe
  source 1..80: mol_type = other DNA
gatgcctccacactggaagttggagcgtggtggaccgtgcgttataataaagttgctattgtatgtgactttgatcctac

SEQ ID NO: 112302 - DNA, 80 bp, synthetic construct
  misc_feature 1..80: note = Artificially Synthesized Probe
  source 1..80: mol_type = other DNA
aacaacaaaaaccagcaacaggcgcttcctccagacacaccacggcacacttcaacctgttccttacaagactacattga

SEQ ID NO: 112303 - DNA, 80 bp, synthetic construct
  misc_feature 1..80: note = Artificially Synthesized Probe
  source 1..80: mol_type = other DNA
ccaagccagggacaaggcctcatccccagaaccaccaaaggattaacttaaagcaaaacaaacacaagcaaacagaacag

SEQ ID NO: 112304 - DNA, 80 bp, synthetic construct
  misc_feature 1..80: note = Artificially Synthesized Probe
  source 1..80: mol_type = other DNA
cctagttttgttacttgcagaatgaactgattctcaaatccctggagatactgggctgagtgcatttgtcctaattacag

SEQ ID NO: 112305 - DNA, 80 bp, synthetic construct
  misc_feature 1..80: note = Artificially Synthesized Probe
  source 1..80: mol_type = other DNA
tggaatctgtgcaaactttaagtcccaacaaaactttgccaaactcacttgttgagcaagaagctcagaaatggagattt

SEQ ID NO: 112306 - DNA, 80 bp, synthetic construct
  misc_feature 1..80: note = Artificially Synthesized Probe
  source 1..80: mol_type = other DNA
gcgtgatgggtctccctgcaacacacgaggagtccctatcccaggggccagaggggacgtcccgcagagaccgtcctgac

SEQ ID NO: 112307 - DNA, 80 bp, synthetic construct
  misc_feature 1..80: note = Artificially Synthesized Probe
  source 1..80: mol_type = other DNA
gctcacaatgcctcggggatttcctctgaagatgtggatgcagaatgaacaccatgaaaacacagctcccactccgggta

SEQ ID NO: 112308 - DNA, 80 bp, synthetic construct
  misc_feature 1..80: note = Artificially Synthesized Probe
  source 1..80: mol_type = other DNA
gtttggaggagaagagaacagagagctgatatgtcaaacagtgttttcacttttcagggtgaagagttagaggtgagact

SEQ ID NO: 112309 - DNA, 80 bp, synthetic construct
  misc_feature 1..80: note = Artificially Synthesized Probe
  source 1..80: mol_type = other DNA
tccatcagggatggctgtgggtgcaggttgtggccacccatgccccgggctccatcagggatggctgtgggtgcaggttg

SEQ ID NO: 112310 - DNA, 80 bp, synthetic construct
  misc_feature 1..80: note = Artificially Synthesized Probe
  source 1..80: mol_type = other DNA
cgccccgggctccgtcagggatggctgtgggtgcaggttgtgaccacccacgccccgggctccgtcagggatggctgtgg

SEQ ID NO: 112311 - DNA, 80 bp, synthetic construct
  misc_feature 1..80: note = Artificially Synthesized Probe
  source 1..80: mol_type = other DNA
atttcccaaacgcagtgggatcaggcctggctggatgtctgaactgcgactctgccccaactgctgccctcattgccgta

SEQ ID NO: 112312 - DNA, 80 bp, synthetic construct
  misc_feature 1..80: note = Artificially Synthesized Probe
  source 1..80: mol_type = other DNA
gctgtgcagaccctctgaagacgagacattctccatatgtttcttggctccaggcagctcatcgacagataacatcctgc

SEQ ID NO: 112313 - DNA, 80 bp, synthetic construct
  misc_feature 1..80: note = Artificially Synthesized Probe
  source 1..80: mol_type = other DNA
gcaggcaggcgtttcagtgttccccagaactacacctcagtatgccctcgcagaaaggagcacttcacacaacatcttta

SEQ ID NO: 112314 - DNA, 80 bp, synthetic construct
  misc_feature 1..80: note = Artificially Synthesized Probe
  source 1..80: mol_type = other DNA
aaaggcatatcttgttccttccacaatctggtcgaagaaaacagcagctttgatctcagatactcttaactactcagtac

SEQ ID NO: 112315 - DNA, 80 bp, synthetic construct
  misc_feature 1..80: note = Artificially Synthesized Probe
  source 1..80: mol_type = other DNA
taagaacctgcaatgggagggtacctgcatttaatctgtgctgttttcgttctcctgatacagaactgtgtcagaatcct

SEQ ID NO: 112316 - DNA, 80 bp, synthetic construct
  misc_feature 1..80: note = Artificially Synthesized Probe
  source 1..80: mol_type = other DNA
ggcaataaagttttttcagttagttggtcaactgtgtacacaacacaaagcagaatacagagtgtgtatatgtcctcaac

SEQ ID NO: 112317 - DNA, 80 bp, synthetic construct
  misc_feature 1..80: note = Artificially Synthesized Probe
  source 1..80: mol_type = other DNA
ctaagttttccatccagtttatttttaaaatctgcaaaagtacttcaaaaatgagtaatctaaaagtctggttccatact

SEQ ID NO: 112318 - DNA, 80 bp, synthetic construct
  misc_feature 1..80: note = Artificially Synthesized Probe
  source 1..80: mol_type = other DNA
cactcttcttgctgggacttctcatctgtccctccctgcagctgccttgtcgtcactcagccacgtggaccacctggact

SEQ ID NO: 112319 - DNA, 80 bp, synthetic construct
  misc_feature 1..80: note = Artificially Synthesized Probe
  source 1..80: mol_type = other DNA
ccagcccataccttccatttagttttgttgtggatgttggcgatgcaatgccccaaatctcattaagcccatcaattaaa

SEQ ID NO: 112320 - DNA, 80 bp, synthetic construct
  misc_feature 1..80: note = Artificially Synthesized Probe
  source 1..80: mol_type = other DNA
ataaacttgatgatgttttcaagaaaataaacaataagaagttaagtaagtgctgccctgccttgtctattgtgcaccag

SEQ ID NO: 112321 - DNA, 80 bp, synthetic construct
  misc_feature 1..80: note = Artificially Synthesized Probe
  source 1..80: mol_type = other DNA
ccttcccagcccaccatcaacaagacgggactcaggaagacacaaggaccctcccagcccaccatcaccgagacgggact

SEQ ID NO: 112322 - DNA, 80 bp, synthetic construct
  misc_feature 1..80: note = Artificially Synthesized Probe
  source 1..80: mol_type = other DNA
ccttcccagtccaccatcgacaagacgagactcaggaagacacaatgaccttcccagcctgccatcactgagacaagact

SEQ ID NO: 112323 - DNA, 80 bp, synthetic construct
  misc_feature 1..80: note = Artificially Synthesized Probe
  source 1..80: mol_type = other DNA
ccctctgggacatgactgggccatcagggtggagcctcaggatgggattagtgcccttataggaagagactcaggagccc

SEQ ID NO: 112324 - DNA, 80 bp, synthetic construct
  misc_feature 1..80: note = Artificially Synthesized Probe
  source 1..80: mol_type = other DNA
catatttgttatagcatcctgagcggactatgatgaatagcatagccaaattaggataactggagagggatggcttacaa

SEQ ID NO: 112325 - DNA, 80 bp, synthetic construct
  misc_feature 1..80: note = Artificially Synthesized Probe
  source 1..80: mol_type = other DNA
gtcgccagggaggaagtgcagtccacatgccgtctctatccaagctccagctccctctgccattctcctgcctcagaaca

SEQ ID NO: 112326 - DNA, 80 bp, synthetic construct
  misc_feature 1..80: note = Artificially Synthesized Probe
  source 1..80: mol_type = other DNA
cctcatctgccagcccagcaacgagcctggactgtgctgcaaactcgattccttgcatataaatgtgaacattaggctaa

SEQ ID NO: 112327 - DNA, 80 bp, synthetic construct
  misc_feature 1..80: note = Artificially Synthesized Probe
  source 1..80: mol_type = other DNA
acagaaaggtgagtgtggaaacccggcggaatgtgatcattacctgctcatctttgactctagacagccatcggtaggat

SEQ ID NO: 112328 - DNA, 80 bp, synthetic construct
  misc_feature 1..80: note = Artificially Synthesized Probe
  source 1..80: mol_type = other DNA
tagtagcagaactgcattttaaaatgctgaaaagccatcactttagagctggtgagagaaaacattactttttttcatta

SEQ ID NO: 112329 - DNA, 80 bp, synthetic construct
  misc_feature 1..80: note = Artificially Synthesized Probe
  source 1..80: mol_type = other DNA
cccctgtaagtggctttgtttctggaaaatgtggggacacttttcatactcgacgtagcccacagccaggtctgtgcacc

SEQ ID NO: 112330 - DNA, 80 bp, synthetic construct
  misc_feature 1..80: note = Artificially Synthesized Probe
  source 1..80: mol_type = other DNA
tctacttgctgcttctgtccctgttaccaccaaggctatggctgcaagtttccaaggaaaaagcgcagcctccgtgggtc

SEQ ID NO: 112331 - DNA, 80 bp, synthetic construct
  misc_feature 1..80: note = Artificially Synthesized Probe
  source 1..80: mol_type = other DNA
gaataggtgggcgctcacctgacagtggcctcccatcctccactgccttgagccctttcccatgcactgcactacggaca

SEQ ID NO: 112332 - DNA, 80 bp, synthetic construct
  misc_feature 1..80: note = Artificially Synthesized Probe
  source 1..80: mol_type = other DNA
tcacagatgagggaacgaagacacgacccacccaaactcacaggtgggcagggggtggtctgactcccagcccagtccca

SEQ ID NO: 112333 - DNA, 80 bp, synthetic construct
  misc_feature 1..80: note = Artificially Synthesized Probe
  source 1..80: mol_type = other DNA
gaaattaattattctgctgctctggttacagtatgttgttaaggtaagacatttttgagtgcaccctctttggaataatt

SEQ ID NO: 112334 - DNA, 80 bp, synthetic construct
  misc_feature 1..80: note = Artificially Synthesized Probe
  source 1..80: mol_type = other DNA
agggggagggcatatcagaggtttgtgaagagagaacatggtgaaaacatactttaaagagtgggagactgaattaacta

SEQ ID NO: 112335 - DNA, 80 bp, synthetic construct
  misc_feature 1..80: note = Artificially Synthesized Probe
  source 1..80: mol_type = other DNA
gtaattttcccaggaaagtaaaatagaaacagaaggacctgatggatattgctaggaagtgattacagtgactgtggact

SEQ ID NO: 112336 - DNA, 80 bp, synthetic construct
  misc_feature 1..80: note = Artificially Synthesized Probe
  source 1..80: mol_type = other DNA
tcagttgtcaaagagaggaatattggcagttattggtaatgacaaagtcttaggtgttgccatgaaagccaatgaggtac

SEQ ID NO: 112337 - DNA, 80 bp, synthetic construct; identical to SEQ ID NO: 37230
  misc_feature 1..80: note = Artificially Synthesized Probe
  source 1..80: mol_type = other DNA

SEQ ID NO: 112338 - DNA, 80 bp, synthetic construct
  misc_feature 1..80: note = Artificially Synthesized Probe
  source 1..80: mol_type = other DNA
tagaaagttaagaaagcattgagggtagttgttgaggattttcctcaatgtaatgggttggcctggggaaacactagaga

SEQ ID NO: 112339 - DNA, 80 bp, synthetic construct; identical to SEQ ID NO: 37133
  misc_feature 1..80: note = Artificially Synthesized Probe
  source 1..80: mol_type = other DNA

SEQ ID NO: 112340 - DNA, 80 bp, synthetic construct
  misc_feature 1..80: note = Artificially Synthesized Probe
  source 1..80: mol_type = other DNA
attaagtgtgccttgacaccataacccaataactggtaacaatcaaggggagggacactgtatctacatttttaaggctt

SEQ ID NO: 112341 - DNA, 80 bp, synthetic construct; identical to SEQ ID NO: 37231
  misc_feature 1..80: note = Artificially Synthesized Probe
  source 1..80: mol_type = other DNA

SEQ ID NO: 112342 - DNA, 80 bp, synthetic construct
  misc_feature 1..80: note = Artificially Synthesized Probe
  source 1..80: mol_type = other DNA
tgatgttgattgtcagtctaattgtcattcctatgtagaagattttttttttctggtactgttaagatggttcctttttt

SEQ ID NO: 112343 - DNA, 80 bp, synthetic construct
  misc_feature 1..80: note = Artificially Synthesized Probe
  source 1..80: mol_type = other DNA
agaccccctccggatatcatctatgtctcaactgccattttatattttccataactgtcttctttgatctacattcttga

SEQ ID NO: 112344 - DNA, 80 bp, synthetic construct
  misc_feature 1..80: note = Artificially Synthesized Probe
  source 1..80: mol_type = other DNA
cttgttctctttcaaacttgcttggttatttaatattatttaccattatttaaataattatttgctcatattttaaaata

SEQ ID NO: 112345 - DNA, 80 bp, synthetic construct
  misc_feature 1..80: note = Artificially Synthesized Probe
  source 1..80: mol_type = other DNA
agtgagctcatattctttgaaactttagctgtgagaaatttatgtggtttgtgttgaagttgagttcctccagcaagtat

SEQ ID NO: 112346 - DNA, 80 bp, synthetic construct; identical to SEQ ID NO: 37232
  misc_feature 1..80: note = Artificially Synthesized Probe
  source 1..80: mol_type = other DNA

SEQ ID NO: 112347 - DNA, 80 bp, synthetic construct
  misc_feature 1..80: note = Artificially Synthesized Probe
  source 1..80: mol_type = other DNA
ttcagtataataaccctggttaaagttgcattctttgggggtttcaggtctttctgcagggatatcactcatctttcagc

SEQ ID NO: 112348 - DNA, 80 bp, synthetic construct
  misc_feature 1..80: note = Artificially Synthesized Probe
  source 1..80: mol_type = other DNA
ttttctgtgactttttttggccagtcaccactgaattctaactttcttttcagcaccacaacttcttaaagaaaatttat

SEQ ID NO: 112349 - DNA, 80 bp, synthetic construct; identical to SEQ ID NO: 37233
  misc_feature 1..80: note = Artificially Synthesized Probe
  source 1..80: mol_type = other DNA

SEQ ID NO: 112350 - DNA, 80 bp, synthetic construct
  misc_feature 1..80: note = Artificially Synthesized Probe
  source 1..80: mol_type = other DNA
ttttaaaattctctttcttgcatctgtgtgttcttcagtgcaagatatgttcctatagttccaagtattttagtaaacgt

SEQ ID NO: 112351 - DNA, 80 bp, synthetic construct
  misc_feature 1..80: note = Artificially Synthesized Probe
  source 1..80: mol_type = other DNA
tctagggggcagtctcatactagcatttttggcaaatgcatttctaccctcctcttaacctccacatagcagtttttgaa

SEQ ID NO: 112352 - DNA, 80 bp, synthetic construct
  misc_feature 1..80: note = Artificially Synthesized Probe
  source 1..80: mol_type = other DNA
tacgattacattctagtgaaggttcaattgtaaataacctagtgcacttcagtgacaatttcagcagaatagatttttag

SEQ ID NO: 112353 - DNA, 80 bp, synthetic construct
  misc_feature 1..80: note = Artificially Synthesized Probe
  source 1..80: mol_type = other DNA
aagagaagtaatggaaatgaggaaagaactataaatacaacctctttaacccaaaacattaaaggtaaaagaacaaatct

SEQ ID NO: 112354 - DNA, 80 bp, synthetic construct
  misc_feature 1..80: note = Artificially Synthesized Probe
  source 1..80: mol_type = other DNA
agtaaggaatcttttcttggttctgataaaaagtaagcatagtgtaaatctggtgttaccaagtgccacattgtaaatag

SEQ ID NO: 112355 - DNA, 80 bp, synthetic construct
  misc_feature 1..80: note = Artificially Synthesized Probe
  source 1..80: mol_type = other DNA
tccttttccacattatcctatatcattttgtcttcataaataagagctactattgccaaagaatgacattttcacttagt

SEQ ID NO: 112356 - DNA, 80 bp, synthetic construct; identical to SEQ ID NO: 37234
  misc_feature 1..80: note = Artificially Synthesized Probe
  source 1..80: mol_type = other DNA

SEQ ID NO: 112357 - DNA, 80 bp, synthetic construct
  misc_feature 1..80: note = Artificially Synthesized Probe
  source 1..80: mol_type = other DNA
gcataaaatgttttttattttctgaagtcatcagtactctgtaaaaaacagtcagtcatgtttttccatggggattttca

SEQ ID NO: 112358 - DNA, 80 bp, synthetic construct
  misc_feature 1..80: note = Artificially Synthesized Probe
  source 1..80: mol_type = other DNA
agatcaggctattgtacaggcttctgcataattggacaagatgctattccccaaagttagtagctttcatactgaatatt

SEQ ID NO: 112359 - DNA, 80 bp, synthetic construct
  misc_feature 1..80: note = Artificially Synthesized Probe
  source 1..80: mol_type = other DNA
taaagaaaattattatttttttctgtaaaaggaattcctatttccaagaagggtaggcctggaagtatcatacgtgtttg

SEQ ID NO: 112360 - DNA, 80 bp, synthetic construct; identical to SEQ ID NO: 37235
  misc_feature 1..80: note = Artificially Synthesized Probe
  source 1..80: mol_type = other DNA

SEQ ID NO: 112361 - DNA, 80 bp, synthetic construct
  misc_feature 1..80: note = Artificially Synthesized Probe
  source 1..80: mol_type = other DNA
gattctccttgctctgaaagttaaaattatcttaataaaaaaaccttccaaatgagtcaatggttaaaaactagggaaga

SEQ ID NO: 112362 - DNA, 80 bp, synthetic construct
  misc_feature 1..80: note = Artificially Synthesized Probe
  source 1..80: mol_type = other DNA
tagtgaacatatattttgagcaggcagacgttttaccactcaagtcaatagttccaaagtatgttgtgcatctgaattac

SEQ ID NO: 112363 - DNA, 80 bp, synthetic construct
  misc_feature 1..80: note = Artificially Synthesized Probe
  source 1..80: mol_type = other DNA
tgtgtgttgtgtatttgacatgcagtgtgcaaagttctttggaatttcaacagctaaaatttaaacaccctagagctgaa

SEQ ID NO: 112364 - DNA, 80 bp, synthetic construct
  misc_feature 1..80: note = Artificially Synthesized Probe
  source 1..80: mol_type = other DNA
gaattaggaactccttgccctcatgaagctcacggttagaacaagagacctaaatttgacaaatgtgtggacaaataatt

SEQ ID NO: 112365 - DNA, 80 bp, synthetic construct; identical to SEQ ID NO: 37236
  misc_feature 1..80: note = Artificially Synthesized Probe
  source 1..80: mol_type = other DNA

SEQ ID NO: 112366 - DNA, 80 bp, synthetic construct
  misc_feature 1..80: note = Artificially Synthesized Probe
  source 1..80: mol_type = other DNA
ctcagctaccttgagatgctctgagatgacaaattgaatgcactgcaaaagttctaatttttctagtttcaattttgtta

SEQ ID NO: 112367 - DNA, 80 bp, synthetic construct
  misc_feature 1..80: note = Artificially Synthesized Probe
  source 1..80: mol_type = other DNA
cggagatctactgaaggttagcttttaaagacaccacgctttatctggtattccacataagcatcttaaagcatattata

SEQ ID NO: 112368 - DNA, 80 bp, synthetic construct; identical to SEQ ID NO: 37237
  misc_feature 1..80: note = Artificially Synthesized Probe
  source 1..80: mol_type = other DNA

SEQ ID NO: 112369 - DNA, 80 bp, synthetic construct
  misc_feature 1..80: note = Artificially Synthesized Probe
  source 1..80: mol_type = other DNA
gagattattcagagaagtaaaaaagaaaaaatattgaagtaagtcaggtagcattctgtccaaattattggaaatagtga

SEQ ID NO: 112370 - DNA, 80 bp, synthetic construct
  misc_feature 1..80: note = Artificially Synthesized Probe
  source 1..80: mol_type = other DNA
attctaagacattactgtgttattacacagcagctgagaaatgtcattctaaatgttttacctaaatggaaatataaagt

SEQ ID NO: 112371 - DNA, 80 bp, synthetic construct
  misc_feature 1..80: note = Artificially Synthesized Probe
  source 1..80: mol_type = other DNA
aagactgagtgaacagagtttgatattattttactttttaatgacacaacagagattgaggaatgtagttttcatcattt

SEQ ID NO: 112372 - DNA, 80 bp, synthetic construct; identical to SEQ ID NO: 37238
  misc_feature 1..80: note = Artificially Synthesized Probe
  source 1..80: mol_type = other DNA

SEQ ID NO: 112373 - DNA, 80 bp, synthetic construct
  misc_feature 1..80: note = Artificially Synthesized Probe
  source 1..80: mol_type = other DNA
tgttaactttttcttatatatgtttaataaaacacattattctataccctaactttacagctcctgattctccccctcaa

SEQ ID NO: 112374 - DNA, 80 bp, synthetic construct
  misc_feature 1..80: note = Artificially Synthesized Probe
  source 1..80: mol_type = other DNA
gaatgtagcttttagatttcagaatgtggtgctacattaggaacctgattattaataggctagttaatatgttttgatta

SEQ ID NO: 112375 - DNA, 80 bp, synthetic construct
  misc_feature 1..80: note = Artificially Synthesized Probe
  source 1..80: mol_type = other DNA
aatcctaataaaaatatttttccaattggatagtagcaggtgttttctcttctccaaactcagactaagtatccttccat

SEQ ID NO: 112376 - DNA, 80 bp, synthetic construct
  misc_feature 1..80: note = Artificially Synthesized Probe
  source 1..80: mol_type = other DNA
acacttctgaagttttacacaagtactctcatgtcattgtctttcaagtgtcccttgagcagagtaattttaataaacat

SEQ ID NO: 112377 - DNA, 80 bp, synthetic construct
  misc_feature 1..80: note = Artificially Synthesized Probe
  source 1..80: mol_type = other DNA
atcactgttaccctgattgcctgtttatccttcaattgtgaaaaagatgaaatccaacattgtatctcatgttagttagc

SEQ ID NO: 112378 - DNA, 80 bp, synthetic construct; identical to SEQ ID NO: 37239
  misc_feature 1..80: note = Artificially Synthesized Probe
  source 1..80: mol_type = other DNA

SEQ ID NO: 112379 - DNA, 80 bp, synthetic construct
  misc_feature 1..80: note = Artificially Synthesized Probe
  source 1..80: mol_type = other DNA
gtgacgaaagtgggagtgtcttgactcccagttagcgaaaaggaagcagggaagaaggttaccattccttttcattaccc

SEQ ID NO: 112380 - DNA, 80 bp, synthetic construct
  misc_feature 1..80: note = Artificially Synthesized Probe
  source 1..80: mol_type = other DNA
atgttgggggaaggaggtctacttttgatgggatgcttcaggaagttctctttgaagaagtgtcattgagctgtgatcca

SEQ ID NO: 112381 - DNA, 80 bp, synthetic construct; identical to SEQ ID NO: 37240
  misc_feature 1..80: note = Artificially Synthesized Probe
  source 1..80: mol_type = other DNA

SEQ ID NO: 112382 - DNA, 80 bp, synthetic construct
  misc_feature 1..80: note = Artificially Synthesized Probe
  source 1..80: mol_type = other DNA
aactaacaggacttggtgatggattggctgtgcagataagaaaaagagaagaatcaaagatgacttctagatttttgaat

SEQ ID NO: 112383 - DNA, 80 bp, synthetic construct
  misc_feature 1..80: note = Artificially Synthesized Probe
  source 1..80: mol_type = other DNA
tagagcttccgtgtatatctagcataatgcataacacacctagacagaaacacatgtggttggatagcattttaagggat

SEQ ID NO: 112384 - DNA, 80 bp, synthetic construct
  misc_feature 1..80: note = Artificially Synthesized Probe
  source 1..80: mol_type = other DNA
caggatttgttaggaataagtaatgacaatgtacattacaccacctcttaagaatatagcatggctcaaattttatatgc

SEQ ID NO: 112385 - DNA, 80 bp, synthetic construct; identical to SEQ ID NO: 37241
  misc_feature 1..80: note = Artificially Synthesized Probe
  source 1..80: mol_type = other DNA

SEQ ID NO: 112386 - DNA, 80 bp, synthetic construct
  misc_feature 1..80: note = Artificially Synthesized Probe
  source 1..80: mol_type = other DNA
cagacgggcaggctgtggggctccgaccccatggcagggtctaggggtgaatgtttacagctgaaaccccagtgggcgtg

SEQ ID NO: 112387 - DNA, 80 bp, synthetic construct
  misc_feature 1..80: note = Artificially Synthesized Probe
  source 1..80: mol_type = other DNA
tgaatcagcacttttaattttttggggagtcatttgctgtgtatttttactgtaagctgatataccagtgcatgtccagg

SEQ ID NO: 112388 - DNA, 80 bp, synthetic construct
  misc_feature 1..80: note = Artificially Synthesized Probe
  source 1..80: mol_type = other DNA
tattgagtggagataactctcagcagaggggggagccagagggaaatggagtgggaagatggttttcccctggagtcggg

SEQ ID NO: 112389 - DNA, 80 bp, synthetic construct
  misc_feature 1..80: note = Artificially Synthesized Probe
  source 1..80: mol_type = other DNA
aacgtccagccgcttgtgtgtgtgcccgttagggtcttgggatttttataggcacaggatgggggcgtggtgggccaggg

SEQ ID NO: 112390 - DNA, 80 bp, synthetic construct
  misc_feature 1..80: note = Artificially Synthesized Probe
  source 1..80: mol_type = other DNA
acgtcacctgacctttttatggaatcattctggcacaaacttgcagtcacggcttccagtttcaaggttcctattttcgg

SEQ ID NO: 112391 - DNA, 80 bp, synthetic construct; identical to SEQ ID NO: 37242
  misc_feature 1..80: note = Artificially Synthesized Probe
  source 1..80: mol_type = other DNA

SEQ ID NO: 112392 - DNA, 80 bp, synthetic construct
  misc_feature 1..80: note = Artificially Synthesized Probe
  source 1..80: mol_type = other DNA
aagatcttgggacactccagtgtgatggctttgcccttttatttctctcactcttttttcgtagtgcaaaatttttcctt

SEQ ID NO: 112393 - DNA, 80 bp, synthetic construct
  misc_feature 1..80: note = Artificially Synthesized Probe
  source 1..80: mol_type = other DNA
cttttccctcagtaaaacttggctttattttacacacacacacacacacacacacacacactctctctctctctctctgc

SEQ ID NO: 112394 - DNA, 80 bp, synthetic construct
  misc_feature 1..80: note = Artificially Synthesized Probe
  source 1..80: mol_type = other DNA
ttatataatatatataatatatttgtatatatattatacaaatttttaaatatatttgtatattttgtatacaaaatata

SEQ ID NO: 112395 - DNA, 80 bp, synthetic construct; identical to SEQ ID NO: 37243
  misc_feature 1..80: note = Artificially Synthesized Probe
  source 1..80: mol_type = other DNA

SEQ ID NO: 112396 - DNA, 80 bp, synthetic construct
  misc_feature 1..80: note = Artificially Synthesized Probe
  source 1..80: mol_type = other DNA
ttggaaatagccctgtaaggtatagtaagtgtagcgaaggaaatggtcataattctggattccttcattagtgatcacta

SEQ ID NO: 112397 - DNA, 80 bp, synthetic construct
  misc_feature 1..80: note = Artificially Synthesized Probe
  source 1..80: mol_type = other DNA
atcattgttagcaggattactgtttcaggagtccatagttctctcataattctcagttgccattatttcagctgctccaa

SEQ ID NO: 112398 - DNA, 80 bp, synthetic construct; identical to SEQ ID NO: 37134
  misc_feature 1..80: note = Artificially Synthesized Probe
  source 1..80: mol_type = other DNA

SEQ ID NO: 112399 - DNA, 80 bp, synthetic construct
  misc_feature 1..80: note = Artificially Synthesized Probe
  source 1..80: mol_type = other DNA
cccgagtagctgggattacaggtgcccattaccacacctagctaatttatttttatttctttttatttttcactagagat

SEQ ID NO: 112400 - DNA, 80 bp, synthetic construct
  misc_feature 1..80: note = Artificially Synthesized Probe
  source 1..80: mol_type = other DNA
gcctatgacatttattatattgggtaacttttttctttatcatgaatatttcttgacaaaataactcatgagggttaatg

SEQ ID NO: 112401 - DNA, 80 bp, synthetic construct; identical to SEQ ID NO: 37244
  misc_feature 1..80: note = Artificially Synthesized Probe
  source 1..80: mol_type = other DNA

SEQ ID NO: 112402 - DNA, 80 bp, synthetic construct
  misc_feature 1..80: note = Artificially Synthesized Probe
  source 1..80: mol_type = other DNA
gtagttttcttctttctttaggaaacttctaagagaatataccctctatagctaaaagactgaggactgaaagtgatgct

SEQ ID NO: 112403 - DNA, 80 bp, synthetic construct
  misc_feature 1..80: note = Artificially Synthesized Probe
  source 1..80: mol_type = other DNA
atataacatacagcaccttaaaacgattgatgacttattgcagataagatatgcccatgtgaaataattgaaaaacactt

SEQ ID NO: 112404 - DNA, 80 bp, synthetic construct
  misc_feature 1..80: note = Artificially Synthesized Probe
  source 1..80: mol_type = other DNA
agattttcaccgtgttaaaaatgacctcatggttactgcatataatatagatcaatcatcagaatgggaagggggccatt

SEQ ID NO: 112405 - DNA, 80 bp, synthetic construct; identical to SEQ ID NO: 37245
  misc_feature 1..80: note = Artificially Synthesized Probe
  source 1..80: mol_type = other DNA

SEQ ID NO: 112406 - DNA, 80 bp, synthetic construct
  misc_feature 1..80: note = Artificially Synthesized Probe
  source 1..80: mol_type = other DNA
atgagtagatctcttgtaaaacttcaatttcctttgtttcttataaaaatcagaacacttttgccatatttcctgtggca

SEQ ID NO: 112407 - DNA, 80 bp, synthetic construct
  misc_feature 1..80: note = Artificially Synthesized Probe
  source 1..80: mol_type = other DNA
ttgatacaagcgtgtaacaagtaataacatcatggaaaatggggtatccatcccctcaagcatttgtccttagtgttata

SEQ ID NO: 112408 - DNA, 80 bp, synthetic construct; identical to SEQ ID NO: 37246
  misc_feature 1..80: note = Artificially Synthesized Probe
  source 1..80: mol_type = other DNA

SEQ ID NO: 112409 - DNA, 80 bp, synthetic construct
  misc_feature 1..80: note = Artificially Synthesized Probe
  source 1..80: mol_type = other DNA
aacaaagctgacctaggaaagctagagaagcctttttgaagacactaacatttgaacattaggaatggctagagaacaga

SEQ ID NO: 112410 - DNA, 80 bp, synthetic construct
  misc_feature 1..80: note = Artificially Synthesized Probe
  source 1..80: mol_type = other DNA
tttctttatcgagtcaaccattgatggacattttggttgcttccaaatcttggctattgtgaagagtactgcaacaaaca

SEQ ID NO: 112411 - DNA, 80 bp, synthetic construct
  misc_feature 1..80: note = Artificially Synthesized Probe
  source 1..80: mol_type = other DNA
gtgtacaagggttcccttttcttcacattctctccaacatttgttattgcctgtcttttggagaagagctattttaactg

SEQ ID NO: 112412 - DNA, 80 bp, synthetic construct
  misc_feature 1..80: note = Artificially Synthesized Probe
  source 1..80: mol_type = other DNA
cctgtagagttgtttgagctgcttatgcattctggttattaatcccttgtcagattgacagtttgcaaatattttctcct

SEQ ID NO: 112413 - DNA, 80 bp, synthetic construct
  misc_feature 1..80: note = Artificially Synthesized Probe
  source 1..80: mol_type = other DNA
cccaatgcaatagtttcatagtttgaggtcttagatttaagtctttaatccattttgatttaatttttgtatatggtgaa

SEQ ID NO: 112414 - DNA, 80 bp, synthetic construct; identical to SEQ ID NO: 37247
  misc_feature 1..80: note = Artificially Synthesized Probe
  source 1..80: mol_type = other DNA

SEQ ID NO: 112415 - DNA, 80 bp, synthetic construct
  misc_feature 1..80: note = Artificially Synthesized Probe
  source 1..80: mol_type = other DNA
gtagtatagataggatattttaataatattgattcttccaccccatgacatcgaatagctttccattttttggtgtcctc

SEQ ID NO: 112416 - DNA, 80 bp, synthetic construct
  misc_feature 1..80: note = Artificially Synthesized Probe
  source 1..80: mol_type = other DNA
gaaatgcagaacactgagagagtttgtgatttctttgcatgtcagacttagggaacaaaatgtctcagaaagctgaagga

SEQ ID NO: 112417 - DNA, 80 bp, synthetic construct
  misc_feature 1..80: note = Artificially Synthesized Probe
  source 1..80: mol_type = other DNA
gagggatcggggtaggagctttatgcggaaagggttagctaaacatacatatttaacctgctacaggaggagctatgaat

SEQ ID NO: 112418 - DNA, 80 bp, synthetic construct; identical to SEQ ID NO: 37248
  misc_feature 1..80: note = Artificially Synthesized Probe
  source 1..80: mol_type = other DNA

SEQ ID NO: 112419 - DNA, 80 bp, synthetic construct
  misc_feature 1..80: note = Artificially Synthesized Probe
  source 1..80: mol_type = other DNA
ttgggtggggattgggggggatacatgtcttaacccttgcctgacatggccatatgtcatgtttataatttggtatctta

SEQ ID NO: 112420 - DNA, 80 bp, synthetic construct
  misc_feature 1..80: note = Artificially Synthesized Probe
  source 1..80: mol_type = other DNA
tacatgcacagacaattttgtaagcaaattcagcgctatcacagacccaccaaatcccagcgtttcctcaatctctgctt

SEQ ID NO: 112421 - DNA, 80 bp, synthetic construct
  misc_feature 1..80: note = Artificially Synthesized Probe
  source 1..80: mol_type = other DNA
ccccatactgttctcatagtagtgaataagtctcatcagacctgatggcttttttattttttgtattttatgtctttaat

SEQ ID NO: 112422 - DNA, 80 bp, synthetic construct
  misc_feature 1..80: note = Artificially Synthesized Probe
  source 1..80: mol_type = other DNA
ctcccccctccccccaccccacaacaggccccggtgtgtgatgttccccttcctgtgtccatgtgttctcattgttcaat

SEQ ID NO: 112423 - DNA, 80 bp, synthetic construct; identical to SEQ ID NO: 37249
  misc_feature 1..80: note = Artificially Synthesized Probe
  source 1..80: mol_type = other DNA

SEQ ID NO: 112424 - DNA, 80 bp, synthetic construct
  misc_feature 1..80: note = Artificially Synthesized Probe
  source 1..80: mol_type = other DNA
taaaagtgttcctatttctccacatcctctccagcacctgttgtttcctgactttttaatgatcaccattctaactggtg

SEQ ID NO: 112425 - DNA, 80 bp, synthetic construct
  misc_feature 1..80: note = Artificially Synthesized Probe
  source 1..80: mol_type = other DNA
gtaaattttgtttgagttctttgtagattctggatattagccctttgtcagatgagtagattgcaaaaattttctcccat

SEQ ID NO: 112426 - DNA, 80 bp, synthetic construct; identical to SEQ ID NO: 37250
  misc_feature 1..80: note = Artificially Synthesized Probe
  source 1..80: mol_type = other DNA

SEQ ID NO: 112427 - DNA, 80 bp, synthetic construct
  misc_feature 1..80: note = Artificially Synthesized Probe
  source 1..80: mol_type = other DNA
ttctgttccattgatctatatctctgttttggtaccagtaccatgctgttttggttacagtagccttgtagtatagttta

SEQ ID NO: 112428 - DNA, 80 bp, synthetic construct
  misc_feature 1..80: note = Artificially Synthesized Probe
  source 1..80: mol_type = other DNA
ttaccttgggcagtgtggccattttcacgatattgattcttcctaccatgagcatgggatgttcttccatttgtttgtat

SEQ ID NO: 112429 - DNA, 80 bp, synthetic construct
  misc_feature 1..80: note = Artificially Synthesized Probe
  source 1..80: mol_type = other DNA
gaatgcttgtgatttttgtacattgattttgtatcctgagactttgctgaagttgcctatcagcttaaggagactttggg

SEQ ID NO: 112430 - DNA, 80 bp, synthetic construct
  misc_feature 1..80: note = Artificially Synthesized Probe
  source 1..80: mol_type = other DNA
gcatccctgtcttgtgccagttttcaaagggaatgcttccagtttttgcccattcagtatgatattggctgtgggtttgt

SEQ ID NO: 112431 - DNA, 80 bp, synthetic construct; identical to SEQ ID NO: 37135
  misc_feature 1..80: note = Artificially Synthesized Probe
  source 1..80: mol_type = other DNA

SEQ ID NO: 112432 - DNA, 80 bp, synthetic construct; identical to SEQ ID NO: 37251
  misc_feature 1..80: note = Artificially Synthesized Probe
  source 1..80: mol_type = other DNA

SEQ ID NO: 112433 - DNA, 80 bp, synthetic construct
  misc_feature 1..80: note = Artificially Synthesized Probe
  source 1..80: mol_type = other DNA
tttttctatcaattggaatagtttcagaaggaatggtaccagctcctccttgtacctctggtagaattcggctgtgaatt

SEQ ID NO: 112434 - DNA, 80 bp, synthetic construct
  misc_feature 1..80: note = Artificially Synthesized Probe
  source 1..80: mol_type = other DNA
atttgcatagaggtgtttatagtgttctctcatggtagtttgtatttctgtgggatcggtggtgatatcccctttagcat

SEQ ID NO: 112435 - DNA, 80 bp, synthetic construct
  misc_feature 1..80: note = Artificially Synthesized Probe
  source 1..80: mol_type = other DNA
tagttatttcttgctttctgctagcttttgaatgtgtttgctcttgcttctctagttcttttgattgtgatgttagggtg

SEQ ID NO: 112436 - DNA, 80 bp, synthetic construct; identical to SEQ ID NO: 37252
  misc_feature 1..80: note = Artificially Synthesized Probe
  source 1..80: mol_type = other DNA

SEQ ID NO: 112437 - DNA, 80 bp, synthetic construct
  misc_feature 1..80: note = Artificially Synthesized Probe
  source 1..80: mol_type = other DNA
tgtagatgtctattaggtctgcttggtgcagagctgagttccattcctggatatccttgttaactttctgtctcattgat

SEQ ID NO: 112438 - DNA, 80 bp, synthetic construct
  misc_feature 1..80: note = Artificially Synthesized Probe
  source 1..80: mol_type = other DNA
ctttagcattatgtaatggccttctttgtctcttttgatctttgttggtttaaagtctgttttatcagagactaggtttg

SEQ ID NO: 112439 - DNA, 80 bp, synthetic construct
  misc_feature 1..80: note = Artificially Synthesized Probe
  source 1..80: mol_type = other DNA
tcatcctttcttgcctgtcgccattaagacatgccttttgcctgctgccatgattgtgaggcctcctaagccacatggaa

SEQ ID NO: 112440 - DNA, 80 bp, synthetic construct; identical to SEQ ID NO: 37253
  misc_feature 1..80: note = Artificially Synthesized Probe
  source 1..80: mol_type = other DNA

SEQ ID NO: 112441 - DNA, 80 bp, synthetic construct
  misc_feature 1..80: note = Artificially Synthesized Probe
  source 1..80: mol_type = other DNA
gattaaggacacaggtaaggttacagagctaaggatgacagaataagaattcacacccagatctgtgttactctcaaatt

SEQ ID NO: 112442 - DNA, 80 bp, synthetic construct
  misc_feature 1..80: note = Artificially Synthesized Probe
  source 1..80: mol_type = other DNA
agggagtttaagtaagcttattgcatcaactcatgtgggatatttctaccaaaaaattattggcttaatattggtctgtg

SEQ ID NO: 112443 - DNA, 80 bp, synthetic construct
  misc_feature 1..80: note = Artificially Synthesized Probe
  source 1..80: mol_type = other DNA
aaaattgcataattatccttagagatatgaactaatgattattgtagctgagaactattaaaagatcaggaaaaacatac

SEQ ID NO: 112444 - DNA, 80 bp, synthetic construct
  misc_feature 1..80: note = Artificially Synthesized Probe
  source 1..80: mol_type = other DNA
cggaactattgaaataagggaacaggtcaagattactaatagtcaagattctttttgtttcaagtactggactcatccca

SEQ ID NO: 112445 - DNA, 80 bp, synthetic construct; identical to SEQ ID NO: 37254
  misc_feature 1..80: note = Artificially Synthesized Probe
  source 1..80: mol_type = other DNA

SEQ ID NO: 112446 - DNA, 80 bp, synthetic construct
  misc_feature 1..80: note = Artificially Synthesized Probe
  source 1..80: mol_type = other DNA
cttactctgtgtatgtgtatgtggttctacttataagaagtcaatttattactgaattgccttagttctccctccctaaa

SEQ ID NO: 112447 - DNA, 80 bp, synthetic construct
  misc_feature 1..80: note = Artificially Synthesized Probe
  source 1..80: mol_type = other DNA
tttaataaggatcttcctgcgagttggtgaggtctagtgtagtgactgtactttatcacaagtcactagctcagtgcctg

SEQ ID NO: 112448 - DNA, 80 bp, synthetic construct
  misc_feature 1..80: note = Artificially Synthesized Probe
  source 1..80: mol_type = other DNA
ctctggatttccacagttctatgccccatcctatctgtgctttctctggtatatggatcttcacataaaaatcaaaatct

SEQ ID NO: 112449 - DNA, 80 bp, synthetic construct; identical to SEQ ID NO: 37255
  misc_feature 1..80: note = Artificially Synthesized Probe
  source 1..80: mol_type = other DNA

SEQ ID NO: 112450 - DNA, 80 bp, synthetic construct
  misc_feature 1..80: note = Artificially Synthesized Probe
  source 1..80: mol_type = other DNA
aggccaaaatagtaaatttaaagttttgcccatcctccaagtcttccataagcaacactttccacagctttttagaggaa

SEQ ID NO: 112451 - DNA, 80 bp, synthetic construct
  misc_feature 1..80: note = Artificially Synthesized Probe
  source 1..80: mol_type = other DNA
gatactatttggttacatttaagagtcctaaccaggactttctctaagaaatgaaaattaatgagcttttgtttttttaa

SEQ ID NO: 112452 - DNA, 80 bp, synthetic construct
  misc_feature 1..80: note = Artificially Synthesized Probe
  source 1..80: mol_type = other DNA
aagcctctactaaaagacattccaccactgattatattttaaagcttgctatacattaagcactttgcatcaccttagct

SEQ ID NO: 112453 - DNA, 80 bp, synthetic construct
  misc_feature 1..80: note = Artificially Synthesized Probe
  source 1..80: mol_type = other DNA
agaaaaatgttttgaaaaatatttatactatgtaaaccctgtcaagtaattgttaaccttgtattcatctgaacacaatt

SEQ ID NO: 112454 - DNA, 80 bp, synthetic construct
  misc_feature 1..80: note = Artificially Synthesized Probe
  source 1..80: mol_type = other DNA
tgatattatgcatgaacagtgagcataacctgctaatttcctctatatttctaataaatatcacacctttcaaaaatcag

SEQ ID NO: 112455 - DNA, 80 bp, synthetic construct; identical to SEQ ID NO: 37256
  misc_feature 1..80: note = Artificially Synthesized Probe
  source 1..80: mol_type = other DNA

SEQ ID NO: 112456 - DNA, 80 bp, synthetic construct
  misc_feature 1..80: note = Artificially Synthesized Probe
  source 1..80: mol_type = other DNA
aaatggggagatgatccagaaaaaggagaaaaagcacatttaatttaatgttaggaatgaaaaaggagacataactacag

SEQ ID NO: 112457 - DNA, 80 bp, synthetic construct
  misc_feature 1..80: note = Artificially Synthesized Probe
  source 1..80: mol_type = other DNA
gtgggcagatggcttgaacccaggagtttgcgatcagcctgggcaccatggtgagaccccatctctagaaaaaataaaca

SEQ ID NO: 112458 - DNA, 80 bp, synthetic construct
  misc_feature 1..80: note = Artificially Synthesized Probe
  source 1..80: mol_type = other DNA
ataaataaatggacatttaaaataaccttatgacaataaatttcaaatggatgaaatcttaaacttctagtaagatataa

SEQ ID NO: 112459 - DNA, 80 bp, synthetic construct; identical to SEQ ID NO: 37257
  misc_feature 1..80: note = Artificially Synthesized Probe
  source 1..80: mol_type = other DNA

SEQ ID NO: 112460 - DNA, 80 bp, synthetic construct
  misc_feature 1..80: note = Artificially Synthesized Probe
  source 1..80: mol_type = other DNA
gtttcctctcctgttgtcctcagaaattttcccaaatcatctctattttcaagccctttgctaaatctcactcatctcat

SEQ ID NO: 112461 - DNA, 80 bp, synthetic construct
  misc_feature 1..80: note = Artificially Synthesized Probe
  source 1..80: mol_type = other DNA
tcctgccttctggatcctaattccttgtgtctgctctaaagctatctatggattattagtgtatgcttcctcagcttcaa

SEQ ID NO: 112462 - DNA, 80 bp, synthetic construct
  misc_feature 1..80: note = Artificially Synthesized Probe
  source 1..80: mol_type = other DNA
ctcagactgtctctgagatgctagaacagctttaggaatgtgcaactgtttatgccttgctagtttgggattatttaata

SEQ ID NO: 112463 - DNA, 80 bp, synthetic construct
  misc_feature 1..80: note = Artificially Synthesized Probe
  source 1..80: mol_type = other DNA
cacattcttcattttggggagttctatttagtgagtgaaaggattaatctacaacatttagataataactgattaaagtt

SEQ ID NO: 112464 - DNA, 80 bp, synthetic construct; identical to SEQ ID NO: 37258
  misc_feature 1..80: note = Artificially Synthesized Probe
  source 1..80: mol_type = other DNA

SEQ ID NO: 112465 - DNA, 80 bp, synthetic construct
  misc_feature 1..80: note = Artificially Synthesized Probe
  source 1..80: mol_type = other DNA
cttcatcttagagactatttatcccaattgaagactttttttggcgttacccatgagtaaagacagaacaactacatctt

SEQ ID NO: 112466 - DNA, 80 bp, synthetic construct
  misc_feature 1..80: note = Artificially Synthesized Probe
  source 1..80: mol_type = other DNA
gcattattgctcatttggttatctatgagatgttttaaatttaacatgcccaaaactgaactccaggtgtttctacccaa

SEQ ID NO: 112467 - DNA, 80 bp, synthetic construct
  misc_feature 1..80: note = Artificially Synthesized Probe
  source 1..80: mol_type = other DNA
ggacttccctcaagtttcatctcagtttgaaaacagtcactgggttgggagatttggccagtgttgaaaagtaatatatt

SEQ ID NO: 112468 - DNA, 80 bp, synthetic construct; identical to SEQ ID NO: 37259
  misc_feature 1..80: note = Artificially Synthesized Probe
  source 1..80: mol_type = other DNA

SEQ ID NO: 112469 - DNA, 80 bp, synthetic construct
  misc_feature 1..80: note = Artificially Synthesized Probe
  source 1..80: mol_type = other DNA
taaaaaatgtcttttatgtagaaataaacatttcatatatatatttatattccacattgaaaaactacttttatgaagga

SEQ ID NO: 112470 - DNA, 80 bp, synthetic construct
  misc_feature 1..80: note = Artificially Synthesized Probe
  source 1..80: mol_type = other DNA
tgcctaaagtagtgcccgacacaaagtagatgctaattacattttgttggattttgttgaatattgattttgtacatatc

SEQ ID NO: 112471 - DNA, 80 bp, synthetic construct
  misc_feature 1..80: note = Artificially Synthesized Probe
  source 1..80: mol_type = other DNA
cacaaatgacgaacaaacatgtaagaagacattctgtctcactcacagccaggaatggctaactaaaatctaactaaaaa

SEQ ID NO: 112472 - DNA, 80 bp, synthetic construct
  misc_feature 1..80: note = Artificially Synthesized Probe
  source 1..80: mol_type = other DNA
aaaagcattcaaaccatttgactcaagaaacacacaatttgtatcctggtgtagggttgcatgcctgtagtaccagctac

SEQ ID NO: 112473 - DNA, 80 bp, synthetic construct; identical to SEQ ID NO: 37260
  misc_feature 1..80: note = Artificially Synthesized Probe
  source 1..80: mol_type = other DNA

SEQ ID NO: 112474 - DNA, 80 bp, synthetic construct
  misc_feature 1..80: note = Artificially Synthesized Probe
  source 1..80: mol_type = other DNA
ataattataatatttttaagctaataagaataaaacagattttaaaactaagccagctgaaagcaagagtaacaacttat

SEQ ID NO: 112475 - DNA, 80 bp, synthetic construct
  misc_feature 1..80: note = Artificially Synthesized Probe
  source 1..80: mol_type = other DNA
gtaacagctactaggaaaatggagttcgagccttggtgacagttcaattctgtctcctttctctttcttttagttatcag

SEQ ID NO: 112476 - DNA, 80 bp, synthetic construct
  misc_feature 1..80: note = Artificially Synthesized Probe
  source 1..80: mol_type = other DNA
caagaaatcttgtttgttctgtcttcaaaataaatccagagtcacactatatctccccacctccctgagtgctgttttca

SEQ ID NO: 112477 - DNA, 80 bp, synthetic construct
  misc_feature 1..80: note = Artificially Synthesized Probe
  source 1..80: mol_type = other DNA
tttttttagcttaattttgtctcttgggagtaaaccaagctagatgttgaaactatatatatgcaaactgaagtgaacta

SEQ ID NO: 112478 - DNA, 80 bp, synthetic construct; identical to SEQ ID NO: 37261
  misc_feature 1..80: note = Artificially Synthesized Probe
  source 1..80: mol_type = other DNA

SEQ ID NO: 112479 - DNA, 80 bp, synthetic construct
  misc_feature 1..80: note = Artificially Synthesized Probe
  source 1..80: mol_type = other DNA
gcctccgcctcctgagctcaagcaattctcgtgcctcagcctcctgaaagctgggaccacaggtctgcccaccacgcagg

SEQ ID NO: 112480 - DNA, 80 bp, synthetic construct
  misc_feature 1..80: note = Artificially Synthesized Probe
  source 1..80: mol_type = other DNA
catgttggattagctcttctgtagtgtcctgatgacctgtgaccaatgataagagtatggaattaggtagtttctatgaa

SEQ ID NO: 112481 - DNA, 80 bp, synthetic construct
  misc_feature 1..80: note = Artificially Synthesized Probe
  source 1..80: mol_type = other DNA
aaactgtttcaaattgctgaatagcctggctaatcctgcctgtctccaatcacatactccgaatccatatttttctcact

SEQ ID NO: 112482 - DNA, 80 bp, synthetic construct; identical to SEQ ID NO: 37262
  misc_feature 1..80: note = Artificially Synthesized Probe
  source 1..80: mol_type = other DNA

SEQ ID NO: 112483 - DNA, 80 bp, synthetic construct
  misc_feature 1..80: note = Artificially Synthesized Probe
  source 1..80: mol_type = other DNA
ttcagcatcactatacacatgttcattttttggttttagatattaatctatacccagttcaaactgtggaaactgaacta

SEQ ID NO: 112484 - DNA, 80 bp, synthetic construct
  misc_feature 1..80: note = Artificially Synthesized Probe
  source 1..80: mol_type = other DNA
ggagtgatattgtaaatactttaaagattttgattgagtgagaggtgtgagctatattttcttctttcctgtatgatata

SEQ ID NO: 112485 - DNA, 80 bp, synthetic construct
  misc_feature 1..80: note = Artificially Synthesized Probe
  source 1..80: mol_type = other DNA
taaattaatagtttaaataagattttgccagcatttgaaatgaacaaatgtttggacaatgaaaacatcagtatgaaagg

SEQ ID NO: 112486 - DNA, 80 bp, synthetic construct
  misc_feature 1..80: note = Artificially Synthesized Probe
  source 1..80: mol_type = other DNA
tttcagtatttcaggataaccaacatcttttttctattaatctagaataaatttccatatattaatgttgtttactttta

SEQ ID NO: 112487 - DNA, 80 bp, synthetic construct; identical to SEQ ID NO: 37263
  misc_feature 1..80: note = Artificially Synthesized Probe
  source 1..80: mol_type = other DNA

SEQ ID NO: 112488 - DNA, 80 bp, synthetic construct; identical to SEQ ID NO: 37136
  misc_feature 1..80: note = Artificially Synthesized Probe
  source 1..80: mol_type = other DNA

SEQ ID NO: 112489 - DNA, 80 bp, synthetic construct
  misc_feature 1..80: note = Artificially Synthesized Probe
  source 1..80: mol_type = other DNA
aattaatctctgtgtgcctcaatttcccattggtaatgtggaaacagtatcattctacttcacagggttcttatgaagat

SEQ ID NO: 112490 - DNA, 80 bp, synthetic construct
  misc_feature 1..80: note = Artificially Synthesized Probe
  source 1..80: mol_type = other DNA
atgtattttgtattggaaacctgttataatattgttctcatatccagagcagtggacaggttttagaacggagatagtat

SEQ ID NO: 112491 - DNA, 80 bp, synthetic construct
  misc_feature 1..80: note = Artificially Synthesized Probe
  source 1..80: mol_type = other DNA
aattcaggccatttcagacattacttgtaaacacaaatacagtaatttgttcaattatttgttttatagcaccaagcgat

SEQ ID NO: 112492 - DNA, 80 bp, synthetic construct
  misc_feature 1..80: note = Artificially Synthesized Probe
  source 1..80: mol_type = other DNA
ctttattaacatccttaagttttattaataatacagacttgtcacagtaaaagaaattgtttaccttacattgataatta

SEQ ID NO: 112493 - DNA, 80 bp, synthetic construct; identical to SEQ ID NO: 37264
  misc_feature 1..80: note = Artificially Synthesized Probe
  source 1..80: mol_type = other DNA

SEQ ID NO: 112494 - DNA, 80 bp, synthetic construct
  misc_feature 1..80: note = Artificially Synthesized Probe
  source 1..80: mol_type = other DNA
cagatgaaatgaagaccactcggaatgtgtttaattaatttgtcatagataagattctaggcttgcacagtttgtagatg

SEQ ID NO: 112495 - DNA, 80 bp, synthetic construct
  misc_feature 1..80: note = Artificially Synthesized Probe
  source 1..80: mol_type = other DNA
aactctaacatataaaaaggataattggaatgattatgattgaatcaaagatgcagagagctggaatataattagaaaaa

SEQ ID NO: 112496 - DNA, 80 bp, synthetic construct
  misc_feature 1..80: note = Artificially Synthesized Probe
  source 1..80: mol_type = other DNA
tgtagtcccagctactggggaggctgaggcaggagaatggcgtcaacccgggaggcggagcttgcagtgagctgagatcc

SEQ ID NO: 112497 - DNA, 80 bp, synthetic construct
  misc_feature 1..80: note = Artificially Synthesized Probe
  source 1..80: mol_type = other DNA
tctccttcacctttttgctgaaaaccctatcttttgaaaaacatctgccctgaaatccctacttcataccacaacttcct

SEQ ID NO: 112498 - DNA, 80 bp, synthetic construct
  misc_feature 1..80: note = Artificially Synthesized Probe
  source 1..80: mol_type = other DNA
atccttttaagtaaaagaagaagaaagataagtcttacaaattctgagttacctaatcccatttgtgactgacagcccaa

SEQ ID NO: 112499 - DNA, 80 bp, synthetic construct; identical to SEQ ID NO: 37265
  misc_feature 1..80: note = Artificially Synthesized Probe
  source 1..80: mol_type = other DNA

SEQ ID NO: 112500 - DNA, 80 bp, synthetic construct
  misc_feature 1..80: note = Artificially Synthesized Probe
  source 1..80: mol_type = other DNA
ctagttttctactctctatgtcacgcagtttttgctttttgttttgttctctgtagggaagagaaatggggcctagagag

SEQ ID NO: 112501 - DNA, 80 bp, synthetic construct
  misc_feature 1..80: note = Artificially Synthesized Probe
  source 1..80: mol_type = other DNA
gttccagtagttctaaattttagcaatcattttgtctctgtacaatttacttatggcttctatgtgatttatattttggt

SEQ ID NO: 112502 - DNA, 80 bp, synthetic construct
  misc_feature 1..80: note = Artificially Synthesized Probe
  source 1..80: mol_type = other DNA
cttttaagtgtgacagctgcaagagggcacaggctaatgatgttaaaatatttcagaagtatagtctcatattgcttgaa

SEQ ID NO: 112503 - DNA, 80 bp, synthetic construct; identical to SEQ ID NO: 37266
  misc_feature 1..80: note = Artificially Synthesized Probe
  source 1..80: mol_type = other DNA

SEQ ID NO: 112504 - DNA, 80 bp, synthetic construct
  misc_feature 1..80: note = Artificially Synthesized Probe
  source 1..80: mol_type = other DNA
atcacttttagtacatagtcataattttggagcccttgagtatgtagcgaagccatctttcctttttcttatcttggaga

SEQ ID NO: 112505 - DNA, 80 bp, synthetic construct
  misc_feature 1..80: note = Artificially Synthesized Probe
  source 1..80: mol_type = other DNA
aaatgggccgggtgtggtggctcacgcctgtaatcccagcactttgggaggctgaagcaggtggatcacgaggtcaggag

SEQ ID NO: 112506 - DNA, 80 bp, synthetic construct
  misc_feature 1..80: note = Artificially Synthesized Probe
  source 1..80: mol_type = other DNA
cgtgccactgccctctagcctgggcaacagagtgagactctgttttaaagaaaaaaaaagtgttaaatgaatattagttg

SEQ ID NO: 112507 - DNA, 80 bp, synthetic construct; identical to SEQ ID NO: 37267
  misc_feature 1..80: note = Artificially Synthesized Probe
  source 1..80: mol_type = other DNA

SEQ ID NO: 112508 - DNA, 80 bp, synthetic construct
  misc_feature 1..80: note = Artificially Synthesized Probe
  source 1..80: mol_type = other DNA
tattttgtgtgagattgctatattactttaacttgtctatttctatgtaaatcaccacaaaattgtagtaaatcttttat

SEQ ID NO: 112509 - DNA, 80 bp, synthetic construct
  misc_feature 1..80: note = Artificially Synthesized Probe
  source 1..80: mol_type = other DNA
tctttagtttttactgatgtactctacctgcctagaagagtgcctggcacttggtaggtgcccatatatatttgattaaa

SEQ ID NO: 112510 - DNA, 80 bp, synthetic construct
  misc_feature 1..80: note = Artificially Synthesized Probe
  source 1..80: mol_type = other DNA
gtgctagacatggtattaatggctttttgtgcttcatgtcatctaatcctcacaagttgtctgtgaagtggagatgatta

SEQ ID NO: 112511 - DNA, 80 bp, synthetic construct
  misc_feature 1..80: note = Artificially Synthesized Probe
  source 1..80: mol_type = other DNA
tcaggttactctgcagatggaaattataaaattattcatactgattagctatgtgtttaagtctccttttattttagaat

SEQ ID NO: 112512 - DNA, 80 bp, synthetic construct; identical to SEQ ID NO: 37268
  misc_feature 1..80: note = Artificially Synthesized Probe
  source 1..80: mol_type = other DNA

SEQ ID NO: 112513 - DNA, 80 bp, synthetic construct
  misc_feature 1..80: note = Artificially Synthesized Probe
  source 1..80: mol_type = other DNA
agtgatgctgatcagcacagttgtagcatttccatttggccacttgacattcttcattgttggcttggagtttttattct

SEQ ID NO: 112514 - DNA, 80 bp, synthetic construct
  misc_feature 1..80: note = Artificially Synthesized Probe
  source 1..80: mol_type = other DNA
acatattaaaataatgataaatagtaaaatcgatccattgataacaattagtttgaagtgttcatgcatactaaaaaaat

SEQ ID NO: 112515 - DNA, 80 bp, synthetic construct; identical to SEQ ID NO: 37269
  misc_feature 1..80: note = Artificially Synthesized Probe
  source 1..80: mol_type = other DNA

SEQ ID NO: 112516 - DNA, 80 bp, synthetic construct
  misc_feature 1..80: note = Artificially Synthesized Probe
  source 1..80: mol_type = other DNA
cagtaatagcctcttctgttcaagaaaactgctaacatccgttcatgaaaattctgttctttttattgcttcaaaagatg

SEQ ID NO: 112517 - DNA, 80 bp, synthetic construct
  misc_feature 1..80: note = Artificially Synthesized Probe
  source 1..80: mol_type = other DNA
tctcactgtgtttgtgactaatatatccagagtattttccttaactccagaagtttctcgtatgcatcttctgaagaatc

SEQ ID NO: 112518 - DNA, 80 bp, synthetic construct
  misc_feature 1..80: note = Artificially Synthesized Probe
  source 1..80: mol_type = other DNA
gaagtggcagtgacctaaacttctggagtaaaactccatgtttattatctgaaagccataaattgacagattccttaagc

SEQ ID NO: 112519 - DNA, 80 bp, synthetic construct
  misc_feature 1..80: note = Artificially Synthesized Probe
  source 1..80: mol_type = other DNA
cattttaataaattttgcatagtaataagaatacacttttctcaaaacttgagtgcttttcaagacatgttgacataaca

SEQ ID NO: 112520 - DNA, 80 bp, synthetic construct
  misc_feature 1..80: note = Artificially Synthesized Probe
  source 1..80: mol_type = other DNA
ctttaaatgcagatctctcccaggatttttgccaacctatgacattttatcacttataatttccacaccatggataataa

SEQ ID NO: 112521 - DNA, 80 bp, synthetic construct; identical to SEQ ID NO: 37270
  misc_feature 1..80: note = Artificially Synthesized Probe
  source 1..80: mol_type = other DNA

SEQ ID NO: 112522 - DNA, 80 bp, synthetic construct
  misc_feature 1..80: note = Artificially Synthesized Probe
  source 1..80: mol_type = other DNA
gaagagtcaagagaatattatagaaacaattcccatacatattaaagatgacagagtttattttgaatgatttttaaaat

SEQ ID NO: 112523 - DNA, 80 bp, synthetic construct
  misc_feature 1..80: note = Artificially Synthesized Probe
  source 1..80: mol_type = other DNA
tacctatcatagtacctgaagggtttgttggaaacctgacttacgaatccatttcgtcaactgcaataaatgtaagctgg

SEQ ID NO: 112524 - DNA, 80 bp, synthetic construct; identical to SEQ ID NO: 37271
  misc_feature 1..80: note = Artificially Synthesized Probe
  source 1..80: mol_type = other DNA

SEQ ID NO: 112525 - DNA, 80 bp, synthetic construct
  misc_feature 1..80: note = Artificially Synthesized Probe
  source 1..80: mol_type = other DNA
ttgaatcctctttttttaatgctgattcacttttgtttcatttaatattctctttttcttttatagtcccagaaacttca

SEQ ID NO: 112526 - DNA, 80 bp, synthetic construct
  misc_feature 1..80: note = Artificially Synthesized Probe
  source 1..80: mol_type = other DNA
aagagctttcaccatttacattatatagcttttttgctgccgcaagaactagaaaaggacttggtccttccagtattctt

SEQ ID NO: 112527 - DNA, 80 bp, synthetic construct
  misc_feature 1..80: note = Artificially Synthesized Probe
  source 1..80: mol_type = other DNA
tttttttttgcaatttgagcttcagaatttcctgttctgtttaaagctactttggaactactctgtccaaatacaaatta

SEQ ID NO: 112528 - DNA, 80 bp, synthetic construct; identical to SEQ ID NO: 37272
  misc_feature 1..80: note = Artificially Synthesized Probe
  source 1..80: mol_type = other DNA

SEQ ID NO: 112529 - DNA, 80 bp, synthetic construct
  misc_feature 1..80: note = Artificially Synthesized Probe
  source 1..80: mol_type = other DNA
actatttttttaaacttctttatttcctacaatttaaggatgcttatggaaaacacaagcaagcgtttgacagatatata

SEQ ID NO: 112530 - DNA, 80 bp, synthetic construct; identical to SEQ ID NO: 37137
  misc_feature 1..80: note = Artificially Synthesized Probe
  source 1..80: mol_type = other DNA

SEQ ID NO: 112531 - DNA, 80 bp, synthetic construct
  misc_feature 1..80: note = Artificially Synthesized Probe
  source 1..80: mol_type = other DNA
ccaagggaatctttttaaccttttagaaaggtattcatctttattctggacttctggtcatctttccagatagcatatga

SEQ ID NO: 112532 - DNA, 80 bp, synthetic construct
  misc_feature 1..80: note = Artificially Synthesized Probe
  source 1..80: mol_type = other DNA
tgtctgtgatttctagcatttaattgccaaaatgtaattaacaagcatttatttaagaaaagtttcttatttttttcccc

SEQ ID NO: 112533 - DNA, 80 bp, synthetic construct
  misc_feature 1..80: note = Artificially Synthesized Probe
  source 1..80: mol_type = other DNA
tcaaaagcaggcattaactttatgtcatcgggaacaatgactttctttctggaaaccaagatattactttaaaacttgat

SEQ ID NO: 112534 - DNA, 80 bp, synthetic construct; identical to SEQ ID NO: 37273
  misc_feature 1..80: note = Artificially Synthesized Probe
  source 1..80: mol_type = other DNA

SEQ ID NO: 112535 - DNA, 80 bp, synthetic construct
  misc_feature 1..80: note = Artificially Synthesized Probe
  source 1..80: mol_type = other DNA
tgcctttgagacttactgtgcttcagtagggacattgcttacctcttaatgcaaaatgggagttacaaagatgtgtacat

SEQ ID NO: 112536 - DNA, 80 bp, synthetic construct
  misc_feature 1..80: note = Artificially Synthesized Probe
  source 1..80: mol_type = other DNA
atgccattatgtgaacatgagaataacttgtattctaagatttgtaaacaggttttctcaatagaagcacatctttaata

SEQ ID NO: 112537 - DNA, 80 bp, synthetic construct
  misc_feature 1..80: note = Artificially Synthesized Probe
  source 1..80: mol_type = other DNA
ttcctttaaatgtactctcatgccatctttttccctgtcttggcatctagttactatatctgctttcctttttctatttc

SEQ ID NO: 112538 - DNA, 80 bp, synthetic construct; identical to SEQ ID NO: 37274
  misc_feature 1..80: note = Artificially Synthesized Probe
  source 1..80: mol_type = other DNA

SEQ ID NO: 112539 - DNA, 80 bp, synthetic construct
  misc_feature 1..80: note = Artificially Synthesized Probe
  source 1..80: mol_type = other DNA
ctcttattattatgccctcttgggttcagttgtttctctggtttttagcccttcctaaccaaaatcataatttgcttgtt

SEQ ID NO: 112540 - DNA, 80 bp, synthetic construct
  misc_feature 1..80: note = Artificially Synthesized Probe
  source 1..80: mol_type = other DNA
tttgtaaatagtaagcaggaaagaatgactgaaataaagagattcagtaagcccctaaattcagtgaatttctagagatt

SEQ ID NO: 112541 - DNA, 80 bp, synthetic construct
  misc_feature 1..80: note = Artificially Synthesized Probe
  source 1..80: mol_type = other DNA
cttacagtgattctagctgaaaaaaaaaattggtccaaaaaattatgcaatgataatgtccacactcaaccagtgctaga

SEQ ID NO: 112542 - DNA, 80 bp, synthetic construct; identical to SEQ ID NO: 37275
  misc_feature 1..80: note = Artificially Synthesized Probe
  source 1..80: mol_type = other DNA

SEQ ID NO: 112543 - DNA, 80 bp, synthetic construct
  misc_feature 1..80: note = Artificially Synthesized Probe
  source 1..80: mol_type = other DNA
cagtgtcaaattagaaatagaggaatcggctgggaaaactcccaatttaagcttcatggaagcagatattttaaaattat

SEQ ID NO: 112544 - DNA, 80 bp, synthetic construct
  misc_feature 1..80: note = Artificially Synthesized Probe
  source 1..80: mol_type = other DNA
gtgggtattaaaaatgaatttagatgagttcagaaaactcaagtatctctgaccatgcacaagttggatttaaattgcag

SEQ ID NO: 112545 - DNA, 80 bp, synthetic construct
  misc_feature 1..80: note = Artificially Synthesized Probe
  source 1..80: mol_type = other DNA
aggtcaggagttcaagaccagcctggccaacatggctaaactctgtctctactaaaaactacaaatattagctgggtgtg

SEQ ID NO: 112546 - DNA, 80 bp, synthetic construct
  misc_feature 1..80: note = Artificially Synthesized Probe
  source 1..80: mol_type = other DNA
ggaaaagaaggtgcccaattcatccttgtatcataaactgagcacactctatggcacaaaataaatgctaatatttgttt

SEQ ID NO: 112547 - DNA, 80 bp, synthetic construct; identical to SEQ ID NO: 37276
  misc_feature 1..80: note = Artificially Synthesized Probe
  source 1..80: mol_type = other DNA

SEQ ID NO: 112548 - DNA, 80 bp, synthetic construct
  misc_feature 1..80: note = Artificially Synthesized Probe
  source 1..80: mol_type = other DNA
cattacttaagagtctactcaaagggaaattgcatttcagtgctttacgtttagtcttggtcttgtgtgaaatcatatgc

SEQ ID NO: 112549 - DNA, 80 bp, synthetic construct
  misc_feature 1..80: note = Artificially Synthesized Probe
  source 1..80: mol_type = other DNA
ttcttagaactctttgagacagctggggaaaaagggggaaatgaactagcagtcacttttaacgggctgatttatatttt

SEQ ID NO: 112550 - DNA, 80 bp, synthetic construct
  misc_feature 1..80: note = Artificially Synthesized Probe
  source 1..80: mol_type = other DNA
gaaatatcattggtctaattcatcaacagcttacctgctgtgtcacacatgtagtatacatgacatatcttgcctttgtg

SEQ ID NO: 112551 - DNA, 80 bp, synthetic construct; identical to SEQ ID NO: 37277
  misc_feature 1..80: note = Artificially Synthesized Probe
  source 1..80: mol_type = other DNA

SEQ ID NO: 112552 - DNA, 80 bp, synthetic construct
  misc_feature 1..80: note = Artificially Synthesized Probe
  source 1..80: mol_type = other DNA
ttctggatttgaatttgagccccatgacctactagttgtataatcttggcaaaggctcatgactctgtgagcctctgtaa

SEQ ID NO: 112553 - DNA, 80 bp, synthetic construct
  misc_feature 1..80: note = Artificially Synthesized Probe
  source 1..80: mol_type = other DNA
taaaacaacccactaaataattattggcatagcagtaggagtaaactgtgaagttggaaaatgatttttctccttagttc

SEQ ID NO: 112554 - DNA, 80 bp, synthetic construct
  misc_feature 1..80: note = Artificially Synthesized Probe
  source 1..80: mol_type = other DNA
tactgttgcccccattcccatgttacagatgaagaagccatgattgagctagattagatgaaaaggaccttgaaaaaatt

SEQ ID NO: 112555 - DNA, 80 bp, synthetic construct; identical to SEQ ID NO: 37278
  misc_feature 1..80: note = Artificially Synthesized Probe
  source 1..80: mol_type = other DNA

SEQ ID NO: 112556 - DNA, 80 bp, synthetic construct
  misc_feature 1..80: note = Artificially Synthesized Probe
  source 1..80: mol_type = other DNA
tattttataaaaatgttcttatatgattctgaaaacaaggaagtgaatagttaatagcatttaattgccagatcccttga

SEQ ID NO: 112557 - DNA, 80 bp, synthetic construct
  misc_feature 1..80: note = Artificially Synthesized Probe
  source 1..80: mol_type = other DNA
caggtagagcggtgtaggcagatcagggatcacctgagtattctttaaagcactatgttttgcataatggcagcaagtta

SEQ ID NO: 112558 - DNA, 80 bp, synthetic construct
  misc_feature 1..80: note = Artificially Synthesized Probe
  source 1..80: mol_type = other DNA
tggctaattggacatttctgtgggaagtaaccagtttctctaatgtgcagtcactttggtgggctaggatattgttcttt

SEQ ID NO: 112559 - DNA, 80 bp, synthetic construct; identical to SEQ ID NO: 37279
  misc_feature 1..80: note = Artificially Synthesized Probe
  source 1..80: mol_type = other DNA

SEQ ID NO: 112560 - DNA, 80 bp, synthetic construct
  misc_feature 1..80: note = Artificially Synthesized Probe
  source 1..80: mol_type = other DNA
catttgcttctgagcttttgaggatgtgattggtgcttcgaactggaagatatttagtgactggttcaatactgtaatga

SEQ ID NO: 112561 - DNA, 80 bp, synthetic construct
  misc_feature 1..80: note = Artificially Synthesized Probe
  source 1..80: mol_type = other DNA
tatgtatacactttaactttgggcatatgtttatctcttaagttccagatgtcgtgcagaatatgcagtgcatggcaact

SEQ ID NO: 112562 - DNA, 80 bp, synthetic construct
  misc_feature 1..80: note = Artificially Synthesized Probe
  source 1..80: mol_type = other DNA
actttcataaagcttcttgccaatacctcatatgtctttaaagtaagagcttcaacctcagctggtgaaggtgatgaaag

SEQ ID NO: 112563 - DNA, 80 bp, synthetic construct; identical to SEQ ID NO: 37280
  misc_feature 1..80: note = Artificially Synthesized Probe
  source 1..80: mol_type = other DNA

SEQ ID NO: 112564 - DNA, 80 bp, synthetic construct
  misc_feature 1..80: note = Artificially Synthesized Probe
  source 1..80: mol_type = other DNA
tttcctgaactatatggttgcagtatcagactcattttcatctattttctcccctttataccagcctttatctttcatgt

SEQ ID NO: 112565 - DNA, 80 bp, synthetic construct
  misc_feature 1..80: note = Artificially Synthesized Probe
  source 1..80: mol_type = other DNA
catccatctgccatctaaaatgtaaacttgttttgcctctgtttctagagctcttgtgaaatcttgttcagctgcgtatc

SEQ ID NO: 112566 - DNA, 80 bp, synthetic construct
  misc_feature 1..80: note = Artificially Synthesized Probe
  source 1..80: mol_type = other DNA
ccacttcactgtagatattggcaataattgttaacttctggcacatccagaccctttatcttggaaacgtctttcaagcc

SEQ ID NO: 112567 - DNA, 80 bp, synthetic construct
  misc_feature 1..80: note = Artificially Synthesized Probe
  source 1..80: mol_type = other DNA
tttccctttccaggatggaatagttacatttcaacaacaccatctctttgctccttagatctcataccatgtcattgtga

SEQ ID NO: 112568 - DNA, 80 bp, synthetic construct
  misc_feature 1..80: note = Artificially Synthesized Probe
  source 1..80: mol_type = other DNA
ttcatcgtccttaattgtcccagctgctccaaaattttctatgtatcccttgtttattcttcataggaaatatgttcata

SEQ ID NO: 112569 - DNA, 80 bp, synthetic construct; identical to SEQ ID NO: 37281
  misc_feature 1..80: note = Artificially Synthesized Probe
  source 1..80: mol_type = other DNA

SEQ ID NO: 112570 - DNA, 80 bp, synthetic construct
  misc_feature 1..80: note = Artificially Synthesized Probe
  source 1..80: mol_type = other DNA
ctttttcttagttttctatgcctgttcttgacaatccattggaccccaagcctcatagttttatacaattccttactcca

SEQ ID NO: 112571 - DNA, 80 bp, synthetic construct
  misc_feature 1..80: note = Artificially Synthesized Probe
  source 1..80: mol_type = other DNA
aacatcttaactagccttatcacccacactactttagcctacccataagtctcatctttcctcctactcacttaattgaa

SEQ ID NO: 112572 - DNA, 80 bp, synthetic construct; identical to SEQ ID NO: 37282
  misc_feature 1..80: note = Artificially Synthesized Probe
  source 1..80: mol_type = other DNA

SEQ ID NO: 112573 - DNA, 80 bp, synthetic construct
  misc_feature 1..80: note = Artificially Synthesized Probe
  source 1..80: mol_type = other DNA
taataattgactagattctcttctttaaacatatccaaccatttttcatcatcagattgctttgcttcctttaactgtat

SEQ ID NO: 112574 - DNA, 80 bp, synthetic construct
  misc_feature 1..80: note = Artificially Synthesized Probe
  source 1..80: mol_type = other DNA
aagaatctctctaggtaattccgatattctgtatgtattggagagtactggagtagattaccaggaacttttgaggacag

SEQ ID NO: 112575 - DNA, 80 bp, synthetic construct
  misc_feature 1..80: note = Artificially Synthesized Probe
  source 1..80: mol_type = other DNA
gtcttgatcattgggcaggagctgagtctttgagaactggcaaataaaattacaggacaacatatctgaaataaatgaga

SEQ ID NO: 112576 - DNA, 80 bp, synthetic construct; identical to SEQ ID NO: 37283
  misc_feature 1..80: note = Artificially Synthesized Probe
  source 1..80: mol_type = other DNA

SEQ ID NO: 112577 - DNA, 80 bp, synthetic construct; identical to SEQ ID NO: 37138
  misc_feature 1..80: note = Artificially Synthesized Probe
  source 1..80: mol_type = other DNA

SEQ ID NO: 112578 - DNA, 80 bp, synthetic construct
  misc_feature 1..80: note = Artificially Synthesized Probe
  source 1..80: mol_type = other DNA
attaaacatattgtactatgaactatgtactttcctactactgagtaccattgcttctcaaagcttgaattctgcatcag

SEQ ID NO: 112579 - DNA, 80 bp, synthetic construct
  misc_feature 1..80: note = Artificially Synthesized Probe
  source 1..80: mol_type = other DNA
ttccaccgcaaactctttgcttgtaggaaccatgtcttatttgtctttatttactcacagttctaacagaaagccttgga

SEQ ID NO: 112580 - DNA, 80 bp, synthetic construct
  misc_feature 1..80: note = Artificially Synthesized Probe
  source 1..80: mol_type = other DNA
tttaaggagaatcatttatataaagcatgagtattaattgctgcttcaaaaatattttgatttttatttttaaaattgtt

SEQ ID NO: 112581 - DNA, 80 bp, synthetic construct
  misc_feature 1..80: note = Artificially Synthesized Probe
  source 1..80: mol_type = other DNA
tatgtggtctaagattagtcacagtgtatagccagctctgagtcactgactccgtacttatttttgacataaagtgaaat

SEQ ID NO: 112582 - DNA, 80 bp, synthetic construct; identical to SEQ ID NO: 37284
  misc_feature 1..80: note = Artificially Synthesized Probe
  source 1..80: mol_type = other DNA

SEQ ID NO: 112583 - DNA, 80 bp, synthetic construct
  misc_feature 1..80: note = Artificially Synthesized Probe
  source 1..80: mol_type = other DNA
gaaataagccaggcacagaaagacaaacttcatgtgttctcactcatttgtggcagccaaaaactaaaacaattgaactc

SEQ ID NO: 112584 - DNA, 80 bp, synthetic construct
  misc_feature 1..80: note = Artificially Synthesized Probe
  source 1..80: mol_type = other DNA
tttacatttaaaagtagctaaaatagtataattggaatttttgtaacacaggaaatgataaatgcttgaggtgatggata

SEQ ID NO: 112585 - DNA, 80 bp, synthetic construct; identical to SEQ ID NO: 37124
  misc_feature 1..80: note = Artificially Synthesized Probe
  source 1..80: mol_type = other DNA

SEQ ID NO: 112586 - DNA, 80 bp, synthetic construct
  misc_feature 1..80: note = Artificially Synthesized Probe
  source 1..80: mol_type = other DNA
ggttttaaaaacttggtcttttgtggaagataattttataatttgggtttatccagagctcttccaagctccataattta

SEQ ID NO: 112587 - DNA, 80 bp, synthetic construct; identical to SEQ ID NO: 37285
  misc_feature 1..80: note = Artificially Synthesized Probe
  source 1..80: mol_type = other DNA

SEQ ID NO: 112588 - DNA, 80 bp, synthetic construct
  misc_feature 1..80: note = Artificially Synthesized Probe
  source 1..80: mol_type = other DNA
ctcctgagtagctaggactacatgtttgcaccaccatgaccagcttattttttgtttgtttgtttgtttgagacagggtc

SEQ ID NO: 112589 - DNA, 80 bp, synthetic construct
  misc_feature 1..80: note = Artificially Synthesized Probe
  source 1..80: mol_type = other DNA
gttctatccagttcgtaggcttgctatcagatttagcatcaccagattatttatcaggcatcatttgtattgcctcaaaa

SEQ ID NO: 112590 - DNA, 80 bp, synthetic construct
  misc_feature 1..80: note = Artificially Synthesized Probe
  source 1..80: mol_type = other DNA
cagggtttcaccatgtgggccagtctgggtatcgaactcctgacttcatgtgatctacctgcctcggcctcccaaaatgc

SEQ ID NO: 112591 - DNA, 80 bp, synthetic construct
  misc_feature 1..80: note = Artificially Synthesized Probe
  source 1..80: mol_type = other DNA
gccacacacccaatctagcttatttgttaaatacattacttatatattttataagaatttataaaattcttatataccat

SEQ ID NO: 112592 - DNA, 80 bp, synthetic construct; identical to SEQ ID NO: 37286
  misc_feature 1..80: note = Artificially Synthesized Probe
  source 1..80: mol_type = other DNA

SEQ ID NO: 112593 - DNA, 80 bp, synthetic construct
  misc_feature 1..80: note = Artificially Synthesized Probe
  source 1..80: mol_type = other DNA
cagtggacagttgaccaatatatacttatttactgcttgctatgttcaggttctaggtgtggggttcaagacccaagttt

SEQ ID NO: 112594 - DNA, 80 bp, synthetic construct
  misc_feature 1..80: note = Artificially Synthesized Probe
  source 1..80: mol_type = other DNA
gagtgccaggtggcattggggatctttgccctgcacatccaaataactccattattataataaaaacatatttaatatgt

SEQ ID NO: 112595 - DNA, 80 bp, synthetic construct
  misc_feature 1..80: note = Artificially Synthesized Probe
  source 1..80: mol_type = other DNA
tcagcctcctgagtagctgggactacaggcctgtgccaccacacccagctaatttttcgtatttttagtagacatggggt

SEQ ID NO: 112596 - DNA, 80 bp, synthetic construct
  misc_feature 1..80: note = Artificially Synthesized Probe
  source 1..80: mol_type = other DNA
ttgaagagtgaaatgtgaattggatgttgcttattgatagtttcaaaattgctttctatgggaagttaagaaccagtaac

SEQ ID NO: 112597 - DNA, 80 bp, synthetic construct; identical to SEQ ID NO: 37287
  misc_feature 1..80: note = Artificially Synthesized Probe
  source 1..80: mol_type = other DNA

SEQ ID NO: 112598 - DNA, 80 bp, synthetic construct
  misc_feature 1..80: note = Artificially Synthesized Probe
  source 1..80: mol_type = other DNA
cttgactacagaggagggtattttattagaaggagtgtaagcaggaaggttgaataactgaagtggacccctacttactc

SEQ ID NO: 112599 - DNA, 80 bp, synthetic construct
  misc_feature 1..80: note = Artificially Synthesized Probe
  source 1..80: mol_type = other DNA
aggatttgttcattacatatttactgagcctcctaagtaatacagaataaaatctccagtcatttcaatggcccataaag

SEQ ID NO: 112600 - DNA, 80 bp, synthetic construct; identical to SEQ ID NO: 37288
  misc_feature 1..80: note = Artificially Synthesized Probe
  source 1..80: mol_type = other DNA

SEQ ID NO: 112601 - DNA, 80 bp, synthetic construct
  misc_feature 1..80: note = Artificially Synthesized Probe
  source 1..80: mol_type = other DNA
tatgggcatgtagaagaaaatataatttacacatacttttttttccctttcccctttgaaacttatctgtctgtgcctct

SEQ ID NO: 112602 - DNA, 80 bp, synthetic construct
  misc_feature 1..80: note = Artificially Synthesized Probe
  source 1..80: mol_type = other DNA
gctgggtgtcttaagtagaaacttgcagtcacaaaacaatttttaaacagttatgtattaaaacatatgagaaaggcatg

SEQ ID NO: 112603 - DNA, 80 bp, synthetic construct
  misc_feature 1..80: note = Artificially Synthesized Probe
  source 1..80: mol_type = other DNA
agtatatcagatggaaaacctttccatcagaataatccctcaagttgcctttgcatagacagacccaattcctgcccacc

SEQ ID NO: 112604 - DNA, 80 bp, synthetic construct
  misc_feature 1..80: note = Artificially Synthesized Probe
  source 1..80: mol_type = other DNA
atcttccttcctctctctctctttctcccttcctcccttccttcccttcccttccctccccttccctccctccctccttt

SEQ ID NO: 112605 - DNA, 80 bp, synthetic construct
  misc_feature 1..80: note = Artificially Synthesized Probe
  source 1..80: mol_type = other DNA
gttcaagtcattcttctgcctcagcctcccgagtagctgggactacaggcgcatgccactgcacccaactaatttttgtg

SEQ ID NO: 112606 - DNA, 80 bp, synthetic construct; identical to SEQ ID NO: 37289
  misc_feature 1..80: note = Artificially Synthesized Probe
  source 1..80: mol_type = other DNA

SEQ ID NO: 112607 - DNA, 80 bp, synthetic construct
  misc_feature 1..80: note = Artificially Synthesized Probe
  source 1..80: mol_type = other DNA
accaacaatgtatgagccatccaggttcacacataggtgtataatgatgtatcattctggttttgtgtttccctgatggc

SEQ ID NO: 112608 - DNA, 80 bp, synthetic construct
  misc_feature 1..80: note = Artificially Synthesized Probe
  source 1..80: mol_type = other DNA
ttgttgagtttggggacatttttaatacattctagctacttgtttttgttagatatatggtttgcaaatgatttttgcca

SEQ ID NO: 112609 - DNA, 80 bp, synthetic construct
  misc_feature 1..80: note = Artificially Synthesized Probe
  source 1..80: mol_type = other DNA
tacagacgcgtgccaccatgcccggctaattttttgtatttttagtagaggcagagcttcgcagtgttacccaggatggt

SEQ ID NO: 112610 - DNA, 80 bp, synthetic construct
  misc_feature 1..80: note = Artificially Synthesized Probe
  source 1..80: mol_type = other DNA
attgcctgggtttgtattccagctccatgatttagcagcttcttacatcctttgcaaagtcactcaggccctttgggtcc

SEQ ID NO: 112611 - DNA, 80 bp, synthetic construct; identical to SEQ ID NO: 37290
  misc_feature 1..80: note = Artificially Synthesized Probe
  source 1..80: mol_type = other DNA

SEQ ID NO: 112612 - DNA, 80 bp, synthetic construct
  misc_feature 1..80: note = Artificially Synthesized Probe
  source 1..80: mol_type = other DNA
attaataaggactcttcagatataaatattccagaatttctcttagctttctaatcaaaacaaccatcagtgaatattac

SEQ ID NO: 112613 - DNA, 80 bp, synthetic construct
  misc_feature 1..80: note = Artificially Synthesized Probe
  source 1..80: mol_type = other DNA
cctcccctcccctctcctgtccacattttgtaaaatctggtcctgaataagtcacaatataaaaataaatgtacacttaa

SEQ ID NO: 112614 - DNA, 80 bp, synthetic construct
  misc_feature 1..80: note = Artificially Synthesized Probe
  source 1..80: mol_type = other DNA
acctcttaaaagaatttggggaaacgagaccaaagaagtcaggtttgatttttagtgacaataacaaacatgaagtgact

SEQ ID NO: 112615 - DNA, 80 bp, synthetic construct; identical to SEQ ID NO: 37291
  misc_feature 1..80: note = Artificially Synthesized Probe
  source 1..80: mol_type = other DNA

SEQ ID NO: 112616 - DNA, 80 bp, synthetic construct
  misc_feature 1..80: note = Artificially Synthesized Probe
  source 1..80: mol_type = other DNA
atagtctctgtgtttaacaataatacctggatgcaaaacaatccactgttatatggccacaaaatattaatgatcttctg

SEQ ID NO: 112617 - DNA, 80 bp, synthetic construct
  misc_feature 1..80: note = Artificially Synthesized Probe
  source 1..80: mol_type = other DNA
gtgaaactgttcatttgttgacagccacagaagtcatattttgctaaatagctgctccagctgtttttttctttggaaaa

SEQ ID NO: 112618 - DNA, 80 bp, synthetic construct
  misc_feature 1..80: note = Artificially Synthesized Probe
  source 1..80: mol_type = other DNA
caattgcaaaaagtgtactgcagctatctcttgggtcaaatctggtacccagaaatggagaaaagcctcaagaaacattg

SEQ ID NO: 112619 - DNA, 80 bp, synthetic construct; identical to SEQ ID NO: 37292
  misc_feature 1..80: note = Artificially Synthesized Probe
  source 1..80: mol_type = other DNA

SEQ ID NO: 112620 - DNA, 80 bp, synthetic construct
  misc_feature 1..80: note = Artificially Synthesized Probe
  source 1..80: mol_type = other DNA
actgccaggtgggatgggcttcaacagagaaggtagggtgtatatctgaagcagaggtggcaggattacgaagactaggg

SEQ ID NO: 112621 - DNA, 80 bp, synthetic construct
  misc_feature 1..80: note = Artificially Synthesized Probe
  source 1..80: mol_type = other DNA
cttctcggtggtattcaaacgccaagccattttcccatactctttgagtttgaggaactttttggagattgcttgagatt

SEQ ID NO: 112622 - DNA, 80 bp, synthetic construct; identical to SEQ ID NO: 37139
  misc_feature 1..80: note = Artificially Synthesized Probe
  source 1..80: mol_type = other DNA

SEQ ID NO: 112623 - DNA, 80 bp, synthetic construct
  misc_feature 1..80: note = Artificially Synthesized Probe
  source 1..80: mol_type = other DNA
tcttgagagaaagcattcaattcttttaccattgtttgtgatgttagctgtaggttcctctttatcgagttgaggaaatt

SEQ ID NO: 112624 - DNA, 80 bp, synthetic construct; identical to SEQ ID NO: 37293
  misc_feature 1..80: note = Artificially Synthesized Probe
  source 1..80: mol_type = other DNA

SEQ ID NO: 112625 - DNA, 80 bp, synthetic construct
  misc_feature 1..80: note = Artificially Synthesized Probe
  source 1..80: mol_type = other DNA
tgcctttatctagttactgtataagagtaatactagctgtgtgaaatgaatctcttctaatttctaaaacagattgtgtg

SEQ ID NO: 112626 - DNA, 80 bp, synthetic construct
  misc_feature 1..80: note = Artificially Synthesized Probe
  source 1..80: mol_type = other DNA
ttgagctgaaatatactatcaaacaagttagaaaaagcaacacttctcgataattcatagattgcaaaggaaatcttaag

SEQ ID NO: 112627 - DNA, 80 bp, synthetic construct; identical to SEQ ID NO: 37294
  misc_feature 1..80: note = Artificially Synthesized Probe
  source 1..80: mol_type = other DNA

SEQ ID NO: 112628 - DNA, 80 bp, synthetic construct
  misc_feature 1..80: note = Artificially Synthesized Probe
  source 1..80: mol_type = other DNA
ttcaagaatgaaacaagtgcagacactgcagacataaaaaaaaaataagagaatactacaaacagctctcacagttaaat

SEQ ID NO: 112629 - DNA, 80 bp, synthetic construct
  misc_feature 1..80: note = Artificially Synthesized Probe
  source 1..80: mol_type = other DNA
attaaagacattaagtgtataatggtttctttgtttgggctgctataataccagaaactggatgaccgataaacaacaaa

SEQ ID NO: 112630 - DNA, 80 bp, synthetic construct
  misc_feature 1..80: note = Artificially Synthesized Probe
  source 1..80: mol_type = other DNA
ggtgaaagggatgaggcagcactctgcagcctaatcccactcgtgattactgccctaatcccactcgtgagggcagagcc

SEQ ID NO: 112631 - DNA, 80 bp, synthetic construct
  misc_feature 1..80: note = Artificially Synthesized Probe
  source 1..80: mol_type = other DNA
gcagttttcttttataccactctagtagagaaagggaggagtacgtctgttattgccaggtaggggtagaaatccgggtt

SEQ ID NO: 112632 - DNA, 80 bp, synthetic construct; identical to SEQ ID NO: 37295
  misc_feature 1..80: note = Artificially Synthesized Probe
  source 1..80: mol_type = other DNA

SEQ ID NO: 112633 - DNA, 80 bp, synthetic construct
  misc_feature 1..80: note = Artificially Synthesized Probe
  source 1..80: mol_type = other DNA
gcagttattgtctgaaaattttctgtcttgctagactgcactgttttttttgtgtgcgtgtgctttttaaatttttagct

SEQ ID NO: 112634 - DNA, 80 bp, synthetic construct
  misc_feature 1..80: note = Artificially Synthesized Probe
  source 1..80: mol_type = other DNA
tcacctcatactgaaaaaaaaatcttgtatagcccctgatcttaccacttcttttgataaagcttttacaggagagcgga

SEQ ID NO: 112635 - DNA, 80 bp, synthetic construct
  misc_feature 1..80: note = Artificially Synthesized Probe
  source 1..80: mol_type = other DNA
tttatgggggctttttttggtcagttggttggtatttccagattgctggcttctaggatatatgagacaaaaagaaaacc

SEQ ID NO: 112636 - DNA, 80 bp, synthetic construct; identical to SEQ ID NO: 37296
  misc_feature 1..80: note = Artificially Synthesized Probe
  source 1..80: mol_type = other DNA

SEQ ID NO: 112637 - DNA, 80 bp, synthetic construct
  misc_feature 1..80: note = Artificially Synthesized Probe
  source 1..80: mol_type = other DNA
cttcatttagtcatttcattttgcagacataggaaatgaagcacacaactgaagtgtttgttgagttttctacaattaat

SEQ ID NO: 112638 - DNA, 80 bp, synthetic construct
  misc_feature 1..80: note = Artificially Synthesized Probe
  source 1..80: mol_type = other DNA
ttcattggaattacaggagttttcttccattatttcacaatgtctaagtacagacattatgaagtagggaaatttacttt

SEQ ID NO: 112639 - DNA, 80 bp, synthetic construct
  misc_feature 1..80: note = Artificially Synthesized Probe
  source 1..80: mol_type = other DNA
aagatctgtaaaatactgaggccattatgggaaatgtttaaagttcctacattcatatcacattttttatcttggatcag

SEQ ID NO: 112640 - DNA, 80 bp, synthetic construct
  misc_feature 1..80: note = Artificially Synthesized Probe
  source 1..80: mol_type = other DNA
taagtggactccaggcagccactctttgctttatccaagctccagctaaggccagctgttctttgagcagtgtttttatt

SEQ ID NO: 112641 - DNA, 80 bp, synthetic construct; identical to SEQ ID NO: 37297
  misc_feature 1..80: note = Artificially Synthesized Probe
  source 1..80: mol_type = other DNA

SEQ ID NO: 112642 - DNA, 80 bp, synthetic construct
  misc_feature 1..80: note = Artificially Synthesized Probe
  source 1..80: mol_type = other DNA
gatttgaacagatagaagactgtacaaaatactactaacctcagcttactgaatttcaaatattacaagtttcatggcat

SEQ ID NO: 112643 - DNA, 80 bp, synthetic construct
  misc_feature 1..80: note = Artificially Synthesized Probe
  source 1..80: mol_type = other DNA
actcactacaaccttgaataaatcacccattgcttctatgtctagatacctttttatgcagaattactattttaaaagca

SEQ ID NO: 112644 - DNA, 80 bp, synthetic construct
  misc_feature 1..80: note = Artificially Synthesized Probe
  source 1..80: mol_type = other DNA
aagtcaggagttcgagatcagcctggccagcatggcaaaaccccgtctctactaaaaatacaaaagttagccgggcatgg

SEQ ID NO: 112645 - DNA, 80 bp, synthetic construct; identical to SEQ ID NO: 37298
  misc_feature 1..80: note = Artificially Synthesized Probe
  source 1..80: mol_type = other DNA

SEQ ID NO: 112646 - DNA, 80 bp, synthetic construct
  misc_feature 1..80: note = Artificially Synthesized Probe
  source 1..80: mol_type = other DNA
acctttccagccttggtgattatagtgtcatgcatgacacagcttggcttattttctaggacaggtggaaatgatcgaaa

SEQ ID NO: 112647 - DNA, 80 bp, synthetic construct
  misc_feature 1..80: note = Artificially Synthesized Probe
  source 1..80: mol_type = other DNA
ttgcctaggctggtctcaaaccactgaactcaatcaatcctcctgccttggcctcacaaaatgctgcgattacaggcatg

SEQ ID NO: 112648 - DNA, 80 bp, synthetic construct
  misc_feature 1..80: note = Artificially Synthesized Probe
  source 1..80: mol_type = other DNA
tcaaagaaatggttaactgtgtaaaacatgttaaaagttgtgtgtgcaccttaaaagctaaataggatgccatactcaga

SEQ ID NO: 112649 - DNA, 80 bp, synthetic construct; identical to SEQ ID NO: 37299
  misc_feature 1..80: note = Artificially Synthesized Probe
  source 1..80: mol_type = other DNA

SEQ ID NO: 112650 - DNA, 80 bp, synthetic construct
  misc_feature 1..80: note = Artificially Synthesized Probe
  source 1..80: mol_type = other DNA
tgcttttaatattttctacttatgggaaatgtatatgcagtgacatgtacagaacttgtgtacaattcaatgagttttga

SEQ ID NO: 112651 - DNA, 80 bp, synthetic construct
  misc_feature 1..80: note = Artificially Synthesized Probe
  source 1..80: mol_type = other DNA
tatgctaggtggcctgtttcaacataactgttgctacagtttttttaatttgttctgttagtgttgagtcattttccatc

SEQ ID NO: 112652 - DNA, 80 bp, synthetic construct
  misc_feature 1..80: note = Artificially Synthesized Probe
  source 1..80: mol_type = other DNA
gttttctaaagtagttgcactgtatgaaatacatacccaacagcaccgaatgagagttctaattacatttcattctcagc

SEQ ID NO: 112653 - DNA, 80 bp, synthetic construct; identical to SEQ ID NO: 37300
  misc_feature 1..80: note = Artificially Synthesized Probe
  source 1..80: mol_type = other DNA

SEQ ID NO: 112654 - DNA, 80 bp, synthetic construct
  misc_feature 1..80: note = Artificially Synthesized Probe
  source 1..80: mol_type = other DNA
ataaaaacttatcaagaattttttttctcattgttcagcttatgttacagagagggcctcttttctatgtttcagttaat

SEQ ID NO: 112655 - DNA, 80 bp, synthetic construct
  misc_feature 1..80: note = Artificially Synthesized Probe
  source 1..80: mol_type = other DNA
ccttcaagacatcatccttcattgaattcatcagaaccacttgctttaatttctgtccatatttgtcttcagtaagttgt

SEQ ID NO: 112656 - DNA, 80 bp, synthetic construct
  misc_feature 1..80: note = Artificially Synthesized Probe
  source 1..80: mol_type = other DNA
gttcattgctgtgagacaaggaggcaacataactacacaattttctccctgtgcataaactgaagaacaaatgcacaatg

SEQ ID NO: 112657 - DNA, 80 bp, synthetic construct; identical to SEQ ID NO: 37301
  misc_feature 1..80: note = Artificially Synthesized Probe
  source 1..80: mol_type = other DNA

SEQ ID NO: 112658 - DNA, 80 bp, synthetic construct; identical to SEQ ID NO: 37140
  misc_feature 1..80: note = Artificially Synthesized Probe
  source 1..80: mol_type = other DNA

SEQ ID NO: 112659 - DNA, 80 bp, synthetic construct
  misc_feature 1..80: note = Artificially Synthesized Probe
  source 1..80: mol_type = other DNA
ttcccacctatgagtgagaatatgcggtgtttggttttttgttcttgcgatagtttactgagaatgatgatttccaattt

SEQ ID NO: 112660 - DNA, 80 bp, synthetic construct
  misc_feature 1..80: note = Artificially Synthesized Probe
  source 1..80: mol_type = other DNA
agatatacctaatgctagatgacgagttagtgggtgcagcacaccagcatggcacatgtatacatatgtaactaacctgc

SEQ ID NO: 112661 - DNA, 80 bp, synthetic construct
  misc_feature 1..80: note = Artificially Synthesized Probe
  source 1..80: mol_type = other DNA
aagccatggtggtttgctgccgccatcaaaccgtcatctatattaggtactcctcctaatgctatccatcccctagcccc

SEQ ID NO: 112662 - DNA, 80 bp, synthetic construct
  misc_feature 1..80: note = Artificially Synthesized Probe
  source 1..80: mol_type = other DNA
gacatgaactcattcttttttatggctgcgtagtattccatggtgtatatgtgccacattttctttatccagtctatcat

SEQ ID NO: 112663 - DNA, 80 bp, synthetic construct; identical to SEQ ID NO: 37302
  misc_feature 1..80: note = Artificially Synthesized Probe
  source 1..80: mol_type = other DNA

SEQ ID NO: 112664 - DNA, 80 bp, synthetic construct
  misc_feature 1..80: note = Artificially Synthesized Probe
  source 1..80: mol_type = other DNA
ttgataaatgtctgttcatatcctttgcccacattttgatggggttgtttgttttttttcttgtaaatttgtttaagttc

SEQ ID NO: 112665 - DNA, 80 bp, synthetic construct
  misc_feature 1..80: note = Artificially Synthesized Probe
  source 1..80: mol_type = other DNA
attgcttttggtgttttagtcatgaagtctttgcccatgcctatgtcctgaatggtattgtgtaaggttttcttctaggg

SEQ ID NO: 112666 - DNA, 80 bp, synthetic construct
  misc_feature 1..80: note = Artificially Synthesized Probe
  source 1..80: mol_type = other DNA
tctgtcatttttgtcaaagatcagatggttttagatgtgtggctttatttctgaggcctctgttctgttccattggtcta

SEQ ID NO: 112667 - DNA, 80 bp, synthetic construct
  misc_feature 1..80: note = Artificially Synthesized Probe
  source 1..80: mol_type = other DNA
gacggaaaaataaaagttaacataatataactggagaaggaaaactatgataaaactgcctcgaaacccagtagtacacc

SEQ ID NO: 112668 - DNA, 80 bp, synthetic construct; identical to SEQ ID NO: 37303
  misc_feature 1..80: note = Artificially Synthesized Probe
  source 1..80: mol_type = other DNA

SEQ ID NO: 112669 - DNA, 80 bp, synthetic construct
  misc_feature 1..80: note = Artificially Synthesized Probe
  source 1..80: mol_type = other DNA
ttggtcaggctggtctcgaactgctgacctcatgatctaccagccttggactcccaaagtacctggattacaggtgtgag

SEQ ID NO: 112670 - DNA, 80 bp, synthetic construct
  misc_feature 1..80: note = Artificially Synthesized Probe
  source 1..80: mol_type = other DNA
tacattttgtgtcctaattaaatattgtgaaaataatatcctgggttttattctagaaatgttatagttttaacttatac

SEQ ID NO: 112671 - DNA, 80 bp, synthetic construct
  misc_feature 1..80: note = Artificially Synthesized Probe
  source 1..80: mol_type = other DNA
cttgaccctatgtgcttgaatttatttctggaatatattttattccattgatttatttatctgttattgtaataaaacca

SEQ ID NO: 112672 - DNA, 80 bp, synthetic construct; identical to SEQ ID NO: 37304
  misc_feature 1..80: note = Artificially Synthesized Probe
  source 1..80: mol_type = other DNA

SEQ ID NO: 112673 - DNA, 80 bp, synthetic construct
  misc_feature 1..80: note = Artificially Synthesized Probe
  source 1..80: mol_type = other DNA
tagtcattagtttgatgcaaaatacagaaacacaatcaatttttatattgacattgtatcctatgacattgttaaattta

SEQ ID NO: 112674 - DNA, 80 bp, synthetic construct
  misc_feature 1..80: note = Artificially Synthesized Probe
  source 1..80: mol_type = other DNA
tttgtttgttttgccttatagcactggcttgactctccagtacagtgttaaacagaggtgataaaagccaatatccttgt

SEQ ID NO: 112675 - DNA, 80 bp, synthetic construct
  misc_feature 1..80: note = Artificially Synthesized Probe
  source 1..80: mol_type = other DNA
attctgaatttaaggcaataatttgctttttctcttttattctcttgctgtgataagttacatggtttatttttgaatgt

SEQ ID NO: 112676 - DNA, 80 bp, synthetic construct; identical to SEQ ID NO: 37305
  misc_feature 1..80: note = Artificially Synthesized Probe
  source 1..80: mol_type = other DNA

SEQ ID NO: 112677 - DNA, 80 bp, synthetic construct
  misc_feature 1..80: note = Artificially Synthesized Probe
  source 1..80: mol_type = other DNA
tgttctgaaattctcattataggtgtgtgtggacattctttcctaaagtactggctctgggtaaagtagcagaataacat

SEQ ID NO: 112678 - DNA, 80 bp, synthetic construct
  misc_feature 1..80: note = Artificially Synthesized Probe
  source 1..80: mol_type = other DNA
ttactttgacttctttaataaatatagaactactcatactttctttttaaaaaattttactttagggccgggcgcggtgg

SEQ ID NO: 112679 - DNA, 80 bp, synthetic construct
  misc_feature 1..80: note = Artificially Synthesized Probe
  source 1..80: mol_type = other DNA
ggaggctgaggcaggagaatggcgtgaacccgggaggtggagcttgcagtgagccgagatcatgccactgcactccagcc

SEQ ID NO: 112680 - DNA, 80 bp, synthetic construct
  misc_feature 1..80: note = Artificially Synthesized Probe
  source 1..80: mol_type = other DNA
atgtttccaagaaacttgaccattttatttaaaatgttgaaaatattggctcaaggttttttgtaatctgcagtgatatt

SEQ ID NO: 112681 - DNA, 80 bp, synthetic construct; identical to SEQ ID NO: 37306
  misc_feature 1..80: note = Artificially Synthesized Probe
  source 1..80: mol_type = other DNA

SEQ ID NO: 112682 - DNA, 80 bp, synthetic construct
  misc_feature 1..80: note = Artificially Synthesized Probe
  source 1..80: mol_type = other DNA
tgattgttatattttcctaattaactgatcctttgatcattataaactatcccttttatctttggggacacttcttgtat

SEQ ID NO: 112683 - DNA, 80 bp, synthetic construct
  misc_feature 1..80: note = Artificially Synthesized Probe
  source 1..80: mol_type = other DNA
acaacaaagtacgtctcttgtgaacaacctataatcaggtctttaatcttgtctgacaacctctgacttttaaatggagt

SEQ ID NO: 112684 - DNA, 80 bp, synthetic construct
  misc_feature 1..80: note = Artificially Synthesized Probe
  source 1..80: mol_type = other DNA
ttaattcttctatttgacttttagctatgtttctttgtattattatttttcgtggcttctcaagggactgcaatatgaat

SEQ ID NO: 112685 - DNA, 80 bp, synthetic construct; identical to SEQ ID NO: 37307
  misc_feature 1..80: note = Artificially Synthesized Probe
  source 1..80: mol_type = other DNA

SEQ ID NO: 112686 - DNA, 80 bp, synthetic construct
  misc_feature 1..80: note = Artificially Synthesized Probe
  source 1..80: mol_type = other DNA
ttgtatattttaggaaaagatatctgcttgggagaaatgcaggcttaaggaaatattggatgctatccccataacccaca

SEQ ID NO: 112687 - DNA, 80 bp, synthetic construct
  misc_feature 1..80: note = Artificially Synthesized Probe
  source 1..80: mol_type = other DNA
tatctgcagaatagtttgatataagttatcaccagatcagagttcctcaagttggaatattttgttttaaattcttagct

SEQ ID NO: 112688 - DNA, 80 bp, synthetic construct
  misc_feature 1..80: note = Artificially Synthesized Probe
  source 1..80: mol_type = other DNA
ttaaattgattattagacatttttgttctaaaaatcttttgatccaagtgtggtggctcacacctgtaatcacagagctt

SEQ ID NO: 112689 - DNA, 80 bp, synthetic construct; identical to SEQ ID NO: 37308
  misc_feature 1..80: note = Artificially Synthesized Probe
  source 1..80: mol_type = other DNA

SEQ ID NO: 112690 - DNA, 80 bp, synthetic construct
  misc_feature 1..80: note = Artificially Synthesized Probe
  source 1..80: mol_type = other DNA
gtgggacaattggttgaaatcaggaggcagaggttgcagtgagccaagatcatgccattgcactccagcctgggcaacaa

SEQ ID NO: 112691 - DNA, 80 bp, synthetic construct
  misc_feature 1..80: note = Artificially Synthesized Probe
  source 1..80: mol_type = other DNA
tttctccttccatctcttccttctctctcgctttctcatatgggctcctgaacaatcccaattctttctttattctttct

SEQ ID NO: 112692 - DNA, 80 bp, synthetic construct
  misc_feature 1..80: note = Artificially Synthesized Probe
  source 1..80: mol_type = other DNA
cctccacctactgggttcaagagattctcctgcctcagcctcctgagtagctgggactataggcacgtgccatcacaccc

SEQ ID NO: 112693 - DNA, 80 bp, synthetic construct
  misc_feature 1..80: note = Artificially Synthesized Probe
  source 1..80: mol_type = other DNA
gagcccccatgcctggcgagccagtttttagaagaaaaaaaaaaagatattttaaataacattcaattatattcaacatt

SEQ ID NO: 112694 - DNA, 80 bp, synthetic construct; identical to SEQ ID NO: 37309
  misc_feature 1..80: note = Artificially Synthesized Probe
  source 1..80: mol_type = other DNA

SEQ ID NO: 112695 - DNA, 80 bp, synthetic construct
  misc_feature 1..80: note = Artificially Synthesized Probe
  source 1..80: mol_type = other DNA
tcattcttgggtaaatctccacaagccagtatgtctttctaatttcttcgtcactctcaatggttcaatttagtctccag

SEQ ID NO: 112696 - DNA, 80 bp, synthetic construct
  misc_feature 1..80: note = Artificially Synthesized Probe
  source 1..80: mol_type = other DNA
tgacttactgcatgcagctgtcaaaactaatgaatttataaatcaagccagctcattttgcctttgtattagtctgttct

SEQ ID NO: 112697 - DNA, 80 bp, synthetic construct
  misc_feature 1..80: note = Artificially Synthesized Probe
  source 1..80: mol_type = other DNA
gtatgagtgcccattgaaggggcgagccccttataaaactatcagatcttgtgagacctaactcactatcatgagaacag

SEQ ID NO: 112698 - DNA, 80 bp, synthetic construct
  misc_feature 1..80: note = Artificially Synthesized Probe
  source 1..80: mol_type = other DNA
caaactgttgccaaaaatgtgtttctaaaaatgaaattacatgcctgctcaaaatccctgttgcctccaggatacagtct

SEQ ID NO: 112699 - DNA, 80 bp, synthetic construct; identical to SEQ ID NO: 37310
  misc_feature 1..80: note = Artificially Synthesized Probe
  source 1..80: mol_type = other DNA

SEQ ID NO: 112700 - DNA, 80 bp, synthetic construct
  misc_feature 1..80: note = Artificially Synthesized Probe
  source 1..80: mol_type = other DNA
gcacattgaatacatttataagactaatttggcacattagtatgaatgggtcagtccatattctcagctttgtagtagca

SEQ ID NO: 112701 - DNA, 80 bp, synthetic construct
  misc_feature 1..80: note = Artificially Synthesized Probe
  source 1..80: mol_type = other DNA
agagtgacgttgtaagaatgggaaatttttttttttggatttttttaatttttattttttattatactttaagttttagg

SEQ ID NO: 112702 - DNA, 80 bp, synthetic construct
  misc_feature 1..80: note = Artificially Synthesized Probe
  source 1..80: mol_type = other DNA
tttaaattttggcattttatgtgtactagtgtgaatggataggtagagtggagattttacgtgttatccagattatgtaa

SEQ ID NO: 112703 - DNA, 80 bp, synthetic construct
  misc_feature 1..80: note = Artificially Synthesized Probe
  source 1..80: mol_type = other DNA
tcctgtgtccatgtgttctcattgttcagttcccacctatgagtgagaacatggggtgtttggtttttaaaataaatttt

SEQ ID NO: 112704 - DNA, 80 bp, synthetic construct; identical to SEQ ID NO: 37311
  misc_feature 1..80: note = Artificially Synthesized Probe
  source 1..80: mol_type = other DNA

SEQ ID NO: 112705 - DNA, 80 bp, synthetic construct
  misc_feature 1..80: note = Artificially Synthesized Probe
  source 1..80: mol_type = other DNA
tcgaggacattgcttattaaattatggtaccctctttatgggttttttcagaagaaatgtatctttggtttcagtatcag

SEQ ID NO: 112706 - DNA, 80 bp, synthetic construct
  misc_feature 1..80: note = Artificially Synthesized Probe
  source 1..80: mol_type = other DNA
ctgggttcattccatttgttttacccctattttctctgtgctcaatataccatcacatcctgtcaatatttctttacatt

SEQ ID NO: 112707 - DNA, 80 bp, synthetic construct; identical to SEQ ID NO: 37312
  misc_feature 1..80: note = Artificially Synthesized Probe
  source 1..80: mol_type = other DNA

SEQ ID NO: 112708 - DNA, 80 bp, synthetic construct
  misc_feature 1..80: note = Artificially Synthesized Probe
  source 1..80: mol_type = other DNA
cctcagttgttccttcaaattagagctcccagatcttcttctctgtcctgttgcatttacctctttgtagttatttctat

SEQ ID NO: 112709 - DNA, 80 bp, synthetic construct
  misc_feature 1..80: note = Artificially Synthesized Probe
  source 1..80: mol_type = other DNA
atttgtagctggtatgctgaaatatgctttgaacttaactttgaaggtatttccatttttgtattgatccatactatatt

SEQ ID NO: 112710 - DNA, 80 bp, synthetic construct; identical to SEQ ID NO: 37141
  misc_feature 1..80: note = Artificially Synthesized Probe
  source 1..80: mol_type = other DNA

SEQ ID NO: 112711 - DNA, 80 bp, synthetic construct
  misc_feature 1..80: note = Artificially Synthesized Probe
  source 1..80: mol_type = other DNA
aatataacttttcagacatctgttttgcttaaaagagagtacatctgttcctgaaaaataaaaatatatagtcataaata

SEQ ID NO: 112712 - DNA, 80 bp, synthetic construct
  misc_feature 1..80: note = Artificially Synthesized Probe
  source 1..80: mol_type = other DNA
tctaagtagaatttactggtcagtaaaaactctcatgcatttaaacctataacaaattcttgcttatttagatctacaga

SEQ ID NO: 112713 - DNA, 80 bp, synthetic construct; identical to SEQ ID NO: 37313
  misc_feature 1..80: note = Artificially Synthesized Probe
  source 1..80: mol_type = other DNA

SEQ ID NO: 112714 - DNA, 80 bp, synthetic construct
  misc_feature 1..80: note = Artificially Synthesized Probe
  source 1..80: mol_type = other DNA
gggttactgctggtcacttatgaatacttctgaggtagccttgtttaaaaaattgtctacaagttataccatatatttca

SEQ ID NO: 112715 - DNA, 80 bp, synthetic construct
  misc_feature 1..80: note = Artificially Synthesized Probe
  source 1..80: mol_type = other DNA
catcactgtgcctgtcacataataggaggctgaaattgtcattatgtttcctatagccaggttacaaataactcttgcct

SEQ ID NO: 112716 - DNA, 80 bp, synthetic construct; identical to SEQ ID NO: 37314
  misc_feature 1..80: note = Artificially Synthesized Probe
  source 1..80: mol_type = other DNA

SEQ ID NO: 112717 - DNA, 80 bp, synthetic construct
  misc_feature 1..80: note = Artificially Synthesized Probe
  source 1..80: mol_type = other DNA
agtagagtgtaagattttaatgaaaacaaaagtcaatataaaaattttcaaggccaggtgccatggcgcatgcttgtgat

SEQ ID NO: 112718 - DNA, 80 bp, synthetic construct
  misc_feature 1..80: note = Artificially Synthesized Probe
  source 1..80: mol_type = other DNA
gagggtcatatgagcctgggaggttgaggctgcaatgagccatgattgtgccactgcattccagcctcagcaacagagta

SEQ ID NO: 112719 - DNA, 80 bp, synthetic construct
  misc_feature 1..80: note = Artificially Synthesized Probe
  source 1..80: mol_type = other DNA
cccaatagaaaaaaaagtagaaaaaatacaaatgatagtttatgaaaaaggaaattaaagagagagaagtgcaataagct

SEQ ID NO: 112720 - DNA, 80 bp, synthetic construct
  misc_feature 1..80: note = Artificially Synthesized Probe
  source 1..80: mol_type = other DNA
ttttcctggaattccttcattactcccttttccccttcacatgtactgtttctggtaaacttgtactctttcaagactca

SEQ ID NO: 112721 - DNA, 80 bp, synthetic construct
  misc_feature 1..80: note = Artificially Synthesized Probe
  source 1..80: mol_type = other DNA
tttacctagcaacgattatcctacagatttactcacacatatgtgtggaatatgaaagcataggcttgtacattacagct

SEQ ID NO: 112722 - DNA, 80 bp, synthetic construct; identical to SEQ ID NO: 37315
  misc_feature 1..80: note = Artificially Synthesized Probe
  source 1..80: mol_type = other DNA

SEQ ID NO: 112723 - DNA, 80 bp, synthetic construct
  misc_feature 1..80: note = Artificially Synthesized Probe
  source 1..80: mol_type = other DNA
tgcccttataaaaagaatgcagagagctcttttgccctctttctgctatacaaggacacaataagaagccagcagtctgg

SEQ ID NO: 112724 - DNA, 80 bp, synthetic construct
  misc_feature 1..80: note = Artificially Synthesized Probe
  source 1..80: mol_type = other DNA
gctacagcagccaaactaagacagtcactctagatatattctttggaagtgagagaagggactgggaggaagaagagagt

SEQ ID NO: 112725 - DNA, 80 bp, synthetic construct; identical to SEQ ID NO: 37316
  misc_feature 1..80: note = Artificially Synthesized Probe
  source 1..80: mol_type = other DNA

SEQ ID NO: 112726 - DNA, 80 bp, synthetic construct
  misc_feature 1..80: note = Artificially Synthesized Probe
  source 1..80: mol_type = other DNA
attatccttcaccaggaaagccaaataaagtcccctgttataccctcgattcatttgctcacacattcaaaaaacattta

SEQ ID NO: 112727 - DNA, 80 bp, synthetic construct
  misc_feature 1..80: note = Artificially Synthesized Probe
  source 1..80: mol_type = other DNA
ttgaatcttttatatataatgttggggtgatgtggaggtgaaagtagattaggcctctttggagtgggttttcagtgcag

SEQ ID NO: 112728 - DNA, 80 bp, synthetic construct
  misc_feature 1..80: note = Artificially Synthesized Probe
  source 1..80: mol_type = other DNA
tctatgtatgtaagcagaggctgggtaagtagtgattgctcattttgtagggggaggtttgtattggtcttctattgctg

SEQ ID NO: 112729 - DNA, 80 bp, synthetic construct
  misc_feature 1..80: note = Artificially Synthesized Probe
  source 1..80: mol_type = other DNA
agtcaacttgtcagtcaacattttcttgtgtaactcagggtcctctttcaggttcacgtggttgtggtagaatttagttc

SEQ ID NO: 112730 - DNA, 80 bp, synthetic construct; identical to SEQ ID NO: 37317
  misc_feature 1..80: note = Artificially Synthesized Probe
  source 1..80: mol_type = other DNA

SEQ ID NO: 112731 - DNA, 80 bp, synthetic construct
  misc_feature 1..80: note = Artificially Synthesized Probe
  source 1..80: mol_type = other DNA
ctttgaaagcaagaacctggccttatttactttatttgagcactaatccttgtatataggttctcaaaaacatttactta

SEQ ID NO: 112732 - DNA, 80 bp, synthetic construct
  misc_feature 1..80: note = Artificially Synthesized Probe
  source 1..80: mol_type = other DNA
accgggaatcttgagggatatctgcagacacaaaggtcagacaaagagacaagatgaccaagatgatctctcaatttcaa

SEQ ID NO: 112733 - DNA, 80 bp, synthetic construct
  misc_feature 1..80: note = Artificially Synthesized Probe
  source 1..80: mol_type = other DNA
caaatcaagtagtctctgaatttctcccttttcctgttttgcaattaccagactgtagttgataaaatgtacctctggac

SEQ ID NO: 112734 - DNA, 80 bp, synthetic construct; identical to SEQ ID NO: 37318
  misc_feature 1..80: note = Artificially Synthesized Probe
  source 1..80: mol_type = other DNA

SEQ ID NO: 112735 - DNA, 80 bp, synthetic construct
  misc_feature 1..80: note = Artificially Synthesized Probe
  source 1..80: mol_type = other DNA
gtgttttctctaattgcttttcttcatgataggtaaagataaaacagaatgtgttgtaaatagtgtgccagttttggtaa

SEQ ID NO: 112736 - DNA, 80 bp, synthetic construct
  misc_feature 1..80: note = Artificially Synthesized Probe
  source 1..80: mol_type = other DNA
ggaatttcaaagttaacctactcaaaagaaattgttaatcttcctccccaaagcttacccctcttacggtcacccacatc

SEQ ID NO: 112737 - DNA, 80 bp, synthetic construct
  misc_feature 1..80: note = Artificially Synthesized Probe
  source 1..80: mol_type = other DNA
tcacattatattcaggagctgaatgtttctcttcacttctgccactaccaccttggaccaggccactgtgatctcttgtg

SEQ ID NO: 112738 - DNA, 80 bp, synthetic construct; identical to SEQ ID NO: 37319
  misc_feature 1..80: note = Artificially Synthesized Probe
  source 1..80: mol_type = other DNA

SEQ ID NO: 112739 - DNA, 80 bp, synthetic construct
  misc_feature 1..80: note = Artificially Synthesized Probe
  source 1..80: mol_type = other DNA
gctgcacccactaactcgtcatctagcattaggtatatctcccaatgctatccctcccccctccccccaccccacaacag

SEQ ID NO: 112740 - DNA, 80 bp, synthetic construct
  misc_feature 1..80: note = Artificially Synthesized Probe
  source 1..80: mol_type = other DNA
ctcatcattttttatggatgcatagtattccatggtgtatatgtgccacattttcttaatccagtctatcattgttggac

SEQ ID NO: 112741 - DNA, 80 bp, synthetic construct
  misc_feature 1..80: note = Artificially Synthesized Probe
  source 1..80: mol_type = other DNA
catcactggccatcagagaaatgcaaatcaaaaccacaatgagataccatctcacaccagttagaatggcaatcattaaa

SEQ ID NO: 112742 - DNA, 80 bp, synthetic construct
  misc_feature 1..80: note = Artificially Synthesized Probe
  source 1..80: mol_type = other DNA
tgggtatatacccaaaggactataaatcatgctgctataaaggaatttagtatcttctaatcccttctctgattacctaa

SEQ ID NO: 112743 - DNA, 80 bp, synthetic construct
  misc_feature 1..80: note = Artificially Synthesized Probe
  source 1..80: mol_type = other DNA
cacagtagacataagtttaatgcataaacatttatattctcacaaattctggaacatgctagataaaatgcagagaaata

SEQ ID NO: 112744 - DNA, 80 bp, synthetic construct; identical to SEQ ID NO: 37320
  misc_feature 1..80: note = Artificially Synthesized Probe
  source 1..80: mol_type = other DNA

SEQ ID NO: 112745 - DNA, 80 bp, synthetic construct
  misc_feature 1..80: note = Artificially Synthesized Probe
  source 1..80: mol_type = other DNA
caaaaggtgactatgtacaatacttattgatacttttattgtttacagctcccctgaatgtaaattttcaggggcaggaa

SEQ ID NO: 112746 - DNA, 80 bp, synthetic construct
  misc_feature 1..80: note = Artificially Synthesized Probe
  source 1..80: mol_type = other DNA
atatacagttcgcattatgtaattttcacatgtcatcattttgattctctttatctccatcttcttaacaaaggccgttg

SEQ ID NO: 112747 - DNA, 80 bp, synthetic construct; identical to SEQ ID NO: 37321
  misc_feature 1..80: note = Artificially Synthesized Probe
  source 1..80: mol_type = other DNA

SEQ ID NO: 112748 - DNA, 80 bp, synthetic construct
  misc_feature 1..80: note = Artificially Synthesized Probe
  source 1..80: mol_type = other DNA
atcttcccttggaactgaatattacaaactcaaaccatacctagggaagtacttaggatgatatgagcatacagttttcc

SEQ ID NO: 112749 - DNA, 80 bp, synthetic construct
  misc_feature 1..80: note = Artificially Synthesized Probe
  source 1..80: mol_type = other DNA
taaaatgatggtcccggaagcatcactctaaggttcttctcattaagtgtggggataattaatctaagagctatagtaat

SEQ ID NO: 112750 - DNA, 80 bp, synthetic construct
  misc_feature 1..80: note = Artificially Synthesized Probe
  source 1..80: mol_type = other DNA
cattgacatggataagacctgacactatccttggctactttcaaaattacaaaattaccactcaacttcgtgctcaaaaa

SEQ ID NO: 112751 - DNA, 80 bp, synthetic construct
  misc_feature 1..80: note = Artificially Synthesized Probe
  source 1..80: mol_type = other DNA
actggatttctacaaaaactctgcctggccgtgagtattgtcctgacatgtacatactgatttctgttatattctgtatc

SEQ ID NO: 112752 - DNA, 80 bp, synthetic construct; identical to SEQ ID NO: 37322
  misc_feature 1..80: note = Artificially Synthesized Probe
  source 1..80: mol_type = other DNA

SEQ ID NO: 112753 - DNA, 80 bp, synthetic construct
  misc_feature 1..80: note = Artificially Synthesized Probe
  source 1..80: mol_type = other DNA
cacacacgtgtgaccacaataaccctgattgatctgtctgcaagtcgtttttcagcttgtgtttttcaactgcacaaaat

SEQ ID NO: 112754 - DNA, 80 bp, synthetic construct; identical to SEQ ID NO: 37142
  misc_feature 1..80: note = Artificially Synthesized Probe
  source 1..80: mol_type = other DNA

SEQ ID NO: 112755 - DNA, 80 bp, synthetic construct
  misc_feature 1..80: note = Artificially Synthesized Probe
  source 1..80: mol_type = other DNA
tgctcttgcaacttaggttttatgtttatagctaactggttgccctgcttgcttggagaatatcattaaccataattaag

SEQ ID NO: 112756 - DNA, 80 bp, synthetic construct; identical to SEQ ID NO: 37323
  misc_feature 1..80: note = Artificially Synthesized Probe
  source 1..80: mol_type = other DNA

SEQ ID NO: 112757 - DNA, 80 bp, synthetic construct
  misc_feature 1..80: note = Artificially Synthesized Probe
  source 1..80: mol_type = other DNA
ctttattttctaggccaccaattgtgtctcctgttacaatttcccagagtatctggcataatgtctgtaatagtaaatgt

SEQ ID NO: 112758 - DNA, 80 bp, synthetic construct
  misc_feature 1..80: note = Artificially Synthesized Probe
  source 1..80: mol_type = other DNA
tacccttctgttttttctcctaccttcctggtagctccgtctccgtcctctttgctgaattattctcagcaaataattgt

SEQ ID NO: 112759 - DNA, 80 bp, synthetic construct
  misc_feature 1..80: note = Artificially Synthesized Probe
  source 1..80: mol_type = other DNA
aagtctgcttacatcttgactattctcaaatactatttccagtcctgaatgctgcctagaactccagatcagaatatctg

SEQ ID NO: 112760 - DNA, 80 bp, synthetic construct; identical to SEQ ID NO: 37324
  misc_feature 1..80: note = Artificially Synthesized Probe
  source 1..80: mol_type = other DNA

SEQ ID NO: 112761 - DNA, 80 bp, synthetic construct
  misc_feature 1..80: note = Artificially Synthesized Probe
  source 1..80: mol_type = other DNA
cgagactatcctggctaacatggtgaaaccccgtctctactaaaaaatacaaaaaattagccaggcatggtggcaggtgc

SEQ ID NO: 112762 - DNA, 80 bp, synthetic construct
  misc_feature 1..80: note = Artificially Synthesized Probe
  source 1..80: mol_type = other DNA
actcccatggctcttagaataaattttacatttcttaacatggttaacaagccctatatgacctggcttttaccttaaac

SEQ ID NO: 112763 - DNA, 80 bp, synthetic construct
  misc_feature 1..80: note = Artificially Synthesized Probe
  source 1..80: mol_type = other DNA
gcttcttataacgtagatctttacttaaatgatccctgatcagaatgaatttccctgaccactcaatctaaaaatagtca

SEQ ID NO: 112764 - DNA, 80 bp, synthetic construct
  misc_feature 1..80: note = Artificially Synthesized Probe
  source 1..80: mol_type = other DNA
gggcacggtcacagcttactgcagcctcgacctcctgggctcaagtaatcctcccacctcagcctcctaagtagctaaga

SEQ ID NO: 112765 - DNA, 80 bp, synthetic construct
  misc_feature 1..80: note = Artificially Synthesized Probe
  source 1..80: mol_type = other DNA
tcaagaatcttttaaggtaattttaaatgcctcactattgagccagatctttaattacctgtgtataggtagagctaaat

SEQ ID NO: 112766 - DNA, 80 bp, synthetic construct; identical to SEQ ID NO: 37325
  misc_feature 1..80: note = Artificially Synthesized Probe
  source 1..80: mol_type = other DNA

SEQ ID NO: 112767 - DNA, 80 bp, synthetic construct
  misc_feature 1..80: note = Artificially Synthesized Probe
  source 1..80: mol_type = other DNA
gttagtcagtaggtatggttattttgaacctgctgattttgtcaagaaatagctattctaatataactagaaaacagaaa

SEQ ID NO: 112768 - DNA, 80 bp, synthetic construct
  misc_feature 1..80: note = Artificially Synthesized Probe
  source 1..80: mol_type = other DNA
taattgccacactgagccaggaagtgaactttttaaatgcacagtctcttgcaagcacacttgacactattatacaagat

SEQ ID NO: 112769 - DNA, 80 bp, synthetic construct; identical to SEQ ID NO: 37326
  misc_feature 1..80: note = Artificially Synthesized Probe
  source 1..80: mol_type = other DNA

SEQ ID NO: 112770 - DNA, 80 bp, synthetic construct
  misc_feature 1..80: note = Artificially Synthesized Probe
  source 1..80: mol_type = other DNA
actcgtcttttagtttcaagaatggaggaaatttttgcttccaatggaatagaagacatttttctaatgataaatattgt

SEQ ID NO: 112771 - DNA, 80 bp, synthetic construct
  misc_feature 1..80: note = Artificially Synthesized Probe
  source 1..80: mol_type = other DNA
cagttaagtaacggaagtcttgaagagcaataatccttttaatattaaaaataaggcattcatagatgttgcttctgcat

SEQ ID NO: 112772 - DNA, 80 bp, synthetic construct
  misc_feature 1..80: note = Artificially Synthesized Probe
  source 1..80: mol_type = other DNA
gcggatcatttgaggtcaggaatttgaaatcagcctttccaacatggtgaaaccctgtctcttctaaaaatacaaaaaat

SEQ ID NO: 112773 - DNA, 80 bp, synthetic construct
  misc_feature 1..80: note = Artificially Synthesized Probe
  source 1..80: mol_type = other DNA
aaaatgcaatatgttgtttcatgatataaaataaaataataactctttctctgaattagagaaaagactaaacaacaata

SEQ ID NO: 112774 - DNA, 80 bp, synthetic construct
  misc_feature 1..80: note = Artificially Synthesized Probe
  source 1..80: mol_type = other DNA
tgagtaactccaataaaagaccacctagttttaataataaatattataaaagtttctacaatggattatataatcagaaa

SEQ ID NO: 112775 - DNA, 80 bp, synthetic construct
  misc_feature 1..80: note = Artificially Synthesized Probe
  source 1..80: mol_type = other DNA
ctcaagctaaccattctttctctcacatgctctcacctagatcattgaagccaaattgcttttgttctcaactaatccgt

SEQ ID NO: 112776 - DNA, 80 bp, synthetic construct
  misc_feature 1..80: note = Artificially Synthesized Probe
  source 1..80: mol_type = other DNA
gagtggtgtgtgtatatatgtggtggtgatgtaaagtcacaagctgttaaatgtttctgtggtgcacaatagatacttat

SEQ ID NO: 112777 - DNA, 80 bp, synthetic construct
  misc_feature 1..80: note = Artificially Synthesized Probe
  source 1..80: mol_type = other DNA
ggagacctgataatatcttagagcacgtgatctaagactgtgcttgctattcccatactgacatttgtctggaaaaaagt

SEQ ID NO: 112778 - DNA, 80 bp, synthetic construct; identical to SEQ ID NO: 37327
  misc_feature 1..80: note = Artificially Synthesized Probe
  source 1..80: mol_type = other DNA

SEQ ID NO: 112779 - DNA, 80 bp, synthetic construct
  misc_feature 1..80: note = Artificially Synthesized Probe
  source 1..80: mol_type = other DNA
ttagttttttctaaactgtgtaatacacttatgtgataagtgttatagtaacagaggtagaaattatcctttttataaag

SEQ ID NO: 112780 - DNA, 80 bp, synthetic construct
  misc_feature 1..80: note = Artificially Synthesized Probe
  source 1..80: mol_type = other DNA
ttgcacttctgcaaaattagttagatgctgttgaaaatcttctaaattagttacacaggactccctaatgggtaattcaa

SEQ ID NO: 112781 - DNA, 80 bp, synthetic construct
  misc_feature 1..80: note = Artificially Synthesized Probe
  source 1..80: mol_type = other DNA
gttcaaactagttatctagaaatcattgttagttctttttacctactctcatcccccacgaggcaaaacctgagtcctat

SEQ ID NO: 112782 - DNA, 80 bp, synthetic construct; identical to SEQ ID NO: 37328
  misc_feature 1..80: note = Artificially Synthesized Probe
  source 1..80: mol_type = other DNA

SEQ ID NO: 112783 - DNA, 80 bp, synthetic construct
  misc_feature 1..80: note = Artificially Synthesized Probe
  source 1..80: mol_type = other DNA
cttttgagaaacctttcagaaatccttatttccagtcccacctcccaaaatttgtttctcaacaagtgagcatattacat

SEQ ID NO: 112784 - DNA, 80 bp, synthetic construct
  misc_feature 1..80: note = Artificially Synthesized Probe
  source 1..80: mol_type = other DNA
gtgttacagtgtcaaaattctccatattttaaaatagttcatgctgatattttttaatttttttggtctaatgcttgtct

SEQ ID NO: 112785 - DNA, 80 bp, synthetic construct
  misc_feature 1..80: note = Artificially Synthesized Probe
  source 1..80: mol_type = other DNA
gttacatatgtatacatgtgccatgctggtgtgctgcacccattaactcatcatttagcattaggtatatctcctaaagc

SEQ ID NO: 112786 - DNA, 80 bp, synthetic construct
  misc_feature 1..80: note = Artificially Synthesized Probe
  source 1..80: mol_type = other DNA
ttttcattaattaacataagaaatataaattattgcatataggaaatatttgtattgcatgtaagaaatatgaattattg

SEQ ID NO: 112787 - DNA, 80 bp, synthetic construct; identical to SEQ ID NO: 37329
  misc_feature 1..80: note = Artificially Synthesized Probe
  source 1..80: mol_type = other DNA

SEQ ID NO: 112788 - DNA, 80 bp, synthetic construct
  misc_feature 1..80: note = Artificially Synthesized Probe
  source 1..80: mol_type = other DNA
tggaacacatacaatttacctaaaatatccatccagtatatgtcgaaattaatgatgaagagtaataaatgccatacaaa

SEQ ID NO: 112789 - DNA, 80 bp, synthetic construct
  misc_feature 1..80: note = Artificially Synthesized Probe
  source 1..80: mol_type = other DNA
tcctatttacataagcaagtagaaagttgtagcaaaatcactaaaaatcaaacaaagaaaagtgtaaagattatcactgt

SEQ ID NO: 112790 - DNA, 80 bp, synthetic construct
  misc_feature 1..80: note = Artificially Synthesized Probe
  source 1..80: mol_type = other DNA
ttgaattaacttttactcttctgagaatcttctttctgtccattcaacaagaagtgtaaagtaggtgtaatacattgtga

SEQ ID NO: 112791 - DNA, 80 bp, synthetic construct
  misc_feature 1..80: note = Artificially Synthesized Probe
  source 1..80: mol_type = other DNA
tcttggtcactttttgttcatgcctagtaaatcaattgagatccataggctgcacagttaagaatattagcaatgactta

SEQ ID NO: 112792 - DNA, 80 bp, synthetic construct
  misc_feature 1..80: note = Artificially Synthesized Probe
  source 1..80: mol_type = other DNA
tactaactgatatgacatagagaagctatccaactgtccaatcatctcccaaaacaaattgagtgagaattttgacatgc

SEQ ID NO: 112793 - DNA, 80 bp, synthetic construct; identical to SEQ ID NO: 37330
  misc_feature 1..80: note = Artificially Synthesized Probe
  source 1..80: mol_type = other DNA

SEQ ID NO: 112794 - DNA, 80 bp, synthetic construct; identical to SEQ ID NO: 37143
  misc_feature 1..80: note = Artificially Synthesized Probe
  source 1..80: mol_type = other DNA

SEQ ID NO: 112795 - DNA, 80 bp, synthetic construct
  misc_feature 1..80: note = Artificially Synthesized Probe
  source 1..80: mol_type = other DNA
atttgatggcttgatacatgtttccatgttgattaccagctcccaaacttcctttacatctacttccctagtcttcacag

SEQ ID NO: 112796 - DNA, 80 bp, synthetic construct
  misc_feature 1..80: note = Artificially Synthesized Probe
  source 1..80: mol_type = other DNA
aggactgttaattactaagccccacactcacggtttttgattcagtaagtctggggtagtgcctcagaaactgcttttct

SEQ ID NO: 112797 - DNA, 80 bp, synthetic construct
  misc_feature 1..80: note = Artificially Synthesized Probe
  source 1..80: mol_type = other DNA
catgtccagtattgaaactgagaggttttctttctattttgtattttttttctagcttaagccagtctgaaattagtcag

SEQ ID NO: 112798 - DNA, 80 bp, synthetic construct; identical to SEQ ID NO: 37331
  misc_feature 1..80: note = Artificially Synthesized Probe
  source 1..80: mol_type = other DNA

SEQ ID NO: 112799 - DNA, 80 bp, synthetic construct
  misc_feature 1..80: note = Artificially Synthesized Probe
  source 1..80: mol_type = other DNA
gtggaaataagatgaatccaattgcagagcttcttcagggcccttgatgccctgaattgcttaagacacaggaatccacc

SEQ ID NO: 112800 - DNA, 80 bp, synthetic construct
  misc_feature 1..80: note = Artificially Synthesized Probe
  source 1..80: mol_type = other DNA
atctggtggcctagtgcaccaaattctgaaactaaaacaccctgagtggtaggcccttttaataaactttatactgaact

SEQ ID NO: 112801 - DNA, 80 bp, synthetic construct
  misc_feature 1..80: note = Artificially Synthesized Probe
  source 1..80: mol_type = other DNA
tattttccactattaagttagacttacagggatctgcagatggcaaagttacaaataagtctttgaatgtgcttatttta

SEQ ID NO: 112802 - DNA, 80 bp, synthetic construct; identical to SEQ ID NO: 37332
  misc_feature 1..80: note = Artificially Synthesized Probe
  source 1..80: mol_type = other DNA

SEQ ID NO: 112803 - DNA, 80 bp, synthetic construct
  misc_feature 1..80: note = Artificially Synthesized Probe
  source 1..80: mol_type = other DNA
ttcatttcacaaacaatcctaaatcagaatgtgacagtttatggggagacaaacaaagctcccaaagatgcttataagtt

SEQ ID NO: 112804 - DNA, 80 bp, synthetic construct
  misc_feature 1..80: note = Artificially Synthesized Probe
  source 1..80: mol_type = other DNA
atatattttattatatgttttgggattttgttaaatttcataagaaagatacctaaaataattttatatgtatttaagta

SEQ ID NO: 112805 - DNA, 80 bp, synthetic construct
  misc_feature 1..80: note = Artificially Synthesized Probe
  source 1..80: mol_type = other DNA
tgtactttttatatctgtattctctgcctgtcttcattactttataaatcattatgggctacagtctttatatttggcag

SEQ ID NO: 112806 - DNA, 80 bp, synthetic construct
  misc_feature 1..80: note = Artificially Synthesized Probe
  source 1..80: mol_type = other DNA
ttaatatatattcagttatataagtttacttttatttttcagtttggatttaggagctctaatccttcaagaatacaagt

SEQ ID NO: 112807 - DNA, 80 bp, synthetic construct; identical to SEQ ID NO: 37333
  misc_feature 1..80: note = Artificially Synthesized Probe
  source 1..80: mol_type = other DNA

SEQ ID NO: 112808 - DNA, 80 bp, synthetic construct
  misc_feature 1..80: note = Artificially Synthesized Probe
  source 1..80: mol_type = other DNA
ttgtgaaagaagagaagttgaaagcaaagcgctatatttctttctgagctggcatacagacacactcacaagccagagtt

SEQ ID NO: 112809 - DNA, 80 bp, synthetic construct
  misc_feature 1..80: note = Artificially Synthesized Probe
  source 1..80: mol_type = other DNA
aacgataatgtgccactctacttgcttgctagaatgagttaggttgaaaagtatagtcccaacagcatcgagtagtatat

SEQ ID NO: 112810 - DNA, 80 bp, synthetic construct
  misc_feature 1..80: note = Artificially Synthesized Probe
  source 1..80: mol_type = other DNA
atcctaacaaaagaagacattaacgctggtcttaacggccttacattttctggcccccatttcctctcggattctctcat

SEQ ID NO: 112811 - DNA, 80 bp, synthetic construct
  misc_feature 1..80: note = Artificially Synthesized Probe
  source 1..80: mol_type = other DNA
taaatgttatctgcttagtgaggcatgagctgaccactatatttaaaatagtaacgccctaagcatcttcatgcccatga

SEQ ID NO: 112812 - DNA, 80 bp, synthetic construct; identical to SEQ ID NO: 37334
  misc_feature 1..80: note = Artificially Synthesized Probe
  source 1..80: mol_type = other DNA

SEQ ID NO: 112813 - DNA, 80 bp, synthetic construct
  misc_feature 1..80: note = Artificially Synthesized Probe
  source 1..80: mol_type = other DNA
caaggggactctaaaatattttcctgttttataccacttgaaatgtgtggccgatcagaaaattgtttctgtccacactg

SEQ ID NO: 112814 - DNA, 80 bp, synthetic construct
  misc_feature 1..80: note = Artificially Synthesized Probe
  source 1..80: mol_type = other DNA
tcccatccccttttatagagtcagaggcagaagagaggccattgaaacccacaaagcatcttatatttatatttttcaag

SEQ ID NO: 112815 - DNA, 80 bp, synthetic construct; identical to SEQ ID NO: 37335
  misc_feature 1..80: note = Artificially Synthesized Probe
  source 1..80: mol_type = other DNA

SEQ ID NO: 112816 - DNA, 80 bp, synthetic construct
  misc_feature 1..80: note = Artificially Synthesized Probe
  source 1..80: mol_type = other DNA
aggaagagtatctttgtcactccaaaggtatttgttcactgaaagttcctgaaatgtattttctagattcctgtatagtt

SEQ ID NO: 112817 - DNA, 80 bp, synthetic construct
  misc_feature 1..80: note = Artificially Synthesized Probe
  source 1..80: mol_type = other DNA
gggaaaaagaaacattaacactcatcagatacaatttatttttagcttcagcaaatatttgatacaaaggggattctttc

SEQ ID NO: 112818 - DNA, 80 bp, synthetic construct
  misc_feature 1..80: note = Artificially Synthesized Probe
  source 1..80: mol_type = other DNA
ctgtgctaattattctccctgattttttaggtggaatctcaactagcaatattaaaacaatagcaacaagtacaagtatt

SEQ ID NO: 112819 - DNA, 80 bp, synthetic construct
  misc_feature 1..80: note = Artificially Synthesized Probe
  source 1..80: mol_type = other DNA
aattacttattcacagtttaaagattgtcaccactattaatctcttagtctgttttgtgttgctataagaaagtatcaga

SEQ ID NO: 112820 - DNA, 80 bp, synthetic construct
  misc_feature 1..80: note = Artificially Synthesized Probe
  source 1..80: mol_type = other DNA
tatccaaatgcttagtgaagcctgtcttataaggaccttaatcccattcaccatgggaggtattctcatgacgtaatcac

SEQ ID NO: 112821 - DNA, 80 bp, synthetic construct; identical to SEQ ID NO: 37336
  misc_feature 1..80: note = Artificially Synthesized Probe
  source 1..80: mol_type = other DNA

SEQ ID NO: 112822 - DNA, 80 bp, synthetic construct
  misc_feature 1..80: note = Artificially Synthesized Probe
  source 1..80: mol_type = other DNA
tcttaccccaccaaaatcagtgtatgttcctgaatgtgctgttgtgaactgccaaaattcactaatattaatgcatgagt

SEQ ID NO: 112823 - DNA, 80 bp, synthetic construct
  misc_feature 1..80: note = Artificially Synthesized Probe
  source 1..80: mol_type = other DNA
aaagagcttatctacactcagtgtttttcaaataacttaactttttcatagttacctgagttgtcttcctaaatcaatgg

SEQ ID NO: 112824 - DNA, 80 bp, synthetic construct
  misc_feature 1..80: note = Artificially Synthesized Probe
  source 1..80: mol_type = other DNA
tgtacatttttattcctccataaatactggtctctctgtgatagttctgtttcttggatttagggattctgaatcttttt

SEQ ID NO: 112825 - DNA, 80 bp, synthetic construct; identical to SEQ ID NO: 37337
  misc_feature 1..80: note = Artificially Synthesized Probe
  source 1..80: mol_type = other DNA

SEQ ID NO: 112826 - DNA, 80 bp, synthetic construct
  misc_feature 1..80: note = Artificially Synthesized Probe
  source 1..80: mol_type = other DNA
ccacttttacatactttgttttcataatttcttttaaagcactataaaatattcatatgatggggaaactgaggtccaaa

SEQ ID NO: 112827 - DNA, 80 bp, synthetic construct
  misc_feature 1..80: note = Artificially Synthesized Probe
  source 1..80: mol_type = other DNA
attgggaaatacttatctctcaatatttaatatcattagaattgactaggggccccaggaggacagaggtgtgtgcagca

SEQ ID NO: 112828 - DNA, 80 bp, synthetic construct
  misc_feature 1..80: note = Artificially Synthesized Probe
  source 1..80: mol_type = other DNA
gttttttgctgcagcaccaaaattagctgtatgtgatggtgtttgcaatggctttcagtattggaactgattaccgtatt

SEQ ID NO: 112829 - DNA, 80 bp, synthetic construct
  misc_feature 1..80: note = Artificially Synthesized Probe
  source 1..80: mol_type = other DNA
cagaaacatttttaagatattgtctcttgttttgcgttactgaaaaaataacaaagtaggacaaattaagaaagtagaac

SEQ ID NO: 112830 - DNA, 80 bp, synthetic construct; identical to SEQ ID NO: 37338
  misc_feature 1..80: note = Artificially Synthesized Probe
  source 1..80: mol_type = other DNA

SEQ ID NO: 112831 - DNA, 80 bp, synthetic construct
  misc_feature 1..80: note = Artificially Synthesized Probe
  source 1..80: mol_type = other DNA
ttcatctagagtaactaattttaaagaattggatctttttatttggtaatgcctttagcactctgtgaaatataaattaa

SEQ ID NO: 112832 - DNA, 80 bp, synthetic construct
  misc_feature 1..80: note = Artificially Synthesized Probe
  source 1..80: mol_type = other DNA
ccttttagcatcagcataagctggagtgaacctgctgtcattactggaccaacatgttatctgattgatgtcaaatcggt

SEQ ID NO: 112833 - DNA, 80 bp, synthetic construct
  misc_feature 1..80: note = Artificially Synthesized Probe
  source 1..80: mol_type = other DNA
taaacagggtatgaggactgaatcagttaacatgcataaagaacttggaacattccctgagatatggtaaatgctcaata

SEQ ID NO: 112834 - DNA, 80 bp, synthetic construct
  misc_feature 1..80: note = Artificially Synthesized Probe
  source 1..80: mol_type = other DNA
aagagagaaggcattaggagaaatatcttccagataaaataacatcagagctaagtcttgaaaaataagtgaagcagaac

SEQ ID NO: 112835 - DNA, 80 bp, synthetic construct; identical to SEQ ID NO: 37339
  misc_feature 1..80: note = Artificially Synthesized Probe
  source 1..80: mol_type = other DNA

SEQ ID NO: 112836 - DNA, 80 bp, synthetic construct
  misc_feature 1..80: note = Artificially Synthesized Probe
  source 1..80: mol_type = other DNA
gtaggataattaaggatgattgtaagttatatgacagaagattatgaggaggaacagatctgtagaggaaaggaatgagt

SEQ ID NO: 112837 - DNA, 80 bp, synthetic construct
  misc_feature 1..80: note = Artificially Synthesized Probe
  source 1..80: mol_type = other DNA
atgagattcactatggaatgtgcaaagtaagatgacaacctaaggacagcaccctggggactatcaacacttaaataaga

SEQ ID NO: 112838 - DNA, 80 bp, synthetic construct; identical to SEQ ID NO: 37340
  misc_feature 1..80: note = Artificially Synthesized Probe
  source 1..80: mol_type = other DNA

SEQ ID NO: 112839 - DNA, 80 bp, synthetic construct; identical to SEQ ID NO: 37144
  misc_feature 1..80: note = Artificially Synthesized Probe
  source 1..80: mol_type = other DNA

SEQ ID NO: 112840 - DNA, 80 bp, synthetic construct
  misc_feature 1..80: note = Artificially Synthesized Probe
  source 1..80: mol_type = other DNA
ccttttgtagagcatatttgtgaagattttagtatgtaattagccaaaaataattagcacgaatgatgaatgccctggga

SEQ ID NO: 112841 - DNA, 80 bp, synthetic construct
  misc_feature 1..80: note = Artificially Synthesized Probe
  source 1..80: mol_type = other DNA
cttgctgagtttcaaagtgagcaagggaaagagggtagaatgggaagataacaaatattttaattgcttattttctacaa

SEQ ID NO: 112842 - DNA, 80 bp, synthetic construct
  misc_feature 1..80: note = Artificially Synthesized Probe
  source 1..80: mol_type = other DNA
aacaatggtttgacaggagaaagggaaggtcattaaataacaaataaaattcgccaacataaatatagcctcaccaaaac

SEQ ID NO: 112843 - DNA, 80 bp, synthetic construct; identical to SEQ ID NO: 37341
  misc_feature 1..80: note = Artificially Synthesized Probe
  source 1..80: mol_type = other DNA

SEQ ID NO: 112844 - DNA, 80 bp, synthetic construct
  misc_feature 1..80: note = Artificially Synthesized Probe
  source 1..80: mol_type = other DNA
catagcattgcacttgggacttattgtgcagcctgtcttctacaaaatactagccacaccgataaaactcttaactttaa

SEQ ID NO: 112845 - DNA, 80 bp, synthetic construct
  misc_feature 1..80: note = Artificially Synthesized Probe
  source 1..80: mol_type = other DNA
acataaagctctgctgtcaggtagctcacaccctagtggtacacactggaatagaaacagctaattatagagtttgaggt

SEQ ID NO: 112846 - DNA, 80 bp, synthetic construct
  misc_feature 1..80: note = Artificially Synthesized Probe
  source 1..80: mol_type = other DNA
aagagaaaaaaaataggaagtggggcaggaagaggagaaccagagtctaattgctgataatgaatataaagtaacacttc

SEQ ID NO: 112847 - DNA, 80 bp, synthetic construct
  misc_feature 1..80: note = Artificially Synthesized Probe
  source 1..80: mol_type = other DNA
taaagaaaggtaatgatgatcttttgtactgccaaatttgaggaccgagaattcctttcaaattttgttaaatactttta

SEQ ID NO: 112848 - DNA, 80 bp, synthetic construct
  misc_feature 1..80: note = Artificially Synthesized Probe
  source 1..80: mol_type = other DNA
tgaaaccaacattactgcattcttacattggatagtagtgaaactaaataattcccaattgtattcagttgtggagcttt

SEQ ID NO: 112849 - DNA, 80 bp, synthetic construct; identical to SEQ ID NO: 37342
  misc_feature 1..80: note = Artificially Synthesized Probe
  source 1..80: mol_type = other DNA

SEQ ID NO: 112850 - DNA, 80 bp, synthetic construct
  misc_feature 1..80: note = Artificially Synthesized Probe
  source 1..80: mol_type = other DNA
cccctttacagaggtcaatagttacccatctctgcacctctcaataatattttttcagcatgaaattaagcctagtctta

SEQ ID NO: 112851 - DNA, 80 bp, synthetic construct
  misc_feature 1..80: note = Artificially Synthesized Probe
  source 1..80: mol_type = other DNA
tcttccattttcgagaagtggggcatttctgtccactgctctgtcttaaggtgggaatgatctatttgactgtatgcaac

SEQ ID NO: 112852 - DNA, 80 bp, synthetic construct
  misc_feature 1..80: note = Artificially Synthesized Probe
  source 1..80: mol_type = other DNA
ataaatgagtttccaggacaacatttacaatatagttataccatatgcaaatcaatgtgtgtttcgccatattatcaata

SEQ ID NO: 112853 - DNA, 80 bp, synthetic construct; identical to SEQ ID NO: 37343
  misc_feature 1..80: note = Artificially Synthesized Probe
  source 1..80: mol_type = other DNA

SEQ ID NO: 112854 - DNA, 80 bp, synthetic construct
  misc_feature 1..80: note = Artificially Synthesized Probe
  source 1..80: mol_type = other DNA
atgacatccacaattaattactatccagtgctacacatagtactaaatcagagtttttcaaactgcagccatcatcagaa

SEQ ID NO: 112855 - DNA, 80 bp, synthetic construct
  misc_feature 1..80: note = Artificially Synthesized Probe
  source 1..80: mol_type = other DNA
ttttgtgggtaatggtgaaaaaatattgaaatctatgtgccaactactttagatttgtcctttctaaatctcagtgaaac

SEQ ID NO: 112856 - DNA, 80 bp, synthetic construct; identical to SEQ ID NO: 37344
  misc_feature 1..80: note = Artificially Synthesized Probe
  source 1..80: mol_type = other DNA

SEQ ID NO: 112857 - DNA, 80 bp, synthetic construct
  misc_feature 1..80: note = Artificially Synthesized Probe
  source 1..80: mol_type = other DNA
tagataaatacatctcacgtagctttgtattattatgttttggtgactcagatttcaagtgctgcttccttaatttttac

SEQ ID NO: 112858 - DNA, 80 bp, synthetic construct
  misc_feature 1..80: note = Artificially Synthesized Probe
  source 1..80: mol_type = other DNA
gggaagtcaagtgctgaaatgattgttactactttagaatcaggtaaggagaatttctcaaccttgctaaaaattgactg

SEQ ID NO: 112859 - DNA, 80 bp, synthetic construct
  misc_feature 1..80: note = Artificially Synthesized Probe
  source 1..80: mol_type = other DNA
gaatattcaatccttgtaaatacagcaacaattaaaggtatccgctgtatttctttgcacttatttaatctgctagttgt

SEQ ID NO: 112860 - DNA, 80 bp, synthetic construct
  misc_feature 1..80: note = Artificially Synthesized Probe
  source 1..80: mol_type = other DNA
aaatacagacaggttaccgcctatgtaggcaccttaggagtttctttcatgttcagatatttccttggtcctttaaggga

SEQ ID NO: 112861 - DNA, 80 bp, synthetic construct
  misc_feature 1..80: note = Artificially Synthesized Probe
  source 1..80: mol_type = other DNA
tgtaatactctgtgagtattaaataatctggaattcgaaagtagaatccagctcacatttatcacagctgttgtcttccc

SEQ ID NO: 112862 - DNA, 80 bp, synthetic construct; identical to SEQ ID NO: 37345
  misc_feature 1..80: note = Artificially Synthesized Probe
  source 1..80: mol_type = other DNA

SEQ ID NO: 112863 - DNA, 80 bp, synthetic construct
  misc_feature 1..80: note = Artificially Synthesized Probe
  source 1..80: mol_type = other DNA
ttcgtctgccaagtatcacaggtatctattttctgattatgctttttacttctcaatccctcctacctgtgaggaaagat

SEQ ID NO: 112864 - DNA, 80 bp, synthetic construct
  misc_feature 1..80: note = Artificially Synthesized Probe
  source 1..80: mol_type = other DNA
aacattgagagaattccttggtttatctgacttaaaatcacatcctaaatttagagaaacatctcataagaaaatatatt

SEQ ID NO: 112865 - DNA, 80 bp, synthetic construct; identical to SEQ ID NO: 37346
  misc_feature 1..80: note = Artificially Synthesized Probe
  source 1..80: mol_type = other DNA

SEQ ID NO: 112866 - DNA, 80 bp, synthetic construct
  misc_feature 1..80: note = Artificially Synthesized Probe
  source 1..80: mol_type = other DNA
attggtgcttagcttgtcatatgttaagctgttatttatctaaaataaactaaaatatttatactatataaagaactctt

SEQ ID NO: 112867 - DNA, 80 bp, synthetic construct
  misc_feature 1..80: note = Artificially Synthesized Probe
  source 1..80: mol_type = other DNA
ccacaataaggtattattgtctatgtactagaacagataaggtaataatttaaaatatggcgatgatacccaatgctggc

SEQ ID NO: 112868 - DNA, 80 bp, synthetic construct
  misc_feature 1..80: note = Artificially Synthesized Probe
  source 1..80: mol_type = other DNA
aaaattatgctcacacaaacatctgtcaccaagattgattgcagttttattagtaataatgaaaactggaaacaacccaa

SEQ ID NO: 112869 - DNA, 80 bp, synthetic construct
  misc_feature 1..80: note = Artificially Synthesized Probe
  source 1..80: mol_type = other DNA
gaagagttattagtgttgtgaagaagcatatactgcaaataaaagaggatactaggagagagtttctttagggtgatgta

SEQ ID NO: 112870 - DNA, 80 bp, synthetic construct; identical to SEQ ID NO: 37145
  misc_feature 1..80: note = Artificially Synthesized Probe
  source 1..80: mol_type = other DNA

SEQ ID NO: 112871 - DNA, 80 bp, synthetic construct; identical to SEQ ID NO: 37347
  misc_feature 1..80: note = Artificially Synthesized Probe
  source 1..80: mol_type = other DNA

SEQ ID NO: 112872 - DNA, 80 bp, synthetic construct
  misc_feature 1..80: note = Artificially Synthesized Probe
  source 1..80: mol_type = other DNA
caaacaaactggatcaccattatggttgctgtgaattacagatgtcaatgattctataatgcgtcagtcattttgctagt

SEQ ID NO: 112873 - DNA, 80 bp, synthetic construct
  misc_feature 1..80: note = Artificially Synthesized Probe
  source 1..80: mol_type = other DNA
tcagaagataccagatgaagttacaaaatttcaattaacgttccttcctccttctcaacctaatggaaatatccaagtat

SEQ ID NO: 112874 - DNA, 80 bp, synthetic construct; identical to SEQ ID NO: 37348
  misc_feature 1..80: note = Artificially Synthesized Probe
  source 1..80: mol_type = other DNA

SEQ ID NO: 112875 - DNA, 80 bp, synthetic construct
  misc_feature 1..80: note = Artificially Synthesized Probe
  source 1..80: mol_type = other DNA
cattaaaagtaaaagaacagtgatatataaagagataactctgcctaaaaaaaagctatatgattatgaatttaaaatgg

SEQ ID NO: 112876 - DNA, 80 bp, synthetic construct
  misc_feature 1..80: note = Artificially Synthesized Probe
  source 1..80: mol_type = other DNA
acagagacatatacagacacaatttgttttattccttgcctacttttagatcatcttgaaattttcaaataaaattatat

SEQ ID NO: 112877 - DNA, 80 bp, synthetic construct
  misc_feature 1..80: note = Artificially Synthesized Probe
  source 1..80: mol_type = other DNA
ctctcagtcactttgactttatatctttataaaataaatcttttggggattctttttgcatgtcccattaagtggaccac

SEQ ID NO: 112878 - DNA, 80 bp, synthetic construct
  misc_feature 1..80: note = Artificially Synthesized Probe
  source 1..80: mol_type = other DNA
tgtgaggattaaatattcatagttatggtaggtagtgaatggtacatatattttggctattggaagagagaaaataggaa

SEQ ID NO: 112879 - DNA, 80 bp, synthetic construct; identical to SEQ ID NO: 37349
  misc_feature 1..80: note = Artificially Synthesized Probe
  source 1..80: mol_type = other DNA

SEQ ID NO: 112880 - DNA, 80 bp, synthetic construct
  misc_feature 1..80: note = Artificially Synthesized Probe
  source 1..80: mol_type = other DNA
aaatattttctctaggcattttcaagccacattttatggtcttggtttatttatcatatctaccacatgtatattgtaat

SEQ ID NO: 112881 - DNA, 80 bp, synthetic construct
  misc_feature 1..80: note = Artificially Synthesized Probe
  source 1..80: mol_type = other DNA
tgacgttgatgcaatgggtacattgatttatatatttagaacctggccatgtctggtattcttttaatgtaataagaaag

SEQ ID NO: 112882 - DNA, 80 bp, synthetic construct
  misc_feature 1..80: note = Artificially Synthesized Probe
  source 1..80: mol_type = other DNA
caagataaagtgaagaaaagaagattctctgtctacagcttccttagcacaaagttaattgaaaggattcacgtttgtgt

SEQ ID NO: 112883 - DNA, 80 bp, synthetic construct; identical to SEQ ID NO: 37350
  misc_feature 1..80: note = Artificially Synthesized Probe
  source 1..80: mol_type = other DNA

SEQ ID NO: 112884 - DNA, 80 bp, synthetic construct
  misc_feature 1..80: note = Artificially Synthesized Probe
  source 1..80: mol_type = other DNA
gatcactcagcctttgttctcagcgtttagtaccagaacatcaatttttagaaatacttcattgttaatgttcttcctac

SEQ ID NO: 112885 - DNA, 80 bp, synthetic construct
  misc_feature 1..80: note = Artificially Synthesized Probe
  source 1..80: mol_type = other DNA
acacacacatacataagcaatcacttgaaaatagtaacaaatatttgtttgttttaggtttacgcagtcaatagtgctgg

SEQ ID NO: 112886 - DNA, 80 bp, synthetic construct
  misc_feature 1..80: note = Artificially Synthesized Probe
  source 1..80: mol_type = other DNA
atgtagacaagcctttaagtgataaatatgcatatattaagcacatactaagtaaaaatgtgtggttattaaagctatag

SEQ ID NO: 112887 - DNA, 80 bp, synthetic construct
  misc_feature 1..80: note = Artificially Synthesized Probe
  source 1..80: mol_type = other DNA
gtgtgtttaaattgcctatcattagactttgactaggtctaattagattattagattgtttgactgatttttattttgga

SEQ ID NO: 112888 - DNA, 80 bp, synthetic construct; identical to SEQ ID NO: 37351
  misc_feature 1..80: note = Artificially Synthesized Probe
  source 1..80: mol_type = other DNA

SEQ ID NO: 112889 - DNA, 80 bp, synthetic construct
  misc_feature 1..80: note = Artificially Synthesized Probe
  source 1..80: mol_type = other DNA
aatacagcagagcacagtgattaaaggtgacagcattaggctgggtttagggtcaaactgctggattgaatcatggatta

SEQ ID NO: 112890 - DNA, 80 bp, synthetic construct
  misc_feature 1..80: note = Artificially Synthesized Probe
  source 1..80: mol_type = other DNA
gaataaaaaatattcactgttagatgaaactgataaattttatctttttgtcaatggattatttatataattgtgatact

SEQ ID NO: 112891 - DNA, 80 bp, synthetic construct
  misc_feature 1..80: note = Artificially Synthesized Probe
  source 1..80: mol_type = other DNA
agggaggcatttcatattcagattgcaattaactttcctgctaattagacttggcactccttggtatttaattaggatga

SEQ ID NO: 112892 - DNA, 80 bp, synthetic construct; identical to SEQ ID NO: 37352
  misc_feature 1..80: note = Artificially Synthesized Probe
  source 1..80: mol_type = other DNA

SEQ ID NO: 112893 - DNA, 80 bp, synthetic construct
  misc_feature 1..80: note = Artificially Synthesized Probe
  source 1..80: mol_type = other DNA
aattggtagtagtctcatgaaatttgcatttgacagatattatgaagttggatagtaatgtccaatgctggattcctcta

SEQ ID NO: 112894 - DNA, 80 bp, synthetic construct
  misc_feature 1..80: note = Artificially Synthesized Probe
  source 1..80: mol_type = other DNA
ctgtgatctgtggcacttactccttccctctgtcccttaattcttcacagataattcccccaaaaaacctcttacacatc

SEQ ID NO: 112895 - DNA, 80 bp, synthetic construct
  misc_feature 1..80: note = Artificially Synthesized Probe
  source 1..80: mol_type = other DNA
agctcttttccctatctacaaaataaaaacaatgttgataatcctgtgggattattgagaagctttttaaaaaagattct

SEQ ID NO: 112896 - DNA, 80 bp, synthetic construct
  misc_feature 1..80: note = Artificially Synthesized Probe
  source 1..80: mol_type = other DNA
ttgtatgcattgatgacaaattatgaattatcatggctcttctagaagttattctgttaatctgttaaggttaaaagtac

SEQ ID NO: 112897 - DNA, 80 bp, synthetic construct; identical to SEQ ID NO: 37353
  misc_feature 1..80: note = Artificially Synthesized Probe
  source 1..80: mol_type = other DNA

SEQ ID NO: 112898 - DNA, 80 bp, synthetic construct
  misc_feature 1..80: note = Artificially Synthesized Probe
  source 1..80: mol_type = other DNA
gctatcatctagatgtttagcatggattaactgtgggaggggtgctagtatgactagaacagaaattagtaaaccagcta

SEQ ID NO: 112899 - DNA, 80 bp, synthetic construct
  misc_feature 1..80: note = Artificially Synthesized Probe
  source 1..80: mol_type = other DNA
caggtgcctgaaaatcacacctgggctctattatctcagggaagtctcaaatgtataattatgctttcaggagataataa

SEQ ID NO: 112900 - DNA, 80 bp, synthetic construct; identical to SEQ ID NO: 37354
  misc_feature 1..80: note = Artificially Synthesized Probe
  source 1..80: mol_type = other DNA

SEQ ID NO: 112901 - DNA, 80 bp, synthetic construct
  misc_feature 1..80: note = Artificially Synthesized Probe
  source 1..80: mol_type = other DNA
gattgactcccagttatcacacacctcttgagattaatagattgtcaatattattattaatgataccaatcatttctttg

SEQ ID NO: 112902 - DNA, 80 bp, synthetic construct
  misc_feature 1..80: note = Artificially Synthesized Probe
  source 1..80: mol_type = other DNA
ataattctggctgtttttaaacaatacttttaacttctcatatctagcaggtagaataaaaggaagcgattatcctcagc

SEQ ID NO: 112903 - DNA, 80 bp, synthetic construct
  misc_feature 1..80: note = Artificially Synthesized Probe
  source 1..80: mol_type = other DNA
taagatggaatcttgatagcttctttggaggggtgaacaagtgagttactcttgattgagggatgctctttctctacctg

SEQ ID NO: 112904 - DNA, 80 bp, synthetic construct
  misc_feature 1..80: note = Artificially Synthesized Probe
  source 1..80: mol_type = other DNA
atatattcatatgttacttggaattattgttctctttgtttctgaaaacagctcagcatgatggaaatgtaacaaagtgg

SEQ ID NO: 112905 - DNA, 80 bp, synthetic construct; identical to SEQ ID NO: 37355
  misc_feature 1..80: note = Artificially Synthesized Probe
  source 1..80: mol_type = other DNA

SEQ ID NO: 112906 - DNA, 80 bp, synthetic construct
  misc_feature 1..80: note = Artificially Synthesized Probe
  source 1..80: mol_type = other DNA
gcaaccctaagagtaattatgatttgatataagttacataaagaccatatgaaaaatgtgctattggagaacataggtat

SEQ ID NO: 112907 - DNA, 80 bp, synthetic construct
  misc_feature 1..80: note = Artificially Synthesized Probe
  source 1..80: mol_type = other DNA
ctttttatctcatgaatgagtgatagaaatatttaataccacctttaatatttagctttttgtagcccctaaaaacccaa

SEQ ID NO: 112908 - DNA, 80 bp, synthetic construct
  misc_feature 1..80: note = Artificially Synthesized Probe
  source 1..80: mol_type = other DNA
attttttaaatgcaggtgctttcatttgtgcctgttagttaaaacattatcaaattctttacaaatatcctaagccaagt

SEQ ID NO: 112909 - DNA, 80 bp, synthetic construct
  misc_feature 1..80: note = Artificially Synthesized Probe
  source 1..80: mol_type = other DNA
tatttatagtttatttattttgcatatttgttcctgaaacagactcttcatataacaaataaaatcataagaattttata

SEQ ID NO: 112910 - DNA, 80 bp, synthetic construct; identical to SEQ ID NO: 37356
  misc_feature 1..80: note = Artificially Synthesized Probe
  source 1..80: mol_type = other DNA

SEQ ID NO: 112911 - DNA, 80 bp, synthetic construct
  misc_feature 1..80: note = Artificially Synthesized Probe
  source 1..80: mol_type = other DNA
gagctgattcagttgttcaaactgctaactgctcacgagtttaccaaatttttagcccctgcctcatcaaattcaatggg

SEQ ID NO: 112912 - DNA, 80 bp, synthetic construct
  misc_feature 1..80: note = Artificially Synthesized Probe
  source 1..80: mol_type = other DNA
atatgcaaagtgttgatttttctttttttattttatagatttaaatttagagctacaaatattatgggacaatttactga

SEQ ID NO: 112913 - DNA, 80 bp, synthetic construct
  misc_feature 1..80: note = Artificially Synthesized Probe
  source 1..80: mol_type = other DNA
cttgatacttaggtgatgggttgatacgtgcagcaaaccaccatgacacatgtttacctatgtaacaaacctgcacgtcc

SEQ ID NO: 112914 - DNA, 80 bp, synthetic construct
  misc_feature 1..80: note = Artificially Synthesized Probe
  source 1..80: mol_type = other DNA
tctagtaatatttgtgggtttttaaaattttttcttttaggtttaggagtacctgtgaaggtttgttacacaaacatctg

SEQ ID NO: 112915 - DNA, 80 bp, synthetic construct; identical to SEQ ID NO: 37357
  misc_feature 1..80: note = Artificially Synthesized Probe
  source 1..80: mol_type = other DNA

SEQ ID NO: 112916 - DNA, 80 bp, synthetic construct
  misc_feature 1..80: note = Artificially Synthesized Probe
  source 1..80: mol_type = other DNA
agaaaataatttaatttctataaatctgagtttcctttgttgggaaaatattgataagagtatcatccttgaggggttgt

SEQ ID NO: 112917 - DNA, 80 bp, synthetic construct
  misc_feature 1..80: note = Artificially Synthesized Probe
  source 1..80: mol_type = other DNA
aacattctacattgtttgtgccaggccctcaaaagccccagtttattcgtcttaaagaattgcatgaacagggtatttct

SEQ ID NO: 112918 - DNA, 80 bp, synthetic construct
  misc_feature 1..80: note = Artificially Synthesized Probe
  source 1..80: mol_type = other DNA
aaatactaattgtataaaaagccagcctccacagcctctacatgtagtcaaggaaactttgcatcttgaagaaatagagg

SEQ ID NO: 112919 - DNA, 80 bp, synthetic construct; identical to SEQ ID NO: 37358
  misc_feature 1..80: note = Artificially Synthesized Probe
  source 1..80: mol_type = other DNA

SEQ ID NO: 112920 - DNA, 80 bp, synthetic construct
  misc_feature 1..80: note = Artificially Synthesized Probe
  source 1..80: mol_type = other DNA
tgctgtattgtatgatgttgtctttcatcaacttactggtttcatacagattattcatgggaaggcaacatgttccgtca

SEQ ID NO: 112921 - DNA, 80 bp, synthetic construct
  misc_feature 1..80: note = Artificially Synthesized Probe
  source 1..80: mol_type = other DNA
agcactataagtaatctcaaagagctcctcagcaatggtcttctctttcttctttccactcacagtcaaggtggtggaat

SEQ ID NO: 112922 - DNA, 80 bp, synthetic construct
  misc_feature 1..80: note = Artificially Synthesized Probe
  source 1..80: mol_type = other DNA
agagcacaggatcctgccaagactaaggaaggagggactggtgaaatgtagactggacacaatatatagaaaggcactgg

SEQ ID NO: 112923 - DNA, 80 bp, synthetic construct; identical to SEQ ID NO: 37359
  misc_feature 1..80: note = Artificially Synthesized Probe
  source 1..80: mol_type = other DNA

SEQ ID NO: 112924 - DNA, 80 bp, synthetic construct; identical to SEQ ID NO: 37146
  misc_feature 1..80: note = Artificially Synthesized Probe
  source 1..80: mol_type = other DNA

SEQ ID NO: 112925 - DNA, 80 bp, synthetic construct
  misc_feature 1..80: note = Artificially Synthesized Probe
  source 1..80: mol_type = other DNA
tatttgctttctaccagactattgagtgtcgtggttctatggagattagagtcactttcataggtcaagaaacaaacaac

SEQ ID NO: 112926 - DNA, 80 bp, synthetic construct
  misc_feature 1..80: note = Artificially Synthesized Probe
  source 1..80: mol_type = other DNA
aattgtaaaaccatatcctaatgttttaagaaagtttacaaatttctgttggcccacgtccaaagttgtcctgggccaca

SEQ ID NO: 112927 - DNA, 80 bp, synthetic construct
  misc_feature 1..80: note = Artificially Synthesized Probe
  source 1..80: mol_type = other DNA
gaatgaaggcaggcaaataataaagtgcattcatataatacccctggtgtcatcagaagatgacaaagggtgattgagtc

SEQ ID NO: 112928 - DNA, 80 bp, synthetic construct
  misc_feature 1..80: note = Artificially Synthesized Probe
  source 1..80: mol_type = other DNA
gggataagcattcattcactggtattttgcacaccacaggcaatgagcactaagccgagttgcctgtctgttgaaacttt

SEQ ID NO: 112929 - DNA, 80 bp, synthetic construct; identical to SEQ ID NO: 37360
  misc_feature 1..80: note = Artificially Synthesized Probe
  source 1..80: mol_type = other DNA

SEQ ID NO: 112930 - DNA, 80 bp, synthetic construct
  misc_feature 1..80: note = Artificially Synthesized Probe
  source 1..80: mol_type = other DNA
aaaaaatcttccctaggcacatcagtttatggaaagtgcttgtaggcaatgttttgattacaaggtttaattatagaggg

SEQ ID NO: 112931 - DNA, 80 bp, synthetic construct
  misc_feature 1..80: note = Artificially Synthesized Probe
  source 1..80: mol_type = other DNA
acagggctctcattaaagctgaacatgatgaaatcttaaaccccatggcaaaggcactctgtgattgttttcttttgtca

SEQ ID NO: 112932 - DNA, 80 bp, synthetic construct
  misc_feature 1..80: note = Artificially Synthesized Probe
  source 1..80: mol_type = other DNA
tggatttcataaatatatttcagagactggatgttcaagttgaaacaggtatatagacatttggttcatcattcattata

SEQ ID NO: 112933 - DNA, 80 bp, synthetic construct; identical to SEQ ID NO: 37361
  misc_feature 1..80: note = Artificially Synthesized Probe
  source 1..80: mol_type = other DNA

SEQ ID NO: 112934 - DNA, 80 bp, synthetic construct
  misc_feature 1..80: note = Artificially Synthesized Probe
  source 1..80: mol_type = other DNA
tcattgtttatgtaccaagtctttaaggggttttacatataaactcatgcatcttcactgcaactctgtaacaacacctc

SEQ ID NO: 112935 - DNA, 80 bp, synthetic construct
  misc_feature 1..80: note = Artificially Synthesized Probe
  source 1..80: mol_type = other DNA
actacctgcaaatcactaagtccccaagtagcccccagttcattactatgggtgatgtttctgctcccacaacctatctt

SEQ ID NO: 112936 - DNA, 80 bp, synthetic construct
  misc_feature 1..80: note = Artificially Synthesized Probe
  source 1..80: mol_type = other DNA
tgacttttctcacaccctagcaaacactttattagctacctttaaattttttcctgtctgtatggatgaaaatgatgttc

SEQ ID NO: 112937 - DNA, 80 bp, synthetic construct
  misc_feature 1..80: note = Artificially Synthesized Probe
  source 1..80: mol_type = other DNA
aagctgtcttaatgggaaaatataaacagaaatgagaaaattttgcaagataatttctggactacagtgtgatcagaata

SEQ ID NO: 112938 - DNA, 80 bp, synthetic construct
  misc_feature 1..80: note = Artificially Synthesized Probe
  source 1..80: mol_type = other DNA
tatcatttattcctcctatctaactctatttcttgacttatggaattgagtaacttttagtaaattatttgctcagtgtt

SEQ ID NO: 112939 - DNA, 80 bp, synthetic construct; identical to SEQ ID NO: 37362
  misc_feature 1..80: note = Artificially Synthesized Probe
  source 1..80: mol_type = other DNA

SEQ ID NO: 112940 - DNA, 80 bp, synthetic construct
  misc_feature 1..80: note = Artificially Synthesized Probe
  source 1..80: mol_type = other DNA
atagtagtacaatttattatgtaaacagaccaatttaatgtgatttgtcacaggattttaagtctagtcagaaatgactt

SEQ ID NO: 112941 - DNA, 80 bp, synthetic construct
  misc_feature 1..80: note = Artificially Synthesized Probe
  source 1..80: mol_type = other DNA
cagtgaatcagaaagtgtacttgataatcagggaacattttgtcctctcttagtgacacttttgtaattcatgtgcccaa

SEQ ID NO: 112942 - DNA, 80 bp, synthetic construct; identical to SEQ ID NO: 37363
  misc_feature 1..80: note = Artificially Synthesized Probe
  source 1..80: mol_type = other DNA

SEQ ID NO: 112943 - DNA, 80 bp, synthetic construct
  misc_feature 1..80: note = Artificially Synthesized Probe
  source 1..80: mol_type = other DNA
ttaaattcagtatttattcaaatccaccatgcaggatagccacaggaactcttttatattggtaacattacataagtacc

SEQ ID NO: 112944 - DNA, 80 bp, synthetic construct
  misc_feature 1..80: note = Artificially Synthesized Probe
  source 1..80: mol_type = other DNA
ttcttatttggttcaatgcctgatcttcaaacacgaacatttttaatctttttcaaaatcaatatatttgttcattagta

SEQ ID NO: 112945 - DNA, 80 bp, synthetic construct
  misc_feature 1..80: note = Artificially Synthesized Probe
  source 1..80: mol_type = other DNA
atgttaaaataagataaagttatggaggaaaaaagtagaacagagggaagaaggagggggaggaggaggcagaaaatgca

SEQ ID NO: 112946 - DNA, 80 bp, synthetic construct
  misc_feature 1..80: note = Artificially Synthesized Probe
  source 1..80: mol_type = other DNA
gctagaaatctaggatcaagtttcctgcccatttggtatcaggtgagggctctctttctggcttacagatggttgccttc

SEQ ID NO: 112947 - DNA, 80 bp, synthetic construct; identical to SEQ ID NO: 37364
  misc_feature 1..80: note = Artificially Synthesized Probe
  source 1..80: mol_type = other DNA

SEQ ID NO: 112948 - DNA, 80 bp, synthetic construct
  misc_feature 1..80: note = Artificially Synthesized Probe
  source 1..80: mol_type = other DNA
ttgagaaggtatttcagcaaacctttaaaggaagtgaagtggctacccagaaagatatacaaggcatacacacctttgca

SEQ ID NO: 112949 - DNA, 80 bp, synthetic construct
  misc_feature 1..80: note = Artificially Synthesized Probe
  source 1..80: mol_type = other DNA
ttccatgatagttactttaaaaatgaagcatataaaaatttttctgcaggtgagaaaatggagttctccaaatgtgtctg

SEQ ID NO: 112950 - DNA, 80 bp, synthetic construct
  misc_feature 1..80: note = Artificially Synthesized Probe
  source 1..80: mol_type = other DNA
agatcacacatgccactggaaggatatgggcttttctcagtgggagatgaggaggattttaagcagagaaataatgtttt

SEQ ID NO: 112951 - DNA, 80 bp, synthetic construct; identical to SEQ ID NO: 37365
  misc_feature 1..80: note = Artificially Synthesized Probe
  source 1..80: mol_type = other DNA

SEQ ID NO: 112952 - DNA, 80 bp, synthetic construct
  misc_feature 1..80: note = Artificially Synthesized Probe
  source 1..80: mol_type = other DNA
cttaacaataaattattgatattatttaagctacttgtatatacgttttcaaatcagtctttgatttttttctttaaagt

SEQ ID NO: 112953 - DNA, 80 bp, synthetic construct
  misc_feature 1..80: note = Artificially Synthesized Probe
  source 1..80: mol_type = other DNA
tccctgaagcaatcagataggttgtcacgtaggaagtcccatattttggatctgtctggtggttttctcttgatgtcctt

SEQ ID NO: 112954 - DNA, 80 bp, synthetic construct
  misc_feature 1..80: note = Artificially Synthesized Probe
  source 1..80: mol_type = other DNA
gatgctaaaattgatcagtaggcttggtggcagcaacagcatgatccttcattggaaagttggttttgaccacttataac

SEQ ID NO: 112955 - DNA, 80 bp, synthetic construct
  misc_feature 1..80: note = Artificially Synthesized Probe
  source 1..80: mol_type = other DNA
ttttgctcttgttacccaggctggagtgcagtggcacgatgtcggctcactgcaacctccaccttccgatttcaagctat

SEQ ID NO: 112956 - DNA, 80 bp, synthetic construct; identical to SEQ ID NO: 37366
  misc_feature 1..80: note = Artificially Synthesized Probe
  source 1..80: mol_type = other DNA

SEQ ID NO: 112957 - DNA, 80 bp, synthetic construct
  misc_feature 1..80: note = Artificially Synthesized Probe
  source 1..80: mol_type = other DNA
tatttaggccaaggagatggtctagttatagccagagtttacaaattagtactttttttaaactattgggtactgggctt

SEQ ID NO: 112958 - DNA, 80 bp, synthetic construct
  misc_feature 1..80: note = Artificially Synthesized Probe
  source 1..80: mol_type = other DNA
atcctactgtcctcatggttagcacttgtaagttcattttatatttaattaacttttcatgggtaaaaagaagagagaaa

SEQ ID NO: 112959 - DNA, 80 bp, synthetic construct
  misc_feature 1..80: note = Artificially Synthesized Probe
  source 1..80: mol_type = other DNA
ttatttctgatcaatttccatttttattaaatataaggcttgaattcttccctctttggccagtaggagccccttcagga

SEQ ID NO: 112960 - DNA, 80 bp, synthetic construct; identical to SEQ ID NO: 37367
  misc_feature 1..80: note = Artificially Synthesized Probe
  source 1..80: mol_type = other DNA

SEQ ID NO: 112961 - DNA, 80 bp, synthetic construct
  misc_feature 1..80: note = Artificially Synthesized Probe
  source 1..80: mol_type = other DNA
gtctggtggataaaaactaagtagtcatcatcatatagatgaaattaaaactgtgaggctagatgggctcacactgggag

SEQ ID NO: 112962 - DNA, 80 bp, synthetic construct
  misc_feature 1..80: note = Artificially Synthesized Probe
  source 1..80: mol_type = other DNA
ataagattccataataatatttaatgatcctgttatccctcttctccaggggaaggactttcagaaagaaccgtagagat

SEQ ID NO: 112963 - DNA, 80 bp, synthetic construct
  misc_feature 1..80: note = Artificially Synthesized Probe
  source 1..80: mol_type = other DNA
gtcatagtccaatcaggagacagaagccacaacagttacttgaatgggaaacatttttatttttaatagacagataaaaa

SEQ ID NO: 112964 - DNA, 80 bp, synthetic construct
  misc_feature 1..80: note = Artificially Synthesized Probe
  source 1..80: mol_type = other DNA
gagaaatctaagagtccagaagtagcaagcaaaacaaagcagctactctctttaacttgaaggagagaggacagtaaaca

SEQ ID NO: 112965 - DNA, 80 bp, synthetic construct; identical to SEQ ID NO: 37368
  misc_feature 1..80: note = Artificially Synthesized Probe
  source 1..80: mol_type = other DNA

SEQ ID NO: 112966 - DNA, 80 bp, synthetic construct
  misc_feature 1..80: note = Artificially Synthesized Probe
  source 1..80: mol_type = other DNA
ctcactttcggccggctggcaaaggagaaatgcaggttccagctccaatatcaaagagcacagcaaaaaaaaggaggttt

SEQ ID NO: 112967 - DNA, 80 bp, synthetic construct
  misc_feature 1..80: note = Artificially Synthesized Probe
  source 1..80: mol_type = other DNA
caacacttgtaaaatatccagcttccttatatggtagacccccttctcatgcttactttctgaacatgtctgtgctgaat

SEQ ID NO: 112968 - DNA, 80 bp, synthetic construct; identical to SEQ ID NO: 37369
  misc_feature 1..80: note = Artificially Synthesized Probe
  source 1..80: mol_type = other DNA

SEQ ID NO: 112969 - DNA, 80 bp, synthetic construct
  misc_feature 1..80: note = Artificially Synthesized Probe
  source 1..80: mol_type = other DNA
ctatttgcagatttagccagaagacagtgagagagttatcattcgaggcactttgaatgctataatgtgtaaaatatggg

SEQ ID NO: 112970 - DNA, 80 bp, synthetic construct; identical to SEQ ID NO: 37147
  misc_feature 1..80: note = Artificially Synthesized Probe
  source 1..80: mol_type = other DNA

SEQ ID NO: 112971 - DNA, 80 bp, synthetic construct
  misc_feature 1..80: note = Artificially Synthesized Probe
  source 1..80: mol_type = other DNA
attccccacaacttgcctactcactagctaaagagatctattctcacctgaacattccttgggcttttatacattctgct

SEQ ID NO: 112972 - DNA, 80 bp, synthetic construct
  misc_feature 1..80: note = Artificially Synthesized Probe
  source 1..80: mol_type = other DNA
tgttttttctgcattgaaatcttgcctctcaactaaattgtaatgtctttgagggtagggaacatgttttatactttcca

SEQ ID NO: 112973 - DNA, 80 bp, synthetic construct
  misc_feature 1..80: note = Artificially Synthesized Probe
  source 1..80: mol_type = other DNA
gtttaagatgaaaagaatctgatttgattctcagattcatgtggcttttatttttgaacctaagttttctgattgtaaag

SEQ ID NO: 112974 - DNA, 80 bp, synthetic construct; identical to SEQ ID NO: 37370
  misc_feature 1..80: note = Artificially Synthesized Probe
  source 1..80: mol_type = other DNA

SEQ ID NO: 112975 - DNA, 80 bp, synthetic construct
  misc_feature 1..80: note = Artificially Synthesized Probe
  source 1..80: mol_type = other DNA
agaaaaagaagtcgagtagctataaatttgcaacatattcagagaggtgattttaacaaggaaattatttgactaaatgt

SEQ ID NO: 112976 - DNA, 80 bp, synthetic construct
  misc_feature 1..80: note = Artificially Synthesized Probe
  source 1..80: mol_type = other DNA
agaattcgacagaagcagaaagaaggtggcacatactctcctcaggatgcagaaattattgacactaaattgaagctgga

SEQ ID NO: 112977 - DNA, 80 bp, synthetic construct; identical to SEQ ID NO: 37371
  misc_feature 1..80: note = Artificially Synthesized Probe
  source 1..80: mol_type = other DNA

SEQ ID NO: 112978 - DNA, 80 bp, synthetic construct
  misc_feature 1..80: note = Artificially Synthesized Probe
  source 1..80: mol_type = other DNA
atcacaggtttaaattaattaaatttataactacttgatattatttatatccatttttataaaagctttttaataactat

SEQ ID NO: 112979 - DNA, 80 bp, synthetic construct
  misc_feature 1..80: note = Artificially Synthesized Probe
  source 1..80: mol_type = other DNA
gtacataattttaaagaaaaaataattataaatccttttaaaagcattatcaattattcaaaatgttggcacattataaa

SEQ ID NO: 112980 - DNA, 80 bp, synthetic construct
  misc_feature 1..80: note = Artificially Synthesized Probe
  source 1..80: mol_type = other DNA
ttattaattttgaaaatatggcatcaaatgtcttggactcaaaaagttattcatttgtagttgtcacttgttaaagttgg

SEQ ID NO: 112981 - DNA, 80 bp, synthetic construct
  misc_feature 1..80: note = Artificially Synthesized Probe
  source 1..80: mol_type = other DNA
ttcttggatatgacagctgactttttaaacattcagatgttgatctttgtgttctaatacagtggtcctatccacaaatg

SEQ ID NO: 112982 - DNA, 80 bp, synthetic construct
  misc_feature 1..80: note = Artificially Synthesized Probe
  source 1..80: mol_type = other DNA
gttctgtttgcctcttctgaccttattagcgtaacttgacatatatgcttgctctgaacatgtgtagctatttcagagtc

SEQ ID NO: 112983 - DNA, 80 bp, synthetic construct; identical to SEQ ID NO: 37372
  misc_feature 1..80: note = Artificially Synthesized Probe
  source 1..80: mol_type = other DNA

SEQ ID NO: 112984 - DNA, 80 bp, synthetic construct
  misc_feature 1..80: note = Artificially Synthesized Probe
  source 1..80: mol_type = other DNA
tagctatttgaacaatatagttgaatctgttcatactaaaatgtaaacttctaagaccgaccccctccccaacactggta

SEQ ID NO: 112985 - DNA, 80 bp, synthetic construct
  misc_feature 1..80: note = Artificially Synthesized Probe
  source 1..80: mol_type = other DNA
tacattcgaggcagactgtggtgagattcaatcccctaagcactatatattttcacagcttgcccctttctctacttctg

SEQ ID NO: 112986 - DNA, 80 bp, synthetic construct; identical to SEQ ID NO: 37373
  misc_feature 1..80: note = Artificially Synthesized Probe
  source 1..80: mol_type = other DNA

SEQ ID NO: 112987 - DNA, 80 bp, synthetic construct
  misc_feature 1..80: note = Artificially Synthesized Probe
  source 1..80: mol_type = other DNA
tatttttccacttctgtgtttatttacatattgcattatttgtaaaagggtttaaaagtgaaataatatttcagataatt

SEQ ID NO: 112988 - DNA, 80 bp, synthetic construct
  misc_feature 1..80: note = Artificially Synthesized Probe
  source 1..80: mol_type = other DNA
gacttattacagaaatgcattaaaataacaattaagtgatttgggcattaattcttcagtacagagatctgtgtccagct

SEQ ID NO: 112989 - DNA, 80 bp, synthetic construct
  misc_feature 1..80: note = Artificially Synthesized Probe
  source 1..80: mol_type = other DNA
tctaaatccgttcaaagtcaatcagagactgatggtagattctaggagtgagaatcaagaagtctgatttagctccctaa

SEQ ID NO: 112990 - DNA, 80 bp, synthetic construct
  misc_feature 1..80: note = Artificially Synthesized Probe
  source 1..80: mol_type = other DNA
tttgagaccagccggcccaacatggtgaaaccccatctctactaaaaatacaaaaattagccaggcatggtggcgcatgc

SEQ ID NO: 112991 - DNA, 80 bp, synthetic construct; identical to SEQ ID NO: 37374
  misc_feature 1..80: note = Artificially Synthesized Probe
  source 1..80: mol_type = other DNA

SEQ ID NO: 112992 - DNA, 80 bp, synthetic construct
  misc_feature 1..80: note = Artificially Synthesized Probe
  source 1..80: mol_type = other DNA
caaacatggtgcttggtactaagtcctttcaatgatttgtggtttcatattttagaaattatttaactattttatactct

SEQ ID NO: 112993 - DNA, 80 bp, synthetic construct
  misc_feature 1..80: note = Artificially Synthesized Probe
  source 1..80: mol_type = other DNA
tgaggtatgattatactccagcgtgatattatgtgctttagtcactgcatcaactctctgcaggctactcaaaatgtagg

SEQ ID NO: 112994 - DNA, 80 bp, synthetic construct
  misc_feature 1..80: note = Artificially Synthesized Probe
  source 1..80: mol_type = other DNA
taaagatgtagtactctttaattctatgaaaacattcaaggatatactaaaataacgttttaaattctcaatttgaatga

SEQ ID NO: 112995 - DNA, 80 bp, synthetic construct; identical to SEQ ID NO: 37375
  misc_feature 1..80: note = Artificially Synthesized Probe
  source 1..80: mol_type = other DNA

SEQ ID NO: 112996 - DNA, 80 bp, synthetic construct
  misc_feature 1..80: note = Artificially Synthesized Probe
  source 1..80: mol_type = other DNA
agctaaaaatgctatttgctaaataagcttattttttactatcttctttccgcatttaagtcacggaagttttgtttctt

SEQ ID NO: 112997 - DNA, 80 bp, synthetic construct
  misc_feature 1..80: note = Artificially Synthesized Probe
  source 1..80: mol_type = other DNA
taatggcacattattttaagcctcaaagcccaatccaataatcacgaatagaattaaaattcacaagataaagtaaacaa

SEQ ID NO: 112998 - DNA, 80 bp, synthetic construct
  misc_feature 1..80: note = Artificially Synthesized Probe
  source 1..80: mol_type = other DNA
actgtaaaccagaatacctttggtattgttactattgtgatttatatttgtaatattgaatactaccccggtctactttc

SEQ ID NO: 112999 - DNA, 80 bp, synthetic construct; identical to SEQ ID NO: 37376
  misc_feature 1..80: note = Artificially Synthesized Probe
  source 1..80: mol_type = other DNA

SEQ ID NO: 113000 - DNA, 80 bp, synthetic construct
  misc_feature 1..80: note = Artificially Synthesized Probe
  source 1..80: mol_type = other DNA
cctctttggatttctttgttgtctcatgatatgaagcaaagaagtgatggcatttaatgttgactcaaacttgcaggaac

SEQ ID NO: 113001 - DNA, 80 bp, synthetic construct
  misc_feature 1..80: note = Artificially Synthesized Probe
  source 1..80: mol_type = other DNA
gcaaacaatggcaaaaatttgtgaattcggaatacaagaaatgttctatgcttagaatgaaattggagatacttaatgct

SEQ ID NO: 113002 - DNA, 80 bp, synthetic construct
  misc_feature 1..80: note = Artificially Synthesized Probe
  source 1..80: mol_type = other DNA
atcttgtcaggtggtgtgctctatattttaaaatacataatattgaacatcttgttgtttaatgcactattttttccaaa

SEQ ID NO: 113003 - DNA, 80 bp, synthetic construct; identical to SEQ ID NO: 37377
  misc_feature 1..80: note = Artificially Synthesized Probe
  source 1..80: mol_type = other DNA

SEQ ID NO: 113004 - DNA, 80 bp, synthetic construct; identical to SEQ ID NO: 37148
  misc_feature 1..80: note = Artificially Synthesized Probe
  source 1..80: mol_type = other DNA

SEQ ID NO: 113005 - DNA, 80 bp, synthetic construct
  misc_feature 1..80: note = Artificially Synthesized Probe
  source 1..80: mol_type = other DNA
gtagccaactgtgcacgcttccaggcactcccctgatgctcagaaatgccatttgtatcctggcacaaacattttttgtt

SEQ ID NO: 113006 - DNA, 80 bp, synthetic construct
  misc_feature 1..80: note = Artificially Synthesized Probe
  source 1..80: mol_type = other DNA
cttactaaagaagaatccgtcttcatgagctataaggctgaatggggccaaagctcctgatagtctggttaaccatgaat

SEQ ID NO: 113007 - DNA, 80 bp, synthetic construct
  misc_feature 1..80: note = Artificially Synthesized Probe
  source 1..80: mol_type = other DNA
cagaggacctgcttgatggggttcaaacatttgtcaaagtaagacactgttaaactgaagatttaattgatcacattaca

SEQ ID NO: 113008 - DNA, 80 bp, synthetic construct; identical to SEQ ID NO: 37378
  misc_feature 1..80: note = Artificially Synthesized Probe
  source 1..80: mol_type = other DNA

SEQ ID NO: 113009 - DNA, 80 bp, synthetic construct
  misc_feature 1..80: note = Artificially Synthesized Probe
  source 1..80: mol_type = other DNA
ctcaatcagagcccttaccctgacacagctaaacttaatcatttgtgttagtcagaacctttatagaacacctctacata

SEQ ID NO: 113010 - DNA, 80 bp, synthetic construct
  misc_feature 1..80: note = Artificially Synthesized Probe
  source 1..80: mol_type = other DNA
ttatttttagctggtataatatcttctggtatctcctattcattgagtccttgctcagggccccatccatctcttcacat

SEQ ID NO: 113011 - DNA, 80 bp, synthetic construct
  misc_feature 1..80: note = Artificially Synthesized Probe
  source 1..80: mol_type = other DNA
ttggagataatcatggagataaatcagaatttgggaagaagacagagtataataaggcatttcagagttgtttttggtag

SEQ ID NO: 113012 - DNA, 80 bp, synthetic construct
  misc_feature 1..80: note = Artificially Synthesized Probe
  source 1..80: mol_type = other DNA
gtaataaggaaaattcaacttctgccacactggggatcatacctctgagctttttgacatcagcaagaatattgcattca

SEQ ID NO: 113013 - DNA, 80 bp, synthetic construct
  misc_feature 1..80: note = Artificially Synthesized Probe
  source 1..80: mol_type = other DNA
accccgtctctactaaaaatacaaaaaattagccgggcgtagtggcgggcgcctgtagtcccagctactcgggaggctga

SEQ ID NO: 113014 - DNA, 80 bp, synthetic construct; identical to SEQ ID NO: 37379
  misc_feature 1..80: note = Artificially Synthesized Probe
  source 1..80: mol_type = other DNA

SEQ ID NO: 113015 - DNA, 80 bp, synthetic construct
  misc_feature 1..80: note = Artificially Synthesized Probe
  source 1..80: mol_type = other DNA
aggtcaggagttcgagaccagcctggccaacatggcaaaatcccgtctctactaaaagtacaaaaattagccaggcatag

SEQ ID NO: 113016 - DNA, 80 bp, synthetic construct
  misc_feature 1..80: note = Artificially Synthesized Probe
  source 1..80: mol_type = other DNA
ccttagagaatttcagtcacttatactagatgacagaaatttgaattcacatttctctgacatcaaattctgaccttgta

SEQ ID NO: 113017 - DNA, 80 bp, synthetic construct
  misc_feature 1..80: note = Artificially Synthesized Probe
  source 1..80: mol_type = other DNA
tattactcacttatggtatatttctcttataaaattttagaatcagctgtataggaccaaccatgggttaggatatttta

SEQ ID NO: 113018 - DNA, 80 bp, synthetic construct
  misc_feature 1..80: note = Artificially Synthesized Probe
  source 1..80: mol_type = other DNA
ttaaaatagatgctttggataagcgatagaatattgtagaagtagatgtaatttatgtgtcattagtgacttgatgaaat

SEQ ID NO: 113019 - DNA, 80 bp, synthetic construct; identical to SEQ ID NO: 37380
  misc_feature 1..80: note = Artificially Synthesized Probe
  source 1..80: mol_type = other DNA

SEQ ID NO: 113020 - DNA, 80 bp, synthetic construct
  misc_feature 1..80: note = Artificially Synthesized Probe
  source 1..80: mol_type = other DNA
accactgccaacataaataaatgcttcctttctagatccatcaagagtaatctgagtggaatttaagtttttgataggct

SEQ ID NO: 113021 - DNA, 80 bp, synthetic construct
  misc_feature 1..80: note = Artificially Synthesized Probe
  source 1..80: mol_type = other DNA
tatcttattgaaatctggacagttcccaaattgatttatccagtaatgaactgattatagtctgacagtaaccttcacta

SEQ ID NO: 113022 - DNA, 80 bp, synthetic construct
  misc_feature 1..80: note = Artificially Synthesized Probe
  source 1..80: mol_type = other DNA
ttcattcgaaactagcactcctgaaatagcattgttgattttcatgcacatcaatttctgtgagtttctagtgcttattt

SEQ ID NO: 113023 - DNA, 80 bp, synthetic construct; identical to SEQ ID NO: 37381
  misc_feature 1..80: note = Artificially Synthesized Probe
  source 1..80: mol_type = other DNA

SEQ ID NO: 113024 - DNA, 80 bp, synthetic construct
  misc_feature 1..80: note = Artificially Synthesized Probe
  source 1..80: mol_type = other DNA
cataaaaactggactactagaagctttcttatcttatataaacataaatgtgaagaacagattctaaaaagtgattggat

SEQ ID NO: 113025 - DNA, 80 bp, synthetic construct
  misc_feature 1..80: note = Artificially Synthesized Probe
  source 1..80: mol_type = other DNA
acgttaggttatctgctatggcttttgcttagactcacatgctttttgttgataaatctattgattatacgtatttaaag

SEQ ID NO: 113026 - DNA, 80 bp, synthetic construct; identical to SEQ ID NO: 37382
  misc_feature 1..80: note = Artificially Synthesized Probe
  source 1..80: mol_type = other DNA

SEQ ID NO: 113027 - DNA, 80 bp, synthetic construct
  misc_feature 1..80: note = Artificially Synthesized Probe
  source 1..80: mol_type = other DNA
aggtattaaagaataagtaaaatttccgttgtacgaagaatgcctggaatggtataaaattgagagggagggatatatag

SEQ ID NO: 113028 - DNA, 80 bp, synthetic construct
  misc_feature 1..80: note = Artificially Synthesized Probe
  source 1..80: mol_type = other DNA
tgcctttttgattgtgttttcttaaacaagactggtaacctttttttaatgtcttccatattgcaatctgtcttttgtct

SEQ ID NO: 113029 - DNA, 80 bp, synthetic construct
  misc_feature 1..80: note = Artificially Synthesized Probe
  source 1..80: mol_type = other DNA
gtattagagatttgtttgggatctcgaattgagagctagaaatccagacttggatttgaaagctagatattcgtgactac

SEQ ID NO: 113030 - DNA, 80 bp, synthetic construct
  misc_feature 1..80: note = Artificially Synthesized Probe
  source 1..80: mol_type = other DNA
atcatactattgatagtaaccaatacttatgtattgcttactaaaggcagagacctttaaatatatgaacttaatttaat

SEQ ID NO: 113031 - DNA, 80 bp, synthetic construct; identical to SEQ ID NO: 37383
  misc_feature 1..80: note = Artificially Synthesized Probe
  source 1..80: mol_type = other DNA

SEQ ID NO: 113032 - DNA, 80 bp, synthetic construct
  misc_feature 1..80: note = Artificially Synthesized Probe
  source 1..80: mol_type = other DNA
gatgtgggttaggcaccaatgacatctgcacaaacttttaaaaatctgaatttcacagcacttaataaatttacgatgat

SEQ ID NO: 113033 - DNA, 80 bp, synthetic construct
  misc_feature 1..80: note = Artificially Synthesized Probe
  source 1..80: mol_type = other DNA
agaatagagatgattaaagaagagcaataatatgaataatattttgctttagctatttcttgctcacttttctttaatat

SEQ ID NO: 113034 - DNA, 80 bp, synthetic construct
  misc_feature 1..80: note = Artificially Synthesized Probe
  source 1..80: mol_type = other DNA
ggaatctctctgcgatgggtggcagtctcactgtccttatataggtggactactagcctgtcactaaatcatatatattg

SEQ ID NO: 113035 - DNA, 80 bp, synthetic construct
  misc_feature 1..80: note = Artificially Synthesized Probe
  source 1..80: mol_type = other DNA
tttacccaacacaaccttctattctttcctatttctgaagaacaaggtatcataggggcactgggcaacaagttatctta

SEQ ID NO: 113036 - DNA, 80 bp, synthetic construct; identical to SEQ ID NO: 37384
  misc_feature 1..80: note = Artificially Synthesized Probe
  source 1..80: mol_type = other DNA

SEQ ID NO: 113037 - DNA, 80 bp, synthetic construct
  misc_feature 1..80: note = Artificially Synthesized Probe
  source 1..80: mol_type = other DNA
ggaagatacaacatctctttctgcttggggggcacccatcattaactgagaattctaacattctactttgtaatacctgg

SEQ ID NO: 113038 - DNA, 80 bp, synthetic construct
  misc_feature 1..80: note = Artificially Synthesized Probe
  source 1..80: mol_type = other DNA
caaaaaacatatcttcttacaaatattcttcaattaaagaatatagtaaaatccctaatattattctagatttaaaactt

SEQ ID NO: 113039 - DNA, 80 bp, synthetic construct
  misc_feature 1..80: note = Artificially Synthesized Probe
  source 1..80: mol_type = other DNA
gcattatagaaaaatagaatataaaagagtatgagtcagtgattcaggttaaatctaccacagagatgaattctaataaa

SEQ ID NO: 113040 - DNA, 80 bp, synthetic construct; identical to SEQ ID NO: 37385
  misc_feature 1..80: note = Artificially Synthesized Probe
  source 1..80: mol_type = other DNA

SEQ ID NO: 113041 - DNA, 80 bp, synthetic construct
  misc_feature 1..80: note = Artificially Synthesized Probe
  source 1..80: mol_type = other DNA
tatattaaaaagtgatctatttttaatgtagtatcctaaatgcctaacatttttaagcatttataatgacatttataata

SEQ ID NO: 113042 - DNA, 80 bp, synthetic construct
  misc_feature 1..80: note = Artificially Synthesized Probe
  source 1..80: mol_type = other DNA
ctttaatctacacttctttcagaattagctgtccactctgactcacaatgcatttaacacaatctctattgcaggttact

SEQ ID NO: 113043 - DNA, 80 bp, synthetic construct
  misc_feature 1..80: note = Artificially Synthesized Probe
  source 1..80: mol_type = other DNA
ttggaaaaacctccaagctggatataaatcataaaagcatgactaattgcatggtaactggagaaatgctttctctctct

SEQ ID NO: 113044 - DNA, 80 bp, synthetic construct
  misc_feature 1..80: note = Artificially Synthesized Probe
  source 1..80: mol_type = other DNA
tctaaaaccttgtaatgtataaaatgttttctgtctgacaaagaggtattatgtgctttaggagtcaatgataacttcat

SEQ ID NO: 113045 - DNA, 80 bp, synthetic construct; identical to SEQ ID NO: 37386
  misc_feature 1..80: note = Artificially Synthesized Probe
  source 1..80: mol_type = other DNA

SEQ ID NO: 113046 - DNA, 80 bp, synthetic construct
  misc_feature 1..80: note = Artificially Synthesized Probe
  source 1..80: mol_type = other DNA
attttcggtatgttactagcagttgtcacaacattgcaagacctccagtcgtttcatgtgtcacatttcatgtccatttt

SEQ ID NO: 113047 - DNA, 80 bp, synthetic construct
  misc_feature 1..80: note = Artificially Synthesized Probe
  source 1..80: mol_type = other DNA
ctgtattggcagcatgaccttgtctattctctgctctttcatccagatgtaggtgcaaatgtagaatgccatattcatta

SEQ ID NO: 113048 - DNA, 80 bp, synthetic construct; identical to SEQ ID NO: 37387
  misc_feature 1..80: note = Artificially Synthesized Probe
  source 1..80: mol_type = other DNA

SEQ ID NO: 113049 - DNA, 80 bp, synthetic construct; identical to SEQ ID NO: 37125
  misc_feature 1..80: note = Artificially Synthesized Probe
  source 1..80: mol_type = other DNA

SEQ ID NO: 113050 - DNA, 80 bp, synthetic construct
  misc_feature 1..80: note = Artificially Synthesized Probe
  source 1..80: mol_type = other DNA
atcttcaagctactttaagagttataagcatcttttctaacttagatgattattttgttattaagaaagacagatttcta

SEQ ID NO: 113051 - DNA, 80 bp, synthetic construct
  misc_feature 1..80: note = Artificially Synthesized Probe
  source 1..80: mol_type = other DNA
taccaatttggaaaataagcttctagaaccatctcaggtaaagtggttacagagaaaaggaatttgtgaacttaaggagg

SEQ ID NO: 113052 - DNA, 80 bp, synthetic construct
  misc_feature 1..80: note = Artificially Synthesized Probe
  source 1..80: mol_type = other DNA
atttcctgcagccttttggttatgcttcttaagaaatattggtctggacttaacaaaatcaatagtgccataaaattctt

SEQ ID NO: 113053 - DNA, 80 bp, synthetic construct
  misc_feature 1..80: note = Artificially Synthesized Probe
  source 1..80: mol_type = other DNA
ttttgaagaccatagtttgaagaactttttaaaaatttcattttgtctaatgctttgttaagaatttctaaagcaaatta

SEQ ID NO: 113054 - DNA, 80 bp, synthetic construct
  misc_feature 1..80: note = Artificially Synthesized Probe
  source 1..80: mol_type = other DNA
ggcaaatttcttaaactctctttgcctcaatatcttcatttgtaaaattataatatctactttattaaattatgaatata

SEQ ID NO: 113055 - DNA, 80 bp, synthetic construct; identical to SEQ ID NO: 37388
  misc_feature 1..80: note = Artificially Synthesized Probe
  source 1..80: mol_type = other DNA

SEQ ID NO: 113056 - DNA, 80 bp, synthetic construct
  misc_feature 1..80: note = Artificially Synthesized Probe
  source 1..80: mol_type = other DNA
ggataacactgcccagtgtaacattaccatctaaacaatcaacctagtgtttgagcattgcttaccaaagccagagctgc

SEQ ID NO: 113057 - DNA, 80 bp, synthetic construct
  misc_feature 1..80: note = Artificially Synthesized Probe
  source 1..80: mol_type = other DNA
taagcctttggtgccaacacatcagaattcagatcttacaccattcctgtcccttaatacatacccatatgtaaacaatt

SEQ ID NO: 113058 - DNA, 80 bp, synthetic construct
  misc_feature 1..80: note = Artificially Synthesized Probe
  source 1..80: mol_type = other DNA
tcacacatgtaaattttcagctcaacaaaataatgaacatattttcttatgccagactttttaatgatgcttgctttgcc

SEQ ID NO: 113059 - DNA, 80 bp, synthetic construct
  misc_feature 1..80: note = Artificially Synthesized Probe
  source 1..80: mol_type = other DNA
ctcaaactgaccaatgttgtaccaattaataggcatgaaatcacactgcctgaggagagaaaacaaaaaataaatcattg

SEQ ID NO: 113060 - DNA, 80 bp, synthetic construct; identical to SEQ ID NO: 37389
  misc_feature 1..80: note = Artificially Synthesized Probe
  source 1..80: mol_type = other DNA

SEQ ID NO: 113061 - DNA, 80 bp, synthetic construct
  misc_feature 1..80: note = Artificially Synthesized Probe
  source 1..80: mol_type = other DNA
gctgatctgccttggaatagagcaaaaaaccgcttcccaaacataaaaccatgtatgtgcatttgttggttttggtttag

SEQ ID NO: 113062 - DNA, 80 bp, synthetic construct; identical to SEQ ID NO: 37149
  misc_feature 1..80: note = Artificially Synthesized Probe
  source 1..80: mol_type = other DNA

SEQ ID NO: 113063 - DNA, 80 bp, synthetic construct
  misc_feature 1..80: note = Artificially Synthesized Probe
  source 1..80: mol_type = other DNA
ttttcagtttgttcacacaagttcacttatgcaggtgcaagaaactgtagacctaatagtttcttagctttgtaattaaa

SEQ ID NO: 113064 - DNA, 80 bp, synthetic construct; identical to SEQ ID NO: 37390
  misc_feature 1..80: note = Artificially Synthesized Probe
  source 1..80: mol_type = other DNA

SEQ ID NO: 113065 - DNA, 80 bp, synthetic construct
  misc_feature 1..80: note = Artificially Synthesized Probe
  source 1..80: mol_type = other DNA
tccctattttcaatattctgattcaatacattttacactatgaaattaaaaagtgacattgtgatgtcctgaaacgtttc

SEQ ID NO: 113066 - DNA, 80 bp, synthetic construct
  misc_feature 1..80: note = Artificially Synthesized Probe
  source 1..80: mol_type = other DNA
ggatgtgatcatagaatgtcgaattgtaaaggacatgcataggaagaaacagaccaaattctgatattctagaactaggg

SEQ ID NO: 113067 - DNA, 80 bp, synthetic construct
  misc_feature 1..80: note = Artificially Synthesized Probe
  source 1..80: mol_type = other DNA
accacctaaatcctttctgcaacaaaacaaatcataagtaaatgattttaagagcaagataacaagactcagtcagagga

SEQ ID NO: 113068 - DNA, 80 bp, synthetic construct; identical to SEQ ID NO: 37391
  misc_feature 1..80: note = Artificially Synthesized Probe
  source 1..80: mol_type = other DNA

SEQ ID NO: 113069 - DNA, 80 bp, synthetic construct
  misc_feature 1..80: note = Artificially Synthesized Probe
  source 1..80: mol_type = other DNA
aggctggttaaatttctaagaccaggacatttttcaacgcatccttttattctttcttttagagagttaacctaggttgg

SEQ ID NO: 113070 - DNA, 80 bp, synthetic construct
  misc_feature 1..80: note = Artificially Synthesized Probe
  source 1..80: mol_type = other DNA
taatctgattaagggacagtaactgtggaataattagtattttttcaattgtatagaattaatggcctggcgcggtggct

SEQ ID NO: 113071 - DNA, 80 bp, synthetic construct
  misc_feature 1..80: note = Artificially Synthesized Probe
  source 1..80: mol_type = other DNA
ccagctactcgagaggctgaggcaggagacttgcttgaacctgggaggcagaggttgcagtgagccgagatcgcaccatt

SEQ ID NO: 113072 - DNA, 80 bp, synthetic construct
  misc_feature 1..80: note = Artificially Synthesized Probe
  source 1..80: mol_type = other DNA
agtttttttgctgtgtgacttttcaatcatttattaagatttcagtgcattattatctgggttccctttaagactgtaag

SEQ ID NO: 113073 - DNA, 80 bp, synthetic construct; identical to SEQ ID NO: 37392
  misc_feature 1..80: note = Artificially Synthesized Probe
  source 1..80: mol_type = other DNA

SEQ ID NO: 113074 - DNA, 80 bp, synthetic construct
  misc_feature 1..80: note = Artificially Synthesized Probe
  source 1..80: mol_type = other DNA
gatatgtttgtcttggaaactatcagaaggagggtttgaaaagtttcaggtaaagaacactgctgctctcataccatctt

SEQ ID NO: 113075 - DNA, 80 bp, synthetic construct
  misc_feature 1..80: note = Artificially Synthesized Probe
  source 1..80: mol_type = other DNA
ctaactttctgggtgaataaggttaattcataggcatttaggctatgtctggagataacaaacccaaatctctagcctgg

SEQ ID NO: 113076 - DNA, 80 bp, synthetic construct
  misc_feature 1..80: note = Artificially Synthesized Probe
  source 1..80: mol_type = other DNA
gcaaataagatgtttaaactaagtagattatcctattgtgcttgcagagaacccataaagctgaagaaaatttattttcc

SEQ ID NO: 113077 - DNA, 80 bp, synthetic construct; identical to SEQ ID NO: 37393
  misc_feature 1..80: note = Artificially Synthesized Probe
  source 1..80: mol_type = other DNA

SEQ ID NO: 113078 - DNA, 80 bp, synthetic construct
  misc_feature 1..80: note = Artificially Synthesized Probe
  source 1..80: mol_type = other DNA
ttgggacataaatcatttgcagaaatgtgtttaatcattcccatttctaaacataaccacattgggcaagtaattgtgat

SEQ ID NO: 113079 - DNA, 80 bp, synthetic construct
  misc_feature 1..80: note = Artificially Synthesized Probe
  source 1..80: mol_type = other DNA
aaatctgtgttataatgacatcttgtagctgaggtaaccaaggagcagagaagcttagcaatttacccaagcccatatgt

SEQ ID NO: 113080 - DNA, 80 bp, synthetic construct
  misc_feature 1..80: note = Artificially Synthesized Probe
  source 1..80: mol_type = other DNA
ctcaggaaaaatagtttctgacatttttctctgaagaaaagtaatgagtacagggtatctagttttactagctcttaaaa

SEQ ID NO: 113081 - DNA, 80 bp, synthetic construct
  misc_feature 1..80: note = Artificially Synthesized Probe
  source 1..80: mol_type = other DNA
ttgttccaacgacaacagataaacaataaaagatatatttatacctcattcctcaaaaaaaaaaaaaaaagtcccaatgg

SEQ ID NO: 113082 - DNA, 80 bp, synthetic construct; identical to SEQ ID NO: 37394
  misc_feature 1..80: note = Artificially Synthesized Probe
  source 1..80: mol_type = other DNA

SEQ ID NO: 113083 - DNA, 80 bp, synthetic construct
  misc_feature 1..80: note = Artificially Synthesized Probe
  source 1..80: mol_type = other DNA
ttgtatttgtacaaagaacataaagtgtttaataataccttgtgataatgaaagtaagagaaaacagaatttttcaaaca

SEQ ID NO: 113084 - DNA, 80 bp, synthetic construct
  misc_feature 1..80: note = Artificially Synthesized Probe
  source 1..80: mol_type = other DNA
aacattttataattacaaagtgaatcatttaaataataataaaaggttaaataactacattattatatattcaaacagtg

SEQ ID NO: 113085 - DNA, 80 bp, synthetic construct
  misc_feature 1..80: note = Artificially Synthesized Probe
  source 1..80: mol_type = other DNA
ctggaaatatatacaaggacatattaatagtcattgtctctgggtggtagaaatatgggagaagaaataactttttaaaa

SEQ ID NO: 113086 - DNA, 80 bp, synthetic construct
  misc_feature 1..80: note = Artificially Synthesized Probe
  source 1..80: mol_type = other DNA
taaatatgtgtaaaactgatatctgattttcgatgagttggtttttttggtggacataaacaagtacatatgtagtacca

SEQ ID NO: 113087 - DNA, 80 bp, synthetic construct; identical to SEQ ID NO: 37395
  misc_feature 1..80: note = Artificially Synthesized Probe
  source 1..80: mol_type = other DNA

SEQ ID NO: 113088 - DNA, 80 bp, synthetic construct
  misc_feature 1..80: note = Artificially Synthesized Probe
  source 1..80: mol_type = other DNA
gatatggatatgcctaacagagatactaacttatcaaaaattatttcaccagtgcgcggcagatgttcaacttcaggcta

SEQ ID NO: 113089 - DNA, 80 bp, synthetic construct
  misc_feature 1..80: note = Artificially Synthesized Probe
  source 1..80: mol_type = other DNA
ccttcaagcgggtaataatgccatcaccatcataggtacattgaaaccttatatgcactcaagatctccacttggtttgc

SEQ ID NO: 113090 - DNA, 80 bp, synthetic construct
  misc_feature 1..80: note = Artificially Synthesized Probe
  source 1..80: mol_type = other DNA
ttttaaccaagttatgtctctttatattcttacccactgacttaaattctaatgcatagcaagcttaaccatcttcatta

SEQ ID NO: 113091 - DNA, 80 bp, synthetic construct; identical to SEQ ID NO: 37396
  misc_feature 1..80: note = Artificially Synthesized Probe
  source 1..80: mol_type = other DNA

SEQ ID NO: 113092 - DNA, 80 bp, synthetic construct
  misc_feature 1..80: note = Artificially Synthesized Probe
  source 1..80: mol_type = other DNA
atctgtatttaaagaattacatgaatttactattatggtaacattttattcatttatcaaatgattgattccctctaaaa

SEQ ID NO: 113093 - DNA, 80 bp, synthetic construct
  misc_feature 1..80: note = Artificially Synthesized Probe
  source 1..80: mol_type = other DNA
tcaagcaggacaaggacaactggttgtatcagtgacctattgatttgtatcattttttattcaccaataagtagatacaa

SEQ ID NO: 113094 - DNA, 80 bp, synthetic construct
  misc_feature 1..80: note = Artificially Synthesized Probe
  source 1..80: mol_type = other DNA
gtaggttgtcagcatacaactatgagcaaatgataacgtggtatgagcaataaactaggaagcctgaagatatatattct

SEQ ID NO: 113095 - DNA, 80 bp, synthetic construct
  misc_feature 1..80: note = Artificially Synthesized Probe
  source 1..80: mol_type = other DNA
tagagatttaattgggtggagacttttagcctaaatagcactttccaactgtgtctgttattcatcaggtaaatatgtac

SEQ ID NO: 113096 - DNA, 80 bp, synthetic construct; identical to SEQ ID NO: 37397
  misc_feature 1..80: note = Artificially Synthesized Probe
  source 1..80: mol_type = other DNA

SEQ ID NO: 113097 - DNA, 80 bp, synthetic construct
  misc_feature 1..80: note = Artificially Synthesized Probe
  source 1..80: mol_type = other DNA
ttccgggtttcaatttctttggaagctatggcaaagggaagagaactatagagggaggtaggaaagaaagcaaaataact

SEQ ID NO: 113098 - DNA, 80 bp, synthetic construct
  misc_feature 1..80: note = Artificially Synthesized Probe
  source 1..80: mol_type = other DNA
tcgagaatggtgctcccagagttaggacttggaaaggctggaagattttgatgaaggatagactgtgaaagaggtaggaa

SEQ ID NO: 113099 - DNA, 80 bp, synthetic construct
  misc_feature 1..80: note = Artificially Synthesized Probe
  source 1..80: mol_type = other DNA
ttcagatgcctgcaattactttaatttgatgacagcttttaacacaactagagattaaaggctatcatgcaaatggttgc

SEQ ID NO: 113100 - DNA, 80 bp, synthetic construct; identical to SEQ ID NO: 37398
  misc_feature 1..80: note = Artificially Synthesized Probe
  source 1..80: mol_type = other DNA

SEQ ID NO: 113101 - DNA, 80 bp, synthetic construct
  misc_feature 1..80: note = Artificially Synthesized Probe
  source 1..80: mol_type = other DNA
cacacatgcatgtttatatacatcatttacaaggatttgctagacagtttgggggatattaagatgaagaatctctgctt

SEQ ID NO: 113102 - DNA, 80 bp, synthetic construct
  misc_feature 1..80: note = Artificially Synthesized Probe
  source 1..80: mol_type = other DNA
atgtatgtatctagatatgtatatgcatgtatataaattctcccactattcactcctttagcaataggacccaatatata

SEQ ID NO: 113103 - DNA, 80 bp, synthetic construct; identical to SEQ ID NO: 37399
  misc_feature 1..80: note = Artificially Synthesized Probe
  source 1..80: mol_type = other DNA

SEQ ID NO: 113104 - DNA, 80 bp, synthetic construct
  misc_feature 1..80: note = Artificially Synthesized Probe
  source 1..80: mol_type = other DNA
aaatctgcaatttttggaaacctttacatttatagagcacttcaaaattttcaaagcaatttcacattccttattttaca

SEQ ID NO: 113105 - DNA, 80 bp, synthetic construct; identical to SEQ ID NO: 37150
  misc_feature 1..80: note = Artificially Synthesized Probe
  source 1..80: mol_type = other DNA

SEQ ID NO: 113106 - DNA, 80 bp, synthetic construct
  misc_feature 1..80: note = Artificially Synthesized Probe
  source 1..80: mol_type = other DNA
aaggactaaagtcaaaaccagtgttctagtctctaggcctatacattgttttcattattcaaacttactgccttcttcta

SEQ ID NO: 113107 - DNA, 80 bp, synthetic construct
  misc_feature 1..80: note = Artificially Synthesized Probe
  source 1..80: mol_type = other DNA
aagaaggattggtctgaccttctccatctcatatgctattctaaaactaattgtatctgcatatacaaattcactggata

SEQ ID NO: 113108 - DNA, 80 bp, synthetic construct
  misc_feature 1..80: note = Artificially Synthesized Probe
  source 1..80: mol_type = other DNA
aaatacatatgcttcagagttcaaatggacctgagttcaaattccttctctgcatttttgtagctgtatgacctgaaact

SEQ ID NO: 113109 - DNA, 80 bp, synthetic construct; identical to SEQ ID NO: 37400
  misc_feature 1..80: note = Artificially Synthesized Probe
  source 1..80: mol_type = other DNA

SEQ ID NO: 113110 - DNA, 80 bp, synthetic construct
  misc_feature 1..80: note = Artificially Synthesized Probe
  source 1..80: mol_type = other DNA
agtttcctctcagaaaaactcaaaagtttgcacacacatattcaaaggtagaagcagaaatagcaaacagaattgacata

SEQ ID NO: 113111 - DNA, 80 bp, synthetic construct
  misc_feature 1..80: note = Artificially Synthesized Probe
  source 1..80: mol_type = other DNA
gtgtcttagcttctttacatgagaatcaaggggggaaatgtgaccatataaagatatatttaaataacagataatacata

SEQ ID NO: 113112 - DNA, 80 bp, synthetic construct; identical to SEQ ID NO: 37401
  misc_feature 1..80: note = Artificially Synthesized Probe
  source 1..80: mol_type = other DNA

SEQ ID NO: 113113 - DNA, 80 bp, synthetic construct
  misc_feature 1..80: note = Artificially Synthesized Probe
  source 1..80: mol_type = other DNA
ttttggaagttaattaccatcccctaagtcactttctcttgtttcttaaagatttcactccgggatcactgcttctctct

SEQ ID NO: 113114 - DNA, 80 bp, synthetic construct
  misc_feature 1..80: note = Artificially Synthesized Probe
  source 1..80: mol_type = other DNA
ccaagaattgtagcctctccataatcttgattgcagatgtctcactatctgtccaaatccttctttccagatcactggac

SEQ ID NO: 113115 - DNA, 80 bp, synthetic construct
  misc_feature 1..80: note = Artificially Synthesized Probe
  source 1..80: mol_type = other DNA
atttatctcttatagtctcgaccttttgataaatccccaaactttgctaaataaaaccctccatggattcttctctgtgt

SEQ ID NO: 113116 - DNA, 80 bp, synthetic construct
  misc_feature 1..80: note = Artificially Synthesized Probe
  source 1..80: mol_type = other DNA
ctggctacttctttctgcttattggccttattattattttttttttctgaagaccaactttgtctgctgagcaatccatg

SEQ ID NO: 113117 - DNA, 80 bp, synthetic construct
  misc_feature 1..80: note = Artificially Synthesized Probe
  source 1..80: mol_type = other DNA
attctttctccttcttctttcttctctggcctctaacactatattcctcattttcacctacatctgatagccttgtttat

SEQ ID NO: 113118 - DNA, 80 bp, synthetic construct; identical to SEQ ID NO: 37402
  misc_feature 1..80: note = Artificially Synthesized Probe
  source 1..80: mol_type = other DNA

SEQ ID NO: 113119 - DNA, 80 bp, synthetic construct
  misc_feature 1..80: note = Artificially Synthesized Probe
  source 1..80: mol_type = other DNA
cttggatactaagcaagcacaacactgaatcagctattttcaaggtcatcaattaactactcagaaaattagccttaagt

SEQ ID NO: 113120 - DNA, 80 bp, synthetic construct
  misc_feature 1..80: note = Artificially Synthesized Probe
  source 1..80: mol_type = other DNA
tcagggttctctagagggacagaactaacaggatagatgtatatatgaaggggcgtttattaaggagtgttgactcacac

SEQ ID NO: 113121 - DNA, 80 bp, synthetic construct; identical to SEQ ID NO: 37403
  misc_feature 1..80: note = Artificially Synthesized Probe
  source 1..80: mol_type = other DNA

SEQ ID NO: 113122 - DNA, 80 bp, synthetic construct
  misc_feature 1..80: note = Artificially Synthesized Probe
  source 1..80: mol_type = other DNA
ttggacttcttactgaattctaaagtcatatatctaattgccttcgtggcattcctacctgaatatctaatagtgatttc

SEQ ID NO: 113123 - DNA, 80 bp, synthetic construct
  misc_feature 1..80: note = Artificially Synthesized Probe
  source 1..80: mol_type = other DNA
aatctgcaaaatgggagaaaatatttgcaaactattcatccaacaagggattaatatccaaaatataccaggaactcaac

SEQ ID NO: 113124 - DNA, 80 bp, synthetic construct
  misc_feature 1..80: note = Artificially Synthesized Probe
  source 1..80: mol_type = other DNA
tccccatttagaatggttattatcaaaaagacaaaaaaataacaaatgccagcaagaatgcagagaaagtggaattatta

SEQ ID NO: 113125 - DNA, 80 bp, synthetic construct
  misc_feature 1..80: note = Artificially Synthesized Probe
  source 1..80: mol_type = other DNA
tagatgagataaagaatcagcctaagtattcatcaacagatgaatgaataaagaaaatatgctgtatatacgcaatggaa

SEQ ID NO: 113126 - DNA, 80 bp, synthetic construct
  misc_feature 1..80: note = Artificially Synthesized Probe
  source 1..80: mol_type = other DNA
tccagatccagtgaaacaaaacaaatggagttggcctctattatcatgcttaccatttaagatttgaagaaataagcaac

SEQ ID NO: 113127 - DNA, 80 bp, synthetic construct; identical to SEQ ID NO: 37404
  misc_feature 1..80: note = Artificially Synthesized Probe
  source 1..80: mol_type = other DNA

SEQ ID NO: 113128 - DNA, 80 bp, synthetic construct
  misc_feature 1..80: note = Artificially Synthesized Probe
  source 1..80: mol_type = other DNA
tgagtattacacattgcatacatgtatgaaaattttcacactgtattccataaaaatgtgcaattattatgtgtcaaaat

SEQ ID NO: 113129 - DNA, 80 bp, synthetic construct
  misc_feature 1..80: note = Artificially Synthesized Probe
  source 1..80: mol_type = other DNA
catctccattgatatcacccatgccaccaatatttcttggctgaattgttacaataaccctctaactattctccctcctt

SEQ ID NO: 113130 - DNA, 80 bp, synthetic construct; identical to SEQ ID NO: 37405
  misc_feature 1..80: note = Artificially Synthesized Probe
  source 1..80: mol_type = other DNA

SEQ ID NO: 113131 - DNA, 80 bp, synthetic construct
  misc_feature 1..80: note = Artificially Synthesized Probe
  source 1..80: mol_type = other DNA
aagtgaaataagccaggaacagaaaaataaataccgcatattctcatgaagtatttattttttctgaataacctatttct

SEQ ID NO: 113132 - DNA, 80 bp, synthetic construct
  misc_feature 1..80: note = Artificially Synthesized Probe
  source 1..80: mol_type = other DNA
ttggtcagtgatgaacccccagctcctaaaatagtgcctggaatgtaatagtcactcacaaatattgattcagtggagaa

SEQ ID NO: 113133 - DNA, 80 bp, synthetic construct
  misc_feature 1..80: note = Artificially Synthesized Probe
  source 1..80: mol_type = other DNA
cctcacactttaactacatatttaggtctttcggttgagactggaaagacagaaaagctgcagtatactgtgtatttaag

SEQ ID NO: 113134 - DNA, 80 bp, synthetic construct
  misc_feature 1..80: note = Artificially Synthesized Probe
  source 1..80: mol_type = other DNA
ctattctctgactactgagacaatttcaatgtaaaaaagtaaatgttaccttttattccatattccttaaagcatcttcc

SEQ ID NO: 113135 - DNA, 80 bp, synthetic construct; identical to SEQ ID NO: 37406
  misc_feature 1..80: note = Artificially Synthesized Probe
  source 1..80: mol_type = other DNA

SEQ ID NO: 113136 - DNA, 80 bp, synthetic construct
  misc_feature 1..80: note = Artificially Synthesized Probe
  source 1..80: mol_type = other DNA
ctggttctgggctcaacctgccttaccaattttgagatcttggcaagttacttcacctttctaagcttcaatatcttcat

SEQ ID NO: 113137 - DNA, 80 bp, synthetic construct; identical to SEQ ID NO: 37151
  misc_feature 1..80: note = Artificially Synthesized Probe
  source 1..80: mol_type = other DNA

SEQ ID NO: 113138 - DNA, 80 bp, synthetic construct
  misc_feature 1..80: note = Artificially Synthesized Probe
  source 1..80: mol_type = other DNA
aaagttagacataaattttgagaaccatttgttgtgtagtatatcagattgtgaggataaatttagacgttggaaatttt

SEQ ID NO: 113139 - DNA, 80 bp, synthetic construct; identical to SEQ ID NO: 37407
  misc_feature 1..80: note = Artificially Synthesized Probe
  source 1..80: mol_type = other DNA

SEQ ID NO: 113140 - DNA, 80 bp, synthetic construct
  misc_feature 1..80: note = Artificially Synthesized Probe
  source 1..80: mol_type = other DNA
agtcgtaataactgtggtatacatatatatcaatataacaatgacgcttatgactgatgattttctctgaatgcagatca

SEQ ID NO: 113141 - DNA, 80 bp, synthetic construct
  misc_feature 1..80: note = Artificially Synthesized Probe
  source 1..80: mol_type = other DNA
aatatgattgatctaaatgtctaaaataaaattaatttctagaactatccctttcaaggatacctgtatattcaacaatg

SEQ ID NO: 113142 - DNA, 80 bp, synthetic construct
  misc_feature 1..80: note = Artificially Synthesized Probe
  source 1..80: mol_type = other DNA
tcactagctttattttatctaatgaagaaactgtaatatctgacttgagacagcaatttcccaagtcactcatctcctga

SEQ ID NO: 113143 - DNA, 80 bp, synthetic construct
  misc_feature 1..80: note = Artificially Synthesized Probe
  source 1..80: mol_type = other DNA
taacagatgctcaatacctgtgtatggaataatttgtgaatgtgttcatttaagttttgggtcaaaagtgtttcaatacc

SEQ ID NO: 113144 - DNA, 80 bp, synthetic construct; identical to SEQ ID NO: 37408
  misc_feature 1..80: note = Artificially Synthesized Probe
  source 1..80: mol_type = other DNA

SEQ ID NO: 113145 - DNA, 80 bp, synthetic construct
  misc_feature 1..80: note = Artificially Synthesized Probe
  source 1..80: mol_type = other DNA
tgacaccacacctatgattgttcactgcaggtgagaaagtgatcagaaatggcctttgaacccattggtctttttattat

SEQ ID NO: 113146 - DNA, 80 bp, synthetic construct
  misc_feature 1..80: note = Artificially Synthesized Probe
  source 1..80: mol_type = other DNA
gatagatctaaaccagtcttgactcgagtctttttcacagttgaagtttggagattagaggaaaatgtagtatgaattct

SEQ ID NO: 113147 - DNA, 80 bp, synthetic construct; identical to SEQ ID NO: 37409
  misc_feature 1..80: note = Artificially Synthesized Probe
  source 1..80: mol_type = other DNA

SEQ ID NO: 113148 - DNA, 80 bp, synthetic construct
  misc_feature 1..80: note = Artificially Synthesized Probe
  source 1..80: mol_type = other DNA
caaactctctaaaaattctctaacaatgtaaaataatggcatctgtgcagcatgtaaggtcattaaagtctatattatag

SEQ ID NO: 113149 - DNA, 80 bp, synthetic construct
  misc_feature 1..80: note = Artificially Synthesized Probe
  source 1..80: mol_type = other DNA
tacattttccataaatttctggatttttaaaattataagactaatacgtaaatgcttgctcattataaaatatatgaaca

SEQ ID NO: 113150 - DNA, 80 bp, synthetic construct
  misc_feature 1..80: note = Artificially Synthesized Probe
  source 1..80: mol_type = other DNA
catcactgatgattaaaacctttgatggacagtagctgtcttcaatttctctgtatcatgcaaatacactgccatgggca

SEQ ID NO: 113151 - DNA, 80 bp, synthetic construct
  misc_feature 1..80: note = Artificially Synthesized Probe
  source 1..80: mol_type = other DNA
ctcaccttgactttagacttctacatttagcttccaattcaacttgacagactgaatgactaaaaagttctagaaatttg

SEQ ID NO: 113152 - DNA, 80 bp, synthetic construct
  misc_feature 1..80: note = Artificially Synthesized Probe
  source 1..80: mol_type = other DNA
ctttcatccctgactaccccacactcctcactgtactctcacctccctggtctcccctgatttttgaacattcaaaaatg

SEQ ID NO: 113153 - DNA, 80 bp, synthetic construct; identical to SEQ ID NO: 37410
  misc_feature 1..80: note = Artificially Synthesized Probe
  source 1..80: mol_type = other DNA

SEQ ID NO: 113154 - DNA, 80 bp, synthetic construct
  misc_feature 1..80: note = Artificially Synthesized Probe
  source 1..80: mol_type = other DNA
tgtggcatgtatatatatatacatgttactatactcagttttatgttataggctcacaatttcttaggtcaaatcatagg

SEQ ID NO: 113155 - DNA, 80 bp, synthetic construct
  misc_feature 1..80: note = Artificially Synthesized Probe
  source 1..80: mol_type = other DNA
taataggaatttctgacaataggaatttccgaatcaatcttgtgaggtttatcagttaacagtttctatggagcatatac

SEQ ID NO: 113156 - DNA, 80 bp, synthetic construct
  misc_feature 1..80: note = Artificially Synthesized Probe
  source 1..80: mol_type = other DNA
tacatttgtaacatttagcatttctgctggtaactgaatatttggtcaatacagagtctctggtattaagaattttcaat

SEQ ID NO: 113157 - DNA, 80 bp, synthetic construct; identical to SEQ ID NO: 37411
  misc_feature 1..80: note = Artificially Synthesized Probe
  source 1..80: mol_type = other DNA

SEQ ID NO: 113158 - DNA, 80 bp, synthetic construct
  misc_feature 1..80: note = Artificially Synthesized Probe
  source 1..80: mol_type = other DNA
gctgaactgagaagtgaaagaatgtgcatggtgcagaatctggtaagatctctaaacctgcactgcattctaaagttcta

SEQ ID NO: 113159 - DNA, 80 bp, synthetic construct
  misc_feature 1..80: note = Artificially Synthesized Probe
  source 1..80: mol_type = other DNA
taatacaagtttctttacaaaacagatatcctattttgttttgcccagcattctgagagttcaaaagataaggaacattt

SEQ ID NO: 113160 - DNA, 80 bp, synthetic construct
  misc_feature 1..80: note = Artificially Synthesized Probe
  source 1..80: mol_type = other DNA
ctgcagcattgttactgatggctcatcttaacttgttatactgataggcatgtaggcagtaacataaaattgatttatct

SEQ ID NO: 113161 - DNA, 80 bp, synthetic construct
  misc_feature 1..80: note = Artificially Synthesized Probe
  source 1..80: mol_type = other DNA
ccagtactaataatgattattgtagcacgctatcaactattaactgtgaggtttttgtttgttgttttggcttataggca

SEQ ID NO: 113162 - DNA, 80 bp, synthetic construct; identical to SEQ ID NO: 37412
  misc_feature 1..80: note = Artificially Synthesized Probe
  source 1..80: mol_type = other DNA

SEQ ID NO: 113163 - DNA, 80 bp, synthetic construct
  misc_feature 1..80: note = Artificially Synthesized Probe
  source 1..80: mol_type = other DNA
ttacacaaatagagattctcttgcagtaaatacgcaggcctgctgtaactgtattttccaggttacattctagaaaacag

SEQ ID NO: 113164 - DNA, 80 bp, synthetic construct
  misc_feature 1..80: note = Artificially Synthesized Probe
  source 1..80: mol_type = other DNA
catctatgatcagacctgaccacaattaggaaaagtttaggggaaaggtgaatgtgttcaattttagggtcttcctagtt

SEQ ID NO: 113165 - DNA, 80 bp, synthetic construct
  misc_feature 1..80: note = Artificially Synthesized Probe
  source 1..80: mol_type = other DNA
aaacttcgatgactggagaactcttcaaccctttttgattcaaacctgtaataccatgtcatggaacattaatcctcctt

SEQ ID NO: 113166 - DNA, 80 bp, synthetic construct
  misc_feature 1..80: note = Artificially Synthesized Probe
  source 1..80: mol_type = other DNA
agcatgagataaatattgaataaggaatattttcaaaaccttgctaattgctaaggctacttattattaggtattctcaa

SEQ ID NO: 113167 - DNA, 80 bp, synthetic construct; identical to SEQ ID NO: 37413
  misc_feature 1..80: note = Artificially Synthesized Probe
  source 1..80: mol_type = other DNA

SEQ ID NO: 113168 - DNA, 80 bp, synthetic construct
  misc_feature 1..80: note = Artificially Synthesized Probe
  source 1..80: mol_type = other DNA
tacattccctcatatactgagttaacaaatgagttaaatgtcacccttcccccaggattcagaaatggaatattatacat

SEQ ID NO: 113169 - DNA, 80 bp, synthetic construct
  misc_feature 1..80: note = Artificially Synthesized Probe
  source 1..80: mol_type = other DNA
tttgcattctctctaatccaagtttggctaacaaattaggtagctggtctttatcaaggggtcttatgaaggttctaata

SEQ ID NO: 113170 - DNA, 80 bp, synthetic construct
  misc_feature 1..80: note = Artificially Synthesized Probe
  source 1..80: mol_type = other DNA
ggtaggatagaggatggaactgacggtttccttctagagtctagagtcaatcttcaaacagtaaaagctgaaaaaacttc

SEQ ID NO: 113171 - DNA, 80 bp, synthetic construct; identical to SEQ ID NO: 37414
  misc_feature 1..80: note = Artificially Synthesized Probe
  source 1..80: mol_type = other DNA

SEQ ID NO: 113172 - DNA, 80 bp, synthetic construct
  misc_feature 1..80: note = Artificially Synthesized Probe
  source 1..80: mol_type = other DNA
gcccaggctgaagtgcagtggcgcgatctcggctcactgtaagctccgcctcccggattcacgccattctcctgcctcag

SEQ ID NO: 113173 - DNA, 80 bp, synthetic construct
  misc_feature 1..80: note = Artificially Synthesized Probe
  source 1..80: mol_type = other DNA
ttctctccttgctgaaaatcaggtactcggaagccctctttgatcttagttcccagaagttaggctctttactgtttttt

SEQ ID NO: 113174 - DNA, 80 bp, synthetic construct
  misc_feature 1..80: note = Artificially Synthesized Probe
  source 1..80: mol_type = other DNA
aacttcagcaatatactgccactaaaaggcactgaggtgtatagcccttacccaggagaaagctttgatttctttcactc

SEQ ID NO: 113175 - DNA, 80 bp, synthetic construct
  misc_feature 1..80: note = Artificially Synthesized Probe
  source 1..80: mol_type = other DNA
gtggtggcgcgtgcctgtaatcccagctacactggaggctgagacaggagaatcgcttgaaaccgggaggcagaggttgc

SEQ ID NO: 113176 - DNA, 80 bp, synthetic construct; identical to SEQ ID NO: 37415
  misc_feature 1..80: note = Artificially Synthesized Probe
  source 1..80: mol_type = other DNA

SEQ ID NO: 113177 - DNA, 80 bp, synthetic construct
  misc_feature 1..80: note = Artificially Synthesized Probe
  source 1..80: mol_type = other DNA
aattaaacttttttcacaacagtatgctgctttcttggcaataacacataacggcagaaggaccttggaacctgtaggac

SEQ ID NO: 113178 - DNA, 80 bp, synthetic construct
  misc_feature 1..80: note = Artificially Synthesized Probe
  source 1..80: mol_type = other DNA
agattatattgtgtcaacatatttctgtcaataatgtaattcactgtgtcatgtatgtttgaaaacacactcttggaatt

SEQ ID NO: 113179 - DNA, 80 bp, synthetic construct
  misc_feature 1..80: note = Artificially Synthesized Probe
  source 1..80: mol_type = other DNA
ccttaaatggtaaaggttgactagctgtgagaattaaatgagactaagtcaacaaacacttattatacaactactatgtg

SEQ ID NO: 113180 - DNA, 80 bp, synthetic construct; identical to SEQ ID NO: 37416
  misc_feature 1..80: note = Artificially Synthesized Probe
  source 1..80: mol_type = other DNA

SEQ ID NO: 113181 - DNA, 80 bp, synthetic construct
  misc_feature 1..80: note = Artificially Synthesized Probe
  source 1..80: mol_type = other DNA
tagctttaactacttttgataaggtccaaactcagagatgctagtaggttattgaattatattgaaaacatttaaaggat

SEQ ID NO: 113182 - DNA, 80 bp, synthetic construct
  misc_feature 1..80: note = Artificially Synthesized Probe
  source 1..80: mol_type = other DNA
acttgatcttaagcaggccacatatccaggtgactaacagatttattggttaaacatattttaaatgcgctgatgatgta

SEQ ID NO: 113183 - DNA, 80 bp, synthetic construct
  misc_feature 1..80: note = Artificially Synthesized Probe
  source 1..80: mol_type = other DNA
gctaacatggtgaaaccccatctctacagaaatgcaaaaaaaaaaaaaaaaaaaaaaaaaaagccgggcatggtagcacg

SEQ ID NO: 113184 - DNA, 80 bp, synthetic construct
  misc_feature 1..80: note = Artificially Synthesized Probe
  source 1..80: mol_type = other DNA
gcaagaaagaatatattaatacttggtgtttagtgacaagtgttagaaaaaaacttgaagcttcaagagaccacaggaat

SEQ ID NO: 113185 - DNA, 80 bp, synthetic construct; identical to SEQ ID NO: 37417
  misc_feature 1..80: note = Artificially Synthesized Probe
  source 1..80: mol_type = other DNA

SEQ ID NO: 113186 - DNA, 80 bp, synthetic construct
  misc_feature 1..80: note = Artificially Synthesized Probe
  source 1..80: mol_type = other DNA
gctggattagtgcacagatcaggttttttttctttaacttttctctaatccaagttgggctaataataccctttctgtct

SEQ ID NO: 113187 - DNA, 80 bp, synthetic construct
  misc_feature 1..80: note = Artificially Synthesized Probe
  source 1..80: mol_type = other DNA
aatattcagaccaaaggatacaattggaagagatttttaaatcccaggggccaaagttaccccctcattcttccgaattg

SEQ ID NO: 113188 - DNA, 80 bp, synthetic construct
  misc_feature 1..80: note = Artificially Synthesized Probe
  source 1..80: mol_type = other DNA
aataaatattatgcattttaaatgcttaagaaaagacatcccatatgtttttgaagtcctccatattttggaataagcca

SEQ ID NO: 113189 - DNA, 80 bp, synthetic construct; identical to SEQ ID NO: 37418
  misc_feature 1..80: note = Artificially Synthesized Probe
  source 1..80: mol_type = other DNA

SEQ ID NO: 113190 - DNA, 80 bp, synthetic construct
  misc_feature 1..80: note = Artificially Synthesized Probe
  source 1..80: mol_type = other DNA
acagagtaccattctagcaaacctacatttgtaaactttaaaacacaagttttaccccctgtattgtatattcaaatata

SEQ ID NO: 113191 - DNA, 80 bp, synthetic construct
  misc_feature 1..80: note = Artificially Synthesized Probe
  source 1..80: mol_type = other DNA
cttccaaatggattatgttaaatggccgtcatttcatttcccaaggttgattttgagcagtatacttggtggaactgaaa

SEQ ID NO: 113192 - DNA, 80 bp, synthetic construct; identical to SEQ ID NO: 37419
  misc_feature 1..80: note = Artificially Synthesized Probe
  source 1..80: mol_type = other DNA

SEQ ID NO: 113193 - DNA, 80 bp, synthetic construct; identical to SEQ ID NO: 37152
  misc_feature 1..80: note = Artificially Synthesized Probe
  source 1..80: mol_type = other DNA

SEQ ID NO: 113194 - DNA, 80 bp, synthetic construct
  misc_feature 1..80: note = Artificially Synthesized Probe
  source 1..80: mol_type = other DNA
taggcagcactgtccaatagaaatacagtattaagggaaccacaaaagtgaagcatatgtgtacaatttaaaatttctag

SEQ ID NO: 113195 - DNA, 80 bp, synthetic construct
  misc_feature 1..80: note = Artificially Synthesized Probe
  source 1..80: mol_type = other DNA
tttatacttagaacacatctcagttgagactaaacacattttaaatatggggagggatagcattaggagatatacctaat

SEQ ID NO: 113196 - DNA, 80 bp, synthetic construct; identical to SEQ ID NO: 37153
  misc_feature 1..80: note = Artificially Synthesized Probe
  source 1..80: mol_type = other DNA

SEQ ID NO: 113197 - DNA, 80 bp, synthetic construct
  misc_feature 1..80: note = Artificially Synthesized Probe
  source 1..80: mol_type = other DNA
tgattgttattaatgatgcacaagtgctaacatccctatgccatttcatcgaggaatcttttagttttccctaagagtgg

SEQ ID NO: 113198 - DNA, 80 bp, synthetic construct
  misc_feature 1..80: note = Artificially Synthesized Probe
  source 1..80: mol_type = other DNA
gttcagtttatctgtaattttacaagttgtggtaggcagtatagtacaatggccctgcgattccttgctttgaattctga

SEQ ID NO: 113199 - DNA, 80 bp, synthetic construct
  misc_feature 1..80: note = Artificially Synthesized Probe
  source 1..80: mol_type = other DNA
gtcagatgttttgtgtactttggtcattgttatatactattcctgagaccaatgtgtgatgcatagcaggagtcaataaa

SEQ ID NO: 113200 - DNA, 80 bp, synthetic construct; identical to SEQ ID NO: 37154
  misc_feature 1..80: note = Artificially Synthesized Probe
  source 1..80: mol_type = other DNA

SEQ ID NO: 113201 - DNA, 80 bp, synthetic construct
  misc_feature 1..80: note = Artificially Synthesized Probe
  source 1..80: mol_type = other DNA
gtgccaccacacccggctaattttttgtgtttttagtagagatggggtttcactatgttggccaggctggtctcgaaatc

SEQ ID NO: 113202 - DNA, 80 bp, synthetic construct
  misc_feature 1..80: note = Artificially Synthesized Probe
  source 1..80: mol_type = other DNA
atagaaacactcaaataggaagaaaaaataaaataaggtaattaagcgtcctttctcctgtggggaaaaaaaaagacaaa

SEQ ID NO: 113203 - DNA, 80 bp, synthetic construct
  misc_feature 1..80: note = Artificially Synthesized Probe
  source 1..80: mol_type = other DNA
gatagcatttctcctcttaactggtttctctgtttccgtttgtgatttccttacaattcatataacattggttgaacatc

SEQ ID NO: 113204 - DNA, 80 bp, synthetic construct
  misc_feature 1..80: note = Artificially Synthesized Probe
  source 1..80: mol_type = other DNA
ctacatggttttaatgcttgacattcccattgtacgtgcatcttccctccagttttggttaacctttttctgtcactgag

SEQ ID NO: 113205 - DNA, 80 bp, synthetic construct; identical to SEQ ID NO: 37155
  misc_feature 1..80: note = Artificially Synthesized Probe
  source 1..80: mol_type = other DNA

SEQ ID NO: 113206 - DNA, 80 bp, synthetic construct
  misc_feature 1..80: note = Artificially Synthesized Probe
  source 1..80: mol_type = other DNA
atgatcttctatggggttaactgaggccataaaaccattttttgtcagttaaatatatatacgattactttttactctat

SEQ ID NO: 113207 - DNA, 80 bp, synthetic construct
  misc_feature 1..80: note = Artificially Synthesized Probe
  source 1..80: mol_type = other DNA
taatgaattaggtaacagtatcctggttgcttagcaaagcgcacttggataattgggatcatttctctaatcatttaaaa

SEQ ID NO: 113208 - DNA, 80 bp, synthetic construct
  misc_feature 1..80: note = Artificially Synthesized Probe
  source 1..80: mol_type = other DNA
cactacagtttcttttccttctacccttcggtaatgtcttaatgtgactatgcctgaacttagcacttcattaagattat

SEQ ID NO: 113209 - DNA, 80 bp, synthetic construct; identical to SEQ ID NO: 37156
  misc_feature 1..80: note = Artificially Synthesized Probe
  source 1..80: mol_type = other DNA

SEQ ID NO: 113210 - DNA, 80 bp, synthetic construct
  misc_feature 1..80: note = Artificially Synthesized Probe
  source 1..80: mol_type = other DNA
taatggattaaaaaaagctccaggttattggaaatatcagattactccactgaaaatttctaaaggcaatgctcactctc

SEQ ID NO: 113211 - DNA, 80 bp, synthetic construct
  misc_feature 1..80: note = Artificially Synthesized Probe
  source 1..80: mol_type = other DNA
tatttcaggtgtctattattgtagttctctctcgttgctttttactactcccctgactatactgactggctttcactgat

SEQ ID NO: 113212 - DNA, 80 bp, synthetic construct
  misc_feature 1..80: note = Artificially Synthesized Probe
  source 1..80: mol_type = other DNA
atatctcactggtttttgctgctaggtcttcttgcacagtgacagtgatcttgggttgggtaatggtaagatgatccaag

SEQ ID NO: 113213 - DNA, 80 bp, synthetic construct
  misc_feature 1..80: note = Artificially Synthesized Probe
  source 1..80: mol_type = other DNA
ctgctttttttctggaaggtaaacacttttgaagtcaagtgactgagagcaaaatttttagcaagcattgtgtctagtac

SEQ ID NO: 113214 - DNA, 80 bp, synthetic construct
  misc_feature 1..80: note = Artificially Synthesized Probe
  source 1..80: mol_type = other DNA
aggaagtctgctgcctaagtacctgtccaattgagagatgtcaatccttctagcaggcactctagatgtatggtagtgat

SEQ ID NO: 113215 - DNA, 80 bp, synthetic construct; identical to SEQ ID NO: 37157
  misc_feature 1..80: note = Artificially Synthesized Probe
  source 1..80: mol_type = other DNA

SEQ ID NO: 113216 - DNA, 80 bp, synthetic construct
  misc_feature 1..80: note = Artificially Synthesized Probe
  source 1..80: mol_type = other DNA
catggagtctattggtcttttattacataaacttctaagacaatccactatgcttatcactctgtgaacttcactgagtt

SEQ ID NO: 113217 - DNA, 80 bp, synthetic construct
  misc_feature 1..80: note = Artificially Synthesized Probe
  source 1..80: mol_type = other DNA
actgcatgccatccagacaggaaaagctgattaaagtgattgtttatggcaacaaagccaaagtaaaaaaattgactctg

SEQ ID NO: 113218 - DNA, 80 bp, synthetic construct
  misc_feature 1..80: note = Artificially Synthesized Probe
  source 1..80: mol_type = other DNA
ttttaagacataaaagctgataagtaatgatgatcttaagaatatgattaagagaactcaaaaaacatgtgaatttaaaa

SEQ ID NO: 113219 - DNA, 80 bp, synthetic construct; identical to SEQ ID NO: 37158
  misc_feature 1..80: note = Artificially Synthesized Probe
  source 1..80: mol_type = other DNA

SEQ ID NO: 113220 - DNA, 80 bp, synthetic construct
  misc_feature 1..80: note = Artificially Synthesized Probe
  source 1..80: mol_type = other DNA
caatataggaatgctaaaagctttgatgtaacaagaagacatttggaaatgcccttactcctagccctcgctccctctct

SEQ ID NO: 113221 - DNA, 80 bp, synthetic construct
  misc_feature 1..80: note = Artificially Synthesized Probe
  source 1..80: mol_type = other DNA
aaggaatgcctttatcacgaatgatttatgactgatgaaggaaagatatttgggaactagagagaatattgttgtgtcac

SEQ ID NO: 113222 - DNA, 80 bp, synthetic construct
  misc_feature 1..80: note = Artificially Synthesized Probe
  source 1..80: mol_type = other DNA
atataatttaccttttcattagaaccatctaggatttgtggcttaattttgaaagctgtgaatatttcttcaaatttaat

SEQ ID NO: 113223 - DNA, 80 bp, synthetic construct; identical to SEQ ID NO: 37159
  misc_feature 1..80: note = Artificially Synthesized Probe
  source 1..80: mol_type = other DNA

SEQ ID NO: 113224 - DNA, 80 bp, synthetic construct
  misc_feature 1..80: note = Artificially Synthesized Probe
  source 1..80: mol_type = other DNA
gcccaggctggagtgcaatgacgcgatctcggctcactgcaacttctgcctcccggattcaagcaattctcctgcctcag

SEQ ID NO: 113225 - DNA, 80 bp, synthetic construct
  misc_feature 1..80: note = Artificially Synthesized Probe
  source 1..80: mol_type = other DNA
tcttacagctatttaaaaaaccatgttaattggtggtagtttatttgctccttgattaataaacaaagctttaatatttt

SEQ ID NO: 113226 - DNA, 80 bp, synthetic construct
  misc_feature 1..80: note = Artificially Synthesized Probe
  source 1..80: mol_type = other DNA
atgaaccactgcgcgtggcctgttctgcagattttcgacataacatgtgaaatataaattgaataaaacattatttgaca

SEQ ID NO: 113227 - DNA, 80 bp, synthetic construct
  misc_feature 1..80: note = Artificially Synthesized Probe
  source 1..80: mol_type = other DNA
agtcttatgatatccacagcatagtaaagaatacaagtatggaaacacatgtagtataagtcagtgcaacaggcgaagca

SEQ ID NO: 113228 - DNA, 80 bp, synthetic construct; identical to SEQ ID NO: 37160
  misc_feature 1..80: note = Artificially Synthesized Probe
  source 1..80: mol_type = other DNA

SEQ ID NO: 113229 - DNA, 80 bp, synthetic construct
  misc_feature 1..80: note = Artificially Synthesized Probe
  source 1..80: mol_type = other DNA
actcttaagtgatcttgaaagctatggattggacaaccgacccgaaggtcccagacatatggtggtaattcagggtatgg

SEQ ID NO: 113230 - DNA, 80 bp, synthetic construct
  misc_feature 1..80: note = Artificially Synthesized Probe
  source 1..80: mol_type = other DNA
ggctgtgttcctttttggagattctaggagagaataagttccttgctcattcaagtagtttgcagaattcagttccttgt

SEQ ID NO: 113231 - DNA, 80 bp, synthetic construct
  misc_feature 1..80: note = Artificially Synthesized Probe
  source 1..80: mol_type = other DNA
catatatgactcttctgacttcctcttttacttttatgggctgttatgattagatcgggactaccaggataatccagttt

SEQ ID NO: 113232 - DNA, 80 bp, synthetic construct
  misc_feature 1..80: note = Artificially Synthesized Probe
  source 1..80: mol_type = other DNA
ttgtcattgagggaacatcaagggtctctgattctgtggtctatcttactttgtttgctaatattttcattatgcataga

SEQ ID NO: 113233 - DNA, 80 bp, synthetic construct
  misc_feature 1..80: note = Artificially Synthesized Probe
  source 1..80: mol_type = other DNA
gtgatatatatgtgataatgcaaaacaaggaataaatttagaattcatataccagctttactccaggatttgacactggt

SEQ ID NO: 113234 - DNA, 80 bp, synthetic construct; identical to SEQ ID NO: 37161
  misc_feature 1..80: note = Artificially Synthesized Probe
  source 1..80: mol_type = other DNA

SEQ ID NO: 113235 - DNA, 80 bp, synthetic construct
  misc_feature 1..80: note = Artificially Synthesized Probe
  source 1..80: mol_type = other DNA
tactacagagtattatgataggtaatgtatacaatcgaacacactaaaatgggacccattctagaggttttagtctgtgg

SEQ ID NO: 113236 - DNA, 80 bp, synthetic construct
  misc_feature 1..80: note = Artificially Synthesized Probe
  source 1..80: mol_type = other DNA
agtaggatctttccaattgagccaatcaaaatttttgttagaaaattgctgcaagtcccctatgtggcaaatcacaacta

SEQ ID NO: 113237 - DNA, 80 bp, synthetic construct; identical to SEQ ID NO: 37126
  misc_feature 1..80: note = Artificially Synthesized Probe
  source 1..80: mol_type = other DNA

SEQ ID NO: 113238 - DNA, 80 bp, synthetic construct; identical to SEQ ID NO: 37162
  misc_feature 1..80: note = Artificially Synthesized Probe
  source 1..80: mol_type = other DNA

SEQ ID NO: 113239 - DNA, 80 bp, synthetic construct
  misc_feature 1..80: note = Artificially Synthesized Probe
  source 1..80: mol_type = other DNA
ttgcaggtaagtaattgaagtccctgttaaaacagcacagtgacttaagagatgagtataagaagaggaaatgggaaaag

SEQ ID NO: 113240 - DNA, 80 bp, synthetic construct
  misc_feature 1..80: note = Artificially Synthesized Probe
  source 1..80: mol_type = other DNA
gcattgagtggatatgaggagggggctaagctgagaaatgaagaacaggtaacatgatggtttgactaagagatgaccag

SEQ ID NO: 113241 - DNA, 80 bp, synthetic construct
  misc_feature 1..80: note = Artificially Synthesized Probe
  source 1..80: mol_type = other DNA
agatgaggctggtgaggtatggagatattaagtattttgcttaaagtcttgtttatatggcagagtcaggatttgaaccc

SEQ ID NO: 113242 - DNA, 80 bp, synthetic construct; identical to SEQ ID NO: 37163
  misc_feature 1..80: note = Artificially Synthesized Probe
  source 1..80: mol_type = other DNA

SEQ ID NO: 113243 - DNA, 80 bp, synthetic construct
  misc_feature 1..80: note = Artificially Synthesized Probe
  source 1..80: mol_type = other DNA
gttagaggagcacacagttatcatagtgattgaaaacttgaagactttgcctctgggtctaaatcctggctctaccattt

SEQ ID NO: 113244 - DNA, 80 bp, synthetic construct
  misc_feature 1..80: note = Artificially Synthesized Probe
  source 1..80: mol_type = other DNA
tagcacagtgcatagtgtgtcataaacttagtaggagttagttctttttattttgtaagtctgctgcttgtacatctcat

SEQ ID NO: 113245 - DNA, 80 bp, synthetic construct
  misc_feature 1..80: note = Artificially Synthesized Probe
  source 1..80: mol_type = other DNA
ctgcccattgtagtcttttgctttcttgataccattttgataggtctgactcttttttaatgttctgagatatgtaagat

SEQ ID NO: 113246 - DNA, 80 bp, synthetic construct
  misc_feature 1..80: note = Artificially Synthesized Probe
  source 1..80: mol_type = other DNA
gtccaatatgtagtgtttggcagcatgtggctatttaatcttggaatatggccagtccaaattcagaggtactgtaaatt

SEQ ID NO: 113247 - DNA, 80 bp, synthetic construct; identical to SEQ ID NO: 37164
  misc_feature 1..80: note = Artificially Synthesized Probe
  source 1..80: mol_type = other DNA

SEQ ID NO: 113248 - DNA, 80 bp, synthetic construct
  misc_feature 1..80: note = Artificially Synthesized Probe
  source 1..80: mol_type = other DNA
aagaaacacgtaaataaacctagaattccttttgcttgccctaattaagttgaatatgaaatgttttttttcctcttaaa

SEQ ID NO: 113249 - DNA, 80 bp, synthetic construct
  misc_feature 1..80: note = Artificially Synthesized Probe
  source 1..80: mol_type = other DNA
ctttattatctatattcattcatgcattctttattcattgatttcttccttcattaattcaatacagtttctctttctat

SEQ ID NO: 113250 - DNA, 80 bp, synthetic construct
  misc_feature 1..80: note = Artificially Synthesized Probe
  source 1..80: mol_type = other DNA
cttctagctcttaaccagaaagctgcactctttcataatgatttaagcattgctgtagatcctctacctttttctgagtg

SEQ ID NO: 113251 - DNA, 80 bp, synthetic construct
  misc_feature 1..80: note = Artificially Synthesized Probe
  source 1..80: mol_type = other DNA
tcccattgaatttaggtaaaaaaccctaaaatctctagtatgacctacatgatcatcagtctgttcccctttcttttttg

SEQ ID NO: 113252 - DNA, 80 bp, synthetic construct; identical to SEQ ID NO: 37165
  misc_feature 1..80: note = Artificially Synthesized Probe
  source 1..80: mol_type = other DNA

SEQ ID NO: 113253 - DNA, 80 bp, synthetic construct
  misc_feature 1..80: note = Artificially Synthesized Probe
  source 1..80: mol_type = other DNA
tagtagttggttagacggatcagtcatggtagatttttgtgtattttaatgtagcagataggagattcaagctttttttc

SEQ ID NO: 113254 - DNA, 80 bp, synthetic construct
  misc_feature 1..80: note = Artificially Synthesized Probe
  source 1..80: mol_type = other DNA
ttagcggtggatgccaagagaatgcttggaactttgagaatgttggggtggacattaatcaattgatataagctttgggt

SEQ ID NO: 113255 - DNA, 80 bp, synthetic construct
  misc_feature 1..80: note = Artificially Synthesized Probe
  source 1..80: mol_type = other DNA
acattttattatatccattttcaaatcgtttctggtagtggggttttaaaatgataaatgaggttcaaaattaattccag

SEQ ID NO: 113256 - DNA, 80 bp, synthetic construct; identical to SEQ ID NO: 37166
  misc_feature 1..80: note = Artificially Synthesized Probe
  source 1..80: mol_type = other DNA

SEQ ID NO: 113257 - DNA, 80 bp, synthetic construct
  misc_feature 1..80: note = Artificially Synthesized Probe
  source 1..80: mol_type = other DNA
taaaataacaaatatttatcagaaatgctcacccttcaaaaaatctggaagattttgattatatatttttccaattatct

SEQ ID NO: 113258 - DNA, 80 bp, synthetic construct
  misc_feature 1..80: note = Artificially Synthesized Probe
  source 1..80: mol_type = other DNA
ttatattatttatgatagttatacctaaaacctaggtgttgttaaatatttacatgtttaacacccaagtatacttagag

SEQ ID NO: 113259 - DNA, 80 bp, synthetic construct; identical to SEQ ID NO: 37167
  misc_feature 1..80: note = Artificially Synthesized Probe
  source 1..80: mol_type = other DNA

SEQ ID NO: 113260 - DNA, 80 bp, synthetic construct
  misc_feature 1..80: note = Artificially Synthesized Probe
  source 1..80: mol_type = other DNA
tagtctactttcctcttatgagtccagacatatatctaattttcttctgattatccctctggcacttcttgcagacactg

SEQ ID NO: 113261 - DNA, 80 bp, synthetic construct
  misc_feature 1..80: note = Artificially Synthesized Probe
  source 1..80: mol_type = other DNA
ttgggtttttgaaagcataagttgaagacaaaaacgttgatgtcaaactgatgagtgttaagtttcagcattggtggact

SEQ ID NO: 113262 - DNA, 80 bp, synthetic construct
  misc_feature 1..80: note = Artificially Synthesized Probe
  source 1..80: mol_type = other DNA
tgagtaatatgggctcattaattgtgtacttgccagaaggatctgtctttaaatcattaatgcaggcaacatttctctct

SEQ ID NO: 113263 - DNA, 80 bp, synthetic construct
  misc_feature 1..80: note = Artificially Synthesized Probe
  source 1..80: mol_type = other DNA
gaatagttgttccttgtgacagtgaactaggatagatagaaatgctgacttaggctgtgataacgcagtacgttttgtaa

SEQ ID NO: 113264 - DNA, 80 bp, synthetic construct; identical to SEQ ID NO: 37168
  misc_feature 1..80: note = Artificially Synthesized Probe
  source 1..80: mol_type = other DNA

SEQ ID NO: 113265 - DNA, 80 bp, synthetic construct
  misc_feature 1..80: note = Artificially Synthesized Probe
  source 1..80: mol_type = other DNA
taaattcatgaaaacagtgtagaataaggcaaaatggaaacaagaaagtgatctgcttagaacctgcattctgctgtttc

SEQ ID NO: 113266 - DNA, 80 bp, synthetic construct
  misc_feature 1..80: note = Artificially Synthesized Probe
  source 1..80: mol_type = other DNA
acatttgctcaggaaggattattccatttgtaagattatttcttgttttcttagtttttctgtgtaagccttgcgtaagt

SEQ ID NO: 113267 - DNA, 80 bp, synthetic construct
  misc_feature 1..80: note = Artificially Synthesized Probe
  source 1..80: mol_type = other DNA
gctctttggaaatttcaaattttacatttataaatactgttattatgtatttttgtgaaaatgcaataattatttgacct

SEQ ID NO: 113268 - DNA, 80 bp, synthetic construct
  misc_feature 1..80: note = Artificially Synthesized Probe
  source 1..80: mol_type = other DNA
ggatgcaaacagtatatacacaagtcagatcaaagccagacagtctggaagttcttcttactaatcttaatcctggaaca

SEQ ID NO: 113269 - DNA, 80 bp, synthetic construct
  misc_feature 1..80: note = Artificially Synthesized Probe
  source 1..80: mol_type = other DNA
attttcttcttttcactccacacatcagtcttgtgaagctcaattttactaaaagcaatacagaaagatctggagatttt

SEQ ID NO: 113270 - DNA, 80 bp, synthetic construct; identical to SEQ ID NO: 37169
  misc_feature 1..80: note = Artificially Synthesized Probe
  source 1..80: mol_type = other DNA

SEQ ID NO: 113271 - DNA, 80 bp, synthetic construct
  misc_feature 1..80: note = Artificially Synthesized Probe
  source 1..80: mol_type = other DNA
ttaaagaaggaaaacttaaatgcaaacaagaggccagggtagtttgaatgcaggtatgtaaaccacaggatgttacacag

SEQ ID NO: 113272 - DNA, 80 bp, synthetic construct
  misc_feature 1..80: note = Artificially Synthesized Probe
  source 1..80: mol_type = other DNA
caagttttttttttttttggtgctttagactggaaagaaagtcttcgttgaaggattaatagctgcaggactggattttg

SEQ ID NO: 113273 - DNA, 80 bp, synthetic construct
  misc_feature 1..80: note = Artificially Synthesized Probe
  source 1..80: mol_type = other DNA
tagtaaaaataattttgccaggttttgagatattgtggtctaagaacatggccttgttctgtatataaaatttagactcc

SEQ ID NO: 113274 - DNA, 80 bp, synthetic construct; identical to SEQ ID NO: 37170
  misc_feature 1..80: note = Artificially Synthesized Probe
  source 1..80: mol_type = other DNA

SEQ ID NO: 113275 - DNA, 80 bp, synthetic construct
  misc_feature 1..80: note = Artificially Synthesized Probe
  source 1..80: mol_type = other DNA
tagatacttaggttgattccatgaccttgctattgtgaataatgctgtaataaacatgagtgatggtgtctttgtgatac

SEQ ID NO: 113276 - DNA, 80 bp, synthetic construct
  misc_feature 1..80: note = Artificially Synthesized Probe
  source 1..80: mol_type = other DNA
ccatctgtttttttgactttttaatagtagccattctgattggtataagatgatgtctcattgtggttttaatttacatt

SEQ ID NO: 113277 - DNA, 80 bp, synthetic construct
  misc_feature 1..80: note = Artificially Synthesized Probe
  source 1..80: mol_type = other DNA
gttggaagcataatttgcaaatattttctccagctctgtaggttttctgtttactctgttaattatttcctttgctgtgc

SEQ ID NO: 113278 - DNA, 80 bp, synthetic construct; identical to SEQ ID NO: 37171
  misc_feature 1..80: note = Artificially Synthesized Probe
  source 1..80: mol_type = other DNA

SEQ ID NO: 113279 - DNA, 80 bp, synthetic construct
  misc_feature 1..80: note = Artificially Synthesized Probe
  source 1..80: mol_type = other DNA
tgctattttagttactatagctttgtagtataattcgaagtcaggtaatgtgatgcctccagatttgttctttttgctta

SEQ ID NO: 113280 - DNA, 80 bp, synthetic construct
  misc_feature 1..80: note = Artificially Synthesized Probe
  source 1..80: mol_type = other DNA
atggaatgtttttccatttgtttgtgtcatctctaatttatttcatgagtgtcttgtagttctccttgtaaagattttca

SEQ ID NO: 113281 - DNA, 80 bp, synthetic construct; identical to SEQ ID NO: 37127
  misc_feature 1..80: note = Artificially Synthesized Probe
  source 1..80: mol_type = other DNA

SEQ ID NO: 113282 - DNA, 80 bp, synthetic construct
  misc_feature 1..80: note = Artificially Synthesized Probe
  source 1..80: mol_type = other DNA
gtttatcaagtctaggattattatttttgagttgtcgttagagttttctagatatacaattgtgtcatcagtgaacaaag

SEQ ID NO: 113283 - DNA, 80 bp, synthetic construct
  misc_feature 1..80: note = Artificially Synthesized Probe
  source 1..80: mol_type = other DNA
tcccaatgctatccctccccactccccccaccccacaacagtccccagagtgtgatgttccccttcctgtgtccatgtgt

SEQ ID NO: 113284 - DNA, 80 bp, synthetic construct; identical to SEQ ID NO: 37172
  misc_feature 1..80: note = Artificially Synthesized Probe
  source 1..80: mol_type = other DNA

SEQ ID NO: 113285 - DNA, 80 bp, synthetic construct
  misc_feature 1..80: note = Artificially Synthesized Probe
  source 1..80: mol_type = other DNA
tcccaccaacagtgtaaaagtgttcctatttctccatatcctctccagcacttgttctttcctgactttttaatgattgc

SEQ ID NO: 113286 - DNA, 80 bp, synthetic construct
  misc_feature 1..80: note = Artificially Synthesized Probe
  source 1..80: mol_type = other DNA
tttgtttttttcttgtaaatttgtttgagttcattgtaggttctggatattagccctttgtcagatgagtaggttgtgaa

SEQ ID NO: 113287 - DNA, 80 bp, synthetic construct; identical to SEQ ID NO: 37173
  misc_feature 1..80: note = Artificially Synthesized Probe
  source 1..80: mol_type = other DNA

SEQ ID NO: 113288 - DNA, 80 bp, synthetic construct
  misc_feature 1..80: note = Artificially Synthesized Probe
  source 1..80: mol_type = other DNA
tcggagggctctgttctgttccattgatctatatctctgttttggtaccagtaccatgctgttttggttactgtagcctt

SEQ ID NO: 113289 - DNA, 80 bp, synthetic construct
  misc_feature 1..80: note = Artificially Synthesized Probe
  source 1..80: mol_type = other DNA
tagaatctataaattaccttgggcagtatggtcattttcacgatattcattcttcctacccatgagcatggaatgttctt

SEQ ID NO: 113290 - DNA, 80 bp, synthetic construct
  misc_feature 1..80: note = Artificially Synthesized Probe
  source 1..80: mol_type = other DNA
gttattggtgtataagaatgcctgtgatttttgtacattgattttgtatcctgagactttgctgaagttgcctatcagct

SEQ ID NO: 113291 - DNA, 80 bp, synthetic construct; identical to SEQ ID NO: 37174
  misc_feature 1..80: note = Artificially Synthesized Probe
  source 1..80: mol_type = other DNA

SEQ ID NO: 113292 - DNA, 80 bp, synthetic construct
  misc_feature 1..80: note = Artificially Synthesized Probe
  source 1..80: mol_type = other DNA
atcttagacatctcagactccctctcccagcatgccagtctcttcttagcaagtagaccagttaatgtgtgtgtgtgtat

SEQ ID NO: 113293 - DNA, 80 bp, synthetic construct
  misc_feature 1..80: note = Artificially Synthesized Probe
  source 1..80: mol_type = other DNA
tatgtgctagattacatttattgatttgtgtatattgaaccagccttgcatcccagggatgaagcccacttgatcattgt

SEQ ID NO: 113294 - DNA, 80 bp, synthetic construct
  misc_feature 1..80: note = Artificially Synthesized Probe
  source 1..80: mol_type = other DNA
agggaggattccctctttttctattgattggaatagtttcagaaggaatagtaccagttcctccttgtacctctggtaga

SEQ ID NO: 113295 - DNA, 80 bp, synthetic construct
  misc_feature 1..80: note = Artificially Synthesized Probe
  source 1..80: mol_type = other DNA
tagattttctagtttatttgcatagaggtgtttgtagtattctctgatggtagtttgtatttctgtgggatcagtggtaa

SEQ ID NO: 113296 - DNA, 80 bp, synthetic construct; identical to SEQ ID NO: 37175
  misc_feature 1..80: note = Artificially Synthesized Probe
  source 1..80: mol_type = other DNA

SEQ ID NO: 113297 - DNA, 80 bp, synthetic construct
  misc_feature 1..80: note = Artificially Synthesized Probe
  source 1..80: mol_type = other DNA
cattttgttaggtacccagtagtcattcgggagccgttgttcagtttccatgtagttgagcggttttcagtgagtttctt

SEQ ID NO: 113298 - DNA, 80 bp, synthetic construct
  misc_feature 1..80: note = Artificially Synthesized Probe
  source 1..80: mol_type = other DNA
ggtggagaattccgtagatgtctattaggtccgcttggtgcaaagctgagttcaattcctgggtatccttgttaactttc

SEQ ID NO: 113299 - DNA, 80 bp, synthetic construct
  misc_feature 1..80: note = Artificially Synthesized Probe
  source 1..80: mol_type = other DNA
ctttaccattatgtaatggccttctttgtctcttttgatctttgttggtttaaagtctgttttatcagagactaggattg

SEQ ID NO: 113300 - DNA, 80 bp, synthetic construct
  misc_feature 1..80: note = Artificially Synthesized Probe
  source 1..80: mol_type = other DNA
tggagcatttagtccatttacatttaaagtcaatattgttatgtgtgaatttgatcctgtcattatgatgttagctggtt

SEQ ID NO: 113301 - DNA, 80 bp, synthetic construct
  misc_feature 1..80: note = Artificially Synthesized Probe
  source 1..80: mol_type = other DNA
tttgtttgtctataatggtttttatttctccttcacttatgaagcttagtttggctggatatgaaattctgggttgcaaa

SEQ ID NO: 113302 - DNA, 80 bp, synthetic construct
  misc_feature 1..80: note = Artificially Synthesized Probe
  source 1..80: mol_type = other DNA
tgaatatgacaattatgtgtcttggagtcgctcttctcgaggagtatctttgtagcgttctctgtatttcctgaatgtga

SEQ ID NO: 113303 - DNA, 80 bp, synthetic construct
  misc_feature 1..80: note = Artificially Synthesized Probe
  source 1..80: mol_type = other DNA
gtttcctactgttagcatgatatattaggaaattggggcacagggagattcacttgcccatatggacatgcatcagatgc

SEQ ID NO: 113304 - DNA, 80 bp, synthetic construct
  misc_feature 1..80: note = Artificially Synthesized Probe
  source 1..80: mol_type = other DNA
ttctttttattcttttttctctaaacttcccttctcacttcatttcattcatttcatcttccatcactgataccctttct

SEQ ID NO: 113305 - DNA, 80 bp, synthetic construct; identical to SEQ ID NO: 37177
  misc_feature 1..80: note = Artificially Synthesized Probe
  source 1..80: mol_type = other DNA

SEQ ID NO: 113306 - DNA, 80 bp, synthetic construct
  misc_feature 1..80: note = Artificially Synthesized Probe
  source 1..80: mol_type = other DNA
tggtgtggatgtcctttctgtttgttagttttcctcctaacagacaggaccctccgctgcaggtctgttggagtttgcta

SEQ ID NO: 113307 - DNA, 80 bp, synthetic construct
  misc_feature 1..80: note = Artificially Synthesized Probe
  source 1..80: mol_type = other DNA
ggtgcctcccagttaggctgctcggcggtcaggggtcagggacccacttgaggaggcagtctgcccgttctcagatctcc

SEQ ID NO: 113308 - DNA, 80 bp, synthetic construct
  misc_feature 1..80: note = Artificially Synthesized Probe
  source 1..80: mol_type = other DNA
cagttggagcttccaggttgctttgtttacctaagcaagcctgggcaatggcgggtgcccctcacccagcctcgctgcca

SEQ ID NO: 113309 - DNA, 80 bp, synthetic construct
  misc_feature 1..80: note = Artificially Synthesized Probe
  source 1..80: mol_type = other DNA
gccatctgtcacccctttctttgactaggaaagggaactccctgaccccttgcacttcccgagtgaggcaatgcctcgcc

SEQ ID NO: 113310 - DNA, 80 bp, synthetic construct; identical to SEQ ID NO: 37178
  misc_feature 1..80: note = Artificially Synthesized Probe
  source 1..80: mol_type = other DNA

SEQ ID NO: 113311 - DNA, 80 bp, synthetic construct
  misc_feature 1..80: note = Artificially Synthesized Probe
  source 1..80: mol_type = other DNA
gggagaaaaatattgaaaaaaaaactttaagtttaataaaaaagtagaatatttttacttaaaaaacttataaaggcgaa

SEQ ID NO: 113312 - DNA, 80 bp, synthetic construct
  misc_feature 1..80: note = Artificially Synthesized Probe
  source 1..80: mol_type = other DNA
ccaatatggcgaaatcccatctctactcaaaatacaagaaattagctgggcatggtggcgagtgcctgtaatcccagcta

SEQ ID NO: 113313 - DNA, 80 bp, synthetic construct
  misc_feature 1..80: note = Artificially Synthesized Probe
  source 1..80: mol_type = other DNA
cattgtactttataaagtgtctttatagagtatcgtttatactttatgaaattgataactttggttaattatttaaaaaa

SEQ ID NO: 113314 - DNA, 80 bp, synthetic construct; identical to SEQ ID NO: 37128
  misc_feature 1..80: note = Artificially Synthesized Probe
  source 1..80: mol_type = other DNA

SEQ ID NO: 113315 - DNA, 80 bp, synthetic construct; identical to SEQ ID NO: 37179
  misc_feature 1..80: note = Artificially Synthesized Probe
  source 1..80: mol_type = other DNA

SEQ ID NO: 113316 - DNA, 80 bp, synthetic construct
  misc_feature 1..80: note = Artificially Synthesized Probe
  source 1..80: mol_type = other DNA
gcctcagcctcccaaatagctgggactagaggcgcccgccaccatgcccggctaattttttcgtattttattttttttta

SEQ ID NO: 113317 - DNA, 80 bp, synthetic construct
  misc_feature 1..80: note = Artificially Synthesized Probe
  source 1..80: mol_type = other DNA
gaatactacagaaagatgagcttataaaaagcagtgctaaattaggccacaggaaaatgcttccagttaagggataagta

SEQ ID NO: 113318 - DNA, 80 bp, synthetic construct
  misc_feature 1..80: note = Artificially Synthesized Probe
  source 1..80: mol_type = other DNA
tagaggataagaaatattggaagagatttttgccaggaagttttttcttactggaagtgtgcctatttgcagaattaaag

SEQ ID NO: 113319 - DNA, 80 bp, synthetic construct
  misc_feature 1..80: note = Artificially Synthesized Probe
  source 1..80: mol_type = other DNA
atctgagtattatataatataggtattttctgtcaatatgtacacattcagattaattaacatgtcaatatatgctattg

SEQ ID NO: 113320 - DNA, 80 bp, synthetic construct; identical to SEQ ID NO: 37180
  misc_feature 1..80: note = Artificially Synthesized Probe
  source 1..80: mol_type = other DNA

SEQ ID NO: 113321 - DNA, 80 bp, synthetic construct
  misc_feature 1..80: note = Artificially Synthesized Probe
  source 1..80: mol_type = other DNA
cagttaagtaaattgctcaaagctactatctgggaattggtagaactacagttaagccaaggttatgattccagtcatgg

SEQ ID NO: 113322 - DNA, 80 bp, synthetic construct
  misc_feature 1..80: note = Artificially Synthesized Probe
  source 1..80: mol_type = other DNA
aaacagttttttgagtatttgtttgcctgattagattgtgaactctaaattaaggtaccatatacatggtctcttgcatt

SEQ ID NO: 113323 - DNA, 80 bp, synthetic construct
  misc_feature 1..80: note = Artificially Synthesized Probe
  source 1..80: mol_type = other DNA
aactggattcttgctctaccatttattcctgtgtgaccttgggcaaaggtatttgacctctctcagccagttttctcatc

SEQ ID NO: 113324 - DNA, 80 bp, synthetic construct
  misc_feature 1..80: note = Artificially Synthesized Probe
  source 1..80: mol_type = other DNA
acttatcaatgcccattccaggccttgaatttatatctgtctgaccaactctcatgccctaatcacttgaaatactatca

SEQ ID NO: 113325 - DNA, 80 bp, synthetic construct; identical to SEQ ID NO: 37181
  misc_feature 1..80: note = Artificially Synthesized Probe
  source 1..80: mol_type = other DNA

SEQ ID NO: 113326 - DNA, 80 bp, synthetic construct
  misc_feature 1..80: note = Artificially Synthesized Probe
  source 1..80: mol_type = other DNA
attctcagtagcatggccacttaattagttttagagttctttcggatagctaatttattccttaaaatatatattattct

SEQ ID NO: 113327 - DNA, 80 bp, synthetic construct
  misc_feature 1..80: note = Artificially Synthesized Probe
  source 1..80: mol_type = other DNA
ggcttgtctatttcccccattaatatgtatctatatgactatacattaatgaaaataagcttgtgctacatatgcaagtt

SEQ ID NO: 113328 - DNA, 80 bp, synthetic construct
  misc_feature 1..80: note = Artificially Synthesized Probe
  source 1..80: mol_type = other DNA
tttaagatacctccattcttccaggggcatagaggaaaaatcttgatgtcacctgtggctcttttctctcacagtacaca

SEQ ID NO: 113329 - DNA, 80 bp, synthetic construct; identical to SEQ ID NO: 37182
  misc_feature 1..80: note = Artificially Synthesized Probe
  source 1..80: mol_type = other DNA

SEQ ID NO: 113330 - DNA, 80 bp, synthetic construct
  misc_feature 1..80: note = Artificially Synthesized Probe
  source 1..80: mol_type = other DNA
aaaaatgacttgtcatgtttgttttatattctgaaggatcttggtgttttactctatcagttttacacactttaccatga

SEQ ID NO: 113331 - DNA, 80 bp, synthetic construct
  misc_feature 1..80: note = Artificially Synthesized Probe
  source 1..80: mol_type = other DNA
ataattacaaccaattgcagggtatccacttgatattaggcactagacatttataaacattccagaaatctgctttttgg

SEQ ID NO: 113332 - DNA, 80 bp, synthetic construct
  misc_feature 1..80: note = Artificially Synthesized Probe
  source 1..80: mol_type = other DNA
aatgcatgtattagcccagttatcctaaagtaaagttgacttgccccaactccagttttttattttaggcaaagttcagt

SEQ ID NO: 113333 - DNA, 80 bp, synthetic construct; identical to SEQ ID NO: 37183
  misc_feature 1..80: note = Artificially Synthesized Probe
  source 1..80: mol_type = other DNA

SEQ ID NO: 113334 - DNA, 80 bp, synthetic construct
  misc_feature 1..80: note = Artificially Synthesized Probe
  source 1..80: mol_type = other DNA
ttaaaatgtccagaggaaacaggtctctttaattcttacccatgcagcttggttggtgctgtgcttgattttggggatgg

SEQ ID NO: 113335 - DNA, 80 bp, synthetic construct
  misc_feature 1..80: note = Artificially Synthesized Probe
  source 1..80: mol_type = other DNA
gggaaattgccagaatgcaatgtaagtatcacagaacactttctatgtcttgaaaaatcttagataaatttaattttcat

SEQ ID NO: 113336 - DNA, 80 bp, synthetic construct
  misc_feature 1..80: note = Artificially Synthesized Probe
  source 1..80: mol_type = other DNA
caagagtgagggattaaaatcatttagggaattctgaaaagacttcatcaaaggagtagcatttgtgatacaccatggag

SEQ ID NO: 113337 - DNA, 80 bp, synthetic construct
  misc_feature 1..80: note = Artificially Synthesized Probe
  source 1..80: mol_type = other DNA
agaggtagactgtcattgttgtgcatatctttggtaaagaatttgtcgttactctggtcattgatgataaacctcataat

SEQ ID NO: 113338 - DNA, 80 bp, synthetic construct; identical to SEQ ID NO: 37184
  misc_feature 1..80: note = Artificially Synthesized Probe
  source 1..80: mol_type = other DNA

SEQ ID NO: 113339 - DNA, 80 bp, synthetic construct
  misc_feature 1..80: note = Artificially Synthesized Probe
  source 1..80: mol_type = other DNA
gaaattctattcgtaaaggttaaggtataaggaatacaataaatatgtcctcttctaaaactgcagacataaatgggtac

SEQ ID NO: 113340 - DNA, 80 bp, synthetic construct
  misc_feature 1..80: note = Artificially Synthesized Probe
  source 1..80: mol_type = other DNA
tttctctattgatcttattttatttactaggagaatagtgaatcttttttatggagtacagccagcccttctccaaccct

SEQ ID NO: 113341 - DNA, 80 bp, synthetic construct
  misc_feature 1..80: note = Artificially Synthesized Probe
  source 1..80: mol_type = other DNA
aacatatctttttgaagtttcagctgctacaactgaagcaggttatattgatagtacgattgtcagaacaccagaatcag

SEQ ID NO: 113342 - DNA, 80 bp, synthetic construct
  misc_feature 1..80: note = Artificially Synthesized Probe
  source 1..80: mol_type = other DNA
tcttttatattatagcacaaaataagtatttgaaaggagaaagatttgcaaaaaacaattcttgagccactgaccgtgat

SEQ ID NO: 113343 - DNA, 80 bp, synthetic construct; identical to SEQ ID NO: 37185
  misc_feature 1..80: note = Artificially Synthesized Probe
  source 1..80: mol_type = other DNA

SEQ ID NO: 113344 - DNA, 80 bp, synthetic construct
  misc_feature 1..80: note = Artificially Synthesized Probe
  source 1..80: mol_type = other DNA
aactattgacaactatgcaaagtagtcatgattatttccattgcacaggcaagaacatttagtttctaagattagtagtt

SEQ ID NO: 113345 - DNA, 80 bp, synthetic construct
  misc_feature 1..80: note = Artificially Synthesized Probe
  source 1..80: mol_type = other DNA
tatgtatttcatatatttataaaatttaagggatattgatatagtcccacattacataaggtatttattatatatataat

SEQ ID NO: 113346 - DNA, 80 bp, synthetic construct
  misc_feature 1..80: note = Artificially Synthesized Probe
  source 1..80: mol_type = other DNA
tgaagtttttttgttcatttaaataaccatctttgaattataccattttcttcttacatactccttactttttatacaat

SEQ ID NO: 113347 - DNA, 80 bp, synthetic construct; identical to SEQ ID NO: 37186
  misc_feature 1..80: note = Artificially Synthesized Probe
  source 1..80: mol_type = other DNA

SEQ ID NO: 113348 - DNA, 80 bp, synthetic construct; identical to SEQ ID NO: 37123
  misc_feature 1..80: note = Artificially Synthesized Probe
  source 1..80: mol_type = other DNA

SEQ ID NO: 113349 - DNA, 80 bp, synthetic construct
  misc_feature 1..80: note = Artificially Synthesized Probe
  source 1..80: mol_type = other DNA
tagcacagcagtctgagatcaaactgcaaggtggcagcgaggctgggtgaggggcacccgccattgcccaggcttgctta

SEQ ID NO: 113350 - DNA, 80 bp, synthetic construct
  misc_feature 1..80: note = Artificially Synthesized Probe
  source 1..80: mol_type = other DNA
aagagagcagtggttctcccagcacacagctggagatctgagaacgggcagactgcctcctcaagtgggtccctgacccc

SEQ ID NO: 113351 - DNA, 80 bp, synthetic construct
  misc_feature 1..80: note = Artificially Synthesized Probe
  source 1..80: mol_type = other DNA
acccaggctaacagggtctggagtagacctctagcaaactccaacagacctgcagcggagggtcctgtctgttaggagga

SEQ ID NO: 113352 - DNA, 80 bp, synthetic construct
  misc_feature 1..80: note = Artificially Synthesized Probe
  source 1..80: mol_type = other DNA
gttcctcaccagcaacagaacaaagctggacagagaatgactttcacgagttgagagaagaaggcttcggacgatcaaac

SEQ ID NO: 113353 - DNA, 80 bp, synthetic construct; identical to SEQ ID NO: 37187
  misc_feature 1..80: note = Artificially Synthesized Probe
  source 1..80: mol_type = other DNA

SEQ ID NO: 113354 - DNA, 80 bp, synthetic construct
  misc_feature 1..80: note = Artificially Synthesized Probe
  source 1..80: mol_type = other DNA
tacttgtgaaaattgggttggtgacattcaccaaggacatcctttagaaggaaggtatcaacaacctctcctgacgcatg

SEQ ID NO: 113355 - DNA, 80 bp, synthetic construct
  misc_feature 1..80: note = Artificially Synthesized Probe
  source 1..80: mol_type = other DNA
acttccccaatctagcaaggcaggccaacattcagattcaggaaatacagagaatgccacaaagatactccttgagaaga

SEQ ID NO: 113356 - DNA, 80 bp, synthetic construct
  misc_feature 1..80: note = Artificially Synthesized Probe
  source 1..80: mol_type = other DNA
ggccaatattcaacattcttaaagaaaagaattttcaatccagaatttcatatccagccaaactaagcttcataagtgaa

SEQ ID NO: 113357 - DNA, 80 bp, synthetic construct; identical to SEQ ID NO: 37176
  misc_feature 1..80: note = Artificially Synthesized Probe
  source 1..80: mol_type = other DNA

SEQ ID NO: 113358 - DNA, 80 bp, synthetic construct
  misc_feature 1..80: note = Artificially Synthesized Probe
  source 1..80: mol_type = other DNA
gcaaatggaaaacaaacaaaggcaggggttgcaatcctagtctctgataaaacagactttaaaccaacaaagatcaaaag

SEQ ID NO: 113359 - DNA, 80 bp, synthetic construct
  misc_feature 1..80: note = Artificially Synthesized Probe
  source 1..80: mol_type = other DNA
gactttaacaccccactgtcaacattagacagaaagttaacaaggatacccaggaattgaactcagctttgcaccaagcg

SEQ ID NO: 113360 - DNA, 80 bp, synthetic construct
  misc_feature 1..80: note = Artificially Synthesized Probe
  source 1..80: mol_type = other DNA
ccacagtgcaatcaaactagaactcaggattaagaaactcactgaaaaccgctcaactacatggaaactgaacaacggct

SEQ ID NO: 113361 - DNA, 80 bp, synthetic construct
  misc_feature 1..80: note = Artificially Synthesized Probe
  source 1..80: mol_type = other DNA
gaaagatccaaaactgacaccctaacatcacaattaaaagaactagaaaagcaagagcaaacacattcataagctagcag

SEQ ID NO: 113362 - DNA, 80 bp, synthetic construct; identical to SEQ ID NO: 37189
  misc_feature 1..80: note = Artificially Synthesized Probe
  source 1..80: mol_type = other DNA

SEQ ID NO: 113363 - DNA, 80 bp, synthetic construct
  misc_feature 1..80: note = Artificially Synthesized Probe
  source 1..80: mol_type = other DNA
agtccaggaccagatggattcacagccgaattctaccagaggtacaaggaggaactggtaccattccttctgaaactatt

SEQ ID NO: 113364 - DNA, 80 bp, synthetic construct
  misc_feature 1..80: note = Artificially Synthesized Probe
  source 1..80: mol_type = other DNA
ggaatccagcagcacaccaaaaagcttatccaccatgatcaagtgggcttcatccctgggatgcaaggctggttcaatat

SEQ ID NO: 113365 - DNA, 80 bp, synthetic construct; identical to SEQ ID NO: 37129
  misc_feature 1..80: note = Artificially Synthesized Probe
  source 1..80: mol_type = other DNA

SEQ ID NO: 113366 - DNA, 80 bp, synthetic construct
  misc_feature 1..80: note = Artificially Synthesized Probe
  source 1..80: mol_type = other DNA
ataagagctatctatgacaaacccacagccaatatcatactgaatgggcaaaaactggaagcattccctttgaaaactgg

SEQ ID NO: 113367 - DNA, 80 bp, synthetic construct; identical to SEQ ID NO: 37190
  misc_feature 1..80: note = Artificially Synthesized Probe
  source 1..80: mol_type = other DNA

SEQ ID NO: 113368 - DNA, 80 bp, synthetic construct
  misc_feature 1..80: note = Artificially Synthesized Probe
  source 1..80: mol_type = other DNA
aatgaaataaaagaggatacaaacaaatgaaagaacattccatgctcatgggtaggaagaatcaatatcatgaaaatggc

SEQ ID NO: 113369 - DNA, 80 bp, synthetic construct
  misc_feature 1..80: note = Artificially Synthesized Probe
  source 1..80: mol_type = other DNA
atcacactacctgactttaaactatactacaaggctacagtaaccaaaacagaatggtactggtaccaaaacagagatat

SEQ ID NO: 113370 - DNA, 80 bp, synthetic construct; identical to SEQ ID NO: 37191
  misc_feature 1..80: note = Artificially Synthesized Probe
  source 1..80: mol_type = other DNA

SEQ ID NO: 113371 - DNA, 80 bp, synthetic construct
  misc_feature 1..80: note = Artificially Synthesized Probe
  source 1..80: mol_type = other DNA
aacaggcaaccttcagaatgggagaaaattttcacaacctactcatctgacaaagggctaatatccagaatctacaatga

SEQ ID NO: 113372 - DNA, 80 bp, synthetic construct
  misc_feature 1..80: note = Artificially Synthesized Probe
  source 1..80: mol_type = other DNA
tgagataccatctcacaccagttagaatggcaatcattaaaaagtcaggaaacaacaggtgctggagaagatgtggagaa

SEQ ID NO: 113373 - DNA, 80 bp, synthetic construct
  misc_feature 1..80: note = Artificially Synthesized Probe
  source 1..80: mol_type = other DNA
aagacacatgcacacatatgtttattgcggcattattcacaatagcaaagacttgcaaccaacccaaatgtccaacaatg

SEQ ID NO: 113374 - DNA, 80 bp, synthetic construct
  misc_feature 1..80: note = Artificially Synthesized Probe
  source 1..80: mol_type = other DNA
cactcataggtgggaattgaacaatgagaacacatggacacaggaaggggaacatcacactctggggactgttgtggggt

SEQ ID NO: 113375 - DNA, 80 bp, synthetic construct; identical to SEQ ID NO: 37192
  misc_feature 1..80: note = Artificially Synthesized Probe
  source 1..80: mol_type = other DNA

SEQ ID NO: 113376 - DNA, 80 bp, synthetic construct
  misc_feature 1..80: note = Artificially Synthesized Probe
  source 1..80: mol_type = other DNA
ctcctccttctcctcctcctcctcttcctcctcttccaccgcctcctccttctcctcctcctcctcctcttcttcctcct

SEQ ID NO: 113377 - DNA, 80 bp, synthetic construct
  misc_feature 1..80: note = Artificially Synthesized Probe
  source 1..80: mol_type = other DNA
tgctcataattttgagggtcattttcttgaaacttctacctgtgttaataagagagaaaatgtttatcaagccagatatc

SEQ ID NO: 113378 - DNA, 80 bp, synthetic construct
  misc_feature 1..80: note = Artificially Synthesized Probe
  source 1..80: mol_type = other DNA
gtgcaatagtaaacagtattaaataaaatcagtaattgttaaaaataagtttatctgatgatccagcatgtgttattcac

SEQ ID NO: 113379 - DNA, 80 bp, synthetic construct; identical to SEQ ID NO: 37193
  misc_feature 1..80: note = Artificially Synthesized Probe
  source 1..80: mol_type = other DNA

SEQ ID NO: 113380 - DNA, 80 bp, synthetic construct
  misc_feature 1..80: note = Artificially Synthesized Probe
  source 1..80: mol_type = other DNA
caaactctgtttaaaagtatcagactctttttaaaagactctaagattgaagcaaacaataggaaagtcataaggaaggg

SEQ ID NO: 113381 - DNA, 80 bp, synthetic construct
  misc_feature 1..80: note = Artificially Synthesized Probe
  source 1..80: mol_type = other DNA
tccttggcttacattcatgaagaacaatggactttgactatattaaattagatttctattcactgctaggagcctagttt

SEQ ID NO: 113382 - DNA, 80 bp, synthetic construct
  misc_feature 1..80: note = Artificially Synthesized Probe
  source 1..80: mol_type = other DNA
acctgggcatccacttgccagagatactttgagaggatcaagtattatatcattaggatcaagtattatatcattagaag

SEQ ID NO: 113383 - DNA, 80 bp, synthetic construct
  misc_feature 1..80: note = Artificially Synthesized Probe
  source 1..80: mol_type = other DNA
atcaaaaaagatacagagttccaactcattttattttgcaatttctgtggtatgaatcactcatcaccatcatgagtaac

SEQ ID NO: 113384 - DNA, 80 bp, synthetic construct; identical to SEQ ID NO: 37194
  misc_feature 1..80: note = Artificially Synthesized Probe
  source 1..80: mol_type = other DNA

SEQ ID NO: 113385 - DNA, 80 bp, synthetic construct
  misc_feature 1..80: note = Artificially Synthesized Probe
  source 1..80: mol_type = other DNA
atcattggaacaatgggtgtagaaattcttttgagtttagctgcaaagcaaagcagtgaatagagagtaagggtagggat

SEQ ID NO: 113386 - DNA, 80 bp, synthetic construct
  misc_feature 1..80: note = Artificially Synthesized Probe
  source 1..80: mol_type = other DNA
tctgtgtgggcagaaggtgagatcttttgctcaaatgtagccattggtttgagataagaatacagataatttgtccatac

SEQ ID NO: 113387 - DNA, 80 bp, synthetic construct; identical to SEQ ID NO: 37195
  misc_feature 1..80: note = Artificially Synthesized Probe
  source 1..80: mol_type = other DNA

SEQ ID NO: 113388 - DNA, 80 bp, synthetic construct
  misc_feature 1..80: note = Artificially Synthesized Probe
  source 1..80: mol_type = other DNA
ttcttctgcctcagccttccaagtagctgggattacaggcatgagccactggcctggctccagctgctttatcatgaagg

SEQ ID NO: 113389 - DNA, 80 bp, synthetic construct
  misc_feature 1..80: note = Artificially Synthesized Probe
  source 1..80: mol_type = other DNA
gcagtgattataattgaaactgacactgaagatgggtagagtggaaatcaagtggtgaggggccaaataaaataaaacaa

SEQ ID NO: 113390 - DNA, 80 bp, synthetic construct
  misc_feature 1..80: note = Artificially Synthesized Probe
  source 1..80: mol_type = other DNA
tgaaattgagattcttaatgatacggagtaattggtgatagtaatgtccaagttatgatcttgagggagtggctgaaatt

SEQ ID NO: 113391 - DNA, 80 bp, synthetic construct
  misc_feature 1..80: note = Artificially Synthesized Probe
  source 1..80: mol_type = other DNA
tgagggctagtggatttcactggtgatacagtatttaaagctgtgggcttttataaggagggagagagaatagtaaataa

SEQ ID NO: 113392 - DNA, 80 bp, synthetic construct; identical to SEQ ID NO: 37196
  misc_feature 1..80: note = Artificially Synthesized Probe
  source 1..80: mol_type = other DNA

SEQ ID NO: 113393 - DNA, 80 bp, synthetic construct
  misc_feature 1..80: note = Artificially Synthesized Probe
  source 1..80: mol_type = other DNA
tctcggctcactgcaagctccgcctcccgggttcacgccattctcctgcctcagcctcccaagtagctgggactacaggc

SEQ ID NO: 113394 - DNA, 80 bp, synthetic construct
  misc_feature 1..80: note = Artificially Synthesized Probe
  source 1..80: mol_type = other DNA
gtcactttttgaactgataaaatttgatgcttcccttttcaatatgtcaaaaataacctggtaattcaaaaaggctttat

SEQ ID NO: 113395 - DNA, 80 bp, synthetic construct
  misc_feature 1..80: note = Artificially Synthesized Probe
  source 1..80: mol_type = other DNA
tgtctttggctctgtacttaaatgtgaacatgattgcacgcttgataaaaaataatccatagctatcttccactttttgc

SEQ ID NO: 113396 - DNA, 80 bp, synthetic construct
  misc_feature 1..80: note = Artificially Synthesized Probe
  source 1..80: mol_type = other DNA
aaatatttcagtattcactccaccagatggtaagaacatagggaatgagtgagatatttttggtatgcttatgaacttca

SEQ ID NO: 113397 - DNA, 80 bp, synthetic construct; identical to SEQ ID NO: 37197
  misc_feature 1..80: note = Artificially Synthesized Probe
  source 1..80: mol_type = other DNA

SEQ ID NO: 113398 - DNA, 80 bp, synthetic construct
  misc_feature 1..80: note = Artificially Synthesized Probe
  source 1..80: mol_type = other DNA
attcctatactcccaattctttcaacaaaatatgtttataatcaaaacgggattctaagcaagtgaagattctgagtgga

SEQ ID NO: 113399 - DNA, 80 bp, synthetic construct
  misc_feature 1..80: note = Artificially Synthesized Probe
  source 1..80: mol_type = other DNA
atgtttccatactatttcacaacatatctttcaggcccacactgaacttgctaaatgtcttaatttctatttagggattg

SEQ ID NO: 113400 - DNA, 80 bp, synthetic construct; identical to SEQ ID NO: 37130
  misc_feature 1..80: note = Artificially Synthesized Probe
  source 1..80: mol_type = other DNA

SEQ ID NO: 113401 - DNA, 80 bp, synthetic construct; identical to SEQ ID NO: 37198
  misc_feature 1..80: note = Artificially Synthesized Probe
  source 1..80: mol_type = other DNA

SEQ ID NO: 113402 - DNA, 80 bp, synthetic construct
  misc_feature 1..80: note = Artificially Synthesized Probe
  source 1..80: mol_type = other DNA
attttacctttgtgtttctatcagaagaatcctagcattgtgtagcttcttccttaaatcttaagttttcctccatctcc

SEQ ID NO: 113403 - DNA, 80 bp, synthetic construct
  misc_feature 1..80: note = Artificially Synthesized Probe
  source 1..80: mol_type = other DNA
actattgtcttctttcaagaccagctgattttggtgcttccaaatagaatccacaactcaataaacatatttttattgtc

SEQ ID NO: 113404 - DNA, 80 bp, synthetic construct
  misc_feature 1..80: note = Artificially Synthesized Probe
  source 1..80: mol_type = other DNA
agtatatttcacaaggcctatttttcacaccaaatcattttaagtagatgactccatttgccctctataaaaagcaattt

SEQ ID NO: 113405 - DNA, 80 bp, synthetic construct; identical to SEQ ID NO: 37199
  misc_feature 1..80: note = Artificially Synthesized Probe
  source 1..80: mol_type = other DNA

SEQ ID NO: 113406 - DNA, 80 bp, synthetic construct
  misc_feature 1..80: note = Artificially Synthesized Probe
  source 1..80: mol_type = other DNA
taattaaagttacttaatttaatttcttctccatattttaaaccagtctatcatctatttaaaaaataattaggactagt

SEQ ID NO: 113407 - DNA, 80 bp, synthetic construct
  misc_feature 1..80: note = Artificially Synthesized Probe
  source 1..80: mol_type = other DNA
gttgatttcattacccctggggatgttacggtccatagtctactttgaaagaaaatcagcatcctattattttagcagtt

SEQ ID NO: 113408 - DNA, 80 bp, synthetic construct
  misc_feature 1..80: note = Artificially Synthesized Probe
  source 1..80: mol_type = other DNA
gaatataacataggcaacagcattcttctaaattgtgtgaggggtaaaaaaaataagcagactgtgatgcttcaatattg

SEQ ID NO: 113409 - DNA, 80 bp, synthetic construct; identical to SEQ ID NO: 37200
  misc_feature 1..80: note = Artificially Synthesized Probe
  source 1..80: mol_type = other DNA

SEQ ID NO: 113410 - DNA, 80 bp, synthetic construct
  misc_feature 1..80: note = Artificially Synthesized Probe
  source 1..80: mol_type = other DNA
atgctattgtgtttctaatgcattagtaaaatttataaatatattaactcgagaataattcttaggtagtccatgtatat

SEQ ID NO: 113411 - DNA, 80 bp, synthetic construct
  misc_feature 1..80: note = Artificially Synthesized Probe
  source 1..80: mol_type = other DNA
tatttaattttaatttatttatttcattatggaattataatttgtaattaaaaataattatcttttctattttttcagta

SEQ ID NO: 113412 - DNA, 80 bp, synthetic construct
  misc_feature 1..80: note = Artificially Synthesized Probe
  source 1..80: mol_type = other DNA
atgtatcgacttgagaatgactcttaggtatttcctgtggacatcaccttcaaaactgatgctgaaccatgaataattga

SEQ ID NO: 113413 - DNA, 80 bp, synthetic construct
  misc_feature 1..80: note = Artificially Synthesized Probe
  source 1..80: mol_type = other DNA
ttgactccatttcctttatcccctaagcttaaataggaaaaaaaagataagtttatagtcattatttttatgcaagtttg

SEQ ID NO: 113414 - DNA, 80 bp, synthetic construct
  misc_feature 1..80: note = Artificially Synthesized Probe
  source 1..80: mol_type = other DNA
tactactcttggtttcactagcaaaataagagacagtaaaatatatatagttttctgctgtcctgcataatatttgatat

SEQ ID NO: 113415 - DNA, 80 bp, synthetic construct; identical to SEQ ID NO: 37201
  misc_feature 1..80: note = Artificially Synthesized Probe
  source 1..80: mol_type = other DNA

SEQ ID NO: 113416 - DNA, 80 bp, synthetic construct
  misc_feature 1..80: note = Artificially Synthesized Probe
  source 1..80: mol_type = other DNA
gatgcaaacatgagctctaggtacaatatattttagtgaaataaaactcatactagaggtgacctgtgcaaagggcttta

SEQ ID NO: 113417 - DNA, 80 bp, synthetic construct
  misc_feature 1..80: note = Artificially Synthesized Probe
  source 1..80: mol_type = other DNA
ccggttacttcatgaagacaaaggaaaaaactcaatctattggatgaaaactttgtatagtcatagttactataaagcca

SEQ ID NO: 113418 - DNA, 80 bp, synthetic construct
  misc_feature 1..80: note = Artificially Synthesized Probe
  source 1..80: mol_type = other DNA
tgtaccgctgccagagagtttagggaaattaactgaaagtgtaacaacaatctgataataagggatcataattttatgcc

SEQ ID NO: 113419 - DNA, 80 bp, synthetic construct; identical to SEQ ID NO: 37202
  misc_feature 1..80: note = Artificially Synthesized Probe
  source 1..80: mol_type = other DNA

SEQ ID NO: 113420 - DNA, 80 bp, synthetic construct
  misc_feature 1..80: note = Artificially Synthesized Probe
  source 1..80: mol_type = other DNA
aaaaaatcaatcaactcttcaaacaatttcatgtaataaattaaaacgcagtctaatttaacttaccaactatatttaat

SEQ ID NO: 113421 - DNA, 80 bp, synthetic construct
  misc_feature 1..80: note = Artificially Synthesized Probe
  source 1..80: mol_type = other DNA
tttggaaaattattctgttattctgctccttacttacatttcgagaacaatgtttagaaatttaggcaagatggccgaat

SEQ ID NO: 113422 - DNA, 80 bp, synthetic construct; identical to SEQ ID NO: 37203
  misc_feature 1..80: note = Artificially Synthesized Probe
  source 1..80: mol_type = other DNA

SEQ ID NO: 113423 - DNA, 80 bp, synthetic construct
  misc_feature 1..80: note = Artificially Synthesized Probe
  source 1..80: mol_type = other DNA
atattttgaaagcatgcccccaaatactacagaaaaagcaattacccaactgtttcctggtcatatttatagatttttac

SEQ ID NO: 113424 - DNA, 80 bp, synthetic construct
  misc_feature 1..80: note = Artificially Synthesized Probe
  source 1..80: mol_type = other DNA
aagctgggtgaggggcgcccgccattgcccaggcttgcttaggtaaacaaagcagcctggaagctccaactgggtggagc

SEQ ID NO: 113425 - DNA, 80 bp, synthetic construct
  misc_feature 1..80: note = Artificially Synthesized Probe
  source 1..80: mol_type = other DNA
gagaaaggggaaactgcctcctcaagtgggtccctgacccctgacccccgagcagcctaactgggaggcatcccccagca

SEQ ID NO: 113426 - DNA, 80 bp, synthetic construct
  misc_feature 1..80: note = Artificially Synthesized Probe
  source 1..80: mol_type = other DNA
atggggaaaaaacagaacagaaaaactggaaactctaaaaagcagagcgcctctcctcctccaaaggaatgcagttcctc

SEQ ID NO: 113427 - DNA, 80 bp, synthetic construct
  misc_feature 1..80: note = Artificially Synthesized Probe
  source 1..80: mol_type = other DNA
atacagagaagtgcttaaaggagctgatggaacttataaccaaggctcgagaactacgtgaagaatgcagaagcctcagg

SEQ ID NO: 113428 - DNA, 80 bp, synthetic construct; identical to SEQ ID NO: 37204
  misc_feature 1..80: note = Artificially Synthesized Probe
  source 1..80: mol_type = other DNA

SEQ ID NO: 113429 - DNA, 80 bp, synthetic construct
  misc_feature 1..80: note = Artificially Synthesized Probe
  source 1..80: mol_type = other DNA
tcaaagggaagcccatcagactaacagcagatctctcggcagaaaccctacaagccagaagagagtgggggccaatattc

SEQ ID NO: 113430 - DNA, 80 bp, synthetic construct
  misc_feature 1..80: note = Artificially Synthesized Probe
  source 1..80: mol_type = other DNA
acatggaaaggaacaactggtaccagccactgcaaaatcatgccaaaatgtaaagaccatcgagactaggaagaaactgc

SEQ ID NO: 113431 - DNA, 80 bp, synthetic construct; identical to SEQ ID NO: 37205
  misc_feature 1..80: note = Artificially Synthesized Probe
  source 1..80: mol_type = other DNA

SEQ ID NO: 113432 - DNA, 80 bp, synthetic construct
  misc_feature 1..80: note = Artificially Synthesized Probe
  source 1..80: mol_type = other DNA
agatattttatgagggtctggtattttctcatataactctggagatacctctgtatttaatcattttaggctgggtgcag

SEQ ID NO: 113433 - DNA, 80 bp, synthetic construct
  misc_feature 1..80: note = Artificially Synthesized Probe
  source 1..80: mol_type = other DNA
attcataaagcaagtcctgagtgacctacaaagagacttagactcccacacattaataatgggagactttaacaccccac

SEQ ID NO: 113434 - DNA, 80 bp, synthetic construct
  misc_feature 1..80: note = Artificially Synthesized Probe
  source 1..80: mol_type = other DNA
aattgactacatacttggaagtaaagctctcctcagcaaatgtaaaagaacagaaattataacaaactatctctgagacc

SEQ ID NO: 113435 - DNA, 80 bp, synthetic construct
  misc_feature 1..80: note = Artificially Synthesized Probe
  source 1..80: mol_type = other DNA
ataccagaatatctgggacgcattcaaagcagtgtgtagagggaaatttatagcactaaatgcccacaagagaaagcagg

SEQ ID NO: 113436 - DNA, 80 bp, synthetic construct; identical to SEQ ID NO: 37206
  misc_feature 1..80: note = Artificially Synthesized Probe
  source 1..80: mol_type = other DNA

SEQ ID NO: 113437 - DNA, 80 bp, synthetic construct
  misc_feature 1..80: note = Artificially Synthesized Probe
  source 1..80: mol_type = other DNA
ggaagaagttgaatctctgaatagaccaataacaggctctgaaattgtggcaataagcaatagcttaccaaccaaaaaga

SEQ ID NO: 113438 - DNA, 80 bp, synthetic construct
  misc_feature 1..80: note = Artificially Synthesized Probe
  source 1..80: mol_type = other DNA
cacaaccaaaaaagagaattttagaccaatatccttgatgaacattgatgcaaaaatcctcagtaaaatactggcaaaac

SEQ ID NO: 113439 - DNA, 80 bp, synthetic construct
  misc_feature 1..80: note = Artificially Synthesized Probe
  source 1..80: mol_type = other DNA
ggcctttgacaaaattcaacaatccttcatgctaaaaactctcaataaattaggtattgatgggacgtatttcaaaataa

SEQ ID NO: 113440 - DNA, 80 bp, synthetic construct
  misc_feature 1..80: note = Artificially Synthesized Probe
  source 1..80: mol_type = other DNA
ggaaataaagggcattcaattaggaaaagaggaagtcaaattgtccctgcttgcagatgacatgattgtatatctagaaa

SEQ ID NO: 113441 - DNA, 80 bp, synthetic construct; identical to SEQ ID NO: 37207
  misc_feature 1..80: note = Artificially Synthesized Probe
  source 1..80: mol_type = other DNA

SEQ ID NO: 113442 - DNA, 80 bp, synthetic construct
  misc_feature 1..80: note = Artificially Synthesized Probe
  source 1..80: mol_type = other DNA
tactttaaagttcatatggaaccaaaaaagagcccgcatcgccaagtcaatcctaagccaaaagaacaaagctggaggat

SEQ ID NO: 113443 - DNA, 80 bp, synthetic construct
  misc_feature 1..80: note = Artificially Synthesized Probe
  source 1..80: mol_type = other DNA
cttggtaggctgaggcaggagaatcacttgaacccaggaggtagaagttgcagtgggctgagatcatgccactgcactcc

SEQ ID NO: 113444 - DNA, 80 bp, synthetic construct
  misc_feature 1..80: note = Artificially Synthesized Probe
  source 1..80: mol_type = other DNA
aagcaatggggaaaggattccttatttaataaatggtgctgggaaaactggctagccatatgtagaaagctgaaactgga

SEQ ID NO: 113445 - DNA, 80 bp, synthetic construct
  misc_feature 1..80: note = Artificially Synthesized Probe
  source 1..80: mol_type = other DNA
acaaaagacaaaattgacaaatgggatctaattaaactaaagagcttctgtacagcaaaagaaactaccatcagagcgaa

SEQ ID NO: 113446 - DNA, 80 bp, synthetic construct; identical to SEQ ID NO: 37208
  misc_feature 1..80: note = Artificially Synthesized Probe
  source 1..80: mol_type = other DNA

SEQ ID NO: 113447 - DNA, 80 bp, synthetic construct
  misc_feature 1..80: note = Artificially Synthesized Probe
  source 1..80: mol_type = other DNA
ctagaactagaaataccatttgacccagccatcccattactgggtatatacccaaaggactataaatcatgctgctataa

SEQ ID NO: 113448 - DNA, 80 bp, synthetic construct
  misc_feature 1..80: note = Artificially Synthesized Probe
  source 1..80: mol_type = other DNA
gtagggacatggatgaaattggaaatcatcattctcagtaaactatcgcaagaacaaaaaaccaaacgccgcatattctc

SEQ ID NO: 113449 - DNA, 80 bp, synthetic construct
  misc_feature 1..80: note = Artificially Synthesized Probe
  source 1..80: mol_type = other DNA
acatgtatacatatgtaactaacctgcacaatgtgcacatgtaccctaaaacttaaagtataataataaaagaaaaaaaa

SEQ ID NO: 113450 - DNA, 80 bp, synthetic construct; identical to SEQ ID NO: 37209
  misc_feature 1..80: note = Artificially Synthesized Probe
  source 1..80: mol_type = other DNA

SEQ ID NO: 113451 - DNA, 80 bp, synthetic construct
  misc_feature 1..80: note = Artificially Synthesized Probe
  source 1..80: mol_type = other DNA
ttaacaaaataaattgtttttgtctattttctttctttcttgttttttgtttgtttgtttgtttgtttgtttgtttgttt

SEQ ID NO: 113452 - DNA, 80 bp, synthetic construct
  misc_feature 1..80: note = Artificially Synthesized Probe
  source 1..80: mol_type = other DNA
ttttagtagagatggggtttcaccatgttggtcaggctggtctcgaactccttacctcaggtgattggcctcccttggcc

SEQ ID NO: 113453 - DNA, 80 bp, synthetic construct; identical to SEQ ID NO: 37210
  misc_feature 1..80: note = Artificially Synthesized Probe
  source 1..80: mol_type = other DNA

SEQ ID NO: 113454 - DNA, 80 bp, synthetic construct; identical to SEQ ID NO: 37131
  misc_feature 1..80: note = Artificially Synthesized Probe
  source 1..80: mol_type = other DNA

SEQ ID NO: 113455 - DNA, 80 bp, synthetic construct
  misc_feature 1..80: note = Artificially Synthesized Probe
  source 1..80: mol_type = other DNA
tagcttggaagatttgctagcacccacacatgtaatatttgaccacttactagtacaaagtaaagtaaatttggggcatg

SEQ ID NO: 113456 - DNA, 80 bp, synthetic construct
  misc_feature 1..80: note = Artificially Synthesized Probe
  source 1..80: mol_type = other DNA
ttcggaaactcttgttatgatttaagtgctccttcaaaggctgtgcttgcaatttggaacagttgccagtgaaaggcaca

SEQ ID NO: 113457 - DNA, 80 bp, synthetic construct
  misc_feature 1..80: note = Artificially Synthesized Probe
  source 1..80: mol_type = other DNA
aggaccaggatctttaggcaatgtgtttgcttctattcacactggaagtcttatttttttccttttgtttctgttaggaa

SEQ ID NO: 113458 - DNA, 80 bp, synthetic construct; identical to SEQ ID NO: 37211
  misc_feature 1..80: note = Artificially Synthesized Probe
  source 1..80: mol_type = other DNA

SEQ ID NO: 113459 - DNA, 80 bp, synthetic construct
  misc_feature 1..80: note = Artificially Synthesized Probe
  source 1..80: mol_type = other DNA
gccacccaggacttatcactccaagttgctcaccatcttcaacccagggttaaattttaatcctatgttgattcctttcc

SEQ ID NO: 113460 - DNA, 80 bp, synthetic construct
  misc_feature 1..80: note = Artificially Synthesized Probe
  source 1..80: mol_type = other DNA
tctgttgaatgggtggccacacctgtttttccatgaagctaagaggttctagaaaggctttttttttgtgattctgtctc

SEQ ID NO: 113461 - DNA, 80 bp, synthetic construct
  misc_feature 1..80: note = Artificially Synthesized Probe
  source 1..80: mol_type = other DNA
aaaccaggtttaaactctagttctgccattactaactgtttaaccctggaaaagttggcctgagctctctgaacatcagt

SEQ ID NO: 113462 - DNA, 80 bp, synthetic construct; identical to SEQ ID NO: 37212
  misc_feature 1..80: note = Artificially Synthesized Probe
  source 1..80: mol_type = other DNA

SEQ ID NO: 113463 - DNA, 80 bp, synthetic construct
  misc_feature 1..80: note = Artificially Synthesized Probe
  source 1..80: mol_type = other DNA
taaaataacaatcaagaatgcatttttactgttttttacagtttcttcgcttttccattttagatctcaaaacattttca

SEQ ID NO: 113464 - DNA, 80 bp, synthetic construct
  misc_feature 1..80: note = Artificially Synthesized Probe
  source 1..80: mol_type = other DNA
tgccgtgttctaggtctatgaccttagaaaaatcaacttttggagacttggtgccttcatttatataatggggcttatat

SEQ ID NO: 113465 - DNA, 80 bp, synthetic construct
  misc_feature 1..80: note = Artificially Synthesized Probe
  source 1..80: mol_type = other DNA
aactcaagaactctttaaatgcttgaaatcttattagaagtcaccagtgacctccccagtgtgcaacacaagaattaaat

SEQ ID NO: 113466 - DNA, 80 bp, synthetic construct
  misc_feature 1..80: note = Artificially Synthesized Probe
  source 1..80: mol_type = other DNA
aaagctaactctctctattttctaactttttagtgaagatgttccacagagctttggtttcagccatctcataacatttt

SEQ ID NO: 113467 - DNA, 80 bp, synthetic construct
  misc_feature 1..80: note = Artificially Synthesized Probe
  source 1..80: mol_type = other DNA
agactcatggaaaggagaggcttagactgaaatttgaatgaagaaaaagcatgttgggagcagcagtgcagacataagaa

SEQ ID NO: 113468 - DNA, 80 bp, synthetic construct
  misc_feature 1..80: note = Artificially Synthesized Probe
  source 1..80: mol_type = other DNA
cataaaacaaaacagaaatcttctctgagataataggggcttcatgatgggagggaagatgtgacattggaatgaggaca

SEQ ID NO: 113469 - DNA, 80 bp, synthetic construct; identical to SEQ ID NO: 37213
  misc_feature 1..80: note = Artificially Synthesized Probe
  source 1..80: mol_type = other DNA

SEQ ID NO: 113470 - DNA, 80 bp, synthetic construct
  misc_feature 1..80: note = Artificially Synthesized Probe
  source 1..80: mol_type = other DNA
agtcacttctgacttagatcctacttagcattcaatagccacttaatgttaaggtcagttatttctacatccagaatgtg

SEQ ID NO: 113471 - DNA, 80 bp, synthetic construct
  misc_feature 1..80: note = Artificially Synthesized Probe
  source 1..80: mol_type = other DNA
cacaaacttagcagcttaaaacaattataatcgcgcagtttctttgggtcagatgtctaggtacagcttagattggttct

SEQ ID NO: 113472 - DNA, 80 bp, synthetic construct; identical to SEQ ID NO: 37214
  misc_feature 1..80: note = Artificially Synthesized Probe
  source 1..80: mol_type = other DNA

SEQ ID NO: 113473 - DNA, 80 bp, synthetic construct
  misc_feature 1..80: note = Artificially Synthesized Probe
  source 1..80: mol_type = other DNA
tatctacctgagaggccatgcactacactcccccagcctactattttatatttcaaacacttattagaataatccttcca

SEQ ID NO: 113474 - DNA, 80 bp, synthetic construct
  misc_feature 1..80: note = Artificially Synthesized Probe
  source 1..80: mol_type = other DNA
ttagtgttttaggggtaaacaccataagaactgaaaacaggagtggtttaaagtgttgcttctgggaagtaagaggtagg

SEQ ID NO: 113475 - DNA, 80 bp, synthetic construct
  misc_feature 1..80: note = Artificially Synthesized Probe
  source 1..80: mol_type = other DNA
tttgatctcattacccttattgaatttttttccagtgaatcccatgatctatttgtttctgaataaatatggattattta

SEQ ID NO: 113476 - DNA, 80 bp, synthetic construct
  misc_feature 1..80: note = Artificially Synthesized Probe
  source 1..80: mol_type = other DNA
agcctctgctaaaatatttgatcaactgttataggatatctaccactgcaaaagtagctcctatcctataagctttgaag

SEQ ID NO: 113477 - DNA, 80 bp, synthetic construct; identical to SEQ ID NO: 37215
  misc_feature 1..80: note = Artificially Synthesized Probe
  source 1..80: mol_type = other DNA

SEQ ID NO: 113478 - DNA, 80 bp, synthetic construct
  misc_feature 1..80: note = Artificially Synthesized Probe
  source 1..80: mol_type = other DNA
taaagcaagatcacatgagtaaaagtatttaacactctgtaacacacagtagcttaaaatgttagcctttgcagtaacaa

SEQ ID NO: 113479 - DNA, 80 bp, synthetic construct
  misc_feature 1..80: note = Artificially Synthesized Probe
  source 1..80: mol_type = other DNA
gactatagtttctagcacttgttttacattttacaaagcactttcaatgcattatctcattcggtccttgcctcaaccct

SEQ ID NO: 113480 - DNA, 80 bp, synthetic construct
  misc_feature 1..80: note = Artificially Synthesized Probe
  source 1..80: mol_type = other DNA
ttcctgtgcatattttccagtttgtcaaggatcctcttactcacttgaacacaatattctgtatggagtttgaatggagc

SEQ ID NO: 113481 - DNA, 80 bp, synthetic construct; identical to SEQ ID NO: 37216
  misc_feature 1..80: note = Artificially Synthesized Probe
  source 1..80: mol_type = other DNA

SEQ ID NO: 113482 - DNA, 80 bp, synthetic construct
  misc_feature 1..80: note = Artificially Synthesized Probe
  source 1..80: mol_type = other DNA
aggaatgaggctgaggacagaacccaagagtagtttaggaatgtcttgagataggtttattttattcagcattaggaaca

SEQ ID NO: 113483 - DNA, 80 bp, synthetic construct
  misc_feature 1..80: note = Artificially Synthesized Probe
  source 1..80: mol_type = other DNA
gaagcatttcttaagaataagtcaaacatttcattaattcaattcagcagacctccagtgaccccaaactgatagatgtg

SEQ ID NO: 113484 - DNA, 80 bp, synthetic construct
  misc_feature 1..80: note = Artificially Synthesized Probe
  source 1..80: mol_type = other DNA
catgttgacaaattgtgacattccctaactcaatggtgctcaaccagcggcagttttgctctccaagaaacatgtgttaa

SEQ ID NO: 113485 - DNA, 80 bp, synthetic construct; identical to SEQ ID NO: 37217
  misc_feature 1..80: note = Artificially Synthesized Probe
  source 1..80: mol_type = other DNA

SEQ ID NO: 113486 - DNA, 80 bp, synthetic construct
  misc_feature 1..80: note = Artificially Synthesized Probe
  source 1..80: mol_type = other DNA
tgggttgttacaaagccaatgttcaaatcattgcccaagttatggagggtttttctaatgtcagaatatcagaatttgag

SEQ ID NO: 113487 - DNA, 80 bp, synthetic construct
  misc_feature 1..80: note = Artificially Synthesized Probe
  source 1..80: mol_type = other DNA
ccatagttgagggggaaattctttgtgctacctcactatagttcattctatagtgctttgtacacagtagattttcaaag

SEQ ID NO: 113488 - DNA, 80 bp, synthetic construct
  misc_feature 1..80: note = Artificially Synthesized Probe
  source 1..80: mol_type = other DNA
tttgtcccatacaaggacataggaacaaacccatatagagttccctatccatagttctttatcacaacttttaaaaagta

SEQ ID NO: 113489 - DNA, 80 bp, synthetic construct; identical to SEQ ID NO: 37218
  misc_feature 1..80: note = Artificially Synthesized Probe
  source 1..80: mol_type = other DNA

SEQ ID NO: 113490 - DNA, 80 bp, synthetic construct
  misc_feature 1..80: note = Artificially Synthesized Probe
  source 1..80: mol_type = other DNA
agcacatgtatattgaggagtgggggatggatatagtttcgacgccatgtgcaaggtactataataagaaaattaatctg

SEQ ID NO: 113491 - DNA, 80 bp, synthetic construct
  misc_feature 1..80: note = Artificially Synthesized Probe
  source 1..80: mol_type = other DNA
gggtaaaagagcatggaattgataaggaatagaatttttttaaaaaaaggggttttggaggtaagttttgaagcagaact

SEQ ID NO: 113492 - DNA, 80 bp, synthetic construct
  misc_feature 1..80: note = Artificially Synthesized Probe
  source 1..80: mol_type = other DNA
acctgccacctggattcagtaatcatcaataggctgccattcttgcctccggtttttaaataaattccagacttaacatc

SEQ ID NO: 113493 - DNA, 80 bp, synthetic construct
  misc_feature 1..80: note = Artificially Synthesized Probe
  source 1..80: mol_type = other DNA
tagaacacattcagatttccttgattatcttcacatcctatgttgattaggtatgttctaattagactccaaacaaagca

SEQ ID NO: 113494 - DNA, 80 bp, synthetic construct; identical to SEQ ID NO: 37219
  misc_feature 1..80: note = Artificially Synthesized Probe
  source 1..80: mol_type = other DNA

SEQ ID NO: 113495 - DNA, 80 bp, synthetic construct
  misc_feature 1..80: note = Artificially Synthesized Probe
  source 1..80: mol_type = other DNA
gtatatcaagcaggcatatagacctctcatgtatggtatacaaatgaggacaggtaattagaaaagcaaaacacattcta

SEQ ID NO: 113496 - DNA, 80 bp, synthetic construct
  misc_feature 1..80: note = Artificially Synthesized Probe
  source 1..80: mol_type = other DNA
gaaatacaatgatcacaatgtgttacaatgattcagggtattagtagccggagaatgaaattttggaatctaaagaagac

SEQ ID NO: 113497 - DNA, 80 bp, synthetic construct
  misc_feature 1..80: note = Artificially Synthesized Probe
  source 1..80: mol_type = other DNA
ttgtgaacatagtagagccaatggtaggattatatgagggttcagcagagatgtcgtctgaccttcactcacttgctaca

SEQ ID NO: 113498 - DNA, 80 bp, synthetic construct
  misc_feature 1..80: note = Artificially Synthesized Probe
  source 1..80: mol_type = other DNA
ctagctagcacagaaatgaacctaagcttagagttcagccatattattaatggtctttgggctggagtcggatttttttt

SEQ ID NO: 113499 - DNA, 80 bp, synthetic construct; identical to SEQ ID NO: 37220
  misc_feature 1..80: note = Artificially Synthesized Probe
  source 1..80: mol_type = other DNA

SEQ ID NO: 113500 - DNA, 80 bp, synthetic construct; identical to SEQ ID NO: 37132
  misc_feature 1..80: note = Artificially Synthesized Probe
  source 1..80: mol_type = other DNA

SEQ ID NO: 113501 - DNA, 80 bp, synthetic construct
  misc_feature 1..80: note = Artificially Synthesized Probe
  source 1..80: mol_type = other DNA
tgatgtcattagtgtatacacttgctcttcagtgtcagtggctcttacagtttctaaaaggagaatgtcataagtggcaa

SEQ ID NO: 113502 - DNA, 80 bp, synthetic construct
  misc_feature 1..80: note = Artificially Synthesized Probe
  source 1..80: mol_type = other DNA
cattcaatagatgtttatatttcacttactgatccatttttcttgtgcaaagaagactggagggcaacactgaaaattaa

SEQ ID NO: 113503 - DNA, 80 bp, synthetic construct; identical to SEQ ID NO: 37221
  misc_feature 1..80: note = Artificially Synthesized Probe
  source 1..80: mol_type = other DNA

SEQ ID NO: 113504 - DNA, 80 bp, synthetic construct
  misc_feature 1..80: note = Artificially Synthesized Probe
  source 1..80: mol_type = other DNA
ttcagaaaacattcctaaccagcctctttaagaaagttgttttcttaaaaacactaatgtcatgtttcagagtaatgtgt

SEQ ID NO: 113505 - DNA, 80 bp, synthetic construct
  misc_feature 1..80: note = Artificially Synthesized Probe
  source 1..80: mol_type = other DNA
attacacacctaactttaatagaggtgtgcatggagagattaatgaatacggagaaatcaggtttaagattttatagtct

SEQ ID NO: 113506 - DNA, 80 bp, synthetic construct
  misc_feature 1..80: note = Artificially Synthesized Probe
  source 1..80: mol_type = other DNA
ttagtgtatctgctttcaccatcatgggagaaggaccaccaacagttctcagtgttaggacacgtcagcaaggtaaggat

SEQ ID NO: 113507 - DNA, 80 bp, synthetic construct; identical to SEQ ID NO: 37222
  misc_feature 1..80: note = Artificially Synthesized Probe
  source 1..80: mol_type = other DNA

SEQ ID NO: 113508 - DNA, 80 bp, synthetic construct
  misc_feature 1..80: note = Artificially Synthesized Probe
  source 1..80: mol_type = other DNA
gtgtcaccatgaatctttttaaaatacctgcatacataactcgattaaatgtgtttttcttttactagatttacccacaa

SEQ ID NO: 113509 - DNA, 80 bp, synthetic construct
  misc_feature 1..80: note = Artificially Synthesized Probe
  source 1..80: mol_type = other DNA
ctatacaccctgcagtgtgccaaaaagttacttttgcaactttaaattattgccttaatattttaggagagaacttgaag

SEQ ID NO: 113510 - DNA, 80 bp, synthetic construct
  misc_feature 1..80: note = Artificially Synthesized Probe
  source 1..80: mol_type = other DNA
tctcttgtccttatagggttaaagaaatacacaaaatacaaaatgagagtggcagcctcaacccacgttggagaaagttc

SEQ ID NO: 113511 - DNA, 80 bp, synthetic construct
  misc_feature 1..80: note = Artificially Synthesized Probe
  source 1..80: mol_type = other DNA
tcagggagtgaaactataaagtggaagagccaggactcacccccagtttttgtttcttttccaagctagagtatttggaa

SEQ ID NO: 113512 - DNA, 80 bp, synthetic construct
  misc_feature 1..80: note = Artificially Synthesized Probe
  source 1..80: mol_type = other DNA
actacaaatgttcttttcttcccctagaaccggaatcatcacctcaagatgtcgaagtaattgatgttaccgcagatgaa

SEQ ID NO: 113513 - DNA, 80 bp, synthetic construct; identical to SEQ ID NO: 37223
  misc_feature 1..80: note = Artificially Synthesized Probe
  source 1..80: mol_type = other DNA

SEQ ID NO: 113514 - DNA, 80 bp, synthetic construct
  misc_feature 1..80: note = Artificially Synthesized Probe
  source 1..80: mol_type = other DNA
taattttctttttcaggcaaaagtgcaggaaaaggtttattgtacaaatttttaagtctgatttatataagggaacttct

SEQ ID NO: 113515 - DNA, 80 bp, synthetic construct
  misc_feature 1..80: note = Artificially Synthesized Probe
  source 1..80: mol_type = other DNA
ctcataggaatagattctgagattctaatgaggtatgtgtatagatagtgatgcagagtgggagcacaaaaatggcatgc

SEQ ID NO: 113516 - DNA, 80 bp, synthetic construct
  misc_feature 1..80: note = Artificially Synthesized Probe
  source 1..80: mol_type = other DNA
gagtgaggttggtttctggatgattcaagcacgttacgtttgttgtgcactttatttctattattattacattgtaacat

SEQ ID NO: 113517 - DNA, 80 bp, synthetic construct; identical to SEQ ID NO: 37224
  misc_feature 1..80: note = Artificially Synthesized Probe
  source 1..80: mol_type = other DNA

SEQ ID NO: 113518 - DNA, 80 bp, synthetic construct
  misc_feature 1..80: note = Artificially Synthesized Probe
  source 1..80: mol_type = other DNA
ccctgttatagaggttgctggatgggttgggagaggatatcccatctaaaggaagtaaaacaagcaaggaattacttgtg

SEQ ID NO: 113519 - DNA, 80 bp, synthetic construct
  misc_feature 1..80: note = Artificially Synthesized Probe
  source 1..80: mol_type = other DNA
acgtttaaaacaataaatatttactgactagatactggtggaaccacatgaaataatttttataggtcacaaatggccaa

SEQ ID NO: 113520 - DNA, 80 bp, synthetic construct
  misc_feature 1..80: note = Artificially Synthesized Probe
  source 1..80: mol_type = other DNA
tagataatggcagtagttgaaagtgcaggaataagaaagtaatgaaaggagcattttacattatcaagagccttgaagtg

SEQ ID NO: 113521 - DNA, 80 bp, synthetic construct; identical to SEQ ID NO: 37225
  misc_feature 1..80: note = Artificially Synthesized Probe
  source 1..80: mol_type = other DNA

SEQ ID NO: 113522 - DNA, 80 bp, synthetic construct
  misc_feature 1..80: note = Artificially Synthesized Probe
  source 1..80: mol_type = other DNA
gccttactggggataaagtagtgtagaagaaaaggatttccttccctccttaagttttattagttggtgggtgtttcatt

SEQ ID NO: 113523 - DNA, 80 bp, synthetic construct
  misc_feature 1..80: note = Artificially Synthesized Probe
  source 1..80: mol_type = other DNA
atgagctggaattagaatccaaacccatctgactgtaaaacccatttccctttcacagcacatgctgtttttgaagtaat

SEQ ID NO: 113524 - DNA, 80 bp, synthetic construct
  misc_feature 1..80: note = Artificially Synthesized Probe
  source 1..80: mol_type = other DNA
tttttcatcattaccttatcactattttggatgttgaaaacaatacatcagaagaggtgcttgttgaaaaacgcaacaca

SEQ ID NO: 113525 - DNA, 80 bp, synthetic construct
  misc_feature 1..80: note = Artificially Synthesized Probe
  source 1..80: mol_type = other DNA
aagtatttcgtttaagtggccatagcatcaagaacaccttattttaatgatgaattataaagcaatgtttttgttttctg

SEQ ID NO: 113526 - DNA, 80 bp, synthetic construct; identical to SEQ ID NO: 37226
  misc_feature 1..80: note = Artificially Synthesized Probe
  source 1..80: mol_type = other DNA

SEQ ID NO: 113527 - DNA, 80 bp, synthetic construct
  misc_feature 1..80: note = Artificially Synthesized Probe
  source 1..80: mol_type = other DNA
aatgcccatcttcctaatatctggttctctgtcctaagttagggtagtctcaagttctgtgcattttccacctggatgaa

SEQ ID NO: 113528 - DNA, 80 bp, synthetic construct
  misc_feature 1..80: note = Artificially Synthesized Probe
  source 1..80: mol_type = other DNA
tgtcatttgaagcaagatgagctcaagagcaactatttttctgggtttaggcccaaaataatcttattaaatacagtaat

SEQ ID NO: 113529 - DNA, 80 bp, synthetic construct
  misc_feature 1..80: note = Artificially Synthesized Probe
  source 1..80: mol_type = other DNA
tactaatgcttggaagtaaaacacccttgtgttcaagcaggaaagatcaatacaagattgattctgtgtgtgtgtgtgtg

SEQ ID NO: 113530 - DNA, 80 bp, synthetic construct; identical to SEQ ID NO: 37227
  misc_feature 1..80: note = Artificially Synthesized Probe
  source 1..80: mol_type = other DNA

SEQ ID NO: 113531 - DNA, 80 bp, synthetic construct
  misc_feature 1..80: note = Artificially Synthesized Probe
  source 1..80: mol_type = other DNA
gtcttttggcagattcaaggtaacttcccttttttactatcatcatggactatgtattttttctgttttggaattttaat

SEQ ID NO: 113532 - DNA, 80 bp, synthetic construct
  misc_feature 1..80: note = Artificially Synthesized Probe
  source 1..80: mol_type = other DNA
tatctacctgatgatccagcactagttattccctaagggtaaatgaataaaaatgcaaaggatatcagccttgggtcagg

SEQ ID NO: 113533 - DNA, 80 bp, synthetic construct
  misc_feature 1..80: note = Artificially Synthesized Probe
  source 1..80: mol_type = other DNA
aatacatatttacacactgactactggtggtaggcagacaactgcagagagaaaacttcaatctaatgggaaattttcaa

SEQ ID NO: 113534 - DNA, 80 bp, synthetic construct
  misc_feature 1..80: note = Artificially Synthesized Probe
  source 1..80: mol_type = other DNA
cattcactaaacagcttttatgggttccatattatgttctaccaccgtactaggtagtgtagctgtagcagtaaacaaga

SEQ ID NO: 113535 - DNA, 80 bp, synthetic construct; identical to SEQ ID NO: 37228
  misc_feature 1..80: note = Artificially Synthesized Probe
  source 1..80: mol_type = other DNA

SEQ ID NO: 113536 - DNA, 80 bp, synthetic construct
  misc_feature 1..80: note = Artificially Synthesized Probe
  source 1..80: mol_type = other DNA
gtttctgtttctgtgcaatttcaccgttatgcaatatatcaatgtaacctgtacacttatcccaaaatctaaaataataa

SEQ ID NO: 113537 - DNA, 80 bp, synthetic construct
  misc_feature 1..80: note = Artificially Synthesized Probe
  source 1..80: mol_type = other DNA
tggatcctgagattcttaggtgccattctaggaactttggagtttaattttaatgaggagcttttggagaattatggaat

SEQ ID NO: 113538 - DNA, 80 bp, synthetic construct
  misc_feature 1..80: note = Artificially Synthesized Probe
  source 1..80: mol_type = other DNA
atatggagaacatccaggagttctgtttgcaacatgtttgaaatatccaagtgccattatgaaggcagttagataaataa

SEQ ID NO: 113539 - DNA, 80 bp, synthetic construct
  misc_feature 1..80: note = Artificially Synthesized Probe
  source 1..80: mol_type = other DNA
aagaagcttacagctatgtcgtgggcaataccacacatagactttgagaagtagaagagctaatcaaggacaaagcagaa

SEQ ID NO: 113540 - DNA, 80 bp, synthetic construct; identical to SEQ ID NO: 37229
  misc_feature 1..80: note = Artificially Synthesized Probe
  source 1..80: mol_type = other DNA

SEQ ID NO: 113541 - DNA, 80 bp, synthetic construct
  misc_feature 1..80: note = Artificially Synthesized Probe
  source 1..80: mol_type = other DNA
agactgtatattacagtgtatgtgtgttcacatgtatctctgactaacttcaaatgtaaagtctctgaataggcagaagg

SEQ ID NO: 113542 - DNA, 80 bp, synthetic construct
  misc_feature 1..80: note = Artificially Synthesized Probe
  source 1..80: mol_type = other DNA
ttgaaaatgtgacccatttatttgaactgaaaggcatcattacaaagtgcaaacatttctttggtaatgaactgaataca

SEQ ID NO: 113543 - DNA, 80 bp, synthetic construct
  misc_feature 1..80: note = Artificially Synthesized Probe
  source 1..80: mol_type = other DNA
aatcattttcaagagaacaattttctacaaacagaacaaattttctaccatgcttgtagaaaagcattttgaattggata

SEQ ID NO: 113544 - DNA, 80 bp, synthetic construct
  misc_feature 1..80: note = Artificially Synthesized Probe
  source 1..80: mol_type = other DNA
aaactgacaaaatatatgaagcaactgttttcaagttactgggcatcagccaacaaagcactgatccgtgtgatggaaaa

SEQ ID NO: 113545 - DNA, 80 bp, synthetic construct
  misc_feature 1..80: note = Artificially Synthesized Probe
  source 1..80: mol_type = other DNA
cagcactgagctgagccctgagctgcacaaactgcccacagccagaaaagagccacccaaatggagtagggatcacaggg

SEQ ID NO: 113546 - DNA, 80 bp, synthetic construct
  misc_feature 1..80: note = Artificially Synthesized Probe
  source 1..80: mol_type = other DNA
ttagtaaagcactgctccaatcctgcccaacacatcttaaaagcaagaccttaaagaaccaaactgtttccatataactg

SEQ ID NO: 113547 - DNA, 80 bp, synthetic construct
  misc_feature 1..80: note = Artificially Synthesized Probe
  source 1..80: mol_type = other DNA
aacccagagctgccacagatgttagagttagcagattattaaaattgtatttattccacaagttcaaaacaccaagtagt

SEQ ID NO: 113548 - DNA, 80 bp, synthetic construct
  misc_feature 1..80: note = Artificially Synthesized Probe
  source 1..80: mol_type = other DNA
gaaaaaggcacagtaacaaaaaattaagcaatggatgagagagctgtggcctaatacacgtataactggaatcttcaaaa

SEQ ID NO: 113549 - DNA, 80 bp, synthetic construct; identical to SEQ ID NO: 37529
  misc_feature 1..80: note = Artificially Synthesized Probe
  source 1..80: mol_type = other DNA

SEQ ID NO: 113550 - DNA, 80 bp, synthetic construct
  misc_feature 1..80: note = Artificially Synthesized Probe
  source 1..80: mol_type = other DNA
acacacagacgttgtactgacacgatatgggtgtcagtagattcctcatgggaaacaatgtgagaggacatttttaaagc

SEQ ID NO: 113551 - DNA, 80 bp, synthetic construct
  misc_feature 1..80: note = Artificially Synthesized Probe
  source 1..80: mol_type = other DNA
cgcgcctgtaatcccagctactgaggaggctgaggcaggagaatcgcttgaacccgggaggcggaggctgcagtgagccg

SEQ ID NO: 113552 - DNA, 80 bp, synthetic construct
  misc_feature 1..80: note = Artificially Synthesized Probe
  source 1..80: mol_type = other DNA
ttaaacatccaaaagctaaaggaatcgattaccaatagagctgcactataagacattttttttagagctcttgaagtaaa

SEQ ID NO: 113553 - DNA, 80 bp, synthetic construct; identical to SEQ ID NO: 37431
  misc_feature 1..80: note = Artificially Synthesized Probe
  source 1..80: mol_type = other DNA

SEQ ID NO: 113554 - DNA, 80 bp, synthetic construct; identical to SEQ ID NO: 37530
  misc_feature 1..80: note = Artificially Synthesized Probe
  source 1..80: mol_type = other DNA

SEQ ID NO: 113555 - DNA, 80 bp, synthetic construct
  misc_feature 1..80: note = Artificially Synthesized Probe
  source 1..80: mol_type = other DNA
aaaacacctgagccttcagagagttttcttcttttggctggtagagaaccttgcttttatgttgctggctgctgacggat

SEQ ID NO: 113556 - DNA, 80 bp, synthetic construct
  misc_feature 1..80: note = Artificially Synthesized Probe
  source 1..80: mol_type = other DNA
aaattgaagtcaatcggccaggcatggtggctcacacctctaatcccagcactttgggaggccaaggcgggcggatcacg

SEQ ID NO: 113557 - DNA, 80 bp, synthetic construct
  misc_feature 1..80: note = Artificially Synthesized Probe
  source 1..80: mol_type = other DNA
aggcaagattgtgccactgcactccagcctggcaacagagtgagactccatctctcaataaataaataaataaaaataaa

SEQ ID NO: 113558 - DNA, 80 bp, synthetic construct; identical to SEQ ID NO: 37531
  misc_feature 1..80: note = Artificially Synthesized Probe
  source 1..80: mol_type = other DNA

SEQ ID NO: 113559 - DNA, 80 bp, synthetic construct
  misc_feature 1..80: note = Artificially Synthesized Probe
  source 1..80: mol_type = other DNA
tgatgttttgacccccccatgaatcaaaaatgttcttaatggtgtctaaaatgatgactcctttccagaaggttttcagt

SEQ ID NO: 113560 - DNA, 80 bp, synthetic construct
  misc_feature 1..80: note = Artificially Synthesized Probe
  source 1..80: mol_type = other DNA
atagatgttttgtgttagcagccatgaaaacaacattaatccccttgcattctccatcagagctcttgggtgacgagatg

SEQ ID NO: 113561 - DNA, 80 bp, synthetic construct; identical to SEQ ID NO: 37532
  misc_feature 1..80: note = Artificially Synthesized Probe
  source 1..80: mol_type = other DNA

SEQ ID NO: 113562 - DNA, 80 bp, synthetic construct
  misc_feature 1..80: note = Artificially Synthesized Probe
  source 1..80: mol_type = other DNA
tctgttgttgaatgtggccaccttaatcactgatactagctagaacttctggagaacttgctgcagcttctccatcagca

SEQ ID NO: 113563 - DNA, 80 bp, synthetic construct; identical to SEQ ID NO: 37421
  misc_feature 1..80: note = Artificially Synthesized Probe
  source 1..80: mol_type = other DNA

SEQ ID NO: 113564 - DNA, 80 bp, synthetic construct
  misc_feature 1..80: note = Artificially Synthesized Probe
  source 1..80: mol_type = other DNA
tggctgagtggaatgttgtggctggtttgctcttcttcccaaaccactaaaacttcctccataaactaactgatgcaaga

SEQ ID NO: 113565 - DNA, 80 bp, synthetic construct
  misc_feature 1..80: note = Artificially Synthesized Probe
  source 1..80: mol_type = other DNA
caacgcttactaaattaaataagctcttggccagaactattacttcaggaaaaatgaggtggtggagaatatgtggacag

SEQ ID NO: 113566 - DNA, 80 bp, synthetic construct
  misc_feature 1..80: note = Artificially Synthesized Probe
  source 1..80: mol_type = other DNA
gtgtctcagggaataaggcctggaaagggaggagagatggagggacggccagtcagtggacagtcagaacacacacaaca

SEQ ID NO: 113567 - DNA, 80 bp, synthetic construct
  misc_feature 1..80: note = Artificially Synthesized Probe
  source 1..80: mol_type = other DNA
gagttgaagaccagcctgggcaaatagcaagactccatctccacaaaataaaaaattaaaaagaaatttaaaaaaaaaaa

SEQ ID NO: 113568 - DNA, 80 bp, synthetic construct; identical to SEQ ID NO: 37533
  misc_feature 1..80: note = Artificially Synthesized Probe
  source 1..80: mol_type = other DNA

SEQ ID NO: 113569 - DNA, 80 bp, synthetic construct
  misc_feature 1..80: note = Artificially Synthesized Probe
  source 1..80: mol_type = other DNA
ggcatctggacaggagcagggcatgaaccctgctttccacgggcagatgacgcaggaggcagtcagatctggaataaaca

SEQ ID NO: 113570 - DNA, 80 bp, synthetic construct
  misc_feature 1..80: note = Artificially Synthesized Probe
  source 1..80: mol_type = other DNA
gggaaagcaacatcctccagaataaagaaaccaatgaacacagcagtgatgactgatctcgtatctacgccaggataatc

SEQ ID NO: 113571 - DNA, 80 bp, synthetic construct; identical to SEQ ID NO: 37534
  misc_feature 1..80: note = Artificially Synthesized Probe
  source 1..80: mol_type = other DNA

SEQ ID NO: 113572 - DNA, 80 bp, synthetic construct
  misc_feature 1..80: note = Artificially Synthesized Probe
  source 1..80: mol_type = other DNA
caggtgatctgcccacctcagcctcccaaagtgctgggattacaggtgtgagcctccatgccccccttaatgcctatttt

SEQ ID NO: 113573 - DNA, 80 bp, synthetic construct
  misc_feature 1..80: note = Artificially Synthesized Probe
  source 1..80: mol_type = other DNA
gagtttaacaattcaaccatccagccttgatcctgaggagctactggcccacatagagagataccactaacatataaaat

SEQ ID NO: 113574 - DNA, 80 bp, synthetic construct
  misc_feature 1..80: note = Artificially Synthesized Probe
  source 1..80: mol_type = other DNA
aactatcactattaaaataattagtaaacctgggcgttgggaagtacgagagagctcacgtgttggtcactaaagaccag

SEQ ID NO: 113575 - DNA, 80 bp, synthetic construct; identical to SEQ ID NO: 37535
  misc_feature 1..80: note = Artificially Synthesized Probe
  source 1..80: mol_type = other DNA

SEQ ID NO: 113576 - DNA, 80 bp, synthetic construct
  misc_feature 1..80: note = Artificially Synthesized Probe
  source 1..80: mol_type = other DNA
gtgtgcaccaccaggcccagctaattgtatttctggtagagaaggggtttcgccatgtagctcaggctggccttcgaact

SEQ ID NO: 113577 - DNA, 80 bp, synthetic construct
  misc_feature 1..80: note = Artificially Synthesized Probe
  source 1..80: mol_type = other DNA
acaagagtgagtgctccacaacttgggttctaaacatccccagtttggtattttatggggatctgatcatagtttgaata

SEQ ID NO: 113578 - DNA, 80 bp, synthetic construct
  misc_feature 1..80: note = Artificially Synthesized Probe
  source 1..80: mol_type = other DNA
aattttgaaccctggatctgtgccacggaggctgctgcccggacaatgcaacacccacttcgcttaaaaaggcccaagtt

SEQ ID NO: 113579 - DNA, 80 bp, synthetic construct
  misc_feature 1..80: note = Artificially Synthesized Probe
  source 1..80: mol_type = other DNA
tctggtccgttaagacaattccccaaacttctgcttgtgcactgagtcacgcattctcttttcaccggacttagctctgt

SEQ ID NO: 113580 - DNA, 80 bp, synthetic construct
  misc_feature 1..80: note = Artificially Synthesized Probe
  source 1..80: mol_type = other DNA
attcagagtcatagagaaggatatgctttctttttacaactatttccttgacatatgaaaaaacacagaggaggaaggca

SEQ ID NO: 113581 - DNA, 80 bp, synthetic construct; identical to SEQ ID NO: 37536
  misc_feature 1..80: note = Artificially Synthesized Probe
  source 1..80: mol_type = other DNA

SEQ ID NO: 113582 - DNA, 80 bp, synthetic construct
  misc_feature 1..80: note = Artificially Synthesized Probe
  source 1..80: mol_type = other DNA
ataaagtctttgactctgttgtgccaacaaacatgagcatcatctgttctatggaaggcaaacactgacactagcacctg

SEQ ID NO: 113583 - DNA, 80 bp, synthetic construct
  misc_feature 1..80: note = Artificially Synthesized Probe
  source 1..80: mol_type = other DNA
gaacttcccgggagcaggagggtgcagaggaggaggagggcatgggaagtgctgagggtggacagccagggagtccccgg

SEQ ID NO: 113584 - DNA, 80 bp, synthetic construct; identical to SEQ ID NO: 37537
  misc_feature 1..80: note = Artificially Synthesized Probe
  source 1..80: mol_type = other DNA

SEQ ID NO: 113585 - DNA, 80 bp, synthetic construct
  misc_feature 1..80: note = Artificially Synthesized Probe
  source 1..80: mol_type = other DNA
caagcactgtgcgccctttccccataccccgtcccaccaggactgcacacacctggggtcatcttaccactcccaggaag

SEQ ID NO: 113586 - DNA, 80 bp, synthetic construct
  misc_feature 1..80: note = Artificially Synthesized Probe
  source 1..80: mol_type = other DNA
gtgagaaaaactgagaatgaggagcagctgtctggagattctgcaggagaggaggccccgccctggctgccatgcgcctg

SEQ ID NO: 113587 - DNA, 80 bp, synthetic construct
  misc_feature 1..80: note = Artificially Synthesized Probe
  source 1..80: mol_type = other DNA
catgaccatagcctcaaccgtggcggctccagggaagagaggaaggcaggacaggaggagggcgtggagggcctagctcc

SEQ ID NO: 113588 - DNA, 80 bp, synthetic construct
  misc_feature 1..80: note = Artificially Synthesized Probe
  source 1..80: mol_type = other DNA
gccggggctgtgggattgatatcagggcgtccctcagctacagggccccccgcgccaatcatgagaccacctcctacctg

SEQ ID NO: 113589 - DNA, 80 bp, synthetic construct; identical to SEQ ID NO: 37538
  misc_feature 1..80: note = Artificially Synthesized Probe
  source 1..80: mol_type = other DNA

SEQ ID NO: 113590 - DNA, 80 bp, synthetic construct
  misc_feature 1..80: note = Artificially Synthesized Probe
  source 1..80: mol_type = other DNA
aaagcccccaagccacaaatcaaacaacccagtatcagacccgcttaaacacactcctggagcatttgaggggaaggagc

SEQ ID NO: 113591 - DNA, 80 bp, synthetic construct
  misc_feature 1..80: note = Artificially Synthesized Probe
  source 1..80: mol_type = other DNA
caaaaaattgtaatagaaaataatcacatatacatgagagcacagtcctgggagaaagccgaaagtggacatgaaatgtt

SEQ ID NO: 113592 - DNA, 80 bp, synthetic construct
  misc_feature 1..80: note = Artificially Synthesized Probe
  source 1..80: mol_type = other DNA
tgacacctgtccactgtgcctaggtccgcacagctacaccctcacgttctcccaggagacacgggacttgctaaaaatca

SEQ ID NO: 113593 - DNA, 80 bp, synthetic construct; identical to SEQ ID NO: 37539
  misc_feature 1..80: note = Artificially Synthesized Probe
  source 1..80: mol_type = other DNA

SEQ ID NO: 113594 - DNA, 80 bp, synthetic construct
  misc_feature 1..80: note = Artificially Synthesized Probe
  source 1..80: mol_type = other DNA
tgcaaagcggagcagaggaccccatgtgtgtcctacgacacttattttaacatgttattttcaacaagcaattaatattc

SEQ ID NO: 113595 - DNA, 80 bp, synthetic construct
  misc_feature 1..80: note = Artificially Synthesized Probe
  source 1..80: mol_type = other DNA
ctccattctaaaagtccactgctgttgagtgagatgcccccgagtcgtccggcctgggctgaccattcacgggctctgga

SEQ ID NO: 113596 - DNA, 80 bp, synthetic construct
  misc_feature 1..80: note = Artificially Synthesized Probe
  source 1..80: mol_type = other DNA
aattgttcactcaatttttttacaacttttgcagactctttgctggtgccaaaaagtcctctggctcagctaagaaacgt

SEQ ID NO: 113597 - DNA, 80 bp, synthetic construct; identical to SEQ ID NO: 37540
  misc_feature 1..80: note = Artificially Synthesized Probe
  source 1..80: mol_type = other DNA

SEQ ID NO: 113598 - DNA, 80 bp, synthetic construct
  misc_feature 1..80: note = Artificially Synthesized Probe
  source 1..80: mol_type = other DNA
gcagaaacccgctctgagtcccggctccatctagacccgggctgccccgagactaccgcgcggcccctctcgggaacccc

SEQ ID NO: 113599 - DNA, 80 bp, synthetic construct
  misc_feature 1..80: note = Artificially Synthesized Probe
  source 1..80: mol_type = other DNA
ctagacatacattaggctttaaggaaaaattaggggcacatcttgctgaagcctgggtttctgtttctcttagtgtttta

SEQ ID NO: 113600 - DNA, 80 bp, synthetic construct
  misc_feature 1..80: note = Artificially Synthesized Probe
  source 1..80: mol_type = other DNA
gggggatggggtgggcactgcgctccaaggggcgggggagggggagagggcggaggctgggggaggagaaggaagggggg

SEQ ID NO: 113601 - DNA, 80 bp, synthetic construct
  misc_feature 1..80: note = Artificially Synthesized Probe
  source 1..80: mol_type = other DNA
gggagcggagggggaccgaggggtcctgagcgggggaaaggtgagcggaggaggggccgcgaaccagggggaagcgggag

SEQ ID NO: 113602 - DNA, 80 bp, synthetic construct
  misc_feature 1..80: note = Artificially Synthesized Probe
  source 1..80: mol_type = other DNA
cgaacaaaggcccagcgggtccccgcgcccaggtccccccacgtcccccttcggaggttcccttctgcgtcccaagtccc

SEQ ID NO: 113603 - DNA, 80 bp, synthetic construct; identical to SEQ ID NO: 37541
  misc_feature 1..80: note = Artificially Synthesized Probe
  source 1..80: mol_type = other DNA

SEQ ID NO: 113604 - DNA, 80 bp, synthetic construct
  misc_feature 1..80: note = Artificially Synthesized Probe
  source 1..80: mol_type = other DNA
cccacgtcccagctgtgcgcggggggcggggggcgccagctgtgcacatgcgcgaggctcctcccggcccctctgaatcc

SEQ ID NO: 113605 - DNA, 80 bp, synthetic construct
  misc_feature 1..80: note = Artificially Synthesized Probe
  source 1..80: mol_type = other DNA
cccctgattctgcgctcgagactcggggctcgggaccctggggcctacgcgaagcttctccacttctcttacccgtggtt

SEQ ID NO: 113606 - DNA, 80 bp, synthetic construct; identical to SEQ ID NO: 37432
  misc_feature 1..80: note = Artificially Synthesized Probe
  source 1..80: mol_type = other DNA

SEQ ID NO: 113607 - DNA, 80 bp, synthetic construct
  misc_feature 1..80: note = Artificially Synthesized Probe
  source 1..80: mol_type = other DNA
tgaacacgtcgctctgcacccgggtgatgttgtccgcgttgtcgcataggatcctggccagcgacgtctgcttgatctga

SEQ ID NO: 113608 - DNA, 80 bp, synthetic construct
  misc_feature 1..80: note = Artificially Synthesized Probe
  source 1..80: mol_type = other DNA
tcccctgcttagttcacagcaatacagaaaccactaggtttgattaggtgtcacttaaaaatggactcacacactgctca

SEQ ID NO: 113609 - DNA, 80 bp, synthetic construct
  misc_feature 1..80: note = Artificially Synthesized Probe
  source 1..80: mol_type = other DNA
cacgaggtcaggagatcgagaccatcctggctaacacagtgaaaccccatctctactaaaactacaaaaaattagccggg

SEQ ID NO: 113610 - DNA, 80 bp, synthetic construct; identical to SEQ ID NO: 37433
  misc_feature 1..80: note = Artificially Synthesized Probe
  source 1..80: mol_type = other DNA

SEQ ID NO: 113611 - DNA, 80 bp, synthetic construct
  misc_feature 1..80: note = Artificially Synthesized Probe
  source 1..80: mol_type = other DNA
aaactcctctaaagtcccacagtggtttagctgtatggactgtccaacaggtttacaggaacagaaatattcctataaat

SEQ ID NO: 113612 - DNA, 80 bp, synthetic construct
  misc_feature 1..80: note = Artificially Synthesized Probe
  source 1..80: mol_type = other DNA
agtctcaaccaggacagctcttctcctctggagtccctaagaaggtggcttaggagcgtgctcccctttctggtgcacgt

SEQ ID NO: 113613 - DNA, 80 bp, synthetic construct
  misc_feature 1..80: note = Artificially Synthesized Probe
  source 1..80: mol_type = other DNA
tttttttttttttaacgcactcacacaacctgaagttagacagttcccgacacttgagctcctcctcccttgggaagagc

SEQ ID NO: 113614 - DNA, 80 bp, synthetic construct
  misc_feature 1..80: note = Artificially Synthesized Probe
  source 1..80: mol_type = other DNA
ctgaaatctacctaacaaagctgcacgtggtaaaaaatacagcaaatataaaaacagttctttctttctatcactatttt

SEQ ID NO: 113615 - DNA, 80 bp, synthetic construct; identical to SEQ ID NO: 37434
  misc_feature 1..80: note = Artificially Synthesized Probe
  source 1..80: mol_type = other DNA

SEQ ID NO: 113616 - DNA, 80 bp, synthetic construct
  misc_feature 1..80: note = Artificially Synthesized Probe
  source 1..80: mol_type = other DNA
aaagatagggcaaaaaacttaggtttatgtgttcaagaacaaacattttcatcgacttcttccaattccttagaaatata

SEQ ID NO: 113617 - DNA, 80 bp, synthetic construct
  misc_feature 1..80: note = Artificially Synthesized Probe
  source 1..80: mol_type = other DNA
atatatatattctataattctcactgcccttttctacaaaactcaaatcagtgaccaccaactgaaccctaggatcaaga

SEQ ID NO: 113618 - DNA, 80 bp, synthetic construct; identical to SEQ ID NO: 37435
  misc_feature 1..80: note = Artificially Synthesized Probe
  source 1..80: mol_type = other DNA

SEQ ID NO: 113619 - DNA, 80 bp, synthetic construct
  misc_feature 1..80: note = Artificially Synthesized Probe
  source 1..80: mol_type = other DNA
gctggaatagtcacattccttaggctcaccagagtctaaagcctccacctgaatccaaggagcttcctccagggaagaga

SEQ ID NO: 113620 - DNA, 80 bp, synthetic construct
  misc_feature 1..80: note = Artificially Synthesized Probe
  source 1..80: mol_type = other DNA
tcctcctggccccatggtctctgatggtcatgcatcttttctcatgtttatgtttcatttccccttagtcagcaatgggc

SEQ ID NO: 113621 - DNA, 80 bp, synthetic construct
  misc_feature 1..80: note = Artificially Synthesized Probe
  source 1..80: mol_type = other DNA
gagagaatcatctgggagagtaatctgtgtcagtttggacaagaacaaaggaggatatttaagcacataaaaaacacaga

SEQ ID NO: 113622 - DNA, 80 bp, synthetic construct; identical to SEQ ID NO: 37436
  misc_feature 1..80: note = Artificially Synthesized Probe
  source 1..80: mol_type = other DNA

SEQ ID NO: 113623 - DNA, 80 bp, synthetic construct
  misc_feature 1..80: note = Artificially Synthesized Probe
  source 1..80: mol_type = other DNA
tacacagtgacctgtgaatctgattcataatccaaggactgagaagaatcacaatgggaaaacactgatgagcaattatt

SEQ ID NO: 113624 - DNA, 80 bp, synthetic construct
  misc_feature 1..80: note = Artificially Synthesized Probe
  source 1..80: mol_type = other DNA
gcccagctaatttttgtagtttttagtagaggtggagtttcaccatcttggccaggctggtcttgaactcctgacctcgt

SEQ ID NO: 113625 - DNA, 80 bp, synthetic construct
  misc_feature 1..80: note = Artificially Synthesized Probe
  source 1..80: mol_type = other DNA
tgacagctgaaagcaaacctgtttctaaatgtggcttatgaatgttctaatcaggtgtggaaggagctgacacacggaga

SEQ ID NO: 113626 - DNA, 80 bp, synthetic construct
  misc_feature 1..80: note = Artificially Synthesized Probe
  source 1..80: mol_type = other DNA
aaaaaaaaggtagtgagtaaaagatgtgaatatctagcaaaaaggagagccgctgaatgtctccactttggggaattctg

SEQ ID NO: 113627 - DNA, 80 bp, synthetic construct; identical to SEQ ID NO: 37437
  misc_feature 1..80: note = Artificially Synthesized Probe
  source 1..80: mol_type = other DNA

SEQ ID NO: 113628 - DNA, 80 bp, synthetic construct
  misc_feature 1..80: note = Artificially Synthesized Probe
  source 1..80: mol_type = other DNA
acaccaagctctgcctctctctctgcccctgatacaacagcaggaacccgaagctgcccaacagccacagtgtcagtttt

SEQ ID NO: 113629 - DNA, 80 bp, synthetic construct
  misc_feature 1..80: note = Artificially Synthesized Probe
  source 1..80: mol_type = other DNA
tggctctgccccctccccacaaccacgcagccacgggaggctgcaggttcccatcttgaccttcatggacttgaccttca

SEQ ID NO: 113630 - DNA, 80 bp, synthetic construct
  misc_feature 1..80: note = Artificially Synthesized Probe
  source 1..80: mol_type = other DNA
ttttcaggtcctcgaacgtgtgtgccgccgatagattgcagtagaccctgtagtcgtggtagggtgggatcccgtggtcc

SEQ ID NO: 113631 - DNA, 80 bp, synthetic construct; identical to SEQ ID NO: 37438
  misc_feature 1..80: note = Artificially Synthesized Probe
  source 1..80: mol_type = other DNA

SEQ ID NO: 113632 - DNA, 80 bp, synthetic construct
  misc_feature 1..80: note = Artificially Synthesized Probe
  source 1..80: mol_type = other DNA
tgatgtgctggatctccgcacccacgatcttcctggtctcatagtagatggtgtcgccgtcccagtgcgggttcagcttg

SEQ ID NO: 113633 - DNA, 80 bp, synthetic construct
  misc_feature 1..80: note = Artificially Synthesized Probe
  source 1..80: mol_type = other DNA
ggagcagcggcttcccggaccgctgcacgatgccctgccgcagcaggccgcggtggctggccaggtcgcggatgctgcgg

SEQ ID NO: 113634 - DNA, 80 bp, synthetic construct
  misc_feature 1..80: note = Artificially Synthesized Probe
  source 1..80: mol_type = other DNA
tggcccgggagtcattgggggggatcatgacagagaagcagggggggtcgttgctgcacacgttgctgcagtgctgtccg

SEQ ID NO: 113635 - DNA, 80 bp, synthetic construct
  misc_feature 1..80: note = Artificially Synthesized Probe
  source 1..80: mol_type = other DNA
gcccgttgtacagtcggtgggggttgatgccccgaggggtgttgaagccattctcgtacacggatttcagcaggcgctcg

SEQ ID NO: 113636 - DNA, 80 bp, synthetic construct
  misc_feature 1..80: note = Artificially Synthesized Probe
  source 1..80: mol_type = other DNA
gtgaacgctctcatcaaaggttctgttccgtttgccaaacaccaattttctttttaaacatagcttgtgatggaaccccg

SEQ ID NO: 113637 - DNA, 80 bp, synthetic construct; identical to SEQ ID NO: 37439
  misc_feature 1..80: note = Artificially Synthesized Probe
  source 1..80: mol_type = other DNA

SEQ ID NO: 113638 - DNA, 80 bp, synthetic construct
  misc_feature 1..80: note = Artificially Synthesized Probe
  source 1..80: mol_type = other DNA
ctctccacagccccagtttctgggccctgtctcccctccccacttagcagtctcatggtttcaaccagcagctctcctct

SEQ ID NO: 113639 - DNA, 80 bp, synthetic construct
  misc_feature 1..80: note = Artificially Synthesized Probe
  source 1..80: mol_type = other DNA
acctgtcactgcacatctcggtccactgaggcttcatgctgttccctcaacgtccaaaagagtgccacttcctttcacgc

SEQ ID NO: 113640 - DNA, 80 bp, synthetic construct; identical to SEQ ID NO: 37440
  misc_feature 1..80: note = Artificially Synthesized Probe
  source 1..80: mol_type = other DNA

SEQ ID NO: 113641 - DNA, 80 bp, synthetic construct
  misc_feature 1..80: note = Artificially Synthesized Probe
  source 1..80: mol_type = other DNA
ttcatacatcctaggccttcaccttcctcaacactcctcctttccaggcacatgtcatgcctgccgaaaagctacacaca

SEQ ID NO: 113642 - DNA, 80 bp, synthetic construct
  misc_feature 1..80: note = Artificially Synthesized Probe
  source 1..80: mol_type = other DNA
ctgcttgtcaagatcacaggtatcactatggacacctttaaagaaaacaagagacagccccttttctgtgggggagcggt

SEQ ID NO: 113643 - DNA, 80 bp, synthetic construct
  misc_feature 1..80: note = Artificially Synthesized Probe
  source 1..80: mol_type = other DNA
tgacttttcccagaggctgaaacagtgagctgaaacatctggccctattttcacagctactcttgggaagtcctacagaa

SEQ ID NO: 113644 - DNA, 80 bp, synthetic construct
  misc_feature 1..80: note = Artificially Synthesized Probe
  source 1..80: mol_type = other DNA
acccgccaaccagagcaggtggcaccgaccctggccccagtttcccaggactggtttgcccacatctgtcctcaccccat

SEQ ID NO: 113645 - DNA, 80 bp, synthetic construct; identical to SEQ ID NO: 37422
  misc_feature 1..80: note = Artificially Synthesized Probe
  source 1..80: mol_type = other DNA

SEQ ID NO: 113646 - DNA, 80 bp, synthetic construct; identical to SEQ ID NO: 37441
  misc_feature 1..80: note = Artificially Synthesized Probe
  source 1..80: mol_type = other DNA

SEQ ID NO: 113647 - DNA, 80 bp, synthetic construct
  misc_feature 1..80: note = Artificially Synthesized Probe
  source 1..80: mol_type = other DNA
tatgtgcaggggcctctctctggttttccatctgcatttctctggaaggtctgatctttgagggcagaggtttttatttc

SEQ ID NO: 113648 - DNA, 80 bp, synthetic construct
  misc_feature 1..80: note = Artificially Synthesized Probe
  source 1..80: mol_type = other DNA
ggggtgattttactctttcctttctgtctttccctgagtctaaatctttctataattggcatgtaatgacacacaatgga

SEQ ID NO: 113649 - DNA, 80 bp, synthetic construct; identical to SEQ ID NO: 37442
  misc_feature 1..80: note = Artificially Synthesized Probe
  source 1..80: mol_type = other DNA

SEQ ID NO: 113650 - DNA, 80 bp, synthetic construct
  misc_feature 1..80: note = Artificially Synthesized Probe
  source 1..80: mol_type = other DNA
tctccccaagaatgtgcctgggaggtgaggctggagtttcacccatcgagaaaagcagaaacatccagaggtctccaact

SEQ ID NO: 113651 - DNA, 80 bp, synthetic construct
  misc_feature 1..80: note = Artificially Synthesized Probe
  source 1..80: mol_type = other DNA
gcaacactctactccgaagacgggcatatatcaccctacaggtctcaattccacgtctctttcatttaaccattgaagaa

SEQ ID NO: 113652 - DNA, 80 bp, synthetic construct
  misc_feature 1..80: note = Artificially Synthesized Probe
  source 1..80: mol_type = other DNA
aaccatgagtaaccagctgctgctgaaaatgatgtttttacatgagaaagtcagggtcttctatgggttcatcaatagta

SEQ ID NO: 113653 - DNA, 80 bp, synthetic construct
  misc_feature 1..80: note = Artificially Synthesized Probe
  source 1..80: mol_type = other DNA
cttccaaaacaaccctcctaatacgcgtggcaccgcattcccaggacacaacgtcactcagggagcaagcacgctgccaa

SEQ ID NO: 113654 - DNA, 80 bp, synthetic construct; identical to SEQ ID NO: 37443
  misc_feature 1..80: note = Artificially Synthesized Probe
  source 1..80: mol_type = other DNA

SEQ ID NO: 113655 - DNA, 80 bp, synthetic construct
  misc_feature 1..80: note = Artificially Synthesized Probe
  source 1..80: mol_type = other DNA
tgcactgccttctgtaacagcaccagctggacgttgtcatgaaatgtcacgagttctgggtgtttcctggtctgcagtcc

SEQ ID NO: 113656 - DNA, 80 bp, synthetic construct
  misc_feature 1..80: note = Artificially Synthesized Probe
  source 1..80: mol_type = other DNA
agccatgctgtacatgctcctgaatgagctgcaatgtccgttcaaagatttctcccgcccgtgcctgttcaactgtgtaa

SEQ ID NO: 113657 - DNA, 80 bp, synthetic construct
  misc_feature 1..80: note = Artificially Synthesized Probe
  source 1..80: mol_type = other DNA
cccaaaatataatcattgctattaatatttctacggctactttctacaacataatgtactataccttcctcatccgaagt

SEQ ID NO: 113658 - DNA, 80 bp, synthetic construct
  misc_feature 1..80: note = Artificially Synthesized Probe
  source 1..80: mol_type = other DNA
actgctttggaatcagcaacgtgaacaaatacactaatgacttttaaactatttgtttttgccaaatcatttagtcataa

SEQ ID NO: 113659 - DNA, 80 bp, synthetic construct; identical to SEQ ID NO: 37444
  misc_feature 1..80: note = Artificially Synthesized Probe
  source 1..80: mol_type = other DNA

SEQ ID NO: 113660 - DNA, 80 bp, synthetic construct
  misc_feature 1..80: note = Artificially Synthesized Probe
  source 1..80: mol_type = other DNA
tcgactgacgtcaggaactaggaaaatacaaagtcgcgtattaccaggaaaaatactgcacaattactcataaaatgatg

SEQ ID NO: 113661 - DNA, 80 bp, synthetic construct
  misc_feature 1..80: note = Artificially Synthesized Probe
  source 1..80: mol_type = other DNA
agaagaagacaggaagtagttataatgtgaagcatggaagatcttacgctatatgcaacagcatgtgggaggtgtggact

SEQ ID NO: 113662 - DNA, 80 bp, synthetic construct
  misc_feature 1..80: note = Artificially Synthesized Probe
  source 1..80: mol_type = other DNA
catcttctcacctgtggacttgtatcattacacagggaaactccctcctcacacacaccacacaccacacacacacaatc

SEQ ID NO: 113663 - DNA, 80 bp, synthetic construct; identical to SEQ ID NO: 37445
  misc_feature 1..80: note = Artificially Synthesized Probe
  source 1..80: mol_type = other DNA

SEQ ID NO: 113664 - DNA, 80 bp, synthetic construct
  misc_feature 1..80: note = Artificially Synthesized Probe
  source 1..80: mol_type = other DNA
acacacacaaatcacattgcacaaacacaccagaggtatgcaccacacactgcacattatacacagacacacagacacca

SEQ ID NO: 113665 - DNA, 80 bp, synthetic construct
  misc_feature 1..80: note = Artificially Synthesized Probe
  source 1..80: mol_type = other DNA
cctcctgactgaaacctgccccctcctgactgaaacatgcccccttcagacagggacctaccccctcctgacacatgcca

SEQ ID NO: 113666 - DNA, 80 bp, synthetic construct
  misc_feature 1..80: note = Artificially Synthesized Probe
  source 1..80: mol_type = other DNA
caagcttccacgaagcaggtgacctgcccgtcctggagaagagagacggagcacagcctgtcagctctgggatggccttc

SEQ ID NO: 113667 - DNA, 80 bp, synthetic construct
  misc_feature 1..80: note = Artificially Synthesized Probe
  source 1..80: mol_type = other DNA
cgcagacattttggtttgaattacagaattttttttggtaaatcacagtcagcttccccctttggcttagacaacacaat

SEQ ID NO: 113668 - DNA, 80 bp, synthetic construct
  misc_feature 1..80: note = Artificially Synthesized Probe
  source 1..80: mol_type = other DNA
accacacaaatacaacacacccagcaccttataaataacacgcacatagcccatcaaacatatagatacacacgacacta

SEQ ID NO: 113669 - DNA, 80 bp, synthetic construct; identical to SEQ ID NO: 37446
  misc_feature 1..80: note = Artificially Synthesized Probe
  source 1..80: mol_type = other DNA

SEQ ID NO: 113670 - DNA, 80 bp, synthetic construct
  misc_feature 1..80: note = Artificially Synthesized Probe
  source 1..80: mol_type = other DNA
aaagttgatttcatttttcttcaacatacgcaatcttttgacagacgctgacacagcccaacacacccttacaaaaaagc

SEQ ID NO: 113671 - DNA, 80 bp, synthetic construct
  misc_feature 1..80: note = Artificially Synthesized Probe
  source 1..80: mol_type = other DNA
ataaaactggtcccctcatgacaggcacctgcacactcctgactgaaatctgccccatcccgactgggacctgcccccct

SEQ ID NO: 113672 - DNA, 80 bp, synthetic construct
  misc_feature 1..80: note = Artificially Synthesized Probe
  source 1..80: mol_type = other DNA
acttgccccctcctgactgaaacctgccctctccggacagggacctaccccctcctgactggaacctgtcccctcctgac

SEQ ID NO: 113673 - DNA, 80 bp, synthetic construct; identical to SEQ ID NO: 37447
  misc_feature 1..80: note = Artificially Synthesized Probe
  source 1..80: mol_type = other DNA

SEQ ID NO: 113674 - DNA, 80 bp, synthetic construct
  misc_feature 1..80: note = Artificially Synthesized Probe
  source 1..80: mol_type = other DNA
caacctgactgaaaccagccccaacctgactgaaacctgccaactcctgactgagacctgtcttctcctgaaggggacct

SEQ ID NO: 113675 - DNA, 80 bp, synthetic construct
  misc_feature 1..80: note = Artificially Synthesized Probe
  source 1..80: mol_type = other DNA
aaacctggctgctgactgaaagcagctccctcctaacagggacctgccccctactgacaaggaactaccctctcttgaca

SEQ ID NO: 113676 - DNA, 80 bp, synthetic construct
  misc_feature 1..80: note = Artificially Synthesized Probe
  source 1..80: mol_type = other DNA
ctgacaggaacctgccccctgttgtctggaacctgtccccacctgacaggcacttgcaccctccagattgggacccgccc

SEQ ID NO: 113677 - DNA, 80 bp, synthetic construct; identical to SEQ ID NO: 37448
  misc_feature 1..80: note = Artificially Synthesized Probe
  source 1..80: mol_type = other DNA

SEQ ID NO: 113678 - DNA, 80 bp, synthetic construct
  misc_feature 1..80: note = Artificially Synthesized Probe
  source 1..80: mol_type = other DNA
ctccctgtgtggttccacttcacgctgttgtcttcaaatttacaccatcgtcctgacctctccctgcagctcacttcgtg

SEQ ID NO: 113679 - DNA, 80 bp, synthetic construct
  misc_feature 1..80: note = Artificially Synthesized Probe
  source 1..80: mol_type = other DNA
agcccccataacaagtctccctgaggctcccgtcccacccttccgtccatgcccacggtcctctcaccctgaggggccaa

SEQ ID NO: 113680 - DNA, 80 bp, synthetic construct
  misc_feature 1..80: note = Artificially Synthesized Probe
  source 1..80: mol_type = other DNA
aggccccctcagatctgctactggccacgagcccagggaccagccccgcagaccccagctgtgggcccgggtgcaggcac

SEQ ID NO: 113681 - DNA, 80 bp, synthetic construct
  misc_feature 1..80: note = Artificially Synthesized Probe
  source 1..80: mol_type = other DNA
gtcgagctctgcagcccagttagcaccaggacccccaggactgccccagccctgtgctccccaccccccggcatcgggct

SEQ ID NO: 113682 - DNA, 80 bp, synthetic construct; identical to SEQ ID NO: 37449
  misc_feature 1..80: note = Artificially Synthesized Probe
  source 1..80: mol_type = other DNA

SEQ ID NO: 113683 - DNA, 80 bp, synthetic construct
  misc_feature 1..80: note = Artificially Synthesized Probe
  source 1..80: mol_type = other DNA
cttctgaaccatcttcttacaacatgtgctcacaccggactatggatggacatctccagcctgatttatttcaccgctaa

SEQ ID NO: 113684 - DNA, 80 bp, synthetic construct
  misc_feature 1..80: note = Artificially Synthesized Probe
  source 1..80: mol_type = other DNA
tggtgtgtatctcagagcccaaatttactaatttttggaatgcaatatttttatgccaataggtagataaatgagacata

SEQ ID NO: 113685 - DNA, 80 bp, synthetic construct
  misc_feature 1..80: note = Artificially Synthesized Probe
  source 1..80: mol_type = other DNA
tatttttgggggatggaattacgggtggacgattaaatttcagatgtaattaattcatgttaaggtagcatttttcaagc

SEQ ID NO: 113686 - DNA, 80 bp, synthetic construct; identical to SEQ ID NO: 37450
  misc_feature 1..80: note = Artificially Synthesized Probe
  source 1..80: mol_type = other DNA

SEQ ID NO: 113687 - DNA, 80 bp, synthetic construct
  misc_feature 1..80: note = Artificially Synthesized Probe
  source 1..80: mol_type = other DNA
tcagagtgttgctaactctagggggacagagcaggagtggggaacacaccactgatgaggcgcaggtttgggtcacactg

SEQ ID NO: 113688 - DNA, 80 bp, synthetic construct
  misc_feature 1..80: note = Artificially Synthesized Probe
  source 1..80: mol_type = other DNA
gccaagggcctcggggtgagtgggatggaagtggtggcggaccaggatgcaaacagacagatgcaggcatggagtcagga

SEQ ID NO: 113689 - DNA, 80 bp, synthetic construct; identical to SEQ ID NO: 37451
  misc_feature 1..80: note = Artificially Synthesized Probe
  source 1..80: mol_type = other DNA

SEQ ID NO: 113690 - DNA, 80 bp, synthetic construct
  misc_feature 1..80: note = Artificially Synthesized Probe
  source 1..80: mol_type = other DNA
ggacactgatgcgcgtcctctcccaatggccatggcaagagaagtgcccgggctggcgcgctgtcctccccatcctgcct

SEQ ID NO: 113691 - DNA, 80 bp, synthetic construct
  misc_feature 1..80: note = Artificially Synthesized Probe
  source 1..80: mol_type = other DNA
aggagagtgtccccacctgggaatcaagggtgctttgtcttctgaataattctgaacagcctaagtcaactggcctggga

SEQ ID NO: 113692 - DNA, 80 bp, synthetic construct
  misc_feature 1..80: note = Artificially Synthesized Probe
  source 1..80: mol_type = other DNA
attgatggtcaagaatccttcagggctgatgtgaaattttccactttctgtcacctgaaccccatcctggagcaaaacag

SEQ ID NO: 113693 - DNA, 80 bp, synthetic construct
  misc_feature 1..80: note = Artificially Synthesized Probe
  source 1..80: mol_type = other DNA
agtgccaagctggcgagataaactcttcccacatctcattctttgggagaacagagcttgacagcttgaggcaaggatga

SEQ ID NO: 113694 - DNA, 80 bp, synthetic construct
  misc_feature 1..80: note = Artificially Synthesized Probe
  source 1..80: mol_type = other DNA
cccagctgaggcaggaacaagagcagatgcctggggtgtgtgtggcgaggaagaaaaggacacagagattcacagggcag

SEQ ID NO: 113695 - DNA, 80 bp, synthetic construct; identical to SEQ ID NO: 37452
  misc_feature 1..80: note = Artificially Synthesized Probe
  source 1..80: mol_type = other DNA

SEQ ID NO: 113696 - DNA, 80 bp, synthetic construct
  misc_feature 1..80: note = Artificially Synthesized Probe
  source 1..80: mol_type = other DNA
cccatcataccccacagcagaggggaggctggggcgtgggcactggtccgcctaccttgctccaggtagtgggtggtgtg

SEQ ID NO: 113697 - DNA, 80 bp, synthetic construct
  misc_feature 1..80: note = Artificially Synthesized Probe
  source 1..80: mol_type = other DNA
aacactggggtgactggaaggcagatgtagagaatccaggagaacgagtcaattacatcaaaaaacttcagaagaacaaa

SEQ ID NO: 113698 - DNA, 80 bp, synthetic construct
  misc_feature 1..80: note = Artificially Synthesized Probe
  source 1..80: mol_type = other DNA
gagcaaagcatagccagtgtcttccctgctcagagacagacagccgcagggtccaggatgggctggctgccatgtcctcc

SEQ ID NO: 113699 - DNA, 80 bp, synthetic construct; identical to SEQ ID NO: 37453
  misc_feature 1..80: note = Artificially Synthesized Probe
  source 1..80: mol_type = other DNA

SEQ ID NO: 113700 - DNA, 80 bp, synthetic construct
  misc_feature 1..80: note = Artificially Synthesized Probe
  source 1..80: mol_type = other DNA
cccactccccatggtccccatgacaagctcagggtctgtggcaacctggattactcagctctgggggccactcatgctaa

SEQ ID NO: 113701 - DNA, 80 bp, synthetic construct; identical to SEQ ID NO: 37423
  misc_feature 1..80: note = Artificially Synthesized Probe
  source 1..80: mol_type = other DNA

SEQ ID NO: 113702 - DNA, 80 bp, synthetic construct
  misc_feature 1..80: note = Artificially Synthesized Probe
  source 1..80: mol_type = other DNA
gaacaagatgaagaccagggtccaaggatgagcgggcagacgggaaagaaactggatttggcctcatgatacatcatctg

SEQ ID NO: 113703 - DNA, 80 bp, synthetic construct; identical to SEQ ID NO: 37454
  misc_feature 1..80: note = Artificially Synthesized Probe
  source 1..80: mol_type = other DNA

SEQ ID NO: 113704 - DNA, 80 bp, synthetic construct
  misc_feature 1..80: note = Artificially Synthesized Probe
  source 1..80: mol_type = other DNA
ctgcacagtcaggtgggccacgaccttctgggagccgatgatgttgacagcctggcattcgtactggccctggtcgtgga

SEQ ID NO: 113705 - DNA, 80 bp, synthetic construct
  misc_feature 1..80: note = Artificially Synthesized Probe
  source 1..80: mol_type = other DNA
ctccacctgggtcggggcgccggataatttggcctggccctgcataagcaaatctttgcctccccagcagacaccatggt

SEQ ID NO: 113706 - DNA, 80 bp, synthetic construct
  misc_feature 1..80: note = Artificially Synthesized Probe
  source 1..80: mol_type = other DNA
ctggagatgacgaagagccaagcgaggccccagcaagttcctttccgggataaacctctcctgttcttgcccataactgc

SEQ ID NO: 113707 - DNA, 80 bp, synthetic construct
  misc_feature 1..80: note = Artificially Synthesized Probe
  source 1..80: mol_type = other DNA
ccaggacaggaaccaggaggtctgcgtagctccttctccagcagtttcagctcctgccctcaccccaacccccatccagg

SEQ ID NO: 113708 - DNA, 80 bp, synthetic construct; identical to SEQ ID NO: 37455
  misc_feature 1..80: note = Artificially Synthesized Probe
  source 1..80: mol_type = other DNA

SEQ ID NO: 113709 - DNA, 80 bp, synthetic construct
  misc_feature 1..80: note = Artificially Synthesized Probe
  source 1..80: mol_type = other DNA
gcttcccagtgccttggtcctgtggaatccagtcccagctcagccctgtccagaacacgctggggttgcctgggcacagt

SEQ ID NO: 113710 - DNA, 80 bp, synthetic construct
  misc_feature 1..80: note = Artificially Synthesized Probe
  source 1..80: mol_type = other DNA
cgtcacagtgaactgaggaagagcttccggagagaaagcattcaaaacaggacatgtaaaaaacagcctggggtaaaaac

SEQ ID NO: 113711 - DNA, 80 bp, synthetic construct
  misc_feature 1..80: note = Artificially Synthesized Probe
  source 1..80: mol_type = other DNA
acaaagaccgttcaaccacaccgccagctgcaatgcacacggggcacggatgaggacacactgcagctcgtggacaccag

SEQ ID NO: 113712 - DNA, 80 bp, synthetic construct
  misc_feature 1..80: note = Artificially Synthesized Probe
  source 1..80: mol_type = other DNA
tggtgcttccataggagtgaaggagggatggaggccagcacaggtaggcggggaggggcctggccctgacatctgggcca

SEQ ID NO: 113713 - DNA, 80 bp, synthetic construct; identical to SEQ ID NO: 37456
  misc_feature 1..80: note = Artificially Synthesized Probe
  source 1..80: mol_type = other DNA

SEQ ID NO: 113714 - DNA, 80 bp, synthetic construct
  misc_feature 1..80: note = Artificially Synthesized Probe
  source 1..80: mol_type = other DNA
caatgtagaaatccatggcagatggcgtaaaacgatgaatactcccagattacatccaaaactgaccttagggaaggatt

SEQ ID NO: 113715 - DNA, 80 bp, synthetic construct
  misc_feature 1..80: note = Artificially Synthesized Probe
  source 1..80: mol_type = other DNA
ctacagagccttctgttccaaaaatctacaaactgcagtcgtctgtatttagtccaaggggggtgtaatggataaaaatc

SEQ ID NO: 113716 - DNA, 80 bp, synthetic construct
  misc_feature 1..80: note = Artificially Synthesized Probe
  source 1..80: mol_type = other DNA
atgttgttggtcgcagagcacgcatactctccgctgtccccctgtacgacgttctgtatgtaaagcccgccagaaggcgt

SEQ ID NO: 113717 - DNA, 80 bp, synthetic construct; identical to SEQ ID NO: 37457
  misc_feature 1..80: note = Artificially Synthesized Probe
  source 1..80: mol_type = other DNA

SEQ ID NO: 113718 - DNA, 80 bp, synthetic construct
  misc_feature 1..80: note = Artificially Synthesized Probe
  source 1..80: mol_type = other DNA
tgagaaaagtgagcaaccatgatcggttaggaagagctaattaggaagcgctttttcttaaaacatgtgccgaactccat

SEQ ID NO: 113719 - DNA, 80 bp, synthetic construct
  misc_feature 1..80: note = Artificially Synthesized Probe
  source 1..80: mol_type = other DNA
tatttttcaaatttaaatccagaaaaaagtccatacaattatgaatgtgtttcatgtgtgagtttgtgtggaaacagaac

SEQ ID NO: 113720 - DNA, 80 bp, synthetic construct
  misc_feature 1..80: note = Artificially Synthesized Probe
  source 1..80: mol_type = other DNA
tgaaggagacagagacacgaaaaacccttcaaacaaaaatgaatccaggagctggattaatttgaaaagattaacaaaat

SEQ ID NO: 113721 - DNA, 80 bp, synthetic construct; identical to SEQ ID NO: 37458
  misc_feature 1..80: note = Artificially Synthesized Probe
  source 1..80: mol_type = other DNA

SEQ ID NO: 113722 - DNA, 80 bp, synthetic construct
  misc_feature 1..80: note = Artificially Synthesized Probe
  source 1..80: mol_type = other DNA
ccaataatagacaagcagagagccaaatcatgagtgaactcccattcatgattgctacaaagaaaataaaatacctagga

SEQ ID NO: 113723 - DNA, 80 bp, synthetic construct
  misc_feature 1..80: note = Artificially Synthesized Probe
  source 1..80: mol_type = other DNA
gattcaatgctactcccatcaagctaccattgactttcttcacagagctagaaaaaactactttaaatttcatatggacc

SEQ ID NO: 113724 - DNA, 80 bp, synthetic construct
  misc_feature 1..80: note = Artificially Synthesized Probe
  source 1..80: mol_type = other DNA
ggtactgagccgtgattcaagtttctttatctgcagcaatgcaaagaacattcattcattgggcacttcagagtaacagc

SEQ ID NO: 113725 - DNA, 80 bp, synthetic construct; identical to SEQ ID NO: 37459
  misc_feature 1..80: note = Artificially Synthesized Probe
  source 1..80: mol_type = other DNA

SEQ ID NO: 113726 - DNA, 80 bp, synthetic construct
  misc_feature 1..80: note = Artificially Synthesized Probe
  source 1..80: mol_type = other DNA
cattcaggacacaggcatgggcaaagactttgtgactaaaacaccaaaagcaattgcaacaaaagccaaaagtgacaaat

SEQ ID NO: 113727 - DNA, 80 bp, synthetic construct
  misc_feature 1..80: note = Artificially Synthesized Probe
  source 1..80: mol_type = other DNA
aaaacaaccccatctaaaagtgggttaaggatatgaacagacacttctcaaaagaaatttatgtggccaacaaacatatg

SEQ ID NO: 113728 - DNA, 80 bp, synthetic construct
  misc_feature 1..80: note = Artificially Synthesized Probe
  source 1..80: mol_type = other DNA
gattgtaaattggttcaaccattgtggaagacaatgtggcgattcctcaaggatctagaaccagaaatataatttgaccc

SEQ ID NO: 113729 - DNA, 80 bp, synthetic construct
  misc_feature 1..80: note = Artificially Synthesized Probe
  source 1..80: mol_type = other DNA
catacacaccatggaatactatgcagccataaaaaagaatgagttcatgtcctttgcaggaacatggaaaaagctggaaa

SEQ ID NO: 113730 - DNA, 80 bp, synthetic construct; identical to SEQ ID NO: 37460
  misc_feature 1..80: note = Artificially Synthesized Probe
  source 1..80: mol_type = other DNA

SEQ ID NO: 113731 - DNA, 80 bp, synthetic construct
  misc_feature 1..80: note = Artificially Synthesized Probe
  source 1..80: mol_type = other DNA
gaaacttaatccatagatatttttacaagcacataaaatgtcatatgtccaaataaatttttgtttgggtcagacgtggt

SEQ ID NO: 113732 - DNA, 80 bp, synthetic construct
  misc_feature 1..80: note = Artificially Synthesized Probe
  source 1..80: mol_type = other DNA
ggcaggttgaggcaggagaatcacttgaaccagggagtcagaggttgcagtgagctgagatcttaccactgcactccagc

SEQ ID NO: 113733 - DNA, 80 bp, synthetic construct; identical to SEQ ID NO: 37461
  misc_feature 1..80: note = Artificially Synthesized Probe
  source 1..80: mol_type = other DNA

SEQ ID NO: 113734 - DNA, 80 bp, synthetic construct
  misc_feature 1..80: note = Artificially Synthesized Probe
  source 1..80: mol_type = other DNA
aggcttttgaataaataacacacaactgtgatagctaaagatttggaaaaaaatctaaactcactccaaaagagaacttg

SEQ ID NO: 113735 - DNA, 80 bp, synthetic construct; identical to SEQ ID NO: 37424
  misc_feature 1..80: note = Artificially Synthesized Probe
  source 1..80: mol_type = other DNA

SEQ ID NO: 113736 - DNA, 80 bp, synthetic construct
  misc_feature 1..80: note = Artificially Synthesized Probe
  source 1..80: mol_type = other DNA
atagataggaaagaaactactaagcattttgggaagaggggaagggaataggagttgagcggatgacgaaaagagccagg

SEQ ID NO: 113737 - DNA, 80 bp, synthetic construct
  misc_feature 1..80: note = Artificially Synthesized Probe
  source 1..80: mol_type = other DNA
ccaaagtcaaagtcggccttgagggcatctgcagacccttataacttaaatttagccttaagagcctcatgtgatacaga

SEQ ID NO: 113738 - DNA, 80 bp, synthetic construct
  misc_feature 1..80: note = Artificially Synthesized Probe
  source 1..80: mol_type = other DNA
gccccacccagggaacagtgcccagtagaagagagaaataaatctcatttaagtgttgttcaccaaaatccggtcctcac

SEQ ID NO: 113739 - DNA, 80 bp, synthetic construct; identical to SEQ ID NO: 37462
  misc_feature 1..80: note = Artificially Synthesized Probe
  source 1..80: mol_type = other DNA

SEQ ID NO: 113740 - DNA, 80 bp, synthetic construct
  misc_feature 1..80: note = Artificially Synthesized Probe
  source 1..80: mol_type = other DNA
aaagaacagaaatgggcacatagtgtccaaacaagtagtggggagcaaatatgaaaaataattatttccaactaaagcaa

SEQ ID NO: 113741 - DNA, 80 bp, synthetic construct
  misc_feature 1..80: note = Artificially Synthesized Probe
  source 1..80: mol_type = other DNA
tcaaatatatgcacatggaaaggctcggagaaaaatggtgggaaaagacacacctgccaatacgaatcaagtagaagctg

SEQ ID NO: 113742 - DNA, 80 bp, synthetic construct; identical to SEQ ID NO: 37463
  misc_feature 1..80: note = Artificially Synthesized Probe
  source 1..80: mol_type = other DNA

SEQ ID NO: 113743 - DNA, 80 bp, synthetic construct
  misc_feature 1..80: note = Artificially Synthesized Probe
  source 1..80: mol_type = other DNA
aatgacgcctgaatttcctctagctgtcatgtggtcataagatattgttcttcttttaaaagttttgatcatttaaaatt

SEQ ID NO: 113744 - DNA, 80 bp, synthetic construct
  misc_feature 1..80: note = Artificially Synthesized Probe
  source 1..80: mol_type = other DNA
tgtgtatctgagggagctacacccacatgctcagactagtatactaaatagggctgctgttcctgagaaagacacaacaa

SEQ ID NO: 113745 - DNA, 80 bp, synthetic construct
  misc_feature 1..80: note = Artificially Synthesized Probe
  source 1..80: mol_type = other DNA
cataacaaggtgacctttccaaccgctgtgccatgcacaggggtagcagaagcctcctggaagggtctccttcctcaaac

SEQ ID NO: 113746 - DNA, 80 bp, synthetic construct
  misc_feature 1..80: note = Artificially Synthesized Probe
  source 1..80: mol_type = other DNA
cagtactacataactttttctccctattttgtggattttttaattccttaaaaatacagcccatgctccttctatgagca

SEQ ID NO: 113747 - DNA, 80 bp, synthetic construct; identical to SEQ ID NO: 37464
  misc_feature 1..80: note = Artificially Synthesized Probe
  source 1..80: mol_type = other DNA

SEQ ID NO: 113748 - DNA, 80 bp, synthetic construct
  misc_feature 1..80: note = Artificially Synthesized Probe
  source 1..80: mol_type = other DNA
aaaataccagggaagcagcaaccctggcatgatttgtggctgaagctaaaggcagccagaaggtttcagagaggaagtta

SEQ ID NO: 113749 - DNA, 80 bp, synthetic construct
  misc_feature 1..80: note = Artificially Synthesized Probe
  source 1..80: mol_type = other DNA
cttctgagcaatggccatggataacacaggtggatcagagcagagtttgcaacctgatggggcccagatggatgagaggc

SEQ ID NO: 113750 - DNA, 80 bp, synthetic construct
  misc_feature 1..80: note = Artificially Synthesized Probe
  source 1..80: mol_type = other DNA
gctggctgtggctgagtagctgtcccttcagatggcgcctggggggtggggtcggtgggtcagggtgtggcaaggccctc

SEQ ID NO: 113751 - DNA, 80 bp, synthetic construct
  misc_feature 1..80: note = Artificially Synthesized Probe
  source 1..80: mol_type = other DNA
acttcagacttcaatgttcattcttattttggggtgcaaggaaaggagaaggcagatagtgagggacgacaattctggat

SEQ ID NO: 113752 - DNA, 80 bp, synthetic construct; identical to SEQ ID NO: 37465
  misc_feature 1..80: note = Artificially Synthesized Probe
  source 1..80: mol_type = other DNA

SEQ ID NO: 113753 - DNA, 80 bp, synthetic construct
  misc_feature 1..80: note = Artificially Synthesized Probe
  source 1..80: mol_type = other DNA
aggcaattctgaaaaggggaccgtgtatttgcacatctcattcactcaggtacttatccttagtattcacgtgttcaatc

SEQ ID NO: 113754 - DNA, 80 bp, synthetic construct
  misc_feature 1..80: note = Artificially Synthesized Probe
  source 1..80: mol_type = other DNA
ctttcgtttctggtgaattaactaaaaagggtagaaacatttttacattactaaaagccagagctgtatctatgtgtatt

SEQ ID NO: 113755 - DNA, 80 bp, synthetic construct
  misc_feature 1..80: note = Artificially Synthesized Probe
  source 1..80: mol_type = other DNA
atctgtattttaacaaacagtgcctgcaagctgctggttggcctccctctgggatctgggaggaacctgtggcactgcac

SEQ ID NO: 113756 - DNA, 80 bp, synthetic construct; identical to SEQ ID NO: 37466
  misc_feature 1..80: note = Artificially Synthesized Probe
  source 1..80: mol_type = other DNA

SEQ ID NO: 113757 - DNA, 80 bp, synthetic construct
  misc_feature 1..80: note = Artificially Synthesized Probe
  source 1..80: mol_type = other DNA
gaaaagtaaactcgcacctcattaaaaccatcctggatttggagttttccgtcccttgcatttgaacctaaactgtctgt

SEQ ID NO: 113758 - DNA, 80 bp, synthetic construct
  misc_feature 1..80: note = Artificially Synthesized Probe
  source 1..80: mol_type = other DNA
catcaccttccacgcgagtttcctaaggagcctgtgcagcctggaccaagctgggtcgctcatgcaggaggagcagcacc

SEQ ID NO: 113759 - DNA, 80 bp, synthetic construct
  misc_feature 1..80: note = Artificially Synthesized Probe
  source 1..80: mol_type = other DNA
cccacagggattgctggatggaagcaatgtcagcttaggccccataaacaagactctctctgatgtggcccaatcccccc

SEQ ID NO: 113760 - DNA, 80 bp, synthetic construct; identical to SEQ ID NO: 37467
  misc_feature 1..80: note = Artificially Synthesized Probe
  source 1..80: mol_type = other DNA

SEQ ID NO: 113761 - DNA, 80 bp, synthetic construct
  misc_feature 1..80: note = Artificially Synthesized Probe
  source 1..80: mol_type = other DNA
ttttcagtcatgaggataacaaaatctagagctggaacaaacctcccatgtcctcttcagcatgaacacatcttcccatt

SEQ ID NO: 113762 - DNA, 80 bp, synthetic construct
  misc_feature 1..80: note = Artificially Synthesized Probe
  source 1..80: mol_type = other DNA
gtttgtgcctcatcacagtttgagcccgagtatcaaacaatgactcagtttgagcccgagtatcacagggctcacatctc

SEQ ID NO: 113763 - DNA, 80 bp, synthetic construct; identical to SEQ ID NO: 37420
  misc_feature 1..80: note = Artificially Synthesized Probe
  source 1..80: mol_type = other DNA

SEQ ID NO: 113764 - DNA, 80 bp, synthetic construct
  misc_feature 1..80: note = Artificially Synthesized Probe
  source 1..80: mol_type = other DNA
agaaggtaggacatggtggctttacttcaggattttcttttaaggattcctttcaaaaggtcactttgaaagtgctccac

SEQ ID NO: 113765 - DNA, 80 bp, synthetic construct
  misc_feature 1..80: note = Artificially Synthesized Probe
  source 1..80: mol_type = other DNA
tttcacctcctcccatctcttccccctagactccatcactccttaaccaacacagccccagctcacaaaccccagcagcg

SEQ ID NO: 113766 - DNA, 80 bp, synthetic construct; identical to SEQ ID NO: 37468
  misc_feature 1..80: note = Artificially Synthesized Probe
  source 1..80: mol_type = other DNA

SEQ ID NO: 113767 - DNA, 80 bp, synthetic construct
  misc_feature 1..80: note = Artificially Synthesized Probe
  source 1..80: mol_type = other DNA
caggcagggagagaacaaccagcatgctctccctccctcccaccgggaagggccgcagtgacgcgttgcccagccagggc

SEQ ID NO: 113768 - DNA, 80 bp, synthetic construct
  misc_feature 1..80: note = Artificially Synthesized Probe
  source 1..80: mol_type = other DNA
agccacccacttactcatgtcaattaaaacatcttctttgatctcctgtcagccataagtgtgtggtccccaacctgtgc

SEQ ID NO: 113769 - DNA, 80 bp, synthetic construct
  misc_feature 1..80: note = Artificially Synthesized Probe
  source 1..80: mol_type = other DNA
agtgaggtgtggtttgggtgtctgagtgtaactccgagagatgcacaggggcatttctgtttggccccaactcacttgtt

SEQ ID NO: 113770 - DNA, 80 bp, synthetic construct; identical to SEQ ID NO: 37469
  misc_feature 1..80: note = Artificially Synthesized Probe
  source 1..80: mol_type = other DNA

SEQ ID NO: 113771 - DNA, 80 bp, synthetic construct
  misc_feature 1..80: note = Artificially Synthesized Probe
  source 1..80: mol_type = other DNA
ctcgaggccctctgggaaagccaaacacctgtgcggagtggatacgccacgggtcgctattttcactgaagaaaagacaa

SEQ ID NO: 113772 - DNA, 80 bp, synthetic construct
  misc_feature 1..80: note = Artificially Synthesized Probe
  source 1..80: mol_type = other DNA
cctcctgcgtgcccgtgactccacatggcttccgagggccatccgagggccacccgagggctgacggctcccaggccttc

SEQ ID NO: 113773 - DNA, 80 bp, synthetic construct
  misc_feature 1..80: note = Artificially Synthesized Probe
  source 1..80: mol_type = other DNA
gcgaatctgtctccatgtacattctgtgagcatcacgagaagaaaaacacaaccacacacaggtgtgtacaagtgagtgc

SEQ ID NO: 113774 - DNA, 80 bp, synthetic construct
  misc_feature 1..80: note = Artificially Synthesized Probe
  source 1..80: mol_type = other DNA
tccccagcattgcacagcccgggtcaggaggctggggcggctctgcccagccctccctgtgctcccgtcactctgggaac

SEQ ID NO: 113775 - DNA, 80 bp, synthetic construct; identical to SEQ ID NO: 37470
  misc_feature 1..80: note = Artificially Synthesized Probe
  source 1..80: mol_type = other DNA

SEQ ID NO: 113776 - DNA, 80 bp, synthetic construct
  misc_feature 1..80: note = Artificially Synthesized Probe
  source 1..80: mol_type = other DNA
cagccaaattggagtaaggagtaaaagtatgacaaagtctccaagggcacaacctcagcactgtgattacggaaggccat

SEQ ID NO: 113777 - DNA, 80 bp, synthetic construct
  misc_feature 1..80: note = Artificially Synthesized Probe
  source 1..80: mol_type = other DNA
ttcagggacgcaggtggggcagctccttccactgagggccgtttctgggagctgttgacagccagtgccctgcggagctg

SEQ ID NO: 113778 - DNA, 80 bp, synthetic construct; identical to SEQ ID NO: 37471
  misc_feature 1..80: note = Artificially Synthesized Probe
  source 1..80: mol_type = other DNA

SEQ ID NO: 113779 - DNA, 80 bp, synthetic construct; identical to SEQ ID NO: 37425
  misc_feature 1..80: note = Artificially Synthesized Probe
  source 1..80: mol_type = other DNA

SEQ ID NO: 113780 - DNA, 80 bp, synthetic construct
  misc_feature 1..80: note = Artificially Synthesized Probe
  source 1..80: mol_type = other DNA
tggtgtgtgcgtgtatgtgcgtgtgtgtggtttgtgtctgcatgtgtgtgtctataaatggtgtgtgtagatggcatgtg

SEQ ID NO: 113781 - DNA, 80 bp, synthetic construct
  misc_feature 1..80: note = Artificially Synthesized Probe
  source 1..80: mol_type = other DNA
tgcgtgtgtggtgtgtgtgtgtatgtgcgtgtgtgtgtggatggtttatgtctgtgtgtctataaatggtttgtgtgtaa

SEQ ID NO: 113782 - DNA, 80 bp, synthetic construct
  misc_feature 1..80: note = Artificially Synthesized Probe
  source 1..80: mol_type = other DNA
tgtgtgtaaatggtgtgtgtggatggcacatgtgtgtggtctgtgtctgcatgtgtgtctataaatgctgtgtgtgtgtg

SEQ ID NO: 113783 - DNA, 80 bp, synthetic construct
  misc_feature 1..80: note = Artificially Synthesized Probe
  source 1..80: mol_type = other DNA
tgcgtgtgtgtggtttgtgtctgcatgtgtgtgtctataaatggtgtgtgtgtaaatggtgtgtgtgtggatggtgtgtg

SEQ ID NO: 113784 - DNA, 80 bp, synthetic construct; identical to SEQ ID NO: 37472
  misc_feature 1..80: note = Artificially Synthesized Probe
  source 1..80: mol_type = other DNA

SEQ ID NO: 113785 - DNA, 80 bp, synthetic construct
  misc_feature 1..80: note = Artificially Synthesized Probe
  source 1..80: mol_type = other DNA
cgtaggttttcagcaaatccgccaaccacaggatttcacagtcgcagtgaagtgtgtttgagtccagtcgcctgtgggaa

SEQ ID NO: 113786 - DNA, 80 bp, synthetic construct
  misc_feature 1..80: note = Artificially Synthesized Probe
  source 1..80: mol_type = other DNA
ctcagggagtgatgtcgagacacacacatcaccaggaagagcccaggggtgcacagtgcccctcaaggcactaaccgtag

SEQ ID NO: 113787 - DNA, 80 bp, synthetic construct; identical to SEQ ID NO: 37473
  misc_feature 1..80: note = Artificially Synthesized Probe
  source 1..80: mol_type = other DNA

SEQ ID NO: 113788 - DNA, 80 bp, synthetic construct
  misc_feature 1..80: note = Artificially Synthesized Probe
  source 1..80: mol_type = other DNA
ggaagaagttgtctgggggacagaggagttccaggtagcaaacacaggctacagggcaagggttggaagaggctggcagc

SEQ ID NO: 113789 - DNA, 80 bp, synthetic construct
  misc_feature 1..80: note = Artificially Synthesized Probe
  source 1..80: mol_type = other DNA
gcaggaagcccatggcaggaaacacactatcttgctttgctgagggtctctatttcccttttttttttcctttttgccca

SEQ ID NO: 113790 - DNA, 80 bp, synthetic construct
  misc_feature 1..80: note = Artificially Synthesized Probe
  source 1..80: mol_type = other DNA
ggatgggatcccgagaggtgctcaccagggcggcagcgtgagggcatctctaggggccgacgctggctccaggaggggaa

SEQ ID NO: 113791 - DNA, 80 bp, synthetic construct
  misc_feature 1..80: note = Artificially Synthesized Probe
  source 1..80: mol_type = other DNA
tgaccacgccggcctgtgtgtgcctctgcagtcaccaagatacacgaacacctctgcacacatggggtgcagggaaatga

SEQ ID NO: 113792 - DNA, 80 bp, synthetic construct
  misc_feature 1..80: note = Artificially Synthesized Probe
  source 1..80: mol_type = other DNA
cagggcacccaacctgtgcccacagctgaaggtcagtacaggaccacaggcacatgcaagacccagatggtcatagtcag

SEQ ID NO: 113793 - DNA, 80 bp, synthetic construct; identical to SEQ ID NO: 37474
  misc_feature 1..80: note = Artificially Synthesized Probe
  source 1..80: mol_type = other DNA

SEQ ID NO: 113794 - DNA, 80 bp, synthetic construct
  misc_feature 1..80: note = Artificially Synthesized Probe
  source 1..80: mol_type = other DNA
gtcttggctactttctagagcatttatctggtgatttctttctcctctctgttatctatcaaatatggaagtattcatcc

SEQ ID NO: 113795 - DNA, 80 bp, synthetic construct
  misc_feature 1..80: note = Artificially Synthesized Probe
  source 1..80: mol_type = other DNA
gtctcttggcattttctgtttctttctaggtctagtttactgaatacactcagtaatatctaaccgaaactaacggtttc

SEQ ID NO: 113796 - DNA, 80 bp, synthetic construct
  misc_feature 1..80: note = Artificially Synthesized Probe
  source 1..80: mol_type = other DNA
cagtttgggagcccaagaagggcggatcacctgaggtcaggagttcaagaccagcctggccaacatggtgaaaccctgtc

SEQ ID NO: 113797 - DNA, 80 bp, synthetic construct; identical to SEQ ID NO: 37475
  misc_feature 1..80: note = Artificially Synthesized Probe
  source 1..80: mol_type = other DNA

SEQ ID NO: 113798 - DNA, 80 bp, synthetic construct
  misc_feature 1..80: note = Artificially Synthesized Probe
  source 1..80: mol_type = other DNA
aggaaatcaagaccaacctgggcaacatggcaaaaccctgtcacaaaaaaagaaaaaaagaaagaaaaaccaaaaaaaaa

SEQ ID NO: 113799 - DNA, 80 bp, synthetic construct
  misc_feature 1..80: note = Artificially Synthesized Probe
  source 1..80: mol_type = other DNA
tctgaaaaaaaatttttttaagtcttaattgcctatcaaaggattaactacttgccacattgtctgagccacatgttttt

SEQ ID NO: 113800 - DNA, 80 bp, synthetic construct; identical to SEQ ID NO: 37476
  misc_feature 1..80: note = Artificially Synthesized Probe
  source 1..80: mol_type = other DNA

SEQ ID NO: 113801 - DNA, 80 bp, synthetic construct
  misc_feature 1..80: note = Artificially Synthesized Probe
  source 1..80: mol_type = other DNA
tgttttatcaacactctcaattaaagagaaaattataagtcctatttccaaattgttagactagaaatatggattttata

SEQ ID NO: 113802 - DNA, 80 bp, synthetic construct
  misc_feature 1..80: note = Artificially Synthesized Probe
  source 1..80: mol_type = other DNA
gggcgttggtatttgccgacacaggtggggtggctggtccccctctgcctctgctatgctgtccagggtcacctgtgcac

SEQ ID NO: 113803 - DNA, 80 bp, synthetic construct
  misc_feature 1..80: note = Artificially Synthesized Probe
  source 1..80: mol_type = other DNA
ttcgggagatgctggaacgaatctgggtccaaagtttctatctgattaaagtgcaggtatctagaggagttaaaagaaaa

SEQ ID NO: 113804 - DNA, 80 bp, synthetic construct
  misc_feature 1..80: note = Artificially Synthesized Probe
  source 1..80: mol_type = other DNA
acaatacataaaattatcaaatgattcaataaatacaactgaacactaggcacagatgtccaccctagtgactggataag

SEQ ID NO: 113805 - DNA, 80 bp, synthetic construct
  misc_feature 1..80: note = Artificially Synthesized Probe
  source 1..80: mol_type = other DNA
taccttccctcaaatcttttaactcgtgtataaatttggcaggggcatcatcatatactttgacacagagtatattatca

SEQ ID NO: 113806 - DNA, 80 bp, synthetic construct; identical to SEQ ID NO: 37477
  misc_feature 1..80: note = Artificially Synthesized Probe
  source 1..80: mol_type = other DNA

SEQ ID NO: 113807 - DNA, 80 bp, synthetic construct
  misc_feature 1..80: note = Artificially Synthesized Probe
  source 1..80: mol_type = other DNA
tcccctgcaaccagcacacattttcagtgactacttcttcaggaggccaaaatgagcaaagaagcagcatgccagcgttc

SEQ ID NO: 113808 - DNA, 80 bp, synthetic construct
  misc_feature 1..80: note = Artificially Synthesized Probe
  source 1..80: mol_type = other DNA
aggccacactgagtctctgcggacacctgcagccggagggcccccaaacgcagaccatccctgccccttgccccgggaca

SEQ ID NO: 113809 - DNA, 80 bp, synthetic construct
  misc_feature 1..80: note = Artificially Synthesized Probe
  source 1..80: mol_type = other DNA
cgaggaaggccgaacccgacagaatccctggagcctcgtctctgccaggcagtgtgctgacagggcgcctgtggttttct

SEQ ID NO: 113810 - DNA, 80 bp, synthetic construct; identical to SEQ ID NO: 37478
  misc_feature 1..80: note = Artificially Synthesized Probe
  source 1..80: mol_type = other DNA

SEQ ID NO: 113811 - DNA, 80 bp, synthetic construct
  misc_feature 1..80: note = Artificially Synthesized Probe
  source 1..80: mol_type = other DNA
agacaggaaatggctccccaagtatactgaggtcatcattgaattcaaacgcatgtttcctgactggccaggtgtgtttt

SEQ ID NO: 113812 - DNA, 80 bp, synthetic construct
  misc_feature 1..80: note = Artificially Synthesized Probe
  source 1..80: mol_type = other DNA
ggggaaggggtgcagttcgccagggtcaggcacaagccaccctccctggacatacagccctttgcccaagtctctcactg

SEQ ID NO: 113813 - DNA, 80 bp, synthetic construct
  misc_feature 1..80: note = Artificially Synthesized Probe
  source 1..80: mol_type = other DNA
cttgggcagctgccgggggatgtgcacctggtctctaggctgcggagggaggaagacctgccacacgctgtccactctga

SEQ ID NO: 113814 - DNA, 80 bp, synthetic construct; identical to SEQ ID NO: 37479
  misc_feature 1..80: note = Artificially Synthesized Probe
  source 1..80: mol_type = other DNA

SEQ ID NO: 113815 - DNA, 80 bp, synthetic construct
  misc_feature 1..80: note = Artificially Synthesized Probe
  source 1..80: mol_type = other DNA
agaacttgctcctttgcaagctctccctacatctgggtgttccctggatacgtccatgtgtttctgcaatgagctgcact

SEQ ID NO: 113816 - DNA, 80 bp, synthetic construct
  misc_feature 1..80: note = Artificially Synthesized Probe
  source 1..80: mol_type = other DNA
gacaacatcgctgtgtccagtgagccagtgacccgtgaccacggatcagcagctgtggcaggaggacgtcacgctgcgtc

SEQ ID NO: 113817 - DNA, 80 bp, synthetic construct
  misc_feature 1..80: note = Artificially Synthesized Probe
  source 1..80: mol_type = other DNA
gacttcacagcaaagtacgacttcacgttggccaaagaaactaagagcgtttcatgacacactgcatacactaactagaa

SEQ ID NO: 113818 - DNA, 80 bp, synthetic construct
  misc_feature 1..80: note = Artificially Synthesized Probe
  source 1..80: mol_type = other DNA
gacttgggcgcctgcctgtctctcctctaagttgtgacagggattccatcgatattactgtccttggtgtcaggaaagca

SEQ ID NO: 113819 - DNA, 80 bp, synthetic construct; identical to SEQ ID NO: 37480
  misc_feature 1..80: note = Artificially Synthesized Probe
  source 1..80: mol_type = other DNA

SEQ ID NO: 113820 - DNA, 80 bp, synthetic construct
  misc_feature 1..80: note = Artificially Synthesized Probe
  source 1..80: mol_type = other DNA
gcacacagacaggaggtcaaacttcagacggaaaagaagaattaaattgacacatggagacagttttacaattaatgact

SEQ ID NO: 113821 - DNA, 80 bp, synthetic construct
  misc_feature 1..80: note = Artificially Synthesized Probe
  source 1..80: mol_type = other DNA
tggctaatgaattgctgacaatacatttgcttcaaagcctgaagaagataaaaaccattttccacaggcatgtataatgc

SEQ ID NO: 113822 - DNA, 80 bp, synthetic construct
  misc_feature 1..80: note = Artificially Synthesized Probe
  source 1..80: mol_type = other DNA
cacaattggcctggctcttgtctttgtgtaaaatggtggaaaatctcaataggagaatcctatttcctaacatgtgaact

SEQ ID NO: 113823 - DNA, 80 bp, synthetic construct; identical to SEQ ID NO: 37481
  misc_feature 1..80: note = Artificially Synthesized Probe
  source 1..80: mol_type = other DNA

SEQ ID NO: 113824 - DNA, 80 bp, synthetic construct
  misc_feature 1..80: note = Artificially Synthesized Probe
  source 1..80: mol_type = other DNA
gacataggcagatgggcaagtcaaaatccacgcttttcctacttttcaaattcaggcagacacgtctcttcaaaattgat

SEQ ID NO: 113825 - DNA, 80 bp, synthetic construct; identical to SEQ ID NO: 37426
  misc_feature 1..80: note = Artificially Synthesized Probe
  source 1..80: mol_type = other DNA

SEQ ID NO: 113826 - DNA, 80 bp, synthetic construct
  misc_feature 1..80: note = Artificially Synthesized Probe
  source 1..80: mol_type = other DNA
tgctaaccttatttcttacaacccatctaagtggctctcacgtcctccctccctgcgaatttgcagagctgacctcataa

SEQ ID NO: 113827 - DNA, 80 bp, synthetic construct; identical to SEQ ID NO: 37482
  misc_feature 1..80: note = Artificially Synthesized Probe
  source 1..80: mol_type = other DNA

SEQ ID NO: 113828 - DNA, 80 bp, synthetic construct
  misc_feature 1..80: note = Artificially Synthesized Probe
  source 1..80: mol_type = other DNA
caggacaactgaatcaaactaacatgtgtgaatgtgtgtttataaagacattggaacgtaatttgttttcatgagaatag

SEQ ID NO: 113829 - DNA, 80 bp, synthetic construct
  misc_feature 1..80: note = Artificially Synthesized Probe
  source 1..80: mol_type = other DNA
gtctctattaaaaatacaaaaaattagccaggcatcgtggtgcacgcctgtaatcccagctattcaggaggctaaggcag

SEQ ID NO: 113830 - DNA, 80 bp, synthetic construct
  misc_feature 1..80: note = Artificially Synthesized Probe
  source 1..80: mol_type = other DNA
ttgacccttgaatgagtcctaactgtctcaagaaataatttcattaagcaatgtgaactaaagggaaggcttatgcctta

SEQ ID NO: 113831 - DNA, 80 bp, synthetic construct; identical to SEQ ID NO: 37483
  misc_feature 1..80: note = Artificially Synthesized Probe
  source 1..80: mol_type = other DNA

SEQ ID NO: 113832 - DNA, 80 bp, synthetic construct
  misc_feature 1..80: note = Artificially Synthesized Probe
  source 1..80: mol_type = other DNA
tcctccaccaccagggacaccgcagtttgttaccgagggagagagggaagagtttggagtgtgggcgctcagagccggct

SEQ ID NO: 113833 - DNA, 80 bp, synthetic construct
  misc_feature 1..80: note = Artificially Synthesized Probe
  source 1..80: mol_type = other DNA
gttaaacctattaaacacacatatacacacacaaggaatgctggctatcagctgactggatctactttccaggaaacaaa

SEQ ID NO: 113834 - DNA, 80 bp, synthetic construct
  misc_feature 1..80: note = Artificially Synthesized Probe
  source 1..80: mol_type = other DNA
gccacaatgatggagggaaaaaggatgtatgtaacactgacaaatatcgcacagagggaatatattttaataaacagagt

SEQ ID NO: 113835 - DNA, 80 bp, synthetic construct
  misc_feature 1..80: note = Artificially Synthesized Probe
  source 1..80: mol_type = other DNA
gggttgatgggtgcagcaaagcaccatggcacgtgtacccctatgtaacaaacctgcacgttctgcacaggtatcccaga

SEQ ID NO: 113836 - DNA, 80 bp, synthetic construct
  misc_feature 1..80: note = Artificially Synthesized Probe
  source 1..80: mol_type = other DNA
ctaggctgcggagggaggaagacctgcggcatgctgtccactctgacagctgcctggggacttgcacctggtctctaggt

SEQ ID NO: 113837 - DNA, 80 bp, synthetic construct; identical to SEQ ID NO: 37484
  misc_feature 1..80: note = Artificially Synthesized Probe
  source 1..80: mol_type = other DNA

SEQ ID NO: 113838 - DNA, 80 bp, synthetic construct
  misc_feature 1..80: note = Artificially Synthesized Probe
  source 1..80: mol_type = other DNA
acttagcgggagacaggaaaatctgcaggaattagtgacactccaccggggttagttatttcgagtttacatgtcacctg

SEQ ID NO: 113839 - DNA, 80 bp, synthetic construct
  misc_feature 1..80: note = Artificially Synthesized Probe
  source 1..80: mol_type = other DNA
aatccactttactaaggcttagtgatgaaacactaaaaatcacataatgtagcactttatatcactgacaagctatttta

SEQ ID NO: 113840 - DNA, 80 bp, synthetic construct
  misc_feature 1..80: note = Artificially Synthesized Probe
  source 1..80: mol_type = other DNA
attttaaattttccaagtcttcaaatgctccactaggtatcctcttgatctgattattattgagaagcctatgaaagaga

SEQ ID NO: 113841 - DNA, 80 bp, synthetic construct; identical to SEQ ID NO: 37485
  misc_feature 1..80: note = Artificially Synthesized Probe
  source 1..80: mol_type = other DNA

SEQ ID NO: 113842 - DNA, 80 bp, synthetic construct
  misc_feature 1..80: note = Artificially Synthesized Probe
  source 1..80: mol_type = other DNA
ccattcgagcgcacagacaagggcctggggtgagagaccccgggccacttgccctccagggtcaacagtggataggcggc

SEQ ID NO: 113843 - DNA, 80 bp, synthetic construct
  misc_feature 1..80: note = Artificially Synthesized Probe
  source 1..80: mol_type = other DNA
gggactgccttgaaccctcacttaagtccactccacactcagaagaagcactgtcctgctcaatcttgccacggaggagg

SEQ ID NO: 113844 - DNA, 80 bp, synthetic construct
  misc_feature 1..80: note = Artificially Synthesized Probe
  source 1..80: mol_type = other DNA
agacaggcacacagccatgagacgagaaacacagtggccacagtcctggcattcacagtcctggcattcaggggcatttt

SEQ ID NO: 113845 - DNA, 80 bp, synthetic construct; identical to SEQ ID NO: 37486
  misc_feature 1..80: note = Artificially Synthesized Probe
  source 1..80: mol_type = other DNA

SEQ ID NO: 113846 - DNA, 80 bp, synthetic construct
  misc_feature 1..80: note = Artificially Synthesized Probe
  source 1..80: mol_type = other DNA
cccattacagaatttctaaaaacagtaattatggggagaaaaattacataaactacctaagcaccctatctctggcaacc

SEQ ID NO: 113847 - DNA, 80 bp, synthetic construct
  misc_feature 1..80: note = Artificially Synthesized Probe
  source 1..80: mol_type = other DNA
accttggggctacactaggagatgatggaagtttctcccaaacctaagggctaagagtcctgtgagtaggaaaggagctg

SEQ ID NO: 113848 - DNA, 80 bp, synthetic construct
  misc_feature 1..80: note = Artificially Synthesized Probe
  source 1..80: mol_type = other DNA
tgatttcctgagctggaattaggctcttccttagtcaacgacctaaactgctaccttcatgagatttaaactgaatgttt

SEQ ID NO: 113849 - DNA, 80 bp, synthetic construct
  misc_feature 1..80: note = Artificially Synthesized Probe
  source 1..80: mol_type = other DNA
atagcccatgagagaccagagagtacgccagaatcgacacagagactgaatctggtgctggaaagagaaacacttcaatt

SEQ ID NO: 113850 - DNA, 80 bp, synthetic construct; identical to SEQ ID NO: 37487
  misc_feature 1..80: note = Artificially Synthesized Probe
  source 1..80: mol_type = other DNA

SEQ ID NO: 113851 - DNA, 80 bp, synthetic construct
  misc_feature 1..80: note = Artificially Synthesized Probe
  source 1..80: mol_type = other DNA
agtgcctcaggtgtttggtcattagggtatcataggtaaggtcaggacattagggtatgataacataaaatgtttataac

SEQ ID NO: 113852 - DNA, 80 bp, synthetic construct
  misc_feature 1..80: note = Artificially Synthesized Probe
  source 1..80: mol_type = other DNA
aagatacttcaaaaaaagtatctgtgtcactgacagcaacagcatccagcctagatgtcagtgaatgaaatgtgtccctc

SEQ ID NO: 113853 - DNA, 80 bp, synthetic construct; identical to SEQ ID NO: 37488
  misc_feature 1..80: note = Artificially Synthesized Probe
  source 1..80: mol_type = other DNA

SEQ ID NO: 113854 - DNA, 80 bp, synthetic construct
  misc_feature 1..80: note = Artificially Synthesized Probe
  source 1..80: mol_type = other DNA
tctgaccagctgcaatttcaggataaacaaacaattgcaaagaagctcccgtacctgagacacagcaagctgaggggctt

SEQ ID NO: 113855 - DNA, 80 bp, synthetic construct
  misc_feature 1..80: note = Artificially Synthesized Probe
  source 1..80: mol_type = other DNA
cgtgggaacccacacgcaagccacagaggaggcagcggcaacagcgtggaagctggaaagcaagatgtggacttggctcc

SEQ ID NO: 113856 - DNA, 80 bp, synthetic construct; identical to SEQ ID NO: 37489
  misc_feature 1..80: note = Artificially Synthesized Probe
  source 1..80: mol_type = other DNA

SEQ ID NO: 113857 - DNA, 80 bp, synthetic construct
  misc_feature 1..80: note = Artificially Synthesized Probe
  source 1..80: mol_type = other DNA
tacgtaaaatcccagagataacccccaccacaggcactgaagaaagcagaagtaagttcctgggataggaaggagaggac

SEQ ID NO: 113858 - DNA, 80 bp, synthetic construct
  misc_feature 1..80: note = Artificially Synthesized Probe
  source 1..80: mol_type = other DNA
cagagaggtgctgtcccatccacaggcccctgtgccctgctggacagagaggtgctgtcccatccacaagcccctatgcc

SEQ ID NO: 113859 - DNA, 80 bp, synthetic construct
  misc_feature 1..80: note = Artificially Synthesized Probe
  source 1..80: mol_type = other DNA
gccctgctggacagagaggtgctgtcccattcacaggcccctgtgccctgctggacagagaggtgctgtcccatccacag

SEQ ID NO: 113860 - DNA, 80 bp, synthetic construct
  misc_feature 1..80: note = Artificially Synthesized Probe
  source 1..80: mol_type = other DNA
accatttttacagataaaacacatgaatccaatgaccttcctcacagctgaaatgctgcctccgccgcagcaacttggcc

SEQ ID NO: 113861 - DNA, 80 bp, synthetic construct
  misc_feature 1..80: note = Artificially Synthesized Probe
  source 1..80: mol_type = other DNA
gttgagtaaaagtgcaaaactcacactggacctcaaggacttcctacaaacaaatagaacataaatatatcttcgataaa

SEQ ID NO: 113862 - DNA, 80 bp, synthetic construct
  misc_feature 1..80: note = Artificially Synthesized Probe
  source 1..80: mol_type = other DNA
gacataagtagttctcatcacatttctgtggatggcactggtctaggttaaggggatcatttcacaagctgctcacagca

SEQ ID NO: 113863 - DNA, 80 bp, synthetic construct; identical to SEQ ID NO: 37490
  misc_feature 1..80: note = Artificially Synthesized Probe
  source 1..80: mol_type = other DNA

SEQ ID NO: 113864 - DNA, 80 bp, synthetic construct
  misc_feature 1..80: note = Artificially Synthesized Probe
  source 1..80: mol_type = other DNA
catgaaaggagctagaaagattgtcaccaaaccggaccgtgtgtttgggatgggctgacttacaacacagctacatctgc

SEQ ID NO: 113865 - DNA, 80 bp, synthetic construct
  misc_feature 1..80: note = Artificially Synthesized Probe
  source 1..80: mol_type = other DNA
atgaaccccaacttcaaggtcacgaagacaaatacaagggctgatttttgcctgaatcatttctcacttgcgagattcta

SEQ ID NO: 113866 - DNA, 80 bp, synthetic construct
  misc_feature 1..80: note = Artificially Synthesized Probe
  source 1..80: mol_type = other DNA
aagtttggaagtcattgttcttcgggaatgctgaagatataacgcaaatacacactatgtatatttttaagtgtgcgtgt

SEQ ID NO: 113867 - DNA, 80 bp, synthetic construct; identical to SEQ ID NO: 37491
  misc_feature 1..80: note = Artificially Synthesized Probe
  source 1..80: mol_type = other DNA

SEQ ID NO: 113868 - DNA, 80 bp, synthetic construct
  misc_feature 1..80: note = Artificially Synthesized Probe
  source 1..80: mol_type = other DNA
gagcacttcaacaagccttccttggctcttccctggggctccgtgctcccaccccgtcctcctgcagtgacgtctcccca

SEQ ID NO: 113869 - DNA, 80 bp, synthetic construct
  misc_feature 1..80: note = Artificially Synthesized Probe
  source 1..80: mol_type = other DNA
agttggcatgatgagcatggagacagattgtagaaagttctgggaaacctataagtggcgtgattactaaagcaagtgga

SEQ ID NO: 113870 - DNA, 80 bp, synthetic construct; identical to SEQ ID NO: 37427
  misc_feature 1..80: note = Artificially Synthesized Probe
  source 1..80: mol_type = other DNA

SEQ ID NO: 113871 - DNA, 80 bp, synthetic construct
  misc_feature 1..80: note = Artificially Synthesized Probe
  source 1..80: mol_type = other DNA
agcaccaatgacagtaagcagcggtgaacaaggtcacagaaggacgacaagtttgtgtgtgaaaagtccttcataaacag

SEQ ID NO: 113872 - DNA, 80 bp, synthetic construct
  misc_feature 1..80: note = Artificially Synthesized Probe
  source 1..80: mol_type = other DNA
gctcccagaaatgataactgtagggcaaggtcaccccctacttcagagtaacaaaggcacgtcctggggaaatggtcgag

SEQ ID NO: 113873 - DNA, 80 bp, synthetic construct; identical to SEQ ID NO: 37492
  misc_feature 1..80: note = Artificially Synthesized Probe
  source 1..80: mol_type = other DNA

SEQ ID NO: 113874 - DNA, 80 bp, synthetic construct
  misc_feature 1..80: note = Artificially Synthesized Probe
  source 1..80: mol_type = other DNA
agttcaaagagaagactgcaataactattaagcatgaactatgaatttttcaatttacagtctcaaaaacagaacacaga

SEQ ID NO: 113875 - DNA, 80 bp, synthetic construct
  misc_feature 1..80: note = Artificially Synthesized Probe
  source 1..80: mol_type = other DNA
gtttggaacgaaacatcaaagtacaggtttacactcaatatcaaaatcacaagtcactgcagaaccacagaatagttgaa

SEQ ID NO: 113876 - DNA, 80 bp, synthetic construct
  misc_feature 1..80: note = Artificially Synthesized Probe
  source 1..80: mol_type = other DNA
taaagattatgttataaagtttattctaataccttccataatactgatttttaaaataaaacaatcttgacttttcccat

SEQ ID NO: 113877 - DNA, 80 bp, synthetic construct; identical to SEQ ID NO: 37493
  misc_feature 1..80: note = Artificially Synthesized Probe
  source 1..80: mol_type = other DNA

SEQ ID NO: 113878 - DNA, 80 bp, synthetic construct
  misc_feature 1..80: note = Artificially Synthesized Probe
  source 1..80: mol_type = other DNA
caaagttatacactatatcgttcggttcgagaacgaaaattatctcaattatggaatgaaaatttcaggtgagagcattg

SEQ ID NO: 113879 - DNA, 80 bp, synthetic construct
  misc_feature 1..80: note = Artificially Synthesized Probe
  source 1..80: mol_type = other DNA
attccccacaagctatgcattgcagaggtgaattgtctttttctcaatatatttttattatgactttatctttgttgtct

SEQ ID NO: 113880 - DNA, 80 bp, synthetic construct
  misc_feature 1..80: note = Artificially Synthesized Probe
  source 1..80: mol_type = other DNA
ccactgcgcccagctaatttttgtatttttagtagagacggggtttcgccttgttggccaggctggtctccaactcctga

SEQ ID NO: 113881 - DNA, 80 bp, synthetic construct
  misc_feature 1..80: note = Artificially Synthesized Probe
  source 1..80: mol_type = other DNA
tgtgggcagttgaacagttgcctgggaataaaatgctatacccagaaggttcgggcagggctgtgctgctgtggaatctt

SEQ ID NO: 113882 - DNA, 80 bp, synthetic construct; identical to SEQ ID NO: 37494
  misc_feature 1..80: note = Artificially Synthesized Probe
  source 1..80: mol_type = other DNA

SEQ ID NO: 113883 - DNA, 80 bp, synthetic construct
  misc_feature 1..80: note = Artificially Synthesized Probe
  source 1..80: mol_type = other DNA
tcacttgaggtcaggagttcgagaccagcttggccaacatggtgaaaccctgtctctactaaaaatacaaaaaattagcc

SEQ ID NO: 113884 - DNA, 80 bp, synthetic construct
  misc_feature 1..80: note = Artificially Synthesized Probe
  source 1..80: mol_type = other DNA
aatataacccaaaggctcttagactgtgctgcttcagagaggcaaatatgcaaagtgctttactgattttaaaggttgga

SEQ ID NO: 113885 - DNA, 80 bp, synthetic construct
  misc_feature 1..80: note = Artificially Synthesized Probe
  source 1..80: mol_type = other DNA
ggccatgtggttttccattaacatttgcctgacctaaaatcgcttcagtgcttcctactaaggactgcctttcatcactg

SEQ ID NO: 113886 - DNA, 80 bp, synthetic construct; identical to SEQ ID NO: 37495
  misc_feature 1..80: note = Artificially Synthesized Probe
  source 1..80: mol_type = other DNA

SEQ ID NO: 113887 - DNA, 80 bp, synthetic construct
  misc_feature 1..80: note = Artificially Synthesized Probe
  source 1..80: mol_type = other DNA
ggagccgcagagaagcgggctcaaggtgggaggtgcggaatggggtgggggacgcaggatggggtcaggggtgtccagct

SEQ ID NO: 113888 - DNA, 80 bp, synthetic construct
  misc_feature 1..80: note = Artificially Synthesized Probe
  source 1..80: mol_type = other DNA
gggtgggatgactgcccttatgaaagaaccccgacagcggtcttgtcctgtccacaatgtgagaggacacgaggagaagg

SEQ ID NO: 113889 - DNA, 80 bp, synthetic construct
  misc_feature 1..80: note = Artificially Synthesized Probe
  source 1..80: mol_type = other DNA
acataacacgcccactaataccattaatgagatcaaattacgttagtcaggacctgcctggccctcagctaaagaaacct

SEQ ID NO: 113890 - DNA, 80 bp, synthetic construct
  misc_feature 1..80: note = Artificially Synthesized Probe
  source 1..80: mol_type = other DNA
ggtgccacccccccaaccccggcacagtgtcccctgtcaccgaggcttcctccaggacgcagggaatagcctcagcctgg

SEQ ID NO: 113891 - DNA, 80 bp, synthetic construct; identical to SEQ ID NO: 37496
  misc_feature 1..80: note = Artificially Synthesized Probe
  source 1..80: mol_type = other DNA

SEQ ID NO: 113892 - DNA, 80 bp, synthetic construct
  misc_feature 1..80: note = Artificially Synthesized Probe
  source 1..80: mol_type = other DNA
cccaacactgtggtgaggggaaaggaggaggagggaaatataaccttggcaggtcacgccgggtctcatttcaaggtttc

SEQ ID NO: 113893 - DNA, 80 bp, synthetic construct
  misc_feature 1..80: note = Artificially Synthesized Probe
  source 1..80: mol_type = other DNA
gcacccgccactacgcccagctaattttttgtatttttagagatgaggtttcaccgagttggccaagctggtctcgaact

SEQ ID NO: 113894 - DNA, 80 bp, synthetic construct
  misc_feature 1..80: note = Artificially Synthesized Probe
  source 1..80: mol_type = other DNA
gggggacagctccaggtgaagggggggcagctccaggtgaagggagggcagctccaggtgaaggggggcaactccaggtg

SEQ ID NO: 113895 - DNA, 80 bp, synthetic construct; identical to SEQ ID NO: 37497
  misc_feature 1..80: note = Artificially Synthesized Probe
  source 1..80: mol_type = other DNA

SEQ ID NO: 113896 - DNA, 80 bp, synthetic construct
  misc_feature 1..80: note = Artificially Synthesized Probe
  source 1..80: mol_type = other DNA
ccaggtgaaggggggacaactccaggtgaaggggggacagctccaggtgaagggggggcagctccaggtgaaggtggggg

SEQ ID NO: 113897 - DNA, 80 bp, synthetic construct
  misc_feature 1..80: note = Artificially Synthesized Probe
  source 1..80: mol_type = other DNA
gaaggggggggcaactccaggtgaaggggggcaactccaggtgaagggagggcaactccaggtgaaggggggcaactcca

SEQ ID NO: 113898 - DNA, 80 bp, synthetic construct
  misc_feature 1..80: note = Artificially Synthesized Probe
  source 1..80: mol_type = other DNA
gacaactccaggtgaagggggggcaactccaggtgaaggtaggggacaactccaggtgaaggggggcaactccaggtgaa

SEQ ID NO: 113899 - DNA, 80 bp, synthetic construct
  misc_feature 1..80: note = Artificially Synthesized Probe
  source 1..80: mol_type = other DNA
aggtgaagggagggcaactccaggtgaaggggggcaactccaggtgaagggggggacagctccaggtgaagcgggggaca

SEQ ID NO: 113900 - DNA, 80 bp, synthetic construct
  misc_feature 1..80: note = Artificially Synthesized Probe
  source 1..80: mol_type = other DNA
aaggggggcaactccaggtgaaggggggggcaactccaggtgaaggagggcaactccaggtgaaggtgggggacaactcc

SEQ ID NO: 113901 - DNA, 80 bp, synthetic construct
  misc_feature 1..80: note = Artificially Synthesized Probe
  source 1..80: mol_type = other DNA
cttccaggtcacaggtagataagagacaaatggctgcactgtcttgagtttctgatgatcttttccaagggatgcagtca

SEQ ID NO: 113902 - DNA, 80 bp, synthetic construct
  misc_feature 1..80: note = Artificially Synthesized Probe
  source 1..80: mol_type = other DNA
cagtgccctgggacgtccctgccaggaaccatcctcgccacaggcccacagcaggatgccggtcctactgcccgacgccc

SEQ ID NO: 113903 - DNA, 80 bp, synthetic construct
  misc_feature 1..80: note = Artificially Synthesized Probe
  source 1..80: mol_type = other DNA
ctttcttttcatacaagtcttggggagcaaccattatcacatgacattaataagagcagatgatgcatcatccgtcagtg

SEQ ID NO: 113904 - DNA, 80 bp, synthetic construct
  misc_feature 1..80: note = Artificially Synthesized Probe
  source 1..80: mol_type = other DNA
ctgcacacatcccagtgccctgggcctccccggagccgtgagagcagagcatgtctgcacacatcccaggggccctgggc

SEQ ID NO: 113905 - DNA, 80 bp, synthetic construct
  misc_feature 1..80: note = Artificially Synthesized Probe
  source 1..80: mol_type = other DNA
cctgggatgcagggtgcagggtgcagctccccatgacctgggacacagggtgcaggatgcagctccccatgacctgggat

SEQ ID NO: 113906 - DNA, 80 bp, synthetic construct; identical to SEQ ID NO: 37499
  misc_feature 1..80: note = Artificially Synthesized Probe
  source 1..80: mol_type = other DNA

SEQ ID NO: 113907 - DNA, 80 bp, synthetic construct
  misc_feature 1..80: note = Artificially Synthesized Probe
  source 1..80: mol_type = other DNA
gcccacgacctgggacgcgtggagtgtcaccagcccttttggagagtttcccgcgtggagtgtggggctacaaggagcag

SEQ ID NO: 113908 - DNA, 80 bp, synthetic construct
  misc_feature 1..80: note = Artificially Synthesized Probe
  source 1..80: mol_type = other DNA
ttcaagttctaccctgccctccgattcctgggctctcaaacccagagaccgtcccagcgtctctgaccttcagtgagagt

SEQ ID NO: 113909 - DNA, 80 bp, synthetic construct; identical to SEQ ID NO: 37500
  misc_feature 1..80: note = Artificially Synthesized Probe
  source 1..80: mol_type = other DNA

SEQ ID NO: 113910 - DNA, 80 bp, synthetic construct
  misc_feature 1..80: note = Artificially Synthesized Probe
  source 1..80: mol_type = other DNA
tctgagagcacgcttcagtgttcaccaatcagctctaagcatcgcctgccccactaataatacaatctgagagcatgctt

SEQ ID NO: 113911 - DNA, 80 bp, synthetic construct; identical to SEQ ID NO: 37428
  misc_feature 1..80: note = Artificially Synthesized Probe
  source 1..80: mol_type = other DNA

SEQ ID NO: 113912 - DNA, 80 bp, synthetic construct
  misc_feature 1..80: note = Artificially Synthesized Probe
  source 1..80: mol_type = other DNA
ctgccccactaataatacaatccgagagcacgcttcactgttcaccaatcagctctaagcatcacctgccccactaataa

SEQ ID NO: 113913 - DNA, 80 bp, synthetic construct
  misc_feature 1..80: note = Artificially Synthesized Probe
  source 1..80: mol_type = other DNA
cgatcagctctaaacatcacctgccccactaattatacaatctaagagcacgctgcagtgctcaccaatcagctctaagc

SEQ ID NO: 113914 - DNA, 80 bp, synthetic construct
  misc_feature 1..80: note = Artificially Synthesized Probe
  source 1..80: mol_type = other DNA
gagcacgcttcagtgttcagcgatcagctctaaacatcacctgccccactaataatacaaactgagagcacgctgcagtg

SEQ ID NO: 113915 - DNA, 80 bp, synthetic construct; identical to SEQ ID NO: 37501
  misc_feature 1..80: note = Artificially Synthesized Probe
  source 1..80: mol_type = other DNA

SEQ ID NO: 113916 - DNA, 80 bp, synthetic construct
  misc_feature 1..80: note = Artificially Synthesized Probe
  source 1..80: mol_type = other DNA
gttcttcattaaaacttggtgcagaggagggattcgtaccaaggtgccgaaagcgacgatctgcagatatccttccccta

SEQ ID NO: 113917 - DNA, 80 bp, synthetic construct
  misc_feature 1..80: note = Artificially Synthesized Probe
  source 1..80: mol_type = other DNA
gcaggcaatcctcagcggagctcttctccagctggaacaatgagctttgtcccgagaacaaggggggcacgcccaggcct

SEQ ID NO: 113918 - DNA, 80 bp, synthetic construct; identical to SEQ ID NO: 37502
  misc_feature 1..80: note = Artificially Synthesized Probe
  source 1..80: mol_type = other DNA

SEQ ID NO: 113919 - DNA, 80 bp, synthetic construct
  misc_feature 1..80: note = Artificially Synthesized Probe
  source 1..80: mol_type = other DNA
ccttcgcaggaagcctcttcctgactagaatgacaaaagtcataagaagcccaagtgattctcaatcctcctttacagag

SEQ ID NO: 113920 - DNA, 80 bp, synthetic construct
  misc_feature 1..80: note = Artificially Synthesized Probe
  source 1..80: mol_type = other DNA
agagctccctgagctgccctcacctccaggccatggtgtgacggaacctcctctcccaggcatctgagttgcacgggcac

SEQ ID NO: 113921 - DNA, 80 bp, synthetic construct
  misc_feature 1..80: note = Artificially Synthesized Probe
  source 1..80: mol_type = other DNA
ggctcttaccctctcctggtctgaggggccaagcctctctccacctgtgccccagccctcatgacctcctggtgctggcc

SEQ ID NO: 113922 - DNA, 80 bp, synthetic construct
  misc_feature 1..80: note = Artificially Synthesized Probe
  source 1..80: mol_type = other DNA
ttgttaagaacctctctacgtgtacaggttttatcaagtacagtttttttaaggagtcactgatgatgcagaatgctggc

SEQ ID NO: 113923 - DNA, 80 bp, synthetic construct; identical to SEQ ID NO: 37503
  misc_feature 1..80: note = Artificially Synthesized Probe
  source 1..80: mol_type = other DNA

SEQ ID NO: 113924 - DNA, 80 bp, synthetic construct
  misc_feature 1..80: note = Artificially Synthesized Probe
  source 1..80: mol_type = other DNA
gccccagagtgcgggtgcttgatctgacgagggcagggtgtgtggtgtttgctgaatggacactgtgcacggccccacag

SEQ ID NO: 113925 - DNA, 80 bp, synthetic construct
  misc_feature 1..80: note = Artificially Synthesized Probe
  source 1..80: mol_type = other DNA
tcagggccattgaacaagatgcgctcctgactgcgctcccactccgcacctgcccggccccaggaggccggcaaggcggc

SEQ ID NO: 113926 - DNA, 80 bp, synthetic construct
  misc_feature 1..80: note = Artificially Synthesized Probe
  source 1..80: mol_type = other DNA
tccaccatgtgaggacacagagagatgccatcatctgcagacctgcaagaggccctcaccagaacccaactctgctggca

SEQ ID NO: 113927 - DNA, 80 bp, synthetic construct; identical to SEQ ID NO: 37504
  misc_feature 1..80: note = Artificially Synthesized Probe
  source 1..80: mol_type = other DNA

SEQ ID NO: 113928 - DNA, 80 bp, synthetic construct
  misc_feature 1..80: note = Artificially Synthesized Probe
  source 1..80: mol_type = other DNA
gtgggccacgtctataaatacaggtgttgcccaagcctgaaggtcaggaacttgctcaagtctgaccgtagcacatggat

SEQ ID NO: 113929 - DNA, 80 bp, synthetic construct
  misc_feature 1..80: note = Artificially Synthesized Probe
  source 1..80: mol_type = other DNA
actctccactagcacccactctccaccaggacccactctacgaacacccactccaccagcacccactctccaccagcacc

SEQ ID NO: 113930 - DNA, 80 bp, synthetic construct; identical to SEQ ID NO: 37505
  misc_feature 1..80: note = Artificially Synthesized Probe
  source 1..80: mol_type = other DNA

SEQ ID NO: 113931 - DNA, 80 bp, synthetic construct
  misc_feature 1..80: note = Artificially Synthesized Probe
  source 1..80: mol_type = other DNA
ccagcacccgctccaccagcacccactccaccagcacccactctccaccagcacccactccaccagcatccactctacca

SEQ ID NO: 113932 - DNA, 80 bp, synthetic construct
  misc_feature 1..80: note = Artificially Synthesized Probe
  source 1..80: mol_type = other DNA
gcactctggagtgccttaaaattatgctacactccctacgtcacactgccagccccagtgtcagacaagaggcggcctga

SEQ ID NO: 113933 - DNA, 80 bp, synthetic construct
  misc_feature 1..80: note = Artificially Synthesized Probe
  source 1..80: mol_type = other DNA
gcacccactctccaccagcacccactccaccagcatccactctaccagcacccgctccaccagcacccactctccaccag

SEQ ID NO: 113934 - DNA, 80 bp, synthetic construct
  misc_feature 1..80: note = Artificially Synthesized Probe
  source 1..80: mol_type = other DNA
cccactctccaccagcacccgctccaccagcacccgctccaccagcacccactctccaccagcacccactccaccagcat

SEQ ID NO: 113935 - DNA, 80 bp, synthetic construct
  misc_feature 1..80: note = Artificially Synthesized Probe
  source 1..80: mol_type = other DNA
gctgaataaaaggagggccacctgcaggatccactgggggaaggcaagtgctggtggaggctctctggtggtgatgacgc

SEQ ID NO: 113936 - DNA, 80 bp, synthetic construct; identical to SEQ ID NO: 37506
  misc_feature 1..80: note = Artificially Synthesized Probe
  source 1..80: mol_type = other DNA

SEQ ID NO: 113937 - DNA, 80 bp, synthetic construct
  misc_feature 1..80: note = Artificially Synthesized Probe
  source 1..80: mol_type = other DNA
aagaagactgggaagtaaatcaaagtactgacaaattgaaaggaagaactacattataatttttattacgattttaggtt

SEQ ID NO: 113938 - DNA, 80 bp, synthetic construct
  misc_feature 1..80: note = Artificially Synthesized Probe
  source 1..80: mol_type = other DNA
gggttcaactttttataatcagcctatagagagactgtggaagacaactgtttggagggtcaagttgaaatgtcaggagc

SEQ ID NO: 113939 - DNA, 80 bp, synthetic construct
  misc_feature 1..80: note = Artificially Synthesized Probe
  source 1..80: mol_type = other DNA
agcggccagcagcagaactaaaatgaaaacggtcggatgagacttgggcagggaaaccgttattcttagttttagatttc

SEQ ID NO: 113940 - DNA, 80 bp, synthetic construct
  misc_feature 1..80: note = Artificially Synthesized Probe
  source 1..80: mol_type = other DNA
gtagctgggattacaggcatccgccaccaggcctggctgattttttgtatttttagtagagatgaggttcaccatggtgg

SEQ ID NO: 113941 - DNA, 80 bp, synthetic construct; identical to SEQ ID NO: 37507
  misc_feature 1..80: note = Artificially Synthesized Probe
  source 1..80: mol_type = other DNA

SEQ ID NO: 113942 - DNA, 80 bp, synthetic construct
  misc_feature 1..80: note = Artificially Synthesized Probe
  source 1..80: mol_type = other DNA
gcaactctaattttctgcaccaacgatcaattaccacagaagaaagaaggctgagcctctccctgctacagttttgtgct

SEQ ID NO: 113943 - DNA, 80 bp, synthetic construct
  misc_feature 1..80: note = Artificially Synthesized Probe
  source 1..80: mol_type = other DNA
tgcaggctggggaggagtagaaggggcacctgcctctgacaggagagccctgggggccgcctctccccactggccgctcc

SEQ ID NO: 113944 - DNA, 80 bp, synthetic construct
  misc_feature 1..80: note = Artificially Synthesized Probe
  source 1..80: mol_type = other DNA
aggggccctcagtgccgtgtccctcctggtccccgggtgagtgaggggccctcagtgccgtgtccctcctggtccccggg

SEQ ID NO: 113945 - DNA, 80 bp, synthetic construct
  misc_feature 1..80: note = Artificially Synthesized Probe
  source 1..80: mol_type = other DNA
aggggcgcacctgaggccccgggcccctgagaggtaagaggtgggcagccaggcaacccaatgcagcctgctgcagagca

SEQ ID NO: 113946 - DNA, 80 bp, synthetic construct; identical to SEQ ID NO: 37508
  misc_feature 1..80: note = Artificially Synthesized Probe
  source 1..80: mol_type = other DNA

SEQ ID NO: 113947 - DNA, 80 bp, synthetic construct
  misc_feature 1..80: note = Artificially Synthesized Probe
  source 1..80: mol_type = other DNA
cctcatttattgctcttacatctgcacttgattactatggatttacacgtcacacccgcagcacccttgcgtaggtagtt

SEQ ID NO: 113948 - DNA, 80 bp, synthetic construct
  misc_feature 1..80: note = Artificially Synthesized Probe
  source 1..80: mol_type = other DNA
gggagcagggaccctgccagttacacttcctagaacttccaaccccttcctcatcaccaccaatcctcgcccagcaatga

SEQ ID NO: 113949 - DNA, 80 bp, synthetic construct
  misc_feature 1..80: note = Artificially Synthesized Probe
  source 1..80: mol_type = other DNA
cccggtggctgtggccaagctccgataagcttttatttatggtgctgaaattccaatttcataaaatgtccacagcatga

SEQ ID NO: 113950 - DNA, 80 bp, synthetic construct; identical to SEQ ID NO: 37509
  misc_feature 1..80: note = Artificially Synthesized Probe
  source 1..80: mol_type = other DNA

SEQ ID NO: 113951 - DNA, 80 bp, synthetic construct
  misc_feature 1..80: note = Artificially Synthesized Probe
  source 1..80: mol_type = other DNA
catgggtgttaaaaaataaaatcagtatttttcctgccttccagtcagaaaaacttggccagttttgcgttcctgaaaac

SEQ ID NO: 113952 - DNA, 80 bp, synthetic construct
  misc_feature 1..80: note = Artificially Synthesized Probe
  source 1..80: mol_type = other DNA
cgggaaaatactgcaggccgtcatctgtctaattagaaacagccacaaaaacagcgacggagcgggagccaattcccagc

SEQ ID NO: 113953 - DNA, 80 bp, synthetic construct
  misc_feature 1..80: note = Artificially Synthesized Probe
  source 1..80: mol_type = other DNA
tcgtccccagcatcccagaagcaccacagcaagtcagccacaggttggctggctctctggtggagcctggtctccagccc

SEQ ID NO: 113954 - DNA, 80 bp, synthetic construct; identical to SEQ ID NO: 37510
  misc_feature 1..80: note = Artificially Synthesized Probe
  source 1..80: mol_type = other DNA

SEQ ID NO: 113955 - DNA, 80 bp, synthetic construct; identical to SEQ ID NO: 37429
  misc_feature 1..80: note = Artificially Synthesized Probe
  source 1..80: mol_type = other DNA

SEQ ID NO: 113956 - DNA, 80 bp, synthetic construct
  misc_feature 1..80: note = Artificially Synthesized Probe
  source 1..80: mol_type = other DNA
ccaccccatggaagcctcgacgccataccccagtgctggacacctgccaccctgaaccgaaacggcccctgacctcaggg

SEQ ID NO: 113957 - DNA, 80 bp, synthetic construct
  misc_feature 1..80: note = Artificially Synthesized Probe
  source 1..80: mol_type = other DNA
ctggggtagagtccacctgtgccacctgactggctgtggcttcctggacagatgcctgggcctctctgagcctcagtgta

SEQ ID NO: 113958 - DNA, 80 bp, synthetic construct
  misc_feature 1..80: note = Artificially Synthesized Probe
  source 1..80: mol_type = other DNA
gctgggcatggtggtacatacctgtaatcccagctacttgggaggctgaggcagaagaatcacttgaacccgggaggtgg

SEQ ID NO: 113959 - DNA, 80 bp, synthetic construct
  misc_feature 1..80: note = Artificially Synthesized Probe
  source 1..80: mol_type = other DNA
cagtgggaagctggtggttaaggaggactagcgtgggaggtggcgggcaggctgggcacagggacaccctctacctgggg

SEQ ID NO: 113960 - DNA, 80 bp, synthetic construct; identical to SEQ ID NO: 37511
  misc_feature 1..80: note = Artificially Synthesized Probe
  source 1..80: mol_type = other DNA

SEQ ID NO: 113961 - DNA, 80 bp, synthetic construct
  misc_feature 1..80: note = Artificially Synthesized Probe
  source 1..80: mol_type = other DNA
tggtaagcacgatctctgctgcgctcaacactccccatttttaacttggctaaggtctgtatactgatgggaagacaaat

SEQ ID NO: 113962 - DNA, 80 bp, synthetic construct
  misc_feature 1..80: note = Artificially Synthesized Probe
  source 1..80: mol_type = other DNA
aatagattaatgcctaaactggctggtggaaagtctgacgggaacagagattccgctgctgtctgtccactattcaaggc

SEQ ID NO: 113963 - DNA, 80 bp, synthetic construct; identical to SEQ ID NO: 37512
  misc_feature 1..80: note = Artificially Synthesized Probe
  source 1..80: mol_type = other DNA

SEQ ID NO: 113964 - DNA, 80 bp, synthetic construct
  misc_feature 1..80: note = Artificially Synthesized Probe
  source 1..80: mol_type = other DNA
accacccaaagctactctactaaccaactacccaaacctgctctactaacctactctgctaagcgaccacccaaagctat

SEQ ID NO: 113965 - DNA, 80 bp, synthetic construct
  misc_feature 1..80: note = Artificially Synthesized Probe
  source 1..80: mol_type = other DNA
aaagctattcgactaaccaactacccaaacctgccctacccactaaccgaccacccaaagctattctactaaccaactac

SEQ ID NO: 113966 - DNA, 80 bp, synthetic construct
  misc_feature 1..80: note = Artificially Synthesized Probe
  source 1..80: mol_type = other DNA
ctaccacccaaaactactctactaacctactacgcaaacctactctactcacctattccactaacctaccacccaactct

SEQ ID NO: 113967 - DNA, 80 bp, synthetic construct
  misc_feature 1..80: note = Artificially Synthesized Probe
  source 1..80: mol_type = other DNA
gcccacaaacagtcccactgaatgtgtttatttccgcagttaactatacagcttctgagtaaacccagctggctggaccc

SEQ ID NO: 113968 - DNA, 80 bp, synthetic construct; identical to SEQ ID NO: 37513
  misc_feature 1..80: note = Artificially Synthesized Probe
  source 1..80: mol_type = other DNA

SEQ ID NO: 113969 - DNA, 80 bp, synthetic construct
  misc_feature 1..80: note = Artificially Synthesized Probe
  source 1..80: mol_type = other DNA
cagggcagcacacacggggtgacacagagcagcaaacacggggtgacgcgggcagggcgtgtgtggtccctttacggctg

SEQ ID NO: 113970 - DNA, 80 bp, synthetic construct
  misc_feature 1..80: note = Artificially Synthesized Probe
  source 1..80: mol_type = other DNA
caacttgccacaactccagcccaaagaggggttcttatggccgtggaggaagcccagccccgaagaccatacctcgcaga

SEQ ID NO: 113971 - DNA, 80 bp, synthetic construct
  misc_feature 1..80: note = Artificially Synthesized Probe
  source 1..80: mol_type = other DNA
gcggccatgcctcccacctgagttactcggaagggggcttgctccacaccttctcacaccacctgctccccgtgtgggaa

SEQ ID NO: 113972 - DNA, 80 bp, synthetic construct
  misc_feature 1..80: note = Artificially Synthesized Probe
  source 1..80: mol_type = other DNA
cagggtcctctccccagcacgaatccttacataaaccacacaaagcctgtgtgccttgagggtacatggaacctaagagg

SEQ ID NO: 113973 - DNA, 80 bp, synthetic construct; identical to SEQ ID NO: 37514
  misc_feature 1..80: note = Artificially Synthesized Probe
  source 1..80: mol_type = other DNA

SEQ ID NO: 113974 - DNA, 80 bp, synthetic construct
  misc_feature 1..80: note = Artificially Synthesized Probe
  source 1..80: mol_type = other DNA
aggatgtgtgtacatgcgtgcattgtgtgtgtgtgtgtgtgtgtgtgtgtgtgtgtgtgtgtgaaagagagagagggagg

SEQ ID NO: 113975 - DNA, 80 bp, synthetic construct
  misc_feature 1..80: note = Artificially Synthesized Probe
  source 1..80: mol_type = other DNA
agagagggagggagggatgcagagagagagggagggagggatgcagagagagagggagggagggatgcagagagagaggg

SEQ ID NO: 113976 - DNA, 80 bp, synthetic construct
  misc_feature 1..80: note = Artificially Synthesized Probe
  source 1..80: mol_type = other DNA
agagggagggagggatgcagagagagagagatgcacagagagagggagggatgcagagagagggagggatgcagagagag

SEQ ID NO: 113977 - DNA, 80 bp, synthetic construct; identical to SEQ ID NO: 37515
  misc_feature 1..80: note = Artificially Synthesized Probe
  source 1..80: mol_type = other DNA

SEQ ID NO: 113978 - DNA, 80 bp, synthetic construct
  misc_feature 1..80: note = Artificially Synthesized Probe
  source 1..80: mol_type = other DNA
ggggtccacccagggctgtgcaggtctggggtgggtccctggtagaattacagggcgacagggaagcagcagggccagga

SEQ ID NO: 113979 - DNA, 80 bp, synthetic construct
  misc_feature 1..80: note = Artificially Synthesized Probe
  source 1..80: mol_type = other DNA
ttccatttctctggagaaccctgaccaacccagtgttcgcaatgtgtgtcacatgacctggtcctcccggaccgcagctg

SEQ ID NO: 113980 - DNA, 80 bp, synthetic construct
  misc_feature 1..80: note = Artificially Synthesized Probe
  source 1..80: mol_type = other DNA
ttaaggccttcaactaactggacgaggtccacccacaccacagaggacagtcggctctactcaaagtctccagatttaaa

SEQ ID NO: 113981 - DNA, 80 bp, synthetic construct; identical to SEQ ID NO: 37516
  misc_feature 1..80: note = Artificially Synthesized Probe
  source 1..80: mol_type = other DNA

SEQ ID NO: 113982 - DNA, 80 bp, synthetic construct
  misc_feature 1..80: note = Artificially Synthesized Probe
  source 1..80: mol_type = other DNA
tgactccaggctctagtgaaacagattgagttttgcttgttgcttttctaaaagcctcaaattggccgggtgcggtggct

SEQ ID NO: 113983 - DNA, 80 bp, synthetic construct
  misc_feature 1..80: note = Artificially Synthesized Probe
  source 1..80: mol_type = other DNA
caggagaatggcgtgaacccaggaggtggagcttgcagtgccactgcactccagcctgggagacagagagagactccgtc

SEQ ID NO: 113984 - DNA, 80 bp, synthetic construct; identical to SEQ ID NO: 37517
  misc_feature 1..80: note = Artificially Synthesized Probe
  source 1..80: mol_type = other DNA

SEQ ID NO: 113985 - DNA, 80 bp, synthetic construct
  misc_feature 1..80: note = Artificially Synthesized Probe
  source 1..80: mol_type = other DNA
aaaatagaacatgtaagaagaataaaattaagccaaagcagtccctcttgaaagctctccacgtggacgtcttcacttta

SEQ ID NO: 113986 - DNA, 80 bp, synthetic construct
  misc_feature 1..80: note = Artificially Synthesized Probe
  source 1..80: mol_type = other DNA
tcccatgagaaattgagaacaggagaatctcaacgcagaatccattgcgtgcaatgcatgggttatcccagcatccagat

SEQ ID NO: 113987 - DNA, 80 bp, synthetic construct
  misc_feature 1..80: note = Artificially Synthesized Probe
  source 1..80: mol_type = other DNA
tataagaaagttgtattttaaaatcagtgcattctgaacttaggagaaaagaggtgtgcgtctacaggtggggctccttc

SEQ ID NO: 113988 - DNA, 80 bp, synthetic construct
  misc_feature 1..80: note = Artificially Synthesized Probe
  source 1..80: mol_type = other DNA
gcacctgacagcctgctgctgtcaccactgtgggacacttcacagtgattccagtagtgagggatggatggatgggtgaa

SEQ ID NO: 113989 - DNA, 80 bp, synthetic construct; identical to SEQ ID NO: 37518
  misc_feature 1..80: note = Artificially Synthesized Probe
  source 1..80: mol_type = other DNA

SEQ ID NO: 113990 - DNA, 80 bp, synthetic construct
  misc_feature 1..80: note = Artificially Synthesized Probe
  source 1..80: mol_type = other DNA
tgtgctgcccaggctggccaagccaggagcaggctggcttcccagacctagtgcagaccccacacagcacttgttgtagg

SEQ ID NO: 113991 - DNA, 80 bp, synthetic construct
  misc_feature 1..80: note = Artificially Synthesized Probe
  source 1..80: mol_type = other DNA
tggaagaaagaatagatggatgagtggttatgaatcaatgaacagatagatggactaatgaatggaaaggtgaatgaatg

SEQ ID NO: 113992 - DNA, 80 bp, synthetic construct
  misc_feature 1..80: note = Artificially Synthesized Probe
  source 1..80: mol_type = other DNA
atgaatggacagatggatgaactaataaatgggcagatggatgaatgagtaaattaatggatagatagaagaatagatgg

SEQ ID NO: 113993 - DNA, 80 bp, synthetic construct; identical to SEQ ID NO: 37519
  misc_feature 1..80: note = Artificially Synthesized Probe
  source 1..80: mol_type = other DNA

SEQ ID NO: 113994 - DNA, 80 bp, synthetic construct
  misc_feature 1..80: note = Artificially Synthesized Probe
  source 1..80: mol_type = other DNA
agtgttgctctgctggttatagatttttagaaatatttgcttcatgccaggatgcaacaagtttcatcttattcccaaaa

SEQ ID NO: 113995 - DNA, 80 bp, synthetic construct
  misc_feature 1..80: note = Artificially Synthesized Probe
  source 1..80: mol_type = other DNA
atgtttctttcccacaacaattctcagtgaagaaatcttcctgcctgaaagttgttatagtcttatttttgtccccacag

SEQ ID NO: 113996 - DNA, 80 bp, synthetic construct
  misc_feature 1..80: note = Artificially Synthesized Probe
  source 1..80: mol_type = other DNA
tttttatagtaggttcttttgacaaaacatgtagagttggtcacatctcagactttcttgtgaaacttgtgaccactgag

SEQ ID NO: 113997 - DNA, 80 bp, synthetic construct; identical to SEQ ID NO: 37520
  misc_feature 1..80: note = Artificially Synthesized Probe
  source 1..80: mol_type = other DNA

SEQ ID NO: 113998 - DNA, 80 bp, synthetic construct
  misc_feature 1..80: note = Artificially Synthesized Probe
  source 1..80: mol_type = other DNA
ggttccatgcaaattttataggattgctttaattctgtttctgtgaagaatgctactggaattgtaacaagaattgcatt

SEQ ID NO: 113999 - DNA, 80 bp, synthetic construct
  misc_feature 1..80: note = Artificially Synthesized Probe
  source 1..80: mol_type = other DNA
attcctaattattttattctttttgatgctatcataacagattgttttcttgattccctttttggataatttgctgttgg

SEQ ID NO: 114000 - DNA, 80 bp, synthetic construct
  misc_feature 1..80: note = Artificially Synthesized Probe
  source 1..80: mol_type = other DNA
ttccctatttaataaatggtgctgggaaaactggctagccatatgtagaaagctgaaactggatcccttccttacacctt

SEQ ID NO: 114001 - DNA, 80 bp, synthetic construct
  misc_feature 1..80: note = Artificially Synthesized Probe
  source 1..80: mol_type = other DNA
agcaattctcctgcctcagcctcccatgtagctgggattacaggtgcccgccaccacgcccggctaatttttgtattttt

SEQ ID NO: 114002 - DNA, 80 bp, synthetic construct; identical to SEQ ID NO: 37521
  misc_feature 1..80: note = Artificially Synthesized Probe
  source 1..80: mol_type = other DNA

SEQ ID NO: 114003 - DNA, 80 bp, synthetic construct
  misc_feature 1..80: note = Artificially Synthesized Probe
  source 1..80: mol_type = other DNA
aaaacacatgaaaaaatgttcatcatcactggccatcagagaaatgcaaatcaaaaccacaatgagataccatctcccac

SEQ ID NO: 114004 - DNA, 80 bp, synthetic construct
  misc_feature 1..80: note = Artificially Synthesized Probe
  source 1..80: mol_type = other DNA
atttgacccagccatcccattactgggtatatacccaaaggactataaatcatgctgctataaagacacatacacacgta

SEQ ID NO: 114005 - DNA, 80 bp, synthetic construct
  misc_feature 1..80: note = Artificially Synthesized Probe
  source 1..80: mol_type = other DNA
attggaaatcatcattctcagtaaactatcgcaagaacaaaaaaccaaacaccgcatattctcactcataggtgggaatt

SEQ ID NO: 114006 - DNA, 80 bp, synthetic construct
  misc_feature 1..80: note = Artificially Synthesized Probe
  source 1..80: mol_type = other DNA
aactaacctgcacattgtgcacatgtaccctaaaacttaaagtataataataataaaataaaaaagaaaaatgtctattc

SEQ ID NO: 114007 - DNA, 80 bp, synthetic construct; identical to SEQ ID NO: 37522
  misc_feature 1..80: note = Artificially Synthesized Probe
  source 1..80: mol_type = other DNA

SEQ ID NO: 114008 - DNA, 80 bp, synthetic construct
  misc_feature 1..80: note = Artificially Synthesized Probe
  source 1..80: mol_type = other DNA
aagggaaaatcagatgtttcttaaacacataggtctggtcggttagacaaaattgccattctcaaatgcagtgaacactc

SEQ ID NO: 114009 - DNA, 80 bp, synthetic construct
  misc_feature 1..80: note = Artificially Synthesized Probe
  source 1..80: mol_type = other DNA
tgcttccttgtaatttcctgtttgcatccaagtatctgcttcaactaaagtcagcatatcaagtaaccgctgacgctgac

SEQ ID NO: 114010 - DNA, 80 bp, synthetic construct; identical to SEQ ID NO: 37523
  misc_feature 1..80: note = Artificially Synthesized Probe
  source 1..80: mol_type = other DNA

SEQ ID NO: 114011 - DNA, 80 bp, synthetic construct
  misc_feature 1..80: note = Artificially Synthesized Probe
  source 1..80: mol_type = other DNA
gccagctccaccacgcaggtgcatttttcctcagccctcagttaggcagccttcccatccctctcaagaacagtctccac

SEQ ID NO: 114012 - DNA, 80 bp, synthetic construct
  misc_feature 1..80: note = Artificially Synthesized Probe
  source 1..80: mol_type = other DNA
taacaactttagagttgatctagtctgaaaggcaagatattttctcccctaaagaagattggttaaggactgctaaactg

SEQ ID NO: 114013 - DNA, 80 bp, synthetic construct; identical to SEQ ID NO: 37430
  misc_feature 1..80: note = Artificially Synthesized Probe
  source 1..80: mol_type = other DNA

SEQ ID NO: 114014 - DNA, 80 bp, synthetic construct
  misc_feature 1..80: note = Artificially Synthesized Probe
  source 1..80: mol_type = other DNA
cagcctccaagtgagtagccaggactacaggcgtataccaccatgtgcagctaatttttgtattttttgtagagacgggt

SEQ ID NO: 114015 - DNA, 80 bp, synthetic construct
  misc_feature 1..80: note = Artificially Synthesized Probe
  source 1..80: mol_type = other DNA
ggtttcgcttgaggcggtcacacggcaagggcacctgctggcagggtccctgggccctcagcacagagcctctctctagg

SEQ ID NO: 114016 - DNA, 80 bp, synthetic construct; identical to SEQ ID NO: 37524
  misc_feature 1..80: note = Artificially Synthesized Probe
  source 1..80: mol_type = other DNA

SEQ ID NO: 114017 - DNA, 80 bp, synthetic construct
  misc_feature 1..80: note = Artificially Synthesized Probe
  source 1..80: mol_type = other DNA
aacaatgtcagtgaatcaacaatgtacagaaacaaagtgtccttcaacaggaatgcacgcgaaacaggaggatttgaaaa

SEQ ID NO: 114018 - DNA, 80 bp, synthetic construct
  misc_feature 1..80: note = Artificially Synthesized Probe
  source 1..80: mol_type = other DNA
gtgagctcctcccagtgcggggcccggtgtgactatgggtctggtaagaacagctgactgtgaggcagagatcaaacaag

SEQ ID NO: 114019 - DNA, 80 bp, synthetic construct; identical to SEQ ID NO: 37525
  misc_feature 1..80: note = Artificially Synthesized Probe
  source 1..80: mol_type = other DNA

SEQ ID NO: 114020 - DNA, 80 bp, synthetic construct
  misc_feature 1..80: note = Artificially Synthesized Probe
  source 1..80: mol_type = other DNA
agtcagtcaccactgctcagctacagagaacatccatccgcaggataatatgaacaggggccaggaagaaaacacaacag

SEQ ID NO: 114021 - DNA, 80 bp, synthetic construct
  misc_feature 1..80: note = Artificially Synthesized Probe
  source 1..80: mol_type = other DNA
caccactcgggtgatgggtgcacccaaatctcaggattcaccactgaagaacttattcatgtaaccaaacaccacctgtt

SEQ ID NO: 114022 - DNA, 80 bp, synthetic construct
  misc_feature 1..80: note = Artificially Synthesized Probe
  source 1..80: mol_type = other DNA
aattctgttaggcagatttggtcatttcaaacaaatactgtgtggtcattaacaatgatgatggaggcctctaattattg

SEQ ID NO: 114023 - DNA, 80 bp, synthetic construct
  misc_feature 1..80: note = Artificially Synthesized Probe
  source 1..80: mol_type = other DNA
ttctgtgtgtgtgcatctgagaacaaagcccagctaatgtttctcctgaatgacagcaatgtgagtaatttgtttcactt

SEQ ID NO: 114024 - DNA, 80 bp, synthetic construct; identical to SEQ ID NO: 37526
  misc_feature 1..80: note = Artificially Synthesized Probe
  source 1..80: mol_type = other DNA

SEQ ID NO: 114025 - DNA, 80 bp, synthetic construct
  misc_feature 1..80: note = Artificially Synthesized Probe
  source 1..80: mol_type = other DNA
atgcggggaacaaagactggctttaaagatgaagtctttcaaaggactttggattttcttagcaaaagaacagaaagcct

SEQ ID NO: 114026 - DNA, 80 bp, synthetic construct
  misc_feature 1..80: note = Artificially Synthesized Probe
  source 1..80: mol_type = other DNA
gcaactttccaaagctcttacaaattcatacacaactttagaattgcgctaagtaaacaggaagagccggggctccttgg

SEQ ID NO: 114027 - DNA, 80 bp, synthetic construct
  misc_feature 1..80: note = Artificially Synthesized Probe
  source 1..80: mol_type = other DNA
ttccttctaagcctccactggtgacccattacttctctaattacccagggcacatgtgaggtcaaacccaaatctgtccc

SEQ ID NO: 114028 - DNA, 80 bp, synthetic construct
  misc_feature 1..80: note = Artificially Synthesized Probe
  source 1..80: mol_type = other DNA
gcttcctgtgagaagaggagggagagagttttaaaactatctgtggtagtacttgctacagcccacattagaagctgggt

SEQ ID NO: 114029 - DNA, 80 bp, synthetic construct; identical to SEQ ID NO: 37527
  misc_feature 1..80: note = Artificially Synthesized Probe
  source 1..80: mol_type = other DNA

SEQ ID NO: 114030 - DNA, 80 bp, synthetic construct
  misc_feature 1..80: note = Artificially Synthesized Probe
  source 1..80: mol_type = other DNA
tgggagcagaaacagcgcatcagctccgagcaggtgggagcagagagccttcacataacctcctctctccccttccgtga

SEQ ID NO: 114031 - DNA, 80 bp, synthetic construct
  misc_feature 1..80: note = Artificially Synthesized Probe
  source 1..80: mol_type = other DNA
agacgaaatggagacagatcggcctgacacatcccacagagctcaggcacaaaacacgcagctatcccaaggcttagagc

SEQ ID NO: 114032 - DNA, 80 bp, synthetic construct; identical to SEQ ID NO: 37528
  misc_feature 1..80: note = Artificially Synthesized Probe
  source 1..80: mol_type = other DNA

SEQ ID NO: 114033 - DNA, 80 bp, synthetic construct
  misc_feature 1..80: note = Artificially Synthesized Probe
  source 1..80: mol_type = other DNA
cagaaaccagcttgtattggttaccaggagtgaggaaaagccgggcattacaatccgttaactgtgagcttcagtgtctc

SEQ ID NO: 114034 - DNA, 80 bp, synthetic construct; identical to SEQ ID NO: 37650
  misc_feature 1..80: note = Artificially Synthesized Probe
  source 1..80: mol_type = other DNA

SEQ ID NO: 114035 - DNA, 80 bp, synthetic construct
  misc_feature 1..80: note = Artificially Synthesized Probe
  source 1..80: mol_type = other DNA
ctgttgagaccacagactcctgagtgctacaggatcagacttttagtgggtgtggcctgggaatcttattttttttaaga

SEQ ID NO: 114036 - DNA, 80 bp, synthetic construct
  misc_feature 1..80: note = Artificially Synthesized Probe
  source 1..80: mol_type = other DNA
agtcctttggcatctggagatgggttcctgcagcacagccggcctcccgcctcggggcatccggcagggaggtctggatc

SEQ ID NO: 114037 - DNA, 80 bp, synthetic construct
  misc_feature 1..80: note = Artificially Synthesized Probe
  source 1..80: mol_type = other DNA
tactaaaatacaaaaaatttgccgggcgtggtggcacatgcctgtaatcccagctactctggaggctgaggcacgagaat

SEQ ID NO: 114038 - DNA, 80 bp, synthetic construct
  misc_feature 1..80: note = Artificially Synthesized Probe
  source 1..80: mol_type = other DNA
gaaagaatgaagcacaaacacagtagaaagtgataaggaaagatacaggctaaatattaggtaaaagagcaggtggcaga

SEQ ID NO: 114039 - DNA, 80 bp, synthetic construct
  misc_feature 1..80: note = Artificially Synthesized Probe
  source 1..80: mol_type = other DNA
cttactatatgattccattttcatgaagtttccagaacaggcaaatccacaaagacagaaagtggcttagtggctgccag

SEQ ID NO: 114040 - DNA, 80 bp, synthetic construct
  misc_feature 1..80: note = Artificially Synthesized Probe
  source 1..80: mol_type = other DNA
actaaattgtacacattaagagcctgaattctgcggcatgtgaattacatcccaatgcaaaaaacactaaagaattcgta

SEQ ID NO: 114041 - DNA, 80 bp, synthetic construct; identical to SEQ ID NO: 37651
  misc_feature 1..80: note = Artificially Synthesized Probe
  source 1..80: mol_type = other DNA

SEQ ID NO: 114042 - DNA, 80 bp, synthetic construct
  misc_feature 1..80: note = Artificially Synthesized Probe
  source 1..80: mol_type = other DNA
gaccttatgttttcacggctatgaagtatctgcacgccagtaagtagccaatatagtggtcaccttttaaaaggaagagt

SEQ ID NO: 114043 - DNA, 80 bp, synthetic construct
  misc_feature 1..80: note = Artificially Synthesized Probe
  source 1..80: mol_type = other DNA
ctgagcacctgaaatggggctggtccgaactaacatttctaagacttagcacacaaaaaagaatgtgaaatatctcgaca

SEQ ID NO: 114044 - DNA, 80 bp, synthetic construct
  misc_feature 1..80: note = Artificially Synthesized Probe
  source 1..80: mol_type = other DNA
gaggctgaggcgggtggatcacgaggtcaggagattgagaccatcctggctaacatggtgaaaccccgtctctactaaaa

SEQ ID NO: 114045 - DNA, 80 bp, synthetic construct; identical to SEQ ID NO: 37652
  misc_feature 1..80: note = Artificially Synthesized Probe
  source 1..80: mol_type = other DNA

SEQ ID NO: 114046 - DNA, 80 bp, synthetic construct
  misc_feature 1..80: note = Artificially Synthesized Probe
  source 1..80: mol_type = other DNA
tgtgactttttaacaatgacctgatcaatgcttgcatcactgcctaacagatcaattccgaagagcaggcgggtgccctg

SEQ ID NO: 114047 - DNA, 80 bp, synthetic construct
  misc_feature 1..80: note = Artificially Synthesized Probe
  source 1..80: mol_type = other DNA
actctatttggtgtcccacaaatacagttagacatggcctctatcctcaagggttttgcatggatggggtgagaaagaaa

SEQ ID NO: 114048 - DNA, 80 bp, synthetic construct
  misc_feature 1..80: note = Artificially Synthesized Probe
  source 1..80: mol_type = other DNA
aaggggagggtgtgtggggcagggaaggggtcaagagaccaagctgggtggagctcggggaataaagggggaaataggat

SEQ ID NO: 114049 - DNA, 80 bp, synthetic construct
  misc_feature 1..80: note = Artificially Synthesized Probe
  source 1..80: mol_type = other DNA
atggcccatgagctaagaatggcttttacattttgaagtggttagaaaaaaatcaaaatcaaaatattctgtgatgcatg

SEQ ID NO: 114050 - DNA, 80 bp, synthetic construct; identical to SEQ ID NO: 37653
  misc_feature 1..80: note = Artificially Synthesized Probe
  source 1..80: mol_type = other DNA

SEQ ID NO: 114051 - DNA, 80 bp, synthetic construct
  misc_feature 1..80: note = Artificially Synthesized Probe
  source 1..80: mol_type = other DNA
caacaacaaaacaaaaactaatgtgataccctgcaggtttcacattattgggaagccctgtaccagtctgtctcacccaa

SEQ ID NO: 114052 - DNA, 80 bp, synthetic construct
  misc_feature 1..80: note = Artificially Synthesized Probe
  source 1..80: mol_type = other DNA
ctccgccccccgggttcatgccattctcctgcctcagcctcccgagtagctgggactacaggcgcccaccaccatgcccg

SEQ ID NO: 114053 - DNA, 80 bp, synthetic construct
  misc_feature 1..80: note = Artificially Synthesized Probe
  source 1..80: mol_type = other DNA
ttgcattaataaaatatgagttcacatgatttaattcaacgcactcctggtattccatgatgttccaccatatcatgtgg

SEQ ID NO: 114054 - DNA, 80 bp, synthetic construct; identical to SEQ ID NO: 37654
  misc_feature 1..80: note = Artificially Synthesized Probe
  source 1..80: mol_type = other DNA

SEQ ID NO: 114055 - DNA, 80 bp, synthetic construct
  misc_feature 1..80: note = Artificially Synthesized Probe
  source 1..80: mol_type = other DNA
gagttcgagaccagcctggccaacatggcgaaaccctgtctctactaaaaatacaaaaaaattagccaggtgtggtggcg

SEQ ID NO: 114056 - DNA, 80 bp, synthetic construct
  misc_feature 1..80: note = Artificially Synthesized Probe
  source 1..80: mol_type = other DNA
tttctggcaagagcagggtgcccaggctgggacccacacatctctctttcacttgggccttgcctttcttcctagaccct

SEQ ID NO: 114057 - DNA, 80 bp, synthetic construct
  misc_feature 1..80: note = Artificially Synthesized Probe
  source 1..80: mol_type = other DNA
aattccaccgggcttttacaaggattagaagtaatacatgtaatacaccaggcacatagtatgtacccatgggtaacatc

SEQ ID NO: 114058 - DNA, 80 bp, synthetic construct
  misc_feature 1..80: note = Artificially Synthesized Probe
  source 1..80: mol_type = other DNA
tgcaccaccaggcccagctaattaattttttgtgtgtggagacagagtcttgttatgttgcccaggctggtcttgaattc

SEQ ID NO: 114059 - DNA, 80 bp, synthetic construct; identical to SEQ ID NO: 37655
  misc_feature 1..80: note = Artificially Synthesized Probe
  source 1..80: mol_type = other DNA

SEQ ID NO: 114060 - DNA, 80 bp, synthetic construct
  misc_feature 1..80: note = Artificially Synthesized Probe
  source 1..80: mol_type = other DNA
tataatttattccagagtgtctatttggaaacaataaaagaactttgctacccctgaagtttatcccagcctcagtggtt

SEQ ID NO: 114061 - DNA, 80 bp, synthetic construct
  misc_feature 1..80: note = Artificially Synthesized Probe
  source 1..80: mol_type = other DNA
cagcgcagtgggtgcttggctgataataacacctgtaaagaggccgcaagatagagacttcagtgagatgcgttttcgtc

SEQ ID NO: 114062 - DNA, 80 bp, synthetic construct; identical to SEQ ID NO: 37656
  misc_feature 1..80: note = Artificially Synthesized Probe
  source 1..80: mol_type = other DNA

SEQ ID NO: 114063 - DNA, 80 bp, synthetic construct
  misc_feature 1..80: note = Artificially Synthesized Probe
  source 1..80: mol_type = other DNA
gttagaaatatttgcctacaaagtgagtaaattttatgtaactctgttaattctctgtaactgcttcctctgccactgct

SEQ ID NO: 114064 - DNA, 80 bp, synthetic construct
  misc_feature 1..80: note = Artificially Synthesized Probe
  source 1..80: mol_type = other DNA
ggagaattcattggttcaacaaatgctgagtgccacatttcgttgctgaaacaattctaatagacataacagctctatat

SEQ ID NO: 114065 - DNA, 80 bp, synthetic construct
  misc_feature 1..80: note = Artificially Synthesized Probe
  source 1..80: mol_type = other DNA
tgttataaaacccctccccgctccccgaactttctggaaaaagaacttcatttgcaattttggctgggtaaaaagggaaa

SEQ ID NO: 114066 - DNA, 80 bp, synthetic construct; identical to SEQ ID NO: 37657
  misc_feature 1..80: note = Artificially Synthesized Probe
  source 1..80: mol_type = other DNA

SEQ ID NO: 114067 - DNA, 80 bp, synthetic construct; identical to SEQ ID NO: 37553
  misc_feature 1..80: note = Artificially Synthesized Probe
  source 1..80: mol_type = other DNA

SEQ ID NO: 114068 - DNA, 80 bp, synthetic construct
  misc_feature 1..80: note = Artificially Synthesized Probe
  source 1..80: mol_type = other DNA
gaggcaatttgcctgcagtccttgccacttcttgttgattagtccagcagcccccagctgggaggcaattctgttcaccc

SEQ ID NO: 114069 - DNA, 80 bp, synthetic construct
  misc_feature 1..80: note = Artificially Synthesized Probe
  source 1..80: mol_type = other DNA
tgtcaatagtgccagggtagagactcagctctagtttatattttccaacttagctcctcaatgaaaatctcaagtttcca

SEQ ID NO: 114070 - DNA, 80 bp, synthetic construct
  misc_feature 1..80: note = Artificially Synthesized Probe
  source 1..80: mol_type = other DNA
ggactgaaggaagccttgaatgtgtggttacaacaaaggggaggggacagtttgtccgtttggctaacaaaagtagtaag

SEQ ID NO: 114071 - DNA, 80 bp, synthetic construct
  misc_feature 1..80: note = Artificially Synthesized Probe
  source 1..80: mol_type = other DNA
cagggagacaatacaggaagtgattaggcaggaggctttggcggcgaccggaaggctggagaattattgcctctgtaaca

SEQ ID NO: 114072 - DNA, 80 bp, synthetic construct; identical to SEQ ID NO: 37658
  misc_feature 1..80: note = Artificially Synthesized Probe
  source 1..80: mol_type = other DNA

SEQ ID NO: 114073 - DNA, 80 bp, synthetic construct
  misc_feature 1..80: note = Artificially Synthesized Probe
  source 1..80: mol_type = other DNA
ttaaatttcccgaataagatgagcacagaaacacgcaatctgttctgaattgacccaaagatgtgacatcaaatgacatc

SEQ ID NO: 114074 - DNA, 80 bp, synthetic construct
  misc_feature 1..80: note = Artificially Synthesized Probe
  source 1..80: mol_type = other DNA
cgcgtctgtcattttaaaggtctgcagtaaaaataccaggatttacacaaaagatttgctcctgagacatatcctgcttt

SEQ ID NO: 114075 - DNA, 80 bp, synthetic construct
  misc_feature 1..80: note = Artificially Synthesized Probe
  source 1..80: mol_type = other DNA
ttataagctcctcagatgtttgatatttcaggcccacaaatattttctaaagaaatggatggagaccccagagagctcct

SEQ ID NO: 114076 - DNA, 80 bp, synthetic construct; identical to SEQ ID NO: 37659
  misc_feature 1..80: note = Artificially Synthesized Probe
  source 1..80: mol_type = other DNA

SEQ ID NO: 114077 - DNA, 80 bp, synthetic construct
  misc_feature 1..80: note = Artificially Synthesized Probe
  source 1..80: mol_type = other DNA
agtataattaagtgctgttgcagctttaggaatggacttctatatcattggtataatttcaacagttttccaggagacag

SEQ ID NO: 114078 - DNA, 80 bp, synthetic construct
  misc_feature 1..80: note = Artificially Synthesized Probe
  source 1..80: mol_type = other DNA
gttctccctctacctaagagtccctttgagatctctgcttagcatggttcacaatagctgtaaggtggaaaccacccaag

SEQ ID NO: 114079 - DNA, 80 bp, synthetic construct
  misc_feature 1..80: note = Artificially Synthesized Probe
  source 1..80: mol_type = other DNA
actctatgattccacttatatagtgtatagtcatcacattcacggggacatgaaaacatgggccgcccagtcctgaaaac

SEQ ID NO: 114080 - DNA, 80 bp, synthetic construct; identical to SEQ ID NO: 37660
  misc_feature 1..80: note = Artificially Synthesized Probe
  source 1..80: mol_type = other DNA

SEQ ID NO: 114081 - DNA, 80 bp, synthetic construct
  misc_feature 1..80: note = Artificially Synthesized Probe
  source 1..80: mol_type = other DNA
gaatagcatccaaactttgcccatggcctccaaggccctgcaggttgcccctgcctcttctgcctctccttgctttgctc

SEQ ID NO: 114082 - DNA, 80 bp, synthetic construct
  misc_feature 1..80: note = Artificially Synthesized Probe
  source 1..80: mol_type = other DNA
gcatcacacggccttgcttttttgtctctactgttcaatttttcagccaagttcaaatacaagaagcctcttatggccag

SEQ ID NO: 114083 - DNA, 80 bp, synthetic construct
  misc_feature 1..80: note = Artificially Synthesized Probe
  source 1..80: mol_type = other DNA
cacaaacacatgcacacacgtccaaaaaaactgcagagatcttagtagaaataggcttaccatatatagcacatctgggc

SEQ ID NO: 114084 - DNA, 80 bp, synthetic construct
  misc_feature 1..80: note = Artificially Synthesized Probe
  source 1..80: mol_type = other DNA
gttggggagcccaggccccaccccggacgcaccttggtctggatgacctgttgtgggaagtcactcatggcatttgtcaa

SEQ ID NO: 114085 - DNA, 80 bp, synthetic construct
  misc_feature 1..80: note = Artificially Synthesized Probe
  source 1..80: mol_type = other DNA
atctacaggcagtggcaagtcaactgtactttttagaaagtcatggaattcacaaacattaaaaataagaataaggaatt

SEQ ID NO: 114086 - DNA, 80 bp, synthetic construct; identical to SEQ ID NO: 37661
  misc_feature 1..80: note = Artificially Synthesized Probe
  source 1..80: mol_type = other DNA

SEQ ID NO: 114087 - DNA, 80 bp, synthetic construct
  misc_feature 1..80: note = Artificially Synthesized Probe
  source 1..80: mol_type = other DNA
tattagtacccatgagtttctaggttaatttaagggaatttcctaccctaaaacagacagcatgaggccgaccactcagt

SEQ ID NO: 114088 - DNA, 80 bp, synthetic construct
  misc_feature 1..80: note = Artificially Synthesized Probe
  source 1..80: mol_type = other DNA
cagcccctgtgctaaatagcttatagaaattatttctaatatagcaaccacacgagctattattatcgatttcacagatg

SEQ ID NO: 114089 - DNA, 80 bp, synthetic construct; identical to SEQ ID NO: 37662
  misc_feature 1..80: note = Artificially Synthesized Probe
  source 1..80: mol_type = other DNA

SEQ ID NO: 114090 - DNA, 80 bp, synthetic construct
  misc_feature 1..80: note = Artificially Synthesized Probe
  source 1..80: mol_type = other DNA
gtcccagctactcgggaggctgaggcaggagaatggcctgaacctgggaggtggagcttgcagtgagctgagatggtgcc

SEQ ID NO: 114091 - DNA, 80 bp, synthetic construct
  misc_feature 1..80: note = Artificially Synthesized Probe
  source 1..80: mol_type = other DNA
gagccaccacacccaatgcagctctcaactcttcatttctacatatgctttccccataagtgtcaaggaaaccatttgtt

SEQ ID NO: 114092 - DNA, 80 bp, synthetic construct
  misc_feature 1..80: note = Artificially Synthesized Probe
  source 1..80: mol_type = other DNA
gtgggcagatcatgaggtcaggagatcgagaccatcttggccagcatggtgaaaccctgtctctactaaaaatacaacaa

SEQ ID NO: 114093 - DNA, 80 bp, synthetic construct; identical to SEQ ID NO: 37663
  misc_feature 1..80: note = Artificially Synthesized Probe
  source 1..80: mol_type = other DNA

SEQ ID NO: 114094 - DNA, 80 bp, synthetic construct
  misc_feature 1..80: note = Artificially Synthesized Probe
  source 1..80: mol_type = other DNA
agagctttccaggcagagctggaatgagcttccagaggccagcagggtggaagtgcagtgagggaaggcatctagcttgg

SEQ ID NO: 114095 - DNA, 80 bp, synthetic construct
  misc_feature 1..80: note = Artificially Synthesized Probe
  source 1..80: mol_type = other DNA
agaacgagccacacaggcgacggggaaccgaggacacttagaaacgggaagaaccaggcatggcccagcgctgctggtca

SEQ ID NO: 114096 - DNA, 80 bp, synthetic construct
  misc_feature 1..80: note = Artificially Synthesized Probe
  source 1..80: mol_type = other DNA
ctggctgctgggctgagagactgccgagcaccagtggtggaatcatccgggctagatgctggtggctgggaccagagggg

SEQ ID NO: 114097 - DNA, 80 bp, synthetic construct
  misc_feature 1..80: note = Artificially Synthesized Probe
  source 1..80: mol_type = other DNA
ggggtgctttgggaggagtagatctggggggactatgacaggctcagcttggccaccttaagtttaaggtgcctgtcaga

SEQ ID NO: 114098 - DNA, 80 bp, synthetic construct
  misc_feature 1..80: note = Artificially Synthesized Probe
  source 1..80: mol_type = other DNA
ccctttcgcccacttcattctgggtcttcccctatattttttttcctgggagaatccttttgctgatcttagagtttcca

SEQ ID NO: 114099 - DNA, 80 bp, synthetic construct; identical to SEQ ID NO: 37664
  misc_feature 1..80: note = Artificially Synthesized Probe
  source 1..80: mol_type = other DNA

SEQ ID NO: 114100 - DNA, 80 bp, synthetic construct
  misc_feature 1..80: note = Artificially Synthesized Probe
  source 1..80: mol_type = other DNA
acaaaagctggcctgaattgacatgaagttacttatggtccttctcttccccacttcgggtgaatattcatatagttcag

SEQ ID NO: 114101 - DNA, 80 bp, synthetic construct
  misc_feature 1..80: note = Artificially Synthesized Probe
  source 1..80: mol_type = other DNA
cttcccttggtttttcaaaagtttcctattttacaagtaagtgggtacctatgggggtatactgtttaaatgtttgtaaa

SEQ ID NO: 114102 - DNA, 80 bp, synthetic construct; identical to SEQ ID NO: 37665
  misc_feature 1..80: note = Artificially Synthesized Probe
  source 1..80: mol_type = other DNA

SEQ ID NO: 114103 - DNA, 80 bp, synthetic construct
  misc_feature 1..80: note = Artificially Synthesized Probe
  source 1..80: mol_type = other DNA
gcctgtagtcccagctattcgggaggctgaggcaggagaatggtgtaaacctcgggggtggagcttgcagtgagccgaga

SEQ ID NO: 114104 - DNA, 80 bp, synthetic construct
  misc_feature 1..80: note = Artificially Synthesized Probe
  source 1..80: mol_type = other DNA
gagtttgagactagcctggccaacatagtgaaaccccatccctactaaaaatacaaaaattagccgggtgtgggggtgca

SEQ ID NO: 114105 - DNA, 80 bp, synthetic construct
  misc_feature 1..80: note = Artificially Synthesized Probe
  source 1..80: mol_type = other DNA
caggtgcatttaaaattttgactcgattataatattaaagttaagccaatttaatatttttattaattataatgctaatg

SEQ ID NO: 114106 - DNA, 80 bp, synthetic construct
  misc_feature 1..80: note = Artificially Synthesized Probe
  source 1..80: mol_type = other DNA
atattgttgtatttaaatatacatcacacatacattaaggtaatgcgtgcccttcacgcagaaagcaaagatcaagtgat

SEQ ID NO: 114107 - DNA, 80 bp, synthetic construct; identical to SEQ ID NO: 37554
  misc_feature 1..80: note = Artificially Synthesized Probe
  source 1..80: mol_type = other DNA

SEQ ID NO: 114108 - DNA, 80 bp, synthetic construct; identical to SEQ ID NO: 37666
  misc_feature 1..80: note = Artificially Synthesized Probe
  source 1..80: mol_type = other DNA

SEQ ID NO: 114109 - DNA, 80 bp, synthetic construct
  misc_feature 1..80: note = Artificially Synthesized Probe
  source 1..80: mol_type = other DNA
atccagaaggacgggaggtaaggatctttccataagcaaacaatgtttcagggcacgatgtaaaaagataaaatacatgt

SEQ ID NO: 114110 - DNA, 80 bp, synthetic construct
  misc_feature 1..80: note = Artificially Synthesized Probe
  source 1..80: mol_type = other DNA
tcatcgaagcctgcgctggtcatttatgatacaaagcaggaaaataattgcagggaggcacaatgctaacaacaccccaa

SEQ ID NO: 114111 - DNA, 80 bp, synthetic construct
  misc_feature 1..80: note = Artificially Synthesized Probe
  source 1..80: mol_type = other DNA
ccctcgggggcccttgaaatagccactaggatcgggaaatccaactttcccagcggtgcagcgaggaaaaccaaaaggaa

SEQ ID NO: 114112 - DNA, 80 bp, synthetic construct; identical to SEQ ID NO: 37667
  misc_feature 1..80: note = Artificially Synthesized Probe
  source 1..80: mol_type = other DNA

SEQ ID NO: 114113 - DNA, 80 bp, synthetic construct
  misc_feature 1..80: note = Artificially Synthesized Probe
  source 1..80: mol_type = other DNA
agaaggggagggggtgtccgaggcgacctgaacgcgaggatttggggcaaaaaggtgagaaacagttcccggggaagctc

SEQ ID NO: 114114 - DNA, 80 bp, synthetic construct
  misc_feature 1..80: note = Artificially Synthesized Probe
  source 1..80: mol_type = other DNA
agatctaggaatttggggtaaaaatgagaagggagtcttcgaggtccccccgatgcaagaagtttgcgactaagagtgac

SEQ ID NO: 114115 - DNA, 80 bp, synthetic construct; identical to SEQ ID NO: 37668
  misc_feature 1..80: note = Artificially Synthesized Probe
  source 1..80: mol_type = other DNA

SEQ ID NO: 114116 - DNA, 80 bp, synthetic construct
  misc_feature 1..80: note = Artificially Synthesized Probe
  source 1..80: mol_type = other DNA
tgcccccaactcagagatctagggggttaaggtgagaagagggtccccaagcgcccccaattcagggagtttgaggagtt

SEQ ID NO: 114117 - DNA, 80 bp, synthetic construct
  misc_feature 1..80: note = Artificially Synthesized Probe
  source 1..80: mol_type = other DNA
gggtccccccaaactccgccgcgcgcgcggacggggtggcggaggcgggtcccgcgggcgcaccacccggacgtttgggg

SEQ ID NO: 114118 - DNA, 80 bp, synthetic construct
  misc_feature 1..80: note = Artificially Synthesized Probe
  source 1..80: mol_type = other DNA
tgggcggatcacctgaggtccggagttcgagaccagcctggccaacatggtgaaaccctatctctactaaaaatacaaaa

SEQ ID NO: 114119 - DNA, 80 bp, synthetic construct
  misc_feature 1..80: note = Artificially Synthesized Probe
  source 1..80: mol_type = other DNA
tgcgtgttggtccccgttggtaagtaacagtctccacggctacagtctctatggcggcggcggtggcggcggcggccgct

SEQ ID NO: 114120 - DNA, 80 bp, synthetic construct
  misc_feature 1..80: note = Artificially Synthesized Probe
  source 1..80: mol_type = other DNA
cctacggcgttccattggctgtctgcagagtctgtcggaaggaggaggcgttcccccttgaaaaagagtgcgagactcgg

SEQ ID NO: 114121 - DNA, 80 bp, synthetic construct; identical to SEQ ID NO: 37669
  misc_feature 1..80: note = Artificially Synthesized Probe
  source 1..80: mol_type = other DNA

SEQ ID NO: 114122 - DNA, 80 bp, synthetic construct
  misc_feature 1..80: note = Artificially Synthesized Probe
  source 1..80: mol_type = other DNA
aaaaatacaaaaaattagccgggcgtggtggcaggcgcctgtagtcccagctacttgggaggctgaggcaggagaatggt

SEQ ID NO: 114123 - DNA, 80 bp, synthetic construct
  misc_feature 1..80: note = Artificially Synthesized Probe
  source 1..80: mol_type = other DNA
actctcttttattgtattgggcccagtattttgaactagtttaaagattggcaaactgcggcctgcgggtcaaattctgc

SEQ ID NO: 114124 - DNA, 80 bp, synthetic construct
  misc_feature 1..80: note = Artificially Synthesized Probe
  source 1..80: mol_type = other DNA
cagaaaatgtttgccaaactcaccagccctcctctcaagctggtagattcagctacgagtaggacagaaacagacagatc

SEQ ID NO: 114125 - DNA, 80 bp, synthetic construct; identical to SEQ ID NO: 37670
  misc_feature 1..80: note = Artificially Synthesized Probe
  source 1..80: mol_type = other DNA

SEQ ID NO: 114126 - DNA, 80 bp, synthetic construct
  misc_feature 1..80: note = Artificially Synthesized Probe
  source 1..80: mol_type = other DNA
ttgagacagagtctctctctgtcacccagactggagtgcagtggtgcgatctggctcgctcactgcaacctctgtctccc

SEQ ID NO: 114127 - DNA, 80 bp, synthetic construct
  misc_feature 1..80: note = Artificially Synthesized Probe
  source 1..80: mol_type = other DNA
gactctcaaagtgctaggattacaggcatgagccaccatgcccggcctttccccatttttcagatcaggaagctgaggcc

SEQ ID NO: 114128 - DNA, 80 bp, synthetic construct; identical to SEQ ID NO: 37671
  misc_feature 1..80: note = Artificially Synthesized Probe
  source 1..80: mol_type = other DNA

SEQ ID NO: 114129 - DNA, 80 bp, synthetic construct
  misc_feature 1..80: note = Artificially Synthesized Probe
  source 1..80: mol_type = other DNA
gcagtggcatgatctcggctcactgcaacctccgcctcccgagttcaagtgattctcctgtttcagtctcccgagtagct

SEQ ID NO: 114130 - DNA, 80 bp, synthetic construct
  misc_feature 1..80: note = Artificially Synthesized Probe
  source 1..80: mol_type = other DNA
ttttaaaatgcaaaaggaaagataccccaaactcccaccataacatagaaactcagacgaggcattgccctgaacagttt

SEQ ID NO: 114131 - DNA, 80 bp, synthetic construct
  misc_feature 1..80: note = Artificially Synthesized Probe
  source 1..80: mol_type = other DNA
cctggccatgtgacagattcttaagctcaagtggtctacagtaatcagtccctttcattcaattattaatttagtcaaaa

SEQ ID NO: 114132 - DNA, 80 bp, synthetic construct
  misc_feature 1..80: note = Artificially Synthesized Probe
  source 1..80: mol_type = other DNA
gctgaggtgggaggatcgcttgagcccaggagttctaggctgtggtgagctatgactgtgcctctgaactccagcttggt

SEQ ID NO: 114133 - DNA, 80 bp, synthetic construct
  misc_feature 1..80: note = Artificially Synthesized Probe
  source 1..80: mol_type = other DNA
ctgatttcaactaaggtttgggctatacgaccagacaaacagtgtgattattcccagcttttcgtttctaaagtgagcac

SEQ ID NO: 114134 - DNA, 80 bp, synthetic construct; identical to SEQ ID NO: 37672
  misc_feature 1..80: note = Artificially Synthesized Probe
  source 1..80: mol_type = other DNA

SEQ ID NO: 114135 - DNA, 80 bp, synthetic construct
  misc_feature 1..80: note = Artificially Synthesized Probe
  source 1..80: mol_type = other DNA
gttggtcaccctgggtctctctaaggagctgacatttgaggcaacgttggagtaacgaggaacaaaggaaaatagtttgg

SEQ ID NO: 114136 - DNA, 80 bp, synthetic construct
  misc_feature 1..80: note = Artificially Synthesized Probe
  source 1..80: mol_type = other DNA
gatatgatggccatcattttattggaggccgtagggaagaagtcacgatcagactgggaaaccaatggagggtgtctttt

SEQ ID NO: 114137 - DNA, 80 bp, synthetic construct
  misc_feature 1..80: note = Artificially Synthesized Probe
  source 1..80: mol_type = other DNA
tcaagttgtagcctcggggagtaaggtgaccgcctgtcctggaactgctggtcaacccgtttagctaagctagacctctt

SEQ ID NO: 114138 - DNA, 80 bp, synthetic construct; identical to SEQ ID NO: 37673
  misc_feature 1..80: note = Artificially Synthesized Probe
  source 1..80: mol_type = other DNA

SEQ ID NO: 114139 - DNA, 80 bp, synthetic construct
  misc_feature 1..80: note = Artificially Synthesized Probe
  source 1..80: mol_type = other DNA
tctcttgcctcagcctcccgagtagctgggattacaggtgcacgccaccatgcccagctaatttttgtatttttagtaga

SEQ ID NO: 114140 - DNA, 80 bp, synthetic construct
  misc_feature 1..80: note = Artificially Synthesized Probe
  source 1..80: mol_type = other DNA
ggggagtgggtggaatgtcacccgatctgtgattttattttattttgtcaattaattatttttttaagagactcttgccg

SEQ ID NO: 114141 - DNA, 80 bp, synthetic construct
  misc_feature 1..80: note = Artificially Synthesized Probe
  source 1..80: mol_type = other DNA
cagatactcgggaggctgaggcaggagaatggcgtgaacccgggaggcggagcttgcagtgagccgagatcggtgccact

SEQ ID NO: 114142 - DNA, 80 bp, synthetic construct
  misc_feature 1..80: note = Artificially Synthesized Probe
  source 1..80: mol_type = other DNA
ggcccggatgtttgtggatggactgcggggcatggcctgtggtcctgatgctgtgatttatgaagagaggcctctgtgcc

SEQ ID NO: 114143 - DNA, 80 bp, synthetic construct; identical to SEQ ID NO: 37674
  misc_feature 1..80: note = Artificially Synthesized Probe
  source 1..80: mol_type = other DNA

SEQ ID NO: 114144 - DNA, 80 bp, synthetic construct
  misc_feature 1..80: note = Artificially Synthesized Probe
  source 1..80: mol_type = other DNA
tacttgaggtcagcctggccaacatggtgaaacccggtctctattaaaaacccaaaaatgagctgggtatgatggcaggc

SEQ ID NO: 114145 - DNA, 80 bp, synthetic construct
  misc_feature 1..80: note = Artificially Synthesized Probe
  source 1..80: mol_type = other DNA
aagctcagttgagccacctcatggggaatagattgtaggagacaaaagggacagagagagatcctaggagtctgtcccag

SEQ ID NO: 114146 - DNA, 80 bp, synthetic construct
  misc_feature 1..80: note = Artificially Synthesized Probe
  source 1..80: mol_type = other DNA
ctggtttgtacactccgttctgctagaatgcttgtctttgaaatgtcagttagtcccaaagtggtggatataataggaaa

SEQ ID NO: 114147 - DNA, 80 bp, synthetic construct; identical to SEQ ID NO: 37675
  misc_feature 1..80: note = Artificially Synthesized Probe
  source 1..80: mol_type = other DNA

SEQ ID NO: 114148 - DNA, 80 bp, synthetic construct
  misc_feature 1..80: note = Artificially Synthesized Probe
  source 1..80: mol_type = other DNA
attagaaaatacattaagggccaggcacagtggctcacacctgtaatcccagcaattggggaggctgaggcaggtggatc

SEQ ID NO: 114149 - DNA, 80 bp, synthetic construct
  misc_feature 1..80: note = Artificially Synthesized Probe
  source 1..80: mol_type = other DNA
ggctgcagtgagctatgatcacgccactgtactccagcctgggtgacagagagagaccctgtctcttaataagaaaagaa

SEQ ID NO: 114150 - DNA, 80 bp, synthetic construct
  misc_feature 1..80: note = Artificially Synthesized Probe
  source 1..80: mol_type = other DNA
ccttaaagtagccacttgaaccatgttggaggaccttgttgggcacagcttggagaggaaatagcagagctgaagtctgc

SEQ ID NO: 114151 - DNA, 80 bp, synthetic construct; identical to SEQ ID NO: 37676
  misc_feature 1..80: note = Artificially Synthesized Probe
  source 1..80: mol_type = other DNA

SEQ ID NO: 114152 - DNA, 80 bp, synthetic construct; identical to SEQ ID NO: 37543
  misc_feature 1..80: note = Artificially Synthesized Probe
  source 1..80: mol_type = other DNA

SEQ ID NO: 114153 - DNA, 80 bp, synthetic construct
  misc_feature 1..80: note = Artificially Synthesized Probe
  source 1..80: mol_type = other DNA
gcgcagtggctcacgactgtaattccagcactttgggaggccaaagtgggaggatcacttgaggccaggagcttgagacc

SEQ ID NO: 114154 - DNA, 80 bp, synthetic construct; identical to SEQ ID NO: 37555
  misc_feature 1..80: note = Artificially Synthesized Probe
  source 1..80: mol_type = other DNA

SEQ ID NO: 114155 - DNA, 80 bp, synthetic construct
  misc_feature 1..80: note = Artificially Synthesized Probe
  source 1..80: mol_type = other DNA
attctagcctgggcaacagaggctctgtcaatgaaggaaaaaaaaagaaaggaaggaaggaaggaaggaagaggaaagaa

SEQ ID NO: 114156 - DNA, 80 bp, synthetic construct
  misc_feature 1..80: note = Artificially Synthesized Probe
  source 1..80: mol_type = other DNA
aaattacctaggtgtattcccaaatttttggctgtgaaatgaattctttgcctcacatcaccccataataaagctgtggt

SEQ ID NO: 114157 - DNA, 80 bp, synthetic construct; identical to SEQ ID NO: 37677
  misc_feature 1..80: note = Artificially Synthesized Probe
  source 1..80: mol_type = other DNA

SEQ ID NO: 114158 - DNA, 80 bp, synthetic construct
  misc_feature 1..80: note = Artificially Synthesized Probe
  source 1..80: mol_type = other DNA
gagcagtataggagaatggctacaatctacttattaaacaaaaaaagtaaatgcagtacagtgttcacagtgcactccta

SEQ ID NO: 114159 - DNA, 80 bp, synthetic construct
  misc_feature 1..80: note = Artificially Synthesized Probe
  source 1..80: mol_type = other DNA
gccaggagtttgaaatcagcctggccaacatggggaaaccctgtctctactaaaaaatacaaaaattaccccagaaatgg

SEQ ID NO: 114160 - DNA, 80 bp, synthetic construct
  misc_feature 1..80: note = Artificially Synthesized Probe
  source 1..80: mol_type = other DNA
ataaaaataaaaataaaataaagtatatgtctacctacagtgtgtgtgtgtgtgtgtgtgtgtgtgtgtgtgtatgtctt

SEQ ID NO: 114161 - DNA, 80 bp, synthetic construct; identical to SEQ ID NO: 37678
  misc_feature 1..80: note = Artificially Synthesized Probe
  source 1..80: mol_type = other DNA

SEQ ID NO: 114162 - DNA, 80 bp, synthetic construct
  misc_feature 1..80: note = Artificially Synthesized Probe
  source 1..80: mol_type = other DNA
ttacttcctccctcccttcctcccttcccttcctttccctttctttcctccctcccttcctccctccctccttccctccc

SEQ ID NO: 114163 - DNA, 80 bp, synthetic construct
  misc_feature 1..80: note = Artificially Synthesized Probe
  source 1..80: mol_type = other DNA
ctttctcttttgagacagggtcttgctctgtctcccaggctgctgtgcagcggtgtgaccatggctcactgcagccttga

SEQ ID NO: 114164 - DNA, 80 bp, synthetic construct
  misc_feature 1..80: note = Artificially Synthesized Probe
  source 1..80: mol_type = other DNA
acctcagcctttgaaagtattgggattatgagtatgaatcaccacacctggcctattcactctttcttccttccttacct

SEQ ID NO: 114165 - DNA, 80 bp, synthetic construct
  misc_feature 1..80: note = Artificially Synthesized Probe
  source 1..80: mol_type = other DNA
aacacttaacatgagatgtagcctcttacattttgatgtgcacagcacggtattattaactctaggcataatattgtgct

SEQ ID NO: 114166 - DNA, 80 bp, synthetic construct
  misc_feature 1..80: note = Artificially Synthesized Probe
  source 1..80: mol_type = other DNA
cttaagggaggctggaggaaggtggctggtggtcgtctgcaagaccagggtgcgcagcaaccccacatggccctgggcca

SEQ ID NO: 114167 - DNA, 80 bp, synthetic construct; identical to SEQ ID NO: 37679
  misc_feature 1..80: note = Artificially Synthesized Probe
  source 1..80: mol_type = other DNA

SEQ ID NO: 114168 - DNA, 80 bp, synthetic construct
  misc_feature 1..80: note = Artificially Synthesized Probe
  source 1..80: mol_type = other DNA
tcaagacagaaaccacagtctttttatagcccaatatcaggagtgacatcctatcacttctgacttatttgtcagaagta

SEQ ID NO: 114169 - DNA, 80 bp, synthetic construct
  misc_feature 1..80: note = Artificially Synthesized Probe
  source 1..80: mol_type = other DNA
tgggtacctgtaataccagctactcgggagtctgagccacagaattgcttgaacccaggaggcggaggttgcagtgagcc

SEQ ID NO: 114170 - DNA, 80 bp, synthetic construct
  misc_feature 1..80: note = Artificially Synthesized Probe
  source 1..80: mol_type = other DNA
tagactagcctgaccagtctctactaaaaatacaaaaattagctaggtgtggtggcgcacgcctgtaatcccagctactt

SEQ ID NO: 114171 - DNA, 80 bp, synthetic construct; identical to SEQ ID NO: 37680
  misc_feature 1..80: note = Artificially Synthesized Probe
  source 1..80: mol_type = other DNA

SEQ ID NO: 114172 - DNA, 80 bp, synthetic construct
  misc_feature 1..80: note = Artificially Synthesized Probe
  source 1..80: mol_type = other DNA
acataacagtagaagggaggcttaactttcatcgaagaacctttcatgttgttgagtctgtctgcattgtttttatgtgt

SEQ ID NO: 114173 - DNA, 80 bp, synthetic construct
  misc_feature 1..80: note = Artificially Synthesized Probe
  source 1..80: mol_type = other DNA
tcacccaggctggagtacagtggtatggtcacagctcactgcagcctcaaactcctgggttcaagggatcctcccacctc

SEQ ID NO: 114174 - DNA, 80 bp, synthetic construct; identical to SEQ ID NO: 37681
  misc_feature 1..80: note = Artificially Synthesized Probe
  source 1..80: mol_type = other DNA

SEQ ID NO: 114175 - DNA, 80 bp, synthetic construct
  misc_feature 1..80: note = Artificially Synthesized Probe
  source 1..80: mol_type = other DNA
tttaactgatgactgttaattaaccagctctattagaactttacaggccattcacgcactgatgcgtagttttaacagcc

SEQ ID NO: 114176 - DNA, 80 bp, synthetic construct
  misc_feature 1..80: note = Artificially Synthesized Probe
  source 1..80: mol_type = other DNA
cgcagagatcttttatttgtctcgcggctttctggccatccgctgccacatttctctggaacacggaatcatttccatag

SEQ ID NO: 114177 - DNA, 80 bp, synthetic construct
  misc_feature 1..80: note = Artificially Synthesized Probe
  source 1..80: mol_type = other DNA
tcccctcgagtcagagacaaggacaaataacgcatgccagaggggacacattctacggcccacagcggctctcacttagg

SEQ ID NO: 114178 - DNA, 80 bp, synthetic construct
  misc_feature 1..80: note = Artificially Synthesized Probe
  source 1..80: mol_type = other DNA
tattaacttcaaaggcaaggaagaaggaaaggaaagaggaaaaagagaaatagaaggaggaaaaaagaatttggagagaa

SEQ ID NO: 114179 - DNA, 80 bp, synthetic construct
  misc_feature 1..80: note = Artificially Synthesized Probe
  source 1..80: mol_type = other DNA
tgactcacgcctgtaatcccagcactttgggaagctgaggcgggtggatcacgaggtcaggagaccaagaccatcctggc

SEQ ID NO: 114180 - DNA, 80 bp, synthetic construct; identical to SEQ ID NO: 37682
  misc_feature 1..80: note = Artificially Synthesized Probe
  source 1..80: mol_type = other DNA

SEQ ID NO: 114181 - DNA, 80 bp, synthetic construct
  misc_feature 1..80: note = Artificially Synthesized Probe
  source 1..80: mol_type = other DNA
gaaagaggtttataaaaaacagagaaacaaaaaatttcagtaacagaagctgtcaagcatactagctgccttctttatga

SEQ ID NO: 114182 - DNA, 80 bp, synthetic construct
  misc_feature 1..80: note = Artificially Synthesized Probe
  source 1..80: mol_type = other DNA
atcaggctgggcacagtggctcacacttgtaatcccagtactttgggaggctgaggcgggtggatcacttgaggccagga

SEQ ID NO: 114183 - DNA, 80 bp, synthetic construct
  misc_feature 1..80: note = Artificially Synthesized Probe
  source 1..80: mol_type = other DNA
tgcaccactgctctccagcctgggtgacacagcaagattccatctcaatcaatcaatcaatcaatcaatcaatcaatcaa

SEQ ID NO: 114184 - DNA, 80 bp, synthetic construct
  misc_feature 1..80: note = Artificially Synthesized Probe
  source 1..80: mol_type = other DNA
tcaaaaaagagaatgttcaatgtttagcttaattacgactaagctgtaacggtaacatagtgcgttgactggtctaggtt

SEQ ID NO: 114185 - DNA, 80 bp, synthetic construct; identical to SEQ ID NO: 37683
  misc_feature 1..80: note = Artificially Synthesized Probe
  source 1..80: mol_type = other DNA

SEQ ID NO: 114186 - DNA, 80 bp, synthetic construct
  misc_feature 1..80: note = Artificially Synthesized Probe
  source 1..80: mol_type = other DNA
ctccattctaaacaacagagtgacaccctgtctcaaaacaaaacaaaacaaaaacaaattgagatgtaacttacagatgt

SEQ ID NO: 114187 - DNA, 80 bp, synthetic construct
  misc_feature 1..80: note = Artificially Synthesized Probe
  source 1..80: mol_type = other DNA
caaggtatggaacatttccttctccccagaaggttctctcttgtccttttccagttaatacctctaccccatttttctga

SEQ ID NO: 114188 - DNA, 80 bp, synthetic construct
  misc_feature 1..80: note = Artificially Synthesized Probe
  source 1..80: mol_type = other DNA
attctcctgcctcagcctcccaagtagctgggactacaggtgcacaccaccatgcccagctaattttttgtatttttagt

SEQ ID NO: 114189 - DNA, 80 bp, synthetic construct
  misc_feature 1..80: note = Artificially Synthesized Probe
  source 1..80: mol_type = other DNA
ttgtattttttttagaaatggggtctcactatgttgcccaggctggtctcaaactcctgggctcaagtgatccttctgct

SEQ ID NO: 114190 - DNA, 80 bp, synthetic construct; identical to SEQ ID NO: 37684
  misc_feature 1..80: note = Artificially Synthesized Probe
  source 1..80: mol_type = other DNA

SEQ ID NO: 114191 - DNA, 80 bp, synthetic construct
  misc_feature 1..80: note = Artificially Synthesized Probe
  source 1..80: mol_type = other DNA
cactgcaacctctgcctcccagtttcaagtgattctcctgcttcagcctaccgagtagctgggattacaggcatccatca

SEQ ID NO: 114192 - DNA, 80 bp, synthetic construct
  misc_feature 1..80: note = Artificially Synthesized Probe
  source 1..80: mol_type = other DNA
atagacacaattggcaagaaacgtcacgtgcacaagcaagtggtaagaaacttcaaaccattttctacaagcctttaaaa

SEQ ID NO: 114193 - DNA, 80 bp, synthetic construct; identical to SEQ ID NO: 37685
  misc_feature 1..80: note = Artificially Synthesized Probe
  source 1..80: mol_type = other DNA

SEQ ID NO: 114194 - DNA, 80 bp, synthetic construct
  misc_feature 1..80: note = Artificially Synthesized Probe
  source 1..80: mol_type = other DNA
tggactccttcagtatcttccagtacctggatccacagtgacacaggatgttcgtggtggacagcgagtgtcagacgtag

SEQ ID NO: 114195 - DNA, 80 bp, synthetic construct
  misc_feature 1..80: note = Artificially Synthesized Probe
  source 1..80: mol_type = other DNA
tgtcaatgtccactgcattctgtcaaatgtgtgtcatttaaagaccacaagacataacaaaaattaattcgttaaaactt

SEQ ID NO: 114196 - DNA, 80 bp, synthetic construct
  misc_feature 1..80: note = Artificially Synthesized Probe
  source 1..80: mol_type = other DNA
catcgcgttaattttcaaatttttaggagagatgaggtctcactatgttgctcaggctggcctcaaactcttgacctcaa

SEQ ID NO: 114197 - DNA, 80 bp, synthetic construct
  misc_feature 1..80: note = Artificially Synthesized Probe
  source 1..80: mol_type = other DNA
aaaaaaacaaaacaaaacaggaccataagatggcagtattgcataacaagctttactgcacggcacttagataggtttgc

SEQ ID NO: 114198 - DNA, 80 bp, synthetic construct; identical to SEQ ID NO: 37686
  misc_feature 1..80: note = Artificially Synthesized Probe
  source 1..80: mol_type = other DNA

SEQ ID NO: 114199 - DNA, 80 bp, synthetic construct
  misc_feature 1..80: note = Artificially Synthesized Probe
  source 1..80: mol_type = other DNA
gctcacttatacagcaagtgacaaccaatttagttcagacctttcttgcttctagacctgcaccatccactcttatccac

SEQ ID NO: 114200 - DNA, 80 bp, synthetic construct
  misc_feature 1..80: note = Artificially Synthesized Probe
  source 1..80: mol_type = other DNA
cctccctagtagctgggactacaggcgtgtgccaccatgcccggctaaatctttgtatttttagtagagatggttttcag

SEQ ID NO: 114201 - DNA, 80 bp, synthetic construct
  misc_feature 1..80: note = Artificially Synthesized Probe
  source 1..80: mol_type = other DNA
tcccaatttttgctagggaaatccaggcacatatatgtattcagtaactcaatgatataaatttcagggcttgtgtctgt

SEQ ID NO: 114202 - DNA, 80 bp, synthetic construct
  misc_feature 1..80: note = Artificially Synthesized Probe
  source 1..80: mol_type = other DNA
ggtgcacacctgtagttctagctactcaggaggctgaggtgggaggattgcttgagcccaggaattcaaggctacactga

SEQ ID NO: 114203 - DNA, 80 bp, synthetic construct; identical to SEQ ID NO: 37687
  misc_feature 1..80: note = Artificially Synthesized Probe
  source 1..80: mol_type = other DNA

SEQ ID NO: 114204 - DNA, 80 bp, synthetic construct
  misc_feature 1..80: note = Artificially Synthesized Probe
  source 1..80: mol_type = other DNA
cagcacatcatgacttcaagctgtcccagatgtgccctgtctgaatttctgacctacaaaaaccacgagagatgatgagt

SEQ ID NO: 114205 - DNA, 80 bp, synthetic construct
  misc_feature 1..80: note = Artificially Synthesized Probe
  source 1..80: mol_type = other DNA
gtatcccagctgtgaaatagaatactatacagctgtgaaaaagaatgagaaaaagacaaatacctattatagcaatttga

SEQ ID NO: 114206 - DNA, 80 bp, synthetic construct; identical to SEQ ID NO: 37688
  misc_feature 1..80: note = Artificially Synthesized Probe
  source 1..80: mol_type = other DNA

SEQ ID NO: 114207 - DNA, 80 bp, synthetic construct
  misc_feature 1..80: note = Artificially Synthesized Probe
  source 1..80: mol_type = other DNA
aaaacatagtgctttgctggttgatgttcccttgcatataggcaaattgatccagtttggtttgtaacagttacatatga

SEQ ID NO: 114208 - DNA, 80 bp, synthetic construct
  misc_feature 1..80: note = Artificially Synthesized Probe
  source 1..80: mol_type = other DNA
ccaagtagctgggactacaggcacacgtcaccacgcccggctaatttttgcatttttagtagagacagggtttcaccatg

SEQ ID NO: 114209 - DNA, 80 bp, synthetic construct
  misc_feature 1..80: note = Artificially Synthesized Probe
  source 1..80: mol_type = other DNA
tgaatgctgcttactgatggagagggggccagaaacagaaatgataaggataccagaactgtggagtcatgttggaggga

SEQ ID NO: 114210 - DNA, 80 bp, synthetic construct; identical to SEQ ID NO: 37689
  misc_feature 1..80: note = Artificially Synthesized Probe
  source 1..80: mol_type = other DNA

SEQ ID NO: 114211 - DNA, 80 bp, synthetic construct
  misc_feature 1..80: note = Artificially Synthesized Probe
  source 1..80: mol_type = other DNA
ccattggatatgtgaatatattttattaagtttttttttttttttttgagacagagtcttgctctgttgcccaggctgga

SEQ ID NO: 114212 - DNA, 80 bp, synthetic construct; identical to SEQ ID NO: 37556
  misc_feature 1..80: note = Artificially Synthesized Probe
  source 1..80: mol_type = other DNA

SEQ ID NO: 114213 - DNA, 80 bp, synthetic construct
  misc_feature 1..80: note = Artificially Synthesized Probe
  source 1..80: mol_type = other DNA
aggctggtctcgaactccttacttgaactcccacctctgcctcccaaagtgctgggatgacaggtgtgagccaccacacc

SEQ ID NO: 114214 - DNA, 80 bp, synthetic construct
  misc_feature 1..80: note = Artificially Synthesized Probe
  source 1..80: mol_type = other DNA
ttagtaagtcacctcgtccatgcgtaattcatcactcttttatcagctggacttttgagacttagaaacaatgacttttt

SEQ ID NO: 114215 - DNA, 80 bp, synthetic construct
  misc_feature 1..80: note = Artificially Synthesized Probe
  source 1..80: mol_type = other DNA
gtgaaaccccgtctctactaaacatacaaaaattagcctggtgtggtggttggcgcctgtaatcccagctactcgggagg

SEQ ID NO: 114216 - DNA, 80 bp, synthetic construct; identical to SEQ ID NO: 37690
  misc_feature 1..80: note = Artificially Synthesized Probe
  source 1..80: mol_type = other DNA

SEQ ID NO: 114217 - DNA, 80 bp, synthetic construct
  misc_feature 1..80: note = Artificially Synthesized Probe
  source 1..80: mol_type = other DNA
aattgggtgtcttggaggttggctgagagctcccactgttcttgactcttaagacaagatggcacatgaggtgaaagcag

SEQ ID NO: 114218 - DNA, 80 bp, synthetic construct
  misc_feature 1..80: note = Artificially Synthesized Probe
  source 1..80: mol_type = other DNA
cccatttccagtgtaaacacctggattcttttacagagttacccttgagttcactttgcccttggctctgggggaagaga

SEQ ID NO: 114219 - DNA, 80 bp, synthetic construct
  misc_feature 1..80: note = Artificially Synthesized Probe
  source 1..80: mol_type = other DNA
gagccatggcctggaatgaacttcatccctctgtgtggaggaagtgtcctcagctgcccagacaggctcagcttcgggtc

SEQ ID NO: 114220 - DNA, 80 bp, synthetic construct; identical to SEQ ID NO: 37691
  misc_feature 1..80: note = Artificially Synthesized Probe
  source 1..80: mol_type = other DNA

SEQ ID NO: 114221 - DNA, 80 bp, synthetic construct
  misc_feature 1..80: note = Artificially Synthesized Probe
  source 1..80: mol_type = other DNA
gggatggtccctgagttgtcctgagatttggggagaggggcccgagattttatgcctccatacagatgttggtggcccgg

SEQ ID NO: 114222 - DNA, 80 bp, synthetic construct
  misc_feature 1..80: note = Artificially Synthesized Probe
  source 1..80: mol_type = other DNA
ctgaaacttgtctgggatagctatggacagattttctccaaggagatttacttttccacggtgagagggtgtgtgtgtat

SEQ ID NO: 114223 - DNA, 80 bp, synthetic construct
  misc_feature 1..80: note = Artificially Synthesized Probe
  source 1..80: mol_type = other DNA
caccagcgcctggtagaggatgtggtcgcagctcctcatccacctgaggatggggtcgcactgacacagggagataagct

SEQ ID NO: 114224 - DNA, 80 bp, synthetic construct
  misc_feature 1..80: note = Artificially Synthesized Probe
  source 1..80: mol_type = other DNA
gtgtatgtgtgcctgtgtgaattaagtgcacgtgtgattgtgcatctatatgaaggtgtatgtgagtgcatatgtgtaag

SEQ ID NO: 114225 - DNA, 80 bp, synthetic construct; identical to SEQ ID NO: 37692
  misc_feature 1..80: note = Artificially Synthesized Probe
  source 1..80: mol_type = other DNA

SEQ ID NO: 114226 - DNA, 80 bp, synthetic construct
  misc_feature 1..80: note = Artificially Synthesized Probe
  source 1..80: mol_type = other DNA
ggagtgtgtgtgtgagattatgattatgtgtataattaggtgtctatcagtgcatacgtgtgtgagtgtatgtaactgtg

SEQ ID NO: 114227 - DNA, 80 bp, synthetic construct
  misc_feature 1..80: note = Artificially Synthesized Probe
  source 1..80: mol_type = other DNA
tgagaatgtgtgtgcatatgtgagtgggtgtgcgtatataattgtgtgtctgtatgaggctgtgtaaccatgtgtgtgca

SEQ ID NO: 114228 - DNA, 80 bp, synthetic construct
  misc_feature 1..80: note = Artificially Synthesized Probe
  source 1..80: mol_type = other DNA
cgcccacatatgtatgtgagtgtaggagtgtgggagtgtgtgtaattgtgtgtccgtacgaggctgtgtgaccacgcatg

SEQ ID NO: 114229 - DNA, 80 bp, synthetic construct; identical to SEQ ID NO: 37693
  misc_feature 1..80: note = Artificially Synthesized Probe
  source 1..80: mol_type = other DNA

SEQ ID NO: 114230 - DNA, 80 bp, synthetic construct
  misc_feature 1..80: note = Artificially Synthesized Probe
  source 1..80: mol_type = other DNA
aagtatttgaattgtgtgaacaggtgtgattgtgggagcatgttatgagtgtgagtgtatgtgagtgtgcttgtgattgt

SEQ ID NO: 114231 - DNA, 80 bp, synthetic construct
  misc_feature 1..80: note = Artificially Synthesized Probe
  source 1..80: mol_type = other DNA
gtctttagagacagaggtcccttccctcctgttggggacctcttgacctgctccctcccctccagcttcacccctgtcca

SEQ ID NO: 114232 - DNA, 80 bp, synthetic construct; identical to SEQ ID NO: 37694
  misc_feature 1..80: note = Artificially Synthesized Probe
  source 1..80: mol_type = other DNA

SEQ ID NO: 114233 - DNA, 80 bp, synthetic construct
  misc_feature 1..80: note = Artificially Synthesized Probe
  source 1..80: mol_type = other DNA
ggtgaaaacccatctctactaaaaatacagaaaattagtcgggagtggtggtgcatgcctgtaacctcagctacttggga

SEQ ID NO: 114234 - DNA, 80 bp, synthetic construct
  misc_feature 1..80: note = Artificially Synthesized Probe
  source 1..80: mol_type = other DNA
cccatccctgagcctcgatgggtcccctccctccatgttgctcccggcgcctccgtgtttccccctgtccctcactgtcc

SEQ ID NO: 114235 - DNA, 80 bp, synthetic construct
  misc_feature 1..80: note = Artificially Synthesized Probe
  source 1..80: mol_type = other DNA
tccttttctcctggcacagcacaagattctgttgctacatctttatttactgagcatctagtatgtgctgcacctggcac

SEQ ID NO: 114236 - DNA, 80 bp, synthetic construct
  misc_feature 1..80: note = Artificially Synthesized Probe
  source 1..80: mol_type = other DNA
cccggctaattttttaaatttttctgtagagacggggtcttactacattgcccaggctggttttgaactcctggcctcaa

SEQ ID NO: 114237 - DNA, 80 bp, synthetic construct; identical to SEQ ID NO: 37695
  misc_feature 1..80: note = Artificially Synthesized Probe
  source 1..80: mol_type = other DNA

SEQ ID NO: 114238 - DNA, 80 bp, synthetic construct
  misc_feature 1..80: note = Artificially Synthesized Probe
  source 1..80: mol_type = other DNA
cgggcgcctgtaatcccagctactcgggaggctgaggcaggagaatcgcttgaacctgggaggcagacgttgcagtgaac

SEQ ID NO: 114239 - DNA, 80 bp, synthetic construct
  misc_feature 1..80: note = Artificially Synthesized Probe
  source 1..80: mol_type = other DNA
gcatttgtttgtgtgattctaggcctcctcttattttcttgaacaggcctcatctggctttgttcatctttatgtctcca

SEQ ID NO: 114240 - DNA, 80 bp, synthetic construct
  misc_feature 1..80: note = Artificially Synthesized Probe
  source 1..80: mol_type = other DNA
ggcaggggcagccagtgatgtcacaagaggtggctgggatggaacgttctggaaggttgaatggggtagaaggcctgttg

SEQ ID NO: 114241 - DNA, 80 bp, synthetic construct; identical to SEQ ID NO: 37696
  misc_feature 1..80: note = Artificially Synthesized Probe
  source 1..80: mol_type = other DNA

SEQ ID NO: 114242 - DNA, 80 bp, synthetic construct
  misc_feature 1..80: note = Artificially Synthesized Probe
  source 1..80: mol_type = other DNA
tcccacctcaacctcccaagtagctgagattacaggcgcctgccaccatgtccagctaattttttttttttttttgagac

SEQ ID NO: 114243 - DNA, 80 bp, synthetic construct
  misc_feature 1..80: note = Artificially Synthesized Probe
  source 1..80: mol_type = other DNA
tcaccacattagccaggatagtctcaatctcctgacctcgtgatccacccgccttggcctcccaaagtgctgggattaca

SEQ ID NO: 114244 - DNA, 80 bp, synthetic construct
  misc_feature 1..80: note = Artificially Synthesized Probe
  source 1..80: mol_type = other DNA
atttttgtatttttagtagagatggggtttcaccatgccagccaggctggtctcgaactcctggcctcaagcgatccacc

SEQ ID NO: 114245 - DNA, 80 bp, synthetic construct; identical to SEQ ID NO: 37697
  misc_feature 1..80: note = Artificially Synthesized Probe
  source 1..80: mol_type = other DNA

SEQ ID NO: 114246 - DNA, 80 bp, synthetic construct; identical to SEQ ID NO: 37557
  misc_feature 1..80: note = Artificially Synthesized Probe
  source 1..80: mol_type = other DNA

SEQ ID NO: 114247 - DNA, 80 bp, synthetic construct
  misc_feature 1..80: note = Artificially Synthesized Probe
  source 1..80: mol_type = other DNA
catcataaaacactgggttgtttacatttgtcttttaaatccagagttcttttcatactccggatactaattttatttgc

SEQ ID NO: 114248 - DNA, 80 bp, synthetic construct
  misc_feature 1..80: note = Artificially Synthesized Probe
  source 1..80: mol_type = other DNA
gaccggcctgggcaatatagcgaggcccccagctctacaaaaataaaaataaaaataaattagccaggcgtagtggcatg

SEQ ID NO: 114249 - DNA, 80 bp, synthetic construct
  misc_feature 1..80: note = Artificially Synthesized Probe
  source 1..80: mol_type = other DNA
gcacagggaggtgcagggccttgtggaccgtggggagaacttgcgcttttacctggagggaggtgggagccatggagggc

SEQ ID NO: 114250 - DNA, 80 bp, synthetic construct
  misc_feature 1..80: note = Artificially Synthesized Probe
  source 1..80: mol_type = other DNA
cctctgcctcttgggttcaagcaattctcccacctcaacctcctgagtagctgggattacaggtgcctgccgccgtgcct

SEQ ID NO: 114251 - DNA, 80 bp, synthetic construct; identical to SEQ ID NO: 37698
  misc_feature 1..80: note = Artificially Synthesized Probe
  source 1..80: mol_type = other DNA

SEQ ID NO: 114252 - DNA, 80 bp, synthetic construct
  misc_feature 1..80: note = Artificially Synthesized Probe
  source 1..80: mol_type = other DNA
agtaaacatcccctcttcatttcttcatgtcgtctgagacacagtcagtggtggagttcttggcggcctcgtgcacatct

SEQ ID NO: 114253 - DNA, 80 bp, synthetic construct
  misc_feature 1..80: note = Artificially Synthesized Probe
  source 1..80: mol_type = other DNA
aatgtgctaggaagagagagggagagagagaggggaagggggaagggggagggagggagggaaagaggaaggaggaaaag

SEQ ID NO: 114254 - DNA, 80 bp, synthetic construct
  misc_feature 1..80: note = Artificially Synthesized Probe
  source 1..80: mol_type = other DNA
aagagaggggaagaacgaagggaggaaagaaggaagggagggagagaggaagggtaggagaatgggaaaaaggaaggaag

SEQ ID NO: 114255 - DNA, 80 bp, synthetic construct; identical to SEQ ID NO: 37699
  misc_feature 1..80: note = Artificially Synthesized Probe
  source 1..80: mol_type = other DNA

SEQ ID NO: 114256 - DNA, 80 bp, synthetic construct
  misc_feature 1..80: note = Artificially Synthesized Probe
  source 1..80: mol_type = other DNA
ccttcacctcccaggttcaagggattctcctgactcgacctcccaagtagttggaactacaggtgtctgccaccatgcct

SEQ ID NO: 114257 - DNA, 80 bp, synthetic construct
  misc_feature 1..80: note = Artificially Synthesized Probe
  source 1..80: mol_type = other DNA
ggaactggaggttcatcaccacatctacagttgcctaggaatgaagggaccggtgagacagacgggtgcgtgcgcccatc

SEQ ID NO: 114258 - DNA, 80 bp, synthetic construct
  misc_feature 1..80: note = Artificially Synthesized Probe
  source 1..80: mol_type = other DNA
atggccttttagccacctgttttcactgaaatacaaaatcagtttttgctggtgtaagaatcacgtgcatgttacagggc

SEQ ID NO: 114259 - DNA, 80 bp, synthetic construct; identical to SEQ ID NO: 37700
  misc_feature 1..80: note = Artificially Synthesized Probe
  source 1..80: mol_type = other DNA

SEQ ID NO: 114260 - DNA, 80 bp, synthetic construct
  misc_feature 1..80: note = Artificially Synthesized Probe
  source 1..80: mol_type = other DNA
caggcagatcacctgaggtcgggagtctgagaccagcctgaccaacatggagaaactctgtctctactaaaaatacaaaa

SEQ ID NO: 114261 - DNA, 80 bp, synthetic construct
  misc_feature 1..80: note = Artificially Synthesized Probe
  source 1..80: mol_type = other DNA
cagtctctactaaaaatacaaaaaaaattagctgggcgtggtggtgggcacctgtggtcccagctactcaggaggctgag

SEQ ID NO: 114262 - DNA, 80 bp, synthetic construct
  misc_feature 1..80: note = Artificially Synthesized Probe
  source 1..80: mol_type = other DNA
acactgagaattaaacaacctgaaggagtggtggtacaaacaccactccaaagccctcaaacagtagagtccaattaatg

SEQ ID NO: 114263 - DNA, 80 bp, synthetic construct; identical to SEQ ID NO: 37701
  misc_feature 1..80: note = Artificially Synthesized Probe
  source 1..80: mol_type = other DNA

SEQ ID NO: 114264 - DNA, 80 bp, synthetic construct
  misc_feature 1..80: note = Artificially Synthesized Probe
  source 1..80: mol_type = other DNA
taagtctgattactgataagtgttttcgaaagaggtggcattgatttttaccacgatgaatgagagcacctgttttccca

SEQ ID NO: 114265 - DNA, 80 bp, synthetic construct
  misc_feature 1..80: note = Artificially Synthesized Probe
  source 1..80: mol_type = other DNA
tgtcctttgcccgctttcccattgggttttggtctttttctgattaattcctcagggttctttacatatgagggaaatca

SEQ ID NO: 114266 - DNA, 80 bp, synthetic construct
  misc_feature 1..80: note = Artificially Synthesized Probe
  source 1..80: mol_type = other DNA
tattacctttaagagaagataaatgtgtggtcccatgagagtttctttcccctgggaggcttcaaaatattttctcaccc

SEQ ID NO: 114267 - DNA, 80 bp, synthetic construct
  misc_feature 1..80: note = Artificially Synthesized Probe
  source 1..80: mol_type = other DNA
cctgggcttctgtagcttcaacaactgctttccttcttgaacactgaccccgggagcccccgcttgagtcaaagtaaaca

SEQ ID NO: 114268 - DNA, 80 bp, synthetic construct
  misc_feature 1..80: note = Artificially Synthesized Probe
  source 1..80: mol_type = other DNA
atcctaggattctaggcagacatgaccagtggatggaagagttggcctcatccctacagcccctttgccaatcctgttaa

SEQ ID NO: 114269 - DNA, 80 bp, synthetic construct
  misc_feature 1..80: note = Artificially Synthesized Probe
  source 1..80: mol_type = other DNA
tccagctcctcagcgtcacccggggacgcctggcctgagcgctggcggttcccgggagggacacgcaggagctgcctgcc

SEQ ID NO: 114270 - DNA, 80 bp, synthetic construct; identical to SEQ ID NO: 37702
  misc_feature 1..80: note = Artificially Synthesized Probe
  source 1..80: mol_type = other DNA

SEQ ID NO: 114271 - DNA, 80 bp, synthetic construct
  misc_feature 1..80: note = Artificially Synthesized Probe
  source 1..80: mol_type = other DNA
tcagccctccaagtagctgggactacaggtgcacaccaccatgcccagctctgtattttttttgtagagacagggtttcg

SEQ ID NO: 114272 - DNA, 80 bp, synthetic construct
  misc_feature 1..80: note = Artificially Synthesized Probe
  source 1..80: mol_type = other DNA
aattcagagctctgctctactggtgatgtgacactgggcaagtcacttgctctttggaggcctcatttgcatatctgaat

SEQ ID NO: 114273 - DNA, 80 bp, synthetic construct; identical to SEQ ID NO: 37703
  misc_feature 1..80: note = Artificially Synthesized Probe
  source 1..80: mol_type = other DNA

SEQ ID NO: 114274 - DNA, 80 bp, synthetic construct
  misc_feature 1..80: note = Artificially Synthesized Probe
  source 1..80: mol_type = other DNA
gatcacgaggtcaggagatcgagaccatcctgactaagatggtgaaaccccgtctctactaaaaaatacaaaaaattagc

SEQ ID NO: 114275 - DNA, 80 bp, synthetic construct
  misc_feature 1..80: note = Artificially Synthesized Probe
  source 1..80: mol_type = other DNA
tagtgaaagtactgaggtttatggcaaataaaagtacttgcattgcaaagtacacattcaaggagagggagtgcaggcgt

SEQ ID NO: 114276 - DNA, 80 bp, synthetic construct
  misc_feature 1..80: note = Artificially Synthesized Probe
  source 1..80: mol_type = other DNA
gcttgaaagatagcatcacacacaaaggagtttggggatgctacctttatgggtccaaagggtggaatattcatctaaat

SEQ ID NO: 114277 - DNA, 80 bp, synthetic construct; identical to SEQ ID NO: 37704
  misc_feature 1..80: note = Artificially Synthesized Probe
  source 1..80: mol_type = other DNA

SEQ ID NO: 114278 - DNA, 80 bp, synthetic construct
  misc_feature 1..80: note = Artificially Synthesized Probe
  source 1..80: mol_type = other DNA
agccaagatcacaccactgcattccagcctgggcaacagagtgagactctgtctcaaaaaaacaaaaacaaaaacaaaaa

SEQ ID NO: 114279 - DNA, 80 bp, synthetic construct
  misc_feature 1..80: note = Artificially Synthesized Probe
  source 1..80: mol_type = other DNA
ccatgtaacccactacagtcattaaaatatcccacaagtgtccaggtgacacctccatgtttttgtccaatttaaagcat

SEQ ID NO: 114280 - DNA, 80 bp, synthetic construct
  misc_feature 1..80: note = Artificially Synthesized Probe
  source 1..80: mol_type = other DNA
agggggcctgtatgaactaggcttcccttgttgtaagttgttatgagattaattgtgcatctccaattcctttgtggaag

SEQ ID NO: 114281 - DNA, 80 bp, synthetic construct
  misc_feature 1..80: note = Artificially Synthesized Probe
  source 1..80: mol_type = other DNA
agaaatggcgaggctcttaggacaccgtggacaactggaaggccacggtggatgggggcccagaaacagatgttctgccc

SEQ ID NO: 114282 - DNA, 80 bp, synthetic construct
  misc_feature 1..80: note = Artificially Synthesized Probe
  source 1..80: mol_type = other DNA
gtgcagtggtgcgatcttggctcactgcaatctccacctcccgggttcaagcgattctcctgcctcagcctccagagtag

SEQ ID NO: 114283 - DNA, 80 bp, synthetic construct; identical to SEQ ID NO: 37705
  misc_feature 1..80: note = Artificially Synthesized Probe
  source 1..80: mol_type = other DNA

SEQ ID NO: 114284 - DNA, 80 bp, synthetic construct
  misc_feature 1..80: note = Artificially Synthesized Probe
  source 1..80: mol_type = other DNA
agaaagtcattggtcagattctctcccacagcctcagaaggaaccagtgctgcctgcaccttgatctcagacttgtggcc

SEQ ID NO: 114285 - DNA, 80 bp, synthetic construct
  misc_feature 1..80: note = Artificially Synthesized Probe
  source 1..80: mol_type = other DNA
ctgtcacccaggctggagtgcagtggcacaatcttggctcactgcaacctctgcctcccgggttcaagtgattctcctgc

SEQ ID NO: 114286 - DNA, 80 bp, synthetic construct; identical to SEQ ID NO: 37706
  misc_feature 1..80: note = Artificially Synthesized Probe
  source 1..80: mol_type = other DNA

SEQ ID NO: 114287 - DNA, 80 bp, synthetic construct
  misc_feature 1..80: note = Artificially Synthesized Probe
  source 1..80: mol_type = other DNA
caacatggtgaaactcatctctactaaaaatacaaaaattagctgggtgtggtggtgcccacctgtaatccccgctactt

SEQ ID NO: 114288 - DNA, 80 bp, synthetic construct
  misc_feature 1..80: note = Artificially Synthesized Probe
  source 1..80: mol_type = other DNA
agcatcccatcataggtggatgtgcaatttccttccaacacagctgcctactctaccattgccatctaccacctccccag

SEQ ID NO: 114289 - DNA, 80 bp, synthetic construct
  misc_feature 1..80: note = Artificially Synthesized Probe
  source 1..80: mol_type = other DNA
tcaacccttactcatccccaaaagaagtgatagatacaggaccccaaaactggttttgaattggtccctttgctagttcc

SEQ ID NO: 114290 - DNA, 80 bp, synthetic construct; identical to SEQ ID NO: 37707
  misc_feature 1..80: note = Artificially Synthesized Probe
  source 1..80: mol_type = other DNA

SEQ ID NO: 114291 - DNA, 80 bp, synthetic construct
  misc_feature 1..80: note = Artificially Synthesized Probe
  source 1..80: mol_type = other DNA
gcatcaaaaaatcagatggagccaggcgcggtggctcatgcctgtaatcccggcactttgggaggccgaggcaggtggat

SEQ ID NO: 114292 - DNA, 80 bp, synthetic construct; identical to SEQ ID NO: 37558
  misc_feature 1..80: note = Artificially Synthesized Probe
  source 1..80: mol_type = other DNA

SEQ ID NO: 114293 - DNA, 80 bp, synthetic construct
  misc_feature 1..80: note = Artificially Synthesized Probe
  source 1..80: mol_type = other DNA
ggggtgagccaagatcacgccactgcactccagcctgggcaaaagagtgagactccgtctcaaaaaataataataggcca

SEQ ID NO: 114294 - DNA, 80 bp, synthetic construct
  misc_feature 1..80: note = Artificially Synthesized Probe
  source 1..80: mol_type = other DNA
cagctactcgggaggctgaggcaggaaaaacgcttgaacccgggaggcggaggttgcagtgagccaagatcgtgccattg

SEQ ID NO: 114295 - DNA, 80 bp, synthetic construct; identical to SEQ ID NO: 37708
  misc_feature 1..80: note = Artificially Synthesized Probe
  source 1..80: mol_type = other DNA

SEQ ID NO: 114296 - DNA, 80 bp, synthetic construct
  misc_feature 1..80: note = Artificially Synthesized Probe
  source 1..80: mol_type = other DNA
tggacataacaaagacagcaggatagatgtgtgataaaatatggtaaaacgctagcagttgtagaatctaggtgttggat

SEQ ID NO: 114297 - DNA, 80 bp, synthetic construct
  misc_feature 1..80: note = Artificially Synthesized Probe
  source 1..80: mol_type = other DNA
agacaccaaccgccccccgtccaaagttattaaataaataaaaacatttgccacccaactctggtgactatttgcagtta

SEQ ID NO: 114298 - DNA, 80 bp, synthetic construct
  misc_feature 1..80: note = Artificially Synthesized Probe
  source 1..80: mol_type = other DNA
gtgggaaattctgaatttcaaccagtactatgaggcttgtcggaaggctgcaaaatccttgatcaaggtaagattcattc

SEQ ID NO: 114299 - DNA, 80 bp, synthetic construct; identical to SEQ ID NO: 37709
  misc_feature 1..80: note = Artificially Synthesized Probe
  source 1..80: mol_type = other DNA

SEQ ID NO: 114300 - DNA, 80 bp, synthetic construct
  misc_feature 1..80: note = Artificially Synthesized Probe
  source 1..80: mol_type = other DNA
gacttgaaatgacaaacatttatcatctcacagtttctgtggattgagaatttaggagctactttgaaattgggttcttc

SEQ ID NO: 114301 - DNA, 80 bp, synthetic construct
  misc_feature 1..80: note = Artificially Synthesized Probe
  source 1..80: mol_type = other DNA
gaattgcttgagtgtcttcacggcatggttgccagtcacccctagaatgaatgaagcaaaagaaagagggaacaaggctg

SEQ ID NO: 114302 - DNA, 80 bp, synthetic construct
  misc_feature 1..80: note = Artificially Synthesized Probe
  source 1..80: mol_type = other DNA
tttaaaaagtagccagatgcagtggcacatgcctgtagtcccagctatcaggaggctgaggtgggaggatcacttgagcc

SEQ ID NO: 114303 - DNA, 80 bp, synthetic construct; identical to SEQ ID NO: 37710
  misc_feature 1..80: note = Artificially Synthesized Probe
  source 1..80: mol_type = other DNA

SEQ ID NO: 114304 - DNA, 80 bp, synthetic construct
  misc_feature 1..80: note = Artificially Synthesized Probe
  source 1..80: mol_type = other DNA
gtgcagtggcacgatcttggcttactgcaacctcctcctcctgggttcaagtgattctcctgtctcagcctcttgagtat

SEQ ID NO: 114305 - DNA, 80 bp, synthetic construct
  misc_feature 1..80: note = Artificially Synthesized Probe
  source 1..80: mol_type = other DNA
aaaccccatctacactaaaaatacaaaaattagccaggtgtggtggtgcacacctgtaatcccagctactcaggaagctg

SEQ ID NO: 114306 - DNA, 80 bp, synthetic construct
  misc_feature 1..80: note = Artificially Synthesized Probe
  source 1..80: mol_type = other DNA
ctacttggagacccaagtagaaattagtcggtgtaactaggcattaataaaaacacactctgtccacaataaagccagcc

SEQ ID NO: 114307 - DNA, 80 bp, synthetic construct
  misc_feature 1..80: note = Artificially Synthesized Probe
  source 1..80: mol_type = other DNA
gggagttttcccctaaggatgctcacttttgtttctgagtttcctggttcattctcacccacattcagaacaagtctgta

SEQ ID NO: 114308 - DNA, 80 bp, synthetic construct
  misc_feature 1..80: note = Artificially Synthesized Probe
  source 1..80: mol_type = other DNA
ggcaggtgctgccacgcccggctaattttttgtatatttagtagagacggggtttcatcttgtgggccaggctggtctcg

SEQ ID NO: 114309 - DNA, 80 bp, synthetic construct; identical to SEQ ID NO: 37711
  misc_feature 1..80: note = Artificially Synthesized Probe
  source 1..80: mol_type = other DNA

SEQ ID NO: 114310 - DNA, 80 bp, synthetic construct
  misc_feature 1..80: note = Artificially Synthesized Probe
  source 1..80: mol_type = other DNA
attcacacctttcaagatagctattctttaaaaaatagcaaaacacaacacgtgttggggaggatatggagaagctggaa

SEQ ID NO: 114311 - DNA, 80 bp, synthetic construct
  misc_feature 1..80: note = Artificially Synthesized Probe
  source 1..80: mol_type = other DNA
agacatgaagagttatttgtagactcagggtcatagcggcgttattcacaagagacagagggtggaagcagcccgtgtgt

SEQ ID NO: 114312 - DNA, 80 bp, synthetic construct
  misc_feature 1..80: note = Artificially Synthesized Probe
  source 1..80: mol_type = other DNA
atactcggtgaaataagccagacacaaaagggcaaatcccgtatggtttctttcctaggaggtccctagagtcgttagac

SEQ ID NO: 114313 - DNA, 80 bp, synthetic construct; identical to SEQ ID NO: 37712
  misc_feature 1..80: note = Artificially Synthesized Probe
  source 1..80: mol_type = other DNA

SEQ ID NO: 114314 - DNA, 80 bp, synthetic construct
  misc_feature 1..80: note = Artificially Synthesized Probe
  source 1..80: mol_type = other DNA
gaggctgaggcaggagaatcgcttgaacccaggagacggaggttgcagtgagccgagatcgcactgctggactccagcct

SEQ ID NO: 114315 - DNA, 80 bp, synthetic construct
  misc_feature 1..80: note = Artificially Synthesized Probe
  source 1..80: mol_type = other DNA
cgtgcccagtacagtcagggaatttctaagcatcagttttctcaggtagaaaatggagaggatattgtcacctcccagga

SEQ ID NO: 114316 - DNA, 80 bp, synthetic construct
  misc_feature 1..80: note = Artificially Synthesized Probe
  source 1..80: mol_type = other DNA
aaaattaaaaatattacacctcagattttaggctcaatgctgtctcccaccccgtgtggctacttttgttttgttttgaa

SEQ ID NO: 114317 - DNA, 80 bp, synthetic construct
  misc_feature 1..80: note = Artificially Synthesized Probe
  source 1..80: mol_type = other DNA
aagtgtgtaccaccatgcccggcgaacttttccactttttttgtaaagacaggggtctcactgtgttgcccaggctggtc

SEQ ID NO: 114318 - DNA, 80 bp, synthetic construct; identical to SEQ ID NO: 37713
  misc_feature 1..80: note = Artificially Synthesized Probe
  source 1..80: mol_type = other DNA

SEQ ID NO: 114319 - DNA, 80 bp, synthetic construct
  misc_feature 1..80: note = Artificially Synthesized Probe
  source 1..80: mol_type = other DNA
aattttggatgaacgccctagttagcaggcaggatagatgcacgaacaaatcattctgatcacaggtcatacgcaataac

SEQ ID NO: 114320 - DNA, 80 bp, synthetic construct
  misc_feature 1..80: note = Artificially Synthesized Probe
  source 1..80: mol_type = other DNA
tccacgtgtatgatcctgtaaaacctcacgacagcaatgtgaagtgggtcctatcatcccctatctacagatgaggaaac

SEQ ID NO: 114321 - DNA, 80 bp, synthetic construct
  misc_feature 1..80: note = Artificially Synthesized Probe
  source 1..80: mol_type = other DNA
gccggactgcggactgcagtggcgcaatctcggctcactgcaagctccgcttcccgggttcacgccattctcctgcctca

SEQ ID NO: 114322 - DNA, 80 bp, synthetic construct; identical to SEQ ID NO: 37714
  misc_feature 1..80: note = Artificially Synthesized Probe
  source 1..80: mol_type = other DNA

SEQ ID NO: 114323 - DNA, 80 bp, synthetic construct
  misc_feature 1..80: note = Artificially Synthesized Probe
  source 1..80: mol_type = other DNA
tgagatgccttctggatgggattctcggtaatattttgaaatgatggctctgaagagcacattttaagcatttttgatgt

SEQ ID NO: 114324 - DNA, 80 bp, synthetic construct
  misc_feature 1..80: note = Artificially Synthesized Probe
  source 1..80: mol_type = other DNA
ctggctaacatgctgaaaccccatctctactaaaaataccaaaaaaatcagccaggcgtggtggcaggtgcctgttagtc

SEQ ID NO: 114325 - DNA, 80 bp, synthetic construct
  misc_feature 1..80: note = Artificially Synthesized Probe
  source 1..80: mol_type = other DNA
aatataccaattattgctggtcactcttacctatatgatatcattgactgctcatggtagccctttgaggtaggtgccat

SEQ ID NO: 114326 - DNA, 80 bp, synthetic construct; identical to SEQ ID NO: 37715
  misc_feature 1..80: note = Artificially Synthesized Probe
  source 1..80: mol_type = other DNA

SEQ ID NO: 114327 - DNA, 80 bp, synthetic construct
  misc_feature 1..80: note = Artificially Synthesized Probe
  source 1..80: mol_type = other DNA
gccgaagactcaacccaggagggttctgtttgggctcaaaaaagatcataaacgacatggaagccactgagtgtgtacag

SEQ ID NO: 114328 - DNA, 80 bp, synthetic construct
  misc_feature 1..80: note = Artificially Synthesized Probe
  source 1..80: mol_type = other DNA
gtttttaaaattagccaggcatggtggtgtgtgcctgtagtcccaactacttgggaggcagaggtgggaggatggcttca

SEQ ID NO: 114329 - DNA, 80 bp, synthetic construct
  misc_feature 1..80: note = Artificially Synthesized Probe
  source 1..80: mol_type = other DNA
aggaaggaaggaaaagaaaagagaaaagagagagaaaaaaattgagggtggtgactagaaataaatattaacattagtta

SEQ ID NO: 114330 - DNA, 80 bp, synthetic construct; identical to SEQ ID NO: 37716
  misc_feature 1..80: note = Artificially Synthesized Probe
  source 1..80: mol_type = other DNA

SEQ ID NO: 114331 - DNA, 80 bp, synthetic construct
  misc_feature 1..80: note = Artificially Synthesized Probe
  source 1..80: mol_type = other DNA
agagagagagagagagagagagagaaaattattattatatatataaaatatataatacatataataaataatatataata

SEQ ID NO: 114332 - DNA, 80 bp, synthetic construct
  misc_feature 1..80: note = Artificially Synthesized Probe
  source 1..80: mol_type = other DNA
ctacaggcgtgcgccaccatggctggctaaattttgtatttttggtaaagatggggtttctccatgttggccaggctggt

SEQ ID NO: 114333 - DNA, 80 bp, synthetic construct
  misc_feature 1..80: note = Artificially Synthesized Probe
  source 1..80: mol_type = other DNA
ctggtgccacatcagacccaaattcaaatcttgggttgtctgctattttgtattctgtatgaatgagcaggaaagcacac

SEQ ID NO: 114334 - DNA, 80 bp, synthetic construct; identical to SEQ ID NO: 37717
  misc_feature 1..80: note = Artificially Synthesized Probe
  source 1..80: mol_type = other DNA

SEQ ID NO: 114335 - DNA, 80 bp, synthetic construct
  misc_feature 1..80: note = Artificially Synthesized Probe
  source 1..80: mol_type = other DNA
ttaaattctaaagcttctagaaaaagaaaagcacggaatggtttcacaacctgggggtagtcaaagatttcttagacagg

SEQ ID NO: 114336 - DNA, 80 bp, synthetic construct
  misc_feature 1..80: note = Artificially Synthesized Probe
  source 1..80: mol_type = other DNA
cactggagtccaggagtttgagaccagcctgggcaacatggtgaaacaccttctctacaaaaaatacaaaaattagccag

SEQ ID NO: 114337 - DNA, 80 bp, synthetic construct
  misc_feature 1..80: note = Artificially Synthesized Probe
  source 1..80: mol_type = other DNA
tggtgaacaggcaaactgcatacttggagaaaatattcttaaaactcgaatttctaacaaaggactggtatctaagatag

SEQ ID NO: 114338 - DNA, 80 bp, synthetic construct
  misc_feature 1..80: note = Artificially Synthesized Probe
  source 1..80: mol_type = other DNA
ggaagaggccaagactgcctcatgttggggaaccagaagcaccccaaaagctccaggcaagaaggaagaaagcccagata

SEQ ID NO: 114339 - DNA, 80 bp, synthetic construct
  misc_feature 1..80: note = Artificially Synthesized Probe
  source 1..80: mol_type = other DNA
aatgtcattatccattgggaaatgcaaattaaaagcaaaagaggatgcaccctgcaagcacaaaaggctgtgaatgatgg

SEQ ID NO: 114340 - DNA, 80 bp, synthetic construct; identical to SEQ ID NO: 37718
  misc_feature 1..80: note = Artificially Synthesized Probe
  source 1..80: mol_type = other DNA

SEQ ID NO: 114341 - DNA, 80 bp, synthetic construct
  misc_feature 1..80: note = Artificially Synthesized Probe
  source 1..80: mol_type = other DNA
ttatgccaccaactctgccgaggtttgtcaatatgtcatcactcatgccaaagtgaacatcttgctggttgagaatgatc

SEQ ID NO: 114342 - DNA, 80 bp, synthetic construct
  misc_feature 1..80: note = Artificially Synthesized Probe
  source 1..80: mol_type = other DNA
cattagtatatgtggtgaagctatttttggagaagcagactgaaatagaggagtttgatttccaattcatattaacttag

SEQ ID NO: 114343 - DNA, 80 bp, synthetic construct
  misc_feature 1..80: note = Artificially Synthesized Probe
  source 1..80: mol_type = other DNA
gtgtaccaccatgtcaggctaactttttttttttccgagacagagtctcgctctgtcgcccaagctggagtgcagtgggc

SEQ ID NO: 114344 - DNA, 80 bp, synthetic construct; identical to SEQ ID NO: 37719
  misc_feature 1..80: note = Artificially Synthesized Probe
  source 1..80: mol_type = other DNA

SEQ ID NO: 114345 - DNA, 80 bp, synthetic construct
  misc_feature 1..80: note = Artificially Synthesized Probe
  source 1..80: mol_type = other DNA
tagccgggtgtggtggcatgcacctgtagtcccagctactggggaggctgaggctgaggtggcaggatcgcttgaacctg

SEQ ID NO: 114346 - DNA, 80 bp, synthetic construct
  misc_feature 1..80: note = Artificially Synthesized Probe
  source 1..80: mol_type = other DNA
tcaattgatcttcctgcctcagcctcccaaagtgctgggattataggcatgagcccccatgcccaaccttaagcccccac

SEQ ID NO: 114347 - DNA, 80 bp, synthetic construct; identical to SEQ ID NO: 37720
  misc_feature 1..80: note = Artificially Synthesized Probe
  source 1..80: mol_type = other DNA

SEQ ID NO: 114348 - DNA, 80 bp, synthetic construct
  misc_feature 1..80: note = Artificially Synthesized Probe
  source 1..80: mol_type = other DNA
cactgcaacctctgcctcccaggttcacgtcattctcctgcctcagcctcccgagtagctgggactacaggtgcctgcca

SEQ ID NO: 114349 - DNA, 80 bp, synthetic construct
  misc_feature 1..80: note = Artificially Synthesized Probe
  source 1..80: mol_type = other DNA
ttcttttgcattgtgttgaaattatccagtgagttttatttgtgtacagtgaaatttagctgctgtcttacgtttttttt

SEQ ID NO: 114350 - DNA, 80 bp, synthetic construct; identical to SEQ ID NO: 37559
  misc_feature 1..80: note = Artificially Synthesized Probe
  source 1..80: mol_type = other DNA

SEQ ID NO: 114351 - DNA, 80 bp, synthetic construct
  misc_feature 1..80: note = Artificially Synthesized Probe
  source 1..80: mol_type = other DNA
gctcaaggaccactgtgactgtttcttgaatacatgatttcatgactctgagtcactcatttcttcactttttcacatct

SEQ ID NO: 114352 - DNA, 80 bp, synthetic construct; identical to SEQ ID NO: 37721
  misc_feature 1..80: note = Artificially Synthesized Probe
  source 1..80: mol_type = other DNA

SEQ ID NO: 114353 - DNA, 80 bp, synthetic construct
  misc_feature 1..80: note = Artificially Synthesized Probe
  source 1..80: mol_type = other DNA
ccaggttcaagtgattctcatgcttcagtctcccaagtagctgggactacaggtgcacaccaccacaccgggctaatttt

SEQ ID NO: 114354 - DNA, 80 bp, synthetic construct
  misc_feature 1..80: note = Artificially Synthesized Probe
  source 1..80: mol_type = other DNA
ctcacaaaattactttcttaagtgatgcatcggtggttcccaaaactcatgtcatacctgtttgtcctcttcctagcaga

SEQ ID NO: 114355 - DNA, 80 bp, synthetic construct
  misc_feature 1..80: note = Artificially Synthesized Probe
  source 1..80: mol_type = other DNA
cacctggctgctgtggatttctgtcctggttctagcaggtccagcattaagtgaataaagcaatatctgaattatttctg

SEQ ID NO: 114356 - DNA, 80 bp, synthetic construct; identical to SEQ ID NO: 37722
  misc_feature 1..80: note = Artificially Synthesized Probe
  source 1..80: mol_type = other DNA

SEQ ID NO: 114357 - DNA, 80 bp, synthetic construct
  misc_feature 1..80: note = Artificially Synthesized Probe
  source 1..80: mol_type = other DNA
ctttttgtatccctcagacatcccaagctgttgcctgccccaggctccttgaatgtctgtttcttcttctctctggaaaa

SEQ ID NO: 114358 - DNA, 80 bp, synthetic construct
  misc_feature 1..80: note = Artificially Synthesized Probe
  source 1..80: mol_type = other DNA
ggatgttgcaagtaactttttcattggattggctagaagtgtcatagagagaccccatcccgctttctttggcatgaaca

SEQ ID NO: 114359 - DNA, 80 bp, synthetic construct
  misc_feature 1..80: note = Artificially Synthesized Probe
  source 1..80: mol_type = other DNA
gcatggtggcgggcgcctgtagtcccagctactcgggaggctgaggcaggagaatggcatgaacccaggaggcggagctt

SEQ ID NO: 114360 - DNA, 80 bp, synthetic construct; identical to SEQ ID NO: 37723
  misc_feature 1..80: note = Artificially Synthesized Probe
  source 1..80: mol_type = other DNA

SEQ ID NO: 114361 - DNA, 80 bp, synthetic construct
  misc_feature 1..80: note = Artificially Synthesized Probe
  source 1..80: mol_type = other DNA
tccaggagtcctgaaaccaagtcatttggagtcagtcaagaccaatagcagcattttatagtgtgggcaggggaagaaaa

SEQ ID NO: 114362 - DNA, 80 bp, synthetic construct
  misc_feature 1..80: note = Artificially Synthesized Probe
  source 1..80: mol_type = other DNA
atttttttggcatgtgctgattattctaaagtctcagggatgtcagaaagaaggtttatcgaaaactttctatttgtccg

SEQ ID NO: 114363 - DNA, 80 bp, synthetic construct
  misc_feature 1..80: note = Artificially Synthesized Probe
  source 1..80: mol_type = other DNA
acatgcctgcaatcccagatactcaggaggctgaggtgggagaatggcttcaacccgggaggcggaggttgcagtgagcc

SEQ ID NO: 114364 - DNA, 80 bp, synthetic construct
  misc_feature 1..80: note = Artificially Synthesized Probe
  source 1..80: mol_type = other DNA
tttcagattccacagagcagcctagagcccctaaaagcgatcatccagtacagactgccaatgaagaagaacaacaactt

SEQ ID NO: 114365 - DNA, 80 bp, synthetic construct; identical to SEQ ID NO: 37724
  misc_feature 1..80: note = Artificially Synthesized Probe
  source 1..80: mol_type = other DNA

SEQ ID NO: 114366 - DNA, 80 bp, synthetic construct
  misc_feature 1..80: note = Artificially Synthesized Probe
  source 1..80: mol_type = other DNA
gaagtggatgtggcctttgcaaagggaaatgggaggtgagcaatgcgtgggggcctagcaaaaggacgtaggcgggacct

SEQ ID NO: 114367 - DNA, 80 bp, synthetic construct
  misc_feature 1..80: note = Artificially Synthesized Probe
  source 1..80: mol_type = other DNA
acaatatactaaaaagttgaaaattatgttaaaactaacaacattaagtttaaatattttatttatacccaagccaaaat

SEQ ID NO: 114368 - DNA, 80 bp, synthetic construct
  misc_feature 1..80: note = Artificially Synthesized Probe
  source 1..80: mol_type = other DNA
ggcaggagaatcgcttgaacccgggaggcggaggttccagtgagccgagatcacaccactgcactccagcctggcaacag

SEQ ID NO: 114369 - DNA, 80 bp, synthetic construct
  misc_feature 1..80: note = Artificially Synthesized Probe
  source 1..80: mol_type = other DNA
acaaaaaaattatccaggcgtggtggtgggcgcctgtagtcccagctactcgggaggctgagacaggagaatggcgtgaa

SEQ ID NO: 114370 - DNA, 80 bp, synthetic construct; identical to SEQ ID NO: 37725
  misc_feature 1..80: note = Artificially Synthesized Probe
  source 1..80: mol_type = other DNA

SEQ ID NO: 114371 - DNA, 80 bp, synthetic construct
  misc_feature 1..80: note = Artificially Synthesized Probe
  source 1..80: mol_type = other DNA
ctctcacctatgtactgctggtggtgctggctctgcacggccatggtctgttccggagtgctgtgcaggccgctgtggga

SEQ ID NO: 114372 - DNA, 80 bp, synthetic construct
  misc_feature 1..80: note = Artificially Synthesized Probe
  source 1..80: mol_type = other DNA
gtggagtagtatcacccctggttgaagacgctaatttataggggagagtcacatagaagggcatctactcctctgcaagg

SEQ ID NO: 114373 - DNA, 80 bp, synthetic construct
  misc_feature 1..80: note = Artificially Synthesized Probe
  source 1..80: mol_type = other DNA
ataataataataataataataataataataataataatcgcccaagcacagtggctcacacctgtaatcccagcactttg

SEQ ID NO: 114374 - DNA, 80 bp, synthetic construct; identical to SEQ ID NO: 37726
  misc_feature 1..80: note = Artificially Synthesized Probe
  source 1..80: mol_type = other DNA

SEQ ID NO: 114375 - DNA, 80 bp, synthetic construct
  misc_feature 1..80: note = Artificially Synthesized Probe
  source 1..80: mol_type = other DNA
cacctctactaaaaatacaaaaattagccgggcgtggtggcacgcacctgtagtctcagctactcaggaggctgagagag

SEQ ID NO: 114376 - DNA, 80 bp, synthetic construct
  misc_feature 1..80: note = Artificially Synthesized Probe
  source 1..80: mol_type = other DNA
gcgtggtggtgcatgcctgtccaagctactcgggaggctaaagaggatcacttgaacctgggaggtggaggttgcagtga

SEQ ID NO: 114377 - DNA, 80 bp, synthetic construct
  misc_feature 1..80: note = Artificially Synthesized Probe
  source 1..80: mol_type = other DNA
tggccgagtaagacaatgaactgtgccagttgtgatgcttggcatctgtgtgcccaacagactgaggaccaacccagatc

SEQ ID NO: 114378 - DNA, 80 bp, synthetic construct; identical to SEQ ID NO: 37727
  misc_feature 1..80: note = Artificially Synthesized Probe
  source 1..80: mol_type = other DNA

SEQ ID NO: 114379 - DNA, 80 bp, synthetic construct
  misc_feature 1..80: note = Artificially Synthesized Probe
  source 1..80: mol_type = other DNA
ttcaagcgattctcctgcctcagcatcctgaggagctgggattacaggcgcctgccaccacacccggctaatttttgtat

SEQ ID NO: 114380 - DNA, 80 bp, synthetic construct
  misc_feature 1..80: note = Artificially Synthesized Probe
  source 1..80: mol_type = other DNA
agtgctttgttgggggttcaatggtagaatttctgcagatcccatgtgatgctcagtcgatacaacccaagagttcactt

SEQ ID NO: 114381 - DNA, 80 bp, synthetic construct; identical to SEQ ID NO: 37560
  misc_feature 1..80: note = Artificially Synthesized Probe
  source 1..80: mol_type = other DNA

SEQ ID NO: 114382 - DNA, 80 bp, synthetic construct
  misc_feature 1..80: note = Artificially Synthesized Probe
  source 1..80: mol_type = other DNA
gcatcaattatcaataaggatgcctttggtcgtaagtgacaaaagtctgaccccaaatggcttaagcaacaaacaaacaa

SEQ ID NO: 114383 - DNA, 80 bp, synthetic construct
  misc_feature 1..80: note = Artificially Synthesized Probe
  source 1..80: mol_type = other DNA
ctcacccaggctgcgggcgtctgggcccgcctcgctgccacgctgctcatcgcccatgtcatctgcggagggaggggtag

SEQ ID NO: 114384 - DNA, 80 bp, synthetic construct; identical to SEQ ID NO: 37728
  misc_feature 1..80: note = Artificially Synthesized Probe
  source 1..80: mol_type = other DNA

SEQ ID NO: 114385 - DNA, 80 bp, synthetic construct
  misc_feature 1..80: note = Artificially Synthesized Probe
  source 1..80: mol_type = other DNA
gggaaggcagcgaacaaataatacctaactccgtagaacacttaccacctgccaactactattctgagcactttgcatat

SEQ ID NO: 114386 - DNA, 80 bp, synthetic construct
  misc_feature 1..80: note = Artificially Synthesized Probe
  source 1..80: mol_type = other DNA
gtgccaggactggcacatcctaagcccttccacctgctgaggatcattctttaggaaaagctgataggacgaggtctggc

SEQ ID NO: 114387 - DNA, 80 bp, synthetic construct
  misc_feature 1..80: note = Artificially Synthesized Probe
  source 1..80: mol_type = other DNA
cagggaccacaggcatacccaagggagtgatgctcagtcatgacaacgtacgccaaagtccctttgctctggagtggtgg

SEQ ID NO: 114388 - DNA, 80 bp, synthetic construct; identical to SEQ ID NO: 37729
  misc_feature 1..80: note = Artificially Synthesized Probe
  source 1..80: mol_type = other DNA

SEQ ID NO: 114389 - DNA, 80 bp, synthetic construct
  misc_feature 1..80: note = Artificially Synthesized Probe
  source 1..80: mol_type = other DNA
gattacaggcacccgccaccatgcctggctaatttttgtatgtttattagagacagggtttcaccaagttggccaggctg

SEQ ID NO: 114390 - DNA, 80 bp, synthetic construct
  misc_feature 1..80: note = Artificially Synthesized Probe
  source 1..80: mol_type = other DNA
tggagtacagtggcactccactcactgcaaccactgcctcctgggttcaagcaattctcgtgcctcagcctcctgagtat

SEQ ID NO: 114391 - DNA, 80 bp, synthetic construct
  misc_feature 1..80: note = Artificially Synthesized Probe
  source 1..80: mol_type = other DNA
gcacctggtctgtttttacactgtttttagagatgggttcttaccatgttgcccaggctggagtgcagtgactactcaca

SEQ ID NO: 114392 - DNA, 80 bp, synthetic construct; identical to SEQ ID NO: 37730
  misc_feature 1..80: note = Artificially Synthesized Probe
  source 1..80: mol_type = other DNA

SEQ ID NO: 114393 - DNA, 80 bp, synthetic construct
  misc_feature 1..80: note = Artificially Synthesized Probe
  source 1..80: mol_type = other DNA
cttcccgtctctgtgaatctgacgactctagggacctcctaggagtggggtcacacaggatttgtccttttgcaactggt

SEQ ID NO: 114394 - DNA, 80 bp, synthetic construct
  misc_feature 1..80: note = Artificially Synthesized Probe
  source 1..80: mol_type = other DNA
ggcccatggaaggtcagcaatggaagattgcaaaagtcagcctccactcccttaatacactgtctcagctagtgctgtat

SEQ ID NO: 114395 - DNA, 80 bp, synthetic construct
  misc_feature 1..80: note = Artificially Synthesized Probe
  source 1..80: mol_type = other DNA
gctcaaggcctcttagaagttttctgatttttctacaactatggtttttactctcccacactgtctgtctgagcaatatc

SEQ ID NO: 114396 - DNA, 80 bp, synthetic construct
  misc_feature 1..80: note = Artificially Synthesized Probe
  source 1..80: mol_type = other DNA
ggactcaattgtatgatgcatgatagagaaaaattatttttggcccagtctccatcatcgctcccctggacctgtgtggt

SEQ ID NO: 114397 - DNA, 80 bp, synthetic construct
  misc_feature 1..80: note = Artificially Synthesized Probe
  source 1..80: mol_type = other DNA
aggtaaaagcccaagtctcctgaggcccacaaggcactgcaagcctagccccatctcccttctcctctcctctcctccct

SEQ ID NO: 114398 - DNA, 80 bp, synthetic construct; identical to SEQ ID NO: 37731
  misc_feature 1..80: note = Artificially Synthesized Probe
  source 1..80: mol_type = other DNA

SEQ ID NO: 114399 - DNA, 80 bp, synthetic construct
  misc_feature 1..80: note = Artificially Synthesized Probe
  source 1..80: mol_type = other DNA
gggaaatgaatgaatgagggaaatctgattaaacaggatattcccctctatgctggctagtatttatgctcctagtggct

SEQ ID NO: 114400 - DNA, 80 bp, synthetic construct
  misc_feature 1..80: note = Artificially Synthesized Probe
  source 1..80: mol_type = other DNA
tgctctgtcatccaggctggagtacagtgacactatcgcggcacactgcaatgtccacctcccaggtttaaacaattctc

SEQ ID NO: 114401 - DNA, 80 bp, synthetic construct; identical to SEQ ID NO: 37732
  misc_feature 1..80: note = Artificially Synthesized Probe
  source 1..80: mol_type = other DNA

SEQ ID NO: 114402 - DNA, 80 bp, synthetic construct
  misc_feature 1..80: note = Artificially Synthesized Probe
  source 1..80: mol_type = other DNA
acttgagaaaatagatatatattttccccctaacatttctctcttagaaaaaaaagtgaaattcttggccgggcgcaggg

SEQ ID NO: 114403 - DNA, 80 bp, synthetic construct
  misc_feature 1..80: note = Artificially Synthesized Probe
  source 1..80: mol_type = other DNA
gtttcttcattcttctgcacatggctagccagttttcccagcaccacttagtgaataggatgtccttccccattgtttat

SEQ ID NO: 114404 - DNA, 80 bp, synthetic construct
  misc_feature 1..80: note = Artificially Synthesized Probe
  source 1..80: mol_type = other DNA
ctagctgtgttctttttgcttaggattgctctatttgggctttctggttccatataaattttagaattgttttatataat

SEQ ID NO: 114405 - DNA, 80 bp, synthetic construct
  misc_feature 1..80: note = Artificially Synthesized Probe
  source 1..80: mol_type = other DNA
aagttattctcgtagaagtctttcatctccttggttaaatgtgtctgtgggtattttattttttgtgtagctactgtaaa

SEQ ID NO: 114406 - DNA, 80 bp, synthetic construct
  misc_feature 1..80: note = Artificially Synthesized Probe
  source 1..80: mol_type = other DNA
atcattggtgaacagagataatttgacttcctctgttcctattttcctattcatacatcttttatttcttgcttgtgcct

SEQ ID NO: 114407 - DNA, 80 bp, synthetic construct; identical to SEQ ID NO: 37733
  misc_feature 1..80: note = Artificially Synthesized Probe
  source 1..80: mol_type = other DNA

SEQ ID NO: 114408 - DNA, 80 bp, synthetic construct
  misc_feature 1..80: note = Artificially Synthesized Probe
  source 1..80: mol_type = other DNA
atttgtttacccaaaagtcattaaggagcaagttgcttagtttccatgtatttgtgtggttttgagggttcctcttggta

SEQ ID NO: 114409 - DNA, 80 bp, synthetic construct
  misc_feature 1..80: note = Artificially Synthesized Probe
  source 1..80: mol_type = other DNA
agagtattctgaagatgtctattaggtccatttggtcaactgtccaatttagtctagtatttctttattttctgcctcaa

SEQ ID NO: 114410 - DNA, 80 bp, synthetic construct; identical to SEQ ID NO: 37734
  misc_feature 1..80: note = Artificially Synthesized Probe
  source 1..80: mol_type = other DNA

SEQ ID NO: 114411 - DNA, 80 bp, synthetic construct
  misc_feature 1..80: note = Artificially Synthesized Probe
  source 1..80: mol_type = other DNA
agctgggcgtggtggcgcatgcctttaatcccagcgactcaggaggctgaggcaggagaatcacttgaacctgggaggca

SEQ ID NO: 114412 - DNA, 80 bp, synthetic construct
  misc_feature 1..80: note = Artificially Synthesized Probe
  source 1..80: mol_type = other DNA
atttaggatgtttatgttcaaggttaatattgatatgtgaggttttgttcctgtcatgtgtttttgctttgtattcttga

SEQ ID NO: 114413 - DNA, 80 bp, synthetic construct
  misc_feature 1..80: note = Artificially Synthesized Probe
  source 1..80: mol_type = other DNA
tagtgatgacaaattcctttacatttgcttatctgagaaatattttatttcccatttatgaaacttagtttagtgggata

SEQ ID NO: 114414 - DNA, 80 bp, synthetic construct
  misc_feature 1..80: note = Artificially Synthesized Probe
  source 1..80: mol_type = other DNA
ttttttttctacattgaccttggtctgatgactatatgcctcgggggtggccatattgtgtagcatctcacaggagttct

SEQ ID NO: 114415 - DNA, 80 bp, synthetic construct
  misc_feature 1..80: note = Artificially Synthesized Probe
  source 1..80: mol_type = other DNA
ctggatttctcatatctagatgttgacctctctggcaagattaggtaaattttcctgtattactccctcaaatatgtttt

SEQ ID NO: 114416 - DNA, 80 bp, synthetic construct; identical to SEQ ID NO: 37735
  misc_feature 1..80: note = Artificially Synthesized Probe
  source 1..80: mol_type = other DNA

SEQ ID NO: 114417 - DNA, 80 bp, synthetic construct
  misc_feature 1..80: note = Artificially Synthesized Probe
  source 1..80: mol_type = other DNA
acccattgctagagaactggtgagattctttggaggtgttgaaacactctggctttttctactgccagatttcttgcact

SEQ ID NO: 114418 - DNA, 80 bp, synthetic construct
  misc_feature 1..80: note = Artificially Synthesized Probe
  source 1..80: mol_type = other DNA
caaaggtctgtatgggttccacggttgtggacagcttctgtgcagtggctaaggtctgtacgggttccatggttgtggac

SEQ ID NO: 114419 - DNA, 80 bp, synthetic construct
  misc_feature 1..80: note = Artificially Synthesized Probe
  source 1..80: mol_type = other DNA
ctcatgcactgtcaataaacccttccagtagcaagatttttgtttggtggtgcagtgcaggatgcagtccagtagatcgc

SEQ ID NO: 114420 - DNA, 80 bp, synthetic construct; identical to SEQ ID NO: 37736
  misc_feature 1..80: note = Artificially Synthesized Probe
  source 1..80: mol_type = other DNA

SEQ ID NO: 114421 - DNA, 80 bp, synthetic construct
  misc_feature 1..80: note = Artificially Synthesized Probe
  source 1..80: mol_type = other DNA
gggttagatcttcagggatcctgcggccccccagaggctcactggtcccttgtgcttgccaaagtcacagcgcgttgtgg

SEQ ID NO: 114422 - DNA, 80 bp, synthetic construct; identical to SEQ ID NO: 37561
  misc_feature 1..80: note = Artificially Synthesized Probe
  source 1..80: mol_type = other DNA

SEQ ID NO: 114423 - DNA, 80 bp, synthetic construct
  misc_feature 1..80: note = Artificially Synthesized Probe
  source 1..80: mol_type = other DNA
ctgtccctgggaagttctctaatcagcaccgatggtgttggcctgggttgcaagggcagaggagctccctgagagtttag

SEQ ID NO: 114424 - DNA, 80 bp, synthetic construct
  misc_feature 1..80: note = Artificially Synthesized Probe
  source 1..80: mol_type = other DNA
cctctccttcctccattttcagttcaaaacttatccatttaccagtaattttgatcttcttcctgaaaactgacatctga

SEQ ID NO: 114425 - DNA, 80 bp, synthetic construct; identical to SEQ ID NO: 37737
  misc_feature 1..80: note = Artificially Synthesized Probe
  source 1..80: mol_type = other DNA

SEQ ID NO: 114426 - DNA, 80 bp, synthetic construct
  misc_feature 1..80: note = Artificially Synthesized Probe
  source 1..80: mol_type = other DNA
aacacacccatctaatttttgtattattagtagagatggggtttcaccacgttggccaggctggtctcgaactcctgacc

SEQ ID NO: 114427 - DNA, 80 bp, synthetic construct
  misc_feature 1..80: note = Artificially Synthesized Probe
  source 1..80: mol_type = other DNA
tctgctcctttctgtcagtcaaaacaaatcactggaccaattctgtctcaaaggaaagagaaacaaattccacctcagaa

SEQ ID NO: 114428 - DNA, 80 bp, synthetic construct
  misc_feature 1..80: note = Artificially Synthesized Probe
  source 1..80: mol_type = other DNA
gaggccgagacaggaggattgcttgaagccaggattgtttgagagaaggctgggaaacacagcaagacctcatctctaca

SEQ ID NO: 114429 - DNA, 80 bp, synthetic construct
  misc_feature 1..80: note = Artificially Synthesized Probe
  source 1..80: mol_type = other DNA
tctcatcatcatctttacagcaagaagttaaaggtagccttagattcttgccagatgtctacagctcagtgtttctcccg

SEQ ID NO: 114430 - DNA, 80 bp, synthetic construct; identical to SEQ ID NO: 37738
  misc_feature 1..80: note = Artificially Synthesized Probe
  source 1..80: mol_type = other DNA

SEQ ID NO: 114431 - DNA, 80 bp, synthetic construct
  misc_feature 1..80: note = Artificially Synthesized Probe
  source 1..80: mol_type = other DNA
agccttgagggatattttgggctgactgctttatgtcctttactgcagttaaccattccttctatttcctcattcattca

SEQ ID NO: 114432 - DNA, 80 bp, synthetic construct
  misc_feature 1..80: note = Artificially Synthesized Probe
  source 1..80: mol_type = other DNA
gtcaatggcactttcaccttagatggtgtgagatggcccttctaaggaagtgacatttcagctgagacttaatgttcaag

SEQ ID NO: 114433 - DNA, 80 bp, synthetic construct
  misc_feature 1..80: note = Artificially Synthesized Probe
  source 1..80: mol_type = other DNA
caggcctacagggaggcgggagaccatgctggcgaggtgtgtgtaaaccacctggctcagggcaggccgtgggcatcaca

SEQ ID NO: 114434 - DNA, 80 bp, synthetic construct
  misc_feature 1..80: note = Artificially Synthesized Probe
  source 1..80: mol_type = other DNA
aacagcgaggaggtctgggtggctggattaatgaagtaactattcaccagagatttatgacactagtgagaaatataagt

SEQ ID NO: 114435 - DNA, 80 bp, synthetic construct; identical to SEQ ID NO: 37739
  misc_feature 1..80: note = Artificially Synthesized Probe
  source 1..80: mol_type = other DNA

SEQ ID NO: 114436 - DNA, 80 bp, synthetic construct
  misc_feature 1..80: note = Artificially Synthesized Probe
  source 1..80: mol_type = other DNA
cctcctaacttcaggcaagttagttaaggactctgtgcttctgttttcacataattctccctgattaaaaaaaccgttag

SEQ ID NO: 114437 - DNA, 80 bp, synthetic construct
  misc_feature 1..80: note = Artificially Synthesized Probe
  source 1..80: mol_type = other DNA
gcttgagcaaagtatgtgagcgccccaatctttatgggtacccagatgtccatcatctgtgctgcaatatggctgagtgg

SEQ ID NO: 114438 - DNA, 80 bp, synthetic construct
  misc_feature 1..80: note = Artificially Synthesized Probe
  source 1..80: mol_type = other DNA
agcacagacaatggacatctgggtacccataaagatcggggcactcacatactttaggcttaagcacatgctctcaaggt

SEQ ID NO: 114439 - DNA, 80 bp, synthetic construct; identical to SEQ ID NO: 37740
  misc_feature 1..80: note = Artificially Synthesized Probe
  source 1..80: mol_type = other DNA

SEQ ID NO: 114440 - DNA, 80 bp, synthetic construct
  misc_feature 1..80: note = Artificially Synthesized Probe
  source 1..80: mol_type = other DNA
aacatagtgagaccccctctctacaaaaaaagttaaaaaaaaattagctgggtgtggtggtgtgtgcctatagtaccagt

SEQ ID NO: 114441 - DNA, 80 bp, synthetic construct
  misc_feature 1..80: note = Artificially Synthesized Probe
  source 1..80: mol_type = other DNA
gattgtcccttatgttacagatcacgtggattgcaggagcagtgacaaaggactttaaactgacagacaagcatgagacg

SEQ ID NO: 114442 - DNA, 80 bp, synthetic construct; identical to SEQ ID NO: 37741
  misc_feature 1..80: note = Artificially Synthesized Probe
  source 1..80: mol_type = other DNA

SEQ ID NO: 114443 - DNA, 80 bp, synthetic construct
  misc_feature 1..80: note = Artificially Synthesized Probe
  source 1..80: mol_type = other DNA
taatagtaaatttttctaaaaaacaaaaaacacctgaccaaataaaacaacttttttttttttttaaccagctggctaca

SEQ ID NO: 114444 - DNA, 80 bp, synthetic construct
  misc_feature 1..80: note = Artificially Synthesized Probe
  source 1..80: mol_type = other DNA
ttcccaaatctaaaaagctccaaaaaacaggagtttttggcagcaaagtctgatctgaattgataagatgttgtttgtgg

SEQ ID NO: 114445 - DNA, 80 bp, synthetic construct
  misc_feature 1..80: note = Artificially Synthesized Probe
  source 1..80: mol_type = other DNA
atgtctgcagacaacgaggtacagaaggaatgctctggaaactctctcctggaacctccaactcctgggagtggctgtgt

SEQ ID NO: 114446 - DNA, 80 bp, synthetic construct
  misc_feature 1..80: note = Artificially Synthesized Probe
  source 1..80: mol_type = other DNA
aagtattatcttttgcctttctattgtggtgaggatttagctcccttcctctcccgtcttctcatttctccttccccatt

SEQ ID NO: 114447 - DNA, 80 bp, synthetic construct; identical to SEQ ID NO: 37742
  misc_feature 1..80: note = Artificially Synthesized Probe
  source 1..80: mol_type = other DNA

SEQ ID NO: 114448 - DNA, 80 bp, synthetic construct
  misc_feature 1..80: note = Artificially Synthesized Probe
  source 1..80: mol_type = other DNA
gtgccaccatgcctggctgatttttgtatttttagtagagatggggtttcacaattttggccagactggtctcaaactcc

SEQ ID NO: 114449 - DNA, 80 bp, synthetic construct
  misc_feature 1..80: note = Artificially Synthesized Probe
  source 1..80: mol_type = other DNA
ttggagatctttgtgatttatcaatggggagctctcaggtgaaaaccaaaaggaagtgaggagagaaggataggctgggg

SEQ ID NO: 114450 - DNA, 80 bp, synthetic construct
  misc_feature 1..80: note = Artificially Synthesized Probe
  source 1..80: mol_type = other DNA
catccatgtgggatagggagcataacttcccagttatttctaagtaagggcggttttctggaaaagagggaactgtgggc

SEQ ID NO: 114451 - DNA, 80 bp, synthetic construct
  misc_feature 1..80: note = Artificially Synthesized Probe
  source 1..80: mol_type = other DNA
ttgcaaagtagttatgtgaaagaacactttgatttcttttctaaatttttttttttttttttttttttagagacaaggtc

SEQ ID NO: 114452 - DNA, 80 bp, synthetic construct; identical to SEQ ID NO: 37743
  misc_feature 1..80: note = Artificially Synthesized Probe
  source 1..80: mol_type = other DNA

SEQ ID NO: 114453 - DNA, 80 bp, synthetic construct
  misc_feature 1..80: note = Artificially Synthesized Probe
  source 1..80: mol_type = other DNA
tctcagtctcccaagccgggattacaggcgtgcaccaccacgcccagctaatttttgtatttttagtagagacgggattt

SEQ ID NO: 114454 - DNA, 80 bp, synthetic construct
  misc_feature 1..80: note = Artificially Synthesized Probe
  source 1..80: mol_type = other DNA
aaaatcaatatgtcatcagggctgcattccttctagaggctcttggggaccttttccagcttctagaggccacctatgtt

SEQ ID NO: 114455 - DNA, 80 bp, synthetic construct
  misc_feature 1..80: note = Artificially Synthesized Probe
  source 1..80: mol_type = other DNA
gtcccttttgccatgaaagattacatattcacaggtcccaggagttagaacgtggacatctttagggggccattattttg

SEQ ID NO: 114456 - DNA, 80 bp, synthetic construct
  misc_feature 1..80: note = Artificially Synthesized Probe
  source 1..80: mol_type = other DNA
acactgggaggcagtgatatttgaatgggccctaaaccaggggccagcaaactatggcctgagggccaattctgctgttt

SEQ ID NO: 114457 - DNA, 80 bp, synthetic construct
  misc_feature 1..80: note = Artificially Synthesized Probe
  source 1..80: mol_type = other DNA
ctcagtgcctgagatgtgttaggtcttcaatacatatttcctttcttggctgaatacataatacatacacatttacctac

SEQ ID NO: 114458 - DNA, 80 bp, synthetic construct; identical to SEQ ID NO: 37744
  misc_feature 1..80: note = Artificially Synthesized Probe
  source 1..80: mol_type = other DNA

SEQ ID NO: 114459 - DNA, 80 bp, synthetic construct
  misc_feature 1..80: note = Artificially Synthesized Probe
  source 1..80: mol_type = other DNA
tagtttgcccatataaaaatgtggttgctctttctgtgctagcatgactagtaaaaagaaaagtaaaagccaggcacggc

SEQ ID NO: 114460 - DNA, 80 bp, synthetic construct
  misc_feature 1..80: note = Artificially Synthesized Probe
  source 1..80: mol_type = other DNA
aaaaaaaaaaaaaagaaaaagaaaaattagccaggcgtggtggtgtgcacctgtaagcccagctactcaggaggctgaga

SEQ ID NO: 114461 - DNA, 80 bp, synthetic construct; identical to SEQ ID NO: 37745
  misc_feature 1..80: note = Artificially Synthesized Probe
  source 1..80: mol_type = other DNA

SEQ ID NO: 114462 - DNA, 80 bp, synthetic construct
  misc_feature 1..80: note = Artificially Synthesized Probe
  source 1..80: mol_type = other DNA
aatactttctcccagttctatggcttgttgtttcctcaataatcttttgaagaggaaaaagtgtttaagttggatgaagt

SEQ ID NO: 114463 - DNA, 80 bp, synthetic construct
  misc_feature 1..80: note = Artificially Synthesized Probe
  source 1..80: mol_type = other DNA
catttagggctataatgcattttgaggtaattttcatgtttggtgagaaataaggctctaaccctaaattttgtggaagc

SEQ ID NO: 114464 - DNA, 80 bp, synthetic construct
  misc_feature 1..80: note = Artificially Synthesized Probe
  source 1..80: mol_type = other DNA
atcttctattttgttccactgatctgcatctctgtctttacgccaaagcctcactgacttattacactagcttgatagca

SEQ ID NO: 114465 - DNA, 80 bp, synthetic construct
  misc_feature 1..80: note = Artificially Synthesized Probe
  source 1..80: mol_type = other DNA
taaattttaaaatcaggtagtaagtcctccaattttgtctttcttttccaaaattgcttgggctattctaggtcctctgc

SEQ ID NO: 114466 - DNA, 80 bp, synthetic construct; identical to SEQ ID NO: 37746
  misc_feature 1..80: note = Artificially Synthesized Probe
  source 1..80: mol_type = other DNA

SEQ ID NO: 114467 - DNA, 80 bp, synthetic construct
  misc_feature 1..80: note = Artificially Synthesized Probe
  source 1..80: mol_type = other DNA
aaatattttaccagtttatgcctctcatcaaatccctagacagagtgcaaaaatctgactggccaacccagctaatgggt

SEQ ID NO: 114468 - DNA, 80 bp, synthetic construct
  misc_feature 1..80: note = Artificially Synthesized Probe
  source 1..80: mol_type = other DNA
ctaaaggaggtaaaacctactgtcttcattggagtgcctcaaatttgggagaagatacatgagatggtgaagaaaaatag

SEQ ID NO: 114469 - DNA, 80 bp, synthetic construct; identical to SEQ ID NO: 37562
  misc_feature 1..80: note = Artificially Synthesized Probe
  source 1..80: mol_type = other DNA

SEQ ID NO: 114470 - DNA, 80 bp, synthetic construct; identical to SEQ ID NO: 37747
  misc_feature 1..80: note = Artificially Synthesized Probe
  source 1..80: mol_type = other DNA

SEQ ID NO: 114471 - DNA, 80 bp, synthetic construct
  misc_feature 1..80: note = Artificially Synthesized Probe
  source 1..80: mol_type = other DNA
gagttctttctaagcttggacatacctataggcgagttgtatgggttgagtgagagctcgggaccccacacgatatccaa

SEQ ID NO: 114472 - DNA, 80 bp, synthetic construct
  misc_feature 1..80: note = Artificially Synthesized Probe
  source 1..80: mol_type = other DNA
caagtcctaactccgcatgaccgtgggaaaccctggatggtaagagagcccacagataagggggatggctctctgaacat

SEQ ID NO: 114473 - DNA, 80 bp, synthetic construct
  misc_feature 1..80: note = Artificially Synthesized Probe
  source 1..80: mol_type = other DNA
ccaatgataagaaaactttaagaataccaaattgaggttcaactccccatctgagagctgtcagtcatagaatcttctgg

SEQ ID NO: 114474 - DNA, 80 bp, synthetic construct
  misc_feature 1..80: note = Artificially Synthesized Probe
  source 1..80: mol_type = other DNA
gagtgcaatggtacaatcatagatcactgtaaccttgaacttctggattcaagcattcctcctgcctcagcctcccaact

SEQ ID NO: 114475 - DNA, 80 bp, synthetic construct; identical to SEQ ID NO: 37748
  misc_feature 1..80: note = Artificially Synthesized Probe
  source 1..80: mol_type = other DNA

SEQ ID NO: 114476 - DNA, 80 bp, synthetic construct
  misc_feature 1..80: note = Artificially Synthesized Probe
  source 1..80: mol_type = other DNA
gtggtcacaaatttagatggttgaacttatcgatctcttatggcttctggatttttctatatacctaaaaaggcttcagt

SEQ ID NO: 114477 - DNA, 80 bp, synthetic construct
  misc_feature 1..80: note = Artificially Synthesized Probe
  source 1..80: mol_type = other DNA
gttaatcaaagagatctcagcaacacacggagaaaatatttcctttcctgcatcctagaactgcactggccagtgctatc

SEQ ID NO: 114478 - DNA, 80 bp, synthetic construct; identical to SEQ ID NO: 37749
  misc_feature 1..80: note = Artificially Synthesized Probe
  source 1..80: mol_type = other DNA

SEQ ID NO: 114479 - DNA, 80 bp, synthetic construct
  misc_feature 1..80: note = Artificially Synthesized Probe
  source 1..80: mol_type = other DNA
ctggagtacagtggcgtgatcactactcactgcagccttgacctcctgggctcaggtgattctcccacctcagcctccca

SEQ ID NO: 114480 - DNA, 80 bp, synthetic construct
  misc_feature 1..80: note = Artificially Synthesized Probe
  source 1..80: mol_type = other DNA
aactgtggggatggcagaaggattagaggttgctgcagactggggtggggagggaaagctgggtaggcagaacatggagg

SEQ ID NO: 114481 - DNA, 80 bp, synthetic construct
  misc_feature 1..80: note = Artificially Synthesized Probe
  source 1..80: mol_type = other DNA
gagccaccacacctggccactgctaggtttcccagttcacaaagcctttgggaatctgacacgctggattaaacactgca

SEQ ID NO: 114482 - DNA, 80 bp, synthetic construct
  misc_feature 1..80: note = Artificially Synthesized Probe
  source 1..80: mol_type = other DNA
ttgactgggtgtaagaatatgctgttccagcagaacaaggatggcattggggagatctgcctctggggtaggcacatctt

SEQ ID NO: 114483 - DNA, 80 bp, synthetic construct
  misc_feature 1..80: note = Artificially Synthesized Probe
  source 1..80: mol_type = other DNA
agcaggcccaccctgaacatttaagggcccagggtaccagcacgaaggccacccccagttcctcaccttccaagaggagc

SEQ ID NO: 114484 - DNA, 80 bp, synthetic construct; identical to SEQ ID NO: 37750
  misc_feature 1..80: note = Artificially Synthesized Probe
  source 1..80: mol_type = other DNA

SEQ ID NO: 114485 - DNA, 80 bp, synthetic construct
  misc_feature 1..80: note = Artificially Synthesized Probe
  source 1..80: mol_type = other DNA
gattgaagaaagtatagaacaaggataagccaacttttcctgaagagggccctttagtaaatatttttgggttcacaaaa

SEQ ID NO: 114486 - DNA, 80 bp, synthetic construct
  misc_feature 1..80: note = Artificially Synthesized Probe
  source 1..80: mol_type = other DNA
aaaattcatttttagcttttggttatacaaaattgaatagtggcctggatttggccactatgggccatagtttgccaaaa

SEQ ID NO: 114487 - DNA, 80 bp, synthetic construct; identical to SEQ ID NO: 37751
  misc_feature 1..80: note = Artificially Synthesized Probe
  source 1..80: mol_type = other DNA

SEQ ID NO: 114488 - DNA, 80 bp, synthetic construct
  misc_feature 1..80: note = Artificially Synthesized Probe
  source 1..80: mol_type = other DNA
cgtgtgccaccacacccggctatttttttgcagagacccaatttcactgtgttgcccaggttggtctagcacttgtgggc

SEQ ID NO: 114489 - DNA, 80 bp, synthetic construct
  misc_feature 1..80: note = Artificially Synthesized Probe
  source 1..80: mol_type = other DNA
ccgcctcccaggttcaagtgattctcctgcctcaacctcccgagtagctgggattacaggtgcacaccaccaaacctggc

SEQ ID NO: 114490 - DNA, 80 bp, synthetic construct
  misc_feature 1..80: note = Artificially Synthesized Probe
  source 1..80: mol_type = other DNA
tgagaccttggttaagaagaagatccccatcatcagtaacgccatgttagtaggagataaactgaagtttctgagcatgt

SEQ ID NO: 114491 - DNA, 80 bp, synthetic construct
  misc_feature 1..80: note = Artificially Synthesized Probe
  source 1..80: mol_type = other DNA
atgggtggtgacagaggtgtctgggggcagtgtgagatgaatcagatgagcggagaacctctggacaagctgaacttcga

SEQ ID NO: 114492 - DNA, 80 bp, synthetic construct
  misc_feature 1..80: note = Artificially Synthesized Probe
  source 1..80: mol_type = other DNA
tgagcaatgcaccgctgtgtgggggaggtgaatggtgggagaggcggtggggagcggggctgggggtgtagaacaactct

SEQ ID NO: 114493 - DNA, 80 bp, synthetic construct; identical to SEQ ID NO: 37752
  misc_feature 1..80: note = Artificially Synthesized Probe
  source 1..80: mol_type = other DNA

SEQ ID NO: 114494 - DNA, 80 bp, synthetic construct
  misc_feature 1..80: note = Artificially Synthesized Probe
  source 1..80: mol_type = other DNA
tcttggaaataaaatccaacctccttactatagctctatacaatctctcgcctgctgacctttcattcactctgcaccaa

SEQ ID NO: 114495 - DNA, 80 bp, synthetic construct
  misc_feature 1..80: note = Artificially Synthesized Probe
  source 1..80: mol_type = other DNA
cccctcagagcagccttgttacaggacccccaggtttgtatgcccactgcacagtaatataccaatacactgagacagca

SEQ ID NO: 114496 - DNA, 80 bp, synthetic construct
  misc_feature 1..80: note = Artificially Synthesized Probe
  source 1..80: mol_type = other DNA
aaattagctgggtatggtagcggtgcccagctactcaggagactgagaggatcgcttgagcccagggaggtcaaggctgc

SEQ ID NO: 114497 - DNA, 80 bp, synthetic construct; identical to SEQ ID NO: 37753
  misc_feature 1..80: note = Artificially Synthesized Probe
  source 1..80: mol_type = other DNA

SEQ ID NO: 114498 - DNA, 80 bp, synthetic construct
  misc_feature 1..80: note = Artificially Synthesized Probe
  source 1..80: mol_type = other DNA
agcagttaaggggaactatatcttgtgattgggttttttgtgtgtgtgtgattctggggcaataggcaaacagctagcta

SEQ ID NO: 114499 - DNA, 80 bp, synthetic construct
  misc_feature 1..80: note = Artificially Synthesized Probe
  source 1..80: mol_type = other DNA
acccagaggtgcccccagctcgggccaggcgaaagagcctctgccctgtgcctccctttcccagcgccgacgggcctggg

SEQ ID NO: 114500 - DNA, 80 bp, synthetic construct
  misc_feature 1..80: note = Artificially Synthesized Probe
  source 1..80: mol_type = other DNA
tgccatcgtccttaatatttcacccagtagcttgctgccacccccattataccaccctgtcttctttaaagcatcagaac

SEQ ID NO: 114501 - DNA, 80 bp, synthetic construct
  misc_feature 1..80: note = Artificially Synthesized Probe
  source 1..80: mol_type = other DNA
gctcggctgtaatctgacggtgtggatggaagaatcagagcaagtatgtggcaatgaacaacctgggttcaaatcctgtc

SEQ ID NO: 114502 - DNA, 80 bp, synthetic construct; identical to SEQ ID NO: 37754
  misc_feature 1..80: note = Artificially Synthesized Probe
  source 1..80: mol_type = other DNA

SEQ ID NO: 114503 - DNA, 80 bp, synthetic construct
  misc_feature 1..80: note = Artificially Synthesized Probe
  source 1..80: mol_type = other DNA
tagtagagacagggtttcaccattttggccaggatggtcttgatctcttgacctcgtgatcaacccgccttggcctccca

SEQ ID NO: 114504 - DNA, 80 bp, synthetic construct
  misc_feature 1..80: note = Artificially Synthesized Probe
  source 1..80: mol_type = other DNA
gcagagggggataccttggctttcccaggatgctggagactggggagttatgatgagtttgtttcgtgttggagaaacac

SEQ ID NO: 114505 - DNA, 80 bp, synthetic construct
  misc_feature 1..80: note = Artificially Synthesized Probe
  source 1..80: mol_type = other DNA
caatgcccctggtgactcagaggctttcaatgaaagtcctgggctcagggagcagacaactcccagtttgagacttgatt

SEQ ID NO: 114506 - DNA, 80 bp, synthetic construct
  misc_feature 1..80: note = Artificially Synthesized Probe
  source 1..80: mol_type = other DNA
ccttccagctcacagaatcctcaccacagctgaaggatcacatggaagttttatcatccccatacagatggcaaaagtta

SEQ ID NO: 114507 - DNA, 80 bp, synthetic construct; identical to SEQ ID NO: 37755
  misc_feature 1..80: note = Artificially Synthesized Probe
  source 1..80: mol_type = other DNA

SEQ ID NO: 114508 - DNA, 80 bp, synthetic construct
  misc_feature 1..80: note = Artificially Synthesized Probe
  source 1..80: mol_type = other DNA
acactcttagttgcagtggattctgagtagcaggcttcaactcatgctgtctctactctaccagggtcatggtagggtgt

SEQ ID NO: 114509 - DNA, 80 bp, synthetic construct
  misc_feature 1..80: note = Artificially Synthesized Probe
  source 1..80: mol_type = other DNA
gaactcaaggaatgaggtgtgttggcccattacacagataataagggatggaggcttgaacttccactatccaccgttta

SEQ ID NO: 114510 - DNA, 80 bp, synthetic construct
  misc_feature 1..80: note = Artificially Synthesized Probe
  source 1..80: mol_type = other DNA
tcatgggcaacttgttctaatgccaccagccaacccatgttttagtttgctggggctacattacaaagtaccacagactg

SEQ ID NO: 114511 - DNA, 80 bp, synthetic construct; identical to SEQ ID NO: 37756
  misc_feature 1..80: note = Artificially Synthesized Probe
  source 1..80: mol_type = other DNA

SEQ ID NO: 114512 - DNA, 80 bp, synthetic construct
  misc_feature 1..80: note = Artificially Synthesized Probe
  source 1..80: mol_type = other DNA
tcatatccattgtcctttgttcaacgttaactggtttaacccttccacaccttcatttgttgatgtcttgtgggtgggcc

SEQ ID NO: 114513 - DNA, 80 bp, synthetic construct
  misc_feature 1..80: note = Artificially Synthesized Probe
  source 1..80: mol_type = other DNA
gtctgtccaaaccaagatgtgctgtaatacataaaacacactgggcttcaaaagcacagcaccaaaaaaaaaaaaaaaaa

SEQ ID NO: 114514 - DNA, 80 bp, synthetic construct
  misc_feature 1..80: note = Artificially Synthesized Probe
  source 1..80: mol_type = other DNA
ttaaatttttatttactttttagagacagggtcttgctctgttgctcaggctagagtgcagtggtgcattcatacctaat

SEQ ID NO: 114515 - DNA, 80 bp, synthetic construct; identical to SEQ ID NO: 37563
  misc_feature 1..80: note = Artificially Synthesized Probe
  source 1..80: mol_type = other DNA

SEQ ID NO: 114516 - DNA, 80 bp, synthetic construct; identical to SEQ ID NO: 37757
  misc_feature 1..80: note = Artificially Synthesized Probe
  source 1..80: mol_type = other DNA

SEQ ID NO: 114517 - DNA, 80 bp, synthetic construct
  misc_feature 1..80: note = Artificially Synthesized Probe
  source 1..80: mol_type = other DNA
tgcaataagtgaaatgctgctctaggtagaagctctccctgctgtttttaagaagccacattcctcattggtcagtttct

SEQ ID NO: 114518 - DNA, 80 bp, synthetic construct
  misc_feature 1..80: note = Artificially Synthesized Probe
  source 1..80: mol_type = other DNA
aacttgtgggctcccatttgatttttttctcctcaggggactcagacattagaaagaaaaagcctcacagatttgaagaa

SEQ ID NO: 114519 - DNA, 80 bp, synthetic construct; identical to SEQ ID NO: 37758
  misc_feature 1..80: note = Artificially Synthesized Probe
  source 1..80: mol_type = other DNA

SEQ ID NO: 114520 - DNA, 80 bp, synthetic construct
  misc_feature 1..80: note = Artificially Synthesized Probe
  source 1..80: mol_type = other DNA
tcaagagtcaaggtatgactcttgactaattccgtcattagggaggagttttctgttgtagtaagttaagtaaacttaaa

SEQ ID NO: 114521 - DNA, 80 bp, synthetic construct
  misc_feature 1..80: note = Artificially Synthesized Probe
  source 1..80: mol_type = other DNA
ccagtgtctcttaagcttctagatactcagaggcaggccagagacccttttgagttccattttttaaatacaccagaaat

SEQ ID NO: 114522 - DNA, 80 bp, synthetic construct
  misc_feature 1..80: note = Artificially Synthesized Probe
  source 1..80: mol_type = other DNA
gtcatttataaagaaaagaggtttaattaattagctcatggttctacaggctttatagaaagtatggtgctggtgcctgt

SEQ ID NO: 114523 - DNA, 80 bp, synthetic construct
  misc_feature 1..80: note = Artificially Synthesized Probe
  source 1..80: mol_type = other DNA
gccatgagggatccgcccccctgccatgacccaaacacctccaccaggccccacctccagcacaggggattacagtgcaa

SEQ ID NO: 114524 - DNA, 80 bp, synthetic construct; identical to SEQ ID NO: 37759
  misc_feature 1..80: note = Artificially Synthesized Probe
  source 1..80: mol_type = other DNA

SEQ ID NO: 114525 - DNA, 80 bp, synthetic construct
  misc_feature 1..80: note = Artificially Synthesized Probe
  source 1..80: mol_type = other DNA
gtaaacctttttgagttttttaaaaatagagacagggcctcactctgtcacccaggctggagtgcactggtgtgatctca

SEQ ID NO: 114526 - DNA, 80 bp, synthetic construct
  misc_feature 1..80: note = Artificially Synthesized Probe
  source 1..80: mol_type = other DNA
tagtttttgtttctactgtccatgtgatctccccacttgtaggttttctaggtagttaatgttggtatatggaagtgctg

SEQ ID NO: 114527 - DNA, 80 bp, synthetic construct
  misc_feature 1..80: note = Artificially Synthesized Probe
  source 1..80: mol_type = other DNA
gcgtgagccataatgcctagcttatttttgtatttttagtggagacggggttttgccatgttggccaggctggtctcaaa

SEQ ID NO: 114528 - DNA, 80 bp, synthetic construct; identical to SEQ ID NO: 37760
  misc_feature 1..80: note = Artificially Synthesized Probe
  source 1..80: mol_type = other DNA

SEQ ID NO: 114529 - DNA, 80 bp, synthetic construct
  misc_feature 1..80: note = Artificially Synthesized Probe
  source 1..80: mol_type = other DNA
tacaaccatcaacacgacgcatttctagaagtttcatctcttcaaactgaaactttatatccatcaaacaattccccatt

SEQ ID NO: 114530 - DNA, 80 bp, synthetic construct
  misc_feature 1..80: note = Artificially Synthesized Probe
  source 1..80: mol_type = other DNA
gaccagcccagccaatacggcgaaaccccgtctctacaaaaaatacaaaaattagctgggcgtggtggtgcatgcctgta

SEQ ID NO: 114531 - DNA, 80 bp, synthetic construct
  misc_feature 1..80: note = Artificially Synthesized Probe
  source 1..80: mol_type = other DNA
attttctgactggcttatttaactgaggataatgtcttcaagggtcatccttttttaaagttttttcaatttttttaaca

SEQ ID NO: 114532 - DNA, 80 bp, synthetic construct
  misc_feature 1..80: note = Artificially Synthesized Probe
  source 1..80: mol_type = other DNA
ttttttcaggctgaatatttcatcatgtatgtacacatgtgtgtgtgtgtatgtacacatatatacgtggataaatttat

SEQ ID NO: 114533 - DNA, 80 bp, synthetic construct; identical to SEQ ID NO: 37761
  misc_feature 1..80: note = Artificially Synthesized Probe
  source 1..80: mol_type = other DNA

SEQ ID NO: 114534 - DNA, 80 bp, synthetic construct
  misc_feature 1..80: note = Artificially Synthesized Probe
  source 1..80: mol_type = other DNA
atgtagaacagtgactctggaatccctcctgctgccagacttgcccctggctcctccctggggactgtcaccttgcagac

SEQ ID NO: 114535 - DNA, 80 bp, synthetic construct
  misc_feature 1..80: note = Artificially Synthesized Probe
  source 1..80: mol_type = other DNA
gatgtctggtctagggaccactgtccccctgtggctagaacggggggagtgatcaagctgataaaaaggtagagtccaga

SEQ ID NO: 114536 - DNA, 80 bp, synthetic construct; identical to SEQ ID NO: 37762
  misc_feature 1..80: note = Artificially Synthesized Probe
  source 1..80: mol_type = other DNA

SEQ ID NO: 114537 - DNA, 80 bp, synthetic construct
  misc_feature 1..80: note = Artificially Synthesized Probe
  source 1..80: mol_type = other DNA
acacagtgaaaccccatctctactaaaaatacaaaaaattagccgggcatggtggcgggcgcctgtagtcccagctactc

SEQ ID NO: 114538 - DNA, 80 bp, synthetic construct
  misc_feature 1..80: note = Artificially Synthesized Probe
  source 1..80: mol_type = other DNA
tatcaggaggtcactaccaggaggtcactatcacttgacctcctgggatcaagtgatcctcctgcctcagcctctgagta

SEQ ID NO: 114539 - DNA, 80 bp, synthetic construct
  misc_feature 1..80: note = Artificially Synthesized Probe
  source 1..80: mol_type = other DNA
tgccttcccaatgacaggggcatgaaaatatgttgtggatgggagggagggactgggagcccacatacctcagctcctcc

SEQ ID NO: 114540 - DNA, 80 bp, synthetic construct
  misc_feature 1..80: note = Artificially Synthesized Probe
  source 1..80: mol_type = other DNA
ctggagtacagaggtgcgatctctgttcactgcaacctccacctcccaggctgaaatgattctcctgcctcagcctcccg

SEQ ID NO: 114541 - DNA, 80 bp, synthetic construct; identical to SEQ ID NO: 37763
  misc_feature 1..80: note = Artificially Synthesized Probe
  source 1..80: mol_type = other DNA

SEQ ID NO: 114542 - DNA, 80 bp, synthetic construct
  misc_feature 1..80: note = Artificially Synthesized Probe
  source 1..80: mol_type = other DNA
cgtgatccgcccacctcggcctcccaaagtgctgggattacaggcatgaccccacgtctggctgcctgttacctctttta

SEQ ID NO: 114543 - DNA, 80 bp, synthetic construct
  misc_feature 1..80: note = Artificially Synthesized Probe
  source 1..80: mol_type = other DNA
aagcccagcaaactagatgcccccagacagtgacaaggaaaacaaagatactttgaagaccatgtcctcggacagattca

SEQ ID NO: 114544 - DNA, 80 bp, synthetic construct
  misc_feature 1..80: note = Artificially Synthesized Probe
  source 1..80: mol_type = other DNA
gcttcagggctggccaaggccgttcagccagtgttgggatcctttagggttcaatctatctcttcagaagttgcctgatg

SEQ ID NO: 114545 - DNA, 80 bp, synthetic construct
  misc_feature 1..80: note = Artificially Synthesized Probe
  source 1..80: mol_type = other DNA
cctgaggtcaggagttcgagaccagcctgaccaacatgttgaaaccccgtctctactaaaaatacaaaattagctgggtg

SEQ ID NO: 114546 - DNA, 80 bp, synthetic construct; identical to SEQ ID NO: 37764
  misc_feature 1..80: note = Artificially Synthesized Probe
  source 1..80: mol_type = other DNA

SEQ ID NO: 114547 - DNA, 80 bp, synthetic construct
  misc_feature 1..80: note = Artificially Synthesized Probe
  source 1..80: mol_type = other DNA
gctcccatctctccctggttttgcccctgacacgccacctgctcgcctctctctaggtccatctgggggtctccggccgc

SEQ ID NO: 114548 - DNA, 80 bp, synthetic construct
  misc_feature 1..80: note = Artificially Synthesized Probe
  source 1..80: mol_type = other DNA
cggctccaacagctgccacctgctcacctacatcgagtaccaccagcagtgtctcggcgtcgagaagtctttcttcaaag

SEQ ID NO: 114549 - DNA, 80 bp, synthetic construct
  misc_feature 1..80: note = Artificially Synthesized Probe
  source 1..80: mol_type = other DNA
ggaattctgtacataatgccgttgtcatagagagtcctctctcacaggctagtataataaaggctcggacaagtcctgtg

SEQ ID NO: 114550 - DNA, 80 bp, synthetic construct; identical to SEQ ID NO: 37564
  misc_feature 1..80: note = Artificially Synthesized Probe
  source 1..80: mol_type = other DNA

SEQ ID NO: 114551 - DNA, 80 bp, synthetic construct
  misc_feature 1..80: note = Artificially Synthesized Probe
  source 1..80: mol_type = other DNA
agtagtgcgatctcggctcactgcaacctccctctctcccaggttcaagaaattctccagcctcagcctccccgattagc

SEQ ID NO: 114552 - DNA, 80 bp, synthetic construct
  misc_feature 1..80: note = Artificially Synthesized Probe
  source 1..80: mol_type = other DNA
atgcccggcccttcttttcctttttaaatttcattgcaatagcagacagcctgggccctttctagatgaggtacatgttt

SEQ ID NO: 114553 - DNA, 80 bp, synthetic construct
  misc_feature 1..80: note = Artificially Synthesized Probe
  source 1..80: mol_type = other DNA
catccacattccctaaggacattccctgtgaaggatgaaaaagtgtcagagaataagggactctggtcctcgtggatcca

SEQ ID NO: 114554 - DNA, 80 bp, synthetic construct; identical to SEQ ID NO: 37565
  misc_feature 1..80: note = Artificially Synthesized Probe
  source 1..80: mol_type = other DNA

SEQ ID NO: 114555 - DNA, 80 bp, synthetic construct; identical to SEQ ID NO: 37544
  misc_feature 1..80: note = Artificially Synthesized Probe
  source 1..80: mol_type = other DNA

SEQ ID NO: 114556 - DNA, 80 bp, synthetic construct
  misc_feature 1..80: note = Artificially Synthesized Probe
  source 1..80: mol_type = other DNA
gaaaccctgtctctactaaaaatataaaaattagccaggcgtgctggtgggggcccgtaaatcccagctacttgggaggc

SEQ ID NO: 114557 - DNA, 80 bp, synthetic construct
  misc_feature 1..80: note = Artificially Synthesized Probe
  source 1..80: mol_type = other DNA
ttgtttgtttgtttgtttgacacagggtcttgctctgtcacccaggctggagtgcagtggtgcaatcgtggctcaccgca

SEQ ID NO: 114558 - DNA, 80 bp, synthetic construct
  misc_feature 1..80: note = Artificially Synthesized Probe
  source 1..80: mol_type = other DNA
agtctcaagtgatcctcttgcctcggcctcccaaactgttgggatttcaggtgtgcaccaccacacctggcccagaggct

SEQ ID NO: 114559 - DNA, 80 bp, synthetic construct
  misc_feature 1..80: note = Artificially Synthesized Probe
  source 1..80: mol_type = other DNA
tccagaggtggctgcgaatcaggccacctggaaaggaggaggaagcctcgcattttcccaaaagctccatttcttgggaa

SEQ ID NO: 114560 - DNA, 80 bp, synthetic construct; identical to SEQ ID NO: 37566
  misc_feature 1..80: note = Artificially Synthesized Probe
  source 1..80: mol_type = other DNA

SEQ ID NO: 114561 - DNA, 80 bp, synthetic construct
  misc_feature 1..80: note = Artificially Synthesized Probe
  source 1..80: mol_type = other DNA
aacgtggactcattaagagaattacttgcgttccctgtgttaccaaatgggatgaggaaatccatcttttctttcttttt

SEQ ID NO: 114562 - DNA, 80 bp, synthetic construct
  misc_feature 1..80: note = Artificially Synthesized Probe
  source 1..80: mol_type = other DNA
ttagtagagacggggtttcaccatgttgcccaggctggtctcaaactactgacctcaggtgatccgcctgcctcagcctc

SEQ ID NO: 114563 - DNA, 80 bp, synthetic construct; identical to SEQ ID NO: 37567
  misc_feature 1..80: note = Artificially Synthesized Probe
  source 1..80: mol_type = other DNA

SEQ ID NO: 114564 - DNA, 80 bp, synthetic construct
  misc_feature 1..80: note = Artificially Synthesized Probe
  source 1..80: mol_type = other DNA
aaattcagtaaaatacacaaatgcttatatgcacggttttgtgtctaagtcaaaaggcaggacatagctacttgggaggc

SEQ ID NO: 114565 - DNA, 80 bp, synthetic construct
  misc_feature 1..80: note = Artificially Synthesized Probe
  source 1..80: mol_type = other DNA
aacaaaaagatgggctaaatgagtcccgagccaaggactatgcctcgagaggtgaacatccagttagaagggctgcgaga

SEQ ID NO: 114566 - DNA, 80 bp, synthetic construct
  misc_feature 1..80: note = Artificially Synthesized Probe
  source 1..80: mol_type = other DNA
ctatgtgaatacaaaaggcttgcactgatgcctgcgatttgcagaaagacaggaattccacgcacagaagcgaggcccga

SEQ ID NO: 114567 - DNA, 80 bp, synthetic construct
  misc_feature 1..80: note = Artificially Synthesized Probe
  source 1..80: mol_type = other DNA
agcagcgtcagcgacagagaggcgagatcgttgaactgaaagagaaacctggagtcaggggcgcctgcagaggggcggca

SEQ ID NO: 114568 - DNA, 80 bp, synthetic construct; identical to SEQ ID NO: 37568
  misc_feature 1..80: note = Artificially Synthesized Probe
  source 1..80: mol_type = other DNA

SEQ ID NO: 114569 - DNA, 80 bp, synthetic construct
  misc_feature 1..80: note = Artificially Synthesized Probe
  source 1..80: mol_type = other DNA
tctccctttaattatttatttattgaaatggagtctcactctgtcacccaggctggaggtgcagtggcgcaatcttggca

SEQ ID NO: 114570 - DNA, 80 bp, synthetic construct
  misc_feature 1..80: note = Artificially Synthesized Probe
  source 1..80: mol_type = other DNA
atccacccgccttggcctcccaaagtgctgggattacaggcgtgagccaccgcgcccggccttcatctcctttttatgaa

SEQ ID NO: 114571 - DNA, 80 bp, synthetic construct
  misc_feature 1..80: note = Artificially Synthesized Probe
  source 1..80: mol_type = other DNA
ttctggaacgtttcacaggaggacaaacaggtcaaaggttcaggtgaaggggtgtgtggggcctgaacgcggaggtctct

SEQ ID NO: 114572 - DNA, 80 bp, synthetic construct; identical to SEQ ID NO: 37569
  misc_feature 1..80: note = Artificially Synthesized Probe
  source 1..80: mol_type = other DNA

SEQ ID NO: 114573 - DNA, 80 bp, synthetic construct
  misc_feature 1..80: note = Artificially Synthesized Probe
  source 1..80: mol_type = other DNA
tggccgcccctgaatcactcaagtagcctatcacctcctcctcagcaccagggacccctcgccctcttgctaccacaaag

SEQ ID NO: 114574 - DNA, 80 bp, synthetic construct
  misc_feature 1..80: note = Artificially Synthesized Probe
  source 1..80: mol_type = other DNA
gagggacccccgccctcttgtcctttgaataaggggcagttaaaacaaaggaccctgagaagggcccggagtggagactt

SEQ ID NO: 114575 - DNA, 80 bp, synthetic construct
  misc_feature 1..80: note = Artificially Synthesized Probe
  source 1..80: mol_type = other DNA
agtgcttggacccttaagagcttaagagctccggagtcttccctgtatttaatgctatgaatactatgaaccacaacctt

SEQ ID NO: 114576 - DNA, 80 bp, synthetic construct
  misc_feature 1..80: note = Artificially Synthesized Probe
  source 1..80: mol_type = other DNA
cagtggtgcaatcatggctcatgcagcctccaactcccgggctcaagtgatcctcctgcctcagcttccagaagtgttgg

SEQ ID NO: 114577 - DNA, 80 bp, synthetic construct; identical to SEQ ID NO: 37570
  misc_feature 1..80: note = Artificially Synthesized Probe
  source 1..80: mol_type = other DNA

SEQ ID NO: 114578 - DNA, 80 bp, synthetic construct
  misc_feature 1..80: note = Artificially Synthesized Probe
  source 1..80: mol_type = other DNA
ctgggggtggagggtgctgactactcggggcagcgaggggacagcagctggctcccaaagtcccctgggtgcggctgctc

SEQ ID NO: 114579 - DNA, 80 bp, synthetic construct
  misc_feature 1..80: note = Artificially Synthesized Probe
  source 1..80: mol_type = other DNA
ccagattttgcgggcggtgagctggaaggagcactggactaggagtcctgagaggttagagtataagactccatccacca

SEQ ID NO: 114580 - DNA, 80 bp, synthetic construct
  misc_feature 1..80: note = Artificially Synthesized Probe
  source 1..80: mol_type = other DNA
tccttcttgctcaacatcaagaaaccacagagaagactgaagcggctggaacagtcgcgtctatttcctccctcttctgt

SEQ ID NO: 114581 - DNA, 80 bp, synthetic construct
  misc_feature 1..80: note = Artificially Synthesized Probe
  source 1..80: mol_type = other DNA
gcaagcatcacaggtcagttccgtgaaaccgaccacgagggtccagccgctccaaccacactcgcccacctcccctgctc

SEQ ID NO: 114582 - DNA, 80 bp, synthetic construct; identical to SEQ ID NO: 37571
  misc_feature 1..80: note = Artificially Synthesized Probe
  source 1..80: mol_type = other DNA

SEQ ID NO: 114583 - DNA, 80 bp, synthetic construct
  misc_feature 1..80: note = Artificially Synthesized Probe
  source 1..80: mol_type = other DNA
gatacttgtttctattcctgggggcaaatttgcctgacactggctcctggtggtgagttagagtctcaccgggccataca

SEQ ID NO: 114584 - DNA, 80 bp, synthetic construct
  misc_feature 1..80: note = Artificially Synthesized Probe
  source 1..80: mol_type = other DNA
caaaaacccctgccccctggaagcgtccgttcttgtctggcagagacccacaataaataagtaaaatgaaccgaatgagg

SEQ ID NO: 114585 - DNA, 80 bp, synthetic construct
  misc_feature 1..80: note = Artificially Synthesized Probe
  source 1..80: mol_type = other DNA
aggaggtgagggggagcctggggaagagagcttcaggcagagggccccacagtgcaaaggccctggggcaggtccgagcc

SEQ ID NO: 114586 - DNA, 80 bp, synthetic construct; identical to SEQ ID NO: 37572
  misc_feature 1..80: note = Artificially Synthesized Probe
  source 1..80: mol_type = other DNA

SEQ ID NO: 114587 - DNA, 80 bp, synthetic construct
  misc_feature 1..80: note = Artificially Synthesized Probe
  source 1..80: mol_type = other DNA
ggacgcagtggggttgggggccgagcgcctggaagattggctgcccctgcctcagatgggaccgtgggcgggaggcgcag

SEQ ID NO: 114588 - DNA, 80 bp, synthetic construct
  misc_feature 1..80: note = Artificially Synthesized Probe
  source 1..80: mol_type = other DNA
ggacagcacggccatcgtgccaggctacacaggtcaccagctgaaggctaaatgacctttgacaatgtgtgtttcttgat

SEQ ID NO: 114589 - DNA, 80 bp, synthetic construct; identical to SEQ ID NO: 37545
  misc_feature 1..80: note = Artificially Synthesized Probe
  source 1..80: mol_type = other DNA

SEQ ID NO: 114590 - DNA, 80 bp, synthetic construct
  misc_feature 1..80: note = Artificially Synthesized Probe
  source 1..80: mol_type = other DNA
gggcagcccggtggcccccaggggctgaggccgcctcttctgctcaagtcggtggcctgccacacccggtcgggtgaaga

SEQ ID NO: 114591 - DNA, 80 bp, synthetic construct; identical to SEQ ID NO: 37573
  misc_feature 1..80: note = Artificially Synthesized Probe
  source 1..80: mol_type = other DNA

SEQ ID NO: 114592 - DNA, 80 bp, synthetic construct
  misc_feature 1..80: note = Artificially Synthesized Probe
  source 1..80: mol_type = other DNA
tcccacgtcttccaccttctgccctcaaatgctaagctccctggagtgacttttcctccttttttactccctatgttcgg

SEQ ID NO: 114593 - DNA, 80 bp, synthetic construct
  misc_feature 1..80: note = Artificially Synthesized Probe
  source 1..80: mol_type = other DNA
cagctgctcccacacacttggcttatctgccacagggtcaggctggcaggggaggtggcactgtggctgtgcccccgcct

SEQ ID NO: 114594 - DNA, 80 bp, synthetic construct; identical to SEQ ID NO: 37574
  misc_feature 1..80: note = Artificially Synthesized Probe
  source 1..80: mol_type = other DNA

SEQ ID NO: 114595 - DNA, 80 bp, synthetic construct
  misc_feature 1..80: note = Artificially Synthesized Probe
  source 1..80: mol_type = other DNA
aaggatcccagcagccagagacaagcggctcatgcattttcccatagacattttttcttttttttttttgagatggagtc

SEQ ID NO: 114596 - DNA, 80 bp, synthetic construct
  misc_feature 1..80: note = Artificially Synthesized Probe
  source 1..80: mol_type = other DNA
ggggtttcgtcatgttggtcaggctggtctggaactcctgacctcaagtggtacacccgccttggtctcccaaactgctg

SEQ ID NO: 114597 - DNA, 80 bp, synthetic construct
  misc_feature 1..80: note = Artificially Synthesized Probe
  source 1..80: mol_type = other DNA
caggctgaagatggcctgatccttgctgaatggggaatggtattctgcacattttcccatgtatgtgctctgagtttaag

SEQ ID NO: 114598 - DNA, 80 bp, synthetic construct; identical to SEQ ID NO: 37575
  misc_feature 1..80: note = Artificially Synthesized Probe
  source 1..80: mol_type = other DNA

SEQ ID NO: 114599 - DNA, 80 bp, synthetic construct
  misc_feature 1..80: note = Artificially Synthesized Probe
  source 1..80: mol_type = other DNA
cactcactgccttttgataacgcctcattttacacatcggccagcacagaagtcaggatggaatcacagtgaggacggga

SEQ ID NO: 114600 - DNA, 80 bp, synthetic construct
  misc_feature 1..80: note = Artificially Synthesized Probe
  source 1..80: mol_type = other DNA
agggacgagcggtcagcacagcgcggccagccacgcaccggaacacaactcagccaggagaggaaccaggctttgacccg

SEQ ID NO: 114601 - DNA, 80 bp, synthetic construct
  misc_feature 1..80: note = Artificially Synthesized Probe
  source 1..80: mol_type = other DNA
cggtgaggacgggagtcaggacgggatcacggtgaggacgggagtcaggacgggatcacggtgaggacgggagtcaggac

SEQ ID NO: 114602 - DNA, 80 bp, synthetic construct
  misc_feature 1..80: note = Artificially Synthesized Probe
  source 1..80: mol_type = other DNA
tccagctatgtgcaaaaccgaatcaagagcgtttggggagaagtgaaagcgatgagtctgagggggccagagctttcctt

SEQ ID NO: 114603 - DNA, 80 bp, synthetic construct
  misc_feature 1..80: note = Artificially Synthesized Probe
  source 1..80: mol_type = other DNA
atgagaacaaaacatttgggactgaatatactgcaatgtacacattcataagaaacgttctaataacaattagcgcacaa

SEQ ID NO: 114604 - DNA, 80 bp, synthetic construct
  misc_feature 1..80: note = Artificially Synthesized Probe
  source 1..80: mol_type = other DNA
aaaatctgtatgaattagctgctttatgcttttctcaaattactgtttctttccaagagaggatcccaagaaaattagct

SEQ ID NO: 114605 - DNA, 80 bp, synthetic construct; identical to SEQ ID NO: 37576
  misc_feature 1..80: note = Artificially Synthesized Probe
  source 1..80: mol_type = other DNA

SEQ ID NO: 114606 - DNA, 80 bp, synthetic construct
  misc_feature 1..80: note = Artificially Synthesized Probe
  source 1..80: mol_type = other DNA
gatctcggctcactgcaacctctgcctcccgggttcaagcgattctcctgcctcagcctcccaagtagctgggattacag

SEQ ID NO: 114607 - DNA, 80 bp, synthetic construct
  misc_feature 1..80: note = Artificially Synthesized Probe
  source 1..80: mol_type = other DNA
tcatttgtcttaaaaatgtctatgcaggttacaagcagagcagggacaggttgccaggtcagacgcacacttacatggct

SEQ ID NO: 114608 - DNA, 80 bp, synthetic construct; identical to SEQ ID NO: 37577
  misc_feature 1..80: note = Artificially Synthesized Probe
  source 1..80: mol_type = other DNA

SEQ ID NO: 114609 - DNA, 80 bp, synthetic construct
  misc_feature 1..80: note = Artificially Synthesized Probe
  source 1..80: mol_type = other DNA
tccattccagtgtcagccaagccagcatcatagtcacctgctcctttccccacgccacatcgatggggaaccagaatgaa

SEQ ID NO: 114610 - DNA, 80 bp, synthetic construct
  misc_feature 1..80: note = Artificially Synthesized Probe
  source 1..80: mol_type = other DNA
ggcgaatgtttacccagtgggagctgtgcgaagaagatttttggaaaagagaaaagagttttggaagaaagagttgggca

SEQ ID NO: 114611 - DNA, 80 bp, synthetic construct
  misc_feature 1..80: note = Artificially Synthesized Probe
  source 1..80: mol_type = other DNA
tcgcacacggaaaacagcgacgtaaaatctgctgcagcccaccctgacgaccagaggactgaagcgggaggagatgaact

SEQ ID NO: 114612 - DNA, 80 bp, synthetic construct
  misc_feature 1..80: note = Artificially Synthesized Probe
  source 1..80: mol_type = other DNA
tcctggggacggggtttccttttggggtgacggaatgttctggaactggacagaggtgccagctgcacgttgtggatgtg

SEQ ID NO: 114613 - DNA, 80 bp, synthetic construct; identical to SEQ ID NO: 37578
  misc_feature 1..80: note = Artificially Synthesized Probe
  source 1..80: mol_type = other DNA

SEQ ID NO: 114614 - DNA, 80 bp, synthetic construct
  misc_feature 1..80: note = Artificially Synthesized Probe
  source 1..80: mol_type = other DNA
ttctgatctgcagcttgggcagccacgtgagtactgccctgtggcaccttccctgtgggacatcgctcacctatgggtgc

SEQ ID NO: 114615 - DNA, 80 bp, synthetic construct
  misc_feature 1..80: note = Artificially Synthesized Probe
  source 1..80: mol_type = other DNA
atttcaccacccacccctgaaaaagagctttatttacttatctttttcttgagccagagtcttactctgtttcccaggct

SEQ ID NO: 114616 - DNA, 80 bp, synthetic construct
  misc_feature 1..80: note = Artificially Synthesized Probe
  source 1..80: mol_type = other DNA
ccaagctggtcttgaactcctggcctcaagtgatccgcccacctcggcctcccaaagttctgggattacaggcataagct

SEQ ID NO: 114617 - DNA, 80 bp, synthetic construct; identical to SEQ ID NO: 37579
  misc_feature 1..80: note = Artificially Synthesized Probe
  source 1..80: mol_type = other DNA

SEQ ID NO: 114618 - DNA, 80 bp, synthetic construct
  misc_feature 1..80: note = Artificially Synthesized Probe
  source 1..80: mol_type = other DNA
ccttttcagataactggggatatttttacttgatactatagcaacacttgacagctggtaatttcttaaaggttagctgc

SEQ ID NO: 114619 - DNA, 80 bp, synthetic construct
  misc_feature 1..80: note = Artificially Synthesized Probe
  source 1..80: mol_type = other DNA
caaaagcagtcaaaaaatgggcaaaaattgtcagaatcgactttatcagaactctggaaatgaattaaaagattatggca

SEQ ID NO: 114620 - DNA, 80 bp, synthetic construct
  misc_feature 1..80: note = Artificially Synthesized Probe
  source 1..80: mol_type = other DNA
tggattgcttgaggccaggagttcaagaccagcctggctaacatggtgaaaccctgtctctactaaaaataccaaaaaaa

SEQ ID NO: 114621 - DNA, 80 bp, synthetic construct; identical to SEQ ID NO: 37580
  misc_feature 1..80: note = Artificially Synthesized Probe
  source 1..80: mol_type = other DNA

SEQ ID NO: 114622 - DNA, 80 bp, synthetic construct
  misc_feature 1..80: note = Artificially Synthesized Probe
  source 1..80: mol_type = other DNA
aggcacgcaaaaaaaaaaaaagaaagtatggcccatatgtagaaataaataaataggactatctctgagaaaatcgagcc

SEQ ID NO: 114623 - DNA, 80 bp, synthetic construct
  misc_feature 1..80: note = Artificially Synthesized Probe
  source 1..80: mol_type = other DNA
cttaaagtcaggagttcagggaccagcctggccaacatggtgaaaccctgtctctactaaaaatacaaaaattagctagg

SEQ ID NO: 114624 - DNA, 80 bp, synthetic construct
  misc_feature 1..80: note = Artificially Synthesized Probe
  source 1..80: mol_type = other DNA
gtgaacttggacagagccccaaatccttcccagtgctgataaaacttgtggttttgatgttttgagacactgctgtgtcc

SEQ ID NO: 114625 - DNA, 80 bp, synthetic construct
  misc_feature 1..80: note = Artificially Synthesized Probe
  source 1..80: mol_type = other DNA
aacaaaaaaacacatgagagtgatgtttcaccagtagaatatcaataaggagacagaaattgtaaaaaggaaccaaataa

SEQ ID NO: 114626 - DNA, 80 bp, synthetic construct; identical to SEQ ID NO: 37581
  misc_feature 1..80: note = Artificially Synthesized Probe
  source 1..80: mol_type = other DNA

SEQ ID NO: 114627 - DNA, 80 bp, synthetic construct
  misc_feature 1..80: note = Artificially Synthesized Probe
  source 1..80: mol_type = other DNA
tctaaactaaatctatacactcaacaaactttaagtggcataaactcaaagaaatccacaccaaagacacattataatca

SEQ ID NO: 114628 - DNA, 80 bp, synthetic construct
  misc_feature 1..80: note = Artificially Synthesized Probe
  source 1..80: mol_type = other DNA
gaaaaacccacatgtcaatgagcagatgaatggataaacaaaatgtggtccatccatacaatggaataatttagccacac

SEQ ID NO: 114629 - DNA, 80 bp, synthetic construct
  misc_feature 1..80: note = Artificially Synthesized Probe
  source 1..80: mol_type = other DNA
gagagtggctgctagtggggatggggtttcctttcagggtgatgacgatattctggaactagataatggtgattgtacca

SEQ ID NO: 114630 - DNA, 80 bp, synthetic construct
  misc_feature 1..80: note = Artificially Synthesized Probe
  source 1..80: mol_type = other DNA
ttttgtaacatcatatactggtcacttgaaaaacatgagtttactgagtttgcagatcttccagacattgccacatttca

SEQ ID NO: 114631 - DNA, 80 bp, synthetic construct; identical to SEQ ID NO: 37582
  misc_feature 1..80: note = Artificially Synthesized Probe
  source 1..80: mol_type = other DNA

SEQ ID NO: 114632 - DNA, 80 bp, synthetic construct
  misc_feature 1..80: note = Artificially Synthesized Probe
  source 1..80: mol_type = other DNA
acaggcttttcttggaggtggtcattgtactctggtggacttcccatctcatcacacacaatagtaaagagatgtgtgct

SEQ ID NO: 114633 - DNA, 80 bp, synthetic construct
  misc_feature 1..80: note = Artificially Synthesized Probe
  source 1..80: mol_type = other DNA
ttgcgatcttggctcactgcaaccttcaccacccaggttcaagcaattctcctgcctcagcctcccgagcagctgggatt

SEQ ID NO: 114634 - DNA, 80 bp, synthetic construct
  misc_feature 1..80: note = Artificially Synthesized Probe
  source 1..80: mol_type = other DNA
ctctttctctcctctcttaaaaacatcttttagaatgtgagcatgtggtgatgaaaaatacagtgacttctaggacagtt

SEQ ID NO: 114635 - DNA, 80 bp, synthetic construct; identical to SEQ ID NO: 37583
  misc_feature 1..80: note = Artificially Synthesized Probe
  source 1..80: mol_type = other DNA

SEQ ID NO: 114636 - DNA, 80 bp, synthetic construct
  misc_feature 1..80: note = Artificially Synthesized Probe
  source 1..80: mol_type = other DNA
agggtcctcacctctcccatcacagcgatcggcgtctctccggtggcctccgcgacgcggtgctccaccaggtagaacat

SEQ ID NO: 114637 - DNA, 80 bp, synthetic construct
  misc_feature 1..80: note = Artificially Synthesized Probe
  source 1..80: mol_type = other DNA
cctcccaggttcaagcgattcccctgcctcagcctcctgggtagctgagactacaggtgcgtgccaccccgtccagctaa

SEQ ID NO: 114638 - DNA, 80 bp, synthetic construct
  misc_feature 1..80: note = Artificially Synthesized Probe
  source 1..80: mol_type = other DNA
taaaagggaaaagcagaatgactggaattttgaaggcagagtggtaaatcatagaattaggcctggagaagggaaaagcc

SEQ ID NO: 114639 - DNA, 80 bp, synthetic construct; identical to SEQ ID NO: 37584
  misc_feature 1..80: note = Artificially Synthesized Probe
  source 1..80: mol_type = other DNA

SEQ ID NO: 114640 - DNA, 80 bp, synthetic construct
  misc_feature 1..80: note = Artificially Synthesized Probe
  source 1..80: mol_type = other DNA
ggccatcctcccacctcagtctcccaagtagctgaacatacaggcatgtgccaccacaaccagggaatttttgtattttt

SEQ ID NO: 114641 - DNA, 80 bp, synthetic construct
  misc_feature 1..80: note = Artificially Synthesized Probe
  source 1..80: mol_type = other DNA
caccacactcagcaggaccgattcttacagagccactgcgcactcttaacttcaacactcttaactaatccacggacgtt

SEQ ID NO: 114642 - DNA, 80 bp, synthetic construct
  misc_feature 1..80: note = Artificially Synthesized Probe
  source 1..80: mol_type = other DNA
ggtcaacactcaagagatccatcagtagctaatcgattattagatcaatgatcaatttgtccctggttgtcttaacagct

SEQ ID NO: 114643 - DNA, 80 bp, synthetic construct; identical to SEQ ID NO: 37585
  misc_feature 1..80: note = Artificially Synthesized Probe
  source 1..80: mol_type = other DNA

SEQ ID NO: 114644 - DNA, 80 bp, synthetic construct
  misc_feature 1..80: note = Artificially Synthesized Probe
  source 1..80: mol_type = other DNA
cagctgcaacaaatgtaacaaacaaacaacttcaaactgcaccacaaagggaactctatgaagttttaaaaaaaagtggt

SEQ ID NO: 114645 - DNA, 80 bp, synthetic construct
  misc_feature 1..80: note = Artificially Synthesized Probe
  source 1..80: mol_type = other DNA
gtcaaaggcaggcagtgggaagagcgattatcatcatgtgtgttggctggcaaataattcgctctgatcattggacaaaa

SEQ ID NO: 114646 - DNA, 80 bp, synthetic construct
  misc_feature 1..80: note = Artificially Synthesized Probe
  source 1..80: mol_type = other DNA
caggtgatcctcccacctcagcctccttagtagctgggactacagacacacactgctaattttttttttttttttttttg

SEQ ID NO: 114647 - DNA, 80 bp, synthetic construct; identical to SEQ ID NO: 37546
  misc_feature 1..80: note = Artificially Synthesized Probe
  source 1..80: mol_type = other DNA

SEQ ID NO: 114648 - DNA, 80 bp, synthetic construct
  misc_feature 1..80: note = Artificially Synthesized Probe
  source 1..80: mol_type = other DNA
agtagagacggggtttcaccatgttggccaggattgtctccatctcttgaccttgtgatccacccgcctcagcctcccaa

SEQ ID NO: 114649 - DNA, 80 bp, synthetic construct; identical to SEQ ID NO: 37586
  misc_feature 1..80: note = Artificially Synthesized Probe
  source 1..80: mol_type = other DNA

SEQ ID NO: 114650 - DNA, 80 bp, synthetic construct
  misc_feature 1..80: note = Artificially Synthesized Probe
  source 1..80: mol_type = other DNA
aaaatttctcttttaatggtattatgtatcgggtatcataagacacccttcttgggcaaaaagaaagctgtcaaaggcag

SEQ ID NO: 114651 - DNA, 80 bp, synthetic construct
  misc_feature 1..80: note = Artificially Synthesized Probe
  source 1..80: mol_type = other DNA
taaaaaagataaagactttttgtcttcgtcagggcccaccgtgtgaccctcagaggctgtgtgttttcacagcatggcct

SEQ ID NO: 114652 - DNA, 80 bp, synthetic construct
  misc_feature 1..80: note = Artificially Synthesized Probe
  source 1..80: mol_type = other DNA
aaaactcccactttagtttccctgctccacgcagtgaaaaaaagcacaatagaaaacgtgtgtatcaaaaactcaccatt

SEQ ID NO: 114653 - DNA, 80 bp, synthetic construct; identical to SEQ ID NO: 37587
  misc_feature 1..80: note = Artificially Synthesized Probe
  source 1..80: mol_type = other DNA

SEQ ID NO: 114654 - DNA, 80 bp, synthetic construct
  misc_feature 1..80: note = Artificially Synthesized Probe
  source 1..80: mol_type = other DNA
gggtgtgtgtgtgtgtgtgtgtgtgtgtgtgtgtgtgtgtgaaaacatagcctattcacggatttctaattgatttaata

SEQ ID NO: 114655 - DNA, 80 bp, synthetic construct
  misc_feature 1..80: note = Artificially Synthesized Probe
  source 1..80: mol_type = other DNA
gttataagttgatgccgtttgctaagtcaaatgtgccacattcgtgacaattactgtagtctgcgaggaaagctttctgt

SEQ ID NO: 114656 - DNA, 80 bp, synthetic construct
  misc_feature 1..80: note = Artificially Synthesized Probe
  source 1..80: mol_type = other DNA
gaagcagcagacactaccctacaatttcacagcctctagaaagcaagtgactcctcccgagaagagagggaggaggcatg

SEQ ID NO: 114657 - DNA, 80 bp, synthetic construct; identical to SEQ ID NO: 37588
  misc_feature 1..80: note = Artificially Synthesized Probe
  source 1..80: mol_type = other DNA

SEQ ID NO: 114658 - DNA, 80 bp, synthetic construct
  misc_feature 1..80: note = Artificially Synthesized Probe
  source 1..80: mol_type = other DNA
agctaacatcacatacttagcagtgacagactgacggcttttcccttaagactgggaaaaaggcaaggatgtccattctt

SEQ ID NO: 114659 - DNA, 80 bp, synthetic construct
  misc_feature 1..80: note = Artificially Synthesized Probe
  source 1..80: mol_type = other DNA
agatgggatcttagctggtgagtctttctagtgacatttcggactccgaatcagagcacaggctggcagctggtgcctgt

SEQ ID NO: 114660 - DNA, 80 bp, synthetic construct
  misc_feature 1..80: note = Artificially Synthesized Probe
  source 1..80: mol_type = other DNA
atattggaaagaaagaaataaagcagttatatttgcaggcaacaagaagctcctagaaccaaaaaatgagttcaggctgg

SEQ ID NO: 114661 - DNA, 80 bp, synthetic construct
  misc_feature 1..80: note = Artificially Synthesized Probe
  source 1..80: mol_type = other DNA
aaaaaattagccgggagtggtggcagacacctgtagtcccagctactcgggaggctgaggcaggagaatgatgtgaacct

SEQ ID NO: 114662 - DNA, 80 bp, synthetic construct; identical to SEQ ID NO: 37589
  misc_feature 1..80: note = Artificially Synthesized Probe
  source 1..80: mol_type = other DNA

SEQ ID NO: 114663 - DNA, 80 bp, synthetic construct
  misc_feature 1..80: note = Artificially Synthesized Probe
  source 1..80: mol_type = other DNA
ccttaacatagtaaagatgggaattctccccaagttggttcagtgcaaattagtcaaaatctcagtagcatttctttgta

SEQ ID NO: 114664 - DNA, 80 bp, synthetic construct
  misc_feature 1..80: note = Artificially Synthesized Probe
  source 1..80: mol_type = other DNA
tatagtaattaagactatgctacttgtaaagggataggcagacagaccaatgggatggaataggacactctgaaataaac

SEQ ID NO: 114665 - DNA, 80 bp, synthetic construct; identical to SEQ ID NO: 37590
  misc_feature 1..80: note = Artificially Synthesized Probe
  source 1..80: mol_type = other DNA

SEQ ID NO: 114666 - DNA, 80 bp, synthetic construct
  misc_feature 1..80: note = Artificially Synthesized Probe
  source 1..80: mol_type = other DNA
cccgggaggtggaggttgcagtgagccaagatggtgccactgcactccagcctgagtcacagagcaagactccgtctcag

SEQ ID NO: 114667 - DNA, 80 bp, synthetic construct
  misc_feature 1..80: note = Artificially Synthesized Probe
  source 1..80: mol_type = other DNA
catcaaaattaaaattttttttttctctgcaaaggacactttttagagaatgaaaagacacactaaagactggggaaaat

SEQ ID NO: 114668 - DNA, 80 bp, synthetic construct
  misc_feature 1..80: note = Artificially Synthesized Probe
  source 1..80: mol_type = other DNA
cctgaccagagcatctacactcacatgaaaagctgctaccatcattagctataaagaaaatgcaagttgcaaccacaatg

SEQ ID NO: 114669 - DNA, 80 bp, synthetic construct; identical to SEQ ID NO: 37591
  misc_feature 1..80: note = Artificially Synthesized Probe
  source 1..80: mol_type = other DNA

SEQ ID NO: 114670 - DNA, 80 bp, synthetic construct
  misc_feature 1..80: note = Artificially Synthesized Probe
  source 1..80: mol_type = other DNA
acaaaaaaaagcaactcggattcatgcagcaacttgactgaatctcaaaggcaccagaatgagtaaaagaagcctgtctg

SEQ ID NO: 114671 - DNA, 80 bp, synthetic construct
  misc_feature 1..80: note = Artificially Synthesized Probe
  source 1..80: mol_type = other DNA
cagtccgcgtccagccctcagcctgtgtgctgacaatgctttacattttgaaatggttggaaaaagtcaaaagaataatt

SEQ ID NO: 114672 - DNA, 80 bp, synthetic construct
  misc_feature 1..80: note = Artificially Synthesized Probe
  source 1..80: mol_type = other DNA
gtgacctgattatacacaaatctacccatgtcaaaactcacaaggctgtacaccaaaaagttgattttactttgtgttaa

SEQ ID NO: 114673 - DNA, 80 bp, synthetic construct
  misc_feature 1..80: note = Artificially Synthesized Probe
  source 1..80: mol_type = other DNA
ctcatggatggattgatccacgcctctaaaagcttgatagtaacaacgataacaataataagagcaaaggaggctgcagc

SEQ ID NO: 114674 - DNA, 80 bp, synthetic construct
  misc_feature 1..80: note = Artificially Synthesized Probe
  source 1..80: mol_type = other DNA
tggttgcgtggcccgtctgaggctggcccgactccatcgtggggccgcctgggcccagagcagacgacagcccctccggg

SEQ ID NO: 114675 - DNA, 80 bp, synthetic construct; identical to SEQ ID NO: 37592
  misc_feature 1..80: note = Artificially Synthesized Probe
  source 1..80: mol_type = other DNA

SEQ ID NO: 114676 - DNA, 80 bp, synthetic construct
  misc_feature 1..80: note = Artificially Synthesized Probe
  source 1..80: mol_type = other DNA
gccttgtctgagttcacagatatccagccaaacatcacgtaaaagctgcaacccagagaggccagacatatggagcaatt

SEQ ID NO: 114677 - DNA, 80 bp, synthetic construct
  misc_feature 1..80: note = Artificially Synthesized Probe
  source 1..80: mol_type = other DNA
gtgggaaaattgcttgaggtcagaagtttgagaccagcctgggcaacatagagagaaccatctctacaaaaaataaaaga

SEQ ID NO: 114678 - DNA, 80 bp, synthetic construct; identical to SEQ ID NO: 37593
  misc_feature 1..80: note = Artificially Synthesized Probe
  source 1..80: mol_type = other DNA

SEQ ID NO: 114679 - DNA, 80 bp, synthetic construct
  misc_feature 1..80: note = Artificially Synthesized Probe
  source 1..80: mol_type = other DNA
gcaagcacacacgcaaaagcacgtgcatacagactggtagaactgaataaggcctgtgggctagttaacagttttacccc

SEQ ID NO: 114680 - DNA, 80 bp, synthetic construct; identical to SEQ ID NO: 37547
  misc_feature 1..80: note = Artificially Synthesized Probe
  source 1..80: mol_type = other DNA

SEQ ID NO: 114681 - DNA, 80 bp, synthetic construct
  misc_feature 1..80: note = Artificially Synthesized Probe
  source 1..80: mol_type = other DNA
cgccacagtagctggggtgatgggtgtgcaccgccacagtggctggggttagaatcatacaactccaccaatcacaaccc

SEQ ID NO: 114682 - DNA, 80 bp, synthetic construct
  misc_feature 1..80: note = Artificially Synthesized Probe
  source 1..80: mol_type = other DNA
gagatgcatactttcctaccccaagcatcacacagttacagagcagaaaactctagacatccttgcaacatggaaaatca

SEQ ID NO: 114683 - DNA, 80 bp, synthetic construct; identical to SEQ ID NO: 37594
  misc_feature 1..80: note = Artificially Synthesized Probe
  source 1..80: mol_type = other DNA

SEQ ID NO: 114684 - DNA, 80 bp, synthetic construct
  misc_feature 1..80: note = Artificially Synthesized Probe
  source 1..80: mol_type = other DNA
agatattgcccagtttcctaatagcattttaacagtatttagtgaacacatcgccaaaagcataagggagaggaatttgc

SEQ ID NO: 114685 - DNA, 80 bp, synthetic construct
  misc_feature 1..80: note = Artificially Synthesized Probe
  source 1..80: mol_type = other DNA
acatcggatacgctgcgttaccgccagtcacgccctcgtgagttgcctgcagattattcaagctagacgtgtcttctatt

SEQ ID NO: 114686 - DNA, 80 bp, synthetic construct
  misc_feature 1..80: note = Artificially Synthesized Probe
  source 1..80: mol_type = other DNA
gtgcgccctggctcctctgtatacgtgggggcgggaccaggagaatgacaacgctcctccagtgcagtggaaactagagt

SEQ ID NO: 114687 - DNA, 80 bp, synthetic construct
  misc_feature 1..80: note = Artificially Synthesized Probe
  source 1..80: mol_type = other DNA
gccccaacaccccccgtgggtggccctggtgccccttccctggcagagaggaggggagagaatgtgatggtctgaacaga

SEQ ID NO: 114688 - DNA, 80 bp, synthetic construct; identical to SEQ ID NO: 37595
  misc_feature 1..80: note = Artificially Synthesized Probe
  source 1..80: mol_type = other DNA

SEQ ID NO: 114689 - DNA, 80 bp, synthetic construct
  misc_feature 1..80: note = Artificially Synthesized Probe
  source 1..80: mol_type = other DNA
tctgttgggtgatgccccaggggtggaagtcaaatgtcgaattctggggtccaagtgaaatgcagaagttacagaaagag

SEQ ID NO: 114690 - DNA, 80 bp, synthetic construct
  misc_feature 1..80: note = Artificially Synthesized Probe
  source 1..80: mol_type = other DNA
tcctgcaaaccttcctagttctcatggacacagtcacctgacaaatgcctgtgaacagactgccaatctaggcaggaccc

SEQ ID NO: 114691 - DNA, 80 bp, synthetic construct
  misc_feature 1..80: note = Artificially Synthesized Probe
  source 1..80: mol_type = other DNA
tggcccactgcctgtttttgtaaataaagttttattggcacacagccacacccatttggttgcatatcatttatggctgc

SEQ ID NO: 114692 - DNA, 80 bp, synthetic construct
  misc_feature 1..80: note = Artificially Synthesized Probe
  source 1..80: mol_type = other DNA
aaggcaggaaaattgcttgaacctgggaggcggaggctgcagtgagccgagatcatgtcgctgcactctagcctgggtga

SEQ ID NO: 114693 - DNA, 80 bp, synthetic construct; identical to SEQ ID NO: 37596
  misc_feature 1..80: note = Artificially Synthesized Probe
  source 1..80: mol_type = other DNA

SEQ ID NO: 114694 - DNA, 80 bp, synthetic construct
  misc_feature 1..80: note = Artificially Synthesized Probe
  source 1..80: mol_type = other DNA
actatctgcagtaaatgatttttttaaaattgcacagcttctggaaaagtcttttggctaagaaactgaagcttacaaca

SEQ ID NO: 114695 - DNA, 80 bp, synthetic construct
  misc_feature 1..80: note = Artificially Synthesized Probe
  source 1..80: mol_type = other DNA
tgggattggagctggctgcctggaccaacaccctctaaaagggaagggagagaaggccagttagacttgtcagaggtcag

SEQ ID NO: 114696 - DNA, 80 bp, synthetic construct; identical to SEQ ID NO: 37597
  misc_feature 1..80: note = Artificially Synthesized Probe
  source 1..80: mol_type = other DNA

SEQ ID NO: 114697 - DNA, 80 bp, synthetic construct
  misc_feature 1..80: note = Artificially Synthesized Probe
  source 1..80: mol_type = other DNA
gagagcactctgtggcgcccctcgcttctgcagtataacccggacttgtttccattttctgatgaggttaatgaagccag

SEQ ID NO: 114698 - DNA, 80 bp, synthetic construct
  misc_feature 1..80: note = Artificially Synthesized Probe
  source 1..80: mol_type = other DNA
ttgctatttttctgggagtaccgattggccacacaaagctatcaaaatgggaagggtcaaagtgaactcgagtcgaggga

SEQ ID NO: 114699 - DNA, 80 bp, synthetic construct
  misc_feature 1..80: note = Artificially Synthesized Probe
  source 1..80: mol_type = other DNA
ttgcaggagtggagctaaggatgaagatggtgctaataaggatgccagcgcaagggcattctgattccaggtgagctggg

SEQ ID NO: 114700 - DNA, 80 bp, synthetic construct
  misc_feature 1..80: note = Artificially Synthesized Probe
  source 1..80: mol_type = other DNA
gagagaggggcttggcaggaagacctgagggctgactcctcttggacaatttcaagtgggcacggaaacatatcaattag

SEQ ID NO: 114701 - DNA, 80 bp, synthetic construct; identical to SEQ ID NO: 37598
  misc_feature 1..80: note = Artificially Synthesized Probe
  source 1..80: mol_type = other DNA

SEQ ID NO: 114702 - DNA, 80 bp, synthetic construct
  misc_feature 1..80: note = Artificially Synthesized Probe
  source 1..80: mol_type = other DNA
gttactcagactggtctcaaactcctgacctcaggtgatccacccaccttggcctcccaaagtgctgggattacaggcat

SEQ ID NO: 114703 - DNA, 80 bp, synthetic construct
  misc_feature 1..80: note = Artificially Synthesized Probe
  source 1..80: mol_type = other DNA
ttcataaactctgttacgtctaatcggtatcgagcgataaaaagaagacacaggcttgagaaaggcaaagacagccgcac

SEQ ID NO: 114704 - DNA, 80 bp, synthetic construct
  misc_feature 1..80: note = Artificially Synthesized Probe
  source 1..80: mol_type = other DNA
attcgctttgtatttctgtcttctttatggcttatttcattccacggtagaaatccaggagcagagaaagcctgaatgtg

SEQ ID NO: 114705 - DNA, 80 bp, synthetic construct
  misc_feature 1..80: note = Artificially Synthesized Probe
  source 1..80: mol_type = other DNA
tcaggagttcgagaccagcctggccaacatggtgaaacctcgtctctactaaaaatacaaaaattagccgggcgtggtag

SEQ ID NO: 114706 - DNA, 80 bp, synthetic construct; identical to SEQ ID NO: 37599
  misc_feature 1..80: note = Artificially Synthesized Probe
  source 1..80: mol_type = other DNA

SEQ ID NO: 114707 - DNA, 80 bp, synthetic construct
  misc_feature 1..80: note = Artificially Synthesized Probe
  source 1..80: mol_type = other DNA
gctggagtgtagtgtcacaatcatggcttactgcagcctcaacctcccaggctcaggtgatcctcccatctcagcctcct

SEQ ID NO: 114708 - DNA, 80 bp, synthetic construct
  misc_feature 1..80: note = Artificially Synthesized Probe
  source 1..80: mol_type = other DNA
agccactgcacccggccttacttcttaattcttaataaagcatttctgtgtaaaagggtcatttccaagtacaagaaaac

SEQ ID NO: 114709 - DNA, 80 bp, synthetic construct; identical to SEQ ID NO: 37600
  misc_feature 1..80: note = Artificially Synthesized Probe
  source 1..80: mol_type = other DNA

SEQ ID NO: 114710 - DNA, 80 bp, synthetic construct
  misc_feature 1..80: note = Artificially Synthesized Probe
  source 1..80: mol_type = other DNA
ttctgcatgctcaggtctaaagaaaggcggagagagattgggtgggcaagggctgcaagcactgaaatccgaagaggcaa

SEQ ID NO: 114711 - DNA, 80 bp, synthetic construct
  misc_feature 1..80: note = Artificially Synthesized Probe
  source 1..80: mol_type = other DNA
gaaggagagaggggccagagaaagttttccaaatataaaacccaaaaagggctctgtcagcgcacaatggcaggaattcc

SEQ ID NO: 114712 - DNA, 80 bp, synthetic construct
  misc_feature 1..80: note = Artificially Synthesized Probe
  source 1..80: mol_type = other DNA
ctaaggctgggtttccccactgtggcaccgttgacatttgagctggatacttctttgctgttggaggcccattctgggca

SEQ ID NO: 114713 - DNA, 80 bp, synthetic construct; identical to SEQ ID NO: 37601
  misc_feature 1..80: note = Artificially Synthesized Probe
  source 1..80: mol_type = other DNA

SEQ ID NO: 114714 - DNA, 80 bp, synthetic construct
  misc_feature 1..80: note = Artificially Synthesized Probe
  source 1..80: mol_type = other DNA
tccccacagccccggtgtctggtgcgatgcttcagtccaaagtatttccagaacatcgcctgcggtcaccccggtatctc

SEQ ID NO: 114715 - DNA, 80 bp, synthetic construct
  misc_feature 1..80: note = Artificially Synthesized Probe
  source 1..80: mol_type = other DNA
tcgaacagtcttcacttttaaataaacaatcggctatgttgagcatttgagacatagttaagtacacacacttaggtagg

SEQ ID NO: 114716 - DNA, 80 bp, synthetic construct
  misc_feature 1..80: note = Artificially Synthesized Probe
  source 1..80: mol_type = other DNA
cagacatacatcgcggtgcccacgacatcgtcagaacacaatagacatttgctagaacttttacgtttctctatcacccc

SEQ ID NO: 114717 - DNA, 80 bp, synthetic construct
  misc_feature 1..80: note = Artificially Synthesized Probe
  source 1..80: mol_type = other DNA
attccccgaccaccaccgctccccggcccccgcccccgtcccctcccaaacgccttcgatgccacccagagccccacggc

SEQ ID NO: 114718 - DNA, 80 bp, synthetic construct
  misc_feature 1..80: note = Artificially Synthesized Probe
  source 1..80: mol_type = other DNA
gtatttcctgagtcctcaactcactctctgtctttgacagaactgacctttggaatttttctgttacaagctgcttgtat

SEQ ID NO: 114719 - DNA, 80 bp, synthetic construct; identical to SEQ ID NO: 37542
  misc_feature 1..80: note = Artificially Synthesized Probe
  source 1..80: mol_type = other DNA

SEQ ID NO: 114720 - DNA, 80 bp, synthetic construct; identical to SEQ ID NO: 37602
  misc_feature 1..80: note = Artificially Synthesized Probe
  source 1..80: mol_type = other DNA

SEQ ID NO: 114721 - DNA, 80 bp, synthetic construct
  misc_feature 1..80: note = Artificially Synthesized Probe
  source 1..80: mol_type = other DNA
ttgctctgtcacccaggctggagtgcaatggcatgatcttggctctgcctcctgggttcaagtgattctcccacctcagt

SEQ ID NO: 114722 - DNA, 80 bp, synthetic construct
  misc_feature 1..80: note = Artificially Synthesized Probe
  source 1..80: mol_type = other DNA
taagccaccgtgcccagcctgttcccctaatttaacacactatttaccatgtgttgtcttataggtcagaccaatgagtc

SEQ ID NO: 114723 - DNA, 80 bp, synthetic construct
  misc_feature 1..80: note = Artificially Synthesized Probe
  source 1..80: mol_type = other DNA
ggaagagagagagccacagaaggggtgagccctcaaatcttcctacaaaatacacctgaatctttggctaagcaactaca

SEQ ID NO: 114724 - DNA, 80 bp, synthetic construct; identical to SEQ ID NO: 37603
  misc_feature 1..80: note = Artificially Synthesized Probe
  source 1..80: mol_type = other DNA

SEQ ID NO: 114725 - DNA, 80 bp, synthetic construct; identical to SEQ ID NO: 37548
  misc_feature 1..80: note = Artificially Synthesized Probe
  source 1..80: mol_type = other DNA

SEQ ID NO: 114726 - DNA, 80 bp, synthetic construct
  misc_feature 1..80: note = Artificially Synthesized Probe
  source 1..80: mol_type = other DNA
cagatagcattcaaggactaaagcagctactaaaaataacttcaagaacttaaaggaagttatatacataatgaatgaac

SEQ ID NO: 114727 - DNA, 80 bp, synthetic construct
  misc_feature 1..80: note = Artificially Synthesized Probe
  source 1..80: mol_type = other DNA
atctgaagaatgaagagaaaatatatgaagaaacatgaatagaacaaactgtctaatatatatgtaacgagagtcccaga

SEQ ID NO: 114728 - DNA, 80 bp, synthetic construct; identical to SEQ ID NO: 37604
  misc_feature 1..80: note = Artificially Synthesized Probe
  source 1..80: mol_type = other DNA

SEQ ID NO: 114729 - DNA, 80 bp, synthetic construct
  misc_feature 1..80: note = Artificially Synthesized Probe
  source 1..80: mol_type = other DNA
cataaacaaaacctgataaaattttctgcctaccatgagaaatgctaatggaagttcttcagaatgaaaggaattaatac

SEQ ID NO: 114730 - DNA, 80 bp, synthetic construct
  misc_feature 1..80: note = Artificially Synthesized Probe
  source 1..80: mol_type = other DNA
tccattgtggggtttatatcatatgtagatgttctccatgacagttgtaacacagaggatggggacaaattaagttatac

SEQ ID NO: 114731 - DNA, 80 bp, synthetic construct
  misc_feature 1..80: note = Artificially Synthesized Probe
  source 1..80: mol_type = other DNA
aaggtatagctaaaaagctaatagagaaatcaaatgaaatcctacttaacatatttgattatctaaataaaggcaagaaa

SEQ ID NO: 114732 - DNA, 80 bp, synthetic construct; identical to SEQ ID NO: 37605
  misc_feature 1..80: note = Artificially Synthesized Probe
  source 1..80: mol_type = other DNA

SEQ ID NO: 114733 - DNA, 80 bp, synthetic construct
  misc_feature 1..80: note = Artificially Synthesized Probe
  source 1..80: mol_type = other DNA
ccaggttcacgccattctcctgcctcagcctcccgagtagctgggactacaggtgcccgccatcacaccaggctaatatt

SEQ ID NO: 114734 - DNA, 80 bp, synthetic construct
  misc_feature 1..80: note = Artificially Synthesized Probe
  source 1..80: mol_type = other DNA
tcagcctgcaaactctgatcttaagaaagctggagcggctgtaataatcagacaaaatagactctgagatgagaaatatt

SEQ ID NO: 114735 - DNA, 80 bp, synthetic construct
  misc_feature 1..80: note = Artificially Synthesized Probe
  source 1..80: mol_type = other DNA
ggaggaaataaacaatcataatcggagattttaaacatccttcattcagtaattttgattactgaatcaaaattagaaga

SEQ ID NO: 114736 - DNA, 80 bp, synthetic construct; identical to SEQ ID NO: 37606
  misc_feature 1..80: note = Artificially Synthesized Probe
  source 1..80: mol_type = other DNA

SEQ ID NO: 114737 - DNA, 80 bp, synthetic construct
  misc_feature 1..80: note = Artificially Synthesized Probe
  source 1..80: mol_type = other DNA
acctgtaatcccagctattcaggaggctgaggcacgagaagtgcttgaacccgggaaggggaggttgcagtgagccgaga

SEQ ID NO: 114738 - DNA, 80 bp, synthetic construct
  misc_feature 1..80: note = Artificially Synthesized Probe
  source 1..80: mol_type = other DNA
atattgtgggtgaaaaaaagaagtaaaattattaagaaaaaaaagtgggcacacctaaagcagtgcttagaaagagatgt

SEQ ID NO: 114739 - DNA, 80 bp, synthetic construct
  misc_feature 1..80: note = Artificially Synthesized Probe
  source 1..80: mol_type = other DNA
atgaaattagaaactccacaaacaatggagaaaatgaacaaaagcaatatttcttcaaaactgaaattttttcagaagaa

SEQ ID NO: 114740 - DNA, 80 bp, synthetic construct
  misc_feature 1..80: note = Artificially Synthesized Probe
  source 1..80: mol_type = other DNA
caggtatcagagagagggatgagtaggcaaagcacagaggatttttaggacactggaactgttctgtatggcactataat

SEQ ID NO: 114741 - DNA, 80 bp, synthetic construct; identical to SEQ ID NO: 37607
  misc_feature 1..80: note = Artificially Synthesized Probe
  source 1..80: mol_type = other DNA

SEQ ID NO: 114742 - DNA, 80 bp, synthetic construct
  misc_feature 1..80: note = Artificially Synthesized Probe
  source 1..80: mol_type = other DNA
agccatgtgtaatggcgggcacctgtaattccagctactcaggaggctgaggtgggagaattgcttgaaccaaggaggca

SEQ ID NO: 114743 - DNA, 80 bp, synthetic construct
  misc_feature 1..80: note = Artificially Synthesized Probe
  source 1..80: mol_type = other DNA
aatatcaggaatgaaatgaaatatatcactagagattctacagaaatcaaaatgataatagagaactattacaaacaact

SEQ ID NO: 114744 - DNA, 80 bp, synthetic construct
  misc_feature 1..80: note = Artificially Synthesized Probe
  source 1..80: mol_type = other DNA
tatagttttactggtgaatgctatcaaatactgaaaaaggaattattacacaaatgccatcagaaaataaaaaaagaata

SEQ ID NO: 114745 - DNA, 80 bp, synthetic construct
  misc_feature 1..80: note = Artificially Synthesized Probe
  source 1..80: mol_type = other DNA
acacttagattatcaattgatttttttttctaatggagcctcagctcttttcttcctcaactggattttcacaaaggtgt

SEQ ID NO: 114746 - DNA, 80 bp, synthetic construct; identical to SEQ ID NO: 37608
  misc_feature 1..80: note = Artificially Synthesized Probe
  source 1..80: mol_type = other DNA

SEQ ID NO: 114747 - DNA, 80 bp, synthetic construct
  misc_feature 1..80: note = Artificially Synthesized Probe
  source 1..80: mol_type = other DNA
aactcctacaattcaatataagatgacaaataacttaaaaaaatggtacttcacaaagcaagatatacagatgcccaaaa

SEQ ID NO: 114748 - DNA, 80 bp, synthetic construct
  misc_feature 1..80: note = Artificially Synthesized Probe
  source 1..80: mol_type = other DNA
ctctggctggcaggcacctcagtcctgcgctcactctgctcttctcaattcttccgcttgcaaccttccctctgtccatg

SEQ ID NO: 114749 - DNA, 80 bp, synthetic construct
  misc_feature 1..80: note = Artificially Synthesized Probe
  source 1..80: mol_type = other DNA
tgtgtagatatgaatgatatgaccacactggaaagaggtttggcagttttctagaaagttaaacctgccctttaacccag

SEQ ID NO: 114750 - DNA, 80 bp, synthetic construct
  misc_feature 1..80: note = Artificially Synthesized Probe
  source 1..80: mol_type = other DNA
tcacagctcactgcatcctcaacctcccaggctcaagcgattctcccacttcagcctcctaagtagctgggactacaggc

SEQ ID NO: 114751 - DNA, 80 bp, synthetic construct; identical to SEQ ID NO: 37609
  misc_feature 1..80: note = Artificially Synthesized Probe
  source 1..80: mol_type = other DNA

SEQ ID NO: 114752 - DNA, 80 bp, synthetic construct
  misc_feature 1..80: note = Artificially Synthesized Probe
  source 1..80: mol_type = other DNA
tgagtagagtggattaaaactaaagttaaaaaaaaatcataatagtgggtgggggggcaggtggcggtgggcgagagtga

SEQ ID NO: 114753 - DNA, 80 bp, synthetic construct
  misc_feature 1..80: note = Artificially Synthesized Probe
  source 1..80: mol_type = other DNA
tgtatgtgaattttaacaatgacaacgaagcctgtaaaaatacaagggtggagaggaggacggagagtgggtacaggtat

SEQ ID NO: 114754 - DNA, 80 bp, synthetic construct; identical to SEQ ID NO: 37610
  misc_feature 1..80: note = Artificially Synthesized Probe
  source 1..80: mol_type = other DNA

SEQ ID NO: 114755 - DNA, 80 bp, synthetic construct
  misc_feature 1..80: note = Artificially Synthesized Probe
  source 1..80: mol_type = other DNA
agtccacagggcacagggacgcacactgtggagcacctttgcagcacccagtttgggaacccctcaatccagtgcaagac

SEQ ID NO: 114756 - DNA, 80 bp, synthetic construct
  misc_feature 1..80: note = Artificially Synthesized Probe
  source 1..80: mol_type = other DNA
tttgactgccttcccctgtgtcctcttagactgggttacaggagcctcggaacagccaatataaaggggaggggccgcaa

SEQ ID NO: 114757 - DNA, 80 bp, synthetic construct
  misc_feature 1..80: note = Artificially Synthesized Probe
  source 1..80: mol_type = other DNA
gaaaagcacagaaccagcggcgcaatttcccctccttggccggcaccagcctttggaatccacgaaacgctcatttgacc

SEQ ID NO: 114758 - DNA, 80 bp, synthetic construct
  misc_feature 1..80: note = Artificially Synthesized Probe
  source 1..80: mol_type = other DNA
atgaatctgcctgggcacaaagggaagaggcttctgtttacagaaaaatactcccatcacctagtaaccagcaatgtcag

SEQ ID NO: 114759 - DNA, 80 bp, synthetic construct; identical to SEQ ID NO: 37611
  misc_feature 1..80: note = Artificially Synthesized Probe
  source 1..80: mol_type = other DNA

SEQ ID NO: 114760 - DNA, 80 bp, synthetic construct
  misc_feature 1..80: note = Artificially Synthesized Probe
  source 1..80: mol_type = other DNA
gttcctctcattcattcactgagccagcatttaaacagaagtgaggtcccggcactcgggtagcgtgcctgatcatgcag

SEQ ID NO: 114761 - DNA, 80 bp, synthetic construct
  misc_feature 1..80: note = Artificially Synthesized Probe
  source 1..80: mol_type = other DNA
accagttgcttcaaagcccagattctgtcctggtagcttgtcttaacactcccagtgtcattaggctgcccagaaaagtc

SEQ ID NO: 114762 - DNA, 80 bp, synthetic construct
  misc_feature 1..80: note = Artificially Synthesized Probe
  source 1..80: mol_type = other DNA
gaaccctccttgatggtggaaccatgtcctttctggcaccaggattactccctgtggacccagttggttctcagtgccaa

SEQ ID NO: 114763 - DNA, 80 bp, synthetic construct
  misc_feature 1..80: note = Artificially Synthesized Probe
  source 1..80: mol_type = other DNA
acccccagttgtgacaaccacagatgttcccagacattgcccagtgtcccctggggcgcagaaggacctctgttcaaaat

SEQ ID NO: 114764 - DNA, 80 bp, synthetic construct; identical to SEQ ID NO: 37612
  misc_feature 1..80: note = Artificially Synthesized Probe
  source 1..80: mol_type = other DNA

SEQ ID NO: 114765 - DNA, 80 bp, synthetic construct
  misc_feature 1..80: note = Artificially Synthesized Probe
  source 1..80: mol_type = other DNA
aattcctttttcttttcgtaagaattgggcttctgttcctgttttcttctcaggagccaaactttccctcctttctctag

SEQ ID NO: 114766 - DNA, 80 bp, synthetic construct
  misc_feature 1..80: note = Artificially Synthesized Probe
  source 1..80: mol_type = other DNA
cagggacccccgtcttaacagtggaaacacccgttccttcccctttagaaacctgacttttttttttttcagacagagtc

SEQ ID NO: 114767 - DNA, 80 bp, synthetic construct
  misc_feature 1..80: note = Artificially Synthesized Probe
  source 1..80: mol_type = other DNA
ggggtcttgctatgttgcccagaatgatctcgaactcctggactgaagcaatcctcccacctcggcctcccaaagtgctg

SEQ ID NO: 114768 - DNA, 80 bp, synthetic construct; identical to SEQ ID NO: 37613
  misc_feature 1..80: note = Artificially Synthesized Probe
  source 1..80: mol_type = other DNA

SEQ ID NO: 114769 - DNA, 80 bp, synthetic construct
  misc_feature 1..80: note = Artificially Synthesized Probe
  source 1..80: mol_type = other DNA
acatgagagtgtcacacacacacagacgcatgtatacactccccacgtatgcatatacacaaatatacatggacatacac

SEQ ID NO: 114770 - DNA, 80 bp, synthetic construct
  misc_feature 1..80: note = Artificially Synthesized Probe
  source 1..80: mol_type = other DNA
acacatacaccacctgacgcaggataatatgagaagaatggccaaaaccactcagaagacacgtcattttcttactccat

SEQ ID NO: 114771 - DNA, 80 bp, synthetic construct; identical to SEQ ID NO: 37549
  misc_feature 1..80: note = Artificially Synthesized Probe
  source 1..80: mol_type = other DNA

SEQ ID NO: 114772 - DNA, 80 bp, synthetic construct; identical to SEQ ID NO: 37614
  misc_feature 1..80: note = Artificially Synthesized Probe
  source 1..80: mol_type = other DNA

SEQ ID NO: 114773 - DNA, 80 bp, synthetic construct
  misc_feature 1..80: note = Artificially Synthesized Probe
  source 1..80: mol_type = other DNA
tttcccattatctatgatggcttttgtgctccaacagcagaggcgaggagctgagacagaccccagcagaagcctaaaat

SEQ ID NO: 114774 - DNA, 80 bp, synthetic construct
  misc_feature 1..80: note = Artificially Synthesized Probe
  source 1..80: mol_type = other DNA
ttgaggagaacatccactgccactgaaaccctgctctttatcctttatcttctcttgagatatggattcttttttatttg

SEQ ID NO: 114775 - DNA, 80 bp, synthetic construct
  misc_feature 1..80: note = Artificially Synthesized Probe
  source 1..80: mol_type = other DNA
tcgtgtctgggtgctgttgtcatctggtttcatttttccccctaatgataccttctcagtcccctgcactggtccctgct

SEQ ID NO: 114776 - DNA, 80 bp, synthetic construct
  misc_feature 1..80: note = Artificially Synthesized Probe
  source 1..80: mol_type = other DNA
cctcaacaagtccaagggaaactctccccccgccaaaattgctcctcttgcgtttcctaagccagggggctgttcaaggc

SEQ ID NO: 114777 - DNA, 80 bp, synthetic construct; identical to SEQ ID NO: 37615
  misc_feature 1..80: note = Artificially Synthesized Probe
  source 1..80: mol_type = other DNA

SEQ ID NO: 114778 - DNA, 80 bp, synthetic construct
  misc_feature 1..80: note = Artificially Synthesized Probe
  source 1..80: mol_type = other DNA
aaaaggtctgctgtctgtaggatcccttctttagagggttggagcctacccttcacacttacaagtctggctgatcaaga

SEQ ID NO: 114779 - DNA, 80 bp, synthetic construct
  misc_feature 1..80: note = Artificially Synthesized Probe
  source 1..80: mol_type = other DNA
gagtcggctgcagccgggggaaaaagactttgcaacctccattatttatataaataagaacaaatgccaaggggaatgcc

SEQ ID NO: 114780 - DNA, 80 bp, synthetic construct; identical to SEQ ID NO: 37616
  misc_feature 1..80: note = Artificially Synthesized Probe
  source 1..80: mol_type = other DNA

SEQ ID NO: 114781 - DNA, 80 bp, synthetic construct
  misc_feature 1..80: note = Artificially Synthesized Probe
  source 1..80: mol_type = other DNA
aatttgaggttgaagtaagctgactgcactactgcactccagcctgggagacagaggaagaccctgtctctaaaaagaat

SEQ ID NO: 114782 - DNA, 80 bp, synthetic construct
  misc_feature 1..80: note = Artificially Synthesized Probe
  source 1..80: mol_type = other DNA
ctgaggaagccgtgaccacatcacctctgctctagacacaacacacacgcaactgaggctcagaaagggcgagccatgag

SEQ ID NO: 114783 - DNA, 80 bp, synthetic construct
  misc_feature 1..80: note = Artificially Synthesized Probe
  source 1..80: mol_type = other DNA
attctcctgctgcagcctcccaagtagctgggatttcaggtgcccaccaccacgcctgactaatttttatatttttagta

SEQ ID NO: 114784 - DNA, 80 bp, synthetic construct
  misc_feature 1..80: note = Artificially Synthesized Probe
  source 1..80: mol_type = other DNA
tatataaatcgcttccccaaccccatgccaaagagaactccaaataacaacacaagcttagcttttgctttagaagtttc

SEQ ID NO: 114785 - DNA, 80 bp, synthetic construct; identical to SEQ ID NO: 37617
  misc_feature 1..80: note = Artificially Synthesized Probe
  source 1..80: mol_type = other DNA

SEQ ID NO: 114786 - DNA, 80 bp, synthetic construct
  misc_feature 1..80: note = Artificially Synthesized Probe
  source 1..80: mol_type = other DNA
tcgcgcatattcaatatctgctcgtcctttccctccccttccagagaccaatgtcacctgtctgtccttttctggtgcct

SEQ ID NO: 114787 - DNA, 80 bp, synthetic construct
  misc_feature 1..80: note = Artificially Synthesized Probe
  source 1..80: mol_type = other DNA
cgggcttcctctgattccggatggagtgtttaaatgagatgtccacacaacccccaaggaccctctgattccaacggaat

SEQ ID NO: 114788 - DNA, 80 bp, synthetic construct
  misc_feature 1..80: note = Artificially Synthesized Probe
  source 1..80: mol_type = other DNA
caccggaggctggcactggtgtctcctgcacacaacgcagggagggtgaggatggggtccatgcacctgccagggtgggg

SEQ ID NO: 114789 - DNA, 80 bp, synthetic construct; identical to SEQ ID NO: 37618
  misc_feature 1..80: note = Artificially Synthesized Probe
  source 1..80: mol_type = other DNA

SEQ ID NO: 114790 - DNA, 80 bp, synthetic construct
  misc_feature 1..80: note = Artificially Synthesized Probe
  source 1..80: mol_type = other DNA
cacccccatggagaaccacacgtctaaggccacacctttactccacacagcatttccagattcaccaaaccactctccgt

SEQ ID NO: 114791 - DNA, 80 bp, synthetic construct
  misc_feature 1..80: note = Artificially Synthesized Probe
  source 1..80: mol_type = other DNA
caaagatgctcaagacgtgttttgcaatgaacaagagaatgagcagcccgcctgctccgggctgctcacctgttctagcc

SEQ ID NO: 114792 - DNA, 80 bp, synthetic construct
  misc_feature 1..80: note = Artificially Synthesized Probe
  source 1..80: mol_type = other DNA
cagggctgcagtgcagctgctgatggtcaagatgaagatggggaatgtgccagtgaaaacctggcatgcggaggcctcac

SEQ ID NO: 114793 - DNA, 80 bp, synthetic construct
  misc_feature 1..80: note = Artificially Synthesized Probe
  source 1..80: mol_type = other DNA
gcacctgtgcccacctggggatggggtctcgtcctgcctgtgtgacccttcctcctgacagccatctctagagacagcca

SEQ ID NO: 114794 - DNA, 80 bp, synthetic construct
  misc_feature 1..80: note = Artificially Synthesized Probe
  source 1..80: mol_type = other DNA
ctttgtagccaacagtcaaactgttttgtttgcattgacagctgtagctgatctgtgaattaatgcatgtggctgaggtt

SEQ ID NO: 114795 - DNA, 80 bp, synthetic construct; identical to SEQ ID NO: 37619
  misc_feature 1..80: note = Artificially Synthesized Probe
  source 1..80: mol_type = other DNA

SEQ ID NO: 114796 - DNA, 80 bp, synthetic construct
  misc_feature 1..80: note = Artificially Synthesized Probe
  source 1..80: mol_type = other DNA
atgacttacttaaactggggactgggcagaaaataatattgtagaaggtagaacagcatttctttgggaggatttatctt

SEQ ID NO: 114797 - DNA, 80 bp, synthetic construct
  misc_feature 1..80: note = Artificially Synthesized Probe
  source 1..80: mol_type = other DNA
actcgcagccattggatcctaattatcacatctaataaggctgatggctaatcagcttgcctttttaagaaaaaaaggcc

SEQ ID NO: 114798 - DNA, 80 bp, synthetic construct
  misc_feature 1..80: note = Artificially Synthesized Probe
  source 1..80: mol_type = other DNA
cccagctactcgggaggctgaggcggaagaatggcgtgaacccgggaggcggagcttcctgggcgacagaacgagactct

SEQ ID NO: 114799 - DNA, 80 bp, synthetic construct; identical to SEQ ID NO: 37620
  misc_feature 1..80: note = Artificially Synthesized Probe
  source 1..80: mol_type = other DNA

SEQ ID NO: 114800 - DNA, 80 bp, synthetic construct
  misc_feature 1..80: note = Artificially Synthesized Probe
  source 1..80: mol_type = other DNA
gaggaggggaagaaatgtgtcacccgctctgaatgaagttcaggggtggtgtttacctaagcaacaaacccttgtcaaca

SEQ ID NO: 114801 - DNA, 80 bp, synthetic construct
  misc_feature 1..80: note = Artificially Synthesized Probe
  source 1..80: mol_type = other DNA
tctcttaataaacataacatacacatcccactgagggccacgggtggacccaacttcttaacaggaacattgagcacatg

SEQ ID NO: 114802 - DNA, 80 bp, synthetic construct; identical to SEQ ID NO: 37621
  misc_feature 1..80: note = Artificially Synthesized Probe
  source 1..80: mol_type = other DNA

SEQ ID NO: 114803 - DNA, 80 bp, synthetic construct
  misc_feature 1..80: note = Artificially Synthesized Probe
  source 1..80: mol_type = other DNA
tttcaagcagatcccgagtggatccatgtctgcctgttgtggcaaatcaaactcaaatttaatcagagaaaaatatatgc

SEQ ID NO: 114804 - DNA, 80 bp, synthetic construct
  misc_feature 1..80: note = Artificially Synthesized Probe
  source 1..80: mol_type = other DNA
tcatcccggagcaaccccctctatctcacattaaccagatctaaaaaaaaccctctcaaatatgtaatctattattttca

SEQ ID NO: 114805 - DNA, 80 bp, synthetic construct
  misc_feature 1..80: note = Artificially Synthesized Probe
  source 1..80: mol_type = other DNA
gcatcacaggagggatttcaatccttcctagtactgggaggagaaagtgcccttttctccaagaggaaagaatctattta

SEQ ID NO: 114806 - DNA, 80 bp, synthetic construct
  misc_feature 1..80: note = Artificially Synthesized Probe
  source 1..80: mol_type = other DNA
ctcttgagagtgaataagtctcatgagatgtgatggttttataaaggcgagttcccctgcacatgctctcttgcctgccg

SEQ ID NO: 114807 - DNA, 80 bp, synthetic construct; identical to SEQ ID NO: 37622
  misc_feature 1..80: note = Artificially Synthesized Probe
  source 1..80: mol_type = other DNA

SEQ ID NO: 114808 - DNA, 80 bp, synthetic construct
  misc_feature 1..80: note = Artificially Synthesized Probe
  source 1..80: mol_type = other DNA
ggaggcacatggttgggcaatctcgacccatgaagggggaaaagaaaagggctaaactgaagctagtgcagcttttgttc

SEQ ID NO: 114809 - DNA, 80 bp, synthetic construct
  misc_feature 1..80: note = Artificially Synthesized Probe
  source 1..80: mol_type = other DNA
gcaacatgtagctgcagcctcgatgggtcaacattttggatgataaaagcacacaatgctgatagatttgtgcatgacca

SEQ ID NO: 114810 - DNA, 80 bp, synthetic construct
  misc_feature 1..80: note = Artificially Synthesized Probe
  source 1..80: mol_type = other DNA
tgttagaatttgaatctgtgttgcagggagatgaggaatttgaagccagactcttgggctgttaatgtatggctaagtgg

SEQ ID NO: 114811 - DNA, 80 bp, synthetic construct; identical to SEQ ID NO: 37623
  misc_feature 1..80: note = Artificially Synthesized Probe
  source 1..80: mol_type = other DNA

SEQ ID NO: 114812 - DNA, 80 bp, synthetic construct
  misc_feature 1..80: note = Artificially Synthesized Probe
  source 1..80: mol_type = other DNA
aaggaagcagacagaaggagtgctgggataggaaggggttgcaatttttaaagcgttgtcaaatgcttccctgggtgggc

SEQ ID NO: 114813 - DNA, 80 bp, synthetic construct
  misc_feature 1..80: note = Artificially Synthesized Probe
  source 1..80: mol_type = other DNA
acaggccattgtaggggctctggcttttgcttggggtaaatggaagccatcacaaggtttgagcccaggaatggcctggt

SEQ ID NO: 114814 - DNA, 80 bp, synthetic construct
  misc_feature 1..80: note = Artificially Synthesized Probe
  source 1..80: mol_type = other DNA
ctggataaacataggaggtagagtcagccagatctgctgacgggtcaagggtacctccaaggtttttggcaactaaaagg

SEQ ID NO: 114815 - DNA, 80 bp, synthetic construct
  misc_feature 1..80: note = Artificially Synthesized Probe
  source 1..80: mol_type = other DNA
agtgtatagagaatgcaggctggagccatcagtgtatagaatatatgaactagagccatcaatgtatagataacatagct

SEQ ID NO: 114816 - DNA, 80 bp, synthetic construct; identical to SEQ ID NO: 37624
  misc_feature 1..80: note = Artificially Synthesized Probe
  source 1..80: mol_type = other DNA

SEQ ID NO: 114817 - DNA, 80 bp, synthetic construct
  misc_feature 1..80: note = Artificially Synthesized Probe
  source 1..80: mol_type = other DNA
tctaccatttagagatcccaaagaagcaggagcctgaaaagaggccaaagaagtataagcaagtggtgtcctgagaacca

SEQ ID NO: 114818 - DNA, 80 bp, synthetic construct
  misc_feature 1..80: note = Artificially Synthesized Probe
  source 1..80: mol_type = other DNA
ggtggggataacaatttggccctgtggccatagctcatccatgcgctgggtcacgtggggcctgtcagccacagaacagc

SEQ ID NO: 114819 - DNA, 80 bp, synthetic construct
  misc_feature 1..80: note = Artificially Synthesized Probe
  source 1..80: mol_type = other DNA
cagatggctcttttgaggaatttttgctagaaagataggaagaggaatggggaggcagctggaagaggaaactgagagcg

SEQ ID NO: 114820 - DNA, 80 bp, synthetic construct
  misc_feature 1..80: note = Artificially Synthesized Probe
  source 1..80: mol_type = other DNA
ggatgggatgggatgggatgggatgtggatgggatgggatgggatgtggatgggatgggatgggatgggatgggatggga

SEQ ID NO: 114821 - DNA, 80 bp, synthetic construct; identical to SEQ ID NO: 37625
  misc_feature 1..80: note = Artificially Synthesized Probe
  source 1..80: mol_type = other DNA

SEQ ID NO: 114822 - DNA, 80 bp, synthetic construct
  misc_feature 1..80: note = Artificially Synthesized Probe
  source 1..80: mol_type = other DNA
gtatgatgacctaggtccacagacctcacatcagagcctccagcagaccctgggttcatagtcacatatgggctccatgt

SEQ ID NO: 114823 - DNA, 80 bp, synthetic construct
  misc_feature 1..80: note = Artificially Synthesized Probe
  source 1..80: mol_type = other DNA
atagctcactgcagcctcaaactcctgggccctcagcccagtgattgtcctgccttagcctcccatgtagctaggactac

SEQ ID NO: 114824 - DNA, 80 bp, synthetic construct
  misc_feature 1..80: note = Artificially Synthesized Probe
  source 1..80: mol_type = other DNA
gcctggccctcactgctttccttatggttactccatacctcttttcaaatttgccaaatggctaatctttccacactcga

SEQ ID NO: 114825 - DNA, 80 bp, synthetic construct; identical to SEQ ID NO: 37626
  misc_feature 1..80: note = Artificially Synthesized Probe
  source 1..80: mol_type = other DNA

SEQ ID NO: 114826 - DNA, 80 bp, synthetic construct
  misc_feature 1..80: note = Artificially Synthesized Probe
  source 1..80: mol_type = other DNA
aagtcagagatcccctcagcaagacccagggatctctgaagaaatgaaaatgaagcgaagaaagacaaaattagaaatat

SEQ ID NO: 114827 - DNA, 80 bp, synthetic construct
  misc_feature 1..80: note = Artificially Synthesized Probe
  source 1..80: mol_type = other DNA
gtgcgctgagaagatgcagcaaaagggtctttttgttaaactcattattagaattaaacccaaagagggaaatgttggag

SEQ ID NO: 114828 - DNA, 80 bp, synthetic construct
  misc_feature 1..80: note = Artificially Synthesized Probe
  source 1..80: mol_type = other DNA
gctttcctattccatcaagttttgagaggggttttcatttttctcaggaaacattttctcccggtgtggggttggggatg

SEQ ID NO: 114829 - DNA, 80 bp, synthetic construct; identical to SEQ ID NO: 37550
  misc_feature 1..80: note = Artificially Synthesized Probe
  source 1..80: mol_type = other DNA

SEQ ID NO: 114830 - DNA, 80 bp, synthetic construct; identical to SEQ ID NO: 37627
  misc_feature 1..80: note = Artificially Synthesized Probe
  source 1..80: mol_type = other DNA

SEQ ID NO: 114831 - DNA, 80 bp, synthetic construct
  misc_feature 1..80: note = Artificially Synthesized Probe
  source 1..80: mol_type = other DNA
ctcttggaaagcatgtttcacttctgcatacattttaaaagataaatatttgggccaggagcagtggctcatgtctgtaa

SEQ ID NO: 114832 - DNA, 80 bp, synthetic construct
  misc_feature 1..80: note = Artificially Synthesized Probe
  source 1..80: mol_type = other DNA
gcaggaggactgcttgaggccaggaggtggaggatgcagtgagcaatgattataccactgcactccagcctgggcgacag

SEQ ID NO: 114833 - DNA, 80 bp, synthetic construct; identical to SEQ ID NO: 37628
  misc_feature 1..80: note = Artificially Synthesized Probe
  source 1..80: mol_type = other DNA

SEQ ID NO: 114834 - DNA, 80 bp, synthetic construct
  misc_feature 1..80: note = Artificially Synthesized Probe
  source 1..80: mol_type = other DNA
catgcctcagcctccagagtagctgggattacaggctcccaccaccatgcctggctagtttttgtatttttattagagac

SEQ ID NO: 114835 - DNA, 80 bp, synthetic construct
  misc_feature 1..80: note = Artificially Synthesized Probe
  source 1..80: mol_type = other DNA
aactccttccacagccagtggcttgatggtgacggtgaacttggacagagtcccacatccttcctgctgctgataaaact

SEQ ID NO: 114836 - DNA, 80 bp, synthetic construct
  misc_feature 1..80: note = Artificially Synthesized Probe
  source 1..80: mol_type = other DNA
cttgatgcccaacactggtcatgggagcaacaaaaaacaaagcacatgctgcccagtggcttccggaagttcctggtccc

SEQ ID NO: 114837 - DNA, 80 bp, synthetic construct
  misc_feature 1..80: note = Artificially Synthesized Probe
  source 1..80: mol_type = other DNA
caccaaccccaatgccaggctgcgcagtgaagaaaatgagtagacggctcatgtgcatgttttgtgtttaaataaaacca

SEQ ID NO: 114838 - DNA, 80 bp, synthetic construct; identical to SEQ ID NO: 37629
  misc_feature 1..80: note = Artificially Synthesized Probe
  source 1..80: mol_type = other DNA

SEQ ID NO: 114839 - DNA, 80 bp, synthetic construct
  misc_feature 1..80: note = Artificially Synthesized Probe
  source 1..80: mol_type = other DNA
cacacaggaatgactgtagaggaccacagggcgacttctaggcagcccccagacaggccggccctgggtagcaggaactc

SEQ ID NO: 114840 - DNA, 80 bp, synthetic construct
  misc_feature 1..80: note = Artificially Synthesized Probe
  source 1..80: mol_type = other DNA
cggtacaggaacagatctggagcttgtggcaggagttcaggtggaacatcaggcggggtacagatgccacagtgtggagg

SEQ ID NO: 114841 - DNA, 80 bp, synthetic construct
  misc_feature 1..80: note = Artificially Synthesized Probe
  source 1..80: mol_type = other DNA
gtcttgctctgtcactcaggctagggtacagtggtgcaatcttggctcactgcagcctggaccgcctgggctcaaggatc

SEQ ID NO: 114842 - DNA, 80 bp, synthetic construct
  misc_feature 1..80: note = Artificially Synthesized Probe
  source 1..80: mol_type = other DNA
ggtgcccataacacactccctcagagcctggacactcagccatcgttcattcattcaacaaacacagtctgagcatctgc

SEQ ID NO: 114843 - DNA, 80 bp, synthetic construct; identical to SEQ ID NO: 37630
  misc_feature 1..80: note = Artificially Synthesized Probe
  source 1..80: mol_type = other DNA

SEQ ID NO: 114844 - DNA, 80 bp, synthetic construct
  misc_feature 1..80: note = Artificially Synthesized Probe
  source 1..80: mol_type = other DNA
accccaaggcagtagctttaggaggtggggcctttgggaggtgattaggtcatgagggtgggatcatgccctcccttatg

SEQ ID NO: 114845 - DNA, 80 bp, synthetic construct
  misc_feature 1..80: note = Artificially Synthesized Probe
  source 1..80: mol_type = other DNA
ctgttgtttacagccacccagtctatggccttttgctgaaacagcccaaacagattaagacaggaggagaaggaggaaga

SEQ ID NO: 114846 - DNA, 80 bp, synthetic construct
  misc_feature 1..80: note = Artificially Synthesized Probe
  source 1..80: mol_type = other DNA
ttttggaagtatcaacggtcaatggaagcaaacgtcagggctggacaaccaggtcagaggtgacaaagacttacgtgata

SEQ ID NO: 114847 - DNA, 80 bp, synthetic construct
  misc_feature 1..80: note = Artificially Synthesized Probe
  source 1..80: mol_type = other DNA
agcccgtggtctggggagagacaagtgtgaggtcgaatcaggcacccagttttgggtgacagaagcctcagatgcccatc

SEQ ID NO: 114848 - DNA, 80 bp, synthetic construct; identical to SEQ ID NO: 37631
  misc_feature 1..80: note = Artificially Synthesized Probe
  source 1..80: mol_type = other DNA

SEQ ID NO: 114849 - DNA, 80 bp, synthetic construct
  misc_feature 1..80: note = Artificially Synthesized Probe
  source 1..80: mol_type = other DNA
catgagttcgagagcagcctggccaacatggcgaaaccccatctctactaaaaaataatacaaaaattagccatgcgtgg

SEQ ID NO: 114850 - DNA, 80 bp, synthetic construct
  misc_feature 1..80: note = Artificially Synthesized Probe
  source 1..80: mol_type = other DNA
aacaaacgttcatcaactggaataccattaactaccttacggtgcatcctagctctaaaacaggaggctaggcgagggtg

SEQ ID NO: 114851 - DNA, 80 bp, synthetic construct; identical to SEQ ID NO: 37632
  misc_feature 1..80: note = Artificially Synthesized Probe
  source 1..80: mol_type = other DNA

SEQ ID NO: 114852 - DNA, 80 bp, synthetic construct
  misc_feature 1..80: note = Artificially Synthesized Probe
  source 1..80: mol_type = other DNA
attataagtatgagccaccatgcccagccctcagtgatgatttctgtctgcagaacttgcaacttagtatttaggccacg

SEQ ID NO: 114853 - DNA, 80 bp, synthetic construct
  misc_feature 1..80: note = Artificially Synthesized Probe
  source 1..80: mol_type = other DNA
tcattccagggcatatttgtggggtttgtcattttaaccaagtacttaatacttgtttctctcccagcatcttgccaaat

SEQ ID NO: 114854 - DNA, 80 bp, synthetic construct
  misc_feature 1..80: note = Artificially Synthesized Probe
  source 1..80: mol_type = other DNA
cacacagaactcctcctaccacgtgcaaccttattctcggctgagcaactcataaatcgcataacaaaaacagtgattga

SEQ ID NO: 114855 - DNA, 80 bp, synthetic construct
  misc_feature 1..80: note = Artificially Synthesized Probe
  source 1..80: mol_type = other DNA
ttcgccagtgctgggtcaaagacaggcaagggcaccagggttagccatgagtgtgtgccaggggctgaatgcaaaacccg

SEQ ID NO: 114856 - DNA, 80 bp, synthetic construct; identical to SEQ ID NO: 37633
  misc_feature 1..80: note = Artificially Synthesized Probe
  source 1..80: mol_type = other DNA

SEQ ID NO: 114857 - DNA, 80 bp, synthetic construct
  misc_feature 1..80: note = Artificially Synthesized Probe
  source 1..80: mol_type = other DNA
gtcaggagtttgagaccagcctgaccaacatggagaaaccctgtctctattaaaatacaaaattagccgggcgtggtggc

SEQ ID NO: 114858 - DNA, 80 bp, synthetic construct
  misc_feature 1..80: note = Artificially Synthesized Probe
  source 1..80: mol_type = other DNA
gcactggcacatgctgtaaacggatggacagtggaccctgaaaacattatgttacgtggaagaagccagtcacaaaaggc

SEQ ID NO: 114859 - DNA, 80 bp, synthetic construct
  misc_feature 1..80: note = Artificially Synthesized Probe
  source 1..80: mol_type = other DNA
tctgtgaagatagtatactaagacccactgaaccatacacttcaaatgggtgagctttacggtatgtaaaacagatctca

SEQ ID NO: 114860 - DNA, 80 bp, synthetic construct; identical to SEQ ID NO: 37634
  misc_feature 1..80: note = Artificially Synthesized Probe
  source 1..80: mol_type = other DNA

SEQ ID NO: 114861 - DNA, 80 bp, synthetic construct
  misc_feature 1..80: note = Artificially Synthesized Probe
  source 1..80: mol_type = other DNA
acagaaagacgaaaagagaaattttcatttctgaatctcctgctgtagatggtggtccttcccaggagaatgttacttgt

SEQ ID NO: 114862 - DNA, 80 bp, synthetic construct
  misc_feature 1..80: note = Artificially Synthesized Probe
  source 1..80: mol_type = other DNA
ccatgcccagctaatttttgtatttttagtagagacggggtttcaccatgttggccaggctggtctcgaactcctgacct

SEQ ID NO: 114863 - DNA, 80 bp, synthetic construct
  misc_feature 1..80: note = Artificially Synthesized Probe
  source 1..80: mol_type = other DNA
atgcaggttcctgtaaattaccaaactgtaatcctgtaaattaccaaacagaatggctgtttgtgcagggagtatcactg

SEQ ID NO: 114864 - DNA, 80 bp, synthetic construct; identical to SEQ ID NO: 37551
  misc_feature 1..80: note = Artificially Synthesized Probe
  source 1..80: mol_type = other DNA

SEQ ID NO: 114865 - DNA, 80 bp, synthetic construct; identical to SEQ ID NO: 37635
  misc_feature 1..80: note = Artificially Synthesized Probe
  source 1..80: mol_type = other DNA

SEQ ID NO: 114866 - DNA, 80 bp, synthetic construct
  misc_feature 1..80: note = Artificially Synthesized Probe
  source 1..80: mol_type = other DNA
agggtctgactacagagagaggttggacttgctctccatcctgtttgagatggaggttataagaatctgtgcaagtgggc

SEQ ID NO: 114867 - DNA, 80 bp, synthetic construct
  misc_feature 1..80: note = Artificially Synthesized Probe
  source 1..80: mol_type = other DNA
tacaaaaattagctgggcatggtggctcgtgcctgtagtcccagctacttgggaggccgatgcaggaaaatcacttgaac

SEQ ID NO: 114868 - DNA, 80 bp, synthetic construct
  misc_feature 1..80: note = Artificially Synthesized Probe
  source 1..80: mol_type = other DNA
aaaatataaattaaaaaaaaaaaaagaaaaaccaggtgcatctactgagtgcccagccccattctaggctctgaggattc

SEQ ID NO: 114869 - DNA, 80 bp, synthetic construct
  misc_feature 1..80: note = Artificially Synthesized Probe
  source 1..80: mol_type = other DNA
tgtgtgtgtgtgtgtgtgtgtgtgtgtgtgtatgtgagagagagacagagagagagagagagagaaggtgaggtcttgct

SEQ ID NO: 114870 - DNA, 80 bp, synthetic construct; identical to SEQ ID NO: 37636
  misc_feature 1..80: note = Artificially Synthesized Probe
  source 1..80: mol_type = other DNA

SEQ ID NO: 114871 - DNA, 80 bp, synthetic construct
  misc_feature 1..80: note = Artificially Synthesized Probe
  source 1..80: mol_type = other DNA
aaaggtcttgcagcagcagaggccctggacaaggtcagatgtctggagttttaaaattccaattgctgtcggggctcagt

SEQ ID NO: 114872 - DNA, 80 bp, synthetic construct
  misc_feature 1..80: note = Artificially Synthesized Probe
  source 1..80: mol_type = other DNA
gggaggctgaggcaggagaatcacttgaacctgggaggtgaaggttgcagtgagtcaaaatcatgccattgcataccagc

SEQ ID NO: 114873 - DNA, 80 bp, synthetic construct
  misc_feature 1..80: note = Artificially Synthesized Probe
  source 1..80: mol_type = other DNA
gaaaaccaagacaaagacattcactactttaaaaaagttcataataagtctgcttcccggccgggtatggtggctcaccc

SEQ ID NO: 114874 - DNA, 80 bp, synthetic construct; identical to SEQ ID NO: 37637
  misc_feature 1..80: note = Artificially Synthesized Probe
  source 1..80: mol_type = other DNA

SEQ ID NO: 114875 - DNA, 80 bp, synthetic construct
  misc_feature 1..80: note = Artificially Synthesized Probe
  source 1..80: mol_type = other DNA
ccacgaggcctgctcctgtgggcagggcagaggccagtgtcagcaatgtggacccccagccacggcagccctccctggac

SEQ ID NO: 114876 - DNA, 80 bp, synthetic construct
  misc_feature 1..80: note = Artificially Synthesized Probe
  source 1..80: mol_type = other DNA
aaattaaataatttgagtgtacactcacttttttaaacaggtacatataaaggtagatggagggctgggcgcggcggctc

SEQ ID NO: 114877 - DNA, 80 bp, synthetic construct
  misc_feature 1..80: note = Artificially Synthesized Probe
  source 1..80: mol_type = other DNA
aggccgaggcgggcagatcatgaggtcaggagatcaagaccatcctggttaacacagtgaaaccccatctctactaaaaa

SEQ ID NO: 114878 - DNA, 80 bp, synthetic construct
  misc_feature 1..80: note = Artificially Synthesized Probe
  source 1..80: mol_type = other DNA
cgtctcaaaaacaaaacaaaataaaacaaaaacaaaaacaaaaattatctgggtgtggtggtgcacacctgtaatcccag

SEQ ID NO: 114879 - DNA, 80 bp, synthetic construct; identical to SEQ ID NO: 37638
  misc_feature 1..80: note = Artificially Synthesized Probe
  source 1..80: mol_type = other DNA

SEQ ID NO: 114880 - DNA, 80 bp, synthetic construct
  misc_feature 1..80: note = Artificially Synthesized Probe
  source 1..80: mol_type = other DNA
accacaggcgtgcaccaccactctcagctagtttttgtattttttgtagagatgaggttttgccatgttgcccagactgg

SEQ ID NO: 114881 - DNA, 80 bp, synthetic construct
  misc_feature 1..80: note = Artificially Synthesized Probe
  source 1..80: mol_type = other DNA
aggaggagtgagtgtggccgctgcactcagcgcttttcagagccatgctagagcctggggcaaagaggaaaaagaagcag

SEQ ID NO: 114882 - DNA, 80 bp, synthetic construct
  misc_feature 1..80: note = Artificially Synthesized Probe
  source 1..80: mol_type = other DNA
ggcacgtgccactacccccagctaatttttgtattgtttgtagagacggggtttcaccctgttgtccaggctggtcttga

SEQ ID NO: 114883 - DNA, 80 bp, synthetic construct; identical to SEQ ID NO: 37639
  misc_feature 1..80: note = Artificially Synthesized Probe
  source 1..80: mol_type = other DNA

SEQ ID NO: 114884 - DNA, 80 bp, synthetic construct
  misc_feature 1..80: note = Artificially Synthesized Probe
  source 1..80: mol_type = other DNA
ggaaactaaaaacaaaaataaaaacccacagtagtgtgctagatgtagtctgctgacccgttttttttttttttaatttt

SEQ ID NO: 114885 - DNA, 80 bp, synthetic construct
  misc_feature 1..80: note = Artificially Synthesized Probe
  source 1..80: mol_type = other DNA
agcttccccagaagctgagaccacaggtatgtgccaccatgcccgggtaattttttaattttttgtacagatggggtctc

SEQ ID NO: 114886 - DNA, 80 bp, synthetic construct
  misc_feature 1..80: note = Artificially Synthesized Probe
  source 1..80: mol_type = other DNA
atttagtcccattttctccattcttaaattactgtttaggttgctttacattctcttcccagccccagatctccaaatac

SEQ ID NO: 114887 - DNA, 80 bp, synthetic construct
  misc_feature 1..80: note = Artificially Synthesized Probe
  source 1..80: mol_type = other DNA
gatcaaagctcatgctatatgaggtctttgtttagctttgtttcaaaggggtcacttctaaatgtatgtgtgtgcgttta

SEQ ID NO: 114888 - DNA, 80 bp, synthetic construct; identical to SEQ ID NO: 37640
  misc_feature 1..80: note = Artificially Synthesized Probe
  source 1..80: mol_type = other DNA

SEQ ID NO: 114889 - DNA, 80 bp, synthetic construct
  misc_feature 1..80: note = Artificially Synthesized Probe
  source 1..80: mol_type = other DNA
gcatatgcctcctagtaaagtaatgctgggaaatatgacgagtcaattactctttatcattaattgtggtaaaatgtgca

SEQ ID NO: 114890 - DNA, 80 bp, synthetic construct
  misc_feature 1..80: note = Artificially Synthesized Probe
  source 1..80: mol_type = other DNA
ccccagcccctggcacccaccattctactttctgtcgctatggatctgatgactctagggacctcctaggggtggaatca

SEQ ID NO: 114891 - DNA, 80 bp, synthetic construct
  misc_feature 1..80: note = Artificially Synthesized Probe
  source 1..80: mol_type = other DNA
ggattacaggtgcctgccaccacgcccggctaattttatatttttagtagaggctgggtttcaccatgttggccaggctg

SEQ ID NO: 114892 - DNA, 80 bp, synthetic construct; identical to SEQ ID NO: 37641
  misc_feature 1..80: note = Artificially Synthesized Probe
  source 1..80: mol_type = other DNA

SEQ ID NO: 114893 - DNA, 80 bp, synthetic construct
  misc_feature 1..80: note = Artificially Synthesized Probe
  source 1..80: mol_type = other DNA
cagttccaatttttccatattcttatcaacatttttctgtctttcttcttttgggtaacagtcatcgtaatgggtgtgaa

SEQ ID NO: 114894 - DNA, 80 bp, synthetic construct
  misc_feature 1..80: note = Artificially Synthesized Probe
  source 1..80: mol_type = other DNA
aattctttatctattttgaatattaacctcttattagaaatgatttggaaacattttcttccattccttgggttgtcttt

SEQ ID NO: 114895 - DNA, 80 bp, synthetic construct
  misc_feature 1..80: note = Artificially Synthesized Probe
  source 1..80: mol_type = other DNA
attttacagttttagctcttatgtttaggtctttgatccattttgagttaatttttgtgtatgttataaaataaaagtcc

SEQ ID NO: 114896 - DNA, 80 bp, synthetic construct; identical to SEQ ID NO: 37642
  misc_feature 1..80: note = Artificially Synthesized Probe
  source 1..80: mol_type = other DNA

SEQ ID NO: 114897 - DNA, 80 bp, synthetic construct
  misc_feature 1..80: note = Artificially Synthesized Probe
  source 1..80: mol_type = other DNA
cttggcacccttgcaggagtaaaatacggccatgagtcgcttcctgacagggatacgttctcagcaatgcaacctcaggc

SEQ ID NO: 114898 - DNA, 80 bp, synthetic construct
  misc_feature 1..80: note = Artificially Synthesized Probe
  source 1..80: mol_type = other DNA
gagcagaagtgttggccacagcgcctggacgccagagggccctgagagatgatggagtggagagagctgggggctgtggg

SEQ ID NO: 114899 - DNA, 80 bp, synthetic construct
  misc_feature 1..80: note = Artificially Synthesized Probe
  source 1..80: mol_type = other DNA
gcatgtgactgcagtgaacagtgcaggcaattgtaacacagtggtaagtatttgtatctccaaacatggctaagcataga

SEQ ID NO: 114900 - DNA, 80 bp, synthetic construct
  misc_feature 1..80: note = Artificially Synthesized Probe
  source 1..80: mol_type = other DNA
aataacacacaagaatctaatcttgccggaaagggcactgtaaaagtgaattgcaagagaagctcacaggaattagatga

SEQ ID NO: 114901 - DNA, 80 bp, synthetic construct; identical to SEQ ID NO: 37643
  misc_feature 1..80: note = Artificially Synthesized Probe
  source 1..80: mol_type = other DNA

SEQ ID NO: 114902 - DNA, 80 bp, synthetic construct
  misc_feature 1..80: note = Artificially Synthesized Probe
  source 1..80: mol_type = other DNA
agacgagcttcgttgtataaaccaggcagatctgtggtctttagaagaaagtgacagaatcagttcacttcctgggtggg

SEQ ID NO: 114903 - DNA, 80 bp, synthetic construct
  misc_feature 1..80: note = Artificially Synthesized Probe
  source 1..80: mol_type = other DNA
cccactgccctgtatttaggaattcaaacagcctgggaagggactgtgctgataattggctctgctttcaaagaacactt

SEQ ID NO: 114904 - DNA, 80 bp, synthetic construct
  misc_feature 1..80: note = Artificially Synthesized Probe
  source 1..80: mol_type = other DNA
tttaccacatctagccagtgaccttgatcagttccacagccaggcattaaggcgagtccccactaactttctcacctcag

SEQ ID NO: 114905 - DNA, 80 bp, synthetic construct; identical to SEQ ID NO: 37644
  misc_feature 1..80: note = Artificially Synthesized Probe
  source 1..80: mol_type = other DNA

SEQ ID NO: 114906 - DNA, 80 bp, synthetic construct
  misc_feature 1..80: note = Artificially Synthesized Probe
  source 1..80: mol_type = other DNA
aacccgccaggaagccacagtcctcaagggacagtcacccagagctgcatgttggtgagtcagagacgagaacaaagagg

SEQ ID NO: 114907 - DNA, 80 bp, synthetic construct
  misc_feature 1..80: note = Artificially Synthesized Probe
  source 1..80: mol_type = other DNA
cacttttgttgcccaggctggacagcagtggcgtgatctcggctcactgcaacctccgcctcccgcgattctcctgcctc

SEQ ID NO: 114908 - DNA, 80 bp, synthetic construct; identical to SEQ ID NO: 37645
  misc_feature 1..80: note = Artificially Synthesized Probe
  source 1..80: mol_type = other DNA

SEQ ID NO: 114909 - DNA, 80 bp, synthetic construct
  misc_feature 1..80: note = Artificially Synthesized Probe
  source 1..80: mol_type = other DNA
catatacacatgagtactagtcacatatagccaagtaatgtgcgttagaccagggggtggcaagctttttttgtaaaatg

SEQ ID NO: 114910 - DNA, 80 bp, synthetic construct
  misc_feature 1..80: note = Artificially Synthesized Probe
  source 1..80: mol_type = other DNA
tggcaaagtccacgcggttgaggtcgctgagcatctggttgatctgggacgtgttctgcagcaccgcccgggccgcctgc

SEQ ID NO: 114911 - DNA, 80 bp, synthetic construct
  misc_feature 1..80: note = Artificially Synthesized Probe
  source 1..80: mol_type = other DNA
cagttttagtatatttgctgctgaagcaagcacaatttatggacactgaaatgtgaatttcagataattttgtatgtcct

SEQ ID NO: 114912 - DNA, 80 bp, synthetic construct
  misc_feature 1..80: note = Artificially Synthesized Probe
  source 1..80: mol_type = other DNA
ctctgtattagactcagatgtttggactcatgtctttaaaacagagcctaaaataactccaaataaataaaagggcaggt

SEQ ID NO: 114913 - DNA, 80 bp, synthetic construct
  misc_feature 1..80: note = Artificially Synthesized Probe
  source 1..80: mol_type = other DNA
caggagctggagcaatgtcacagggaagggggaggccagccctcatgtcctctggattctgaccctgtgctatggttgga

SEQ ID NO: 114914 - DNA, 80 bp, synthetic construct; identical to SEQ ID NO: 37646
  misc_feature 1..80: note = Artificially Synthesized Probe
  source 1..80: mol_type = other DNA

SEQ ID NO: 114915 - DNA, 80 bp, synthetic construct
  misc_feature 1..80: note = Artificially Synthesized Probe
  source 1..80: mol_type = other DNA
atgattcagggtctttgggcatttcacagaggaacagaaacttgtggattagagaaaattattatatgagataacatctt

SEQ ID NO: 114916 - DNA, 80 bp, synthetic construct
  misc_feature 1..80: note = Artificially Synthesized Probe
  source 1..80: mol_type = other DNA
gtagttgagaccagaggcccacaccaccacacctggctatttttgcattttgaatttttcatagagacagggtttcacca

SEQ ID NO: 114917 - DNA, 80 bp, synthetic construct
  misc_feature 1..80: note = Artificially Synthesized Probe
  source 1..80: mol_type = other DNA
ccattgcactacagcctgggtgacatagtgagactctgtctcaaaaaaaaaaaaaaaaaagaatacacatttctccaaag

SEQ ID NO: 114918 - DNA, 80 bp, synthetic construct; identical to SEQ ID NO: 37647
  misc_feature 1..80: note = Artificially Synthesized Probe
  source 1..80: mol_type = other DNA

SEQ ID NO: 114919 - DNA, 80 bp, synthetic construct
  misc_feature 1..80: note = Artificially Synthesized Probe
  source 1..80: mol_type = other DNA
ggagtggaatactattcagccataaaaaagaatgaagctctgacacaggctacaatgtggatgaactgcaaaacaatatt

SEQ ID NO: 114920 - DNA, 80 bp, synthetic construct
  misc_feature 1..80: note = Artificially Synthesized Probe
  source 1..80: mol_type = other DNA
gagtaggggactgtgatcgacttctaataggtatggagtttcttttcacggtgatggaaatgttctggaattagagagtg

SEQ ID NO: 114921 - DNA, 80 bp, synthetic construct; identical to SEQ ID NO: 37552
  misc_feature 1..80: note = Artificially Synthesized Probe
  source 1..80: mol_type = other DNA

SEQ ID NO: 114922 - DNA, 80 bp, synthetic construct
  misc_feature 1..80: note = Artificially Synthesized Probe
  source 1..80: mol_type = other DNA
gagaccagcctgggcaacatagtgagaccttgtctctacaaaaaattagccaggcatggtggcgtgcacctatagtccca

SEQ ID NO: 114923 - DNA, 80 bp, synthetic construct; identical to SEQ ID NO: 37648
  misc_feature 1..80: note = Artificially Synthesized Probe
  source 1..80: mol_type = other DNA

SEQ ID NO: 114924 - DNA, 80 bp, synthetic construct
  misc_feature 1..80: note = Artificially Synthesized Probe
  source 1..80: mol_type = other DNA
tctgtttcaggaactctgagtctaagccgcaaaacgtgtttacatgagacccatcaacagaataagccgagggactgaat

SEQ ID NO: 114925 - DNA, 80 bp, synthetic construct
  misc_feature 1..80: note = Artificially Synthesized Probe
  source 1..80: mol_type = other DNA
atccgggagtggggggaggaaaactgtggaggttggtgtctcagaaatcttaaaggatgttaaaaaagaaaaccatgatt

SEQ ID NO: 114926 - DNA, 80 bp, synthetic construct; identical to SEQ ID NO: 37649
  misc_feature 1..80: note = Artificially Synthesized Probe
  source 1..80: mol_type = other DNA

SEQ ID NO: 114927 - DNA, 80 bp, synthetic construct
  misc_feature 1..80: note = Artificially Synthesized Probe
  source 1..80: mol_type = other DNA
tgctggagaataaaggtagcagagtttacagccacgcgtccagagggaattcagaggggcggggcaggccgttgctaggc

SEQ ID NO: 114928 - DNA, 80 bp, synthetic construct
  misc_feature 1..80: note = Artificially Synthesized Probe
  source 1..80: mol_type = other DNA
gctaagctgacagggaacacgttccagaggaggggccgggggagggagaggctgccagggggtttgagcacctcctaagt

SEQ ID NO: 114929 - DNA, 80 bp, synthetic construct
  misc_feature 1..80: note = Artificially Synthesized Probe
  source 1..80: mol_type = other DNA
ttagggcaacggacacgcatgtggtaaaaaaaaggccctgtggtgtcggggaggcgaggaggtggccccggtcctgctgg

SEQ ID NO: 114930 - DNA, 80 bp, synthetic construct
  misc_feature 1..80: note = Artificially Synthesized Probe
  source 1..80: mol_type = other DNA
cttttccatccacagttggttgaatttgtggatgtggaacccatggatacagagggccaactgtatttaggataatttca

SEQ ID NO: 114931 - DNA, 80 bp, synthetic construct
  misc_feature 1..80: note = Artificially Synthesized Probe
  source 1..80: mol_type = other DNA
ggctcactgcagcctcccctcccgagttcaagcgattctcctacctcagcctgctgagtaactgggactacaggcatggg

SEQ ID NO: 114932 - DNA, 80 bp, synthetic construct
  misc_feature 1..80: note = Artificially Synthesized Probe
  source 1..80: mol_type = other DNA
aattttctgtaggtatataagtaataatttgaagttcacaactagatgccttttcgtgtaaccgtatcttgaatggaaca

SEQ ID NO: 114933 - DNA, 80 bp, synthetic construct
  misc_feature 1..80: note = Artificially Synthesized Probe
  source 1..80: mol_type = other DNA
ttgcaaacttgtatcaggttgttttccttggtctgtattaagtttgaagcaaaggggattttcacataccaagacgaagc

SEQ ID NO: 114934 - DNA, 80 bp, synthetic construct; identical to SEQ ID NO: 37776
  misc_feature 1..80: note = Artificially Synthesized Probe
  source 1..80: mol_type = other DNA

SEQ ID NO: 114935 - DNA, 80 bp, synthetic construct
  misc_feature 1..80: note = Artificially Synthesized Probe
  source 1..80: mol_type = other DNA
tttatttttttgacggagtctcactctgtcaccaggctggagtgcagtagtgtgatctcggctcactggactctgccacc

SEQ ID NO: 114936 - DNA, 80 bp, synthetic construct
  misc_feature 1..80: note = Artificially Synthesized Probe
  source 1..80: mol_type = other DNA
tggcctcccaaggtgctgggattacaggcatgagccactgtgctgggccaaatttggttcttagaaaccaaggagtgatg

SEQ ID NO: 114937 - DNA, 80 bp, synthetic construct
  misc_feature 1..80: note = Artificially Synthesized Probe
  source 1..80: mol_type = other DNA
ccaaagaaattaattacctccaggagatcgagaccatcctggctaacacggtgaaaccccgtctctactaaaaatacaaa

SEQ ID NO: 114938 - DNA, 80 bp, synthetic construct; identical to SEQ ID NO: 37766
  misc_feature 1..80: note = Artificially Synthesized Probe
  source 1..80: mol_type = other DNA

SEQ ID NO: 114939 - DNA, 80 bp, synthetic construct; identical to SEQ ID NO: 37777
  misc_feature 1..80: note = Artificially Synthesized Probe
  source 1..80: mol_type = other DNA

SEQ ID NO: 114940 - DNA, 80 bp, synthetic construct
  misc_feature 1..80: note = Artificially Synthesized Probe
  source 1..80: mol_type = other DNA
ggtatcaaagagttggtcgacgttctctcaacaacctaatagggaccaaccatggaaggccagtagtaaaggagtttgaa

SEQ ID NO: 114941 - DNA, 80 bp, synthetic construct
  misc_feature 1..80: note = Artificially Synthesized Probe
  source 1..80: mol_type = other DNA
caattttttatcatgcaaaaaagtattttgttatgacatttgtaagtggagactatatttcaaaacaagtttatacagac

SEQ ID NO: 114942 - DNA, 80 bp, synthetic construct
  misc_feature 1..80: note = Artificially Synthesized Probe
  source 1..80: mol_type = other DNA
gttaggtctgttcttctaaggaggaaagacgagatatatgagatattttttaaagaacaaactcaacatatcagcagcaa

SEQ ID NO: 114943 - DNA, 80 bp, synthetic construct; identical to SEQ ID NO: 37778
  misc_feature 1..80: note = Artificially Synthesized Probe
  source 1..80: mol_type = other DNA

SEQ ID NO: 114944 - DNA, 80 bp, synthetic construct
  misc_feature 1..80: note = Artificially Synthesized Probe
  source 1..80: mol_type = other DNA
ggtttttatttgggaaaatggagaggattctcaaaacagattcatggcttgcatgcagtgacaccctatcaagagcctgg

SEQ ID NO: 114945 - DNA, 80 bp, synthetic construct
  misc_feature 1..80: note = Artificially Synthesized Probe
  source 1..80: mol_type = other DNA
tattttaacttagcacaattaactgcagcatatttacttcatagccccttaacatgtcacttttaccaacaaagcttttt

SEQ ID NO: 114946 - DNA, 80 bp, synthetic construct; identical to SEQ ID NO: 37779
  misc_feature 1..80: note = Artificially Synthesized Probe
  source 1..80: mol_type = other DNA

SEQ ID NO: 114947 - DNA, 80 bp, synthetic construct
  misc_feature 1..80: note = Artificially Synthesized Probe
  source 1..80: mol_type = other DNA
gcctatcaatagagaaattgaaaatctgaccacacaaatgctgcagcacccagctgaaatgcatttggatgacgatctca

SEQ ID NO: 114948 - DNA, 80 bp, synthetic construct
  misc_feature 1..80: note = Artificially Synthesized Probe
  source 1..80: mol_type = other DNA
gggagatcacatgagttagagggctgtggcctggtatcaacacttcaagctgttgtacttttacttcaagttgaaacttt

SEQ ID NO: 114949 - DNA, 80 bp, synthetic construct
  misc_feature 1..80: note = Artificially Synthesized Probe
  source 1..80: mol_type = other DNA
caactacgaagataggatgcccatccagaagaacgggaagcattttattcctcacctttggaaagtaaaacaaaaaaaaa

SEQ ID NO: 114950 - DNA, 80 bp, synthetic construct
  misc_feature 1..80: note = Artificially Synthesized Probe
  source 1..80: mol_type = other DNA
acccaggctggagtgcagtggcgtgatgagacttcagtgcagccttgatctcccaggctcaagtgattctcccacctcag

SEQ ID NO: 114951 - DNA, 80 bp, synthetic construct
  misc_feature 1..80: note = Artificially Synthesized Probe
  source 1..80: mol_type = other DNA
cgagccactgtacccaaccatatgtcattctttagacacactgcttactaaatttctctttttaaaggatatactgaatt

SEQ ID NO: 114952 - DNA, 80 bp, synthetic construct; identical to SEQ ID NO: 37780
  misc_feature 1..80: note = Artificially Synthesized Probe
  source 1..80: mol_type = other DNA

SEQ ID NO: 114953 - DNA, 80 bp, synthetic construct
  misc_feature 1..80: note = Artificially Synthesized Probe
  source 1..80: mol_type = other DNA
gaaccaaaacaaacaaaaaccaaagttttaatcatttaaaaatcatgtttattgaggtacaacttacttatagtaaaacc

SEQ ID NO: 114954 - DNA, 80 bp, synthetic construct
  misc_feature 1..80: note = Artificially Synthesized Probe
  source 1..80: mol_type = other DNA
ttttcagtgtcatataagtagaatcacactgtacatagtattttgagtctgacctctgtcaactggcataatgcatttga

SEQ ID NO: 114955 - DNA, 80 bp, synthetic construct
  misc_feature 1..80: note = Artificially Synthesized Probe
  source 1..80: mol_type = other DNA
tgtacaggtttttaattaaatgttttggagatataattcatataccacataattcacctttttaaagtgcataattcact

SEQ ID NO: 114956 - DNA, 80 bp, synthetic construct; identical to SEQ ID NO: 37781
  misc_feature 1..80: note = Artificially Synthesized Probe
  source 1..80: mol_type = other DNA

SEQ ID NO: 114957 - DNA, 80 bp, synthetic construct
  misc_feature 1..80: note = Artificially Synthesized Probe
  source 1..80: mol_type = other DNA
gctggactggagaagaatctacttccaaacttatgtggtagttggaagaatttagttcctcaaggctgctaaactgatgg

SEQ ID NO: 114958 - DNA, 80 bp, synthetic construct
  misc_feature 1..80: note = Artificially Synthesized Probe
  source 1..80: mol_type = other DNA
ttatactactgatccagaacagagatatgactactgcgacattcctgagtgtgaagggcaggagtggctctagaaaatgt

SEQ ID NO: 114959 - DNA, 80 bp, synthetic construct
  misc_feature 1..80: note = Artificially Synthesized Probe
  source 1..80: mol_type = other DNA
ggctctcaaggggaagagattatacaaaggcatgaatttctggaggaggcaatgagggcaaagaactctgaaaagtctct

SEQ ID NO: 114960 - DNA, 80 bp, synthetic construct; identical to SEQ ID NO: 37782
  misc_feature 1..80: note = Artificially Synthesized Probe
  source 1..80: mol_type = other DNA

SEQ ID NO: 114961 - DNA, 80 bp, synthetic construct
  misc_feature 1..80: note = Artificially Synthesized Probe
  source 1..80: mol_type = other DNA
gtgcttagatagggtgcatttgctcttgccttggaaggctgttttctgataaggttctatatcctctgcaaatcaaatca

SEQ ID NO: 114962 - DNA, 80 bp, synthetic construct
  misc_feature 1..80: note = Artificially Synthesized Probe
  source 1..80: mol_type = other DNA
agagagttttagacctctgtgtatgtatggtgtacaagtgacaatattcagatctgtaaactgtaacccagtctgggagc

SEQ ID NO: 114963 - DNA, 80 bp, synthetic construct
  misc_feature 1..80: note = Artificially Synthesized Probe
  source 1..80: mol_type = other DNA
tatgctgagttttaatgcgtgtgggggcagggtgaattaacatttgtgatgcaaggagaagagcaatctatacttaccac

SEQ ID NO: 114964 - DNA, 80 bp, synthetic construct; identical to SEQ ID NO: 37783
  misc_feature 1..80: note = Artificially Synthesized Probe
  source 1..80: mol_type = other DNA

SEQ ID NO: 114965 - DNA, 80 bp, synthetic construct
  misc_feature 1..80: note = Artificially Synthesized Probe
  source 1..80: mol_type = other DNA
gattcaacattagccttactagattcaacatattctaatgtttcacatattatttttatttcttaatttttttttaaaga

SEQ ID NO: 114966 - DNA, 80 bp, synthetic construct
  misc_feature 1..80: note = Artificially Synthesized Probe
  source 1..80: mol_type = other DNA
tttaaaatttttgtagacatagggtctcgccatgttgcccaggctgattctgaactcctgttctcaagcaatcctcctgc

SEQ ID NO: 114967 - DNA, 80 bp, synthetic construct
  misc_feature 1..80: note = Artificially Synthesized Probe
  source 1..80: mol_type = other DNA
caaaaccagagattataaacatttgcttccaaggacatgagagaggtaaaaggtacttgtttgctctgatgggccctgtt

SEQ ID NO: 114968 - DNA, 80 bp, synthetic construct
  misc_feature 1..80: note = Artificially Synthesized Probe
  source 1..80: mol_type = other DNA
tgacagtccatatctgtaatatggtggtaagtttcctttgcatgtctttctttctggcatcttagaccttttacctagga

SEQ ID NO: 114969 - DNA, 80 bp, synthetic construct; identical to SEQ ID NO: 37784
  misc_feature 1..80: note = Artificially Synthesized Probe
  source 1..80: mol_type = other DNA

SEQ ID NO: 114970 - DNA, 80 bp, synthetic construct
  misc_feature 1..80: note = Artificially Synthesized Probe
  source 1..80: mol_type = other DNA
caacagttctgaaagatttccagccattctcttcatatattatctgtgctgtattcttgtctctccttttagaacttcga

SEQ ID NO: 114971 - DNA, 80 bp, synthetic construct
  misc_feature 1..80: note = Artificially Synthesized Probe
  source 1..80: mol_type = other DNA
ttttgctctcattgcccaggctagagtgcaatggtgcgatctcggctcaccacaacctccgcctccgggttcaagcgatt

SEQ ID NO: 114972 - DNA, 80 bp, synthetic construct
  misc_feature 1..80: note = Artificially Synthesized Probe
  source 1..80: mol_type = other DNA
gcaccatctcggctcactgcaacctctgcctcctgggttcaagcagttctcctacctcagcctcccaagtagctgggatt

SEQ ID NO: 114973 - DNA, 80 bp, synthetic construct; identical to SEQ ID NO: 37785
  misc_feature 1..80: note = Artificially Synthesized Probe
  source 1..80: mol_type = other DNA

SEQ ID NO: 114974 - DNA, 80 bp, synthetic construct
  misc_feature 1..80: note = Artificially Synthesized Probe
  source 1..80: mol_type = other DNA
aatatctgttcttggtatcccttaggttagtctcttttagaacttctaaatcaatggacccttaacttataggagccacc

SEQ ID NO: 114975 - DNA, 80 bp, synthetic construct
  misc_feature 1..80: note = Artificially Synthesized Probe
  source 1..80: mol_type = other DNA
ataaaattagttataattttgagatttctgtcttgctttttataggggcagttttactcttaggtgactagaagtagatt

SEQ ID NO: 114976 - DNA, 80 bp, synthetic construct
  misc_feature 1..80: note = Artificially Synthesized Probe
  source 1..80: mol_type = other DNA
gacaaaaatactattgtggctatagaaacctatcctatagtttgaagaactgagattactgtcagtattgagaacattcc

SEQ ID NO: 114977 - DNA, 80 bp, synthetic construct; identical to SEQ ID NO: 37786
  misc_feature 1..80: note = Artificially Synthesized Probe
  source 1..80: mol_type = other DNA

SEQ ID NO: 114978 - DNA, 80 bp, synthetic construct
  misc_feature 1..80: note = Artificially Synthesized Probe
  source 1..80: mol_type = other DNA
aactagataaggtcaatcagtcaaaagtaagatgtctggacattctgggcctcctgatgtcttagaaagcacacaatacc

SEQ ID NO: 114979 - DNA, 80 bp, synthetic construct
  misc_feature 1..80: note = Artificially Synthesized Probe
  source 1..80: mol_type = other DNA
attaaaaatatatttatatatataattgttatagataaaaaaacaacaaaatggccgggcgtggtggctcacacctgtaa

SEQ ID NO: 114980 - DNA, 80 bp, synthetic construct
  misc_feature 1..80: note = Artificially Synthesized Probe
  source 1..80: mol_type = other DNA
ttgaatctgggaggaggaggttgcagtgagccatgatcggaccactgcactccagccagggtgacagagcaacactacgt

SEQ ID NO: 114981 - DNA, 80 bp, synthetic construct
  misc_feature 1..80: note = Artificially Synthesized Probe
  source 1..80: mol_type = other DNA
gaattattcactggggaaagaaatgatgtgtgggatttaagtctctaactctcccctatttacgccaaaagattgtccat

SEQ ID NO: 114982 - DNA, 80 bp, synthetic construct; identical to SEQ ID NO: 37767
  misc_feature 1..80: note = Artificially Synthesized Probe
  source 1..80: mol_type = other DNA

SEQ ID NO: 114983 - DNA, 80 bp, synthetic construct; identical to SEQ ID NO: 37787
  misc_feature 1..80: note = Artificially Synthesized Probe
  source 1..80: mol_type = other DNA

SEQ ID NO: 114984 - DNA, 80 bp, synthetic construct
  misc_feature 1..80: note = Artificially Synthesized Probe
  source 1..80: mol_type = other DNA
gcatgccaccacgtccagctaatttttgtatttttagtagagacgagatttcaccatgttggccaggatggtctcggtat

SEQ ID NO: 114985 - DNA, 80 bp, synthetic construct
  misc_feature 1..80: note = Artificially Synthesized Probe
  source 1..80: mol_type = other DNA
aagctatttggggttggaggaaggaagaggggtgaagtagaaaaggaacaagctaataaatgttttttaaaaagtagaat

SEQ ID NO: 114986 - DNA, 80 bp, synthetic construct
  misc_feature 1..80: note = Artificially Synthesized Probe
  source 1..80: mol_type = other DNA
cttttcaaatctagtcacggcctactcatatgacagacccaattcaaatgagcaaaattgaaaagttacacatacagaca

SEQ ID NO: 114987 - DNA, 80 bp, synthetic construct; identical to SEQ ID NO: 37788
  misc_feature 1..80: note = Artificially Synthesized Probe
  source 1..80: mol_type = other DNA

SEQ ID NO: 114988 - DNA, 80 bp, synthetic construct
  misc_feature 1..80: note = Artificially Synthesized Probe
  source 1..80: mol_type = other DNA
cccaaatttcccccttccctccatatggcaataaaggaaggaattcagttaactacagcagctgcatgtgaagcatttca

SEQ ID NO: 114989 - DNA, 80 bp, synthetic construct
  misc_feature 1..80: note = Artificially Synthesized Probe
  source 1..80: mol_type = other DNA
tgggctatatgactccactgtcctaagctatttggggttggaaggaagaggggtgaagtagaaaggcaacaagctaatac

SEQ ID NO: 114990 - DNA, 80 bp, synthetic construct; identical to SEQ ID NO: 37789
  misc_feature 1..80: note = Artificially Synthesized Probe
  source 1..80: mol_type = other DNA

SEQ ID NO: 114991 - DNA, 80 bp, synthetic construct
  misc_feature 1..80: note = Artificially Synthesized Probe
  source 1..80: mol_type = other DNA
ctgaagtcccaggcagttaagacgtccacagtgaacggcacttaatcaaaagttcagacacagtgaaaattcaggaatat

SEQ ID NO: 114992 - DNA, 80 bp, synthetic construct
  misc_feature 1..80: note = Artificially Synthesized Probe
  source 1..80: mol_type = other DNA
tttcattttaggttaggcaagaaagttagcgaactttgtcctcaaacctaggaccatttaaaaaagtgacaataaagaag

SEQ ID NO: 114993 - DNA, 80 bp, synthetic construct
  misc_feature 1..80: note = Artificially Synthesized Probe
  source 1..80: mol_type = other DNA
ctagtaaaataaaaaaaattagccgggcatggtggtgcgtgcctgcagtctcagctactcaggaggctgaggcaggggaa

SEQ ID NO: 114994 - DNA, 80 bp, synthetic construct
  misc_feature 1..80: note = Artificially Synthesized Probe
  source 1..80: mol_type = other DNA
tttgctgaagctaagcaaggaaccagtttttaaatcagcaatccgttattttaatggactgagcaatttaatagtgcacc

SEQ ID NO: 114995 - DNA, 80 bp, synthetic construct; identical to SEQ ID NO: 37790
  misc_feature 1..80: note = Artificially Synthesized Probe
  source 1..80: mol_type = other DNA

SEQ ID NO: 114996 - DNA, 80 bp, synthetic construct
  misc_feature 1..80: note = Artificially Synthesized Probe
  source 1..80: mol_type = other DNA
ttaccagcttcaatttttctcttaaccagtgatgagattaaataatatacgtagagcccagggcctgggtcataagaact

SEQ ID NO: 114997 - DNA, 80 bp, synthetic construct
  misc_feature 1..80: note = Artificially Synthesized Probe
  source 1..80: mol_type = other DNA
tttaaacaggaaaaacttcccatgccactttgccatctccacctgaaaactgtttagtagttcagtactataaatatcag

SEQ ID NO: 114998 - DNA, 80 bp, synthetic construct
  misc_feature 1..80: note = Artificially Synthesized Probe
  source 1..80: mol_type = other DNA
agttaaaaaaaaaaatcaatgaaactacgagttttaggccaaatctgagaaaagaccaaagatgactatgtttgggactg

SEQ ID NO: 114999 - DNA, 80 bp, synthetic construct
  misc_feature 1..80: note = Artificially Synthesized Probe
  source 1..80: mol_type = other DNA
tcttaggaaaagtaggaattaagaaataatctttatgtaataggtataaaagaagtattttggctggatgcggtggctca

SEQ ID NO: 115000 - DNA, 80 bp, synthetic construct
  misc_feature 1..80: note = Artificially Synthesized Probe
  source 1..80: mol_type = other DNA
ggcatgttggcgggcacctgtagtcccagctacttgggaggctgaggcaggagaatggcgtgaacctgggaggtggagct

SEQ ID NO: 115001 - DNA, 80 bp, synthetic construct; identical to SEQ ID NO: 37791
  misc_feature 1..80: note = Artificially Synthesized Probe
  source 1..80: mol_type = other DNA

SEQ ID NO: 115002 - DNA, 80 bp, synthetic construct
  misc_feature 1..80: note = Artificially Synthesized Probe
  source 1..80: mol_type = other DNA
accataatggaggctctgcaacatgttgttccaagaattaattttcaaaatcatacattacagatgaagattctaaataa

SEQ ID NO: 115003 - DNA, 80 bp, synthetic construct
  misc_feature 1..80: note = Artificially Synthesized Probe
  source 1..80: mol_type = other DNA
gccctatgagtcccagttctgaaatttgtcagaattgtgtttatagacagttttattacacatcttcttcccatctatta

SEQ ID NO: 115004 - DNA, 80 bp, synthetic construct
  misc_feature 1..80: note = Artificially Synthesized Probe
  source 1..80: mol_type = other DNA
gcagaaatcacaaagtcaaattggcttctggagtctgctgctctatcatgatgcctccatgtcaccactattaactttgc

SEQ ID NO: 115005 - DNA, 80 bp, synthetic construct; identical to SEQ ID NO: 37792
  misc_feature 1..80: note = Artificially Synthesized Probe
  source 1..80: mol_type = other DNA

SEQ ID NO: 115006 - DNA, 80 bp, synthetic construct
  misc_feature 1..80: note = Artificially Synthesized Probe
  source 1..80: mol_type = other DNA
tccacctgtttgaatcatcgggctcctttatttgtacaccatgttatcggtatttgcccttaagcaccaccaatgcatca

SEQ ID NO: 115007 - DNA, 80 bp, synthetic construct
  misc_feature 1..80: note = Artificially Synthesized Probe
  source 1..80: mol_type = other DNA
cttgattggattaaaggatgcaaagtattaatcctgagtgttgtctgtgagggtgttgccaaaggagattaacatttgag

SEQ ID NO: 115008 - DNA, 80 bp, synthetic construct
  misc_feature 1..80: note = Artificially Synthesized Probe
  source 1..80: mol_type = other DNA
atcagactcctagttcttcagttttggaacttggactggctctcgttgctcctcagtctgcagatggcctagtgatcgtg

SEQ ID NO: 115009 - DNA, 80 bp, synthetic construct
  misc_feature 1..80: note = Artificially Synthesized Probe
  source 1..80: mol_type = other DNA
tagtaattaaataagacagtgaaattaaagaagaagaacatatttagacagagtaacagaccaagtttagtttcgggaga

SEQ ID NO: 115010 - DNA, 80 bp, synthetic construct; identical to SEQ ID NO: 37793
  misc_feature 1..80: note = Artificially Synthesized Probe
  source 1..80: mol_type = other DNA

SEQ ID NO: 115011 - DNA, 80 bp, synthetic construct
  misc_feature 1..80: note = Artificially Synthesized Probe
  source 1..80: mol_type = other DNA
taaggtgggtggatcacgaggtcagcaagttcaagaccagcctggccaagatggtgaaaccctatctctactaaaaatgc

SEQ ID NO: 115012 - DNA, 80 bp, synthetic construct
  misc_feature 1..80: note = Artificially Synthesized Probe
  source 1..80: mol_type = other DNA
aaaacaaacaaaaaaaaacttagtcatcaaacttttaactacgttagtcattttaatagcagctataaattaattgctac

SEQ ID NO: 115013 - DNA, 80 bp, synthetic construct; identical to SEQ ID NO: 37794
  misc_feature 1..80: note = Artificially Synthesized Probe
  source 1..80: mol_type = other DNA

SEQ ID NO: 115014 - DNA, 80 bp, synthetic construct
  misc_feature 1..80: note = Artificially Synthesized Probe
  source 1..80: mol_type = other DNA
ggagtgcagtggcacgatcttggctcacagcaacctctgcctcccaggctcaagccatcctcccacctcagccccacaag

SEQ ID NO: 115015 - DNA, 80 bp, synthetic construct
  misc_feature 1..80: note = Artificially Synthesized Probe
  source 1..80: mol_type = other DNA
accacgcctggtctaaactgtaaagtttaccaggccctttgacatgtattggtttattgactcccaaaaatctgaagttc

SEQ ID NO: 115016 - DNA, 80 bp, synthetic construct
  misc_feature 1..80: note = Artificially Synthesized Probe
  source 1..80: mol_type = other DNA
tgactgcttattccactgctgattgctagattacaatctcttgtgcgacctttgccctggctgattacttcctttgttga

SEQ ID NO: 115017 - DNA, 80 bp, synthetic construct
  misc_feature 1..80: note = Artificially Synthesized Probe
  source 1..80: mol_type = other DNA
gagaagcaccgtcacttcaggtgaatattgttctccgtgaggccatgagcataaacaaaaactccagactaaaaccctga

SEQ ID NO: 115018 - DNA, 80 bp, synthetic construct; identical to SEQ ID NO: 37795
  misc_feature 1..80: note = Artificially Synthesized Probe
  source 1..80: mol_type = other DNA

SEQ ID NO: 115019 - DNA, 80 bp, synthetic construct
  misc_feature 1..80: note = Artificially Synthesized Probe
  source 1..80: mol_type = other DNA
aggcgcagtggctcatgcctgtaatcccagcactttgggaggccgaggcgggtggatcacgaggtcaggagaccgagact

SEQ ID NO: 115020 - DNA, 80 bp, synthetic construct
  misc_feature 1..80: note = Artificially Synthesized Probe
  source 1..80: mol_type = other DNA
catatactttgatgcagagatgtacgataatcatgaattagaattagcatcctgatttagtgttctaccaaaaaccctaa

SEQ ID NO: 115021 - DNA, 80 bp, synthetic construct
  misc_feature 1..80: note = Artificially Synthesized Probe
  source 1..80: mol_type = other DNA
ccatgcatttgcagcaactgaaaaaaatcttaaaacataagcaagtattagtatacatatgaaactaatccaaagccaac

SEQ ID NO: 115022 - DNA, 80 bp, synthetic construct; identical to SEQ ID NO: 37796
  misc_feature 1..80: note = Artificially Synthesized Probe
  source 1..80: mol_type = other DNA

SEQ ID NO: 115023 - DNA, 80 bp, synthetic construct
  misc_feature 1..80: note = Artificially Synthesized Probe
  source 1..80: mol_type = other DNA
caaggtggctagtccaaatcaagacatgctaacagtaagtgtaaacacacacactggattttgaagacttggtgaaaaac

SEQ ID NO: 115024 - DNA, 80 bp, synthetic construct
  misc_feature 1..80: note = Artificially Synthesized Probe
  source 1..80: mol_type = other DNA
ttatttatgtatttatttgagatgcggtcttcctttgtcacccagagctggagtgcagtgatgtgatcatagttcactga

SEQ ID NO: 115025 - DNA, 80 bp, synthetic construct
  misc_feature 1..80: note = Artificially Synthesized Probe
  source 1..80: mol_type = other DNA
ccttttacaatgttaaatttgtccctctccttcattataaacaaaaacttagtatcatttcctagctaggagaaataaca

SEQ ID NO: 115026 - DNA, 80 bp, synthetic construct
  misc_feature 1..80: note = Artificially Synthesized Probe
  source 1..80: mol_type = other DNA
taaggctctatgttctacagtagtgtataggcacattcgttcttaggtcagggattcctaacctagagctcacagaaact

SEQ ID NO: 115027 - DNA, 80 bp, synthetic construct; identical to SEQ ID NO: 37797
  misc_feature 1..80: note = Artificially Synthesized Probe
  source 1..80: mol_type = other DNA

SEQ ID NO: 115028 - DNA, 80 bp, synthetic construct
  misc_feature 1..80: note = Artificially Synthesized Probe
  source 1..80: mol_type = other DNA
ggagagtttataaacaacagaaatttatttctcaccgttctaggggctgtgatgtccaagaccaaggcactagcagtgtc

SEQ ID NO: 115029 - DNA, 80 bp, synthetic construct
  misc_feature 1..80: note = Artificially Synthesized Probe
  source 1..80: mol_type = other DNA
atactgtatacatgccgttgccactacatgtgaatactggcagacgttagtggctaaagataaacattagataaaacata

SEQ ID NO: 115030 - DNA, 80 bp, synthetic construct
  misc_feature 1..80: note = Artificially Synthesized Probe
  source 1..80: mol_type = other DNA
gtacttcatttcatacagccacagttattaatactttgctaagggctacccagctgctaaaaactgctgttatctcatac

SEQ ID NO: 115031 - DNA, 80 bp, synthetic construct
  misc_feature 1..80: note = Artificially Synthesized Probe
  source 1..80: mol_type = other DNA
aacataaaaagccagaatccctcaatttataccaccaatctgactgtcttacatattcatttatccctgtagtttcattc

SEQ ID NO: 115032 - DNA, 80 bp, synthetic construct; identical to SEQ ID NO: 37798
  misc_feature 1..80: note = Artificially Synthesized Probe
  source 1..80: mol_type = other DNA

SEQ ID NO: 115033 - DNA, 80 bp, synthetic construct
  misc_feature 1..80: note = Artificially Synthesized Probe
  source 1..80: mol_type = other DNA
ttctgagtgacaaaagaaacagaacaaatgaaaatgaacactttaaaaaaagactcacgttaatgcgcatgattcaagca

SEQ ID NO: 115034 - DNA, 80 bp, synthetic construct
  misc_feature 1..80: note = Artificially Synthesized Probe
  source 1..80: mol_type = other DNA
taagggagaaaaaaattgctcaaatattttaggggtgttcacaaagcatcgttcatatcccaacattagtatcccacaaa

SEQ ID NO: 115035 - DNA, 80 bp, synthetic construct; identical to SEQ ID NO: 37799
  misc_feature 1..80: note = Artificially Synthesized Probe
  source 1..80: mol_type = other DNA

SEQ ID NO: 115036 - DNA, 80 bp, synthetic construct
  misc_feature 1..80: note = Artificially Synthesized Probe
  source 1..80: mol_type = other DNA
tttgttgttgtttcagatgtgctagacacttcaacttctgaagctgcatctgctacatcatcaccctgaataacatctgt

SEQ ID NO: 115037 - DNA, 80 bp, synthetic construct
  misc_feature 1..80: note = Artificially Synthesized Probe
  source 1..80: mol_type = other DNA
tgtagtttaaaacgaacagctaaatgctctacttttctttctccatctgcaaaatcacatgcagtccacacccatactct

SEQ ID NO: 115038 - DNA, 80 bp, synthetic construct
  misc_feature 1..80: note = Artificially Synthesized Probe
  source 1..80: mol_type = other DNA
acatctttatcatatctgtagaattctgccctgtgactaaaaacaacttgttcattttcctcaccactggatacttcaac

SEQ ID NO: 115039 - DNA, 80 bp, synthetic construct; identical to SEQ ID NO: 37800
  misc_feature 1..80: note = Artificially Synthesized Probe
  source 1..80: mol_type = other DNA

SEQ ID NO: 115040 - DNA, 80 bp, synthetic construct; identical to SEQ ID NO: 37768
  misc_feature 1..80: note = Artificially Synthesized Probe
  source 1..80: mol_type = other DNA

SEQ ID NO: 115041 - DNA, 80 bp, synthetic construct
  misc_feature 1..80: note = Artificially Synthesized Probe
  source 1..80: mol_type = other DNA
tttgtcaaaaatgttttgaaatctttcagtccactcttcatttcttcagctctctgtattaacttggcagctctgccagt

SEQ ID NO: 115042 - DNA, 80 bp, synthetic construct
  misc_feature 1..80: note = Artificially Synthesized Probe
  source 1..80: mol_type = other DNA
atccatgctctatctgatccagagaggggcttcaggttcattgtagtcgttatccaatgattagcacacacttttagtac

SEQ ID NO: 115043 - DNA, 80 bp, synthetic construct
  misc_feature 1..80: note = Artificially Synthesized Probe
  source 1..80: mol_type = other DNA
acaagttctactttttcaggcatttgaactactggttcaaaatggatgtcatcgctgtcctcagtcttataggcatcatc

SEQ ID NO: 115044 - DNA, 80 bp, synthetic construct
  misc_feature 1..80: note = Artificially Synthesized Probe
  source 1..80: mol_type = other DNA
gtaaaagtgctacttgtttggccaaaaatcacaccacggcccttcttccggccactaatatcctgagcctgtaagccagt

SEQ ID NO: 115045 - DNA, 80 bp, synthetic construct; identical to SEQ ID NO: 37801
  misc_feature 1..80: note = Artificially Synthesized Probe
  source 1..80: mol_type = other DNA

SEQ ID NO: 115046 - DNA, 80 bp, synthetic construct
  misc_feature 1..80: note = Artificially Synthesized Probe
  source 1..80: mol_type = other DNA
attgagaggttaagaaacttgcctgtggtcaaaataagcagaagagcaagggtctaaatgcaccccaacactctgtcctc

SEQ ID NO: 115047 - DNA, 80 bp, synthetic construct
  misc_feature 1..80: note = Artificially Synthesized Probe
  source 1..80: mol_type = other DNA
actcccatttttaaaatattctaaatattcacacttattaacacaaaaataaggtgactaagaaggataatttctgtatt

SEQ ID NO: 115048 - DNA, 80 bp, synthetic construct
  misc_feature 1..80: note = Artificially Synthesized Probe
  source 1..80: mol_type = other DNA
tgctggtctgagaagatactgggaattatatgctggtgactgactataatatactgaagggccagtagttgcaactaaaa

SEQ ID NO: 115049 - DNA, 80 bp, synthetic construct; identical to SEQ ID NO: 37802
  misc_feature 1..80: note = Artificially Synthesized Probe
  source 1..80: mol_type = other DNA

SEQ ID NO: 115050 - DNA, 80 bp, synthetic construct
  misc_feature 1..80: note = Artificially Synthesized Probe
  source 1..80: mol_type = other DNA
aaagactaggttgtattttgtaaactaaagctattactgagaatgttcagctcaaaaatcacctgacaaattcatggaaa

SEQ ID NO: 115051 - DNA, 80 bp, synthetic construct
  misc_feature 1..80: note = Artificially Synthesized Probe
  source 1..80: mol_type = other DNA
gccattctcctgcctcagtctcccaagtagctgggactacaggcgcctgccaccatgccctgctaattttttgtattttt

SEQ ID NO: 115052 - DNA, 80 bp, synthetic construct
  misc_feature 1..80: note = Artificially Synthesized Probe
  source 1..80: mol_type = other DNA
tcatttgcttgaactgttttatgatagttttaccagaaaacaaccaaaagatctttcatgcctgtacatggaagaagaaa

SEQ ID NO: 115053 - DNA, 80 bp, synthetic construct
  misc_feature 1..80: note = Artificially Synthesized Probe
  source 1..80: mol_type = other DNA
cacagaacaacctgacagaaatggcccaagaatcttaaagtcttgcaagatgtctgtctgcatgaaagcaaaaagaaaaa

SEQ ID NO: 115054 - DNA, 80 bp, synthetic construct; identical to SEQ ID NO: 37803
  misc_feature 1..80: note = Artificially Synthesized Probe
  source 1..80: mol_type = other DNA

SEQ ID NO: 115055 - DNA, 80 bp, synthetic construct
  misc_feature 1..80: note = Artificially Synthesized Probe
  source 1..80: mol_type = other DNA
aaacaactggaaggtacccacgttgaagatggcaaaactaccaactgccatttgcatgaattgttgagcatgactagtat

SEQ ID NO: 115056 - DNA, 80 bp, synthetic construct
  misc_feature 1..80: note = Artificially Synthesized Probe
  source 1..80: mol_type = other DNA
agtgtcctagaatttgtaatggcataaaccagaaacaacataaataaaggaacagaatttacagtacttccatgtgatgg

SEQ ID NO: 115057 - DNA, 80 bp, synthetic construct
  misc_feature 1..80: note = Artificially Synthesized Probe
  source 1..80: mol_type = other DNA
aatgctctcaaatataagaaatgttaataaggtggttagtttttagttttcttcaccctgttcagtacttctgagtatct

SEQ ID NO: 115058 - DNA, 80 bp, synthetic construct; identical to SEQ ID NO: 37804
  misc_feature 1..80: note = Artificially Synthesized Probe
  source 1..80: mol_type = other DNA

SEQ ID NO: 115059 - DNA, 80 bp, synthetic construct
  misc_feature 1..80: note = Artificially Synthesized Probe
  source 1..80: mol_type = other DNA
caaataactgactgcacacatcactaaaaaagccccaggaaaggctagccggtttgtttatcctcttacaaggacctata

SEQ ID NO: 115060 - DNA, 80 bp, synthetic construct
  misc_feature 1..80: note = Artificially Synthesized Probe
  source 1..80: mol_type = other DNA
ctatatgaaccatcacacaaatgtgctcatctaaaccagattttattctaaatctttcctgggctaaaaagagagagaga

SEQ ID NO: 115061 - DNA, 80 bp, synthetic construct; identical to SEQ ID NO: 37805
  misc_feature 1..80: note = Artificially Synthesized Probe
  source 1..80: mol_type = other DNA

SEQ ID NO: 115062 - DNA, 80 bp, synthetic construct
  misc_feature 1..80: note = Artificially Synthesized Probe
  source 1..80: mol_type = other DNA
tccatgttccaccttttgtaattgtctcacagttcttgactcttgttctgttttttctttttcattcttttttctcattg

SEQ ID NO: 115063 - DNA, 80 bp, synthetic construct
  misc_feature 1..80: note = Artificially Synthesized Probe
  source 1..80: mol_type = other DNA
ctcatagtaattatgtaaggcaagtattatctccacatttcagacaggttaacttacacagctattatagtaagtgatag

SEQ ID NO: 115064 - DNA, 80 bp, synthetic construct
  misc_feature 1..80: note = Artificially Synthesized Probe
  source 1..80: mol_type = other DNA
ttcttagtgcataactctattcaataacatttttcaatttaaggaataatctaatctcagctcatctgaggtgtggatta

SEQ ID NO: 115065 - DNA, 80 bp, synthetic construct
  misc_feature 1..80: note = Artificially Synthesized Probe
  source 1..80: mol_type = other DNA
acgttatctacttaaaagagggaagtaaagtagttttactaaaatatgcgattatccacttgccagctcacctgttagtg

SEQ ID NO: 115066 - DNA, 80 bp, synthetic construct
  misc_feature 1..80: note = Artificially Synthesized Probe
  source 1..80: mol_type = other DNA
tcatttaattatatcatgccagaaacagtgctggggaaacttactcttttaaatttaaataactgattttttcttttttt

SEQ ID NO: 115067 - DNA, 80 bp, synthetic construct; identical to SEQ ID NO: 37806
  misc_feature 1..80: note = Artificially Synthesized Probe
  source 1..80: mol_type = other DNA

SEQ ID NO: 115068 - DNA, 80 bp, synthetic construct
  misc_feature 1..80: note = Artificially Synthesized Probe
  source 1..80: mol_type = other DNA
atacaaaacttaattcattaactctctcacctaaacaaataacctcctaaatgatcacaccttcatttccattctacact

SEQ ID NO: 115069 - DNA, 80 bp, synthetic construct
  misc_feature 1..80: note = Artificially Synthesized Probe
  source 1..80: mol_type = other DNA
tgacattccaaatcacctccccaaattagcttttcacttaaccctgtgttcaaacaaaatacaactaattctcaaggtga

SEQ ID NO: 115070 - DNA, 80 bp, synthetic construct
  misc_feature 1..80: note = Artificially Synthesized Probe
  source 1..80: mol_type = other DNA
gcagggaataacagctggaatttgaaccacatctgactccaaaaatgttttcttaacacaactctgctgccttgacaaga

SEQ ID NO: 115071 - DNA, 80 bp, synthetic construct; identical to SEQ ID NO: 37807
  misc_feature 1..80: note = Artificially Synthesized Probe
  source 1..80: mol_type = other DNA

SEQ ID NO: 115072 - DNA, 80 bp, synthetic construct
  misc_feature 1..80: note = Artificially Synthesized Probe
  source 1..80: mol_type = other DNA
ctacacatacacatccaagaaataagaaactagtggaatcacctagaaaactttatggtcactgctggtatctgcaccag

SEQ ID NO: 115073 - DNA, 80 bp, synthetic construct
  misc_feature 1..80: note = Artificially Synthesized Probe
  source 1..80: mol_type = other DNA
atctctttgcttacattacccatctgttcttgcatgttatgccatttttacattagagcccctagcatgttaatcttagt

SEQ ID NO: 115074 - DNA, 80 bp, synthetic construct
  misc_feature 1..80: note = Artificially Synthesized Probe
  source 1..80: mol_type = other DNA
accaagcttttcaagctcatggaccagtgctccactatacttccacagaatacaatgttgggagcctgaaacctgtatgt

SEQ ID NO: 115075 - DNA, 80 bp, synthetic construct; identical to SEQ ID NO: 37808
  misc_feature 1..80: note = Artificially Synthesized Probe
  source 1..80: mol_type = other DNA

SEQ ID NO: 115076 - DNA, 80 bp, synthetic construct
  misc_feature 1..80: note = Artificially Synthesized Probe
  source 1..80: mol_type = other DNA
aatccacagctaatctgggaatgaactcatagaccagagtatgattagtacattgtagcagttcaatcactcgggaacct

SEQ ID NO: 115077 - DNA, 80 bp, synthetic construct
  misc_feature 1..80: note = Artificially Synthesized Probe
  source 1..80: mol_type = other DNA
ggccaaggcgggcagatcgcctgaggtcagaagttcaaaaccagcttggccaacatggtgaaactctgtgtctactaaaa

SEQ ID NO: 115078 - DNA, 80 bp, synthetic construct
  misc_feature 1..80: note = Artificially Synthesized Probe
  source 1..80: mol_type = other DNA
aaataaaataaaataaaatatggaaaagggtcaagaccaaggtatgtaggctgggcacagtggctcacacctgcaatccc

SEQ ID NO: 115079 - DNA, 80 bp, synthetic construct; identical to SEQ ID NO: 37809
  misc_feature 1..80: note = Artificially Synthesized Probe
  source 1..80: mol_type = other DNA

SEQ ID NO: 115080 - DNA, 80 bp, synthetic construct
  misc_feature 1..80: note = Artificially Synthesized Probe
  source 1..80: mol_type = other DNA
cttaatggcctttacttcttggcgaatcattttcagtaaagaattctgatcttctgcccatcgaggtggtgttttgggag

SEQ ID NO: 115081 - DNA, 80 bp, synthetic construct
  misc_feature 1..80: note = Artificially Synthesized Probe
  source 1..80: mol_type = other DNA
cgcatttcgcaaagaaccatttttatagagaggacctccttcactatagttttcgagttcctgcatgactgacttaagca

SEQ ID NO: 115082 - DNA, 80 bp, synthetic construct
  misc_feature 1..80: note = Artificially Synthesized Probe
  source 1..80: mol_type = other DNA
atttttgtcactttaataagcactttacactttaaataataatacacgtgaaagtgttttttaattatcttttttctttg

SEQ ID NO: 115083 - DNA, 80 bp, synthetic construct; identical to SEQ ID NO: 37810
  misc_feature 1..80: note = Artificially Synthesized Probe
  source 1..80: mol_type = other DNA

SEQ ID NO: 115084 - DNA, 80 bp, synthetic construct; identical to SEQ ID NO: 37769
  misc_feature 1..80: note = Artificially Synthesized Probe
  source 1..80: mol_type = other DNA

SEQ ID NO: 115085 - DNA, 80 bp, synthetic construct
  misc_feature 1..80: note = Artificially Synthesized Probe
  source 1..80: mol_type = other DNA
agaaatgctcttaagttgtcagcaacaactttcaatttcagcaaagttcattaagaattagtcctgaggttataatattt

SEQ ID NO: 115086 - DNA, 80 bp, synthetic construct
  misc_feature 1..80: note = Artificially Synthesized Probe
  source 1..80: mol_type = other DNA
acacatcccttctgtgcattaataacaacatattactgagtattttttgaaattaccaaaatataagaccaacgcaaaaa

SEQ ID NO: 115087 - DNA, 80 bp, synthetic construct
  misc_feature 1..80: note = Artificially Synthesized Probe
  source 1..80: mol_type = other DNA
ctcagataatttttgcattcttcttgttcttcaggagaaagggcatcatttgcaatgtcttctgccttcctgtgaaaaat

SEQ ID NO: 115088 - DNA, 80 bp, synthetic construct
  misc_feature 1..80: note = Artificially Synthesized Probe
  source 1..80: mol_type = other DNA
gcttgagcctgggaagcagaggttgcagtgagccaagattgtgccactgcactctagcctggccagcagagaaaccccat

SEQ ID NO: 115089 - DNA, 80 bp, synthetic construct; identical to SEQ ID NO: 37811
  misc_feature 1..80: note = Artificially Synthesized Probe
  source 1..80: mol_type = other DNA

SEQ ID NO: 115090 - DNA, 80 bp, synthetic construct
  misc_feature 1..80: note = Artificially Synthesized Probe
  source 1..80: mol_type = other DNA
accgttaaataacaaggcaattaatttaagcagtgtatagctccatgtctttgtttataaactggaaattcccatctcca

SEQ ID NO: 115091 - DNA, 80 bp, synthetic construct
  misc_feature 1..80: note = Artificially Synthesized Probe
  source 1..80: mol_type = other DNA
ttcttccaataatgaacacttctccctatgtattctcgttgatcataaaaagaattaagaccgctgccctaaaaaagaaa

SEQ ID NO: 115092 - DNA, 80 bp, synthetic construct
  misc_feature 1..80: note = Artificially Synthesized Probe
  source 1..80: mol_type = other DNA
tgaactcactgcaacctctgccgtgcaggttcaagcaattctcctgcctcagcttcccaagtagctgggattacaggcac

SEQ ID NO: 115093 - DNA, 80 bp, synthetic construct; identical to SEQ ID NO: 37812
  misc_feature 1..80: note = Artificially Synthesized Probe
  source 1..80: mol_type = other DNA

SEQ ID NO: 115094 - DNA, 80 bp, synthetic construct
  misc_feature 1..80: note = Artificially Synthesized Probe
  source 1..80: mol_type = other DNA
aattttcaggctgaataattatcagaacttaattattaaggaataacagtaacagctcagctaatatgtaacattcactg

SEQ ID NO: 115095 - DNA, 80 bp, synthetic construct
  misc_feature 1..80: note = Artificially Synthesized Probe
  source 1..80: mol_type = other DNA
tttaaaatgcttatactttaaaactcaccattttctgaaggcattttgcccaatgtacaagcagagcaggttgaaggcca

SEQ ID NO: 115096 - DNA, 80 bp, synthetic construct
  misc_feature 1..80: note = Artificially Synthesized Probe
  source 1..80: mol_type = other DNA
ctgacaaagtaccaagtgtcaaggatcatggattgaatcctgaaacagaggaaggacactgaaggaaagactgggaaaac

SEQ ID NO: 115097 - DNA, 80 bp, synthetic construct
  misc_feature 1..80: note = Artificially Synthesized Probe
  source 1..80: mol_type = other DNA
agcgcttacatacatatatgttaatgggtcacatgacaaattaaatcttcacacgaggattaaatccccggtaaaaccta

SEQ ID NO: 115098 - DNA, 80 bp, synthetic construct; identical to SEQ ID NO: 37813
  misc_feature 1..80: note = Artificially Synthesized Probe
  source 1..80: mol_type = other DNA

SEQ ID NO: 115099 - DNA, 80 bp, synthetic construct
  misc_feature 1..80: note = Artificially Synthesized Probe
  source 1..80: mol_type = other DNA
gattcaggtgcatttgtttcaagccttgaggtttcctggggcaaatgatggaaaagctgttttagccattttcggattcc

SEQ ID NO: 115100 - DNA, 80 bp, synthetic construct
  misc_feature 1..80: note = Artificially Synthesized Probe
  source 1..80: mol_type = other DNA
attatatatatcttaattatataactgcttttctatatcaaagctggagggaattctatgttaggcaaaatctcatgttc

SEQ ID NO: 115101 - DNA, 80 bp, synthetic construct; identical to SEQ ID NO: 37814
  misc_feature 1..80: note = Artificially Synthesized Probe
  source 1..80: mol_type = other DNA

SEQ ID NO: 115102 - DNA, 80 bp, synthetic construct
  misc_feature 1..80: note = Artificially Synthesized Probe
  source 1..80: mol_type = other DNA
ggtgtcacgtgcctatagtcccagctacatgggaggctgaggcaagacaattgcttgaacctggcaggcggaagttgcag

SEQ ID NO: 115103 - DNA, 80 bp, synthetic construct
  misc_feature 1..80: note = Artificially Synthesized Probe
  source 1..80: mol_type = other DNA
catgtcctttgtctcagtaattctgtttataggtatctctatggaaataacttgccatgaagacactttttgttgaagtt

SEQ ID NO: 115104 - DNA, 80 bp, synthetic construct
  misc_feature 1..80: note = Artificially Synthesized Probe
  source 1..80: mol_type = other DNA
tgaaggaagcaagataaatcatacataaccatttagatgaaaaatatggccagatgcagtggctcatgcctataattcca

SEQ ID NO: 115105 - DNA, 80 bp, synthetic construct
  misc_feature 1..80: note = Artificially Synthesized Probe
  source 1..80: mol_type = other DNA
tttttgtatttttagtagagacggggtttcaccatgttggccaggatggtcttgaactcctgatctcaggtgatctgccc

SEQ ID NO: 115106 - DNA, 80 bp, synthetic construct; identical to SEQ ID NO: 37815
  misc_feature 1..80: note = Artificially Synthesized Probe
  source 1..80: mol_type = other DNA

SEQ ID NO: 115107 - DNA, 80 bp, synthetic construct
  misc_feature 1..80: note = Artificially Synthesized Probe
  source 1..80: mol_type = other DNA
tgtaaggtcactgttattccttgtagttaacatatatttggcaccacaggattcattctggaattctctttggcttattt

SEQ ID NO: 115108 - DNA, 80 bp, synthetic construct
  misc_feature 1..80: note = Artificially Synthesized Probe
  source 1..80: mol_type = other DNA
agtttgagaccagcctgaccaacatgatgaaaccctgtctctactaaaactacaaaaaattagccgggcgtggtggtggg

SEQ ID NO: 115109 - DNA, 80 bp, synthetic construct
  misc_feature 1..80: note = Artificially Synthesized Probe
  source 1..80: mol_type = other DNA
acccccacagcaccacattcaaactccccccagcccaacccacacacaaaaggaatacaggaaaatattaagtcgttatt

SEQ ID NO: 115110 - DNA, 80 bp, synthetic construct; identical to SEQ ID NO: 37816
  misc_feature 1..80: note = Artificially Synthesized Probe
  source 1..80: mol_type = other DNA

SEQ ID NO: 115111 - DNA, 80 bp, synthetic construct
  misc_feature 1..80: note = Artificially Synthesized Probe
  source 1..80: mol_type = other DNA
ccaaaggggaaataatatgattattgcagacctaaccctccaacccaaaaaatacagctggacaacaaaacgggtgctta

SEQ ID NO: 115112 - DNA, 80 bp, synthetic construct
  misc_feature 1..80: note = Artificially Synthesized Probe
  source 1..80: mol_type = other DNA
ttggtgttaggtggcattaagttctcagtaatgacacttatcaaataggaacttagtgcctgttactcacctttatccat

SEQ ID NO: 115113 - DNA, 80 bp, synthetic construct
  misc_feature 1..80: note = Artificially Synthesized Probe
  source 1..80: mol_type = other DNA
tcttattctctgatctgatacactgatttctaaacctggctcatcagaatcctcctttaaacagcttttaagaattattt

SEQ ID NO: 115114 - DNA, 80 bp, synthetic construct
  misc_feature 1..80: note = Artificially Synthesized Probe
  source 1..80: mol_type = other DNA
aaaaatacacacacaaaaaaaattagccggccctggtggcgggtgcctgtagtcccagctactggggaggctgagggagg

SEQ ID NO: 115115 - DNA, 80 bp, synthetic construct; identical to SEQ ID NO: 37817
  misc_feature 1..80: note = Artificially Synthesized Probe
  source 1..80: mol_type = other DNA

SEQ ID NO: 115116 - DNA, 80 bp, synthetic construct
  misc_feature 1..80: note = Artificially Synthesized Probe
  source 1..80: mol_type = other DNA
ggggagtaactgctaataggtaaggaattcctcatggagtgatgaaaatcttctaaaactgactgtggtgacagtgataa

SEQ ID NO: 115117 - DNA, 80 bp, synthetic construct
  misc_feature 1..80: note = Artificially Synthesized Probe
  source 1..80: mol_type = other DNA
gcacacttacagaggcaccctcgggatgcccagatcaaagatataaaaaaaaatacaggcaatttttatctaactgtgac

SEQ ID NO: 115118 - DNA, 80 bp, synthetic construct
  misc_feature 1..80: note = Artificially Synthesized Probe
  source 1..80: mol_type = other DNA
taaaagagcaatgtgagctttggccaacagcctaactatacaccaaagcttataataactttgattaatattacatcttg

SEQ ID NO: 115119 - DNA, 80 bp, synthetic construct
  misc_feature 1..80: note = Artificially Synthesized Probe
  source 1..80: mol_type = other DNA
aaatcacaggtaatacgcaacagacctttaggattcatcccaagccaaaaatgggggaaaaaatccacaaattccaagag

SEQ ID NO: 115120 - DNA, 80 bp, synthetic construct; identical to SEQ ID NO: 37770
  misc_feature 1..80: note = Artificially Synthesized Probe
  source 1..80: mol_type = other DNA

SEQ ID NO: 115121 - DNA, 80 bp, synthetic construct; identical to SEQ ID NO: 37818
  misc_feature 1..80: note = Artificially Synthesized Probe
  source 1..80: mol_type = other DNA

SEQ ID NO: 115122 - DNA, 80 bp, synthetic construct
  misc_feature 1..80: note = Artificially Synthesized Probe
  source 1..80: mol_type = other DNA
tttctttttaaattaaattagtttaatattactattacctgattggctcagtcggtcacaggccatcatttccagcagat

SEQ ID NO: 115123 - DNA, 80 bp, synthetic construct
  misc_feature 1..80: note = Artificially Synthesized Probe
  source 1..80: mol_type = other DNA
aattaaactgaattggaaaagactgcaaaaactgggaaccaaggaatttgtataacctatgaaagataggccaggtacag

SEQ ID NO: 115124 - DNA, 80 bp, synthetic construct; identical to SEQ ID NO: 37819
  misc_feature 1..80: note = Artificially Synthesized Probe
  source 1..80: mol_type = other DNA

SEQ ID NO: 115125 - DNA, 80 bp, synthetic construct
  misc_feature 1..80: note = Artificially Synthesized Probe
  source 1..80: mol_type = other DNA
ttcaagaccagcctgaacaacacggtgagaccctatctctaaaaaaagttttttttaattagccaggcatggtggcacac

SEQ ID NO: 115126 - DNA, 80 bp, synthetic construct
  misc_feature 1..80: note = Artificially Synthesized Probe
  source 1..80: mol_type = other DNA
agcagctctgagaaattagtttctactaaaagcacattcatgttacattcagagaaatggaaaatttaattacattactt

SEQ ID NO: 115127 - DNA, 80 bp, synthetic construct
  misc_feature 1..80: note = Artificially Synthesized Probe
  source 1..80: mol_type = other DNA
ggacaaccaggaaattaaagagatcctaatgcaataacctatgaaaaaaaaaaaaaaagcatgatgaatagaatggcgaa

SEQ ID NO: 115128 - DNA, 80 bp, synthetic construct
  misc_feature 1..80: note = Artificially Synthesized Probe
  source 1..80: mol_type = other DNA
gaaaagtaatgaatgtccatcactgaaaacgtccagtcataggcaatgcccacttactagaaacatgccaaaagtaacta

SEQ ID NO: 115129 - DNA, 80 bp, synthetic construct; identical to SEQ ID NO: 37820
  misc_feature 1..80: note = Artificially Synthesized Probe
  source 1..80: mol_type = other DNA

SEQ ID NO: 115130 - DNA, 80 bp, synthetic construct
  misc_feature 1..80: note = Artificially Synthesized Probe
  source 1..80: mol_type = other DNA
tttcctccttcttttaaagacaggggatatatgtgtgtttacttggagatgcataaaacatttcctgaagaacacacaag

SEQ ID NO: 115131 - DNA, 80 bp, synthetic construct
  misc_feature 1..80: note = Artificially Synthesized Probe
  source 1..80: mol_type = other DNA
aaattagccaggcataatgccatgcacctgtagtcccagctacttgggaggctgaggcaggagaatcgcttgaacctcgg

SEQ ID NO: 115132 - DNA, 80 bp, synthetic construct
  misc_feature 1..80: note = Artificially Synthesized Probe
  source 1..80: mol_type = other DNA
tccaaatatgctcatttttcaaaatatatgatttatgaacctaaaagcttctgattttgaattttagaaatattcgtatc

SEQ ID NO: 115133 - DNA, 80 bp, synthetic construct
  misc_feature 1..80: note = Artificially Synthesized Probe
  source 1..80: mol_type = other DNA
acctcaattcataaacccggcctcttttacaaaattattcaatagttgaatttgtgaccagttaattagttgtgaatcca

SEQ ID NO: 115134 - DNA, 80 bp, synthetic construct; identical to SEQ ID NO: 37821
  misc_feature 1..80: note = Artificially Synthesized Probe
  source 1..80: mol_type = other DNA

SEQ ID NO: 115135 - DNA, 80 bp, synthetic construct
  misc_feature 1..80: note = Artificially Synthesized Probe
  source 1..80: mol_type = other DNA
aaggtttcaagatactttgtcaactacctagctgcaatgcagatgtacttactagaaccacagtattcctctgattaaga

SEQ ID NO: 115136 - DNA, 80 bp, synthetic construct
  misc_feature 1..80: note = Artificially Synthesized Probe
  source 1..80: mol_type = other DNA
acagaaatatgtggtagttaataaagactgaggtaggtatctctgtgctgaagtggaacaatgaagaaacatttagaaaa

SEQ ID NO: 115137 - DNA, 80 bp, synthetic construct
  misc_feature 1..80: note = Artificially Synthesized Probe
  source 1..80: mol_type = other DNA
tcctaacagtagctgtcatctaggaaaggagacctgagtgaatggattaagagggaaactaacttattatgattaaaagt

SEQ ID NO: 115138 - DNA, 80 bp, synthetic construct; identical to SEQ ID NO: 37822
  misc_feature 1..80: note = Artificially Synthesized Probe
  source 1..80: mol_type = other DNA

SEQ ID NO: 115139 - DNA, 80 bp, synthetic construct
  misc_feature 1..80: note = Artificially Synthesized Probe
  source 1..80: mol_type = other DNA
gttcaatgttacggtgagctacgattacgcaactgcactccagcctgggtgacacagcaagactctaatagacacacaga

SEQ ID NO: 115140 - DNA, 80 bp, synthetic construct
  misc_feature 1..80: note = Artificially Synthesized Probe
  source 1..80: mol_type = other DNA
aaaaattagccaggcgtggtggtgggtgcctgtagtcccagctactcgggaggctgaggcaggagaatggcgtgaaccca

SEQ ID NO: 115141 - DNA, 80 bp, synthetic construct; identical to SEQ ID NO: 37823
  misc_feature 1..80: note = Artificially Synthesized Probe
  source 1..80: mol_type = other DNA

SEQ ID NO: 115142 - DNA, 80 bp, synthetic construct
  misc_feature 1..80: note = Artificially Synthesized Probe
  source 1..80: mol_type = other DNA
attaaaaaatacaaaagattagccaggcatggtggtgtgtgcctgtaatcccagatacgtgacagactgaagcaggagaa

SEQ ID NO: 115143 - DNA, 80 bp, synthetic construct
  misc_feature 1..80: note = Artificially Synthesized Probe
  source 1..80: mol_type = other DNA
aatcgcttgaacccaggagttggaggttgcactgagcagagatcatgccgctgcactctagcctgggtgacacagtgagt

SEQ ID NO: 115144 - DNA, 80 bp, synthetic construct
  misc_feature 1..80: note = Artificially Synthesized Probe
  source 1..80: mol_type = other DNA
cgagacgcgcagatcacctgagttcaggagctcaagaccagcctgaccaacatggagaaaccttgtctctactaaaaata

SEQ ID NO: 115145 - DNA, 80 bp, synthetic construct
  misc_feature 1..80: note = Artificially Synthesized Probe
  source 1..80: mol_type = other DNA
aaaaaaagatttatattaggaggggccttctctaaaagtaatgaatccttttttttccctccctaagcaaaaaatccttc

SEQ ID NO: 115146 - DNA, 80 bp, synthetic construct
  misc_feature 1..80: note = Artificially Synthesized Probe
  source 1..80: mol_type = other DNA
aggcaggtggatgactaggtcaggagattgagaccatcctggctaacatggtgaaaccccgtctctactaaaagtacaaa

SEQ ID NO: 115147 - DNA, 80 bp, synthetic construct; identical to SEQ ID NO: 37824
  misc_feature 1..80: note = Artificially Synthesized Probe
  source 1..80: mol_type = other DNA

SEQ ID NO: 115148 - DNA, 80 bp, synthetic construct
  misc_feature 1..80: note = Artificially Synthesized Probe
  source 1..80: mol_type = other DNA
gaggctgcagtgagccgagatcacgccactgcactccagcctggcgacagagagagacttggtctcaaaaaaaataaaaa

SEQ ID NO: 115149 - DNA, 80 bp, synthetic construct
  misc_feature 1..80: note = Artificially Synthesized Probe
  source 1..80: mol_type = other DNA
tacttattaggattttgtccaagtaacacatctttttgaatcaagtttacccatcatacgagattacatctttatcatgt

SEQ ID NO: 115150 - DNA, 80 bp, synthetic construct; identical to SEQ ID NO: 37825
  misc_feature 1..80: note = Artificially Synthesized Probe
  source 1..80: mol_type = other DNA

SEQ ID NO: 115151 - DNA, 80 bp, synthetic construct
  misc_feature 1..80: note = Artificially Synthesized Probe
  source 1..80: mol_type = other DNA
tttcatttctaagaaagtagctgacagttcatcatttccacccaaagaagatttcgcagactgaagagcactatcaaaac

SEQ ID NO: 115152 - DNA, 80 bp, synthetic construct
  misc_feature 1..80: note = Artificially Synthesized Probe
  source 1..80: mol_type = other DNA
taatgcttatttttatcctgcatacttcctatacttcatgcttaacctctcaaatgatgtcttattcccagttatttcca

SEQ ID NO: 115153 - DNA, 80 bp, synthetic construct
  misc_feature 1..80: note = Artificially Synthesized Probe
  source 1..80: mol_type = other DNA
caaattataagtaaataattgacaggtatttgagtatcaatacagtaattgctctttttactatatagatcattacagca

SEQ ID NO: 115154 - DNA, 80 bp, synthetic construct; identical to SEQ ID NO: 37771
  misc_feature 1..80: note = Artificially Synthesized Probe
  source 1..80: mol_type = other DNA

SEQ ID NO: 115155 - DNA, 80 bp, synthetic construct
  misc_feature 1..80: note = Artificially Synthesized Probe
  source 1..80: mol_type = other DNA
ctgccaccatgccccgctaaactttttttatatttttagtagagacagggttttactatgttggccaggctggtctcgaa

SEQ ID NO: 115156 - DNA, 80 bp, synthetic construct; identical to SEQ ID NO: 37826
  misc_feature 1..80: note = Artificially Synthesized Probe
  source 1..80: mol_type = other DNA

SEQ ID NO: 115157 - DNA, 80 bp, synthetic construct
  misc_feature 1..80: note = Artificially Synthesized Probe
  source 1..80: mol_type = other DNA
ggctggagtgcagtgacacaatcttggcttactgcaacctctgactcccaggttcaagcgattcttctgcctcagcctcc

SEQ ID NO: 115158 - DNA, 80 bp, synthetic construct
  misc_feature 1..80: note = Artificially Synthesized Probe
  source 1..80: mol_type = other DNA
gccaccgcgccccgctgagctgagttttctagaggcttcatgacatgtaatagttttacagactgaaagaggaagtaaat

SEQ ID NO: 115159 - DNA, 80 bp, synthetic construct; identical to SEQ ID NO: 37827
  misc_feature 1..80: note = Artificially Synthesized Probe
  source 1..80: mol_type = other DNA

SEQ ID NO: 115160 - DNA, 80 bp, synthetic construct
  misc_feature 1..80: note = Artificially Synthesized Probe
  source 1..80: mol_type = other DNA
aaactctgtctcaaaaaaaaaaaaaaaaaaaaagctataattattaacacacaatagggcttattacatttttaatggat

SEQ ID NO: 115161 - DNA, 80 bp, synthetic construct
  misc_feature 1..80: note = Artificially Synthesized Probe
  source 1..80: mol_type = other DNA
aggccaaggtagacagatcaagaggtcaagagatcgagaccagccgggcgcggtggctcatgcctgtaatcccagcactt

SEQ ID NO: 115162 - DNA, 80 bp, synthetic construct
  misc_feature 1..80: note = Artificially Synthesized Probe
  source 1..80: mol_type = other DNA
tgaaccctggagacacagcttgcagtgagccgagatggcgccactgcactccagcctgggcaacagagcgagactccgtc

SEQ ID NO: 115163 - DNA, 80 bp, synthetic construct; identical to SEQ ID NO: 37828
  misc_feature 1..80: note = Artificially Synthesized Probe
  source 1..80: mol_type = other DNA

SEQ ID NO: 115164 - DNA, 80 bp, synthetic construct
  misc_feature 1..80: note = Artificially Synthesized Probe
  source 1..80: mol_type = other DNA
caccagctttttatcttcctcagggtcctcccctcaggcccccaagtcaccccctcatggtccagattctcccgagtgac

SEQ ID NO: 115165 - DNA, 80 bp, synthetic construct
  misc_feature 1..80: note = Artificially Synthesized Probe
  source 1..80: mol_type = other DNA
tgtggtacaaatgagatcactacaagtaatttaaaaatgtgctagtagtgtttttttttctgagacggagtcttgctctg

SEQ ID NO: 115166 - DNA, 80 bp, synthetic construct
  misc_feature 1..80: note = Artificially Synthesized Probe
  source 1..80: mol_type = other DNA
gagattgcgccactgtactccaggctgggtgacagagcgagactctgtctcaaaaaaaaaaaaaaaaaaaaaaaaaaaaa

SEQ ID NO: 115167 - DNA, 80 bp, synthetic construct
  misc_feature 1..80: note = Artificially Synthesized Probe
  source 1..80: mol_type = other DNA
agattgagaccatcctgaaccccgtctctactaaaaatacaaaaattagctgggcgtagtggtgtgcgcctgtggtccca

SEQ ID NO: 115168 - DNA, 80 bp, synthetic construct; identical to SEQ ID NO: 37829
  misc_feature 1..80: note = Artificially Synthesized Probe
  source 1..80: mol_type = other DNA

SEQ ID NO: 115169 - DNA, 80 bp, synthetic construct
  misc_feature 1..80: note = Artificially Synthesized Probe
  source 1..80: mol_type = other DNA
ctccctgcactcagtgaaatgaacttctttccttataccagatggggaaataaattaacttccaaacaaatggacagcct

SEQ ID NO: 115170 - DNA, 80 bp, synthetic construct
  misc_feature 1..80: note = Artificially Synthesized Probe
  source 1..80: mol_type = other DNA
taacaaaattaggcaggggccatatttggcccacaagttctaatcaacaacccctgctctaaactaacatctttatacaa

SEQ ID NO: 115171 - DNA, 80 bp, synthetic construct
  misc_feature 1..80: note = Artificially Synthesized Probe
  source 1..80: mol_type = other DNA
ctagtacatgtgaacctagccatctgatgacagatgaactttaattttcactcaagattatactattataaaaaaataaa

SEQ ID NO: 115172 - DNA, 80 bp, synthetic construct; identical to SEQ ID NO: 37830
  misc_feature 1..80: note = Artificially Synthesized Probe
  source 1..80: mol_type = other DNA

SEQ ID NO: 115173 - DNA, 80 bp, synthetic construct
  misc_feature 1..80: note = Artificially Synthesized Probe
  source 1..80: mol_type = other DNA
gttgctcgccagtcacttttatcagactccaaacactgtaaagactccagatattcctattttgtggaatgaatagtaag

SEQ ID NO: 115174 - DNA, 80 bp, synthetic construct
  misc_feature 1..80: note = Artificially Synthesized Probe
  source 1..80: mol_type = other DNA
tcccattataaattcaactgatcctggtaaaaatttcgttttataactgttctacctaaataaaagaaatttaagtcctg

SEQ ID NO: 115175 - DNA, 80 bp, synthetic construct
  misc_feature 1..80: note = Artificially Synthesized Probe
  source 1..80: mol_type = other DNA
gccacagcatccttcaatcttttagttgagcgatacaactccactagccggatgttcacatggacgtcatcaggtcttac

SEQ ID NO: 115176 - DNA, 80 bp, synthetic construct
  misc_feature 1..80: note = Artificially Synthesized Probe
  source 1..80: mol_type = other DNA
caccgtgttagccaggaaggtctcggtctcctgacctcgtgatcctcccacctcagcctcccaaagtgctgggattacag

SEQ ID NO: 115177 - DNA, 80 bp, synthetic construct
  misc_feature 1..80: note = Artificially Synthesized Probe
  source 1..80: mol_type = other DNA
gtctagttttatgatgatgccaccaaaaacaccatcctatataccttattcgtcccttctgagagttgcttacaacccag

SEQ ID NO: 115178 - DNA, 80 bp, synthetic construct; identical to SEQ ID NO: 37831
  misc_feature 1..80: note = Artificially Synthesized Probe
  source 1..80: mol_type = other DNA

SEQ ID NO: 115179 - DNA, 80 bp, synthetic construct
  misc_feature 1..80: note = Artificially Synthesized Probe
  source 1..80: mol_type = other DNA
tccatcagcctctcaagaagctaggaccataggcatgcaccaccatgcccggctaatttttttttaacgttctgtagaga

SEQ ID NO: 115180 - DNA, 80 bp, synthetic construct
  misc_feature 1..80: note = Artificially Synthesized Probe
  source 1..80: mol_type = other DNA
tcttattcttccacctcactgagggcctacatacccttactttcagaaataccacatgacaagctcccttcaagacaata

SEQ ID NO: 115181 - DNA, 80 bp, synthetic construct
  misc_feature 1..80: note = Artificially Synthesized Probe
  source 1..80: mol_type = other DNA
gtgtgcttagatttgggaaatcataaccccaagctaactgatttcatttgcattatctcaaccatcaaactggtgctgcc

SEQ ID NO: 115182 - DNA, 80 bp, synthetic construct; identical to SEQ ID NO: 37832
  misc_feature 1..80: note = Artificially Synthesized Probe
  source 1..80: mol_type = other DNA

SEQ ID NO: 115183 - DNA, 80 bp, synthetic construct
  misc_feature 1..80: note = Artificially Synthesized Probe
  source 1..80: mol_type = other DNA
agagaaaaagccttctcaacagtaatactcccattcattaaacaaatgtcagaaactgtttaccttagcaagccttaaat

SEQ ID NO: 115184 - DNA, 80 bp, synthetic construct
  misc_feature 1..80: note = Artificially Synthesized Probe
  source 1..80: mol_type = other DNA
aaaagaatctcctgccattacatatgttctttaacactactgacaccagattaactggattgccacgcccaatatgggag

SEQ ID NO: 115185 - DNA, 80 bp, synthetic construct; identical to SEQ ID NO: 37833
  misc_feature 1..80: note = Artificially Synthesized Probe
  source 1..80: mol_type = other DNA

SEQ ID NO: 115186 - DNA, 80 bp, synthetic construct
  misc_feature 1..80: note = Artificially Synthesized Probe
  source 1..80: mol_type = other DNA
tagaaataaaaaaagtgaaaggttaaattgtggaccatgaaatactactcagaagtaaaggaaccaactatggatataca

SEQ ID NO: 115187 - DNA, 80 bp, synthetic construct
  misc_feature 1..80: note = Artificially Synthesized Probe
  source 1..80: mol_type = other DNA
tacttttttcatgtaagcctttgaaatctggtgggtattttatatttactgtacatcctgatttggaataaccacatttc

SEQ ID NO: 115188 - DNA, 80 bp, synthetic construct
  misc_feature 1..80: note = Artificially Synthesized Probe
  source 1..80: mol_type = other DNA
gccaacatggtgaaaccccgtttctgctaaaaatacaaaaataagcgggacacggtaacatgtgcctgtagtcccagcta

SEQ ID NO: 115189 - DNA, 80 bp, synthetic construct
  misc_feature 1..80: note = Artificially Synthesized Probe
  source 1..80: mol_type = other DNA
acataacattttgaaatcaccaaagtataaagatggagaacagattaatgttgccagaggtcaggcatagtgaagagaag

SEQ ID NO: 115190 - DNA, 80 bp, synthetic construct; identical to SEQ ID NO: 37834
  misc_feature 1..80: note = Artificially Synthesized Probe
  source 1..80: mol_type = other DNA

SEQ ID NO: 115191 - DNA, 80 bp, synthetic construct
  misc_feature 1..80: note = Artificially Synthesized Probe
  source 1..80: mol_type = other DNA
ctcaacctgtataagcattgggggaaaatgaagtagcatataggatctttctgtgcaatctttgcaacttcctgtgcaaa

SEQ ID NO: 115192 - DNA, 80 bp, synthetic construct
  misc_feature 1..80: note = Artificially Synthesized Probe
  source 1..80: mol_type = other DNA
taaagtatacattaatagataaaacattacaatatacattttaaatgtttgccaaacatatttgtgtagattttctccag

SEQ ID NO: 115193 - DNA, 80 bp, synthetic construct
  misc_feature 1..80: note = Artificially Synthesized Probe
  source 1..80: mol_type = other DNA
tatcttttgcttgaaaaccttactatctcaaaatacaatcccttccactttcagacaatagttattagaaaacacttctt

SEQ ID NO: 115194 - DNA, 80 bp, synthetic construct; identical to SEQ ID NO: 37835
  misc_feature 1..80: note = Artificially Synthesized Probe
  source 1..80: mol_type = other DNA

SEQ ID NO: 115195 - DNA, 80 bp, synthetic construct
  misc_feature 1..80: note = Artificially Synthesized Probe
  source 1..80: mol_type = other DNA
agtttataaattgcaggacttcctgggaaaagttttgctgctctttccacccagtattctgctcttccatcagtaacatc

SEQ ID NO: 115196 - DNA, 80 bp, synthetic construct
  misc_feature 1..80: note = Artificially Synthesized Probe
  source 1..80: mol_type = other DNA
aaaattatcactccaacccttaaaaaattctacttctggagaaaacatattacttcaaaggtgttcaaataaaagtgtct

SEQ ID NO: 115197 - DNA, 80 bp, synthetic construct
  misc_feature 1..80: note = Artificially Synthesized Probe
  source 1..80: mol_type = other DNA
taaatctgttccaagctgtgtcacataactgtactatgataccaatgcctgttttatgatattcataaaatatatttgac

SEQ ID NO: 115198 - DNA, 80 bp, synthetic construct; identical to SEQ ID NO: 37836
  misc_feature 1..80: note = Artificially Synthesized Probe
  source 1..80: mol_type = other DNA

SEQ ID NO: 115199 - DNA, 80 bp, synthetic construct
  misc_feature 1..80: note = Artificially Synthesized Probe
  source 1..80: mol_type = other DNA
cacgttagggctgcatattttatggatcccaggaaaaatacacatagtctgaaagaatgatctcagtcagaaactcagaa

SEQ ID NO: 115200 - DNA, 80 bp, synthetic construct
  misc_feature 1..80: note = Artificially Synthesized Probe
  source 1..80: mol_type = other DNA
taaaaacacatacatagagttgaccacatactcattttaccattaaatgtcacatttaccaaatttttctccagtgttat

SEQ ID NO: 115201 - DNA, 80 bp, synthetic construct
  misc_feature 1..80: note = Artificially Synthesized Probe
  source 1..80: mol_type = other DNA
gggaaatacacttaccctttaagcaagaaagtaatttctaacagtactatatatccagctaaaatcgaacagaagaaaaa

SEQ ID NO: 115202 - DNA, 80 bp, synthetic construct
  misc_feature 1..80: note = Artificially Synthesized Probe
  source 1..80: mol_type = other DNA
agttaacagtcacagtgctgctagttacataatttatgtaccaccattttcctttcttaccagcatttccatcttccttt

SEQ ID NO: 115203 - DNA, 80 bp, synthetic construct; identical to SEQ ID NO: 37837
  misc_feature 1..80: note = Artificially Synthesized Probe
  source 1..80: mol_type = other DNA

SEQ ID NO: 115204 - DNA, 80 bp, synthetic construct
  misc_feature 1..80: note = Artificially Synthesized Probe
  source 1..80: mol_type = other DNA
tatccctaggatagagccttagagcatcacatattgtgtcaattaaacatcttttatacaagctattctcctgccttaca

SEQ ID NO: 115205 - DNA, 80 bp, synthetic construct
  misc_feature 1..80: note = Artificially Synthesized Probe
  source 1..80: mol_type = other DNA
ataaagcagcagcatgcagaaaacactaattacggtttcaatctcaatggaatctaggctggtccttagcatcagtctga

SEQ ID NO: 115206 - DNA, 80 bp, synthetic construct
  misc_feature 1..80: note = Artificially Synthesized Probe
  source 1..80: mol_type = other DNA
taatacagctttgcaaaatagaatcctctcgttgacttctaaaaaaaattaaaagttgttttacgtttcatacagaaata

SEQ ID NO: 115207 - DNA, 80 bp, synthetic construct
  misc_feature 1..80: note = Artificially Synthesized Probe
  source 1..80: mol_type = other DNA
ggctcatgcctgtaatcccagcactttgggaggccgaagtgggcggatcacctgaggtcaggagtttgagaccagcctgg

SEQ ID NO: 115208 - DNA, 80 bp, synthetic construct; identical to SEQ ID NO: 37772
  misc_feature 1..80: note = Artificially Synthesized Probe
  source 1..80: mol_type = other DNA

SEQ ID NO: 115209 - DNA, 80 bp, synthetic construct; identical to SEQ ID NO: 37838
  misc_feature 1..80: note = Artificially Synthesized Probe
  source 1..80: mol_type = other DNA

SEQ ID NO: 115210 - DNA, 80 bp, synthetic construct
  misc_feature 1..80: note = Artificially Synthesized Probe
  source 1..80: mol_type = other DNA
ctgtgttcctagctactcaggaggccaaggaaggagaatcacttgagcccaggaggttgacactgccgtgagttatgact

SEQ ID NO: 115211 - DNA, 80 bp, synthetic construct
  misc_feature 1..80: note = Artificially Synthesized Probe
  source 1..80: mol_type = other DNA
ctctcacttaacaaacaaaagaaaccagctttctttggggaggaaaggtattccagaaatctcttctcctaccatgtgta

SEQ ID NO: 115212 - DNA, 80 bp, synthetic construct
  misc_feature 1..80: note = Artificially Synthesized Probe
  source 1..80: mol_type = other DNA
aggaaaggtattccagaaatctcttctcctaccatgtgtaaaagcctctatgggaaagaataagtaagtacttaggatct

SEQ ID NO: 115213 - DNA, 80 bp, synthetic construct
  misc_feature 1..80: note = Artificially Synthesized Probe
  source 1..80: mol_type = other DNA
attaaggcactgaggattccctgtgcctcaatagtacatgtactgttctctctacagatcagatcagtattttacagtca

SEQ ID NO: 115214 - DNA, 80 bp, synthetic construct; identical to SEQ ID NO: 37839
  misc_feature 1..80: note = Artificially Synthesized Probe
  source 1..80: mol_type = other DNA

SEQ ID NO: 115215 - DNA, 80 bp, synthetic construct
  misc_feature 1..80: note = Artificially Synthesized Probe
  source 1..80: mol_type = other DNA
aaaaaaaaaaaaagctgatacaaccagagtatgttccatccatgtgatacagagtatacagctactcaaacatcttattt

SEQ ID NO: 115216 - DNA, 80 bp, synthetic construct
  misc_feature 1..80: note = Artificially Synthesized Probe
  source 1..80: mol_type = other DNA
ctcaactaagcacttatcacacactgtggctgtaacttttgcagtttggggtgtcacaacaaaactagcacaaatttctt

SEQ ID NO: 115217 - DNA, 80 bp, synthetic construct
  misc_feature 1..80: note = Artificially Synthesized Probe
  source 1..80: mol_type = other DNA
ctatatggcttctctctggcatatgtgaactgccagcatcgctactcttgctctttggtgccattttaaataaaataagg

SEQ ID NO: 115218 - DNA, 80 bp, synthetic construct; identical to SEQ ID NO: 37840
  misc_feature 1..80: note = Artificially Synthesized Probe
  source 1..80: mol_type = other DNA

SEQ ID NO: 115219 - DNA, 80 bp, synthetic construct
  misc_feature 1..80: note = Artificially Synthesized Probe
  source 1..80: mol_type = other DNA
agaaaaggaaattaagaaagcaattccatttacaatcgcatctaaatgaaaaaaatgcctgggaataaatgtaaacaagg

SEQ ID NO: 115220 - DNA, 80 bp, synthetic construct
  misc_feature 1..80: note = Artificially Synthesized Probe
  source 1..80: mol_type = other DNA
cttaacaaaaataatacacaacagtcaggacagcacgtaaaagaacaaggcttgttccccccttcctttttttttttgag

SEQ ID NO: 115221 - DNA, 80 bp, synthetic construct; identical to SEQ ID NO: 37841
  misc_feature 1..80: note = Artificially Synthesized Probe
  source 1..80: mol_type = other DNA

SEQ ID NO: 115222 - DNA, 80 bp, synthetic construct
  misc_feature 1..80: note = Artificially Synthesized Probe
  source 1..80: mol_type = other DNA
gtcatgttggccaggctggtctcgaactcctgatctcaggtgctccacccgcctcagcctcccaaagtgttaggattaca

SEQ ID NO: 115223 - DNA, 80 bp, synthetic construct
  misc_feature 1..80: note = Artificially Synthesized Probe
  source 1..80: mol_type = other DNA
atcttttgcctctaacctgctcactttacaagggaactgaagctcaagcaggcaaatgccttgtttaaagatatatagct

SEQ ID NO: 115224 - DNA, 80 bp, synthetic construct
  misc_feature 1..80: note = Artificially Synthesized Probe
  source 1..80: mol_type = other DNA
caagaactgatgcagggctgaaaacaggaacagtaagaccctaagagatgccacatcatcgctatcttgcacagtaagat

SEQ ID NO: 115225 - DNA, 80 bp, synthetic construct
  misc_feature 1..80: note = Artificially Synthesized Probe
  source 1..80: mol_type = other DNA
cagtcaaatgaatctccctccccctaaaatcctccaaaaaagctgctgttctcaacaaacccatctgatcagctccaaat

SEQ ID NO: 115226 - DNA, 80 bp, synthetic construct
  misc_feature 1..80: note = Artificially Synthesized Probe
  source 1..80: mol_type = other DNA
ttagagaaactccagctttcaggtaaacatcattaaaaaaaagggtaagaaatggtcaaagaaataatacaagaaatgct

SEQ ID NO: 115227 - DNA, 80 bp, synthetic construct; identical to SEQ ID NO: 37842
  misc_feature 1..80: note = Artificially Synthesized Probe
  source 1..80: mol_type = other DNA

SEQ ID NO: 115228 - DNA, 80 bp, synthetic construct; identical to SEQ ID NO: 37765
  misc_feature 1..80: note = Artificially Synthesized Probe
  source 1..80: mol_type = other DNA

SEQ ID NO: 115229 - DNA, 80 bp, synthetic construct
  misc_feature 1..80: note = Artificially Synthesized Probe
  source 1..80: mol_type = other DNA
acagagcaagactctgtcccaaaacaaaaacaaacaaaaaaacctctcatccacttttcctcaaagcaagtgagactatg

SEQ ID NO: 115230 - DNA, 80 bp, synthetic construct
  misc_feature 1..80: note = Artificially Synthesized Probe
  source 1..80: mol_type = other DNA
agctgtgtagcaaagaggaagaaaacccaatccaggttggagaagtcggttagtaagggtattccaggtagacaatcaat

SEQ ID NO: 115231 - DNA, 80 bp, synthetic construct
  misc_feature 1..80: note = Artificially Synthesized Probe
  source 1..80: mol_type = other DNA
agaagtcggttagtaagggtattccaggtagacaatcaatcaatcaatcaatgttttaagctgaaattgaacggattatg

SEQ ID NO: 115232 - DNA, 80 bp, synthetic construct
  misc_feature 1..80: note = Artificially Synthesized Probe
  source 1..80: mol_type = other DNA
ttatataaatgttaaatattcatttaaacaaaaactgcaataacagtactgaaagaatgaggggcaaaccaaagtgtctg

SEQ ID NO: 115233 - DNA, 80 bp, synthetic construct; identical to SEQ ID NO: 37843
  misc_feature 1..80: note = Artificially Synthesized Probe
  source 1..80: mol_type = other DNA

SEQ ID NO: 115234 - DNA, 80 bp, synthetic construct
  misc_feature 1..80: note = Artificially Synthesized Probe
  source 1..80: mol_type = other DNA
gtgttactcagaagtatgaagtatagatgtaaagggcagaaaaaacaactaacagctgtcaaaggtgcctgcctgtagtc

SEQ ID NO: 115235 - DNA, 80 bp, synthetic construct
  misc_feature 1..80: note = Artificially Synthesized Probe
  source 1..80: mol_type = other DNA
cacactagacatctaaagcaaccaaccatagttaacaagcagtgctcttaccaaaaggtaactctttctagaatctggca

SEQ ID NO: 115236 - DNA, 80 bp, synthetic construct
  misc_feature 1..80: note = Artificially Synthesized Probe
  source 1..80: mol_type = other DNA
gagaagtaggaatcagctgcagaataagaaaccgacttgacagaacatagaaaaactaaacagaagccatctggaaaaag

SEQ ID NO: 115237 - DNA, 80 bp, synthetic construct
  misc_feature 1..80: note = Artificially Synthesized Probe
  source 1..80: mol_type = other DNA
gtgggactacaggcgctgccaccacgcccggctcatttttgtatttttaatagagatggattttcaccatattggtcagg

SEQ ID NO: 115238 - DNA, 80 bp, synthetic construct; identical to SEQ ID NO: 37844
  misc_feature 1..80: note = Artificially Synthesized Probe
  source 1..80: mol_type = other DNA

SEQ ID NO: 115239 - DNA, 80 bp, synthetic construct
  misc_feature 1..80: note = Artificially Synthesized Probe
  source 1..80: mol_type = other DNA
cccaggttctaatgtaaatgactttcaatttgggggaaaaaaagactctaagtgtaagagaggtggtcataataaccaat

SEQ ID NO: 115240 - DNA, 80 bp, synthetic construct
  misc_feature 1..80: note = Artificially Synthesized Probe
  source 1..80: mol_type = other DNA
cagtggtttttaatcttttggaagccaaggtccccactaagaatctcagaaaggctctaagcttgcttttttttttttaa

SEQ ID NO: 115241 - DNA, 80 bp, synthetic construct; identical to SEQ ID NO: 37845
  misc_feature 1..80: note = Artificially Synthesized Probe
  source 1..80: mol_type = other DNA

SEQ ID NO: 115242 - DNA, 80 bp, synthetic construct
  misc_feature 1..80: note = Artificially Synthesized Probe
  source 1..80: mol_type = other DNA
cattgcaaatgtccgcgctgagatgcctaccttgtcactcgacgcagccgccaaagctcacccggagctgcgtcagtccc

SEQ ID NO: 115243 - DNA, 80 bp, synthetic construct
  misc_feature 1..80: note = Artificially Synthesized Probe
  source 1..80: mol_type = other DNA
cgggcccaggagcgagcaccgtcgggaacaagcgtcgggaacaagccgggagaaagaggaagcgccggcgccaacggtct

SEQ ID NO: 115244 - DNA, 80 bp, synthetic construct
  misc_feature 1..80: note = Artificially Synthesized Probe
  source 1..80: mol_type = other DNA
tccaggccaccgcctcaacagagcgcgccagggagcagcgcccgtcgggagccatgacgcctgagccatcgaggccgccg

SEQ ID NO: 115245 - DNA, 80 bp, synthetic construct
  misc_feature 1..80: note = Artificially Synthesized Probe
  source 1..80: mol_type = other DNA
ctgagccatcgaggccgccgcctcaacagagcgcgccagggagcagcgcccgtcgggagccatgacgcctgagccatcga

SEQ ID NO: 115246 - DNA, 80 bp, synthetic construct
  misc_feature 1..80: note = Artificially Synthesized Probe
  source 1..80: mol_type = other DNA
catgacgcctgagccatcgaggccgccgccgggccgggtcgaggccgccgcctccacagagcgcgccagggagcagcgcc

SEQ ID NO: 115247 - DNA, 80 bp, synthetic construct
  misc_feature 1..80: note = Artificially Synthesized Probe
  source 1..80: mol_type = other DNA
atgtcactgccatagctatgcaatgggtgatatttacactatgctcaaacaaagcaaccagaaaaacacatcactgaata

SEQ ID NO: 115248 - DNA, 80 bp, synthetic construct
  misc_feature 1..80: note = Artificially Synthesized Probe
  source 1..80: mol_type = other DNA
agggccaggtcgaggccggcgcctcaacagagcgcgccagggagcagcgcccgtcgggagccatgacgcctgagccatcg

SEQ ID NO: 115249 - DNA, 80 bp, synthetic construct
  misc_feature 1..80: note = Artificially Synthesized Probe
  source 1..80: mol_type = other DNA
gccgccgcagggccaggtcgaggccgccgcctcaacagagcgcgccagggagcagcgcccgtcgggagccatgacgcctg

SEQ ID NO: 115250 - DNA, 80 bp, synthetic construct; identical to SEQ ID NO: 37846
  misc_feature 1..80: note = Artificially Synthesized Probe
  source 1..80: mol_type = other DNA

SEQ ID NO: 115251 - DNA, 80 bp, synthetic construct; identical to SEQ ID NO: 37847
  misc_feature 1..80: note = Artificially Synthesized Probe
  source 1..80: mol_type = other DNA

SEQ ID NO: 115252 - DNA, 80 bp, synthetic construct
  misc_feature 1..80: note = Artificially Synthesized Probe
  source 1..80: mol_type = other DNA
gccgccgcagggccaggtcgaggccgccgcctccacagagcgcgccagggagcagcgctcgtcgggagccatgacgcctg

SEQ ID NO: 115253 - DNA, 80 bp, synthetic construct
  misc_feature 1..80: note = Artificially Synthesized Probe
  source 1..80: mol_type = other DNA
accaacctggctcccgagatgcgtgagaccagcgctcagccccgcagcagtcgccaattccaagaggaaagcgcctgaaa

SEQ ID NO: 115254 - DNA, 80 bp, synthetic construct
  misc_feature 1..80: note = Artificially Synthesized Probe
  source 1..80: mol_type = other DNA
aagtagggaagagaaaaaagaaaaggagcaagagggagtagccagctctcaaaagagtctccaataggaaagcaaaatct

SEQ ID NO: 115255 - DNA, 80 bp, synthetic construct; identical to SEQ ID NO: 37773
  misc_feature 1..80: note = Artificially Synthesized Probe
  source 1..80: mol_type = other DNA

SEQ ID NO: 115256 - DNA, 80 bp, synthetic construct
  misc_feature 1..80: note = Artificially Synthesized Probe
  source 1..80: mol_type = other DNA
aggctgaggcaggggaatcacttgaacccaggaggtggaggttgcagtgagctgagaccatgccactgtactccagcctg

SEQ ID NO: 115257 - DNA, 80 bp, synthetic construct
  misc_feature 1..80: note = Artificially Synthesized Probe
  source 1..80: mol_type = other DNA
acctcgtctctaccaaaaacgaacaaacaaaaatcagccggatgtggtggtacacacctgtagtcccagctacttgggag

SEQ ID NO: 115258 - DNA, 80 bp, synthetic construct; identical to SEQ ID NO: 37774
  misc_feature 1..80: note = Artificially Synthesized Probe
  source 1..80: mol_type = other DNA

SEQ ID NO: 115259 - DNA, 80 bp, synthetic construct
  misc_feature 1..80: note = Artificially Synthesized Probe
  source 1..80: mol_type = other DNA
tgcactgaggtcagaacaaggaacagaagaaaatgaggtaaattggtaaatctttttgcaggctgagaagtgagagaatg

SEQ ID NO: 115260 - DNA, 80 bp, synthetic construct
  misc_feature 1..80: note = Artificially Synthesized Probe
  source 1..80: mol_type = other DNA
atttcagagaaaaccaggactttggaatcagacagatcaactttgaattcttgatctgcttcttcatagctatttacgct

SEQ ID NO: 115261 - DNA, 80 bp, synthetic construct
  misc_feature 1..80: note = Artificially Synthesized Probe
  source 1..80: mol_type = other DNA
agcctcccaagtagctgggactacaggcatccgccaccatgcctggctgattttttgtatttttagtagagacggggctt

SEQ ID NO: 115262 - DNA, 80 bp, synthetic construct
  misc_feature 1..80: note = Artificially Synthesized Probe
  source 1..80: mol_type = other DNA
tacagataaagaaatgggggctcagagcagtcaagaacatgccccaagttattcgtcagtgaggcggaaattgtggtgtc

SEQ ID NO: 115263 - DNA, 80 bp, synthetic construct
  misc_feature 1..80: note = Artificially Synthesized Probe
  source 1..80: mol_type = other DNA
attttgttgacctcttctgtcaacttaaacctggcactctcttggctggctttctctgctctttctgggcactccaaagc

SEQ ID NO: 115264 - DNA, 80 bp, synthetic construct; identical to SEQ ID NO: 37775
  misc_feature 1..80: note = Artificially Synthesized Probe
  source 1..80: mol_type = other DNA

SEQ ID NO: 115265 - DNA, 80 bp, synthetic construct; identical to SEQ ID NO: 37848
  misc_feature 1..80: note = Artificially Synthesized Probe
  source 1..80: mol_type = other DNA

SEQ ID NO: 115266 - DNA, 80 bp, synthetic construct
  misc_feature 1..80: note = Artificially Synthesized Probe
  source 1..80: mol_type = other DNA
gaggctgaggcaggagaatcacttgaacccaggaggcggaggttgcgttgagccgagatagcgccattgcactccagcct

SEQ ID NO: 115267 - DNA, 80 bp, synthetic construct; identical to SEQ ID NO: 37859
  misc_feature 1..80: note = Artificially Synthesized Probe
  source 1..80: mol_type = other DNA

SEQ ID NO: 115268 - DNA, 80 bp, synthetic construct
  misc_feature 1..80: note = Artificially Synthesized Probe
  source 1..80: mol_type = other DNA
tcccaagctcaactgatcctcccatctcagcctccggagcagctgggactacaggtgtaccaccacacctggctaatttt

SEQ ID NO: 115269 - DNA, 80 bp, synthetic construct
  misc_feature 1..80: note = Artificially Synthesized Probe
  source 1..80: mol_type = other DNA
gttgtttttaatcaccagtttgctcatgtcaaaaacaacatgtaaagaagaaagcttgttggtcttaactcttaaaggaa

SEQ ID NO: 115270 - DNA, 80 bp, synthetic construct
  misc_feature 1..80: note = Artificially Synthesized Probe
  source 1..80: mol_type = other DNA
cagtgaatagtgtgagtcccaggacagggttgccaaataaaatgcaggatacccaattcattgcgaatttaaaaacagac

SEQ ID NO: 115271 - DNA, 80 bp, synthetic construct
  misc_feature 1..80: note = Artificially Synthesized Probe
  source 1..80: mol_type = other DNA
tagccaatctcacactcaaaaattacccaagtaactccaaaatgtacctccatacagtttgttaaagctggaaggaagcc

SEQ ID NO: 115272 - DNA, 80 bp, synthetic construct; identical to SEQ ID NO: 37860
  misc_feature 1..80: note = Artificially Synthesized Probe
  source 1..80: mol_type = other DNA

SEQ ID NO: 115273 - DNA, 80 bp, synthetic construct
  misc_feature 1..80: note = Artificially Synthesized Probe
  source 1..80: mol_type = other DNA
ccacgcctggctaatttttgtatttctggcagagacagggttttcccatgttggtcaggctggtctcgaactcctgacct

SEQ ID NO: 115274 - DNA, 80 bp, synthetic construct
  misc_feature 1..80: note = Artificially Synthesized Probe
  source 1..80: mol_type = other DNA
aagtagctgggattacaggtgcccaccaccacgcctggctaattttttaatttttagtagagacagggtttcaccatgtt

SEQ ID NO: 115275 - DNA, 80 bp, synthetic construct; identical to SEQ ID NO: 37849
  misc_feature 1..80: note = Artificially Synthesized Probe
  source 1..80: mol_type = other DNA

SEQ ID NO: 115276 - DNA, 80 bp, synthetic construct
  misc_feature 1..80: note = Artificially Synthesized Probe
  source 1..80: mol_type = other DNA
ctattgtattgcaagaacagaaacatacttttcccctttgttgaaagatctccagtggcttcccatcttttataagggcc

SEQ ID NO: 115277 - DNA, 80 bp, synthetic construct; identical to SEQ ID NO: 37861
  misc_feature 1..80: note = Artificially Synthesized Probe
  source 1..80: mol_type = other DNA

SEQ ID NO: 115278 - DNA, 80 bp, synthetic construct
  misc_feature 1..80: note = Artificially Synthesized Probe
  source 1..80: mol_type = other DNA
gaatttgttttgctcactgctgtgtccccagtgcctggctcatagtggatattgaataaatatctgttgaataaaatagt

SEQ ID NO: 115279 - DNA, 80 bp, synthetic construct
  misc_feature 1..80: note = Artificially Synthesized Probe
  source 1..80: mol_type = other DNA
gcctcacagtccacattagcagcaggtgacctctaagaacctttccaattctgaaattatgtgatcctcagggaaggaga

SEQ ID NO: 115280 - DNA, 80 bp, synthetic construct
  misc_feature 1..80: note = Artificially Synthesized Probe
  source 1..80: mol_type = other DNA
acctggaagccaatcctagaaatgacaaagcagaggtggtcacttgggcatcaggcagcagaggtcatcagggacaaaaa

SEQ ID NO: 115281 - DNA, 80 bp, synthetic construct; identical to SEQ ID NO: 37862
  misc_feature 1..80: note = Artificially Synthesized Probe
  source 1..80: mol_type = other DNA

SEQ ID NO: 115282 - DNA, 80 bp, synthetic construct
  misc_feature 1..80: note = Artificially Synthesized Probe
  source 1..80: mol_type = other DNA
ggagtgcagtggtcggctcactgcaacctctgtcccccaggttcaagcgattcttgtgcctcaagtagctgggactacag

SEQ ID NO: 115283 - DNA, 80 bp, synthetic construct
  misc_feature 1..80: note = Artificially Synthesized Probe
  source 1..80: mol_type = other DNA
cccagttttctcgttaggcaattaaagatgaaggttctatttctcttggggcaaggtgggtggggtagagcttggctttc

SEQ ID NO: 115284 - DNA, 80 bp, synthetic construct
  misc_feature 1..80: note = Artificially Synthesized Probe
  source 1..80: mol_type = other DNA
cagcccgttcactgcagccccacggatagttgtacacaacaagccagttttttaagcctttcctatttcttgtctcaaca

SEQ ID NO: 115285 - DNA, 80 bp, synthetic construct; identical to SEQ ID NO: 37863
  misc_feature 1..80: note = Artificially Synthesized Probe
  source 1..80: mol_type = other DNA

SEQ ID NO: 115286 - DNA, 80 bp, synthetic construct
  misc_feature 1..80: note = Artificially Synthesized Probe
  source 1..80: mol_type = other DNA
gatctgcctcccagaacactggccctcaccgaggctaggggagtctgttggcaggctgctgatgtgttttcctagtttac

SEQ ID NO: 115287 - DNA, 80 bp, synthetic construct
  misc_feature 1..80: note = Artificially Synthesized Probe
  source 1..80: mol_type = other DNA
gaaaccccttctctactaaaaatacaaaacattagccgggagtggtggcaggtgcctgcagtcccagctactcaggaggc

SEQ ID NO: 115288 - DNA, 80 bp, synthetic construct
  misc_feature 1..80: note = Artificially Synthesized Probe
  source 1..80: mol_type = other DNA
aaataaattaaaaagataaaaagagttgccaccctgctgctcttgtagggagtgcagatgtcaacaactacctgcccaac

SEQ ID NO: 115289 - DNA, 80 bp, synthetic construct
  misc_feature 1..80: note = Artificially Synthesized Probe
  source 1..80: mol_type = other DNA
gcttcctccccagctccaaacacagttcaggttatcaaaacctcagggaaatgtttgttgaatgactgaaaaatggagtc

SEQ ID NO: 115290 - DNA, 80 bp, synthetic construct; identical to SEQ ID NO: 37864
  misc_feature 1..80: note = Artificially Synthesized Probe
  source 1..80: mol_type = other DNA

SEQ ID NO: 115291 - DNA, 80 bp, synthetic construct
  misc_feature 1..80: note = Artificially Synthesized Probe
  source 1..80: mol_type = other DNA
cctccttgttcaaaagacaccattaagaaagtaaaaggtgggctgggcatggtggctcacacctgtaatcctggcacttt

SEQ ID NO: 115292 - DNA, 80 bp, synthetic construct
  misc_feature 1..80: note = Artificially Synthesized Probe
  source 1..80: mol_type = other DNA
agaattgcttgaacctgggaggcagaggttgtagtgagctgagatagcgccactgcattccagcctgggtgacagaagga

SEQ ID NO: 115293 - DNA, 80 bp, synthetic construct
  misc_feature 1..80: note = Artificially Synthesized Probe
  source 1..80: mol_type = other DNA
caactgtccaaaaagcatattaaaagtgctccatttagttagttattggagatatcaaaatgtaaaaaataggtttcact

SEQ ID NO: 115294 - DNA, 80 bp, synthetic construct; identical to SEQ ID NO: 37865
  misc_feature 1..80: note = Artificially Synthesized Probe
  source 1..80: mol_type = other DNA

SEQ ID NO: 115295 - DNA, 80 bp, synthetic construct
  misc_feature 1..80: note = Artificially Synthesized Probe
  source 1..80: mol_type = other DNA
ggccacactaatggccaaagttgtttatctcgttttcttgcaagtcagctttctcaggcatgggaaactcatattataaa

SEQ ID NO: 115296 - DNA, 80 bp, synthetic construct
  misc_feature 1..80: note = Artificially Synthesized Probe
  source 1..80: mol_type = other DNA
cctgcaagacgtgttctgcctcttttttacaggggaactgtgaacaacaaaactttccttccaataatactggaagaaaa

SEQ ID NO: 115297 - DNA, 80 bp, synthetic construct
  misc_feature 1..80: note = Artificially Synthesized Probe
  source 1..80: mol_type = other DNA
tgtatattatctcagttcactttctgttgctataacagaataccacagaatgggtaatttataaaataattatatatagc

SEQ ID NO: 115298 - DNA, 80 bp, synthetic construct
  misc_feature 1..80: note = Artificially Synthesized Probe
  source 1..80: mol_type = other DNA
tatgcaccaccacacccagctaatgtttttgtatgatttggttttgttttgttttattttgagatggagtctccctctgt

SEQ ID NO: 115299 - DNA, 80 bp, synthetic construct; identical to SEQ ID NO: 37866
  misc_feature 1..80: note = Artificially Synthesized Probe
  source 1..80: mol_type = other DNA

SEQ ID NO: 115300 - DNA, 80 bp, synthetic construct
  misc_feature 1..80: note = Artificially Synthesized Probe
  source 1..80: mol_type = other DNA
tattttttttttttttttttttttttttaaagatgggattttgctctatcatccaggctggaatgcagtggcatgatcat

SEQ ID NO: 115301 - DNA, 80 bp, synthetic construct
  misc_feature 1..80: note = Artificially Synthesized Probe
  source 1..80: mol_type = other DNA
gcacgaccatagctcactgcagcctcaaactcctgggctcaagtgatcctctcacctcagcctcctgagtagctagaatt

SEQ ID NO: 115302 - DNA, 80 bp, synthetic construct
  misc_feature 1..80: note = Artificially Synthesized Probe
  source 1..80: mol_type = other DNA
agacaacccccaaagtcttaacttgttccagcaccaactcaaaattccaaagtccatggtctcatctaaatcagatgtgg

SEQ ID NO: 115303 - DNA, 80 bp, synthetic construct; identical to SEQ ID NO: 37867
  misc_feature 1..80: note = Artificially Synthesized Probe
  source 1..80: mol_type = other DNA

SEQ ID NO: 115304 - DNA, 80 bp, synthetic construct
  misc_feature 1..80: note = Artificially Synthesized Probe
  source 1..80: mol_type = other DNA
atgttgcacttcgcacaggttggagtctcatgcctgcagttctcccaagctggcattgcactatgatagctctaccattc

SEQ ID NO: 115305 - DNA, 80 bp, synthetic construct
  misc_feature 1..80: note = Artificially Synthesized Probe
  source 1..80: mol_type = other DNA
agcttttgcattctgcacacctgcaaaattagtgccatgtgtatgctgccaaggtttatgacttttaccttccacatcac

SEQ ID NO: 115306 - DNA, 80 bp, synthetic construct
  misc_feature 1..80: note = Artificially Synthesized Probe
  source 1..80: mol_type = other DNA
tctctgaaatggctttggagtttttctcccttgtcctgatgaacagcctctggctttgttctatgtgtactaattttctt

SEQ ID NO: 115307 - DNA, 80 bp, synthetic construct
  misc_feature 1..80: note = Artificially Synthesized Probe
  source 1..80: mol_type = other DNA
accacgcctggctaatttatgtgtactagttttcttatcaatcggtagcttggtcacactctcagttttctcagctgaaa

SEQ ID NO: 115308 - DNA, 80 bp, synthetic construct
  misc_feature 1..80: note = Artificially Synthesized Probe
  source 1..80: mol_type = other DNA
cctggctaatgtttgtgtttttagtagagacagggtttcaccatgttggccaagctgttcttgaactcctgacctcaagt

SEQ ID NO: 115309 - DNA, 80 bp, synthetic construct; identical to SEQ ID NO: 37868
  misc_feature 1..80: note = Artificially Synthesized Probe
  source 1..80: mol_type = other DNA

SEQ ID NO: 115310 - DNA, 80 bp, synthetic construct
  misc_feature 1..80: note = Artificially Synthesized Probe
  source 1..80: mol_type = other DNA
gcaacctctgcctcctgggttcaagtgattctcctgcttcagcctcctgagtagctgggattacaggtgtgcgccagagt

SEQ ID NO: 115311 - DNA, 80 bp, synthetic construct
  misc_feature 1..80: note = Artificially Synthesized Probe
  source 1..80: mol_type = other DNA
acaatacaggctttttctagcctgctcctcaaaactcttccaacctattcccatcacccagttccaaagccacttccaca

SEQ ID NO: 115312 - DNA, 80 bp, synthetic construct
  misc_feature 1..80: note = Artificially Synthesized Probe
  source 1..80: mol_type = other DNA
gccaccatctggtgagggccttcttgctgcatcatgacatggagaagtcatcacacggtgagagggcaagagcatgccag

SEQ ID NO: 115313 - DNA, 80 bp, synthetic construct; identical to SEQ ID NO: 37869
  misc_feature 1..80: note = Artificially Synthesized Probe
  source 1..80: mol_type = other DNA

SEQ ID NO: 115314 - DNA, 80 bp, synthetic construct
  misc_feature 1..80: note = Artificially Synthesized Probe
  source 1..80: mol_type = other DNA
caaacctgctgactgccaccccacaactcattctatatgatgctgtctggaaaaagaaatgaatgaagcagaaatccatc

SEQ ID NO: 115315 - DNA, 80 bp, synthetic construct
  misc_feature 1..80: note = Artificially Synthesized Probe
  source 1..80: mol_type = other DNA
tcggaatgagtggctcttgggattcaaactaggaaggcctgtccacaaagcttggccagatgcttcccagatttcagcat

SEQ ID NO: 115316 - DNA, 80 bp, synthetic construct; identical to SEQ ID NO: 37870
  misc_feature 1..80: note = Artificially Synthesized Probe
  source 1..80: mol_type = other DNA

SEQ ID NO: 115317 - DNA, 80 bp, synthetic construct
  misc_feature 1..80: note = Artificially Synthesized Probe
  source 1..80: mol_type = other DNA
cagtttgtgggaaatgctccatcctggctctgatcacagcatctgactcagtcacatatgctcatctgaataggaaattg

SEQ ID NO: 115318 - DNA, 80 bp, synthetic construct
  misc_feature 1..80: note = Artificially Synthesized Probe
  source 1..80: mol_type = other DNA
tcataaagaacggggctatgttctattgctaaatctgcacagcaaccctgtgacataggacttattttcccattttacag

SEQ ID NO: 115319 - DNA, 80 bp, synthetic construct
  misc_feature 1..80: note = Artificially Synthesized Probe
  source 1..80: mol_type = other DNA
aggggtgataccactgtgacaagagtagatttttaaaacttcgcgtaaaacagcaagagggactcaacacattttgttat

SEQ ID NO: 115320 - DNA, 80 bp, synthetic construct
  misc_feature 1..80: note = Artificially Synthesized Probe
  source 1..80: mol_type = other DNA
aaggcaagaggataactgcttcttggtcctcaactcactcaccctgatgagagttgacttgcagggatgtgctggagcca

SEQ ID NO: 115321 - DNA, 80 bp, synthetic construct
  misc_feature 1..80: note = Artificially Synthesized Probe
  source 1..80: mol_type = other DNA
ttaagttaatcctctaccagcaaaccactgattggctttttcttttttggctataggtcagtggttctaaaacttgagct

SEQ ID NO: 115322 - DNA, 80 bp, synthetic construct; identical to SEQ ID NO: 37871
  misc_feature 1..80: note = Artificially Synthesized Probe
  source 1..80: mol_type = other DNA

SEQ ID NO: 115323 - DNA, 80 bp, synthetic construct
  misc_feature 1..80: note = Artificially Synthesized Probe
  source 1..80: mol_type = other DNA
gctcccttccttcactggctttttttttttctaacttcccctgcctgttctctacaggcatctgagtaggaccttgctag

SEQ ID NO: 115324 - DNA, 80 bp, synthetic construct
  misc_feature 1..80: note = Artificially Synthesized Probe
  source 1..80: mol_type = other DNA
gatgtctcacccactgatatgtgatccctataatttggggctatggttgtctctgtagaaggcatccaagaaccggaagg

SEQ ID NO: 115325 - DNA, 80 bp, synthetic construct
  misc_feature 1..80: note = Artificially Synthesized Probe
  source 1..80: mol_type = other DNA
taaatctcatttcttagagtctgagaatacctcagtaggcggttgtgagaattcaaggagataatgcatataatggtttc

SEQ ID NO: 115326 - DNA, 80 bp, synthetic construct; identical to SEQ ID NO: 37872
  misc_feature 1..80: note = Artificially Synthesized Probe
  source 1..80: mol_type = other DNA

SEQ ID NO: 115327 - DNA, 80 bp, synthetic construct
  misc_feature 1..80: note = Artificially Synthesized Probe
  source 1..80: mol_type = other DNA
tccagtagcatcccaacagccctgtgaggggagatagtatccttatctccatttacaagggggcgactgaggctgagaaa

SEQ ID NO: 115328 - DNA, 80 bp, synthetic construct
  misc_feature 1..80: note = Artificially Synthesized Probe
  source 1..80: mol_type = other DNA
gtcctatttggaaagaagaggtggcctggagaggtgataaatccatccaaggtaggggctggacataatttctgaataaa

SEQ ID NO: 115329 - DNA, 80 bp, synthetic construct
  misc_feature 1..80: note = Artificially Synthesized Probe
  source 1..80: mol_type = other DNA
atgaagcaccagcagcacaatgtaggtgatctctccaagcagacccagcaagctgaagatggagtgcatgacggagatgt

SEQ ID NO: 115330 - DNA, 80 bp, synthetic construct; identical to SEQ ID NO: 37850
  misc_feature 1..80: note = Artificially Synthesized Probe
  source 1..80: mol_type = other DNA

SEQ ID NO: 115331 - DNA, 80 bp, synthetic construct; identical to SEQ ID NO: 37873
  misc_feature 1..80: note = Artificially Synthesized Probe
  source 1..80: mol_type = other DNA

SEQ ID NO: 115332 - DNA, 80 bp, synthetic construct
  misc_feature 1..80: note = Artificially Synthesized Probe
  source 1..80: mol_type = other DNA
attcctggtctctccccacgagctgccagtagcagccctcaccccactgtgtcaaccaagaacgcctccagacattgtca

SEQ ID NO: 115333 - DNA, 80 bp, synthetic construct
  misc_feature 1..80: note = Artificially Synthesized Probe
  source 1..80: mol_type = other DNA
tgaacaggccttgtttttcttggatgcttttgcttaaaatccaacagccaaatgaggaaactgtaaaagcaaaacaaaca

SEQ ID NO: 115334 - DNA, 80 bp, synthetic construct; identical to SEQ ID NO: 37874
  misc_feature 1..80: note = Artificially Synthesized Probe
  source 1..80: mol_type = other DNA

SEQ ID NO: 115335 - DNA, 80 bp, synthetic construct
  misc_feature 1..80: note = Artificially Synthesized Probe
  source 1..80: mol_type = other DNA
ctactaaaaacacaaaaaattagctgggcgtggtggagggcgcctgtagtcccagctactcaggaggctgaggcaggaga

SEQ ID NO: 115336 - DNA, 80 bp, synthetic construct
  misc_feature 1..80: note = Artificially Synthesized Probe
  source 1..80: mol_type = other DNA
ggtggtgggcacctgtaatcccagctactcaggaggctgaggtaggagaatcacttgaacccaggaggtggaggttgcag

SEQ ID NO: 115337 - DNA, 80 bp, synthetic construct
  misc_feature 1..80: note = Artificially Synthesized Probe
  source 1..80: mol_type = other DNA
ctgggtggaccctatgccttcagaatgtctgtttcctggttgggccacacactcttcttaccaataagctttcatacaca

SEQ ID NO: 115338 - DNA, 80 bp, synthetic construct
  misc_feature 1..80: note = Artificially Synthesized Probe
  source 1..80: mol_type = other DNA
tctgtgtatccatttcgctcactaaactatagcttgaaaagcaagatgagtgttaaaacgtatgtgttgaatgaaggaat

SEQ ID NO: 115339 - DNA, 80 bp, synthetic construct; identical to SEQ ID NO: 37875
  misc_feature 1..80: note = Artificially Synthesized Probe
  source 1..80: mol_type = other DNA

SEQ ID NO: 115340 - DNA, 80 bp, synthetic construct
  misc_feature 1..80: note = Artificially Synthesized Probe
  source 1..80: mol_type = other DNA
tctgtcgcccaggctggagtgcagtggcgcaatttcggctcactgcaagctctgtctcccaggttcaagtgattctcgca

SEQ ID NO: 115341 - DNA, 80 bp, synthetic construct
  misc_feature 1..80: note = Artificially Synthesized Probe
  source 1..80: mol_type = other DNA
ctgcgcccagccagtttttcctaattttaggttggaatgcactccctgaatagcccctgttcatccaaatccagccttcg

SEQ ID NO: 115342 - DNA, 80 bp, synthetic construct
  misc_feature 1..80: note = Artificially Synthesized Probe
  source 1..80: mol_type = other DNA
tccccgacctccctatgacctctccctcctctcattccagcagctactgccaggattgcttgtttcgtattttacattat

SEQ ID NO: 115343 - DNA, 80 bp, synthetic construct
  misc_feature 1..80: note = Artificially Synthesized Probe
  source 1..80: mol_type = other DNA
tcaggatttgctgagtattggagaaagatccatccacttagaagaagaattaaacaatcagaagtggacacgacctggac

SEQ ID NO: 115344 - DNA, 80 bp, synthetic construct; identical to SEQ ID NO: 37876
  misc_feature 1..80: note = Artificially Synthesized Probe
  source 1..80: mol_type = other DNA

SEQ ID NO: 115345 - DNA, 80 bp, synthetic construct
  misc_feature 1..80: note = Artificially Synthesized Probe
  source 1..80: mol_type = other DNA
agcctggtaacaaattctccccagtgcccaagcaagctcaaatgggttctgccacctgctccccagcatcttaacaaatg

SEQ ID NO: 115346 - DNA, 80 bp, synthetic construct
  misc_feature 1..80: note = Artificially Synthesized Probe
  source 1..80: mol_type = other DNA
ccttcagccaaagcagagagcattagttgtctagtttcttaccggcaggcacttggctcccccgatggagatcagcccag

SEQ ID NO: 115347 - DNA, 80 bp, synthetic construct
  misc_feature 1..80: note = Artificially Synthesized Probe
  source 1..80: mol_type = other DNA
ggtaaaggaagcaaggtagagagagaacaccatcttgctgcaagtgaccagcacgctgggaacaaggcaaccctgtaaca

SEQ ID NO: 115348 - DNA, 80 bp, synthetic construct; identical to SEQ ID NO: 37877
  misc_feature 1..80: note = Artificially Synthesized Probe
  source 1..80: mol_type = other DNA

SEQ ID NO: 115349 - DNA, 80 bp, synthetic construct
  misc_feature 1..80: note = Artificially Synthesized Probe
  source 1..80: mol_type = other DNA
attgtaaggattaaatgagtttccacatataaagctcttagtccagtgtctggcatagaacatgaataaatgcccaatag

SEQ ID NO: 115350 - DNA, 80 bp, synthetic construct
  misc_feature 1..80: note = Artificially Synthesized Probe
  source 1..80: mol_type = other DNA
atctgacaccctcagctctcacctaggtttagcctctgagcttccctgagctgacacccactcctgccttgctaggtgtc

SEQ ID NO: 115351 - DNA, 80 bp, synthetic construct
  misc_feature 1..80: note = Artificially Synthesized Probe
  source 1..80: mol_type = other DNA
ccaccagctggaccccctgcccccatcatcatgagaacttgttttgtctcccctctcacccatctctgcccacaagactc

SEQ ID NO: 115352 - DNA, 80 bp, synthetic construct; identical to SEQ ID NO: 37878
  misc_feature 1..80: note = Artificially Synthesized Probe
  source 1..80: mol_type = other DNA

SEQ ID NO: 115353 - DNA, 80 bp, synthetic construct
  misc_feature 1..80: note = Artificially Synthesized Probe
  source 1..80: mol_type = other DNA
ggccccctgtgaccacccagcattcttcctagagctccactgtagaggcaggcacagctccaccacccggcatgccctct

SEQ ID NO: 115354 - DNA, 80 bp, synthetic construct
  misc_feature 1..80: note = Artificially Synthesized Probe
  source 1..80: mol_type = other DNA
ctggctaattttttatatttttggtagagacgtggtttcaccatattggccaggctggtcttgaactcctgacttgaagt

SEQ ID NO: 115355 - DNA, 80 bp, synthetic construct
  misc_feature 1..80: note = Artificially Synthesized Probe
  source 1..80: mol_type = other DNA
ctagagcatagtaggtgttgaacatggcattcttcctttggattggacttctcagcagagcagagttgacacttggccag

SEQ ID NO: 115356 - DNA, 80 bp, synthetic construct
  misc_feature 1..80: note = Artificially Synthesized Probe
  source 1..80: mol_type = other DNA
cagccttgtcacttagagttagatggggaagtcacgtctcccctccgagctctcaagctgataccagctaaccacatttt

SEQ ID NO: 115357 - DNA, 80 bp, synthetic construct
  misc_feature 1..80: note = Artificially Synthesized Probe
  source 1..80: mol_type = other DNA
ggctcactgcaacctccaccacctggattcaaaagattctcctgcctcagcctcccaagtagctgggattacaggcgtgc

SEQ ID NO: 115358 - DNA, 80 bp, synthetic construct; identical to SEQ ID NO: 37879
  misc_feature 1..80: note = Artificially Synthesized Probe
  source 1..80: mol_type = other DNA

SEQ ID NO: 115359 - DNA, 80 bp, synthetic construct
  misc_feature 1..80: note = Artificially Synthesized Probe
  source 1..80: mol_type = other DNA
gattggataaacttattgaaactcacacataatgagtctctcctttctagtggatattaatgaagagaggtccctaaaag

SEQ ID NO: 115360 - DNA, 80 bp, synthetic construct
  misc_feature 1..80: note = Artificially Synthesized Probe
  source 1..80: mol_type = other DNA
tcaccccaccttgtccttacccagcatggcagacaaactgggtatcgttgctctctgatcattatcctccgttcccttgg

SEQ ID NO: 115361 - DNA, 80 bp, synthetic construct; identical to SEQ ID NO: 37880
  misc_feature 1..80: note = Artificially Synthesized Probe
  source 1..80: mol_type = other DNA

SEQ ID NO: 115362 - DNA, 80 bp, synthetic construct
  misc_feature 1..80: note = Artificially Synthesized Probe
  source 1..80: mol_type = other DNA
tttcaccgtgtttgccaggctggtctcaaactcctgacctcaggcgatccacccgcctcggcctcccaaagtgctgggat

SEQ ID NO: 115363 - DNA, 80 bp, synthetic construct
  misc_feature 1..80: note = Artificially Synthesized Probe
  source 1..80: mol_type = other DNA
ctaagtagctgggattacaggagtgcacaaccatgcctggccaatttttaaattttgtgtaaagatggaatctcactatg

SEQ ID NO: 115364 - DNA, 80 bp, synthetic construct
  misc_feature 1..80: note = Artificially Synthesized Probe
  source 1..80: mol_type = other DNA
tcactgattcctacttctcagcggaattttaactctgcaggagtgatgagtgatataaattttgcaacatgaagcaacca

SEQ ID NO: 115365 - DNA, 80 bp, synthetic construct; identical to SEQ ID NO: 37851
  misc_feature 1..80: note = Artificially Synthesized Probe
  source 1..80: mol_type = other DNA

SEQ ID NO: 115366 - DNA, 80 bp, synthetic construct; identical to SEQ ID NO: 37881
  misc_feature 1..80: note = Artificially Synthesized Probe
  source 1..80: mol_type = other DNA

SEQ ID NO: 115367 - DNA, 80 bp, synthetic construct
  misc_feature 1..80: note = Artificially Synthesized Probe
  source 1..80: mol_type = other DNA
agttcgataccagcctggccaacatggcaaaaccctgtctctactaaaaatacaaaaattagccaggcgtggtgatgctt

SEQ ID NO: 115368 - DNA, 80 bp, synthetic construct
  misc_feature 1..80: note = Artificially Synthesized Probe
  source 1..80: mol_type = other DNA
tgttactcctctgctcagaagcctccagcggctcccatgtcactcaaagtcaaggtccaggttcttgccacgaccctgca

SEQ ID NO: 115369 - DNA, 80 bp, synthetic construct
  misc_feature 1..80: note = Artificially Synthesized Probe
  source 1..80: mol_type = other DNA
caccctgggtgcaagcaatcggggtgccttgtctgcagagggtgtctaacaattctaaagccaactaaaaagtctgtctg

SEQ ID NO: 115370 - DNA, 80 bp, synthetic construct
  misc_feature 1..80: note = Artificially Synthesized Probe
  source 1..80: mol_type = other DNA
ttctcctgcttcagcctcccatgtagctgggattacaggcgcccaccactgtgcccggctaatttttgtatttttagtag

SEQ ID NO: 115371 - DNA, 80 bp, synthetic construct; identical to SEQ ID NO: 37882
  misc_feature 1..80: note = Artificially Synthesized Probe
  source 1..80: mol_type = other DNA

SEQ ID NO: 115372 - DNA, 80 bp, synthetic construct
  misc_feature 1..80: note = Artificially Synthesized Probe
  source 1..80: mol_type = other DNA
tctccccaacttttcgtgtttcttttctccattttatttttctctgtggtacttaccactctctaacatgctatatcttt

SEQ ID NO: 115373 - DNA, 80 bp, synthetic construct
  misc_feature 1..80: note = Artificially Synthesized Probe
  source 1..80: mol_type = other DNA
gtgaacaaatgatggtaaaaagccctcagtcatacataaagaggaaagtctatgcagtttcctgataagaactgaaaagc

SEQ ID NO: 115374 - DNA, 80 bp, synthetic construct
  misc_feature 1..80: note = Artificially Synthesized Probe
  source 1..80: mol_type = other DNA
gctgaattgaagttttgaggaaaatgaatactgaaaatcagtgctaagccctcctctagaccagttaagctagcaagtca

SEQ ID NO: 115375 - DNA, 80 bp, synthetic construct; identical to SEQ ID NO: 37883
  misc_feature 1..80: note = Artificially Synthesized Probe
  source 1..80: mol_type = other DNA

SEQ ID NO: 115376 - DNA, 80 bp, synthetic construct
  misc_feature 1..80: note = Artificially Synthesized Probe
  source 1..80: mol_type = other DNA
agctggtgtacagagatgttagatgtacagagagaatcagagccaaaagatggagagcacagactacctgggatctcagt

SEQ ID NO: 115377 - DNA, 80 bp, synthetic construct
  misc_feature 1..80: note = Artificially Synthesized Probe
  source 1..80: mol_type = other DNA
acttgaacctgggaggcagaggttgaagtgagccgagatcacaccattacactctagcctgagctatagagcaagactct

SEQ ID NO: 115378 - DNA, 80 bp, synthetic construct
  misc_feature 1..80: note = Artificially Synthesized Probe
  source 1..80: mol_type = other DNA
ggtgacattttcttcctgggaatcagggagttctcattaatccttatattaagcagagagaaaaggcagaaaatggaagt

SEQ ID NO: 115379 - DNA, 80 bp, synthetic construct
  misc_feature 1..80: note = Artificially Synthesized Probe
  source 1..80: mol_type = other DNA
tcagggaagaatcaatgaacactaaaatcagtgggtgaaagttggatgatcaacaggatttctataggaaattatctcct

SEQ ID NO: 115380 - DNA, 80 bp, synthetic construct; identical to SEQ ID NO: 37884
  misc_feature 1..80: note = Artificially Synthesized Probe
  source 1..80: mol_type = other DNA

SEQ ID NO: 115381 - DNA, 80 bp, synthetic construct
  misc_feature 1..80: note = Artificially Synthesized Probe
  source 1..80: mol_type = other DNA
gaaaaaattggtgaaatgagaataaggtaatcataatatatcaatgtcaatttctcatttttgttaactgaacaatggtt

SEQ ID NO: 115382 - DNA, 80 bp, synthetic construct
  misc_feature 1..80: note = Artificially Synthesized Probe
  source 1..80: mol_type = other DNA
ggaaggtgaaagggaagcaaggcacatcttacgtggtggcaggtgagagagagagagaaagagagagaggaagtgccaca

SEQ ID NO: 115383 - DNA, 80 bp, synthetic construct; identical to SEQ ID NO: 37885
  misc_feature 1..80: note = Artificially Synthesized Probe
  source 1..80: mol_type = other DNA

SEQ ID NO: 115384 - DNA, 80 bp, synthetic construct
  misc_feature 1..80: note = Artificially Synthesized Probe
  source 1..80: mol_type = other DNA
aggcacaagaattgcttgaatccaggaggcggaggttgcagtgagccgagatcacaccactgcactccagcctgggtgat

SEQ ID NO: 115385 - DNA, 80 bp, synthetic construct
  misc_feature 1..80: note = Artificially Synthesized Probe
  source 1..80: mol_type = other DNA
tgggaggccaaggcgggtggatcacctgaggtcaggagtttgagaccagcctggccaacatggcaaaactccgtctctac

SEQ ID NO: 115386 - DNA, 80 bp, synthetic construct
  misc_feature 1..80: note = Artificially Synthesized Probe
  source 1..80: mol_type = other DNA
tctgaaaaaaaaaaaaaaaacttcccatattccctcccagaccattgttcttttttccaccccaaacatccccagctccc

SEQ ID NO: 115387 - DNA, 80 bp, synthetic construct; identical to SEQ ID NO: 37886
  misc_feature 1..80: note = Artificially Synthesized Probe
  source 1..80: mol_type = other DNA

SEQ ID NO: 115388 - DNA, 80 bp, synthetic construct
  misc_feature 1..80: note = Artificially Synthesized Probe
  source 1..80: mol_type = other DNA
aaattaggtaatacacgtagtggaatgaattagcaaatgatgagtgcattttcataaaccttcggaggatgagatgggtg

SEQ ID NO: 115389 - DNA, 80 bp, synthetic construct
  misc_feature 1..80: note = Artificially Synthesized Probe
  source 1..80: mol_type = other DNA
ccatgccaggcactgtcctaaatgctttagaacagtattcaaaattgaacaagtgttcggtcacttgttcaatcctcaca

SEQ ID NO: 115390 - DNA, 80 bp, synthetic construct
  misc_feature 1..80: note = Artificially Synthesized Probe
  source 1..80: mol_type = other DNA
tcctttcttaaccagctcagattttgtgggctactgttatacttcctcctttgcaaacagccccatctctggtctccctt

SEQ ID NO: 115391 - DNA, 80 bp, synthetic construct
  misc_feature 1..80: note = Artificially Synthesized Probe
  source 1..80: mol_type = other DNA
cccctgcagccctctcactctcttccactcccacagatgaccataccacactttccctctccgcaaaccccatccctcct

SEQ ID NO: 115392 - DNA, 80 bp, synthetic construct; identical to SEQ ID NO: 37887
  misc_feature 1..80: note = Artificially Synthesized Probe
  source 1..80: mol_type = other DNA

SEQ ID NO: 115393 - DNA, 80 bp, synthetic construct
  misc_feature 1..80: note = Artificially Synthesized Probe
  source 1..80: mol_type = other DNA
ctccaaggctgcatctctccactggactagcgagagggttgtcagtgttttgctcccgggtctgcttccggctgcttatt

SEQ ID NO: 115394 - DNA, 80 bp, synthetic construct
  misc_feature 1..80: note = Artificially Synthesized Probe
  source 1..80: mol_type = other DNA
gctttgctatttcaactatcacgatgtgggcatctgcaaagctgttgccatgctgtggaagctctgacctttttgacttc

SEQ ID NO: 115395 - DNA, 80 bp, synthetic construct
  misc_feature 1..80: note = Artificially Synthesized Probe
  source 1..80: mol_type = other DNA
gaattatatttaagttgtgagactgagttctgtattctggtgagttaatggggttgcctcccagcttcttataagactca

SEQ ID NO: 115396 - DNA, 80 bp, synthetic construct; identical to SEQ ID NO: 37888
  misc_feature 1..80: note = Artificially Synthesized Probe
  source 1..80: mol_type = other DNA

SEQ ID NO: 115397 - DNA, 80 bp, synthetic construct
  misc_feature 1..80: note = Artificially Synthesized Probe
  source 1..80: mol_type = other DNA
tagacgtatcaaaatattacccattgtaaactgagatttaattctcaaatgtattctacttgttctaaaacaatctgtcc

SEQ ID NO: 115398 - DNA, 80 bp, synthetic construct
  misc_feature 1..80: note = Artificially Synthesized Probe
  source 1..80: mol_type = other DNA
tgctcaaaatcccactcctgctttccaactcaaaggcttgactcttgcagttcatctctcttctgtatcatcagattttt

SEQ ID NO: 115399 - DNA, 80 bp, synthetic construct
  misc_feature 1..80: note = Artificially Synthesized Probe
  source 1..80: mol_type = other DNA
aaaaaaaaaaatcacccctggatttatcagcttagcaagtttgcatccttgcctctttaatggatatttggctttcaact

SEQ ID NO: 115400 - DNA, 80 bp, synthetic construct
  misc_feature 1..80: note = Artificially Synthesized Probe
  source 1..80: mol_type = other DNA
ccatgcatgccaaggtctccttgtcaaatccaatggctacttcccagccctcatccgacttgacctctcagcagcattca

SEQ ID NO: 115401 - DNA, 80 bp, synthetic construct; identical to SEQ ID NO: 37889
  misc_feature 1..80: note = Artificially Synthesized Probe
  source 1..80: mol_type = other DNA

SEQ ID NO: 115402 - DNA, 80 bp, synthetic construct
  misc_feature 1..80: note = Artificially Synthesized Probe
  source 1..80: mol_type = other DNA
ctatcccaccccaatgttccccatctcagtaaatggcaccagcagctgctgagttgtgccagatgagaaccttgaagtca

SEQ ID NO: 115403 - DNA, 80 bp, synthetic construct
  misc_feature 1..80: note = Artificially Synthesized Probe
  source 1..80: mol_type = other DNA
ttcctctcttgccccttcagtcttttctgaacccagaagccagagtatcttaaaacataagtcagatcatagctctcctc

SEQ ID NO: 115404 - DNA, 80 bp, synthetic construct
  misc_feature 1..80: note = Artificially Synthesized Probe
  source 1..80: mol_type = other DNA
ttaattcaattactccctcaaaaccctatgtggtagtactgctaccctcatattacagacgaagaaactaaagctctaag

SEQ ID NO: 115405 - DNA, 80 bp, synthetic construct
  misc_feature 1..80: note = Artificially Synthesized Probe
  source 1..80: mol_type = other DNA
tgggttctgccactatcttgctatgtgatcttgggcagtcccttcccctctccaggcatcagccttctcacctatgagat

SEQ ID NO: 115406 - DNA, 80 bp, synthetic construct; identical to SEQ ID NO: 37890
  misc_feature 1..80: note = Artificially Synthesized Probe
  source 1..80: mol_type = other DNA

SEQ ID NO: 115407 - DNA, 80 bp, synthetic construct
  misc_feature 1..80: note = Artificially Synthesized Probe
  source 1..80: mol_type = other DNA
ctatcaatcttttcttttcttttttcttttttttttattggagatgaagtcttgctcttgtcccccaggctgcagtgcaa

SEQ ID NO: 115408 - DNA, 80 bp, synthetic construct
  misc_feature 1..80: note = Artificially Synthesized Probe
  source 1..80: mol_type = other DNA
cttgaactcctgacctcaggtgatctgccctccttggcctcccaaagtgctgggattacaggtgtgagccactgtaccca

SEQ ID NO: 115409 - DNA, 80 bp, synthetic construct; identical to SEQ ID NO: 37852
  misc_feature 1..80: note = Artificially Synthesized Probe
  source 1..80: mol_type = other DNA

SEQ ID NO: 115410 - DNA, 80 bp, synthetic construct; identical to SEQ ID NO: 37891
  misc_feature 1..80: note = Artificially Synthesized Probe
  source 1..80: mol_type = other DNA

SEQ ID NO: 115411 - DNA, 80 bp, synthetic construct
  misc_feature 1..80: note = Artificially Synthesized Probe
  source 1..80: mol_type = other DNA
tcctcccagcaccatgactcacgttgaagatattactgatgaccatcctcagggtgcctaaagctgtcacctccaccagc

SEQ ID NO: 115412 - DNA, 80 bp, synthetic construct
  misc_feature 1..80: note = Artificially Synthesized Probe
  source 1..80: mol_type = other DNA
ttcattcattcaacaaacactgttgggcaccttactttctgtggaaatagaagacaagatttctacccacctgggcgctg

SEQ ID NO: 115413 - DNA, 80 bp, synthetic construct
  misc_feature 1..80: note = Artificially Synthesized Probe
  source 1..80: mol_type = other DNA
ctgttccctcaggggatctgataactgggattctgcccagtcttcttttctgctgccatcattcggatgctcaacagagg

SEQ ID NO: 115414 - DNA, 80 bp, synthetic construct; identical to SEQ ID NO: 37892
  misc_feature 1..80: note = Artificially Synthesized Probe
  source 1..80: mol_type = other DNA

SEQ ID NO: 115415 - DNA, 80 bp, synthetic construct
  misc_feature 1..80: note = Artificially Synthesized Probe
  source 1..80: mol_type = other DNA
gatccaaaaaaaaaaaaaatgtacttatgatctagacaggctacatacaccatgagcctgtcaactaagaatatctgtga

SEQ ID NO: 115416 - DNA, 80 bp, synthetic construct
  misc_feature 1..80: note = Artificially Synthesized Probe
  source 1..80: mol_type = other DNA
aatgatgatgatgctacaaccacagcaacagtgatgataatgatttattataagagcattttgtaaaacaggcttgtaac

SEQ ID NO: 115417 - DNA, 80 bp, synthetic construct
  misc_feature 1..80: note = Artificially Synthesized Probe
  source 1..80: mol_type = other DNA
aaaaattacccgggcatggtggtgcatgcttgtaatcccagccactctcgaggctgaggcatggcagtcgcttgaacccg

SEQ ID NO: 115418 - DNA, 80 bp, synthetic construct; identical to SEQ ID NO: 37893
  misc_feature 1..80: note = Artificially Synthesized Probe
  source 1..80: mol_type = other DNA

SEQ ID NO: 115419 - DNA, 80 bp, synthetic construct
  misc_feature 1..80: note = Artificially Synthesized Probe
  source 1..80: mol_type = other DNA
cttacagggaccaggaatttagaataaggggttattcaatgttccatcgtgcctggacaggttattccttttaagtgggt

SEQ ID NO: 115420 - DNA, 80 bp, synthetic construct
  misc_feature 1..80: note = Artificially Synthesized Probe
  source 1..80: mol_type = other DNA
gtgctctcaggtctaggctgcctgggctggaatcttgactcagacactttctggctgtgtgatcctgggcaacttattta

SEQ ID NO: 115421 - DNA, 80 bp, synthetic construct
  misc_feature 1..80: note = Artificially Synthesized Probe
  source 1..80: mol_type = other DNA
tcctgcctcagcttcccaagtagctgggattacaggcatccaccaccacgcctgtctaatttttttttgtatttttagta

SEQ ID NO: 115422 - DNA, 80 bp, synthetic construct
  misc_feature 1..80: note = Artificially Synthesized Probe
  source 1..80: mol_type = other DNA
atacgtcaagcacaataaaggagttggttattgctattatcttctagggagagtcctgcagatttcaaaatacattaaaa

SEQ ID NO: 115423 - DNA, 80 bp, synthetic construct
  misc_feature 1..80: note = Artificially Synthesized Probe
  source 1..80: mol_type = other DNA
ctaggcgtggtggtgtgtgcctgtggtctcagctactcaggaggctgtaattccagtacttttcggagccgaggtgggca

SEQ ID NO: 115424 - DNA, 80 bp, synthetic construct; identical to SEQ ID NO: 37894
  misc_feature 1..80: note = Artificially Synthesized Probe
  source 1..80: mol_type = other DNA

SEQ ID NO: 115425 - DNA, 80 bp, synthetic construct
  misc_feature 1..80: note = Artificially Synthesized Probe
  source 1..80: mol_type = other DNA
aaaaatttaactcaggaggctgaggtgggaggatcacttgagcccaggaggcagaggctgcagtgagctatgattgtacc

SEQ ID NO: 115426 - DNA, 80 bp, synthetic construct
  misc_feature 1..80: note = Artificially Synthesized Probe
  source 1..80: mol_type = other DNA
aataagataggcccctcccctgaagggactcaaaacagaaccaaatcagtcccaagtcaagtggcacaagctggagtgtt

SEQ ID NO: 115427 - DNA, 80 bp, synthetic construct
  misc_feature 1..80: note = Artificially Synthesized Probe
  source 1..80: mol_type = other DNA
gtgacttctctcccttctcatcttcctggattgagtcaagaatgaacaggtccctgtggacatcagatgaagggagcagc

SEQ ID NO: 115428 - DNA, 80 bp, synthetic construct; identical to SEQ ID NO: 37895
  misc_feature 1..80: note = Artificially Synthesized Probe
  source 1..80: mol_type = other DNA

SEQ ID NO: 115429 - DNA, 80 bp, synthetic construct
  misc_feature 1..80: note = Artificially Synthesized Probe
  source 1..80: mol_type = other DNA
gtagagacaggatttcaccatgttgctcaggtcggtctcgaactcctgacctcaggtaatccatctgtctaggcctccta

SEQ ID NO: 115430 - DNA, 80 bp, synthetic construct
  misc_feature 1..80: note = Artificially Synthesized Probe
  source 1..80: mol_type = other DNA
tacttacttttatgcaggactgttgtgaggataaaatcaggtaatgtggaaaagcacctagcacaaaatcagaaactgta

SEQ ID NO: 115431 - DNA, 80 bp, synthetic construct
  misc_feature 1..80: note = Artificially Synthesized Probe
  source 1..80: mol_type = other DNA
tcctgcctcagcctcccgagtggctgggactacaggcgcccgccaccacgcccagctaattttttgtatgtttagtcgag

SEQ ID NO: 115432 - DNA, 80 bp, synthetic construct
  misc_feature 1..80: note = Artificially Synthesized Probe
  source 1..80: mol_type = other DNA
gtaaagtggcacgatcatggctcactcagcctcagcctcactgggttcaggtgatcctcctgcctcagcctcccaagtag

SEQ ID NO: 115433 - DNA, 80 bp, synthetic construct; identical to SEQ ID NO: 37896
  misc_feature 1..80: note = Artificially Synthesized Probe
  source 1..80: mol_type = other DNA

SEQ ID NO: 115434 - DNA, 80 bp, synthetic construct
  misc_feature 1..80: note = Artificially Synthesized Probe
  source 1..80: mol_type = other DNA
gttaaacaaaataatatttgtggagtgctcagcacagttcctggctcatagagaaatgtttaacagcagtgcccagaggt

SEQ ID NO: 115435 - DNA, 80 bp, synthetic construct
  misc_feature 1..80: note = Artificially Synthesized Probe
  source 1..80: mol_type = other DNA
tctattaagtgccaatgcccttttaaaatgtgtatagcttgatgtgtaatcatcacccaggtgaacacagagaacatttt

SEQ ID NO: 115436 - DNA, 80 bp, synthetic construct; identical to SEQ ID NO: 37897
  misc_feature 1..80: note = Artificially Synthesized Probe
  source 1..80: mol_type = other DNA

SEQ ID NO: 115437 - DNA, 80 bp, synthetic construct
  misc_feature 1..80: note = Artificially Synthesized Probe
  source 1..80: mol_type = other DNA
cctgaccaacacagagaaaccctatctctactaaaaatacaaaatcagccaggtgtggtggcacatgcctataatcccag

SEQ ID NO: 115438 - DNA, 80 bp, synthetic construct
  misc_feature 1..80: note = Artificially Synthesized Probe
  source 1..80: mol_type = other DNA
gaaaaaaaaaaaatagaatgtctctctaggtgtggcatgtctatttctctctgtctaacgtgtttccttcttacgttttc

SEQ ID NO: 115439 - DNA, 80 bp, synthetic construct
  misc_feature 1..80: note = Artificially Synthesized Probe
  source 1..80: mol_type = other DNA
gaataatcttttagcataaggatgtcctaaatattgcacagcactggtgctagacagagagggggcaatatcccagatct

SEQ ID NO: 115440 - DNA, 80 bp, synthetic construct
  misc_feature 1..80: note = Artificially Synthesized Probe
  source 1..80: mol_type = other DNA
ttacctcacttgatctttgaaataacccagtgaagtagcacaaagattactactcttatgttaccagtgagagaggtcaa

SEQ ID NO: 115441 - DNA, 80 bp, synthetic construct
  misc_feature 1..80: note = Artificially Synthesized Probe
  source 1..80: mol_type = other DNA
agaggttgaaggccacactgctccagctgtgtctccggaaatttgaggtgaggaagcccaagccaagggccgccatcacg

SEQ ID NO: 115442 - DNA, 80 bp, synthetic construct; identical to SEQ ID NO: 37898
  misc_feature 1..80: note = Artificially Synthesized Probe
  source 1..80: mol_type = other DNA

SEQ ID NO: 115443 - DNA, 80 bp, synthetic construct
  misc_feature 1..80: note = Artificially Synthesized Probe
  source 1..80: mol_type = other DNA
agggccaaccccctggctgggcacatgagaaaataaagccacagaagccaagtgacttgtcccaggacacacagaaaaga

SEQ ID NO: 115444 - DNA, 80 bp, synthetic construct
  misc_feature 1..80: note = Artificially Synthesized Probe
  source 1..80: mol_type = other DNA
tgagcagaggctgctgtggcaggtgagtggaagagatgcacctgagggcagggaggggcccagcaaagcggagggtgagc

SEQ ID NO: 115445 - DNA, 80 bp, synthetic construct; identical to SEQ ID NO: 37899
  misc_feature 1..80: note = Artificially Synthesized Probe
  source 1..80: mol_type = other DNA

SEQ ID NO: 115446 - DNA, 80 bp, synthetic construct
  misc_feature 1..80: note = Artificially Synthesized Probe
  source 1..80: mol_type = other DNA
gcaacctctgcctcctgggttcaagtgattctcctgcatcagcctcccaagtagctgggattacaggtgcccaccaccgt

SEQ ID NO: 115447 - DNA, 80 bp, synthetic construct
  misc_feature 1..80: note = Artificially Synthesized Probe
  source 1..80: mol_type = other DNA
cctagataatctgctggagcctgtgccttggactaccacaccatctgccctccctcttcttatcaataatcaccaactgt

SEQ ID NO: 115448 - DNA, 80 bp, synthetic construct
  misc_feature 1..80: note = Artificially Synthesized Probe
  source 1..80: mol_type = other DNA
tgataaatggccatctggcttttatttgaatgcctccaaagacagaggactcactactgccatatgaagtagctcattcc

SEQ ID NO: 115449 - DNA, 80 bp, synthetic construct
  misc_feature 1..80: note = Artificially Synthesized Probe
  source 1..80: mol_type = other DNA
cagagtctctctgttacccaggttggagtgcagtggtgcgatctcggtttgctgcaacctctgcctcccgggttcaagtg

SEQ ID NO: 115450 - DNA, 80 bp, synthetic construct
  misc_feature 1..80: note = Artificially Synthesized Probe
  source 1..80: mol_type = other DNA
gttgctgcaatggctactgatggggttcgtcagatttccttaatttatccagcaaatattttttttcagagacaggatct

SEQ ID NO: 115451 - DNA, 80 bp, synthetic construct; identical to SEQ ID NO: 37900
  misc_feature 1..80: note = Artificially Synthesized Probe
  source 1..80: mol_type = other DNA

SEQ ID NO: 115452 - DNA, 80 bp, synthetic construct
  misc_feature 1..80: note = Artificially Synthesized Probe
  source 1..80: mol_type = other DNA
acaaaaaaattagctggatgtggtggcgggcacctgtaatcccagctactcgggaggctgaggcaggagaatcgcttgaa

SEQ ID NO: 115453 - DNA, 80 bp, synthetic construct
  misc_feature 1..80: note = Artificially Synthesized Probe
  source 1..80: mol_type = other DNA
cttactttccttatcaacagaataagggtaattagagccacctgagaggtttctgggacatccgaaggaaataatgttta

SEQ ID NO: 115454 - DNA, 80 bp, synthetic construct
  misc_feature 1..80: note = Artificially Synthesized Probe
  source 1..80: mol_type = other DNA
aaaagtctttgatttataaagtacatttaaattcacttccattgaaacgtacacacacccagggtctgccagagaggaca

SEQ ID NO: 115455 - DNA, 80 bp, synthetic construct
  misc_feature 1..80: note = Artificially Synthesized Probe
  source 1..80: mol_type = other DNA
caactctttgcacttcttctgacagcaaggagggaggtgcagggaatgtttctatctcctgcttgcatccttaggaatgg

SEQ ID NO: 115456 - DNA, 80 bp, synthetic construct; identical to SEQ ID NO: 37901
  misc_feature 1..80: note = Artificially Synthesized Probe
  source 1..80: mol_type = other DNA

SEQ ID NO: 115457 - DNA, 80 bp, synthetic construct
  misc_feature 1..80: note = Artificially Synthesized Probe
  source 1..80: mol_type = other DNA
aggaagaccttcaggaaaagtttatgaaagccccacaacttggagaaagaaaatctaacctggtagttcagcagtgaact

SEQ ID NO: 115458 - DNA, 80 bp, synthetic construct
  misc_feature 1..80: note = Artificially Synthesized Probe
  source 1..80: mol_type = other DNA
gtaacacataggagttggacttgatactctctaaggcttttacagctctggaatattccaaagaagttagtggaagatgg

SEQ ID NO: 115459 - DNA, 80 bp, synthetic construct
  misc_feature 1..80: note = Artificially Synthesized Probe
  source 1..80: mol_type = other DNA
aagaccttgtctctacaaaaaatacaaaattacttgggcgtggtggcaagtgcctgtagtcccagctactcaggagggtg

SEQ ID NO: 115460 - DNA, 80 bp, synthetic construct; identical to SEQ ID NO: 37902
  misc_feature 1..80: note = Artificially Synthesized Probe
  source 1..80: mol_type = other DNA

SEQ ID NO: 115461 - DNA, 80 bp, synthetic construct
  misc_feature 1..80: note = Artificially Synthesized Probe
  source 1..80: mol_type = other DNA
actccggctcaaaaaaaaagagagatgaggaagtcagaggatcctgggtgggggctttatcgggcacagctgctgcccct

SEQ ID NO: 115462 - DNA, 80 bp, synthetic construct; identical to SEQ ID NO: 37853
  misc_feature 1..80: note = Artificially Synthesized Probe
  source 1..80: mol_type = other DNA

SEQ ID NO: 115463 - DNA, 80 bp, synthetic construct
  misc_feature 1..80: note = Artificially Synthesized Probe
  source 1..80: mol_type = other DNA
atgagctgttgacagagctcatgcaccccaaactggtcaggaaataacatttgatttcaggcttctcctccccctgcccc

SEQ ID NO: 115464 - DNA, 80 bp, synthetic construct
  misc_feature 1..80: note = Artificially Synthesized Probe
  source 1..80: mol_type = other DNA
cagtctgctctgcactcacatcagctgctggtttgataagctgatgggctctaaggtgttcaggggtgataagaagtgga

SEQ ID NO: 115465 - DNA, 80 bp, synthetic construct; identical to SEQ ID NO: 37903
  misc_feature 1..80: note = Artificially Synthesized Probe
  source 1..80: mol_type = other DNA

SEQ ID NO: 115466 - DNA, 80 bp, synthetic construct
  misc_feature 1..80: note = Artificially Synthesized Probe
  source 1..80: mol_type = other DNA
agagctagtaaatggtagcaggaggattcaaaccctacctacctaggtttaaccattatgccatcctgcctttctataca

SEQ ID NO: 115467 - DNA, 80 bp, synthetic construct
  misc_feature 1..80: note = Artificially Synthesized Probe
  source 1..80: mol_type = other DNA
gctcatgcaagtcactttgcccagcattgggtacgtagtgagtgttagtaactgttaccccgtgccggccgctgattagc

SEQ ID NO: 115468 - DNA, 80 bp, synthetic construct
  misc_feature 1..80: note = Artificially Synthesized Probe
  source 1..80: mol_type = other DNA
tcccactcttgcccctccctctggcctgcagaaacttcagcaccaagagctctgaaggcagaaccagcttcactccccca

SEQ ID NO: 115469 - DNA, 80 bp, synthetic construct; identical to SEQ ID NO: 37904
  misc_feature 1..80: note = Artificially Synthesized Probe
  source 1..80: mol_type = other DNA

SEQ ID NO: 115470 - DNA, 80 bp, synthetic construct
  misc_feature 1..80: note = Artificially Synthesized Probe
  source 1..80: mol_type = other DNA
acatgtgaatgaggtcatctgaggccatcccaccccaaactgcagatgcatgaatgaccctgggtgaaactaacagaaga

SEQ ID NO: 115471 - DNA, 80 bp, synthetic construct
  misc_feature 1..80: note = Artificially Synthesized Probe
  source 1..80: mol_type = other DNA
atactctctgcttcccctaagcatatcataggccccttaactccaagcccagaatgaacatatcattgttcattcatcct

SEQ ID NO: 115472 - DNA, 80 bp, synthetic construct; identical to SEQ ID NO: 37905
  misc_feature 1..80: note = Artificially Synthesized Probe
  source 1..80: mol_type = other DNA

SEQ ID NO: 115473 - DNA, 80 bp, synthetic construct
  misc_feature 1..80: note = Artificially Synthesized Probe
  source 1..80: mol_type = other DNA
accagcctgaccaacatggagaaaccccgtctctactaaaaatacaaaattagccgggcgtggtggcgcatgcctgtaat

SEQ ID NO: 115474 - DNA, 80 bp, synthetic construct
  misc_feature 1..80: note = Artificially Synthesized Probe
  source 1..80: mol_type = other DNA
gatgaagtcagttacacgcaacaacacggatgattctcagaataatcatgctgagcaaaagaggccagaccaagggcagt

SEQ ID NO: 115475 - DNA, 80 bp, synthetic construct
  misc_feature 1..80: note = Artificially Synthesized Probe
  source 1..80: mol_type = other DNA
tgtgtcaattcatttatcctttcaacaacttaatgaaacaagtactatcatcctctgacagaagtagaaacagaggcaga

SEQ ID NO: 115476 - DNA, 80 bp, synthetic construct
  misc_feature 1..80: note = Artificially Synthesized Probe
  source 1..80: mol_type = other DNA
ggtctggcctagggcctgagaatctgcatttctactaaatttccaggagatgctgaggcagcaggtctggggaccacact

SEQ ID NO: 115477 - DNA, 80 bp, synthetic construct; identical to SEQ ID NO: 37906
  misc_feature 1..80: note = Artificially Synthesized Probe
  source 1..80: mol_type = other DNA

SEQ ID NO: 115478 - DNA, 80 bp, synthetic construct
  misc_feature 1..80: note = Artificially Synthesized Probe
  source 1..80: mol_type = other DNA
ccaccatacccagctaattttttgtatttttagtagagatggggtttcatcatgttagccaggatggtctccatctccag

SEQ ID NO: 115479 - DNA, 80 bp, synthetic construct
  misc_feature 1..80: note = Artificially Synthesized Probe
  source 1..80: mol_type = other DNA
tcgcccatgctggagtgaagtggtacaatcccgtcccactgcagcctcaagctcccaggctcaagcaagcctctcacctc

SEQ ID NO: 115480 - DNA, 80 bp, synthetic construct
  misc_feature 1..80: note = Artificially Synthesized Probe
  source 1..80: mol_type = other DNA
cctaagtgctcagccagggtgttttttttttttttaattaactattacagaactttcaaagcatatatgaaaacagagag

SEQ ID NO: 115481 - DNA, 80 bp, synthetic construct
  misc_feature 1..80: note = Artificially Synthesized Probe
  source 1..80: mol_type = other DNA
tctactttttcttttttctggtatgaaagcaaaccccagatatcatgccatttcaatgtgcctctctaacagatagagcc

SEQ ID NO: 115482 - DNA, 80 bp, synthetic construct; identical to SEQ ID NO: 37907
  misc_feature 1..80: note = Artificially Synthesized Probe
  source 1..80: mol_type = other DNA

SEQ ID NO: 115483 - DNA, 80 bp, synthetic construct
  misc_feature 1..80: note = Artificially Synthesized Probe
  source 1..80: mol_type = other DNA
accagcctaggtaatacggtgaaaccccatctctacaaaaaaatacaaaaattagcctgccatggtggcctacacctgtg

SEQ ID NO: 115484 - DNA, 80 bp, synthetic construct
  misc_feature 1..80: note = Artificially Synthesized Probe
  source 1..80: mol_type = other DNA
agtcaatcaagacaatttcaaattatcaagaagactctgaggagtgaattttcatccactatcgtcaactgtagcaatgg

SEQ ID NO: 115485 - DNA, 80 bp, synthetic construct
  misc_feature 1..80: note = Artificially Synthesized Probe
  source 1..80: mol_type = other DNA
gctcaaaaaatggtgtgtacaccatcagaaggttgaagccctcgggtcaatactacactacagcctccacgctggtcttg

SEQ ID NO: 115486 - DNA, 80 bp, synthetic construct; identical to SEQ ID NO: 37908
  misc_feature 1..80: note = Artificially Synthesized Probe
  source 1..80: mol_type = other DNA

SEQ ID NO: 115487 - DNA, 80 bp, synthetic construct
  misc_feature 1..80: note = Artificially Synthesized Probe
  source 1..80: mol_type = other DNA
tgacctcaggtgatctgcccgccttggcctcccaaagtgtttgggattacaggcatgagccaccacacccagtccctgct

SEQ ID NO: 115488 - DNA, 80 bp, synthetic construct
  misc_feature 1..80: note = Artificially Synthesized Probe
  source 1..80: mol_type = other DNA
ggttttgccatgttggccaggctggtcttgaactcctaacctcaggtgattctccagccttggcctcccaaagtgctggg

SEQ ID NO: 115489 - DNA, 80 bp, synthetic construct
  misc_feature 1..80: note = Artificially Synthesized Probe
  source 1..80: mol_type = other DNA
cctactgagccttcaagagctggctgggcaggcacctccctccagaagcctcccctgacaccatcgtctcccctgcctgg

SEQ ID NO: 115490 - DNA, 80 bp, synthetic construct; identical to SEQ ID NO: 37909
  misc_feature 1..80: note = Artificially Synthesized Probe
  source 1..80: mol_type = other DNA

SEQ ID NO: 115491 - DNA, 80 bp, synthetic construct
  misc_feature 1..80: note = Artificially Synthesized Probe
  source 1..80: mol_type = other DNA
aagtgctcataaatatcagttctaatcatcatgtgtctggatcccacattggatgtcatacatggttgaatgaatggaat

SEQ ID NO: 115492 - DNA, 80 bp, synthetic construct
  misc_feature 1..80: note = Artificially Synthesized Probe
  source 1..80: mol_type = other DNA
cccaggatgacttctctttgcttccagttaactagccgttcatatcaacctaggaacaagcaagcactcaaccaggctca

SEQ ID NO: 115493 - DNA, 80 bp, synthetic construct
  misc_feature 1..80: note = Artificially Synthesized Probe
  source 1..80: mol_type = other DNA
ctgggaatatttttagctgaatataaaataaccatcatcctaccctccccttcagccataccttctggttctggatttat

SEQ ID NO: 115494 - DNA, 80 bp, synthetic construct; identical to SEQ ID NO: 37854
  misc_feature 1..80: note = Artificially Synthesized Probe
  source 1..80: mol_type = other DNA

SEQ ID NO: 115495 - DNA, 80 bp, synthetic construct; identical to SEQ ID NO: 37910
  misc_feature 1..80: note = Artificially Synthesized Probe
  source 1..80: mol_type = other DNA

SEQ ID NO: 115496 - DNA, 80 bp, synthetic construct
  misc_feature 1..80: note = Artificially Synthesized Probe
  source 1..80: mol_type = other DNA
cctgtctcaaaaagaaataagaaatgagcgagaggccacaaaaaggaaacaaaacccgaaaacccaacaacatgaaattg

SEQ ID NO: 115497 - DNA, 80 bp, synthetic construct
  misc_feature 1..80: note = Artificially Synthesized Probe
  source 1..80: mol_type = other DNA
tgaaaaatcaaggcaggcttcacagaagagggcatgcccaggctgcttctaaaggaaagcttacattgttgactgaattt

SEQ ID NO: 115498 - DNA, 80 bp, synthetic construct
  misc_feature 1..80: note = Artificially Synthesized Probe
  source 1..80: mol_type = other DNA
cgagccccttttgatcctctaaggaagcgtcatagtgggtaaaaaaatagaagaggagaatgagagctgcttccagtgtt

SEQ ID NO: 115499 - DNA, 80 bp, synthetic construct
  misc_feature 1..80: note = Artificially Synthesized Probe
  source 1..80: mol_type = other DNA
gagggcttgagggagcgataggggagacacccgccaaaggccttatctcaggctgcaaggctggctgtgctggcctgtct

SEQ ID NO: 115500 - DNA, 80 bp, synthetic construct; identical to SEQ ID NO: 37911
  misc_feature 1..80: note = Artificially Synthesized Probe
  source 1..80: mol_type = other DNA

SEQ ID NO: 115501 - DNA, 80 bp, synthetic construct
  misc_feature 1..80: note = Artificially Synthesized Probe
  source 1..80: mol_type = other DNA
aatggagctgagccctggggaggatacagataggacccacgtagaattgactcctcatagttacacagttgaaattactt

SEQ ID NO: 115502 - DNA, 80 bp, synthetic construct
  misc_feature 1..80: note = Artificially Synthesized Probe
  source 1..80: mol_type = other DNA
cagcccaggactctgcctggggcactacagtgcatctgaggaaggccaccagcctcagcatccccatccctcagtactgg

SEQ ID NO: 115503 - DNA, 80 bp, synthetic construct
  misc_feature 1..80: note = Artificially Synthesized Probe
  source 1..80: mol_type = other DNA
gaggaagggatgaaagaggaagaaaagaaggaaggaattggagtttcctcattttctacaatggccccagccactggcca

SEQ ID NO: 115504 - DNA, 80 bp, synthetic construct
  misc_feature 1..80: note = Artificially Synthesized Probe
  source 1..80: mol_type = other DNA
ctctctcttagctaagaaagccggagggattccattcggctccttcatttgcaagacgttaagggctccttacccacccc

SEQ ID NO: 115505 - DNA, 80 bp, synthetic construct; identical to SEQ ID NO: 37912
  misc_feature 1..80: note = Artificially Synthesized Probe
  source 1..80: mol_type = other DNA

SEQ ID NO: 115506 - DNA, 80 bp, synthetic construct
  misc_feature 1..80: note = Artificially Synthesized Probe
  source 1..80: mol_type = other DNA
ttacagaaggaaaaaactgagactaacctaaatgtccgctagcagggggttggttaagaaaactgcaggacatgaaactt

SEQ ID NO: 115507 - DNA, 80 bp, synthetic construct
  misc_feature 1..80: note = Artificially Synthesized Probe
  source 1..80: mol_type = other DNA
tagaaaaaagttggctgcaaaccactaaaacattggttaattttgctttatacattttcagagctaactgttactaagta

SEQ ID NO: 115508 - DNA, 80 bp, synthetic construct; identical to SEQ ID NO: 37913
  misc_feature 1..80: note = Artificially Synthesized Probe
  source 1..80: mol_type = other DNA

SEQ ID NO: 115509 - DNA, 80 bp, synthetic construct
  misc_feature 1..80: note = Artificially Synthesized Probe
  source 1..80: mol_type = other DNA
atagggtttgtgcccctgtgagaatctaatgccgctgctgatctgacaggaggcggagctcaggcggtagtgctcgctgg

SEQ ID NO: 115510 - DNA, 80 bp, synthetic construct
  misc_feature 1..80: note = Artificially Synthesized Probe
  source 1..80: mol_type = other DNA
accccaatccccagaggtcagaagtctccattcctctcacaattgcctcctggttctgatctctgctctatttctggcag

SEQ ID NO: 115511 - DNA, 80 bp, synthetic construct
  misc_feature 1..80: note = Artificially Synthesized Probe
  source 1..80: mol_type = other DNA
actaaagatttccaggcaatgccaacccctagacctgacaggcatgtttaccagctggcaaacagcgtgggtggtggttg

SEQ ID NO: 115512 - DNA, 80 bp, synthetic construct; identical to SEQ ID NO: 37914
  misc_feature 1..80: note = Artificially Synthesized Probe
  source 1..80: mol_type = other DNA

SEQ ID NO: 115513 - DNA, 80 bp, synthetic construct
  misc_feature 1..80: note = Artificially Synthesized Probe
  source 1..80: mol_type = other DNA
aaatttttcataataaaatgctgggaaaaaagcactctattgcacctgctgttctctctgtctgaaacactcctcctacc

SEQ ID NO: 115514 - DNA, 80 bp, synthetic construct
  misc_feature 1..80: note = Artificially Synthesized Probe
  source 1..80: mol_type = other DNA
attcaatactttatcataaaataggctttgtgttagatgattttgcccaaccgtaggctaatgtaagcgttctaagcatg

SEQ ID NO: 115515 - DNA, 80 bp, synthetic construct
  misc_feature 1..80: note = Artificially Synthesized Probe
  source 1..80: mol_type = other DNA
gagcccccgcacctgtcaccttgtgatggctttaaagctcctgcacctggaactgtttgttttcctgtaaccatttgtct

SEQ ID NO: 115516 - DNA, 80 bp, synthetic construct
  misc_feature 1..80: note = Artificially Synthesized Probe
  source 1..80: mol_type = other DNA
ggatctgtactccaccatccccttctcagggaagttttccctgactgcccttttttgctgtgttttttttttagatgaag

SEQ ID NO: 115517 - DNA, 80 bp, synthetic construct
  misc_feature 1..80: note = Artificially Synthesized Probe
  source 1..80: mol_type = other DNA
cgcgataccacacctggctagtttttgtagttttagtagagacagggtttcaccacattggcctggctggtcttgaactc

SEQ ID NO: 115518 - DNA, 80 bp, synthetic construct; identical to SEQ ID NO: 37915
  misc_feature 1..80: note = Artificially Synthesized Probe
  source 1..80: mol_type = other DNA

SEQ ID NO: 115519 - DNA, 80 bp, synthetic construct
  misc_feature 1..80: note = Artificially Synthesized Probe
  source 1..80: mol_type = other DNA
accatgttggctaggctggtctcgaactcctgacctcaggtgacttgcccaccttggcctcgcaaagtactgggattaca

SEQ ID NO: 115520 - DNA, 80 bp, synthetic construct
  misc_feature 1..80: note = Artificially Synthesized Probe
  source 1..80: mol_type = other DNA
tgaataacagctaccatttctggaatgccaagcacggaaccaatcattttgcatatgctatttcatcggatcttcctctc

SEQ ID NO: 115521 - DNA, 80 bp, synthetic construct; identical to SEQ ID NO: 37916
  misc_feature 1..80: note = Artificially Synthesized Probe
  source 1..80: mol_type = other DNA

SEQ ID NO: 115522 - DNA, 80 bp, synthetic construct
  misc_feature 1..80: note = Artificially Synthesized Probe
  source 1..80: mol_type = other DNA
ggtgaatcaagccagggagcccacagctttcacgtgtaatcatgacttttctgtaaacaccagactccctgagaatacct

SEQ ID NO: 115523 - DNA, 80 bp, synthetic construct
  misc_feature 1..80: note = Artificially Synthesized Probe
  source 1..80: mol_type = other DNA
ttggctaaagtgcagctaagtcagtcgttcattgatttaacacacatgagctttggagttaggcaacctggttcaaattc

SEQ ID NO: 115524 - DNA, 80 bp, synthetic construct
  misc_feature 1..80: note = Artificially Synthesized Probe
  source 1..80: mol_type = other DNA
aggcagtgcataaagtgtcagatgtgtagaaaacactccataaatgttagcaattatgattatcacacaagcttggcaag

SEQ ID NO: 115525 - DNA, 80 bp, synthetic construct
  misc_feature 1..80: note = Artificially Synthesized Probe
  source 1..80: mol_type = other DNA
ttacacagcacatactgtttggtaacttgctattttcatgaactctatatcataagcagtttccaagccaggaaaatctt

SEQ ID NO: 115526 - DNA, 80 bp, synthetic construct; identical to SEQ ID NO: 37917
  misc_feature 1..80: note = Artificially Synthesized Probe
  source 1..80: mol_type = other DNA

SEQ ID NO: 115527 - DNA, 80 bp, synthetic construct
  misc_feature 1..80: note = Artificially Synthesized Probe
  source 1..80: mol_type = other DNA
tgaattaggctcaaagtgtggtgtttctctgtaactcacttggttacaacactttaaatatgtacaattgttttgttttg

SEQ ID NO: 115528 - DNA, 80 bp, synthetic construct
  misc_feature 1..80: note = Artificially Synthesized Probe
  source 1..80: mol_type = other DNA
tgggaggccaaggcaggtggatcacctaaggtcaggagtttgagaccagcctggctaacatggcaaaaccccatttctac

SEQ ID NO: 115529 - DNA, 80 bp, synthetic construct
  misc_feature 1..80: note = Artificially Synthesized Probe
  source 1..80: mol_type = other DNA
ctcaaaaaaaaaaaaaataggtttctctaggggatacaggtacatgtgttaagaggtggccatcgaaatgtttggacttt

SEQ ID NO: 115530 - DNA, 80 bp, synthetic construct; identical to SEQ ID NO: 37918
  misc_feature 1..80: note = Artificially Synthesized Probe
  source 1..80: mol_type = other DNA

SEQ ID NO: 115531 - DNA, 80 bp, synthetic construct
  misc_feature 1..80: note = Artificially Synthesized Probe
  source 1..80: mol_type = other DNA
agaatcccaaagggccatttcaggactcagaggaaaaaggctggcacttggctggagccaaaagggcttgtgctagagtg

SEQ ID NO: 115532 - DNA, 80 bp, synthetic construct
  misc_feature 1..80: note = Artificially Synthesized Probe
  source 1..80: mol_type = other DNA
ctcagcttgtgctttgagctagattgctctaccacacctattatgtgaccttgtttcctctcagcctcagttttctcatt

SEQ ID NO: 115533 - DNA, 80 bp, synthetic construct
  misc_feature 1..80: note = Artificially Synthesized Probe
  source 1..80: mol_type = other DNA
gaattgggattggaacttagacctccagaccttcagattgtttgtcagccatcaccctcagattttctctgccctttctc

SEQ ID NO: 115534 - DNA, 80 bp, synthetic construct
  misc_feature 1..80: note = Artificially Synthesized Probe
  source 1..80: mol_type = other DNA
cctctcatcttttctttggcttactcatctaaccatcccacttagtctctggcccaggtaatctggaacactgcagtcat

SEQ ID NO: 115535 - DNA, 80 bp, synthetic construct; identical to SEQ ID NO: 37919
  misc_feature 1..80: note = Artificially Synthesized Probe
  source 1..80: mol_type = other DNA

SEQ ID NO: 115536 - DNA, 80 bp, synthetic construct
  misc_feature 1..80: note = Artificially Synthesized Probe
  source 1..80: mol_type = other DNA
ctgagtggaaacagactgtgagagatttagtaacttgtccaagctagtaagtggccaagctagaatttcagccctactct

SEQ ID NO: 115537 - DNA, 80 bp, synthetic construct
  misc_feature 1..80: note = Artificially Synthesized Probe
  source 1..80: mol_type = other DNA
gaagggggaaagatcggttgcagtggatttaaggatagtgagaaaaacggtttgcttgcctggcgtagcctggaaaagga

SEQ ID NO: 115538 - DNA, 80 bp, synthetic construct
  misc_feature 1..80: note = Artificially Synthesized Probe
  source 1..80: mol_type = other DNA
tagttttagtggagacggggtttcaccgggttgcccaggctggtctcaaactcctgacctcaagtgatccacccgccttg

SEQ ID NO: 115539 - DNA, 80 bp, synthetic construct; identical to SEQ ID NO: 37920
  misc_feature 1..80: note = Artificially Synthesized Probe
  source 1..80: mol_type = other DNA

SEQ ID NO: 115540 - DNA, 80 bp, synthetic construct
  misc_feature 1..80: note = Artificially Synthesized Probe
  source 1..80: mol_type = other DNA
cgatctcctgacctcgtgatctacccgcctcggcctcccaaagtgctgggattacaggcgtgagccaccgcgcccagccc

SEQ ID NO: 115541 - DNA, 80 bp, synthetic construct
  misc_feature 1..80: note = Artificially Synthesized Probe
  source 1..80: mol_type = other DNA
tgactactattctagtatgactactattctagtatgaccactattctatttaatagcaatagtaacattatcatccatag

SEQ ID NO: 115542 - DNA, 80 bp, synthetic construct
  misc_feature 1..80: note = Artificially Synthesized Probe
  source 1..80: mol_type = other DNA
catgcggacttttctaagtgttactttgccatacgtacgtggcaggggagttataaggagtaaatgagcaaatacacgca

SEQ ID NO: 115543 - DNA, 80 bp, synthetic construct
  misc_feature 1..80: note = Artificially Synthesized Probe
  source 1..80: mol_type = other DNA
cctcgcgggtcctgcggactcggcgcccgcggggcccacagcgctgcccagcctgtggacgtggagcccgggccgcaccg

SEQ ID NO: 115544 - DNA, 80 bp, synthetic construct; identical to SEQ ID NO: 37855
  misc_feature 1..80: note = Artificially Synthesized Probe
  source 1..80: mol_type = other DNA

SEQ ID NO: 115545 - DNA, 80 bp, synthetic construct
  misc_feature 1..80: note = Artificially Synthesized Probe
  source 1..80: mol_type = other DNA
cacagcattgactagaggatggcctaaggggacacatcagagtgctgcgtgaactatgagtgtaggtcaaagggaggaga

SEQ ID NO: 115546 - DNA, 80 bp, synthetic construct
  misc_feature 1..80: note = Artificially Synthesized Probe
  source 1..80: mol_type = other DNA
tcgctcttgtctcaggctggagtgcagtgatgcaatctcagctcactgcaacctctgcctcccgggttcaagcaattctg

SEQ ID NO: 115547 - DNA, 80 bp, synthetic construct
  misc_feature 1..80: note = Artificially Synthesized Probe
  source 1..80: mol_type = other DNA
atgtccctttgctaagtgacctcagactcctgtactacaatttttttgtgcctgcttgttatcatttatcaagagctgtg

SEQ ID NO: 115548 - DNA, 80 bp, synthetic construct
  misc_feature 1..80: note = Artificially Synthesized Probe
  source 1..80: mol_type = other DNA
tcagcctcctgagtaactgggattacaggcatgtgctaccacgcccagctaacttttgtatttttagtagagatggggtt

SEQ ID NO: 115549 - DNA, 80 bp, synthetic construct; identical to SEQ ID NO: 37856
  misc_feature 1..80: note = Artificially Synthesized Probe
  source 1..80: mol_type = other DNA

SEQ ID NO: 115550 - DNA, 80 bp, synthetic construct
  misc_feature 1..80: note = Artificially Synthesized Probe
  source 1..80: mol_type = other DNA
ttcctcctgcaatgctccttactccatttttgtttttgttttactcataaacagcaagtcaacatatatacccaggtatg

SEQ ID NO: 115551 - DNA, 80 bp, synthetic construct
  misc_feature 1..80: note = Artificially Synthesized Probe
  source 1..80: mol_type = other DNA
tggagcacaggatttttaatctcaagattaatcaaaatattgtgtgtgtcaaaacgacagtgtctcaacagaaatccttt

SEQ ID NO: 115552 - DNA, 80 bp, synthetic construct
  misc_feature 1..80: note = Artificially Synthesized Probe
  source 1..80: mol_type = other DNA
tctcggctcactgcagcctctgcctcccaggttcaagcgattctcctgcctcagcctcccaagtagctaagattataggc

SEQ ID NO: 115553 - DNA, 80 bp, synthetic construct; identical to SEQ ID NO: 37857
  misc_feature 1..80: note = Artificially Synthesized Probe
  source 1..80: mol_type = other DNA

SEQ ID NO: 115554 - DNA, 80 bp, synthetic construct
  misc_feature 1..80: note = Artificially Synthesized Probe
  source 1..80: mol_type = other DNA
gctccagtcaactcctgggaacctcagcttaagattccacttgtgtagttaggaaagtagcttataacttgcttaagtgc

SEQ ID NO: 115555 - DNA, 80 bp, synthetic construct
  misc_feature 1..80: note = Artificially Synthesized Probe
  source 1..80: mol_type = other DNA
ccaagtagctgggaccacaagtgtgtgctaccatacccagctcatttttttgtattttttgcagagacggggtttagcca

SEQ ID NO: 115556 - DNA, 80 bp, synthetic construct
  misc_feature 1..80: note = Artificially Synthesized Probe
  source 1..80: mol_type = other DNA
aagctggctgaatttcacaggacacatggaatgagtacttcctttcacaggaagcaaggaaatgctcctgatagatttat

SEQ ID NO: 115557 - DNA, 80 bp, synthetic construct
  misc_feature 1..80: note = Artificially Synthesized Probe
  source 1..80: mol_type = other DNA
ttacaggcgtgagtcactgcgcccggcctacatgccggtctttcaagtgttcgaagagccttcttaggtctcctctggcc

SEQ ID NO: 115558 - DNA, 80 bp, synthetic construct; identical to SEQ ID NO: 37858
  misc_feature 1..80: note = Artificially Synthesized Probe
  source 1..80: mol_type = other DNA

SEQ ID NO: 115559 - DNA, 80 bp, synthetic construct
  misc_feature 1..80: note = Artificially Synthesized Probe
  source 1..80: mol_type = other DNA
gttggtctaatctctcagcagcccaagcgttttgtgttcttgtgtccagttttaagaatttgttggccgggcacagtggc

SEQ ID NO: 115560 - DNA, 80 bp, synthetic construct
  misc_feature 1..80: note = Artificially Synthesized Probe
  source 1..80: mol_type = other DNA
gtttagaaaactgcctttattctattagtagttggaaaaattaactggtacagaaaaaaagtttagtcagctggagagaa

SEQ ID NO: 115561 - DNA, 80 bp, synthetic construct
  misc_feature 1..80: note = Artificially Synthesized Probe
  source 1..80: mol_type = other DNA
tgagccaccacacccggccgagtattcacttttatgagcatcaagctcaaatgagagtatatttaaattattttaggttg

SEQ ID NO: 115562 - DNA, 80 bp, synthetic construct; identical to SEQ ID NO: 37932
  misc_feature 1..80: note = Artificially Synthesized Probe
  source 1..80: mol_type = other DNA

SEQ ID NO: 115563 - DNA, 80 bp, synthetic construct
  misc_feature 1..80: note = Artificially Synthesized Probe
  source 1..80: mol_type = other DNA
tgggctgggtgcggtggctcacgcctgtaatcccagcactttgggaggccaaggcgggcggatcacctgaagtcggaagt

SEQ ID NO: 115564 - DNA, 80 bp, synthetic construct
  misc_feature 1..80: note = Artificially Synthesized Probe
  source 1..80: mol_type = other DNA
aatgagctgagattgcaccactgcactccagcctggccaacaagagcgaaactccatttaaaaaaaaaaaaaaattagct

SEQ ID NO: 115565 - DNA, 80 bp, synthetic construct
  misc_feature 1..80: note = Artificially Synthesized Probe
  source 1..80: mol_type = other DNA
caaaacagatactagaactgaaccaagtggcataattcaaaatgtcaagtcaaaaataactctgtagcttataaaagtgt

SEQ ID NO: 115566 - DNA, 80 bp, synthetic construct; identical to SEQ ID NO: 37922
  misc_feature 1..80: note = Artificially Synthesized Probe
  source 1..80: mol_type = other DNA

SEQ ID NO: 115567 - DNA, 80 bp, synthetic construct; identical to SEQ ID NO: 37933
  misc_feature 1..80: note = Artificially Synthesized Probe
  source 1..80: mol_type = other DNA

SEQ ID NO: 115568 - DNA, 80 bp, synthetic construct
  misc_feature 1..80: note = Artificially Synthesized Probe
  source 1..80: mol_type = other DNA
tacaagtcccattcaacactgcccagcactgcacccagctctgctaccccattcttatcaccagactccatgttaaacat

SEQ ID NO: 115569 - DNA, 80 bp, synthetic construct
  misc_feature 1..80: note = Artificially Synthesized Probe
  source 1..80: mol_type = other DNA
atcacaaataacctccacaaggcccactgtacttctgtcatgcaaaccatcattctggcatgtgtaactaagatatactg

SEQ ID NO: 115570 - DNA, 80 bp, synthetic construct
  misc_feature 1..80: note = Artificially Synthesized Probe
  source 1..80: mol_type = other DNA
ggcgcttgataaaatgcttccaagatgttgagtctgtctcatatcaaaaggggccttttcattgtgagcaggcctactct

SEQ ID NO: 115571 - DNA, 80 bp, synthetic construct
  misc_feature 1..80: note = Artificially Synthesized Probe
  source 1..80: mol_type = other DNA
attctcctgcctcagcctcccaagtagctgggattacaagtgcctgccaccacgcccagctaattttttgtatttttagt

SEQ ID NO: 115572 - DNA, 80 bp, synthetic construct; identical to SEQ ID NO: 37934
  misc_feature 1..80: note = Artificially Synthesized Probe
  source 1..80: mol_type = other DNA

SEQ ID NO: 115573 - DNA, 80 bp, synthetic construct
  misc_feature 1..80: note = Artificially Synthesized Probe
  source 1..80: mol_type = other DNA
ctaaatttcttatgggcaagattctggttgttccaagatgcccaggcagaaataatgtttccaagagaaccaaagagctg

SEQ ID NO: 115574 - DNA, 80 bp, synthetic construct
  misc_feature 1..80: note = Artificially Synthesized Probe
  source 1..80: mol_type = other DNA
acctgacattgcttccccaagccaatggatctttctatgtatggtgcatcaatctaagttaggtaagagggctataactt

SEQ ID NO: 115575 - DNA, 80 bp, synthetic construct; identical to SEQ ID NO: 37935
  misc_feature 1..80: note = Artificially Synthesized Probe
  source 1..80: mol_type = other DNA

SEQ ID NO: 115576 - DNA, 80 bp, synthetic construct
  misc_feature 1..80: note = Artificially Synthesized Probe
  source 1..80: mol_type = other DNA
gcaggcagatcacgaggtcaggagatccagaccatcctggctaacacggtgaaaccctgtctctactaaaaatacaaaaa

SEQ ID NO: 115577 - DNA, 80 bp, synthetic construct
  misc_feature 1..80: note = Artificially Synthesized Probe
  source 1..80: mol_type = other DNA
aaaaaaaaaaggactacaaactatgaaagagggttttgaacatggcagtattcatctcttagaaagcgctttggtgctgc

SEQ ID NO: 115578 - DNA, 80 bp, synthetic construct
  misc_feature 1..80: note = Artificially Synthesized Probe
  source 1..80: mol_type = other DNA
gtcgcccaggctggagggcaatggcatgatctcagctgactgcaacctccacctcctgggttcaagggattctcccgcct

SEQ ID NO: 115579 - DNA, 80 bp, synthetic construct
  misc_feature 1..80: note = Artificially Synthesized Probe
  source 1..80: mol_type = other DNA
attcctcacacagtgccacaaaaggaggctaggtggccctaggacagaaagaaataagtaatgtggacaagtagaagtgg

SEQ ID NO: 115580 - DNA, 80 bp, synthetic construct
  misc_feature 1..80: note = Artificially Synthesized Probe
  source 1..80: mol_type = other DNA
atcccagctcctcgggaggctgagataggagaattgcttgaactcaggaggcggaggttgttgtaaaccaagatcatgcc

SEQ ID NO: 115581 - DNA, 80 bp, synthetic construct; identical to SEQ ID NO: 37936
  misc_feature 1..80: note = Artificially Synthesized Probe
  source 1..80: mol_type = other DNA

SEQ ID NO: 115582 - DNA, 80 bp, synthetic construct
  misc_feature 1..80: note = Artificially Synthesized Probe
  source 1..80: mol_type = other DNA
tgaggtggaaggatcacttgagcccaagagttcaaggctgcatgatcatgtcacagcactgcaggcctgggagacaaagt

SEQ ID NO: 115583 - DNA, 80 bp, synthetic construct
  misc_feature 1..80: note = Artificially Synthesized Probe
  source 1..80: mol_type = other DNA
tttgttccagtcttgccagagggcttttaggacagaaatggggaagcactgttctcaccatcaatgacaataaaataaaa

SEQ ID NO: 115584 - DNA, 80 bp, synthetic construct; identical to SEQ ID NO: 37937
  misc_feature 1..80: note = Artificially Synthesized Probe
  source 1..80: mol_type = other DNA

SEQ ID NO: 115585 - DNA, 80 bp, synthetic construct
  misc_feature 1..80: note = Artificially Synthesized Probe
  source 1..80: mol_type = other DNA
aaagagcacatatggctgggcaaggtggctcacgcctgtaatcccagcactttgggaggctgaggcaggtggatcatctg

SEQ ID NO: 115586 - DNA, 80 bp, synthetic construct
  misc_feature 1..80: note = Artificially Synthesized Probe
  source 1..80: mol_type = other DNA
gcgagctgagattgtaccactgcactccagcctgggcgacagagcgagactctgtctcaaacaacaaaacaaaacaaaaa

SEQ ID NO: 115587 - DNA, 80 bp, synthetic construct
  misc_feature 1..80: note = Artificially Synthesized Probe
  source 1..80: mol_type = other DNA
aaaatcagccaggtgtggtggcatattcccgtaatcccagctactggggaggctgaggcaggagaatcctttaaacctgg

SEQ ID NO: 115588 - DNA, 80 bp, synthetic construct
  misc_feature 1..80: note = Artificially Synthesized Probe
  source 1..80: mol_type = other DNA
ctgctatttgggaggctgaggcaggagaatcacttgaacctgggaggcagaggttgcagtgagccaagaccgagccactg

SEQ ID NO: 115589 - DNA, 80 bp, synthetic construct
  misc_feature 1..80: note = Artificially Synthesized Probe
  source 1..80: mol_type = other DNA
cactgtacccagcctaaaaaaaaaaaagactttcaaaagctgttaaacttggctgggtgtggtggctcacacctgtaatc

SEQ ID NO: 115590 - DNA, 80 bp, synthetic construct; identical to SEQ ID NO: 37938
  misc_feature 1..80: note = Artificially Synthesized Probe
  source 1..80: mol_type = other DNA

SEQ ID NO: 115591 - DNA, 80 bp, synthetic construct
  misc_feature 1..80: note = Artificially Synthesized Probe
  source 1..80: mol_type = other DNA
gcacaagaagtcataggtagcttacaggatgacacatgctttggtaaccatggggcataaacctctattagcatactcaa

SEQ ID NO: 115592 - DNA, 80 bp, synthetic construct
  misc_feature 1..80: note = Artificially Synthesized Probe
  source 1..80: mol_type = other DNA
attcaaacttctagtacgccgatccacctggcaccaaaaggttatacattaaaaactcgtaactaacattatacttaatg

SEQ ID NO: 115593 - DNA, 80 bp, synthetic construct
  misc_feature 1..80: note = Artificially Synthesized Probe
  source 1..80: mol_type = other DNA
gttcaagcaattctcctgcctcagactcccaagtagctgggattacaggcacgtaccaccacatccagctaatttttgat

SEQ ID NO: 115594 - DNA, 80 bp, synthetic construct; identical to SEQ ID NO: 37939
  misc_feature 1..80: note = Artificially Synthesized Probe
  source 1..80: mol_type = other DNA

SEQ ID NO: 115595 - DNA, 80 bp, synthetic construct
  misc_feature 1..80: note = Artificially Synthesized Probe
  source 1..80: mol_type = other DNA
acgaggtcaggagatcgagaccatcctggctaacacggagaaaccccatctctactaaaaatacaaataactagccgggc

SEQ ID NO: 115596 - DNA, 80 bp, synthetic construct
  misc_feature 1..80: note = Artificially Synthesized Probe
  source 1..80: mol_type = other DNA
aaggaaacaatttgtcaagcagggtaaaaacaatgaaaggactgatgaaagggagtacccaagggaggaaagaaccaaaa

SEQ ID NO: 115597 - DNA, 80 bp, synthetic construct
  misc_feature 1..80: note = Artificially Synthesized Probe
  source 1..80: mol_type = other DNA
agatcacctgaggtcaggagtttgagaccagcctggccaacatggagaaaccccatctctaccaaaaatacaaaattagc

SEQ ID NO: 115598 - DNA, 80 bp, synthetic construct; identical to SEQ ID NO: 37940
  misc_feature 1..80: note = Artificially Synthesized Probe
  source 1..80: mol_type = other DNA

SEQ ID NO: 115599 - DNA, 80 bp, synthetic construct
  misc_feature 1..80: note = Artificially Synthesized Probe
  source 1..80: mol_type = other DNA
caggagttcaagacgagcctgggaaacatagtgaaaccctgtctctactaaaaatacaaaaaattagccaggagcggtgg

SEQ ID NO: 115600 - DNA, 80 bp, synthetic construct
  misc_feature 1..80: note = Artificially Synthesized Probe
  source 1..80: mol_type = other DNA
aatcgcttaaatctgggaggcggaggttgcagttgagccaagatcgtgccacagcactccagcctggcgacacagtgagg

SEQ ID NO: 115601 - DNA, 80 bp, synthetic construct
  misc_feature 1..80: note = Artificially Synthesized Probe
  source 1..80: mol_type = other DNA
atcagccagttgtggtagcatgcacctgtagtcccagctaccaaggaggctgaggtgggaggattgcttgagcccaggag

SEQ ID NO: 115602 - DNA, 80 bp, synthetic construct
  misc_feature 1..80: note = Artificially Synthesized Probe
  source 1..80: mol_type = other DNA
ttgggctgggcacggtagctcacacctgtaatcccagcactttgggaggctgaggcaagcagaacacttgaggtcaggag

SEQ ID NO: 115603 - DNA, 80 bp, synthetic construct; identical to SEQ ID NO: 37941
  misc_feature 1..80: note = Artificially Synthesized Probe
  source 1..80: mol_type = other DNA

SEQ ID NO: 115604 - DNA, 80 bp, synthetic construct
  misc_feature 1..80: note = Artificially Synthesized Probe
  source 1..80: mol_type = other DNA
tcaagtgatcctcccacttcaaattccccagcagctgggaccacaggcatgcgccaccacgcccagctaatttttgtatt

SEQ ID NO: 115605 - DNA, 80 bp, synthetic construct
  misc_feature 1..80: note = Artificially Synthesized Probe
  source 1..80: mol_type = other DNA
tatctatgtgtttctctattatgtagttattttcagaaagggtctcattctgtcaccaaggctggaatgcagtggtgcaa

SEQ ID NO: 115606 - DNA, 80 bp, synthetic construct
  misc_feature 1..80: note = Artificially Synthesized Probe
  source 1..80: mol_type = other DNA
gggctcatgcaatcctcccgattcagcctcccaaagtgctgggattacaagcataagccacctccccaggcctaaataca

SEQ ID NO: 115607 - DNA, 80 bp, synthetic construct; identical to SEQ ID NO: 37942
  misc_feature 1..80: note = Artificially Synthesized Probe
  source 1..80: mol_type = other DNA

SEQ ID NO: 115608 - DNA, 80 bp, synthetic construct
  misc_feature 1..80: note = Artificially Synthesized Probe
  source 1..80: mol_type = other DNA
tatataaaattgtccagaataaacaaattcagaaagagaaaatagactggtagttgcctagggcagggacttgggggtgg

SEQ ID NO: 115609 - DNA, 80 bp, synthetic construct
  misc_feature 1..80: note = Artificially Synthesized Probe
  source 1..80: mol_type = other DNA
cactctgttgcccaggctggagtatagtggtgcgatctccactcactgcaaccttagcctccccaggctcaagtgaacct

SEQ ID NO: 115610 - DNA, 80 bp, synthetic construct; identical to SEQ ID NO: 37943
  misc_feature 1..80: note = Artificially Synthesized Probe
  source 1..80: mol_type = other DNA

SEQ ID NO: 115611 - DNA, 80 bp, synthetic construct
  misc_feature 1..80: note = Artificially Synthesized Probe
  source 1..80: mol_type = other DNA
gaaggttaaggagtcaatcaagagcaaaattactcaagctaccaatccaggactaaatgccctgaaggaaataaagccta

SEQ ID NO: 115612 - DNA, 80 bp, synthetic construct
  misc_feature 1..80: note = Artificially Synthesized Probe
  source 1..80: mol_type = other DNA
tttgttgtagactacacttcctagcttcccttggagacatggccatgtaccatgagatgtgagaatcagcagtatgttgt

SEQ ID NO: 115613 - DNA, 80 bp, synthetic construct
  misc_feature 1..80: note = Artificially Synthesized Probe
  source 1..80: mol_type = other DNA
ctggatctcaggtgatcttgggagccaccatctcagccccaagactgcctaccttccatgtttcttccatatgaatgaga

SEQ ID NO: 115614 - DNA, 80 bp, synthetic construct
  misc_feature 1..80: note = Artificially Synthesized Probe
  source 1..80: mol_type = other DNA
gagaccagcctggccaacatatgaaaccccatctctattaaaaatattaaaattacccaggcgtggtggggtgaggcaag

SEQ ID NO: 115615 - DNA, 80 bp, synthetic construct
  misc_feature 1..80: note = Artificially Synthesized Probe
  source 1..80: mol_type = other DNA
tgtctaaagggtatgttccccaaccagaatggataagacaatccacaggggtaccagaagaaaactcagagggcaaacaa

SEQ ID NO: 115616 - DNA, 80 bp, synthetic construct; identical to SEQ ID NO: 37944
  misc_feature 1..80: note = Artificially Synthesized Probe
  source 1..80: mol_type = other DNA

SEQ ID NO: 115617 - DNA, 80 bp, synthetic construct
  misc_feature 1..80: note = Artificially Synthesized Probe
  source 1..80: mol_type = other DNA
catatcgatgatagggaaatgtgctcaatgcatatcttcaaacaagagcatgcagtcaaggctaggagtaatggctcatg

SEQ ID NO: 115618 - DNA, 80 bp, synthetic construct
  misc_feature 1..80: note = Artificially Synthesized Probe
  source 1..80: mol_type = other DNA
ctgaggcaggagaatctcctgaactcaggaggcagaggctgcagtaagccgatatctcgccattgcattccagcctggga

SEQ ID NO: 115619 - DNA, 80 bp, synthetic construct; identical to SEQ ID NO: 37945
  misc_feature 1..80: note = Artificially Synthesized Probe
  source 1..80: mol_type = other DNA

SEQ ID NO: 115620 - DNA, 80 bp, synthetic construct
  misc_feature 1..80: note = Artificially Synthesized Probe
  source 1..80: mol_type = other DNA
gaacccgggaggaggaagttgcagtgagctgagatcgtgccactgcactccagtttaggcaacaagagcgaaaattcgtc

SEQ ID NO: 115621 - DNA, 80 bp, synthetic construct
  misc_feature 1..80: note = Artificially Synthesized Probe
  source 1..80: mol_type = other DNA
aataaaaaaatattggccgggcatggtggctcacacctgtaatcccagcactttgggaggctgaggtgggcagatcacga

SEQ ID NO: 115622 - DNA, 80 bp, synthetic construct
  misc_feature 1..80: note = Artificially Synthesized Probe
  source 1..80: mol_type = other DNA
agctaagatcgtgccactgcactccagcctgggtgacagagagagactccgtctcaaaaataaataaataaataaaataa

SEQ ID NO: 115623 - DNA, 80 bp, synthetic construct; identical to SEQ ID NO: 37923
  misc_feature 1..80: note = Artificially Synthesized Probe
  source 1..80: mol_type = other DNA

SEQ ID NO: 115624 - DNA, 80 bp, synthetic construct; identical to SEQ ID NO: 37946
  misc_feature 1..80: note = Artificially Synthesized Probe
  source 1..80: mol_type = other DNA

SEQ ID NO: 115625 - DNA, 80 bp, synthetic construct
  misc_feature 1..80: note = Artificially Synthesized Probe
  source 1..80: mol_type = other DNA
tcaaacaaccaggaccctatgggatgcaaagaaacgtcaacaggaattccccagttcaagaaaaggctgctttggccgag

SEQ ID NO: 115626 - DNA, 80 bp, synthetic construct
  misc_feature 1..80: note = Artificially Synthesized Probe
  source 1..80: mol_type = other DNA
actgagatgctgaggcaggagaatcacttgaacacaggaggcaaaggttgcagtgagccgagttagcgccattgcactcc

SEQ ID NO: 115627 - DNA, 80 bp, synthetic construct
  misc_feature 1..80: note = Artificially Synthesized Probe
  source 1..80: mol_type = other DNA
caattcctatttacttagcccagctccatggggtactgagatacatggggccgaaaaggggtaatatggccatcttttat

SEQ ID NO: 115628 - DNA, 80 bp, synthetic construct
  misc_feature 1..80: note = Artificially Synthesized Probe
  source 1..80: mol_type = other DNA
agcactttgggaggccgaggcgggcagatcacgaggtcaggagatcgagaccatcccggctaacatttctactaaaaata

SEQ ID NO: 115629 - DNA, 80 bp, synthetic construct; identical to SEQ ID NO: 37947
  misc_feature 1..80: note = Artificially Synthesized Probe
  source 1..80: mol_type = other DNA

SEQ ID NO: 115630 - DNA, 80 bp, synthetic construct
  misc_feature 1..80: note = Artificially Synthesized Probe
  source 1..80: mol_type = other DNA
ttgtgccttcccttcctagaatgtccagactctgtctccacctttgcttatagggagggaattcacgtttaaagacccta

SEQ ID NO: 115631 - DNA, 80 bp, synthetic construct
  misc_feature 1..80: note = Artificially Synthesized Probe
  source 1..80: mol_type = other DNA
cctgtaatcccagctacttggaaggctgaggcacgagaatcacttgaacctgggaggtggaggttgcagtgagccgagat

SEQ ID NO: 115632 - DNA, 80 bp, synthetic construct
  misc_feature 1..80: note = Artificially Synthesized Probe
  source 1..80: mol_type = other DNA
tcggacaaaatgaaagcctaagtgatttctgggatactgggagtgcggcaatacacagaagttgagaagtaaaaagtaca

SEQ ID NO: 115633 - DNA, 80 bp, synthetic construct; identical to SEQ ID NO: 37948
  misc_feature 1..80: note = Artificially Synthesized Probe
  source 1..80: mol_type = other DNA

SEQ ID NO: 115634 - DNA, 80 bp, synthetic construct
  misc_feature 1..80: note = Artificially Synthesized Probe
  source 1..80: mol_type = other DNA
acaaccttgacctcccaggctcaggtaatcctcccacttcagtctcccaagtagctaggagtacaggcacacacaccacg

SEQ ID NO: 115635 - DNA, 80 bp, synthetic construct
  misc_feature 1..80: note = Artificially Synthesized Probe
  source 1..80: mol_type = other DNA
aaacccgtctctactaaaaatacaaaaattagccaggcgtggtggcacatgcctgtaatcccagcaacttgggaggctga

SEQ ID NO: 115636 - DNA, 80 bp, synthetic construct
  misc_feature 1..80: note = Artificially Synthesized Probe
  source 1..80: mol_type = other DNA
gctcagatgggcagatcacttgaggtcaggagttcgaaaccagcagcctggccaacatggtgaaaccattctctactatg

SEQ ID NO: 115637 - DNA, 80 bp, synthetic construct
  misc_feature 1..80: note = Artificially Synthesized Probe
  source 1..80: mol_type = other DNA
aaaaacaaatttaattatcttttatgtagagacagggtcttgctgtgttgccctggctagtctcaaactcctagcctcaa

SEQ ID NO: 115638 - DNA, 80 bp, synthetic construct
  misc_feature 1..80: note = Artificially Synthesized Probe
  source 1..80: mol_type = other DNA
tccgcctcccaggttcaagcaattctcctgcctcagcctcccaaatagctgggaggcgtctgccaccacgcctggctaat

SEQ ID NO: 115639 - DNA, 80 bp, synthetic construct; identical to SEQ ID NO: 37949
  misc_feature 1..80: note = Artificially Synthesized Probe
  source 1..80: mol_type = other DNA

SEQ ID NO: 115640 - DNA, 80 bp, synthetic construct
  misc_feature 1..80: note = Artificially Synthesized Probe
  source 1..80: mol_type = other DNA
cttcattctttttcatttggaaatctagtcacctcagcattatttactgaaaagactattttccccccaactggatggtc

SEQ ID NO: 115641 - DNA, 80 bp, synthetic construct
  misc_feature 1..80: note = Artificially Synthesized Probe
  source 1..80: mol_type = other DNA
ttgtttttttccaagattattttggttattctgggtcccctgaattttggtatgtattttagtaacagtttgtcaatttc

SEQ ID NO: 115642 - DNA, 80 bp, synthetic construct; identical to SEQ ID NO: 37950
  misc_feature 1..80: note = Artificially Synthesized Probe
  source 1..80: mol_type = other DNA

SEQ ID NO: 115643 - DNA, 80 bp, synthetic construct
  misc_feature 1..80: note = Artificially Synthesized Probe
  source 1..80: mol_type = other DNA
tagccagtaagaggcagaattggacactgaagtaaattaagcaatccgtttcagagtacacatttctaaacattccactg

SEQ ID NO: 115644 - DNA, 80 bp, synthetic construct
  misc_feature 1..80: note = Artificially Synthesized Probe
  source 1..80: mol_type = other DNA
tcacaaactcagtctctgatgtatttgattaactctgtctatgtctatattcagtatgaccgtatgggctttttaaaact

SEQ ID NO: 115645 - DNA, 80 bp, synthetic construct
  misc_feature 1..80: note = Artificially Synthesized Probe
  source 1..80: mol_type = other DNA
gcgggtgcctgtaatcccagctactcaggaggctgaggcaggagaaccgcttgaacctgggaggcggaggttgcagtgag

SEQ ID NO: 115646 - DNA, 80 bp, synthetic construct
  misc_feature 1..80: note = Artificially Synthesized Probe
  source 1..80: mol_type = other DNA
ttgggaggcaaaagtgggcagatcacttgaggtaaggagttcaagaccagcctggccaacagggtgaaaccccatctatt

SEQ ID NO: 115647 - DNA, 80 bp, synthetic construct; identical to SEQ ID NO: 37951
  misc_feature 1..80: note = Artificially Synthesized Probe
  source 1..80: mol_type = other DNA

SEQ ID NO: 115648 - DNA, 80 bp, synthetic construct
  misc_feature 1..80: note = Artificially Synthesized Probe
  source 1..80: mol_type = other DNA
gtcgggcgcggtggctcatgcctgtaatcccagcactttgggaggcccaaggtgggcagatcacgaggtcagcatagaga

SEQ ID NO: 115649 - DNA, 80 bp, synthetic construct
  misc_feature 1..80: note = Artificially Synthesized Probe
  source 1..80: mol_type = other DNA
accccagcccgggggacagagcgagactccaggtctcaaaaaaaaaaaacaaaaaaaaaaaccctattatgtttgttttc

SEQ ID NO: 115650 - DNA, 80 bp, synthetic construct
  misc_feature 1..80: note = Artificially Synthesized Probe
  source 1..80: mol_type = other DNA
ctcttggttctttggttctagcatgtcttacacctgtttactcttactgttttaatgtctgtttactcattacagatgat

SEQ ID NO: 115651 - DNA, 80 bp, synthetic construct
  misc_feature 1..80: note = Artificially Synthesized Probe
  source 1..80: mol_type = other DNA
ctataggtgtgtgccaccattcccgactaaatttttttctatttgtgtgggtgtgtgtgtggagacggggttttgccatg

SEQ ID NO: 115652 - DNA, 80 bp, synthetic construct; identical to SEQ ID NO: 37952
  misc_feature 1..80: note = Artificially Synthesized Probe
  source 1..80: mol_type = other DNA

SEQ ID NO: 115653 - DNA, 80 bp, synthetic construct
  misc_feature 1..80: note = Artificially Synthesized Probe
  source 1..80: mol_type = other DNA
ttctcacatttgtgtgaccatgatgcttactcacatttgtctggacaacttcctgaaggccttctggagctgttcaatgg

SEQ ID NO: 115654 - DNA, 80 bp, synthetic construct
  misc_feature 1..80: note = Artificially Synthesized Probe
  source 1..80: mol_type = other DNA
tatagccatacagtggagtactactcagcaacaataaggaacgaagtacagtactgtactgaaacatgctacaacatgga

SEQ ID NO: 115655 - DNA, 80 bp, synthetic construct
  misc_feature 1..80: note = Artificially Synthesized Probe
  source 1..80: mol_type = other DNA
ggccgaggcgggtggaacacctgaagtcaggagttcaagaccaacctggccaacctggtgaaaccccatctctacaaaaa

SEQ ID NO: 115656 - DNA, 80 bp, synthetic construct; identical to SEQ ID NO: 37953
  misc_feature 1..80: note = Artificially Synthesized Probe
  source 1..80: mol_type = other DNA

SEQ ID NO: 115657 - DNA, 80 bp, synthetic construct; identical to SEQ ID NO: 37924
  misc_feature 1..80: note = Artificially Synthesized Probe
  source 1..80: mol_type = other DNA

SEQ ID NO: 115658 - DNA, 80 bp, synthetic construct
  misc_feature 1..80: note = Artificially Synthesized Probe
  source 1..80: mol_type = other DNA
cagtgaacagactcaggagctctgttctgtccagaattccaatagctaacaacttacaataaataaaagttacagaagcc

SEQ ID NO: 115659 - DNA, 80 bp, synthetic construct
  misc_feature 1..80: note = Artificially Synthesized Probe
  source 1..80: mol_type = other DNA
ctacttgggaggctgaggcagaaaaatggcatgaacccaggaggtggagcttgcagtgagccgagatggtgccactgcac

SEQ ID NO: 115660 - DNA, 80 bp, synthetic construct; identical to SEQ ID NO: 37954
  misc_feature 1..80: note = Artificially Synthesized Probe
  source 1..80: mol_type = other DNA

SEQ ID NO: 115661 - DNA, 80 bp, synthetic construct
  misc_feature 1..80: note = Artificially Synthesized Probe
  source 1..80: mol_type = other DNA
tttgtagttttagtagagacggggaacatcttggccaggctggtcttgaactcctgaccttgtgatccacctgcctcggc

SEQ ID NO: 115662 - DNA, 80 bp, synthetic construct
  misc_feature 1..80: note = Artificially Synthesized Probe
  source 1..80: mol_type = other DNA
atgagccaccacgcccagccccatgtcaggatttaattcacaccttacttgggatgctagccagtttgaaccagtcaaca

SEQ ID NO: 115663 - DNA, 80 bp, synthetic construct
  misc_feature 1..80: note = Artificially Synthesized Probe
  source 1..80: mol_type = other DNA
aaaatctatttcagaaaaggtaaaaggcgtcatggatattaatataaaagagtacggggccaggtgtggtggctctcccc

SEQ ID NO: 115664 - DNA, 80 bp, synthetic construct
  misc_feature 1..80: note = Artificially Synthesized Probe
  source 1..80: mol_type = other DNA
tgaggcaggaggatcacgaggtcaggagatcgagaccaccctggctaacacggtgaaaccccgtctctactaaaaataca

SEQ ID NO: 115665 - DNA, 80 bp, synthetic construct; identical to SEQ ID NO: 37955
  misc_feature 1..80: note = Artificially Synthesized Probe
  source 1..80: mol_type = other DNA

SEQ ID NO: 115666 - DNA, 80 bp, synthetic construct
  misc_feature 1..80: note = Artificially Synthesized Probe
  source 1..80: mol_type = other DNA
taggcagcagagtcactgcttcaagtgtgaacacaacagacaaaaagtctggattgcattcaatcctacaactggtaatg

SEQ ID NO: 115667 - DNA, 80 bp, synthetic construct
  misc_feature 1..80: note = Artificially Synthesized Probe
  source 1..80: mol_type = other DNA
ctgagcctctaaaacaacctggcctgtgaaggttcctgctgggctccccaaacctccaaacttggggccctagttcaaga

SEQ ID NO: 115668 - DNA, 80 bp, synthetic construct
  misc_feature 1..80: note = Artificially Synthesized Probe
  source 1..80: mol_type = other DNA
accatgcccgggtaattttgtatttttagtagagacggggtttctccatgttggtcaggctggtctgaacttcccaacct

SEQ ID NO: 115669 - DNA, 80 bp, synthetic construct
  misc_feature 1..80: note = Artificially Synthesized Probe
  source 1..80: mol_type = other DNA
ctacaatcctgcctcccaggttcaagtgattctcccgcctcagcctcccaagtagctgggattataggcatccaccacta

SEQ ID NO: 115670 - DNA, 80 bp, synthetic construct; identical to SEQ ID NO: 37956
  misc_feature 1..80: note = Artificially Synthesized Probe
  source 1..80: mol_type = other DNA

SEQ ID NO: 115671 - DNA, 80 bp, synthetic construct
  misc_feature 1..80: note = Artificially Synthesized Probe
  source 1..80: mol_type = other DNA
gtgagccatgatcataccattgctctccagcctgggtgccagagtgagtccctgtgtcaaaaacaagaacaacaaaaaac

SEQ ID NO: 115672 - DNA, 80 bp, synthetic construct
  misc_feature 1..80: note = Artificially Synthesized Probe
  source 1..80: mol_type = other DNA
ggtgtgaactactgcacttggcctaaaatttttcattttcaaattcagttccttggccacactgaccatattcaatgctc

SEQ ID NO: 115673 - DNA, 80 bp, synthetic construct; identical to SEQ ID NO: 37957
  misc_feature 1..80: note = Artificially Synthesized Probe
  source 1..80: mol_type = other DNA

SEQ ID NO: 115674 - DNA, 80 bp, synthetic construct
  misc_feature 1..80: note = Artificially Synthesized Probe
  source 1..80: mol_type = other DNA
aaaattacccaggcatggtgagcgtgcctgtaatcccagctacctgagaggctgaggcaggagaatcgctggaacctggg

SEQ ID NO: 115675 - DNA, 80 bp, synthetic construct
  misc_feature 1..80: note = Artificially Synthesized Probe
  source 1..80: mol_type = other DNA
tcttttacgcttccttcttagtcactctgccacctactactgcagtataatggtgatcttctccttgccaggcccagtgg

SEQ ID NO: 115676 - DNA, 80 bp, synthetic construct
  misc_feature 1..80: note = Artificially Synthesized Probe
  source 1..80: mol_type = other DNA
gtttggctaattgctgtagagatggggttccatcatatgggccagacgggtctccaactcctgggatcaagcgatctacc

SEQ ID NO: 115677 - DNA, 80 bp, synthetic construct
  misc_feature 1..80: note = Artificially Synthesized Probe
  source 1..80: mol_type = other DNA
cagaaatgcttgacttctggggtccacttttctgggatgttttctgaaagaaaaatgtagagaatttggggatacataca

SEQ ID NO: 115678 - DNA, 80 bp, synthetic construct; identical to SEQ ID NO: 37958
  misc_feature 1..80: note = Artificially Synthesized Probe
  source 1..80: mol_type = other DNA

SEQ ID NO: 115679 - DNA, 80 bp, synthetic construct
  misc_feature 1..80: note = Artificially Synthesized Probe
  source 1..80: mol_type = other DNA
cactgcaagctccacctcccgggttcacgccattctcctgcctcagcctcccaagtagctaggactacaggcacccgcca

SEQ ID NO: 115680 - DNA, 80 bp, synthetic construct
  misc_feature 1..80: note = Artificially Synthesized Probe
  source 1..80: mol_type = other DNA
ttagtagagacagggattcaccatgttggtcaggctggtctcgaactcctgacctcgcgatctgcctgcctcagcctccc

SEQ ID NO: 115681 - DNA, 80 bp, synthetic construct
  misc_feature 1..80: note = Artificially Synthesized Probe
  source 1..80: mol_type = other DNA
caatgcaacctccacctcccgggttccaccaattctcctgcatcagcctcatgagtaactagaattacaggtgcgcacaa

SEQ ID NO: 115682 - DNA, 80 bp, synthetic construct; identical to SEQ ID NO: 37959
  misc_feature 1..80: note = Artificially Synthesized Probe
  source 1..80: mol_type = other DNA

SEQ ID NO: 115683 - DNA, 80 bp, synthetic construct
  misc_feature 1..80: note = Artificially Synthesized Probe
  source 1..80: mol_type = other DNA
caagtcccctggaaagagcggtaacgatggttcaggaatactttctaaggtgaggaaacagcttgagcaaataacctcaa

SEQ ID NO: 115684 - DNA, 80 bp, synthetic construct
  misc_feature 1..80: note = Artificially Synthesized Probe
  source 1..80: mol_type = other DNA
agccgggtgtggtggcaggcacctgtagtcccagctactcgggaggctgaggcaggagaatgacgtgaacccgggaggcg

SEQ ID NO: 115685 - DNA, 80 bp, synthetic construct
  misc_feature 1..80: note = Artificially Synthesized Probe
  source 1..80: mol_type = other DNA
gagcaatctgcattctattctgtaaggaagggaaagccactggaccagcacaatcaggtctgtaattaatagagaaacaa

SEQ ID NO: 115686 - DNA, 80 bp, synthetic construct
  misc_feature 1..80: note = Artificially Synthesized Probe
  source 1..80: mol_type = other DNA
tataatccctttcctttaaacagagaaccaacagctttttctcagtccagccaagagtggtgctgagcatctctgtaggt

SEQ ID NO: 115687 - DNA, 80 bp, synthetic construct
  misc_feature 1..80: note = Artificially Synthesized Probe
  source 1..80: mol_type = other DNA
gcgcctataatttcagctactcgggaggctgaggtaggagaatcgcttgaacccaggaggcggaggttgcagtgagccaa

SEQ ID NO: 115688 - DNA, 80 bp, synthetic construct; identical to SEQ ID NO: 37960
  misc_feature 1..80: note = Artificially Synthesized Probe
  source 1..80: mol_type = other DNA

SEQ ID NO: 115689 - DNA, 80 bp, synthetic construct
  misc_feature 1..80: note = Artificially Synthesized Probe
  source 1..80: mol_type = other DNA
ctcaaaaaggtatgatgataatgaacaccaagaaaaaaggaagaacacattacaagaaaagagtccaaactacatgcttg

SEQ ID NO: 115690 - DNA, 80 bp, synthetic construct
  misc_feature 1..80: note = Artificially Synthesized Probe
  source 1..80: mol_type = other DNA
tggctcacgcctgtaatcccagcactttgggaggctgaggaggatggatcatttgagatcaggagttagagaccagcctg

SEQ ID NO: 115691 - DNA, 80 bp, synthetic construct
  misc_feature 1..80: note = Artificially Synthesized Probe
  source 1..80: mol_type = other DNA
taaaaatacaaaaattagccggacatgatggcacacgtctgtaatcccagctactcgggaggctgaggcaggagaatcgc

SEQ ID NO: 115692 - DNA, 80 bp, synthetic construct; identical to SEQ ID NO: 37961
  misc_feature 1..80: note = Artificially Synthesized Probe
  source 1..80: mol_type = other DNA

SEQ ID NO: 115693 - DNA, 80 bp, synthetic construct
  misc_feature 1..80: note = Artificially Synthesized Probe
  source 1..80: mol_type = other DNA
gcaggctgaggtggcaggatcgcttgggcccaggagggcaaagtggcagtgagtagtgatcgagacactgcactccagcc

SEQ ID NO: 115694 - DNA, 80 bp, synthetic construct
  misc_feature 1..80: note = Artificially Synthesized Probe
  source 1..80: mol_type = other DNA
atctatagagacacaaagtagattagtggttacctaaggctgggcgtggtgatagggagattgaagatgacagttgaaga

SEQ ID NO: 115695 - DNA, 80 bp, synthetic construct
  misc_feature 1..80: note = Artificially Synthesized Probe
  source 1..80: mol_type = other DNA
gtttttgtttttttaaaaaaaataagcgttgaaagtatggcagagactgcctgcttatctgcctcaatagctttcccctt

SEQ ID NO: 115696 - DNA, 80 bp, synthetic construct; identical to SEQ ID NO: 37962
  misc_feature 1..80: note = Artificially Synthesized Probe
  source 1..80: mol_type = other DNA

SEQ ID NO: 115697 - DNA, 80 bp, synthetic construct; identical to SEQ ID NO: 37925
  misc_feature 1..80: note = Artificially Synthesized Probe
  source 1..80: mol_type = other DNA

SEQ ID NO: 115698 - DNA, 80 bp, synthetic construct
  misc_feature 1..80: note = Artificially Synthesized Probe
  source 1..80: mol_type = other DNA
tcaagggtccatgagttcaaagagagacaagtcagtgaattttttctttcgctacattcagtcaaaagcacagaataggt

SEQ ID NO: 115699 - DNA, 80 bp, synthetic construct
  misc_feature 1..80: note = Artificially Synthesized Probe
  source 1..80: mol_type = other DNA
tcctgtggtcccatctactcaggaggctgagacacgagaattgcttgaacccagaaggcggaggttgctgtgagccttga

SEQ ID NO: 115700 - DNA, 80 bp, synthetic construct; identical to SEQ ID NO: 37963
  misc_feature 1..80: note = Artificially Synthesized Probe
  source 1..80: mol_type = other DNA

SEQ ID NO: 115701 - DNA, 80 bp, synthetic construct
  misc_feature 1..80: note = Artificially Synthesized Probe
  source 1..80: mol_type = other DNA
gtggcgggcacctgtagtcctagctactctggaggctgaggcaggagaacggcgtgaacccgggaggcagagcttgcagt

SEQ ID NO: 115702 - DNA, 80 bp, synthetic construct
  misc_feature 1..80: note = Artificially Synthesized Probe
  source 1..80: mol_type = other DNA
ttatttgggagactgagacaggagaattgctgcctcgggaggcagaggttgcagttagctgagactgtgccactgcactc

SEQ ID NO: 115703 - DNA, 80 bp, synthetic construct
  misc_feature 1..80: note = Artificially Synthesized Probe
  source 1..80: mol_type = other DNA
acagtgaaaccccgtctctactaaaaactacaaaaacttagctgggcgtggcggcgggcacctgtagtcccagctactcg

SEQ ID NO: 115704 - DNA, 80 bp, synthetic construct
  misc_feature 1..80: note = Artificially Synthesized Probe
  source 1..80: mol_type = other DNA
aaaaagtgatgtgccaaatatgtcatatgctatcataccatagtgtaatggcgggatacatagatatacaaaacagggct

SEQ ID NO: 115705 - DNA, 80 bp, synthetic construct; identical to SEQ ID NO: 37964
  misc_feature 1..80: note = Artificially Synthesized Probe
  source 1..80: mol_type = other DNA

SEQ ID NO: 115706 - DNA, 80 bp, synthetic construct
  misc_feature 1..80: note = Artificially Synthesized Probe
  source 1..80: mol_type = other DNA
ctgggattacatgcactggtctacaagaaacacaacaggtacctctaggggccatatatccttttgcactgtttgaattt

SEQ ID NO: 115707 - DNA, 80 bp, synthetic construct
  misc_feature 1..80: note = Artificially Synthesized Probe
  source 1..80: mol_type = other DNA
tcaagggggtaagaaataaagcaatacatatgcaaaaatccatcttggaatctgaactcaagaaactacagaaacggctg

SEQ ID NO: 115708 - DNA, 80 bp, synthetic construct
  misc_feature 1..80: note = Artificially Synthesized Probe
  source 1..80: mol_type = other DNA
tagctgggcatggtggcacgtgcttgtaatcccagctactcgggaggctgaggcaggagaatcgcttgaacccgggaggc

SEQ ID NO: 115709 - DNA, 80 bp, synthetic construct
  misc_feature 1..80: note = Artificially Synthesized Probe
  source 1..80: mol_type = other DNA
cccccaccacctcctgtttctataaggagataaaacaagattatctgtgttcaggccaagggttgattcccactactcat

SEQ ID NO: 115710 - DNA, 80 bp, synthetic construct
  misc_feature 1..80: note = Artificially Synthesized Probe
  source 1..80: mol_type = other DNA
aaaaaaattagccgggtgtagtggtgggcacctgtagtcccagctattcaggaggctgaggcaggagaatggtgtgaacc

SEQ ID NO: 115711 - DNA, 80 bp, synthetic construct; identical to SEQ ID NO: 37965
  misc_feature 1..80: note = Artificially Synthesized Probe
  source 1..80: mol_type = other DNA

SEQ ID NO: 115712 - DNA, 80 bp, synthetic construct
  misc_feature 1..80: note = Artificially Synthesized Probe
  source 1..80: mol_type = other DNA
gagcaagattgtagccaaaaaggtgaggtggggggatggtatataaaagggttaatttccagccgggcacggtggctcac

SEQ ID NO: 115713 - DNA, 80 bp, synthetic construct
  misc_feature 1..80: note = Artificially Synthesized Probe
  source 1..80: mol_type = other DNA
gctgaggcaggagaatggcgtgaacccgggaggcagaacttgcagtgagctgagattgcaccactgcactccagcctggg

SEQ ID NO: 115714 - DNA, 80 bp, synthetic construct
  misc_feature 1..80: note = Artificially Synthesized Probe
  source 1..80: mol_type = other DNA
tcctctaagttactacccttcttttctgaattgaccttaggaagttacttctttccaaacaagacctacaagtaacaacg

SEQ ID NO: 115715 - DNA, 80 bp, synthetic construct; identical to SEQ ID NO: 37966
  misc_feature 1..80: note = Artificially Synthesized Probe
  source 1..80: mol_type = other DNA

SEQ ID NO: 115716 - DNA, 80 bp, synthetic construct
  misc_feature 1..80: note = Artificially Synthesized Probe
  source 1..80: mol_type = other DNA
aatgaagttgaaaacatagagctgtttattttgtttactgactgcatgggaaattcctgatgaaagggccaaactaccat

SEQ ID NO: 115717 - DNA, 80 bp, synthetic construct
  misc_feature 1..80: note = Artificially Synthesized Probe
  source 1..80: mol_type = other DNA
gtctgaaaggcaccactaggcatttcctttgaatgtcatgccagcgcccatcttgaagcatttcagatgctcaacctgta

SEQ ID NO: 115718 - DNA, 80 bp, synthetic construct; identical to SEQ ID NO: 37967
  misc_feature 1..80: note = Artificially Synthesized Probe
  source 1..80: mol_type = other DNA

SEQ ID NO: 115719 - DNA, 80 bp, synthetic construct
  misc_feature 1..80: note = Artificially Synthesized Probe
  source 1..80: mol_type = other DNA
tgcgtatctagtaaaactgacaaagaaaaatgaaccattaggtacctcccagtgagctggctaagaatttatatatgctt

SEQ ID NO: 115720 - DNA, 80 bp, synthetic construct
  misc_feature 1..80: note = Artificially Synthesized Probe
  source 1..80: mol_type = other DNA
tctctataaaaattaaattaattaactaggtatggtggtgcttgcctgtagtcccagatgctcatgaggctgaggcagga

SEQ ID NO: 115721 - DNA, 80 bp, synthetic construct
  misc_feature 1..80: note = Artificially Synthesized Probe
  source 1..80: mol_type = other DNA
gaagccaagcaaataaaacgaatgaacaaaaaaactagtctaaaaaactttaggccaggagcagtggctcacacctgtaa

SEQ ID NO: 115722 - DNA, 80 bp, synthetic construct
  misc_feature 1..80: note = Artificially Synthesized Probe
  source 1..80: mol_type = other DNA
ggcaagtagacagcttgggcctaggagctcaagaacagcctatgcaacatggctaaaccccatctccagacagcgtggtg

SEQ ID NO: 115723 - DNA, 80 bp, synthetic construct
  misc_feature 1..80: note = Artificially Synthesized Probe
  source 1..80: mol_type = other DNA
gaagaatcgcttgaacccgagaggcggaggttgcagtgagttgagatcgtgccactgcactgcagcctgggcaacagagc

SEQ ID NO: 115724 - DNA, 80 bp, synthetic construct; identical to SEQ ID NO: 37968
  misc_feature 1..80: note = Artificially Synthesized Probe
  source 1..80: mol_type = other DNA

SEQ ID NO: 115725 - DNA, 80 bp, synthetic construct
  misc_feature 1..80: note = Artificially Synthesized Probe
  source 1..80: mol_type = other DNA
ataaaaatttaaagccttgaggaaatgctctttaactcgactgagtggcaattacttgggtatacacattcatcaaaatt

SEQ ID NO: 115726 - DNA, 80 bp, synthetic construct
  misc_feature 1..80: note = Artificially Synthesized Probe
  source 1..80: mol_type = other DNA
aggcgtggtggtgcacacctgcagtcccagctactcgggaggctaaagcagagaattcttgggcctaggaggtcgaggat

SEQ ID NO: 115727 - DNA, 80 bp, synthetic construct; identical to SEQ ID NO: 37969
  misc_feature 1..80: note = Artificially Synthesized Probe
  source 1..80: mol_type = other DNA

SEQ ID NO: 115728 - DNA, 80 bp, synthetic construct
  misc_feature 1..80: note = Artificially Synthesized Probe
  source 1..80: mol_type = other DNA
ctgaggtgggaggactgtttgagcccaggagtctgagacccaacctgggcaagacagcaagactccatctctacaaaatg

SEQ ID NO: 115729 - DNA, 80 bp, synthetic construct
  misc_feature 1..80: note = Artificially Synthesized Probe
  source 1..80: mol_type = other DNA
ccaaaaaaaagccaggcgcagtggctcacacccgtaatcccagtactttgggaagccaaggcaggtggatcacaaggtca

SEQ ID NO: 115730 - DNA, 80 bp, synthetic construct
  misc_feature 1..80: note = Artificially Synthesized Probe
  source 1..80: mol_type = other DNA
agagattgcagtgagccgagattgtgccactacactccagcttagacaacagagcaagactccgtctcaaaaaaaaaaaa

SEQ ID NO: 115731 - DNA, 80 bp, synthetic construct; identical to SEQ ID NO: 37970
  misc_feature 1..80: note = Artificially Synthesized Probe
  source 1..80: mol_type = other DNA

SEQ ID NO: 115732 - DNA, 80 bp, synthetic construct
  misc_feature 1..80: note = Artificially Synthesized Probe
  source 1..80: mol_type = other DNA
gatcacctgaggtcaggagatcgggaccatcctggctaacacggtaaaaccctgtctctactaaaaatacaaaaaaaaaa

SEQ ID NO: 115733 - DNA, 80 bp, synthetic construct
  misc_feature 1..80: note = Artificially Synthesized Probe
  source 1..80: mol_type = other DNA
tgggaggctgaggcagaagaaacacttgaacccaggaggtggaggttgtgatgagtcgagatcgcaatactacactcact

SEQ ID NO: 115734 - DNA, 80 bp, synthetic construct
  misc_feature 1..80: note = Artificially Synthesized Probe
  source 1..80: mol_type = other DNA
aaaaaaaaaaaaaaaaaaattagctgggcatggtgacatgcctgtaaaccccaactaatggggaggctgaggcaggagaa

SEQ ID NO: 115735 - DNA, 80 bp, synthetic construct
  misc_feature 1..80: note = Artificially Synthesized Probe
  source 1..80: mol_type = other DNA
actgaaatctcatggcgcttccttaccattccctttctacagaagaaaaaaactgaattacaaaggagacatactactgc

SEQ ID NO: 115736 - DNA, 80 bp, synthetic construct
  misc_feature 1..80: note = Artificially Synthesized Probe
  source 1..80: mol_type = other DNA
cagcaatcttggctcactgcaacctgcgcctctcaagttcgagggattctcctgcttcagccttccgagtagctgggatt

SEQ ID NO: 115737 - DNA, 80 bp, synthetic construct; identical to SEQ ID NO: 37971
  misc_feature 1..80: note = Artificially Synthesized Probe
  source 1..80: mol_type = other DNA

SEQ ID NO: 115738 - DNA, 80 bp, synthetic construct
  misc_feature 1..80: note = Artificially Synthesized Probe
  source 1..80: mol_type = other DNA
ctatatcccaaacaaagttacaaaaaaaaatcccagtagtagagcatatgatctctaggtccatggaagagacaccagag

SEQ ID NO: 115739 - DNA, 80 bp, synthetic construct
  misc_feature 1..80: note = Artificially Synthesized Probe
  source 1..80: mol_type = other DNA
caacttttttaaatcatgggactgaatccttgtgctttagagcagctataagcttcagaaattaaaaatcttggccaggg

SEQ ID NO: 115740 - DNA, 80 bp, synthetic construct; identical to SEQ ID NO: 37972
  misc_feature 1..80: note = Artificially Synthesized Probe
  source 1..80: mol_type = other DNA

SEQ ID NO: 115741 - DNA, 80 bp, synthetic construct
  misc_feature 1..80: note = Artificially Synthesized Probe
  source 1..80: mol_type = other DNA
aggtgggtgggtcacggggtcacgaggtcaagagatcaaggccatcctggccaacatggtgagatcccgtctttactaaa

SEQ ID NO: 115742 - DNA, 80 bp, synthetic construct
  misc_feature 1..80: note = Artificially Synthesized Probe
  source 1..80: mol_type = other DNA
aagagaagagaagagaagaaccaatgacttcaaataaaataggcagaagtcactaagtcaaggaaattaatattatgaaa

SEQ ID NO: 115743 - DNA, 80 bp, synthetic construct
  misc_feature 1..80: note = Artificially Synthesized Probe
  source 1..80: mol_type = other DNA
atatttatttttggtaacatacattaagtggcactaattacacagtaactataaggtaactaacatgaaaccacagaact

SEQ ID NO: 115744 - DNA, 80 bp, synthetic construct
  misc_feature 1..80: note = Artificially Synthesized Probe
  source 1..80: mol_type = other DNA
ctatctcagcctcctgaatagccgggattataggcgcctgctgccacgcccagctaatgttttgtatttttagtagagac

SEQ ID NO: 115745 - DNA, 80 bp, synthetic construct; identical to SEQ ID NO: 37926
  misc_feature 1..80: note = Artificially Synthesized Probe
  source 1..80: mol_type = other DNA

SEQ ID NO: 115746 - DNA, 80 bp, synthetic construct
  misc_feature 1..80: note = Artificially Synthesized Probe
  source 1..80: mol_type = other DNA
gtcagaatggaattagatctactcctactcacagtgattctagttttttttttaatatcagatcatgtcattccctttct

SEQ ID NO: 115747 - DNA, 80 bp, synthetic construct; identical to SEQ ID NO: 37973
  misc_feature 1..80: note = Artificially Synthesized Probe
  source 1..80: mol_type = other DNA

SEQ ID NO: 115748 - DNA, 80 bp, synthetic construct
  misc_feature 1..80: note = Artificially Synthesized Probe
  source 1..80: mol_type = other DNA
gcacaagaatcacttgaactaggaggcggcggttgcagtgagccgagatggcgctactgcactctggcccggacgacaga

SEQ ID NO: 115749 - DNA, 80 bp, synthetic construct
  misc_feature 1..80: note = Artificially Synthesized Probe
  source 1..80: mol_type = other DNA
acacacacacatatgcttaaatatacatactcatcctcttcaaaaaataaaatcaagctaagtttggcataaactgcata

SEQ ID NO: 115750 - DNA, 80 bp, synthetic construct; identical to SEQ ID NO: 37974
  misc_feature 1..80: note = Artificially Synthesized Probe
  source 1..80: mol_type = other DNA

SEQ ID NO: 115751 - DNA, 80 bp, synthetic construct
  misc_feature 1..80: note = Artificially Synthesized Probe
  source 1..80: mol_type = other DNA
tattaatgtgtagttacaagcaaacagttccattgggcaggtaaacaaaggaataaactaaatggcagagtcagacaaaa

SEQ ID NO: 115752 - DNA, 80 bp, synthetic construct
  misc_feature 1..80: note = Artificially Synthesized Probe
  source 1..80: mol_type = other DNA
caccacacccagctaattttttttgtatttttagtagagacggggtttcaccgtgttagccaggatggtctccagacctc

SEQ ID NO: 115753 - DNA, 80 bp, synthetic construct
  misc_feature 1..80: note = Artificially Synthesized Probe
  source 1..80: mol_type = other DNA
caggagttcaagaccagcctggccaacacggtgaaaccccatctctactaaaaatacaaaagttagccaggaatggtggt

SEQ ID NO: 115754 - DNA, 80 bp, synthetic construct
  misc_feature 1..80: note = Artificially Synthesized Probe
  source 1..80: mol_type = other DNA
tatatggccaattttaaaatccagtgactatgtactatttatcataatcactagtaaccacaatgcaattaaacccaagg

SEQ ID NO: 115755 - DNA, 80 bp, synthetic construct; identical to SEQ ID NO: 37975
  misc_feature 1..80: note = Artificially Synthesized Probe
  source 1..80: mol_type = other DNA

SEQ ID NO: 115756 - DNA, 80 bp, synthetic construct
  misc_feature 1..80: note = Artificially Synthesized Probe
  source 1..80: mol_type = other DNA
ttggttttgaagcagtaaagtgtaggccttgctctagaagttggtcccttaaaaaaaaatccaaacaaagccatgattag

SEQ ID NO: 115757 - DNA, 80 bp, synthetic construct
  misc_feature 1..80: note = Artificially Synthesized Probe
  source 1..80: mol_type = other DNA
gcctataatcccagcactgtgaaggccggggcgggtggatcacctcaggtcgggagttgggagaccagcataaccaacat

SEQ ID NO: 115758 - DNA, 80 bp, synthetic construct
  misc_feature 1..80: note = Artificially Synthesized Probe
  source 1..80: mol_type = other DNA
aaacaatggaataagctagaagtcctgaattttagctgactctggaggccaactgcttgggagtaaatggagaatacctt

SEQ ID NO: 115759 - DNA, 80 bp, synthetic construct
  misc_feature 1..80: note = Artificially Synthesized Probe
  source 1..80: mol_type = other DNA
tactctcttcttccctccaacacagatttttatgagaacagagaggataaatctagcactagactttaactcaaaccaag

SEQ ID NO: 115760 - DNA, 80 bp, synthetic construct; identical to SEQ ID NO: 37976
  misc_feature 1..80: note = Artificially Synthesized Probe
  source 1..80: mol_type = other DNA

SEQ ID NO: 115761 - DNA, 80 bp, synthetic construct
  misc_feature 1..80: note = Artificially Synthesized Probe
  source 1..80: mol_type = other DNA
gagtgaaatatctacttacacacctgcaagaaacgtttaagactttcttcaagacagaaccaaacaagtcaacaacagag

SEQ ID NO: 115762 - DNA, 80 bp, synthetic construct
  misc_feature 1..80: note = Artificially Synthesized Probe
  source 1..80: mol_type = other DNA
cgaatagcgctattcaatgaagacgacccgtaactgtagatccaatcagtaactaaggtacagatatttagatcattcct

SEQ ID NO: 115763 - DNA, 80 bp, synthetic construct; identical to SEQ ID NO: 37977
  misc_feature 1..80: note = Artificially Synthesized Probe
  source 1..80: mol_type = other DNA

SEQ ID NO: 115764 - DNA, 80 bp, synthetic construct
  misc_feature 1..80: note = Artificially Synthesized Probe
  source 1..80: mol_type = other DNA
tgcgcggtcgcggggcccggcccaaagcccccgccctgcccggcgccgctgggagaggaagctccggggaccgagggcgg

SEQ ID NO: 115765 - DNA, 80 bp, synthetic construct
  misc_feature 1..80: note = Artificially Synthesized Probe
  source 1..80: mol_type = other DNA
ggccacgagcagccggtggggcgcggccgcggcggtgcggcggcctgccggccggaagagtaccgggctggcgggcctgg

SEQ ID NO: 115766 - DNA, 80 bp, synthetic construct
  misc_feature 1..80: note = Artificially Synthesized Probe
  source 1..80: mol_type = other DNA
accgcgggcggcgggagggtagcgcgagagagcgagggcgggcggcggcgggagggcggggaacgacgtgcgcgcctccg

SEQ ID NO: 115767 - DNA, 80 bp, synthetic construct; identical to SEQ ID NO: 37978
  misc_feature 1..80: note = Artificially Synthesized Probe
  source 1..80: mol_type = other DNA

SEQ ID NO: 115768 - DNA, 80 bp, synthetic construct
  misc_feature 1..80: note = Artificially Synthesized Probe
  source 1..80: mol_type = other DNA
aacaagagcgaaactccgtctcaaaaacaacaaaacaaaacaaaaaaattaactgggcatggtggtgcacacctgtaatc

SEQ ID NO: 115769 - DNA, 80 bp, synthetic construct
  misc_feature 1..80: note = Artificially Synthesized Probe
  source 1..80: mol_type = other DNA
gtcatggcggagtcctggtctgggcaggccttgcaggctctgccggccacggtgctgggcgcgctgggcagcgagttctt

SEQ ID NO: 115770 - DNA, 80 bp, synthetic construct
  misc_feature 1..80: note = Artificially Synthesized Probe
  source 1..80: mol_type = other DNA
tgggctggccgcccccgcccccaccctctcccgactgtaccattgggttccccactatcctgcaagaggctcatcagaac

SEQ ID NO: 115771 - DNA, 80 bp, synthetic construct
  misc_feature 1..80: note = Artificially Synthesized Probe
  source 1..80: mol_type = other DNA
tcagaactctcacctggcaataccattagtcccttaggaccctcaccagacttcaccaaacaataccagtggtctctaac

SEQ ID NO: 115772 - DNA, 80 bp, synthetic construct
  misc_feature 1..80: note = Artificially Synthesized Probe
  source 1..80: mol_type = other DNA
tgcagtggctcatcaggcctgtaatctcagcactttgggaggccgaggcaggtggatcaggagtttgagaccagtctggc

SEQ ID NO: 115773 - DNA, 80 bp, synthetic construct; identical to SEQ ID NO: 37927
  misc_feature 1..80: note = Artificially Synthesized Probe
  source 1..80: mol_type = other DNA

SEQ ID NO: 115774 - DNA, 80 bp, synthetic construct
  misc_feature 1..80: note = Artificially Synthesized Probe
  source 1..80: mol_type = other DNA
ccaggctggagcgcagtggcgcaatctcagctcactacaacctctgcctcccgggttcaagcaattctcctgcctcagcc

SEQ ID NO: 115775 - DNA, 80 bp, synthetic construct
  misc_feature 1..80: note = Artificially Synthesized Probe
  source 1..80: mol_type = other DNA
tgagccacagtgcctggcctagaatagatgttctgttagtaggtgctgtagttatttcctgaatatgtgaaattatacca

SEQ ID NO: 115776 - DNA, 80 bp, synthetic construct
  misc_feature 1..80: note = Artificially Synthesized Probe
  source 1..80: mol_type = other DNA
cactgcaacctctgcctcccaggttcaagcaattctcctgcctcagcctcctgagtagctgggattacaggtacatgcca

SEQ ID NO: 115777 - DNA, 80 bp, synthetic construct
  misc_feature 1..80: note = Artificially Synthesized Probe
  source 1..80: mol_type = other DNA
tacaggcgtgagccaccatgcccggcctaaaaaatataaaaattaaccaagcgcagcagtgtgtgcctgtagtaccaact

SEQ ID NO: 115778 - DNA, 80 bp, synthetic construct
  misc_feature 1..80: note = Artificially Synthesized Probe
  source 1..80: mol_type = other DNA
tcaccagagtaccttgcagctgacagataataggcaggacatgttagttataaagtagttacagcctaattcacaaaagt

SEQ ID NO: 115779 - DNA, 80 bp, synthetic construct; identical to SEQ ID NO: 37928
  misc_feature 1..80: note = Artificially Synthesized Probe
  source 1..80: mol_type = other DNA

SEQ ID NO: 115780 - DNA, 80 bp, synthetic construct
  misc_feature 1..80: note = Artificially Synthesized Probe
  source 1..80: mol_type = other DNA
tgtaatcccagcactttgggaggccaaggtgagtggatcaccagaggtcagaagtttgagagaagcctggccaacacgga

SEQ ID NO: 115781 - DNA, 80 bp, synthetic construct
  misc_feature 1..80: note = Artificially Synthesized Probe
  source 1..80: mol_type = other DNA
cagagcgagaccccgcctctaaatcaatcaatcaatcataactgctgaaaatgatctaagtgaaccaacggcatggaata

SEQ ID NO: 115782 - DNA, 80 bp, synthetic construct; identical to SEQ ID NO: 37929
  misc_feature 1..80: note = Artificially Synthesized Probe
  source 1..80: mol_type = other DNA

SEQ ID NO: 115783 - DNA, 80 bp, synthetic construct
  misc_feature 1..80: note = Artificially Synthesized Probe
  source 1..80: mol_type = other DNA
caagttttttcaagcctggtttcacagaatgtcaggttagcattcttcagtctttttctaaagaatactgacttctgggc

SEQ ID NO: 115784 - DNA, 80 bp, synthetic construct
  misc_feature 1..80: note = Artificially Synthesized Probe
  source 1..80: mol_type = other DNA
tcccagctacttgggtggctgaggcaggagaatggcatcaacccaggaggcagagcttgcagtgagctgagatcaagctg

SEQ ID NO: 115785 - DNA, 80 bp, synthetic construct
  misc_feature 1..80: note = Artificially Synthesized Probe
  source 1..80: mol_type = other DNA
gctaagacagggcaaccaaaaaaaagaaagtctttccccaaaagagatggctttacatttggaactcatctagtttgctc

SEQ ID NO: 115786 - DNA, 80 bp, synthetic construct
  misc_feature 1..80: note = Artificially Synthesized Probe
  source 1..80: mol_type = other DNA
agagacaaggggttcaccatgttgcctaggctggtctcaaactcctgacctcaggtgatctgccagcctcggcctcccaa

SEQ ID NO: 115787 - DNA, 80 bp, synthetic construct; identical to SEQ ID NO: 37930
  misc_feature 1..80: note = Artificially Synthesized Probe
  source 1..80: mol_type = other DNA

SEQ ID NO: 115788 - DNA, 80 bp, synthetic construct; identical to SEQ ID NO: 37921
  misc_feature 1..80: note = Artificially Synthesized Probe
  source 1..80: mol_type = other DNA

SEQ ID NO: 115789 - DNA, 80 bp, synthetic construct
  misc_feature 1..80: note = Artificially Synthesized Probe
  source 1..80: mol_type = other DNA
attataggtgtcaggcaccgtgccctgcctaggtggatacattttaaatacagtacccatgggagacctaggctgaaagg

SEQ ID NO: 115790 - DNA, 80 bp, synthetic construct
  misc_feature 1..80: note = Artificially Synthesized Probe
  source 1..80: mol_type = other DNA
agctacacaggcagtgacaaatatcagggtgcagggccactcacctaaactatcagggctgtcgatggaaaaacacatca

SEQ ID NO: 115791 - DNA, 80 bp, synthetic construct; identical to SEQ ID NO: 37931
  misc_feature 1..80: note = Artificially Synthesized Probe
  source 1..80: mol_type = other DNA

SEQ ID NO: 115792 - DNA, 80 bp, synthetic construct
  misc_feature 1..80: note = Artificially Synthesized Probe
  source 1..80: mol_type = other DNA
tggcctcccaagtagctgggactacaggtgcccgccatcacacccggctaattttttgtatttttagtagagacggggtt

SEQ ID NO: 115793 - DNA, 80 bp, synthetic construct
  misc_feature 1..80: note = Artificially Synthesized Probe
  source 1..80: mol_type = other DNA
gctcagactggagttcagtggcaagatcttggctcactgcaagctctgcccccgggttcatgccattctcctgcctcagc

SEQ ID NO: 115794 - DNA, 80 bp, synthetic construct
  misc_feature 1..80: note = Artificially Synthesized Probe
  source 1..80: mol_type = other DNA
aatcagaaaaatactttattccactacattacttaattatttcaacaagagggaaagtacagtcgcactggctgtctaac

SEQ ID NO: 115795 - DNA, 80 bp, synthetic construct
  misc_feature 1..80: note = Artificially Synthesized Probe
  source 1..80: mol_type = other DNA
tttcttttttctgagacagggtctcacactgtcacccaggctggagtgcagtggcacaatctcgacttactgcaaccttt

SEQ ID NO: 115796 - DNA, 80 bp, synthetic construct
  misc_feature 1..80: note = Artificially Synthesized Probe
  source 1..80: mol_type = other DNA
tttgccttggtctcccaaagtgatgggatgacaagtgtgcaccactgcgcccaggctttgcccatttttgaatcaggttg

SEQ ID NO: 115797 - DNA, 80 bp, synthetic construct
  misc_feature 1..80: note = Artificially Synthesized Probe
  source 1..80: mol_type = other DNA
gtttaatttttttttttgttgcctgtgctttggtatcatatccaggaaatcactgccacatccaacattgtgaacctttt

SEQ ID NO: 115798 - DNA, 80 bp, synthetic construct; identical to SEQ ID NO: 37990
  misc_feature 1..80: note = Artificially Synthesized Probe
  source 1..80: mol_type = other DNA

SEQ ID NO: 115799 - DNA, 80 bp, synthetic construct
  misc_feature 1..80: note = Artificially Synthesized Probe
  source 1..80: mol_type = other DNA
ttattgcaaacaaaggcagttaaggagataccgataaactaaaaatcctgtcatatataaaacaaaaaacagcaagacag

SEQ ID NO: 115800 - DNA, 80 bp, synthetic construct
  misc_feature 1..80: note = Artificially Synthesized Probe
  source 1..80: mol_type = other DNA
ggatggaaaaagatataccatgtgaactataaccaatataaaaattaaatgaagaaaatcccaccgtaaaaaataatgaa

SEQ ID NO: 115801 - DNA, 80 bp, synthetic construct
  misc_feature 1..80: note = Artificially Synthesized Probe
  source 1..80: mol_type = other DNA
acgcctgtaattaatcccagctacttgggaggctgaggcacaagaattgcttgaacccaggaggtggaggttgcagtgag

SEQ ID NO: 115802 - DNA, 80 bp, synthetic construct; identical to SEQ ID NO: 37991
  misc_feature 1..80: note = Artificially Synthesized Probe
  source 1..80: mol_type = other DNA

SEQ ID NO: 115803 - DNA, 80 bp, synthetic construct
  misc_feature 1..80: note = Artificially Synthesized Probe
  source 1..80: mol_type = other DNA
tgtaaagcaaaagtaaccaagatattgtggtatttctgaaaggagaaaatatactcatcgacagggtccggaagaaagcc

SEQ ID NO: 115804 - DNA, 80 bp, synthetic construct
  misc_feature 1..80: note = Artificially Synthesized Probe
  source 1..80: mol_type = other DNA
gagcagggggaggtgaactgtggtctgttccggggctggggctgagtccagcctgccacctgtttttgtaaataaagttt

SEQ ID NO: 115805 - DNA, 80 bp, synthetic construct
  misc_feature 1..80: note = Artificially Synthesized Probe
  source 1..80: mol_type = other DNA
gagtctcatcttctgctctactgttgctccatctcctcgctcttcctttgtgcttattatcctctatgttacatctattt

SEQ ID NO: 115806 - DNA, 80 bp, synthetic construct; identical to SEQ ID NO: 37992
  misc_feature 1..80: note = Artificially Synthesized Probe
  source 1..80: mol_type = other DNA

SEQ ID NO: 115807 - DNA, 80 bp, synthetic construct
  misc_feature 1..80: note = Artificially Synthesized Probe
  source 1..80: mol_type = other DNA
aacatgaccatgtctgggaggattttagcagaaaatacaaacctctgaacaaaatagaaatctatgaatatggctggacg

SEQ ID NO: 115808 - DNA, 80 bp, synthetic construct
  misc_feature 1..80: note = Artificially Synthesized Probe
  source 1..80: mol_type = other DNA
cagctacttgggagactgaggcacaagaatcgcttgaacctgggaggcagaggttgcagtcagccgagattgcaccactg

SEQ ID NO: 115809 - DNA, 80 bp, synthetic construct
  misc_feature 1..80: note = Artificially Synthesized Probe
  source 1..80: mol_type = other DNA
tgtggaaatggaaaaactgctatgaggcagtcattaggtggttgattgttggggggtgaggccggatgaggcaaaaggta

SEQ ID NO: 115810 - DNA, 80 bp, synthetic construct
  misc_feature 1..80: note = Artificially Synthesized Probe
  source 1..80: mol_type = other DNA
atcacgtgaccaaagtgaagaggaatcaatcaggtgactaaggtgaacatccctgtggcagaacaggtcacctctgtgct

SEQ ID NO: 115811 - DNA, 80 bp, synthetic construct; identical to SEQ ID NO: 37993
  misc_feature 1..80: note = Artificially Synthesized Probe
  source 1..80: mol_type = other DNA

SEQ ID NO: 115812 - DNA, 80 bp, synthetic construct
  misc_feature 1..80: note = Artificially Synthesized Probe
  source 1..80: mol_type = other DNA
cagcgtggacgcctggcctgagttacgggtggtttcctaggactgtgctgtgtcagcgtggacgcctggcctgagttacg

SEQ ID NO: 115813 - DNA, 80 bp, synthetic construct
  misc_feature 1..80: note = Artificially Synthesized Probe
  source 1..80: mol_type = other DNA
gtggttttgtaggactgtactgtgtcagcgtggacgcctggcctgagttacgggtggttttgtagggctgtgctgtgtca

SEQ ID NO: 115814 - DNA, 80 bp, synthetic construct
  misc_feature 1..80: note = Artificially Synthesized Probe
  source 1..80: mol_type = other DNA
cgtggacgcctggcctgagttacaggtggttttgtaggactgtgctgtgtcagcgtggatgcctggcctgagttgtgggt

SEQ ID NO: 115815 - DNA, 80 bp, synthetic construct; identical to SEQ ID NO: 37980
  misc_feature 1..80: note = Artificially Synthesized Probe
  source 1..80: mol_type = other DNA

SEQ ID NO: 115816 - DNA, 80 bp, synthetic construct; identical to SEQ ID NO: 37994
  misc_feature 1..80: note = Artificially Synthesized Probe
  source 1..80: mol_type = other DNA

SEQ ID NO: 115817 - DNA, 80 bp, synthetic construct
  misc_feature 1..80: note = Artificially Synthesized Probe
  source 1..80: mol_type = other DNA
aataaattattttaaaaaactaatttttttaaatactgttattacaattttttctgtgtgcttgaagtattttcaaaata

SEQ ID NO: 115818 - DNA, 80 bp, synthetic construct
  misc_feature 1..80: note = Artificially Synthesized Probe
  source 1..80: mol_type = other DNA
ttattttaaaaaaactaacttggtttttaaaatactattcttacaattttttctgtgtgcttgaagtattttcaaaataa

SEQ ID NO: 115819 - DNA, 80 bp, synthetic construct; identical to SEQ ID NO: 37995
  misc_feature 1..80: note = Artificially Synthesized Probe
  source 1..80: mol_type = other DNA

SEQ ID NO: 115820 - DNA, 80 bp, synthetic construct
  misc_feature 1..80: note = Artificially Synthesized Probe
  source 1..80: mol_type = other DNA
cctatcagctggccaaaatccagaacactgacatcatcaaatgtgaggacgtggagcaacaggaactctcattcgttgct

SEQ ID NO: 115821 - DNA, 80 bp, synthetic construct
  misc_feature 1..80: note = Artificially Synthesized Probe
  source 1..80: mol_type = other DNA
atagcagcttaattcataattgccaaaacttggaagcaaccaagatgcccttcagtaggtgaatggatgaactatgatac

SEQ ID NO: 115822 - DNA, 80 bp, synthetic construct
  misc_feature 1..80: note = Artificially Synthesized Probe
  source 1..80: mol_type = other DNA
gtaaaaagatcagtggctgtcaagggttggtgggaggtgggggaaggatgaacaggtggcgcacagaggatttttagggt

SEQ ID NO: 115823 - DNA, 80 bp, synthetic construct
  misc_feature 1..80: note = Artificially Synthesized Probe
  source 1..80: mol_type = other DNA
tgctctggtggaggatgaggatgatgggggagctgtgcgtgtgtggagtcatggtgtatatgggaaatctgtaccttcct

SEQ ID NO: 115824 - DNA, 80 bp, synthetic construct; identical to SEQ ID NO: 37996
  misc_feature 1..80: note = Artificially Synthesized Probe
  source 1..80: mol_type = other DNA

SEQ ID NO: 115825 - DNA, 80 bp, synthetic construct
  misc_feature 1..80: note = Artificially Synthesized Probe
  source 1..80: mol_type = other DNA
atagtcacataaatgcaaatcaaaatgactttttcctttcaaattggcaaagaggaaacacaacagacacagcgggtgtt

SEQ ID NO: 115826 - DNA, 80 bp, synthetic construct
  misc_feature 1..80: note = Artificially Synthesized Probe
  source 1..80: mol_type = other DNA
cctgtaatcccagctactcgggaggctgaggcaggagaatcacttgaacccaggaggcggaggttgcggtgagccaagat

SEQ ID NO: 115827 - DNA, 80 bp, synthetic construct
  misc_feature 1..80: note = Artificially Synthesized Probe
  source 1..80: mol_type = other DNA
aacatggtgaacctctggaaatgacacactctccgggcacagggggcttagacaaggtcaaccatgggatgaaacagaaa

SEQ ID NO: 115828 - DNA, 80 bp, synthetic construct
  misc_feature 1..80: note = Artificially Synthesized Probe
  source 1..80: mol_type = other DNA
actatttttgtttaaaaccaagaggacatagaatgcaaaggagccagttatctcctgtgacttgttacacggtcatcagg

SEQ ID NO: 115829 - DNA, 80 bp, synthetic construct; identical to SEQ ID NO: 37997
  misc_feature 1..80: note = Artificially Synthesized Probe
  source 1..80: mol_type = other DNA

SEQ ID NO: 115830 - DNA, 80 bp, synthetic construct
  misc_feature 1..80: note = Artificially Synthesized Probe
  source 1..80: mol_type = other DNA
tgttaggaacacatttcccagaaccccatctccctcatctttatcgccctctgacaagttcctgtctaacttgattctgt

SEQ ID NO: 115831 - DNA, 80 bp, synthetic construct
  misc_feature 1..80: note = Artificially Synthesized Probe
  source 1..80: mol_type = other DNA
tgttagagaatgtgaaattctgagtaaatcattcttgggtgcataattttgtcaccttgaaatccagatgctgatggaca

SEQ ID NO: 115832 - DNA, 80 bp, synthetic construct
  misc_feature 1..80: note = Artificially Synthesized Probe
  source 1..80: mol_type = other DNA
agggaggctgctctgctctgagcccctcctgcctctcagtgcgacctgggggcatggcaaggtgctacttctagttgctg

SEQ ID NO: 115833 - DNA, 80 bp, synthetic construct; identical to SEQ ID NO: 37998
  misc_feature 1..80: note = Artificially Synthesized Probe
  source 1..80: mol_type = other DNA

SEQ ID NO: 115834 - DNA, 80 bp, synthetic construct
  misc_feature 1..80: note = Artificially Synthesized Probe
  source 1..80: mol_type = other DNA
agctgtccactaagcacattccccatccacctgaagctcatgacctcactcctacccccaagaagacagaatcttgtgaa

SEQ ID NO: 115835 - DNA, 80 bp, synthetic construct
  misc_feature 1..80: note = Artificially Synthesized Probe
  source 1..80: mol_type = other DNA
tcaatatcaagttcatcctaagaatccccttgacatcaccgtcccttcgaactacattccatttgctgctccatttagag

SEQ ID NO: 115836 - DNA, 80 bp, synthetic construct; identical to SEQ ID NO: 37999
  misc_feature 1..80: note = Artificially Synthesized Probe
  source 1..80: mol_type = other DNA

SEQ ID NO: 115837 - DNA, 80 bp, synthetic construct
  misc_feature 1..80: note = Artificially Synthesized Probe
  source 1..80: mol_type = other DNA
gggtgggaggccaagggggagcaggcgcgttgcagggcgagcaggcaagagactggggggtggtgccatgtacttttaac

SEQ ID NO: 115838 - DNA, 80 bp, synthetic construct
  misc_feature 1..80: note = Artificially Synthesized Probe
  source 1..80: mol_type = other DNA
tgagtgggatgatgagcagttttattttgctgacaatttcctttaaaacgctgtgaagaaggtgcttgcgggggttagaa

SEQ ID NO: 115839 - DNA, 80 bp, synthetic construct
  misc_feature 1..80: note = Artificially Synthesized Probe
  source 1..80: mol_type = other DNA
ccacatgagattcgggcagggacaaatatctaaactatatcagctggtttccctcattaactcataaccttttgtttttg

SEQ ID NO: 115840 - DNA, 80 bp, synthetic construct
  misc_feature 1..80: note = Artificially Synthesized Probe
  source 1..80: mol_type = other DNA
gtcttgccatgtcacccaggctggtctcaaactcttgggctcaagggatctgcctgactcagctcccaaagtgttaggat

SEQ ID NO: 115841 - DNA, 80 bp, synthetic construct; identical to SEQ ID NO: 38000
  misc_feature 1..80: note = Artificially Synthesized Probe
  source 1..80: mol_type = other DNA

SEQ ID NO: 115842 - DNA, 80 bp, synthetic construct
  misc_feature 1..80: note = Artificially Synthesized Probe
  source 1..80: mol_type = other DNA
ggcgctgtcatgggatggcgctggctttgcttctccgagtccacccaatgagagacccttgcactgtggccctccctctg

SEQ ID NO: 115843 - DNA, 80 bp, synthetic construct
  misc_feature 1..80: note = Artificially Synthesized Probe
  source 1..80: mol_type = other DNA
cccagaacctctgctcaggctgagggttaccaggagcacctctcactctaggccatcatgtggggcagggaggacgggag

SEQ ID NO: 115844 - DNA, 80 bp, synthetic construct
  misc_feature 1..80: note = Artificially Synthesized Probe
  source 1..80: mol_type = other DNA
attagaacacagtcatggtcatgcctattagcttccatactttctatggttgcttttgcaattccatgacagagttgagt

SEQ ID NO: 115845 - DNA, 80 bp, synthetic construct
  misc_feature 1..80: note = Artificially Synthesized Probe
  source 1..80: mol_type = other DNA
aggtctctactaaaaatacaaaaattagccaggcatggtggtgcgtgcctgtagtcccagctactcgggaggctgaggca

SEQ ID NO: 115846 - DNA, 80 bp, synthetic construct; identical to SEQ ID NO: 38001
  misc_feature 1..80: note = Artificially Synthesized Probe
  source 1..80: mol_type = other DNA

SEQ ID NO: 115847 - DNA, 80 bp, synthetic construct
  misc_feature 1..80: note = Artificially Synthesized Probe
  source 1..80: mol_type = other DNA
cccagggaggagacgctgcctgtggtggaacaagaataaaacatgagtcgttcatgttaacacatcacggtgctttgagg

SEQ ID NO: 115848 - DNA, 80 bp, synthetic construct
  misc_feature 1..80: note = Artificially Synthesized Probe
  source 1..80: mol_type = other DNA
ctgccagtcttgagtattctctatcctcctcaattactcagatcctaaggaaaggtagaaagctgacctgacagaacaaa

SEQ ID NO: 115849 - DNA, 80 bp, synthetic construct
  misc_feature 1..80: note = Artificially Synthesized Probe
  source 1..80: mol_type = other DNA
gtggggacctacagggacccaggggagggctccataagagcttccagcagggcctgagggggcaggtggggtcctcgatg

SEQ ID NO: 115850 - DNA, 80 bp, synthetic construct
  misc_feature 1..80: note = Artificially Synthesized Probe
  source 1..80: mol_type = other DNA
gggagaggatgcgtgtgcttgacccaactgccaaggaactggcgtttctctttcacggaagctgtgacggctcttcgttc

SEQ ID NO: 115851 - DNA, 80 bp, synthetic construct; identical to SEQ ID NO: 38002
  misc_feature 1..80: note = Artificially Synthesized Probe
  source 1..80: mol_type = other DNA

SEQ ID NO: 115852 - DNA, 80 bp, synthetic construct
  misc_feature 1..80: note = Artificially Synthesized Probe
  source 1..80: mol_type = other DNA
ctctgccctgagtccttcccaaactgcctcctctctcccgtttccgagctgcctggtgtgtggccgatgtggtacatctg

SEQ ID NO: 115853 - DNA, 80 bp, synthetic construct
  misc_feature 1..80: note = Artificially Synthesized Probe
  source 1..80: mol_type = other DNA
gctgacaaagtttactactgtcttcttcagcactgtttgtcatttcatgagacagcaagtgaaggcagttaaagcccagg

SEQ ID NO: 115854 - DNA, 80 bp, synthetic construct
  misc_feature 1..80: note = Artificially Synthesized Probe
  source 1..80: mol_type = other DNA
ggtcaacacaggaccaacacgggaccaacacaggaccaacataggaccaacacagggtcaacacaggaccgacatgggac

SEQ ID NO: 115855 - DNA, 80 bp, synthetic construct
  misc_feature 1..80: note = Artificially Synthesized Probe
  source 1..80: mol_type = other DNA
aggaccaacatgggaccaacacagggtcaacacaggaccaacataggaccaacacagggtcaacacaggaccaacatagg

SEQ ID NO: 115856 - DNA, 80 bp, synthetic construct; identical to SEQ ID NO: 38003
  misc_feature 1..80: note = Artificially Synthesized Probe
  source 1..80: mol_type = other DNA

SEQ ID NO: 115857 - DNA, 80 bp, synthetic construct
  misc_feature 1..80: note = Artificially Synthesized Probe
  source 1..80: mol_type = other DNA
aaagtctgtctactgttgcacgagaggttacgtttttcactactgaggaaaatgggaaatgccacacgtctggtatacag

SEQ ID NO: 115858 - DNA, 80 bp, synthetic construct
  misc_feature 1..80: note = Artificially Synthesized Probe
  source 1..80: mol_type = other DNA
tctaacaacgtcagttgaaatacacacatgacgagatgatgtgtaaatgtctaaatcttcctctagcttcatgctgcggc

SEQ ID NO: 115859 - DNA, 80 bp, synthetic construct; identical to SEQ ID NO: 37981
  misc_feature 1..80: note = Artificially Synthesized Probe
  source 1..80: mol_type = other DNA

SEQ ID NO: 115860 - DNA, 80 bp, synthetic construct
  misc_feature 1..80: note = Artificially Synthesized Probe
  source 1..80: mol_type = other DNA
tgggctctccctggcattcctctcttgcacctctgcacactcagcttctccctccagacaaccccttctcttctctctgc

SEQ ID NO: 115861 - DNA, 80 bp, synthetic construct; identical to SEQ ID NO: 38004
  misc_feature 1..80: note = Artificially Synthesized Probe
  source 1..80: mol_type = other DNA

SEQ ID NO: 115862 - DNA, 80 bp, synthetic construct
  misc_feature 1..80: note = Artificially Synthesized Probe
  source 1..80: mol_type = other DNA
aacttcacactgttgaggaaaatgagggtgcacatgttacatacaaaaaataaggtggggagaagagtttattcactaaa

SEQ ID NO: 115863 - DNA, 80 bp, synthetic construct
  misc_feature 1..80: note = Artificially Synthesized Probe
  source 1..80: mol_type = other DNA
ccagcctggctggagtgaattctaattttaggtggcctcagcactcattttgaagacaggtttaactttctcataccaga

SEQ ID NO: 115864 - DNA, 80 bp, synthetic construct
  misc_feature 1..80: note = Artificially Synthesized Probe
  source 1..80: mol_type = other DNA
gtacagatgtaccacagtgatgccctcagtcacagcgggaccccgtggagcttgtgcctgcctgctctaaacccaccaat

SEQ ID NO: 115865 - DNA, 80 bp, synthetic construct; identical to SEQ ID NO: 38005
  misc_feature 1..80: note = Artificially Synthesized Probe
  source 1..80: mol_type = other DNA

SEQ ID NO: 115866 - DNA, 80 bp, synthetic construct
  misc_feature 1..80: note = Artificially Synthesized Probe
  source 1..80: mol_type = other DNA
tgggtaatgggttcaggccatcccccaggtgaaagaaggattccatataaggcacaccaggtcagccccttaatttcctg

SEQ ID NO: 115867 - DNA, 80 bp, synthetic construct
  misc_feature 1..80: note = Artificially Synthesized Probe
  source 1..80: mol_type = other DNA
ctcgcagggagatgaaataagtaccaaaatgagttcatgtccagtcaactgtatggattagcaaaatctgggggcttgga

SEQ ID NO: 115868 - DNA, 80 bp, synthetic construct
  misc_feature 1..80: note = Artificially Synthesized Probe
  source 1..80: mol_type = other DNA
cgtcagtgcacacagtgtgactcagcaacatgcatctctattttgttctctttctggcatgattttacttacttgaaact

SEQ ID NO: 115869 - DNA, 80 bp, synthetic construct; identical to SEQ ID NO: 38006
  misc_feature 1..80: note = Artificially Synthesized Probe
  source 1..80: mol_type = other DNA

SEQ ID NO: 115870 - DNA, 80 bp, synthetic construct
  misc_feature 1..80: note = Artificially Synthesized Probe
  source 1..80: mol_type = other DNA
agctgtgggcatgcggactgtgcctggcatacacaggtactcaatgagcatctggagcacgagcttcctcccccgcctct

SEQ ID NO: 115871 - DNA, 80 bp, synthetic construct
  misc_feature 1..80: note = Artificially Synthesized Probe
  source 1..80: mol_type = other DNA
ccactaacgcaccagctttgaaaggccactaagaggccagccatggtgcctcatgtccatcatcccaacactttgggagg

SEQ ID NO: 115872 - DNA, 80 bp, synthetic construct
  misc_feature 1..80: note = Artificially Synthesized Probe
  source 1..80: mol_type = other DNA
aaaaacaggccagcaagagaaatatggacaagttacttggtcacgttttccagtctagcaaccctggactgatctccacg

SEQ ID NO: 115873 - DNA, 80 bp, synthetic construct
  misc_feature 1..80: note = Artificially Synthesized Probe
  source 1..80: mol_type = other DNA
tgactgcacatgaggggtggggctgtctcctggcaccgagtgcccgtctatgctggctgggttttgagatacgaacagtc

SEQ ID NO: 115874 - DNA, 80 bp, synthetic construct
  misc_feature 1..80: note = Artificially Synthesized Probe
  source 1..80: mol_type = other DNA
cccggcccgacatacaagttcactttctgcctcctcttccccacacagaagctcccagaggacgggcactgggcgtgttt

SEQ ID NO: 115875 - DNA, 80 bp, synthetic construct; identical to SEQ ID NO: 38007
  misc_feature 1..80: note = Artificially Synthesized Probe
  source 1..80: mol_type = other DNA

SEQ ID NO: 115876 - DNA, 80 bp, synthetic construct
  misc_feature 1..80: note = Artificially Synthesized Probe
  source 1..80: mol_type = other DNA
accagagatcagcagaaatatacctccctccagcgagagtggaagaaaagaaggcagatttggattcctgaggatatcag

SEQ ID NO: 115877 - DNA, 80 bp, synthetic construct
  misc_feature 1..80: note = Artificially Synthesized Probe
  source 1..80: mol_type = other DNA
gctcacacctgtaatcccagcacttcgggaggctgaggtgggcggatcacctgaggtcaggagttcgaaaccagcctggt

SEQ ID NO: 115878 - DNA, 80 bp, synthetic construct
  misc_feature 1..80: note = Artificially Synthesized Probe
  source 1..80: mol_type = other DNA
gtgacagagtgagactctgtctcaaaaacaaacaaacaaacaaacaaacaaacaaacaaactcagtggggttcactggct

SEQ ID NO: 115879 - DNA, 80 bp, synthetic construct; identical to SEQ ID NO: 38008
  misc_feature 1..80: note = Artificially Synthesized Probe
  source 1..80: mol_type = other DNA

SEQ ID NO: 115880 - DNA, 80 bp, synthetic construct
  misc_feature 1..80: note = Artificially Synthesized Probe
  source 1..80: mol_type = other DNA
tctcctgcctcagcctcctgaatagctgggattacaggtgtgcaccaacacatctggctaattgtgttttgtttttagta

SEQ ID NO: 115881 - DNA, 80 bp, synthetic construct
  misc_feature 1..80: note = Artificially Synthesized Probe
  source 1..80: mol_type = other DNA
cccaggatgggaaacccacccagtgagggagcccaagcattaggcttccccagcgcagtgactgtgactggccagtgccc

SEQ ID NO: 115882 - DNA, 80 bp, synthetic construct
  misc_feature 1..80: note = Artificially Synthesized Probe
  source 1..80: mol_type = other DNA
taaaggaggaatttgcaaatgtttctgcaaagggctagctagtaaatgtaggaggctttgctgtccacataaggtctccg

SEQ ID NO: 115883 - DNA, 80 bp, synthetic construct
  misc_feature 1..80: note = Artificially Synthesized Probe
  source 1..80: mol_type = other DNA
gcctgggtaacatagtgagaccccatctccacacaaaataaaaaaattagctgtgtgtggtggtgcgtgcctgtggtccc

SEQ ID NO: 115884 - DNA, 80 bp, synthetic construct; identical to SEQ ID NO: 38009
  misc_feature 1..80: note = Artificially Synthesized Probe
  source 1..80: mol_type = other DNA

SEQ ID NO: 115885 - DNA, 80 bp, synthetic construct
  misc_feature 1..80: note = Artificially Synthesized Probe
  source 1..80: mol_type = other DNA
acacagcagggaggtgggcacctgcacacacgctggaggctcacccacccctacacacacagccaatgggaggcagacag

SEQ ID NO: 115886 - DNA, 80 bp, synthetic construct
  misc_feature 1..80: note = Artificially Synthesized Probe
  source 1..80: mol_type = other DNA
ttccagaaatggaatgcagtaaaactgtattcagaacagatgcaatacggcaaaagcacggatgagctaaaatgtacaag

SEQ ID NO: 115887 - DNA, 80 bp, synthetic construct
  misc_feature 1..80: note = Artificially Synthesized Probe
  source 1..80: mol_type = other DNA
cagtgcctttatacacagaacatgccacatatatgtacctttcgcaaacggctacgactcctggcagaaagcaggcagcc

SEQ ID NO: 115888 - DNA, 80 bp, synthetic construct; identical to SEQ ID NO: 38010
  misc_feature 1..80: note = Artificially Synthesized Probe
  source 1..80: mol_type = other DNA

SEQ ID NO: 115889 - DNA, 80 bp, synthetic construct
  misc_feature 1..80: note = Artificially Synthesized Probe
  source 1..80: mol_type = other DNA
gattcttccaacctagaaatctaaacataattacacaacctcttgttatcagacaggctatgctgagtgacatgtgaccc

SEQ ID NO: 115890 - DNA, 80 bp, synthetic construct
  misc_feature 1..80: note = Artificially Synthesized Probe
  source 1..80: mol_type = other DNA
caaatctcagtgctgcaccccacacaagccggcaggatgcaaattcagtgtcagcccttccaggggagcacctggcctca

SEQ ID NO: 115891 - DNA, 80 bp, synthetic construct; identical to SEQ ID NO: 38011
  misc_feature 1..80: note = Artificially Synthesized Probe
  source 1..80: mol_type = other DNA

SEQ ID NO: 115892 - DNA, 80 bp, synthetic construct
  misc_feature 1..80: note = Artificially Synthesized Probe
  source 1..80: mol_type = other DNA
agaagaggggtggggtgacagaggatggggtgggggtggaaggacaggggtgggggtgagaggatggggttggggagaga

SEQ ID NO: 115893 - DNA, 80 bp, synthetic construct
  misc_feature 1..80: note = Artificially Synthesized Probe
  source 1..80: mol_type = other DNA
caggtgaccctgagaaggctccaaagaacagctaagagcaagaaggaaagctgtcttactaggctgtgtgagtgctgcct

SEQ ID NO: 115894 - DNA, 80 bp, synthetic construct
  misc_feature 1..80: note = Artificially Synthesized Probe
  source 1..80: mol_type = other DNA
gtggggtgagagcatggggtgggggcaagaggatggggtggggaagagaggatggggtcggggagagaggatggcatagg

SEQ ID NO: 115895 - DNA, 80 bp, synthetic construct
  misc_feature 1..80: note = Artificially Synthesized Probe
  source 1..80: mol_type = other DNA
atggggtgggggtgagaggatgggtgggggagagaggatggcattgggggtggcaggacagaagtgggggtgagaggatg

SEQ ID NO: 115896 - DNA, 80 bp, synthetic construct
  misc_feature 1..80: note = Artificially Synthesized Probe
  source 1..80: mol_type = other DNA
ggtgagaggatggggtgggggtgacaggataggtgggggcaccaggatggggtgacagtgataggatggggtggggtgac

SEQ ID NO: 115897 - DNA, 80 bp, synthetic construct; identical to SEQ ID NO: 38012
  misc_feature 1..80: note = Artificially Synthesized Probe
  source 1..80: mol_type = other DNA

SEQ ID NO: 115898 - DNA, 80 bp, synthetic construct
  misc_feature 1..80: note = Artificially Synthesized Probe
  source 1..80: mol_type = other DNA
tggcagttcccctccaccccctctcctgccgctatgtaagatgtgccttgctccccctttgccttctgccatgattgtaa

SEQ ID NO: 115899 - DNA, 80 bp, synthetic construct
  misc_feature 1..80: note = Artificially Synthesized Probe
  source 1..80: mol_type = other DNA
aaatgtggaagcaactttggaactgggtaatgggcagaagttggaacaatttggagggctcagaaaaagacagaaaggtg

SEQ ID NO: 115900 - DNA, 80 bp, synthetic construct; identical to SEQ ID NO: 38013
  misc_feature 1..80: note = Artificially Synthesized Probe
  source 1..80: mol_type = other DNA

SEQ ID NO: 115901 - DNA, 80 bp, synthetic construct
  misc_feature 1..80: note = Artificially Synthesized Probe
  source 1..80: mol_type = other DNA
gaaaagaaaaacccattttctgaggggaaattcaagctggctgcagaaatgtgcataagtaaccaggagccaggacggtg

SEQ ID NO: 115902 - DNA, 80 bp, synthetic construct
  misc_feature 1..80: note = Artificially Synthesized Probe
  source 1..80: mol_type = other DNA
aaagccaacaaatccagagcccgtgttcagagccaaccccaagcctgggcggcctgttccactcaccctgcctgatcctc

SEQ ID NO: 115903 - DNA, 80 bp, synthetic construct
  misc_feature 1..80: note = Artificially Synthesized Probe
  source 1..80: mol_type = other DNA
gccatgactaaaagggtccaaggtacaatttgggctgctgcttcagagggagcaaaccccaagcattggcggcttccaca

SEQ ID NO: 115904 - DNA, 80 bp, synthetic construct
  misc_feature 1..80: note = Artificially Synthesized Probe
  source 1..80: mol_type = other DNA
aatgtgcggtggttgttcccacacagtgtcccaactggggtgctgcctagagaagccatgagaagagggccactgtcctc

SEQ ID NO: 115905 - DNA, 80 bp, synthetic construct; identical to SEQ ID NO: 38014
  misc_feature 1..80: note = Artificially Synthesized Probe
  source 1..80: mol_type = other DNA

SEQ ID NO: 115906 - DNA, 80 bp, synthetic construct
  misc_feature 1..80: note = Artificially Synthesized Probe
  source 1..80: mol_type = other DNA
gggcttggacttctgagtttatgcgggaatgagttaaaactttgggggactgctgggaaggtatgattgtgttttgaaat

SEQ ID NO: 115907 - DNA, 80 bp, synthetic construct
  misc_feature 1..80: note = Artificially Synthesized Probe
  source 1..80: mol_type = other DNA
ctcgtgatagtaagttctcatgaaatctgatggtttaagagtgtttggcagttccccctgccctctctcctgctgttaat

SEQ ID NO: 115908 - DNA, 80 bp, synthetic construct
  misc_feature 1..80: note = Artificially Synthesized Probe
  source 1..80: mol_type = other DNA
ggtgacaggacagtgtaggggtgaggggtgacaggatgggatgaggggtgacgggatgggatggggtgacaggacagggt

SEQ ID NO: 115909 - DNA, 80 bp, synthetic construct
  misc_feature 1..80: note = Artificially Synthesized Probe
  source 1..80: mol_type = other DNA
gggtgacaggatggaaggggagtgactggctggcaagcagggccaagggtgatctgtccgctccaggtttgggtgtacac

SEQ ID NO: 115910 - DNA, 80 bp, synthetic construct; identical to SEQ ID NO: 38015
  misc_feature 1..80: note = Artificially Synthesized Probe
  source 1..80: mol_type = other DNA

SEQ ID NO: 115911 - DNA, 80 bp, synthetic construct
  misc_feature 1..80: note = Artificially Synthesized Probe
  source 1..80: mol_type = other DNA
acacacagagaaacagatattgcatctagcagccatcccctttgagagcaaggtgttaattaacaagtctgacatttaaa

SEQ ID NO: 115912 - DNA, 80 bp, synthetic construct; identical to SEQ ID NO: 37982
  misc_feature 1..80: note = Artificially Synthesized Probe
  source 1..80: mol_type = other DNA

SEQ ID NO: 115913 - DNA, 80 bp, synthetic construct
  misc_feature 1..80: note = Artificially Synthesized Probe
  source 1..80: mol_type = other DNA
gttttgttgggggaggaggaggctggagggactctcaggagagctcacagtgcttgtcttacgtgtgtcctgcccccaca

SEQ ID NO: 115914 - DNA, 80 bp, synthetic construct
  misc_feature 1..80: note = Artificially Synthesized Probe
  source 1..80: mol_type = other DNA
ctactggtttgaggaatggcctcctgaccaaacaggtgtggaccaatggctggggcaagtggaaagagagccggcacaca

SEQ ID NO: 115915 - DNA, 80 bp, synthetic construct; identical to SEQ ID NO: 38016
  misc_feature 1..80: note = Artificially Synthesized Probe
  source 1..80: mol_type = other DNA

SEQ ID NO: 115916 - DNA, 80 bp, synthetic construct
  misc_feature 1..80: note = Artificially Synthesized Probe
  source 1..80: mol_type = other DNA
gccatctgcgatgataacacaagcaggagggagcggccttgtctgcccatggctcactggcccggtgcaaacacagggca

SEQ ID NO: 115917 - DNA, 80 bp, synthetic construct
  misc_feature 1..80: note = Artificially Synthesized Probe
  source 1..80: mol_type = other DNA
ggagtgacttggagctctagggttctcccctactcgacaaggggactatgtctccaccaaggagggaagacagtcctggg

SEQ ID NO: 115918 - DNA, 80 bp, synthetic construct; identical to SEQ ID NO: 38017
  misc_feature 1..80: note = Artificially Synthesized Probe
  source 1..80: mol_type = other DNA

SEQ ID NO: 115919 - DNA, 80 bp, synthetic construct
  misc_feature 1..80: note = Artificially Synthesized Probe
  source 1..80: mol_type = other DNA
tgcagcaaggactgggctgcagggaaagtctccaaggggacctgagcagcagatggggtgagttctactgagggtggagc

SEQ ID NO: 115920 - DNA, 80 bp, synthetic construct
  misc_feature 1..80: note = Artificially Synthesized Probe
  source 1..80: mol_type = other DNA
gcccagagacttgagacactgggtgtggcctcagaagagggtagattttaataataaaacaaagtttaaaagggacagtg

SEQ ID NO: 115921 - DNA, 80 bp, synthetic construct
  misc_feature 1..80: note = Artificially Synthesized Probe
  source 1..80: mol_type = other DNA
gaccagcccgaccaacacagagaaaccctgtctctactaaaaatacaaaattagccaggcgtggtggcgcatgcctgtaa

SEQ ID NO: 115922 - DNA, 80 bp, synthetic construct
  misc_feature 1..80: note = Artificially Synthesized Probe
  source 1..80: mol_type = other DNA
gcccgcatcctgcgaactgggaggccgcgaaggcctgagagtcaaggcagtcgggggagaatgcaggtcactcacgcgga

SEQ ID NO: 115923 - DNA, 80 bp, synthetic construct
  misc_feature 1..80: note = Artificially Synthesized Probe
  source 1..80: mol_type = other DNA
gcagcctgtggtagggcagaggctgggtggatggaacggatcttagaggattactgggaagaggaagatgtttaattgtt

SEQ ID NO: 115924 - DNA, 80 bp, synthetic construct; identical to SEQ ID NO: 38018
  misc_feature 1..80: note = Artificially Synthesized Probe
  source 1..80: mol_type = other DNA

SEQ ID NO: 115925 - DNA, 80 bp, synthetic construct
  misc_feature 1..80: note = Artificially Synthesized Probe
  source 1..80: mol_type = other DNA
aaactccaccctgcgtttgtgatgctcacctccacagtgtaactgacaaacagtggggccacgaggtcactgggcagagc

SEQ ID NO: 115926 - DNA, 80 bp, synthetic construct
  misc_feature 1..80: note = Artificially Synthesized Probe
  source 1..80: mol_type = other DNA
ctctgatgtctgtgataacagacatgttttatgaactcaagcaacttctggccccaaggggacttggtgtgaatgagggt

SEQ ID NO: 115927 - DNA, 80 bp, synthetic construct; identical to SEQ ID NO: 38019
  misc_feature 1..80: note = Artificially Synthesized Probe
  source 1..80: mol_type = other DNA

SEQ ID NO: 115928 - DNA, 80 bp, synthetic construct
  misc_feature 1..80: note = Artificially Synthesized Probe
  source 1..80: mol_type = other DNA
aggcctctttccccacaaggcaggtggggtggccaacggtgggagctgcactcttcacggaagagggaaaggaagtgcag

SEQ ID NO: 115929 - DNA, 80 bp, synthetic construct
  misc_feature 1..80: note = Artificially Synthesized Probe
  source 1..80: mol_type = other DNA
aggcttggagtggaggcgcgtgctgactgggaggagggtcaggaagaaacaggtagagaatggacaagccgcaactgaga

SEQ ID NO: 115930 - DNA, 80 bp, synthetic construct
  misc_feature 1..80: note = Artificially Synthesized Probe
  source 1..80: mol_type = other DNA
atgcagggctcagcggggattggaggcctgggaggcagaaggccctgggtgactgtcagggaaggacagtgtcaagaagc

SEQ ID NO: 115931 - DNA, 80 bp, synthetic construct
  misc_feature 1..80: note = Artificially Synthesized Probe
  source 1..80: mol_type = other DNA
accactttgtctcaatgtgacaccaaaagcaaaaacaataaaacagaccaaatgaacattgtcaaaatcagaaccttttg

SEQ ID NO: 115932 - DNA, 80 bp, synthetic construct; identical to SEQ ID NO: 38020
  misc_feature 1..80: note = Artificially Synthesized Probe
  source 1..80: mol_type = other DNA

SEQ ID NO: 115933 - DNA, 80 bp, synthetic construct
  misc_feature 1..80: note = Artificially Synthesized Probe
  source 1..80: mol_type = other DNA
tttactcaatggaaatttttcaagataactattatcaacagagatgaagagactgaggacccaagaggccaacaattcac

SEQ ID NO: 115934 - DNA, 80 bp, synthetic construct
  misc_feature 1..80: note = Artificially Synthesized Probe
  source 1..80: mol_type = other DNA
ctccccacagctccatggtctcgggatagcgcacctggctcatcacggaaccaagcacaccccccacagctccatggtct

SEQ ID NO: 115935 - DNA, 80 bp, synthetic construct
  misc_feature 1..80: note = Artificially Synthesized Probe
  source 1..80: mol_type = other DNA
ccacagctccacggtctcgggatagcgcacctggctcatcacagaaccaagcacaactcccacagctccatggtctcggg

SEQ ID NO: 115936 - DNA, 80 bp, synthetic construct; identical to SEQ ID NO: 38021
  misc_feature 1..80: note = Artificially Synthesized Probe
  source 1..80: mol_type = other DNA

SEQ ID NO: 115937 - DNA, 80 bp, synthetic construct
  misc_feature 1..80: note = Artificially Synthesized Probe
  source 1..80: mol_type = other DNA
ccatggtctcgggatagcgcacctggctcatcacagaaccaagcacaactcccacagctccatggtctcgggatagcgca

SEQ ID NO: 115938 - DNA, 80 bp, synthetic construct
  misc_feature 1..80: note = Artificially Synthesized Probe
  source 1..80: mol_type = other DNA
ggtctcgggatagcgcacctggctcatcacggaaccaagcacaccccccacagctccacggtctcgggatagcgcacctg

SEQ ID NO: 115939 - DNA, 80 bp, synthetic construct
  misc_feature 1..80: note = Artificially Synthesized Probe
  source 1..80: mol_type = other DNA
tcgggatagcgcacctggctcatcacggaaccaagcacaccccccacagctccacggtctcgggatagcgcacctggctc

SEQ ID NO: 115940 - DNA, 80 bp, synthetic construct
  misc_feature 1..80: note = Artificially Synthesized Probe
  source 1..80: mol_type = other DNA
gatagtgcacctggctcatcacagaaccaagcacacccctcatagctccatggtctcgggatagtgcacctggctcatca

SEQ ID NO: 115941 - DNA, 80 bp, synthetic construct; identical to SEQ ID NO: 38022
  misc_feature 1..80: note = Artificially Synthesized Probe
  source 1..80: mol_type = other DNA

SEQ ID NO: 115942 - DNA, 80 bp, synthetic construct
  misc_feature 1..80: note = Artificially Synthesized Probe
  source 1..80: mol_type = other DNA
ccttcaggttctgctgagaatcaagtcacaccaggcgtcatcctgaagagcagtaactcggagaaaggggccgccaggga

SEQ ID NO: 115943 - DNA, 80 bp, synthetic construct
  misc_feature 1..80: note = Artificially Synthesized Probe
  source 1..80: mol_type = other DNA
tcaccatgaatgaaggcctccagcccagcctcctcctttagtatggagacatactaaaatcagaaggatgatctaggctg

SEQ ID NO: 115944 - DNA, 80 bp, synthetic construct
  misc_feature 1..80: note = Artificially Synthesized Probe
  source 1..80: mol_type = other DNA
cgggcggatcacaaggtcaggagatcgagaccatcctgtctaacacagtgaaaccccgtctctactaaaaatataaaaaa

SEQ ID NO: 115945 - DNA, 80 bp, synthetic construct; identical to SEQ ID NO: 38023
  misc_feature 1..80: note = Artificially Synthesized Probe
  source 1..80: mol_type = other DNA

SEQ ID NO: 115946 - DNA, 80 bp, synthetic construct
  misc_feature 1..80: note = Artificially Synthesized Probe
  source 1..80: mol_type = other DNA
aggagtttaagaccaggctggccaacatggtgaaaccccatctctatcaaaaatacaaaagttacctgggcgtgatggca

SEQ ID NO: 115947 - DNA, 80 bp, synthetic construct
  misc_feature 1..80: note = Artificially Synthesized Probe
  source 1..80: mol_type = other DNA
aaaaacaaagaaagggacaaacaccagaatgacaagatgtaggaagaacctcatgcctcctcccattctgtggttcagga

SEQ ID NO: 115948 - DNA, 80 bp, synthetic construct
  misc_feature 1..80: note = Artificially Synthesized Probe
  source 1..80: mol_type = other DNA
ctagaagacagagtatagactggcttggatcaggattaaggcaccagctccaaagcctggggcaggtgcagatgaagagg

SEQ ID NO: 115949 - DNA, 80 bp, synthetic construct
  misc_feature 1..80: note = Artificially Synthesized Probe
  source 1..80: mol_type = other DNA
ctatacacaccaaactgcaaaggcacaagcagtatgtccaacaccacaggcatcaggagctcagagtctggcctaaatcc

SEQ ID NO: 115950 - DNA, 80 bp, synthetic construct; identical to SEQ ID NO: 38024
  misc_feature 1..80: note = Artificially Synthesized Probe
  source 1..80: mol_type = other DNA

SEQ ID NO: 115951 - DNA, 80 bp, synthetic construct
  misc_feature 1..80: note = Artificially Synthesized Probe
  source 1..80: mol_type = other DNA
aagtctacaaaactaacaaatggcatcacagcacagatgcacagacctcagtgaggcctgagcgggagaacacaggcagc

SEQ ID NO: 115952 - DNA, 80 bp, synthetic construct
  misc_feature 1..80: note = Artificially Synthesized Probe
  source 1..80: mol_type = other DNA
cactaacagcccagcactaaaataaataataaaggaattccctgtaggtaagaaaaataattcctgatagaagcacagag

SEQ ID NO: 115953 - DNA, 80 bp, synthetic construct; identical to SEQ ID NO: 37983
  misc_feature 1..80: note = Artificially Synthesized Probe
  source 1..80: mol_type = other DNA

SEQ ID NO: 115954 - DNA, 80 bp, synthetic construct; identical to SEQ ID NO: 38025
  misc_feature 1..80: note = Artificially Synthesized Probe
  source 1..80: mol_type = other DNA

SEQ ID NO: 115955 - DNA, 80 bp, synthetic construct
  misc_feature 1..80: note = Artificially Synthesized Probe
  source 1..80: mol_type = other DNA
gctgcgtctgacgtcatcatggcagagggcgtaaggaatggaggaaatcaaccctggtgcagagcaatcgagtccacaag

SEQ ID NO: 115956 - DNA, 80 bp, synthetic construct
  misc_feature 1..80: note = Artificially Synthesized Probe
  source 1..80: mol_type = other DNA
cgctaggcaggaacggggttctctgactaggaatgccagccctaatttactgtcttgaaacacacagattgtactggcta

SEQ ID NO: 115957 - DNA, 80 bp, synthetic construct
  misc_feature 1..80: note = Artificially Synthesized Probe
  source 1..80: mol_type = other DNA
cgttaggtcttgttttgtgttcctgtcaaacattctgaaattattgttaagacccagtcacaacaccgtcagatccattc

SEQ ID NO: 115958 - DNA, 80 bp, synthetic construct
  misc_feature 1..80: note = Artificially Synthesized Probe
  source 1..80: mol_type = other DNA
tggattgcagtggtgcgatctccgctcaccgcaacctccactccccaggttcaaatgattctctagcctcaggctcccaa

SEQ ID NO: 115959 - DNA, 80 bp, synthetic construct; identical to SEQ ID NO: 38026
  misc_feature 1..80: note = Artificially Synthesized Probe
  source 1..80: mol_type = other DNA

SEQ ID NO: 115960 - DNA, 80 bp, synthetic construct
  misc_feature 1..80: note = Artificially Synthesized Probe
  source 1..80: mol_type = other DNA
gcaaatagttcctttactgctgctagatacagatgtgttatagctgttcagatggaattctgcggctgaaatcacctgtt

SEQ ID NO: 115961 - DNA, 80 bp, synthetic construct
  misc_feature 1..80: note = Artificially Synthesized Probe
  source 1..80: mol_type = other DNA
tctattaacaggaattgagttggtgtgaccagtatgagcattggcagatgctctttgtggagtgactgcgacccctagac

SEQ ID NO: 115962 - DNA, 80 bp, synthetic construct; identical to SEQ ID NO: 38027
  misc_feature 1..80: note = Artificially Synthesized Probe
  source 1..80: mol_type = other DNA

SEQ ID NO: 115963 - DNA, 80 bp, synthetic construct
  misc_feature 1..80: note = Artificially Synthesized Probe
  source 1..80: mol_type = other DNA
atagttatggtcaatagttatagaaaaattaaaattccacaccactcgtgacatcatctgctacatcgtcatctattgct

SEQ ID NO: 115964 - DNA, 80 bp, synthetic construct
  misc_feature 1..80: note = Artificially Synthesized Probe
  source 1..80: mol_type = other DNA
gggggtaaactactttccttgacctaaatgttggttacacattatgattctgaaaaattgactgaggtatacactcataa

SEQ ID NO: 115965 - DNA, 80 bp, synthetic construct
  misc_feature 1..80: note = Artificially Synthesized Probe
  source 1..80: mol_type = other DNA
ctcagtgagtctgcagggcagacaacgcacagatggcccgcctgccactccagcatgtgaggggtccaggacctgccgtt

SEQ ID NO: 115966 - DNA, 80 bp, synthetic construct
  misc_feature 1..80: note = Artificially Synthesized Probe
  source 1..80: mol_type = other DNA
ctgcaggcaaaaatgaacacagaagggaagttatgaccctatagtgtaatattacagaggaaaggttgaaaattaatcct

SEQ ID NO: 115967 - DNA, 80 bp, synthetic construct; identical to SEQ ID NO: 38028
  misc_feature 1..80: note = Artificially Synthesized Probe
  source 1..80: mol_type = other DNA

SEQ ID NO: 115968 - DNA, 80 bp, synthetic construct
  misc_feature 1..80: note = Artificially Synthesized Probe
  source 1..80: mol_type = other DNA
cagggtgaaacactgtctctaccaaaaatacaaaaatacaaaaaaaaaacacaaaaaaacaaaaaaaaaacactttggga

SEQ ID NO: 115969 - DNA, 80 bp, synthetic construct
  misc_feature 1..80: note = Artificially Synthesized Probe
  source 1..80: mol_type = other DNA
ccgggaggtggagcttgcagtgagccaagactgcgccactgcactccagcctaggcaacagagcgagactccgtctcaaa

SEQ ID NO: 115970 - DNA, 80 bp, synthetic construct
  misc_feature 1..80: note = Artificially Synthesized Probe
  source 1..80: mol_type = other DNA
ggcacactggtcaagagaaaagagaattcataatacccactgttaaacaagaggcatcattatggaacttacagacatga

SEQ ID NO: 115971 - DNA, 80 bp, synthetic construct
  misc_feature 1..80: note = Artificially Synthesized Probe
  source 1..80: mol_type = other DNA
aacagttcgatgtctaataaagatatcaaatccctagtttaaaatctttgcacaaaaaacttactgggcctaaatagtgt

SEQ ID NO: 115972 - DNA, 80 bp, synthetic construct; identical to SEQ ID NO: 38029
  misc_feature 1..80: note = Artificially Synthesized Probe
  source 1..80: mol_type = other DNA

SEQ ID NO: 115973 - DNA, 80 bp, synthetic construct
  misc_feature 1..80: note = Artificially Synthesized Probe
  source 1..80: mol_type = other DNA
ataatcacagaaaaattaacaaaattcaataccattcatgatgattaaaaaagaaaccttagcaaaaacttgatgcacat

SEQ ID NO: 115974 - DNA, 80 bp, synthetic construct
  misc_feature 1..80: note = Artificially Synthesized Probe
  source 1..80: mol_type = other DNA
caggcctctggaaatcaattcaaggcagacaacaaatcagaaaacattgactcctgaaatcagaacacactgactcctga

SEQ ID NO: 115975 - DNA, 80 bp, synthetic construct
  misc_feature 1..80: note = Artificially Synthesized Probe
  source 1..80: mol_type = other DNA
tccttattcaaagataacatgttggcgtatgtaaatgttctagcagaatctacacataaaccaacagagttatcaagtaa

SEQ ID NO: 115976 - DNA, 80 bp, synthetic construct; identical to SEQ ID NO: 38030
  misc_feature 1..80: note = Artificially Synthesized Probe
  source 1..80: mol_type = other DNA

SEQ ID NO: 115977 - DNA, 80 bp, synthetic construct
  misc_feature 1..80: note = Artificially Synthesized Probe
  source 1..80: mol_type = other DNA
ttagagctccatggctgcccttggcacacactcagttaaagagcttctttacacacgcactttcccaagagcattttctt

SEQ ID NO: 115978 - DNA, 80 bp, synthetic construct
  misc_feature 1..80: note = Artificially Synthesized Probe
  source 1..80: mol_type = other DNA
cagctctgccctgttctccagggcttctgtggtgacagaagggcagtggagggctgtccaggaggctgtttttatgggcc

SEQ ID NO: 115979 - DNA, 80 bp, synthetic construct
  misc_feature 1..80: note = Artificially Synthesized Probe
  source 1..80: mol_type = other DNA
actcctcccttagacagaaagtcactcccccagagtggagcgcccccaccaccactgtcactggcccagctcagatgctg

SEQ ID NO: 115980 - DNA, 80 bp, synthetic construct
  misc_feature 1..80: note = Artificially Synthesized Probe
  source 1..80: mol_type = other DNA
agaacacaggtgcacgtcatgaggcatttgaggatgggtgctgggggctcctcccccagggagagcctgggctggactgc

SEQ ID NO: 115981 - DNA, 80 bp, synthetic construct
  misc_feature 1..80: note = Artificially Synthesized Probe
  source 1..80: mol_type = other DNA
ggcgtgtccatgactgtggggcatcctcgtccttcacctccttactgtggctactcctttccacgtgtgtgtgtaaaaac

SEQ ID NO: 115982 - DNA, 80 bp, synthetic construct; identical to SEQ ID NO: 38031
  misc_feature 1..80: note = Artificially Synthesized Probe
  source 1..80: mol_type = other DNA

SEQ ID NO: 115983 - DNA, 80 bp, synthetic construct
  misc_feature 1..80: note = Artificially Synthesized Probe
  source 1..80: mol_type = other DNA
cacttacaatgtgttttgttttaaagaaaaaacaacatgagactggaaaccatcagagggtactgcactaagcgaggata

SEQ ID NO: 115984 - DNA, 80 bp, synthetic construct
  misc_feature 1..80: note = Artificially Synthesized Probe
  source 1..80: mol_type = other DNA
agcatgagccagagctgttggtgatgtctcctcacattccatagagacttaaggctgtgggggatggagcctgtggccat

SEQ ID NO: 115985 - DNA, 80 bp, synthetic construct
  misc_feature 1..80: note = Artificially Synthesized Probe
  source 1..80: mol_type = other DNA
gccaggccacagggcctacatgcatgggggactttggcgcttactcctggaaagttgggatgcatttaagcagatccctc

SEQ ID NO: 115986 - DNA, 80 bp, synthetic construct; identical to SEQ ID NO: 38032
  misc_feature 1..80: note = Artificially Synthesized Probe
  source 1..80: mol_type = other DNA

SEQ ID NO: 115987 - DNA, 80 bp, synthetic construct; identical to SEQ ID NO: 37984
  misc_feature 1..80: note = Artificially Synthesized Probe
  source 1..80: mol_type = other DNA

SEQ ID NO: 115988 - DNA, 80 bp, synthetic construct
  misc_feature 1..80: note = Artificially Synthesized Probe
  source 1..80: mol_type = other DNA
catcagaatgccataggactaaaaattaacgatgaaaatgacagggagctaaaagctaaccacttagaaactaaagcata

SEQ ID NO: 115989 - DNA, 80 bp, synthetic construct
  misc_feature 1..80: note = Artificially Synthesized Probe
  source 1..80: mol_type = other DNA
ttaaatatacttactaggaaacaagaaagtaagtaaatgacctgaacattccactcaagctagagaaaggttaagggctc

SEQ ID NO: 115990 - DNA, 80 bp, synthetic construct; identical to SEQ ID NO: 38033
  misc_feature 1..80: note = Artificially Synthesized Probe
  source 1..80: mol_type = other DNA

SEQ ID NO: 115991 - DNA, 80 bp, synthetic construct
  misc_feature 1..80: note = Artificially Synthesized Probe
  source 1..80: mol_type = other DNA
aggctggagtgcagtggtgtgatctcagctcaccacagcctctgtctcctgggttcaagtgattttcctgcctcagcctc

SEQ ID NO: 115992 - DNA, 80 bp, synthetic construct
  misc_feature 1..80: note = Artificially Synthesized Probe
  source 1..80: mol_type = other DNA
gccactgcgcctggccgagaagacaccatttttatgaaaaggtaaatcacaataacacacatagaataggtaccaaactc

SEQ ID NO: 115993 - DNA, 80 bp, synthetic construct
  misc_feature 1..80: note = Artificially Synthesized Probe
  source 1..80: mol_type = other DNA
aagtagctgggactacaggcgcccaccaccacgcccaactaatttttttgtatttttagtagagatggggtttcactgag

SEQ ID NO: 115994 - DNA, 80 bp, synthetic construct
  misc_feature 1..80: note = Artificially Synthesized Probe
  source 1..80: mol_type = other DNA
ttgtaatcacaaaaaaacaactattatatttaaatcatcagaccaaatgcacattttggagatcaggcagagaaaagacc

SEQ ID NO: 115995 - DNA, 80 bp, synthetic construct; identical to SEQ ID NO: 38034
  misc_feature 1..80: note = Artificially Synthesized Probe
  source 1..80: mol_type = other DNA

SEQ ID NO: 115996 - DNA, 80 bp, synthetic construct
  misc_feature 1..80: note = Artificially Synthesized Probe
  source 1..80: mol_type = other DNA
ggaaatatgactgtgattaagatgcagatacgacacatttcaacttacatgctttgaaagcaaaactgtacgacaaggag

SEQ ID NO: 115997 - DNA, 80 bp, synthetic construct
  misc_feature 1..80: note = Artificially Synthesized Probe
  source 1..80: mol_type = other DNA
aggatgaggctgtgggtactggtacagttggaaggatttatagaactaacattcttttcccctcttttgcaaatatgtac

SEQ ID NO: 115998 - DNA, 80 bp, synthetic construct
  misc_feature 1..80: note = Artificially Synthesized Probe
  source 1..80: mol_type = other DNA
cacaggcctgtgcagggggatccagcgcggccacagaagtgatgccacaggggaccaggaactgactggatatcggctcc

SEQ ID NO: 115999 - DNA, 80 bp, synthetic construct; identical to SEQ ID NO: 38035
  misc_feature 1..80: note = Artificially Synthesized Probe
  source 1..80: mol_type = other DNA

SEQ ID NO: 116000 - DNA, 80 bp, synthetic construct
  misc_feature 1..80: note = Artificially Synthesized Probe
  source 1..80: mol_type = other DNA
tttttttttttgagacagagtttcactctgtcacccaggcgggagtgtaatgacgcgatcttggctcactgcaacctcca

SEQ ID NO: 116001 - DNA, 80 bp, synthetic construct
  misc_feature 1..80: note = Artificially Synthesized Probe
  source 1..80: mol_type = other DNA
acatcggtctctcaaagtgctgggattataggcatgagccaccatgcccagcctatgattaggctttatagtgatatctt

SEQ ID NO: 116002 - DNA, 80 bp, synthetic construct
  misc_feature 1..80: note = Artificially Synthesized Probe
  source 1..80: mol_type = other DNA
tcctctgggccagtgcagctaagaactaggaaaaaaacatcccttaagtgagaggtggattcacagacttgaggattcca

SEQ ID NO: 116003 - DNA, 80 bp, synthetic construct
  misc_feature 1..80: note = Artificially Synthesized Probe
  source 1..80: mol_type = other DNA
ctcatgacctacctcaatttctctgccctctcctctagactgacccaccacagaacaacccacttcacgctacctccttc

SEQ ID NO: 116004 - DNA, 80 bp, synthetic construct; identical to SEQ ID NO: 38036
  misc_feature 1..80: note = Artificially Synthesized Probe
  source 1..80: mol_type = other DNA

SEQ ID NO: 116005 - DNA, 80 bp, synthetic construct
  misc_feature 1..80: note = Artificially Synthesized Probe
  source 1..80: mol_type = other DNA
attgatgcctgatctataaatagtgctcactagtcaattagaaagaaacacctcaataaaaggctatgaggagacctgaa

SEQ ID NO: 116006 - DNA, 80 bp, synthetic construct
  misc_feature 1..80: note = Artificially Synthesized Probe
  source 1..80: mol_type = other DNA
cagttttcatgtgcacatccgcagcctagccactccaccccgaagaatatattccaaggaaaaaaatcaagtaagagaac

SEQ ID NO: 116007 - DNA, 80 bp, synthetic construct; identical to SEQ ID NO: 38037
  misc_feature 1..80: note = Artificially Synthesized Probe
  source 1..80: mol_type = other DNA

SEQ ID NO: 116008 - DNA, 80 bp, synthetic construct
  misc_feature 1..80: note = Artificially Synthesized Probe
  source 1..80: mol_type = other DNA
ctgtggctttttggaggaatgcactcagactactggaatctgtgttgacctcaggctttaagagctaggcaaacctgtga

SEQ ID NO: 116009 - DNA, 80 bp, synthetic construct
  misc_feature 1..80: note = Artificially Synthesized Probe
  source 1..80: mol_type = other DNA
ctccatcattcctaacaatgttatcttcggggaacattatcttgggtcaccagtgccctcctcactggtccaatggacac

SEQ ID NO: 116010 - DNA, 80 bp, synthetic construct
  misc_feature 1..80: note = Artificially Synthesized Probe
  source 1..80: mol_type = other DNA
atctgcggctgccgtggacacagattctccagcttaggtccaggtaaaatacccaagcaaacaaaaaccaatcaaacaac

SEQ ID NO: 116011 - DNA, 80 bp, synthetic construct
  misc_feature 1..80: note = Artificially Synthesized Probe
  source 1..80: mol_type = other DNA
tttccttcacctttggggctctccacactccaatatctaggattataggattattatcccgtattaatcgctccccaaat

SEQ ID NO: 116012 - DNA, 80 bp, synthetic construct
  misc_feature 1..80: note = Artificially Synthesized Probe
  source 1..80: mol_type = other DNA
tcctctccagtgttttgtctagcagtgaaaccctgtccagttctctagcccttgtctccgactcatgtctgctgaatcta

SEQ ID NO: 116013 - DNA, 80 bp, synthetic construct; identical to SEQ ID NO: 38038
  misc_feature 1..80: note = Artificially Synthesized Probe
  source 1..80: mol_type = other DNA

SEQ ID NO: 116014 - DNA, 80 bp, synthetic construct
  misc_feature 1..80: note = Artificially Synthesized Probe
  source 1..80: mol_type = other DNA
caaggccggtgattgttagaggacaggaattggagaccatcctgggcaacaaagggaccccatctctgtgaaaaattaaa

SEQ ID NO: 116015 - DNA, 80 bp, synthetic construct
  misc_feature 1..80: note = Artificially Synthesized Probe
  source 1..80: mol_type = other DNA
caaagagaaggaagggagaaaaaggaagaaagatggggagccacagaaagcggctttgctgtagggctggttgtagggct

SEQ ID NO: 116016 - DNA, 80 bp, synthetic construct; identical to SEQ ID NO: 38039
  misc_feature 1..80: note = Artificially Synthesized Probe
  source 1..80: mol_type = other DNA

SEQ ID NO: 116017 - DNA, 80 bp, synthetic construct
  misc_feature 1..80: note = Artificially Synthesized Probe
  source 1..80: mol_type = other DNA
atcttgcatcccgctccccccggcggcccctcccctccacggccccttcctgcctgcggaccctcccccacgccctcctc

SEQ ID NO: 116018 - DNA, 80 bp, synthetic construct
  misc_feature 1..80: note = Artificially Synthesized Probe
  source 1..80: mol_type = other DNA
cctcactcccccgctccctccccaccgcttctccagtgtccccctctccccacgggcccctcatcacgcccgcggccccc

SEQ ID NO: 116019 - DNA, 80 bp, synthetic construct
  misc_feature 1..80: note = Artificially Synthesized Probe
  source 1..80: mol_type = other DNA
gcggcctctcccctggcatccccctccccctgccccctcccccttctccacgcgccctctctcctccgcagccccccacg

SEQ ID NO: 116020 - DNA, 80 bp, synthetic construct; identical to SEQ ID NO: 38040
  misc_feature 1..80: note = Artificially Synthesized Probe
  source 1..80: mol_type = other DNA

SEQ ID NO: 116021 - DNA, 80 bp, synthetic construct
  misc_feature 1..80: note = Artificially Synthesized Probe
  source 1..80: mol_type = other DNA
gcatttcctaaggactccagagcggctaccgtaaatgagccaaagaattaaaggaaaatatgatgatagtgactccaggc

SEQ ID NO: 116022 - DNA, 80 bp, synthetic construct; identical to SEQ ID NO: 37985
  misc_feature 1..80: note = Artificially Synthesized Probe
  source 1..80: mol_type = other DNA

SEQ ID NO: 116023 - DNA, 80 bp, synthetic construct
  misc_feature 1..80: note = Artificially Synthesized Probe
  source 1..80: mol_type = other DNA
tacatctatgaacacatcatggtaacagaacaaaacccaataatcatctcaaaagagaaagagaaagcacttgaaaaatt

SEQ ID NO: 116024 - DNA, 80 bp, synthetic construct
  misc_feature 1..80: note = Artificially Synthesized Probe
  source 1..80: mol_type = other DNA
agatcaggaacagaacaaagacaaggatgtctgttcttgccgcttgtattcaacactgtattgaaagttccagagagggc

SEQ ID NO: 116025 - DNA, 80 bp, synthetic construct
  misc_feature 1..80: note = Artificially Synthesized Probe
  source 1..80: mol_type = other DNA
gagaatccacaaaaaaaatccccagagctcataaactcagtagattgcaggatacaagatccatctataaaaatcagttg

SEQ ID NO: 116026 - DNA, 80 bp, synthetic construct; identical to SEQ ID NO: 37986
  misc_feature 1..80: note = Artificially Synthesized Probe
  source 1..80: mol_type = other DNA

SEQ ID NO: 116027 - DNA, 80 bp, synthetic construct
  misc_feature 1..80: note = Artificially Synthesized Probe
  source 1..80: mol_type = other DNA
tttcaaaagttactataaagctttagtaagtgaaagacaaaaagaaaaatacttaaagcagcaagagaagagcaactcat

SEQ ID NO: 116028 - DNA, 80 bp, synthetic construct; identical to SEQ ID NO: 37979
  misc_feature 1..80: note = Artificially Synthesized Probe
  source 1..80: mol_type = other DNA

SEQ ID NO: 116029 - DNA, 80 bp, synthetic construct
  misc_feature 1..80: note = Artificially Synthesized Probe
  source 1..80: mol_type = other DNA
gaggtcaggagtttgagaccagcctggccaacatggtgaaaccccatctctacaaaactagccaggtgtggtggtgcgca

SEQ ID NO: 116030 - DNA, 80 bp, synthetic construct
  misc_feature 1..80: note = Artificially Synthesized Probe
  source 1..80: mol_type = other DNA
gtggtggtgcatgcctacagtcccagatactcaggaggctgaggtgggaggattgattgagcccaggaggtccaggctgc

SEQ ID NO: 116031 - DNA, 80 bp, synthetic construct
  misc_feature 1..80: note = Artificially Synthesized Probe
  source 1..80: mol_type = other DNA
ttcagtgaaattatccttcaaaatgaagacaaagacattcaaatatggaaaaaaaaaatgaagagaactgacttctagcc

SEQ ID NO: 116032 - DNA, 80 bp, synthetic construct; identical to SEQ ID NO: 37987
  misc_feature 1..80: note = Artificially Synthesized Probe
  source 1..80: mol_type = other DNA

SEQ ID NO: 116033 - DNA, 80 bp, synthetic construct
  misc_feature 1..80: note = Artificially Synthesized Probe
  source 1..80: mol_type = other DNA
taaagcacacagataaagtatcaacaggagaactaaaacgtgtattagtctgcttgggcttctgtaataaaataccacag

SEQ ID NO: 116034 - DNA, 80 bp, synthetic construct
  misc_feature 1..80: note = Artificially Synthesized Probe
  source 1..80: mol_type = other DNA
tacggcctcttttgtgtgtgtgcagagttagtaagcaagctccctggtgtctcttttgttttttgaaaatttatgatgat

SEQ ID NO: 116035 - DNA, 80 bp, synthetic construct
  misc_feature 1..80: note = Artificially Synthesized Probe
  source 1..80: mol_type = other DNA
acccatctctataactgttttcattttgtgaaactgaaattttgtgaaactcccattaaacgagagcttcccacccctcc

SEQ ID NO: 116036 - DNA, 80 bp, synthetic construct; identical to SEQ ID NO: 37988
  misc_feature 1..80: note = Artificially Synthesized Probe
  source 1..80: mol_type = other DNA

SEQ ID NO: 116037 - DNA, 80 bp, synthetic construct
  misc_feature 1..80: note = Artificially Synthesized Probe
  source 1..80: mol_type = other DNA
aatccttttgagtactgaattgaaatgcagcatcatctgggaattgtgtttttaagttttggaggaaaggccacactgtt

SEQ ID NO: 116038 - DNA, 80 bp, synthetic construct
  misc_feature 1..80: note = Artificially Synthesized Probe
  source 1..80: mol_type = other DNA
gtttcaggtttaaccatcttcataaaaatactttgaggaaagctgcatccacagacttcaactatgtgattacttctttg

SEQ ID NO: 116039 - DNA, 80 bp, synthetic construct
  misc_feature 1..80: note = Artificially Synthesized Probe
  source 1..80: mol_type = other DNA
acgccaccagcctggataattttttgtagagagggggttttgcccaggctggtctggaactcctaggctcagctccacct

SEQ ID NO: 116040 - DNA, 80 bp, synthetic construct
  misc_feature 1..80: note = Artificially Synthesized Probe
  source 1..80: mol_type = other DNA
ggattacagacatccgtgcccggcctgtttttgtttttaagagacaggatcttactctgtcgtccaggctggagtgcagt

SEQ ID NO: 116041 - DNA, 80 bp, synthetic construct
  misc_feature 1..80: note = Artificially Synthesized Probe
  source 1..80: mol_type = other DNA
ccaggccagcggggacgggaggtgggggcgtgagagaacgctgaggcctgcaggcagccaggggtggactggactgcagg

SEQ ID NO: 116042 - DNA, 80 bp, synthetic construct; identical to SEQ ID NO: 37989
  misc_feature 1..80: note = Artificially Synthesized Probe
  source 1..80: mol_type = other DNA

SEQ ID NO: 116043 - DNA, 80 bp, synthetic construct
  misc_feature 1..80: note = Artificially Synthesized Probe
  source 1..80: mol_type = other DNA
ccgaggggcgacagcgcgcggcaggcggcgagctcgggggccgcaggtgcgagcgggcctggagagtctcccggggcggg

SEQ ID NO: 116044 - DNA, 80 bp, synthetic construct
  misc_feature 1..80: note = Artificially Synthesized Probe
  source 1..80: mol_type = other DNA
ctaggttaccattctgccactttttctcaaagcagtctctctcctcatgagcatattcctttctcaggacaataccccaa

SEQ ID NO: 116045 - DNA, 80 bp, synthetic construct; identical to SEQ ID NO: 38148
  misc_feature 1..80: note = Artificially Synthesized Probe
  source 1..80: mol_type = other DNA

SEQ ID NO: 116046 - DNA, 80 bp, synthetic construct
  misc_feature 1..80: note = Artificially Synthesized Probe
  source 1..80: mol_type = other DNA
ggtgaaaccccgtctctactaaaaatacaaaaaattagctgggtgtggtggtgcatgcctgtagtcccagctacttggta

SEQ ID NO: 116047 - DNA, 80 bp, synthetic construct
  misc_feature 1..80: note = Artificially Synthesized Probe
  source 1..80: mol_type = other DNA
tcaattccctacaaaatcaggcagttggtacccctttgtctacgagctcccattcaacaaggcgtccccattccccttca

SEQ ID NO: 116048 - DNA, 80 bp, synthetic construct; identical to SEQ ID NO: 38149
  misc_feature 1..80: note = Artificially Synthesized Probe
  source 1..80: mol_type = other DNA

SEQ ID NO: 116049 - DNA, 80 bp, synthetic construct
  misc_feature 1..80: note = Artificially Synthesized Probe
  source 1..80: mol_type = other DNA
ctcaatattcagtgctacaccctcagtccaccgcccaggggctcctaaaacacggagctttctgtgaacatgagaagacc

SEQ ID NO: 116050 - DNA, 80 bp, synthetic construct
  misc_feature 1..80: note = Artificially Synthesized Probe
  source 1..80: mol_type = other DNA
agagtgacaaatttaagaacatccttacagctaatatgactagaggttaatattcttaggaatcaataagaaaataccct

SEQ ID NO: 116051 - DNA, 80 bp, synthetic construct
  misc_feature 1..80: note = Artificially Synthesized Probe
  source 1..80: mol_type = other DNA
gttggcccttcccttagtcaatcactagtgccagggtaaatatcggccctgattggattaggctagtcagggcccgcccc

SEQ ID NO: 116052 - DNA, 80 bp, synthetic construct
  misc_feature 1..80: note = Artificially Synthesized Probe
  source 1..80: mol_type = other DNA
acagtttttagatatcatgtttacgtattcattttgcaaagctgatttttaaaaacaacagccgccggccagtgctgcaa

SEQ ID NO: 116053 - DNA, 80 bp, synthetic construct
  misc_feature 1..80: note = Artificially Synthesized Probe
  source 1..80: mol_type = other DNA
ccttttcagctttgcttcgaaaaataagaaatagtttaattgtccggaaatacaggatgggcaaattaaagtatggccgt

SEQ ID NO: 116054 - DNA, 80 bp, synthetic construct; identical to SEQ ID NO: 38150
  misc_feature 1..80: note = Artificially Synthesized Probe
  source 1..80: mol_type = other DNA

SEQ ID NO: 116055 - DNA, 80 bp, synthetic construct
  misc_feature 1..80: note = Artificially Synthesized Probe
  source 1..80: mol_type = other DNA
ttaccgtgggtgcaccttgcctaccagcgtttcagaagccgtctgcagaacttttccagaatcctgaccatctaccctca

SEQ ID NO: 116056 - DNA, 80 bp, synthetic construct
  misc_feature 1..80: note = Artificially Synthesized Probe
  source 1..80: mol_type = other DNA
tcacaaggcacataccttagctgaattcagagatgttaaggacacatctcgctgacgcttctcacatcctagacaatgaa

SEQ ID NO: 116057 - DNA, 80 bp, synthetic construct; identical to SEQ ID NO: 38151
  misc_feature 1..80: note = Artificially Synthesized Probe
  source 1..80: mol_type = other DNA

SEQ ID NO: 116058 - DNA, 80 bp, synthetic construct
  misc_feature 1..80: note = Artificially Synthesized Probe
  source 1..80: mol_type = other DNA
gggaggggctccgtcctcacccgttcactccgcatttgccgaacccttagtgagtgccaggcgtctcattagggtgctgg

SEQ ID NO: 116059 - DNA, 80 bp, synthetic construct
  misc_feature 1..80: note = Artificially Synthesized Probe
  source 1..80: mol_type = other DNA
acttccctaaaggtgaggtgggacttgacaggcgcaggatcatgcagtgagcgggttgtggtggtaccccatgcagaggc

SEQ ID NO: 116060 - DNA, 80 bp, synthetic construct
  misc_feature 1..80: note = Artificially Synthesized Probe
  source 1..80: mol_type = other DNA
cttgggttccttggtgggagccgagtgagtgagtgagtggcgccctcttttgacagagcccagtggagtcggattttctc

SEQ ID NO: 116061 - DNA, 80 bp, synthetic construct; identical to SEQ ID NO: 38152
  misc_feature 1..80: note = Artificially Synthesized Probe
  source 1..80: mol_type = other DNA

SEQ ID NO: 116062 - DNA, 80 bp, synthetic construct
  misc_feature 1..80: note = Artificially Synthesized Probe
  source 1..80: mol_type = other DNA
cctttggagtgaccccagaacagaccactagcctggccatctgtggaagctgttaccattttcatagtcatggagacaag

SEQ ID NO: 116063 - DNA, 80 bp, synthetic construct
  misc_feature 1..80: note = Artificially Synthesized Probe
  source 1..80: mol_type = other DNA
gtcttatgtatgtagacgtttagaggatttgttatcaattttgagtcctgctaaggaacttcacgaattcttgagctctt

SEQ ID NO: 116064 - DNA, 80 bp, synthetic construct
  misc_feature 1..80: note = Artificially Synthesized Probe
  source 1..80: mol_type = other DNA
ctgtcactcaacacccttcataaagctactaatgtggggtggtctgcagaaagaaacctgtgaccctacagtgatgcccc

SEQ ID NO: 116065 - DNA, 80 bp, synthetic construct
  misc_feature 1..80: note = Artificially Synthesized Probe
  source 1..80: mol_type = other DNA
acaggaaggtttactaaaaggaggccagcatggatgctggatgtgttgactctgacctatcaaaacatcagcggcttaga

SEQ ID NO: 116066 - DNA, 80 bp, synthetic construct; identical to SEQ ID NO: 38153
  misc_feature 1..80: note = Artificially Synthesized Probe
  source 1..80: mol_type = other DNA

SEQ ID NO: 116067 - DNA, 80 bp, synthetic construct
  misc_feature 1..80: note = Artificially Synthesized Probe
  source 1..80: mol_type = other DNA
ccacccttttccccacacccacacagcatgcagcctctccaagtctcatcatgtctcggcgctctgggagatgcacaggg

SEQ ID NO: 116068 - DNA, 80 bp, synthetic construct
  misc_feature 1..80: note = Artificially Synthesized Probe
  source 1..80: mol_type = other DNA
tttctggtttatttccttccagtcagatctctgtgcaggtaaccacagccaaagaccttacctcgttagttttcctgctg

SEQ ID NO: 116069 - DNA, 80 bp, synthetic construct
  misc_feature 1..80: note = Artificially Synthesized Probe
  source 1..80: mol_type = other DNA
ggactgcgggcatggctggcttttagttgttttggatatgtaccttgaaggggaattcctggatcatttgataactctgt

SEQ ID NO: 116070 - DNA, 80 bp, synthetic construct; identical to SEQ ID NO: 38154
  misc_feature 1..80: note = Artificially Synthesized Probe
  source 1..80: mol_type = other DNA

SEQ ID NO: 116071 - DNA, 80 bp, synthetic construct
  misc_feature 1..80: note = Artificially Synthesized Probe
  source 1..80: mol_type = other DNA
ggttgttgattaacaaagttattaggatattaaaaatacacacatcacttccaagtaagattaatcccagcaattcaagg

SEQ ID NO: 116072 - DNA, 80 bp, synthetic construct
  misc_feature 1..80: note = Artificially Synthesized Probe
  source 1..80: mol_type = other DNA
ttgagctcacaatgcccaaggtagacataatattaagatgtctataccaacatcatgcctgcccatcaaattccattagt

SEQ ID NO: 116073 - DNA, 80 bp, synthetic construct
  misc_feature 1..80: note = Artificially Synthesized Probe
  source 1..80: mol_type = other DNA
atacaggactgtcaggaattgcaaaaaacctaaatgcccattaaccagcagacaggtaactggtgtctttatcagtgggt

SEQ ID NO: 116074 - DNA, 80 bp, synthetic construct
  misc_feature 1..80: note = Artificially Synthesized Probe
  source 1..80: mol_type = other DNA
ttatctctggggagggacggagggatgtgaagttgtaactatatgcataatgttttgtttctctaaaaaatgatctatcg

SEQ ID NO: 116075 - DNA, 80 bp, synthetic construct; identical to SEQ ID NO: 38052
  misc_feature 1..80: note = Artificially Synthesized Probe
  source 1..80: mol_type = other DNA

SEQ ID NO: 116076 - DNA, 80 bp, synthetic construct; identical to SEQ ID NO: 38155
  misc_feature 1..80: note = Artificially Synthesized Probe
  source 1..80: mol_type = other DNA

SEQ ID NO: 116077 - DNA, 80 bp, synthetic construct
  misc_feature 1..80: note = Artificially Synthesized Probe
  source 1..80: mol_type = other DNA
cgccctcagccctcccccctgctaatgactcctgtccctgcctttcttcagtgtcttcgagagaactctgacgtgaagac

SEQ ID NO: 116078 - DNA, 80 bp, synthetic construct
  misc_feature 1..80: note = Artificially Synthesized Probe
  source 1..80: mol_type = other DNA
gtggttttcacttcttctggccagtttctctgcttcagaactgattgcccttcttggattctaggtttgggattcagccg

SEQ ID NO: 116079 - DNA, 80 bp, synthetic construct
  misc_feature 1..80: note = Artificially Synthesized Probe
  source 1..80: mol_type = other DNA
cgcacaggtacaacaccctttctctcaagaaagcatcctttttttcattttccttttttggcaaacacaatattcagaaa

SEQ ID NO: 116080 - DNA, 80 bp, synthetic construct; identical to SEQ ID NO: 38156
  misc_feature 1..80: note = Artificially Synthesized Probe
  source 1..80: mol_type = other DNA

SEQ ID NO: 116081 - DNA, 80 bp, synthetic construct
  misc_feature 1..80: note = Artificially Synthesized Probe
  source 1..80: mol_type = other DNA
attctcctgcctcagcctcccaagtagctgggattacaggcatgcaccaccatgcccggctaatttttgtatttttagta

SEQ ID NO: 116082 - DNA, 80 bp, synthetic construct
  misc_feature 1..80: note = Artificially Synthesized Probe
  source 1..80: mol_type = other DNA
ccactggttttaatgcatcagtatcattcacagtcactgacctgaggatcaacccacttcttgtctagctttttggagct

SEQ ID NO: 116083 - DNA, 80 bp, synthetic construct; identical to SEQ ID NO: 38157
  misc_feature 1..80: note = Artificially Synthesized Probe
  source 1..80: mol_type = other DNA

SEQ ID NO: 116084 - DNA, 80 bp, synthetic construct
  misc_feature 1..80: note = Artificially Synthesized Probe
  source 1..80: mol_type = other DNA
tcacctgaggtcagcagttcgaaaccagcctggccaacacggtgaaaccccatctctactaaaaatacaaaattagccag

SEQ ID NO: 116085 - DNA, 80 bp, synthetic construct
  misc_feature 1..80: note = Artificially Synthesized Probe
  source 1..80: mol_type = other DNA
gaaatgctgtgcaaatctcaagtcattctgtaaggaggcatttgggaaacaccatccacctgtcttctgtttctcgtgtt

SEQ ID NO: 116086 - DNA, 80 bp, synthetic construct
  misc_feature 1..80: note = Artificially Synthesized Probe
  source 1..80: mol_type = other DNA
gagatgctgcccagagtaggttgctttcttcctgtaaacctagcccctcatttcttcatctcgcttctgcatgtctcatg

SEQ ID NO: 116087 - DNA, 80 bp, synthetic construct
  misc_feature 1..80: note = Artificially Synthesized Probe
  source 1..80: mol_type = other DNA
gggaggccgaggtgggcggatcacgaggtcaggagttcaagaccagcctgaccaacatggtgaaaccccgtctctactaa

SEQ ID NO: 116088 - DNA, 80 bp, synthetic construct; identical to SEQ ID NO: 38158
  misc_feature 1..80: note = Artificially Synthesized Probe
  source 1..80: mol_type = other DNA

SEQ ID NO: 116089 - DNA, 80 bp, synthetic construct
  misc_feature 1..80: note = Artificially Synthesized Probe
  source 1..80: mol_type = other DNA
tggttgtgtattctgacattttcacatataggcacatgagtttagtattcccacaagcacacgcatctagcaagaagcca

SEQ ID NO: 116090 - DNA, 80 bp, synthetic construct
  misc_feature 1..80: note = Artificially Synthesized Probe
  source 1..80: mol_type = other DNA
tctattcccctgaacatgggctctatttccttggaaaggatgttgacatccaagaatagtatcacctgtggtacttgtat

SEQ ID NO: 116091 - DNA, 80 bp, synthetic construct
  misc_feature 1..80: note = Artificially Synthesized Probe
  source 1..80: mol_type = other DNA
catgttgatacttatgatgatgttacaaaaagcggtgatgagttaaactgctggcccctcacgtgaagacacagtagctg

SEQ ID NO: 116092 - DNA, 80 bp, synthetic construct
  misc_feature 1..80: note = Artificially Synthesized Probe
  source 1..80: mol_type = other DNA
tgcctcacagaaaatcactcatgacaagccctgggttatcagccggctgctgtgttcatggaccgccacccgtgctggga

SEQ ID NO: 116093 - DNA, 80 bp, synthetic construct; identical to SEQ ID NO: 38159
  misc_feature 1..80: note = Artificially Synthesized Probe
  source 1..80: mol_type = other DNA

SEQ ID NO: 116094 - DNA, 80 bp, synthetic construct
  misc_feature 1..80: note = Artificially Synthesized Probe
  source 1..80: mol_type = other DNA
taattgactgaaaaatgcactgatacagtttcaggctccacattgcaactaacctctagacatgaccatttatcactgtg

SEQ ID NO: 116095 - DNA, 80 bp, synthetic construct
  misc_feature 1..80: note = Artificially Synthesized Probe
  source 1..80: mol_type = other DNA
ccagggccagcacaggaatggaagaccaaaccactcttctcacggattcatgttttggaaaatattttaaatgttattta

SEQ ID NO: 116096 - DNA, 80 bp, synthetic construct; identical to SEQ ID NO: 38160
  misc_feature 1..80: note = Artificially Synthesized Probe
  source 1..80: mol_type = other DNA

SEQ ID NO: 116097 - DNA, 80 bp, synthetic construct
  misc_feature 1..80: note = Artificially Synthesized Probe
  source 1..80: mol_type = other DNA
tagtaaggtatgtctccagatctgagagaaccaggaataatatttctctttctgcagctttcatgatgtaaaagattata

SEQ ID NO: 116098 - DNA, 80 bp, synthetic construct
  misc_feature 1..80: note = Artificially Synthesized Probe
  source 1..80: mol_type = other DNA
tataattttagtcagtataattaacgaatgctctgttccgtgcagaaaagaagaaaggtttcaaagacgcggcttctgcc

SEQ ID NO: 116099 - DNA, 80 bp, synthetic construct
  misc_feature 1..80: note = Artificially Synthesized Probe
  source 1..80: mol_type = other DNA
ctcaaaaaagaagaaaaaagaaaagaggccgggtggggtggctcacacctgtaatcccagcactttgagagggcaagacg

SEQ ID NO: 116100 - DNA, 80 bp, synthetic construct
  misc_feature 1..80: note = Artificially Synthesized Probe
  source 1..80: mol_type = other DNA
aaattagataattttttttcctcataggttcacttttcccctccttcttgtccttaaaataaaaaggaatgttaggtttc

SEQ ID NO: 116101 - DNA, 80 bp, synthetic construct
  misc_feature 1..80: note = Artificially Synthesized Probe
  source 1..80: mol_type = other DNA
agaccagtgcttactccagaaatgatgaactgaaccacctagaagaggaaggtcgtttccttaaggcatattctccagca

SEQ ID NO: 116102 - DNA, 80 bp, synthetic construct; identical to SEQ ID NO: 38161
  misc_feature 1..80: note = Artificially Synthesized Probe
  source 1..80: mol_type = other DNA

SEQ ID NO: 116103 - DNA, 80 bp, synthetic construct
  misc_feature 1..80: note = Artificially Synthesized Probe
  source 1..80: mol_type = other DNA
ctgtactccagcctgggtgaaactgtcaaacaaacaaaaaatgctttttggaggatttttcgagttttctggtctgtggt

SEQ ID NO: 116104 - DNA, 80 bp, synthetic construct
  misc_feature 1..80: note = Artificially Synthesized Probe
  source 1..80: mol_type = other DNA
agttctgtatccgggtggagaacgactggcaccgggtgtacctggtgcggaagctcagcagccagcgggggatggagttc

SEQ ID NO: 116105 - DNA, 80 bp, synthetic construct
  misc_feature 1..80: note = Artificially Synthesized Probe
  source 1..80: mol_type = other DNA
ccccccacaccccaccccctcacaccttccccaccacataccctcatacccccacacctcaccctcacacccccacacct

SEQ ID NO: 116106 - DNA, 80 bp, synthetic construct; identical to SEQ ID NO: 38162
  misc_feature 1..80: note = Artificially Synthesized Probe
  source 1..80: mol_type = other DNA

SEQ ID NO: 116107 - DNA, 80 bp, synthetic construct
  misc_feature 1..80: note = Artificially Synthesized Probe
  source 1..80: mol_type = other DNA
aacattcttgtggcctttgctttcagcgaattaaacgtagttcagcttgcaaggtgcgacctttttacctctggcaggca

SEQ ID NO: 116108 - DNA, 80 bp, synthetic construct
  misc_feature 1..80: note = Artificially Synthesized Probe
  source 1..80: mol_type = other DNA
tggtgaaaccttgtctctacttcaaagaaaaaaaaaattagctggacatgatggtgggtgcttgtaatcccagctagtcg

SEQ ID NO: 116109 - DNA, 80 bp, synthetic construct
  misc_feature 1..80: note = Artificially Synthesized Probe
  source 1..80: mol_type = other DNA
gatacccagaaattaacaaattcttattgtccaggggatacaaaaatggtactaagaaccccggcactgtttgactacca

SEQ ID NO: 116110 - DNA, 80 bp, synthetic construct; identical to SEQ ID NO: 38163
  misc_feature 1..80: note = Artificially Synthesized Probe
  source 1..80: mol_type = other DNA

SEQ ID NO: 116111 - DNA, 80 bp, synthetic construct
  misc_feature 1..80: note = Artificially Synthesized Probe
  source 1..80: mol_type = other DNA
gaggttgcagtgagccaagattgtgcctctgcactccagcctgggcgacagagcaagactctgtctcaaaaaaaataata

SEQ ID NO: 116112 - DNA, 80 bp, synthetic construct
  misc_feature 1..80: note = Artificially Synthesized Probe
  source 1..80: mol_type = other DNA
tggccaaagctgtcctcgagtgcaagccactgggcattaagactgctctgaaggtaggatgggcccgtggcttctctctg

SEQ ID NO: 116113 - DNA, 80 bp, synthetic construct
  misc_feature 1..80: note = Artificially Synthesized Probe
  source 1..80: mol_type = other DNA
ggaacaggacagctatgacagttgagctgggttgacagatttgctgtgtcttgctgatctgccaagtccatcagcagcgc

SEQ ID NO: 116114 - DNA, 80 bp, synthetic construct
  misc_feature 1..80: note = Artificially Synthesized Probe
  source 1..80: mol_type = other DNA
aagttaaaaaatataaagatgtttttagaatctaacctttaaattggtctggtcttgcttcctttttgagtccctgtgcc

SEQ ID NO: 116115 - DNA, 80 bp, synthetic construct; identical to SEQ ID NO: 38164
  misc_feature 1..80: note = Artificially Synthesized Probe
  source 1..80: mol_type = other DNA

SEQ ID NO: 116116 - DNA, 80 bp, synthetic construct
  misc_feature 1..80: note = Artificially Synthesized Probe
  source 1..80: mol_type = other DNA
tttgggaggccgaggcatgcagatcacaaggtcaggagtttgagaccagcctggcaaacatggtgaaaccccgtgtctac

SEQ ID NO: 116117 - DNA, 80 bp, synthetic construct
  misc_feature 1..80: note = Artificially Synthesized Probe
  source 1..80: mol_type = other DNA
catctcaaaaaaaaaagatgtgttgagcttttaaattcttacttgatacccttgattttgcaggcctgcaagacccccca

SEQ ID NO: 116118 - DNA, 80 bp, synthetic construct
  misc_feature 1..80: note = Artificially Synthesized Probe
  source 1..80: mol_type = other DNA
gaaagttatcaacacaaatcataccataatttttttatctaggatagaggttctcaaccttgttatgtggaggaacacat

SEQ ID NO: 116119 - DNA, 80 bp, synthetic construct; identical to SEQ ID NO: 38165
  misc_feature 1..80: note = Artificially Synthesized Probe
  source 1..80: mol_type = other DNA

SEQ ID NO: 116120 - DNA, 80 bp, synthetic construct
  misc_feature 1..80: note = Artificially Synthesized Probe
  source 1..80: mol_type = other DNA
tagtgacagcaaccttgatggaacggtgacagaaatggccattcatgctgcagccgtccttctgtgtggacagaatgaac

SEQ ID NO: 116121 - DNA, 80 bp, synthetic construct
  misc_feature 1..80: note = Artificially Synthesized Probe
  source 1..80: mol_type = other DNA
gcagctgtgggaactcttgagcatctttatctcctcagttctctgcctttgtgtcacctgattcttgagcacacaagata

SEQ ID NO: 116122 - DNA, 80 bp, synthetic construct
  misc_feature 1..80: note = Artificially Synthesized Probe
  source 1..80: mol_type = other DNA
tgagcagcagcacccaggtgacaagctcacttatctagagctgtctctgtcttcttgtttttcagcatgcttttcttcca

SEQ ID NO: 116123 - DNA, 80 bp, synthetic construct; identical to SEQ ID NO: 38053
  misc_feature 1..80: note = Artificially Synthesized Probe
  source 1..80: mol_type = other DNA

SEQ ID NO: 116124 - DNA, 80 bp, synthetic construct
  misc_feature 1..80: note = Artificially Synthesized Probe
  source 1..80: mol_type = other DNA
cagatgctatgaagcattgggttcgacttggggtccacgtggtttgtgcctcagggtccaaaaccacctgcattctaccg

SEQ ID NO: 116125 - DNA, 80 bp, synthetic construct; identical to SEQ ID NO: 38166
  misc_feature 1..80: note = Artificially Synthesized Probe
  source 1..80: mol_type = other DNA

SEQ ID NO: 116126 - DNA, 80 bp, synthetic construct
  misc_feature 1..80: note = Artificially Synthesized Probe
  source 1..80: mol_type = other DNA
aaaatagaaaggtctagaatcctgtccaccttgcctccaaaagtacccctggtatgggcctatattctaattgctcttta

SEQ ID NO: 116127 - DNA, 80 bp, synthetic construct
  misc_feature 1..80: note = Artificially Synthesized Probe
  source 1..80: mol_type = other DNA
cccttttcaatgtgggtcattgggtgaaacctcattagccaatgtgtgtcctgttctcttcacagcttgtcccaacggcc

SEQ ID NO: 116128 - DNA, 80 bp, synthetic construct
  misc_feature 1..80: note = Artificially Synthesized Probe
  source 1..80: mol_type = other DNA
agcagggcaatgccaatggcgctaagggtttctagcccagggcttctcagactcagcactgtggacgtggctctgcggcg

SEQ ID NO: 116129 - DNA, 80 bp, synthetic construct; identical to SEQ ID NO: 38167
  misc_feature 1..80: note = Artificially Synthesized Probe
  source 1..80: mol_type = other DNA

SEQ ID NO: 116130 - DNA, 80 bp, synthetic construct
  misc_feature 1..80: note = Artificially Synthesized Probe
  source 1..80: mol_type = other DNA
ggctggtgggttgagctgacacgtggtagttagttattagtattacttacttggttgagatatgtctggctctcttaccc

SEQ ID NO: 116131 - DNA, 80 bp, synthetic construct
  misc_feature 1..80: note = Artificially Synthesized Probe
  source 1..80: mol_type = other DNA
gagaaaaactgttacatacacttcatttttctgagcttcaatcacttccttgtccatgaaatgaggacgctgaaatagag

SEQ ID NO: 116132 - DNA, 80 bp, synthetic construct; identical to SEQ ID NO: 38168
  misc_feature 1..80: note = Artificially Synthesized Probe
  source 1..80: mol_type = other DNA

SEQ ID NO: 116133 - DNA, 80 bp, synthetic construct
  misc_feature 1..80: note = Artificially Synthesized Probe
  source 1..80: mol_type = other DNA
acacaaagcatcagcagggcatggtggtgcatgcgtgcatgcgtgcatgcgtgtggtcccagctacttgggaggctaagg

SEQ ID NO: 116134 - DNA, 80 bp, synthetic construct
  misc_feature 1..80: note = Artificially Synthesized Probe
  source 1..80: mol_type = other DNA
tattcttggtattagatcatgaagtgccacaggctagtgtgatagatggagggatggaaaaagtgctgaatacaagaaag

SEQ ID NO: 116135 - DNA, 80 bp, synthetic construct
  misc_feature 1..80: note = Artificially Synthesized Probe
  source 1..80: mol_type = other DNA
gagtgagtgtggggctggcagagtgggtgctccatgctgtctgcatggcagctctgcatgggtgagaatctggaggcaga

SEQ ID NO: 116136 - DNA, 80 bp, synthetic construct
  misc_feature 1..80: note = Artificially Synthesized Probe
  source 1..80: mol_type = other DNA
actgggacaatctgagggtgctcacgtctgccggtgataaggaggtgttcatttgcatgatggcatttgtgcataaaatg

SEQ ID NO: 116137 - DNA, 80 bp, synthetic construct; identical to SEQ ID NO: 38169
  misc_feature 1..80: note = Artificially Synthesized Probe
  source 1..80: mol_type = other DNA

SEQ ID NO: 116138 - DNA, 80 bp, synthetic construct
  misc_feature 1..80: note = Artificially Synthesized Probe
  source 1..80: mol_type = other DNA
ctttaacagctgttaatatgaatacaggtgtcttccttttgggccttgggtgcaccttctgtagaaatatgcatgacata

SEQ ID NO: 116139 - DNA, 80 bp, synthetic construct
  misc_feature 1..80: note = Artificially Synthesized Probe
  source 1..80: mol_type = other DNA
ccagacttcagaatccaggtacaaatccgatcccacaatcccatgctgagatgaatgtggttctaaatgctcctttcaga

SEQ ID NO: 116140 - DNA, 80 bp, synthetic construct
  misc_feature 1..80: note = Artificially Synthesized Probe
  source 1..80: mol_type = other DNA
gactttagatcccggtttttcctttggggagatgagaacaatatggacacccatgggatgccgactgtcctcccaaactc

SEQ ID NO: 116141 - DNA, 80 bp, synthetic construct; identical to SEQ ID NO: 38170
  misc_feature 1..80: note = Artificially Synthesized Probe
  source 1..80: mol_type = other DNA

SEQ ID NO: 116142 - DNA, 80 bp, synthetic construct
  misc_feature 1..80: note = Artificially Synthesized Probe
  source 1..80: mol_type = other DNA
atgtgaccgagggctgcccccagtggtcttcctccttatccggctactcactcacttggctctgcttctgggagcgtccc

SEQ ID NO: 116143 - DNA, 80 bp, synthetic construct
  misc_feature 1..80: note = Artificially Synthesized Probe
  source 1..80: mol_type = other DNA
taattagtctacaaagtaatatacaagttatacatcttcatgtttccccctgtggcgtatgatggtatggggggaactac

SEQ ID NO: 116144 - DNA, 80 bp, synthetic construct
  misc_feature 1..80: note = Artificially Synthesized Probe
  source 1..80: mol_type = other DNA
agagcacactgcataaccaagatggccaacagtacaatctggatattctttatctcactgtaacaacagaaaagccagca

SEQ ID NO: 116145 - DNA, 80 bp, synthetic construct; identical to SEQ ID NO: 38171
  misc_feature 1..80: note = Artificially Synthesized Probe
  source 1..80: mol_type = other DNA

SEQ ID NO: 116146 - DNA, 80 bp, synthetic construct
  misc_feature 1..80: note = Artificially Synthesized Probe
  source 1..80: mol_type = other DNA
ctgacatcctagtacagagtcaggtgaatccactcgtggacattgggaggaagaggctggatgctaggacggcacagtct

SEQ ID NO: 116147 - DNA, 80 bp, synthetic construct
  misc_feature 1..80: note = Artificially Synthesized Probe
  source 1..80: mol_type = other DNA
cgcaagcaggctcgctgtcttgtgggccaccccacacacagccagtctgagctctgtctgtgctgttgctggaaagaatg

SEQ ID NO: 116148 - DNA, 80 bp, synthetic construct
  misc_feature 1..80: note = Artificially Synthesized Probe
  source 1..80: mol_type = other DNA
gtgttcagtgtgcatatatggggagtcttcagttccgaagtcagccccgtaggtcattcccctaccatgctgggagcacg

SEQ ID NO: 116149 - DNA, 80 bp, synthetic construct
  misc_feature 1..80: note = Artificially Synthesized Probe
  source 1..80: mol_type = other DNA
cagaaagaaaaggtctgtaagacaacttagtaaaatggttatatggttatctgtgagtggtggaattaagagtgattttc

SEQ ID NO: 116150 - DNA, 80 bp, synthetic construct; identical to SEQ ID NO: 38172
  misc_feature 1..80: note = Artificially Synthesized Probe
  source 1..80: mol_type = other DNA

SEQ ID NO: 116151 - DNA, 80 bp, synthetic construct
  misc_feature 1..80: note = Artificially Synthesized Probe
  source 1..80: mol_type = other DNA
aaatgggtctaagattacaattatgtaggatagaggaatttttagagattgatgttatcttcaaaaggtcattaagttgg

SEQ ID NO: 116152 - DNA, 80 bp, synthetic construct
  misc_feature 1..80: note = Artificially Synthesized Probe
  source 1..80: mol_type = other DNA
agggcttttaaattttgacacagaattgtcaactaaagaaatgaggaacaactgggaaaaggaaatcgcagctgtgattt

SEQ ID NO: 116153 - DNA, 80 bp, synthetic construct
  misc_feature 1..80: note = Artificially Synthesized Probe
  source 1..80: mol_type = other DNA
tcgagtcactccatcctcctcctgtccccaagtgctcttccctcctacagctggtcatgaagtcagtccgaggaattcct

SEQ ID NO: 116154 - DNA, 80 bp, synthetic construct
  misc_feature 1..80: note = Artificially Synthesized Probe
  source 1..80: mol_type = other DNA
tagattaattattcatctagcagccagaatgttagtaagagaaatataggtttctgaatctcattctgtttggggagaca

SEQ ID NO: 116155 - DNA, 80 bp, synthetic construct; identical to SEQ ID NO: 38173
  misc_feature 1..80: note = Artificially Synthesized Probe
  source 1..80: mol_type = other DNA

SEQ ID NO: 116156 - DNA, 80 bp, synthetic construct
  misc_feature 1..80: note = Artificially Synthesized Probe
  source 1..80: mol_type = other DNA
ctctaagatttggagctgcaggaaaagaattacagttgagtacctccagcacattgtggaacagaaaaatggcaaagaaa

SEQ ID NO: 116157 - DNA, 80 bp, synthetic construct
  misc_feature 1..80: note = Artificially Synthesized Probe
  source 1..80: mol_type = other DNA
cattcttaacagactattccagtgctttggttttgaataggatgtagcagaagactcagggctagagatcttcatacata

SEQ ID NO: 116158 - DNA, 80 bp, synthetic construct
  misc_feature 1..80: note = Artificially Synthesized Probe
  source 1..80: mol_type = other DNA
tgtttttccttcctaacactcgcttctctctgagatctgacccttccttcatctgccgttacagattctgagaacaataa

SEQ ID NO: 116159 - DNA, 80 bp, synthetic construct
  misc_feature 1..80: note = Artificially Synthesized Probe
  source 1..80: mol_type = other DNA
agacagaaaaggatgcagctctttcccagccgctctgttcctctctgtccacaatgctggagcatgggcagatcaaacaa

SEQ ID NO: 116160 - DNA, 80 bp, synthetic construct; identical to SEQ ID NO: 38174
  misc_feature 1..80: note = Artificially Synthesized Probe
  source 1..80: mol_type = other DNA

SEQ ID NO: 116161 - DNA, 80 bp, synthetic construct
  misc_feature 1..80: note = Artificially Synthesized Probe
  source 1..80: mol_type = other DNA
ggaaggacacccaggaataaggccagccctcgctgcctaagctctgggtctcttctttcagcagcttctctccgtaccca

SEQ ID NO: 116162 - DNA, 80 bp, synthetic construct
  misc_feature 1..80: note = Artificially Synthesized Probe
  source 1..80: mol_type = other DNA
actgtctgtagacttgtgggaagaacttttcccgttttcaagctccacgctgcatcacaggaaatgacactgaccagatt

SEQ ID NO: 116163 - DNA, 80 bp, synthetic construct; identical to SEQ ID NO: 38175
  misc_feature 1..80: note = Artificially Synthesized Probe
  source 1..80: mol_type = other DNA

SEQ ID NO: 116164 - DNA, 80 bp, synthetic construct
  misc_feature 1..80: note = Artificially Synthesized Probe
  source 1..80: mol_type = other DNA
ttaccatgcggtgaagggtgcttgaaccccaaaaacatattagaagctttcgccacagctgaaaagcacctccctctcta

SEQ ID NO: 116165 - DNA, 80 bp, synthetic construct
  misc_feature 1..80: note = Artificially Synthesized Probe
  source 1..80: mol_type = other DNA
gttgctatcatacggttcttaccaagtattctgttcaacagatgggttgaggcagctgcttcacaacaggatcacagtct

SEQ ID NO: 116166 - DNA, 80 bp, synthetic construct
  misc_feature 1..80: note = Artificially Synthesized Probe
  source 1..80: mol_type = other DNA
ttttgagatggagtcttgctctgtcgccaggctggagtgcagtggcaccatctcggctcactgcaacctctgcctcccgg

SEQ ID NO: 116167 - DNA, 80 bp, synthetic construct
  misc_feature 1..80: note = Artificially Synthesized Probe
  source 1..80: mol_type = other DNA
cgcttaacttgtgtctcttttgatggtggtgtctggataagtaaaataatgtgtcaggaaaataaaccctcagtactctt

SEQ ID NO: 116168 - DNA, 80 bp, synthetic construct; identical to SEQ ID NO: 38054
  misc_feature 1..80: note = Artificially Synthesized Probe
  source 1..80: mol_type = other DNA

SEQ ID NO: 116169 - DNA, 80 bp, synthetic construct; identical to SEQ ID NO: 38176
  misc_feature 1..80: note = Artificially Synthesized Probe
  source 1..80: mol_type = other DNA

SEQ ID NO: 116170 - DNA, 80 bp, synthetic construct
  misc_feature 1..80: note = Artificially Synthesized Probe
  source 1..80: mol_type = other DNA
gtgcctgctcagcccagagtccctaagcccagtggggcagacacaagcaagcttcagccccttccctaacagacactcac

SEQ ID NO: 116171 - DNA, 80 bp, synthetic construct
  misc_feature 1..80: note = Artificially Synthesized Probe
  source 1..80: mol_type = other DNA
gtggatgccgccgaggtcactgaactgcatgtcatcagttatgaagtggagcgggacctgactccactgattctctccaa

SEQ ID NO: 116172 - DNA, 80 bp, synthetic construct
  misc_feature 1..80: note = Artificially Synthesized Probe
  source 1..80: mol_type = other DNA
tgaacaagcagcccttggtgtgtttctcgagagagggaagcagcacctcaccctgcagtctggtctgtatctcctccctc

SEQ ID NO: 116173 - DNA, 80 bp, synthetic construct; identical to SEQ ID NO: 38177
  misc_feature 1..80: note = Artificially Synthesized Probe
  source 1..80: mol_type = other DNA

SEQ ID NO: 116174 - DNA, 80 bp, synthetic construct
  misc_feature 1..80: note = Artificially Synthesized Probe
  source 1..80: mol_type = other DNA
tcttgattctaccagttaatggcaccaccacccccacagcccctcttccttcagcctccatgggtaacctgccagcagat

SEQ ID NO: 116175 - DNA, 80 bp, synthetic construct
  misc_feature 1..80: note = Artificially Synthesized Probe
  source 1..80: mol_type = other DNA
gtgccggatggacctgcctggcctctcatggcatatgggataaagccgacactctgttgtctggtatgggaggccctgta

SEQ ID NO: 116176 - DNA, 80 bp, synthetic construct; identical to SEQ ID NO: 38178
  misc_feature 1..80: note = Artificially Synthesized Probe
  source 1..80: mol_type = other DNA

SEQ ID NO: 116177 - DNA, 80 bp, synthetic construct
  misc_feature 1..80: note = Artificially Synthesized Probe
  source 1..80: mol_type = other DNA
tgtatttttagtagagacggggtttcaccatgttagccaggatggtctcgatctcttgacttcgtgatctgcccgtctct

SEQ ID NO: 116178 - DNA, 80 bp, synthetic construct
  misc_feature 1..80: note = Artificially Synthesized Probe
  source 1..80: mol_type = other DNA
tgatgtgacaatatcttgtcatgtaattggctgtgaggactccgctggattcccggttgtgttactatttccatagatgg

SEQ ID NO: 116179 - DNA, 80 bp, synthetic construct
  misc_feature 1..80: note = Artificially Synthesized Probe
  source 1..80: mol_type = other DNA
ttttttttttttttttttttgagacagagtttcgctcttgttgcccaggctggagtgcagtggtgcgatctcggctcgct

SEQ ID NO: 116180 - DNA, 80 bp, synthetic construct
  misc_feature 1..80: note = Artificially Synthesized Probe
  source 1..80: mol_type = other DNA
acccactctggtgtacagacacgactggaactatgaacatctctttatggacatcaagaacaaaatggcacaggtgatcc

SEQ ID NO: 116181 - DNA, 80 bp, synthetic construct; identical to SEQ ID NO: 38179
  misc_feature 1..80: note = Artificially Synthesized Probe
  source 1..80: mol_type = other DNA

SEQ ID NO: 116182 - DNA, 80 bp, synthetic construct
  misc_feature 1..80: note = Artificially Synthesized Probe
  source 1..80: mol_type = other DNA
gagagttggccccccgcatgtggcttgggcagtgaaggggctcggctctcttaccaggtggtgagatgccagaaacccag

SEQ ID NO: 116183 - DNA, 80 bp, synthetic construct
  misc_feature 1..80: note = Artificially Synthesized Probe
  source 1..80: mol_type = other DNA
caaacatgcagctgaatgtgtatactcaagacatcctgcaaatgggtgatcagacgattcacgtgttaaaggtgggtctc

SEQ ID NO: 116184 - DNA, 80 bp, synthetic construct
  misc_feature 1..80: note = Artificially Synthesized Probe
  source 1..80: mol_type = other DNA
gacagtagagacagacacgcgctagaaatgccagcagtctagatagagcccaaatgtgactgagtacatgaggcccctgc

SEQ ID NO: 116185 - DNA, 80 bp, synthetic construct
  misc_feature 1..80: note = Artificially Synthesized Probe
  source 1..80: mol_type = other DNA
gtgggggtgtgagacctcagcccccactcaggaattctattccttctgcaggccttaaacagatgccagttaaaacacac

SEQ ID NO: 116186 - DNA, 80 bp, synthetic construct; identical to SEQ ID NO: 38180
  misc_feature 1..80: note = Artificially Synthesized Probe
  source 1..80: mol_type = other DNA

SEQ ID NO: 116187 - DNA, 80 bp, synthetic construct
  misc_feature 1..80: note = Artificially Synthesized Probe
  source 1..80: mol_type = other DNA
tcttctatagacacaaaaatagttcttttcttaccacagaatcccatttcctgctttttgtcattaccagggcacctgag

SEQ ID NO: 116188 - DNA, 80 bp, synthetic construct
  misc_feature 1..80: note = Artificially Synthesized Probe
  source 1..80: mol_type = other DNA
agcgagtctcatgcctcagcttcccaaatagctgggactacaggcgtgtaccaccatgcctggctaatttttgtattttt

SEQ ID NO: 116189 - DNA, 80 bp, synthetic construct; identical to SEQ ID NO: 38181
  misc_feature 1..80: note = Artificially Synthesized Probe
  source 1..80: mol_type = other DNA

SEQ ID NO: 116190 - DNA, 80 bp, synthetic construct
  misc_feature 1..80: note = Artificially Synthesized Probe
  source 1..80: mol_type = other DNA
agatccacccacctcggcctcccaaagtgctgggattacaggtgtgagccaccgcgcccggcctccaccttccttttctt

SEQ ID NO: 116191 - DNA, 80 bp, synthetic construct
  misc_feature 1..80: note = Artificially Synthesized Probe
  source 1..80: mol_type = other DNA
ctgcagtcccacctactcaggaggctgaggcaggagaattgctttaacctgggaggtggagattgcagtgagctgagatc

SEQ ID NO: 116192 - DNA, 80 bp, synthetic construct
  misc_feature 1..80: note = Artificially Synthesized Probe
  source 1..80: mol_type = other DNA
attatccatcttttacatagttgccaatctaaaggccaaaatggtatctcattttcagttgtatttccccatttaccgtg

SEQ ID NO: 116193 - DNA, 80 bp, synthetic construct
  misc_feature 1..80: note = Artificially Synthesized Probe
  source 1..80: mol_type = other DNA
tctcctgccttagcctccctagtagctgggattacaggtgccaaccatcacgcccagctaattttttctattttagtaca

SEQ ID NO: 116194 - DNA, 80 bp, synthetic construct; identical to SEQ ID NO: 38182
  misc_feature 1..80: note = Artificially Synthesized Probe
  source 1..80: mol_type = other DNA

SEQ ID NO: 116195 - DNA, 80 bp, synthetic construct
  misc_feature 1..80: note = Artificially Synthesized Probe
  source 1..80: mol_type = other DNA
ctagagtgcaatggtgtcatcttagctcactgcaacctctgcctcctgggttcaagcgattctcctgcctcagcctcccg

SEQ ID NO: 116196 - DNA, 80 bp, synthetic construct
  misc_feature 1..80: note = Artificially Synthesized Probe
  source 1..80: mol_type = other DNA
tgcgcccggcctgtcctctctcttcttgtgctttcacatacttgttttattcaccagtttatgtttaggtgtaaagtaag

SEQ ID NO: 116197 - DNA, 80 bp, synthetic construct
  misc_feature 1..80: note = Artificially Synthesized Probe
  source 1..80: mol_type = other DNA
catgtagataaaaaagatccctttcctagagaatttccagtctttgttaatgtgaaacatgtaatagaatacaaggtttt

SEQ ID NO: 116198 - DNA, 80 bp, synthetic construct; identical to SEQ ID NO: 38183
  misc_feature 1..80: note = Artificially Synthesized Probe
  source 1..80: mol_type = other DNA

SEQ ID NO: 116199 - DNA, 80 bp, synthetic construct
  misc_feature 1..80: note = Artificially Synthesized Probe
  source 1..80: mol_type = other DNA
ccaccgccatgcctggctaatttttgtatttttactagagacagggtttctccatgttggctaggctggtctcgaactcc

SEQ ID NO: 116200 - DNA, 80 bp, synthetic construct
  misc_feature 1..80: note = Artificially Synthesized Probe
  source 1..80: mol_type = other DNA
ttaagtcttaacgagcattttggttctgctgatgacaacgggaaaaagtaacatgaggggactgattggtccccttatgt

SEQ ID NO: 116201 - DNA, 80 bp, synthetic construct
  misc_feature 1..80: note = Artificially Synthesized Probe
  source 1..80: mol_type = other DNA
cctcctgagtagcttcggactataggcatacaccaccacgtgcccagctaatttttgtatttttgctagagacagggttt

SEQ ID NO: 116202 - DNA, 80 bp, synthetic construct
  misc_feature 1..80: note = Artificially Synthesized Probe
  source 1..80: mol_type = other DNA
ccgctgggtgcgtgtcttgcgcttctgtaggcctctgcattgagggtgcgtgcccagaggggctttgaagctttgggtgt

SEQ ID NO: 116203 - DNA, 80 bp, synthetic construct
  misc_feature 1..80: note = Artificially Synthesized Probe
  source 1..80: mol_type = other DNA
accatgctgaggagactgttttaaatgctctcttctttggtttttcagcctgagagacactctcgtaagttacatgcaaa

SEQ ID NO: 116204 - DNA, 80 bp, synthetic construct; identical to SEQ ID NO: 38184
  misc_feature 1..80: note = Artificially Synthesized Probe
  source 1..80: mol_type = other DNA

SEQ ID NO: 116205 - DNA, 80 bp, synthetic construct
  misc_feature 1..80: note = Artificially Synthesized Probe
  source 1..80: mol_type = other DNA
attgagagatgacaatgaagattagatgaaattggaaataaaccaacattgtttacattccaggagacttgtagctcagc

SEQ ID NO: 116206 - DNA, 80 bp, synthetic construct
  misc_feature 1..80: note = Artificially Synthesized Probe
  source 1..80: mol_type = other DNA
atgatgtgaaaaactaccagactgttttttgtcttctcacaaagacaagaaaaatcagggcattttgtgagtgccttaag

SEQ ID NO: 116207 - DNA, 80 bp, synthetic construct
  misc_feature 1..80: note = Artificially Synthesized Probe
  source 1..80: mol_type = other DNA
ccttggttttctcacgcataaaatggagagtggattaatcgccaaagattcttctgatctgacattttgaaattgtgaga

SEQ ID NO: 116208 - DNA, 80 bp, synthetic construct; identical to SEQ ID NO: 38185
  misc_feature 1..80: note = Artificially Synthesized Probe
  source 1..80: mol_type = other DNA

SEQ ID NO: 116209 - DNA, 80 bp, synthetic construct
  misc_feature 1..80: note = Artificially Synthesized Probe
  source 1..80: mol_type = other DNA
aatattcattctaaatgagttaacgacttaacttgaaattgggcctaaggagtgagaactacaaaaatacaaaatgcttg

SEQ ID NO: 116210 - DNA, 80 bp, synthetic construct
  misc_feature 1..80: note = Artificially Synthesized Probe
  source 1..80: mol_type = other DNA
gtcatctgtgattgttttatcactctggactgtgcagagccacctgccaccgagatctgcattccgactgcctatgaacg

SEQ ID NO: 116211 - DNA, 80 bp, synthetic construct
  misc_feature 1..80: note = Artificially Synthesized Probe
  source 1..80: mol_type = other DNA
tttttttcctttggcctgggaatttttcccatttttatgaaggggttttaaattgtttcattttgtgtgctgtgcttcaa

SEQ ID NO: 116212 - DNA, 80 bp, synthetic construct; identical to SEQ ID NO: 38186
  misc_feature 1..80: note = Artificially Synthesized Probe
  source 1..80: mol_type = other DNA

SEQ ID NO: 116213 - DNA, 80 bp, synthetic construct
  misc_feature 1..80: note = Artificially Synthesized Probe
  source 1..80: mol_type = other DNA
tctgcctcagaaggagtcccccatgccctgcctgaaatgacttcactggacacagcggggctgcagctaacggggtacag

SEQ ID NO: 116214 - DNA, 80 bp, synthetic construct; identical to SEQ ID NO: 38055
  misc_feature 1..80: note = Artificially Synthesized Probe
  source 1..80: mol_type = other DNA

SEQ ID NO: 116215 - DNA, 80 bp, synthetic construct
  misc_feature 1..80: note = Artificially Synthesized Probe
  source 1..80: mol_type = other DNA
ctgtggtctagaaccacagcaagaagaggaggcatgctggcctgcaccggaagactcactttgtctgccctgcgccagcc

SEQ ID NO: 116216 - DNA, 80 bp, synthetic construct
  misc_feature 1..80: note = Artificially Synthesized Probe
  source 1..80: mol_type = other DNA
gtgatttacctgaaaatcttcacaactgatcattatctccttctctttgagacctgactgaaaaaattaggtgtgcacac

SEQ ID NO: 116217 - DNA, 80 bp, synthetic construct; identical to SEQ ID NO: 38187
  misc_feature 1..80: note = Artificially Synthesized Probe
  source 1..80: mol_type = other DNA

SEQ ID NO: 116218 - DNA, 80 bp, synthetic construct
  misc_feature 1..80: note = Artificially Synthesized Probe
  source 1..80: mol_type = other DNA
tgtgaaggttgcataactggggaggtggctggagaaaacctgagcctcgagctgagtaacaatccaagccatgattagca

SEQ ID NO: 116219 - DNA, 80 bp, synthetic construct
  misc_feature 1..80: note = Artificially Synthesized Probe
  source 1..80: mol_type = other DNA
ctaatcaccctctctgcaggatatgctggggatagcccttttgaggaggtgggggtgtatgcgaaagcaacctggggcca

SEQ ID NO: 116220 - DNA, 80 bp, synthetic construct; identical to SEQ ID NO: 38042
  misc_feature 1..80: note = Artificially Synthesized Probe
  source 1..80: mol_type = other DNA

SEQ ID NO: 116221 - DNA, 80 bp, synthetic construct
  misc_feature 1..80: note = Artificially Synthesized Probe
  source 1..80: mol_type = other DNA
tattccttcatgatcactgctacctgtgccctgaagcgcaacagaacctcaacccagaggacagccacttcctcagaacc

SEQ ID NO: 116222 - DNA, 80 bp, synthetic construct; identical to SEQ ID NO: 38188
  misc_feature 1..80: note = Artificially Synthesized Probe
  source 1..80: mol_type = other DNA

SEQ ID NO: 116223 - DNA, 80 bp, synthetic construct
  misc_feature 1..80: note = Artificially Synthesized Probe
  source 1..80: mol_type = other DNA
attacagacattatatagaaaagcaccgtgaaaatccctgtcctgttctgttccgttctaattacgggtgcatgcagccc

SEQ ID NO: 116224 - DNA, 80 bp, synthetic construct
  misc_feature 1..80: note = Artificially Synthesized Probe
  source 1..80: mol_type = other DNA
ttaactcgtgtctgaggggttttctctgcagcttgtcctgctacatttcttggttccctgaccaggaatctaggtgatta

SEQ ID NO: 116225 - DNA, 80 bp, synthetic construct
  misc_feature 1..80: note = Artificially Synthesized Probe
  source 1..80: mol_type = other DNA
cgaggaggatcaacgcagtggctgaacaccgggaaggaactgccacttggagtccagacatctgaaacttggtaagactg

SEQ ID NO: 116226 - DNA, 80 bp, synthetic construct
  misc_feature 1..80: note = Artificially Synthesized Probe
  source 1..80: mol_type = other DNA
ctgtggtctgtggggggtgagtggggtgagtgtggggggtgagtggggtgtctgtggggggtgtggggtgagtgtgtggg

SEQ ID NO: 116227 - DNA, 80 bp, synthetic construct; identical to SEQ ID NO: 38189
  misc_feature 1..80: note = Artificially Synthesized Probe
  source 1..80: mol_type = other DNA

SEQ ID NO: 116228 - DNA, 80 bp, synthetic construct
  misc_feature 1..80: note = Artificially Synthesized Probe
  source 1..80: mol_type = other DNA
gccagcattagaggtaggttggccatcagagtgaagcctggacaggtcccttgtttcaaaggtatggcacaaggtaacct

SEQ ID NO: 116229 - DNA, 80 bp, synthetic construct
  misc_feature 1..80: note = Artificially Synthesized Probe
  source 1..80: mol_type = other DNA
gacaaagagggagtcagagagagagagagaaagagacagaggcaaaaggaaagtcaaagagaaagagacagaaaatcaag

SEQ ID NO: 116230 - DNA, 80 bp, synthetic construct
  misc_feature 1..80: note = Artificially Synthesized Probe
  source 1..80: mol_type = other DNA
ggtgtctgtggggggtgagtggggggtgagtggggtgtgtgttggggggtgtgtgagtggtgtgaatgggatgtgtgtgt

SEQ ID NO: 116231 - DNA, 80 bp, synthetic construct
  misc_feature 1..80: note = Artificially Synthesized Probe
  source 1..80: mol_type = other DNA
gtgtgagttgggggtgtgtgagtggggtgtgttgggtgtgtgtgtgttgggtgtgtgcgtgttgggtgtgtgtgagtggt

SEQ ID NO: 116232 - DNA, 80 bp, synthetic construct; identical to SEQ ID NO: 38056
  misc_feature 1..80: note = Artificially Synthesized Probe
  source 1..80: mol_type = other DNA

SEQ ID NO: 116233 - DNA, 80 bp, synthetic construct
  misc_feature 1..80: note = Artificially Synthesized Probe
  source 1..80: mol_type = other DNA
tgaataatgaggaatctagaaagccacacaaatgctcgagcaggacgcactcgaaaaagacctgagaagacctcagtgca

SEQ ID NO: 116234 - DNA, 80 bp, synthetic construct
  misc_feature 1..80: note = Artificially Synthesized Probe
  source 1..80: mol_type = other DNA
actgcaacctttgcctcccaggttcaagtgattgtcctacttcagcctccggagtagctgggactacaggcacccgccac

SEQ ID NO: 116235 - DNA, 80 bp, synthetic construct
  misc_feature 1..80: note = Artificially Synthesized Probe
  source 1..80: mol_type = other DNA
tttttcttttccatgttttggctgtaggtgtttaaggaaatctctatcaaactactaattggcaacaagccaaaggaaca

SEQ ID NO: 116236 - DNA, 80 bp, synthetic construct
  misc_feature 1..80: note = Artificially Synthesized Probe
  source 1..80: mol_type = other DNA
cagcctcccagctagctgggattacaggcatgcaccaccatgtctggctaattttgtatttttagtagagacggggtttc

SEQ ID NO: 116237 - DNA, 80 bp, synthetic construct; identical to SEQ ID NO: 38057
  misc_feature 1..80: note = Artificially Synthesized Probe
  source 1..80: mol_type = other DNA

SEQ ID NO: 116238 - DNA, 80 bp, synthetic construct
  misc_feature 1..80: note = Artificially Synthesized Probe
  source 1..80: mol_type = other DNA
gagaggggaggtgtgcagggttgtcttgttgtgcagataatcactcaggtgatctcagagctgctctcagaggaactggc

SEQ ID NO: 116239 - DNA, 80 bp, synthetic construct
  misc_feature 1..80: note = Artificially Synthesized Probe
  source 1..80: mol_type = other DNA
gaaatgttaaacgctgcagccgttaaggaagcagcaaggcagttgatccaaaagttacgcataaaattatcctaggccgg

SEQ ID NO: 116240 - DNA, 80 bp, synthetic construct
  misc_feature 1..80: note = Artificially Synthesized Probe
  source 1..80: mol_type = other DNA
aaaaaaaaaaattagctgggcgtggtggcgtatgcctgtaatcccagctacttgggcggctgaggcaggagaatcacttg

SEQ ID NO: 116241 - DNA, 80 bp, synthetic construct; identical to SEQ ID NO: 38058
  misc_feature 1..80: note = Artificially Synthesized Probe
  source 1..80: mol_type = other DNA

SEQ ID NO: 116242 - DNA, 80 bp, synthetic construct
  misc_feature 1..80: note = Artificially Synthesized Probe
  source 1..80: mol_type = other DNA
cacttgaggtcaggagttcaagaccaacctgaccaacatggggaaaccccgtctctactaaaaatacaaaaagtagccgg

SEQ ID NO: 116243 - DNA, 80 bp, synthetic construct
  misc_feature 1..80: note = Artificially Synthesized Probe
  source 1..80: mol_type = other DNA
agcctaaatatccacatatccacacatgagagaagttcagagtgaatacacaggtgaatgccgatgggttgtctctggtg

SEQ ID NO: 116244 - DNA, 80 bp, synthetic construct
  misc_feature 1..80: note = Artificially Synthesized Probe
  source 1..80: mol_type = other DNA
agctgagacagcgagctgcgtggccagcctcaccctgcagcagagtcaggtggtcagtcctcacctgcagtcatggggtg

SEQ ID NO: 116245 - DNA, 80 bp, synthetic construct; identical to SEQ ID NO: 38059
  misc_feature 1..80: note = Artificially Synthesized Probe
  source 1..80: mol_type = other DNA

SEQ ID NO: 116246 - DNA, 80 bp, synthetic construct
  misc_feature 1..80: note = Artificially Synthesized Probe
  source 1..80: mol_type = other DNA
tgcccgcctccgcctctaggggcttgggaggcctggcctggctggccctggggtgcccgggcctgcctataccttctggg

SEQ ID NO: 116247 - DNA, 80 bp, synthetic construct
  misc_feature 1..80: note = Artificially Synthesized Probe
  source 1..80: mol_type = other DNA
tgtcctgcacgtctgcaggagctgcttcttcgtcttcccacaccctcctgcccatgggccctggaggcagacggtgctgg

SEQ ID NO: 116248 - DNA, 80 bp, synthetic construct
  misc_feature 1..80: note = Artificially Synthesized Probe
  source 1..80: mol_type = other DNA
aggttttggtagatgctgctgtagacctcatatccgatgaatgggaagctgctaatgccatacccagcaagagaaggaag

SEQ ID NO: 116249 - DNA, 80 bp, synthetic construct
  misc_feature 1..80: note = Artificially Synthesized Probe
  source 1..80: mol_type = other DNA
gtatgtggttgctctgaatagccatctcaaaattgaccacagaatctgttttggggtggcatagattagtctcccacaca

SEQ ID NO: 116250 - DNA, 80 bp, synthetic construct
  misc_feature 1..80: note = Artificially Synthesized Probe
  source 1..80: mol_type = other DNA
ggccacctcgcacttccggcccttgagtccctgccagtcgaggaaggctgcccaggatgggcgttttcgggtcacccttg

SEQ ID NO: 116251 - DNA, 80 bp, synthetic construct; identical to SEQ ID NO: 38060
  misc_feature 1..80: note = Artificially Synthesized Probe
  source 1..80: mol_type = other DNA

SEQ ID NO: 116252 - DNA, 80 bp, synthetic construct
  misc_feature 1..80: note = Artificially Synthesized Probe
  source 1..80: mol_type = other DNA
acgtgggggtgtagtggaagccctgctcagtttagtctctggtttttggaagttgaaatcctgactttttctctttttct

SEQ ID NO: 116253 - DNA, 80 bp, synthetic construct
  misc_feature 1..80: note = Artificially Synthesized Probe
  source 1..80: mol_type = other DNA
accacgcccggctactttttttgtgtatttttagtagagacggggtttcaccatgttggccaggctggtctcgaactcct

SEQ ID NO: 116254 - DNA, 80 bp, synthetic construct; identical to SEQ ID NO: 38061
  misc_feature 1..80: note = Artificially Synthesized Probe
  source 1..80: mol_type = other DNA

SEQ ID NO: 116255 - DNA, 80 bp, synthetic construct
  misc_feature 1..80: note = Artificially Synthesized Probe
  source 1..80: mol_type = other DNA
tgggctggggcttggccgtgagcccactcctgcagctcctgggaaatgcaggcagcgtccacacggggctggacttagcc

SEQ ID NO: 116256 - DNA, 80 bp, synthetic construct
  misc_feature 1..80: note = Artificially Synthesized Probe
  source 1..80: mol_type = other DNA
agagaacatggaaggtttagcactgcagagatgtctgctgtcacccagaatgacacgggaacttaaccaactaattaatg

SEQ ID NO: 116257 - DNA, 80 bp, synthetic construct
  misc_feature 1..80: note = Artificially Synthesized Probe
  source 1..80: mol_type = other DNA
ccgagtagctgggactacaggcgtgcaccaccacacccaattaatttttaaaatttttggtagagatggggtcttgctgt

SEQ ID NO: 116258 - DNA, 80 bp, synthetic construct; identical to SEQ ID NO: 38062
  misc_feature 1..80: note = Artificially Synthesized Probe
  source 1..80: mol_type = other DNA

SEQ ID NO: 116259 - DNA, 80 bp, synthetic construct
  misc_feature 1..80: note = Artificially Synthesized Probe
  source 1..80: mol_type = other DNA
tcaccccagtcacacacaccccccgccacacataccccactcacacataccccactcacaccactcacacacacccccac

SEQ ID NO: 116260 - DNA, 80 bp, synthetic construct
  misc_feature 1..80: note = Artificially Synthesized Probe
  source 1..80: mol_type = other DNA
gccccagtggagttctttggttccaagccagcagaagaaggtggtgggtgggccagtgtgccctgaggcttcttactggg

SEQ ID NO: 116261 - DNA, 80 bp, synthetic construct
  misc_feature 1..80: note = Artificially Synthesized Probe
  source 1..80: mol_type = other DNA
tccacacacacataccccactcacaccactcacacacgcccccacacacacaccccactcacacacacctcaacacacac

SEQ ID NO: 116262 - DNA, 80 bp, synthetic construct
  misc_feature 1..80: note = Artificially Synthesized Probe
  source 1..80: mol_type = other DNA
taccactcacacaccccccaagacaaacgccccactcacaccactcacacactgccaacacacacagccaactcacacca

SEQ ID NO: 116263 - DNA, 80 bp, synthetic construct; identical to SEQ ID NO: 38063
  misc_feature 1..80: note = Artificially Synthesized Probe
  source 1..80: mol_type = other DNA

SEQ ID NO: 116264 - DNA, 80 bp, synthetic construct
  misc_feature 1..80: note = Artificially Synthesized Probe
  source 1..80: mol_type = other DNA
tggctaatttttgtatttttagtagagatggggttttgccatgttggctaggctggtttcaagctcctgacctcaaggaa

SEQ ID NO: 116265 - DNA, 80 bp, synthetic construct
  misc_feature 1..80: note = Artificially Synthesized Probe
  source 1..80: mol_type = other DNA
agatgctgtatgaacagttgctacacggtgcggtgttgctctttgtgttctttgttattgttgtctcgttattttctgtt

SEQ ID NO: 116266 - DNA, 80 bp, synthetic construct
  misc_feature 1..80: note = Artificially Synthesized Probe
  source 1..80: mol_type = other DNA
gagatggagtctcactctgtcgcccaggccggagtgcagtggcacaatctcggctcactgcaagctccgcctcccaggtt

SEQ ID NO: 116267 - DNA, 80 bp, synthetic construct; identical to SEQ ID NO: 38064
  misc_feature 1..80: note = Artificially Synthesized Probe
  source 1..80: mol_type = other DNA

SEQ ID NO: 116268 - DNA, 80 bp, synthetic construct
  misc_feature 1..80: note = Artificially Synthesized Probe
  source 1..80: mol_type = other DNA
ctggctaatttttgtatttttagtagagatggggtttccccatgttggccaggctggtctcgaactcctgacctcaggtg

SEQ ID NO: 116269 - DNA, 80 bp, synthetic construct
  misc_feature 1..80: note = Artificially Synthesized Probe
  source 1..80: mol_type = other DNA
taaaattataaataccgctatggttatgtagttcgagattctgggtcaaagaagactatgaaactgttcaatggaaaagc

SEQ ID NO: 116270 - DNA, 80 bp, synthetic construct
  misc_feature 1..80: note = Artificially Synthesized Probe
  source 1..80: mol_type = other DNA
ggtgtgatgatgtcagatggttggttttgtttctattgaaaagaggttctgggatggcggcttgagggcagtggtcttcc

SEQ ID NO: 116271 - DNA, 80 bp, synthetic construct
  misc_feature 1..80: note = Artificially Synthesized Probe
  source 1..80: mol_type = other DNA
tgctgtttcttcctggctggccactcccctcctgcaaggcaggccctggggaggggtgctggcagctgttcctaaggtct

SEQ ID NO: 116272 - DNA, 80 bp, synthetic construct
  misc_feature 1..80: note = Artificially Synthesized Probe
  source 1..80: mol_type = other DNA
gtgcagagtggcgcgctttgtggatggcagcctccccccattactaggaatctgactgccagcccagtagccctgggctg

SEQ ID NO: 116273 - DNA, 80 bp, synthetic construct; identical to SEQ ID NO: 38065
  misc_feature 1..80: note = Artificially Synthesized Probe
  source 1..80: mol_type = other DNA

SEQ ID NO: 116274 - DNA, 80 bp, synthetic construct
  misc_feature 1..80: note = Artificially Synthesized Probe
  source 1..80: mol_type = other DNA
tactaaaaatatgaaaattacggccgggcacagtagctcacgcctggaatcccagcactttgggaggccgaggcgggtgg

SEQ ID NO: 116275 - DNA, 80 bp, synthetic construct
  misc_feature 1..80: note = Artificially Synthesized Probe
  source 1..80: mol_type = other DNA
gaggttgcaatgggctcagatcatgccattgcactccagcctgggcaacaagagtgaaacttcgtctcaaaaaaaacaaa

SEQ ID NO: 116276 - DNA, 80 bp, synthetic construct; identical to SEQ ID NO: 38066
  misc_feature 1..80: note = Artificially Synthesized Probe
  source 1..80: mol_type = other DNA

SEQ ID NO: 116277 - DNA, 80 bp, synthetic construct
  misc_feature 1..80: note = Artificially Synthesized Probe
  source 1..80: mol_type = other DNA
ctgtgatccacctgctactctgtccttcaggggacaagacagcgcctcctctggtgattgattcctctggagagaggaag

SEQ ID NO: 116278 - DNA, 80 bp, synthetic construct
  misc_feature 1..80: note = Artificially Synthesized Probe
  source 1..80: mol_type = other DNA
accctgttccccggctgcgggaggggtcggggtgggggcagcgggcacgcctgggaccccggcgacatccccggagcgca

SEQ ID NO: 116279 - DNA, 80 bp, synthetic construct
  misc_feature 1..80: note = Artificially Synthesized Probe
  source 1..80: mol_type = other DNA
taacagggagagccaagggaccattccccaggatgggccatccagcgctgtcaccaggtggccacaaacacctgctgtgt

SEQ ID NO: 116280 - DNA, 80 bp, synthetic construct
  misc_feature 1..80: note = Artificially Synthesized Probe
  source 1..80: mol_type = other DNA
cccacggtggctcagtgacccacctggggttgcccagccattgtagcatggggtgagctggatgggaactcaggcaggcc

SEQ ID NO: 116281 - DNA, 80 bp, synthetic construct; identical to SEQ ID NO: 38067
  misc_feature 1..80: note = Artificially Synthesized Probe
  source 1..80: mol_type = other DNA

SEQ ID NO: 116282 - DNA, 80 bp, synthetic construct
  misc_feature 1..80: note = Artificially Synthesized Probe
  source 1..80: mol_type = other DNA
atcggctgaccgcagcctctgcctcccgggttcaagcaattctcctgcttcagcctcccaagtagctgggattgcaggtg

SEQ ID NO: 116283 - DNA, 80 bp, synthetic construct
  misc_feature 1..80: note = Artificially Synthesized Probe
  source 1..80: mol_type = other DNA
attgttttatttttgagatggagtctcactctgtcgcccaggctggagtgcagtggccagatctcagtgaggccctgttt

SEQ ID NO: 116284 - DNA, 80 bp, synthetic construct; identical to SEQ ID NO: 38043
  misc_feature 1..80: note = Artificially Synthesized Probe
  source 1..80: mol_type = other DNA

SEQ ID NO: 116285 - DNA, 80 bp, synthetic construct
  misc_feature 1..80: note = Artificially Synthesized Probe
  source 1..80: mol_type = other DNA
tggacgcaggccgagcgggaggctggagccaagctgtggcctggggagatgttatgggtcggagggtcggggggtggggg

SEQ ID NO: 116286 - DNA, 80 bp, synthetic construct
  misc_feature 1..80: note = Artificially Synthesized Probe
  source 1..80: mol_type = other DNA
agccctgtccagctgcggcctcgtcatgccctgggtgggtgggaacgcagcctcctccttgggccacacaggggccgacc

SEQ ID NO: 116287 - DNA, 80 bp, synthetic construct; identical to SEQ ID NO: 38068
  misc_feature 1..80: note = Artificially Synthesized Probe
  source 1..80: mol_type = other DNA

SEQ ID NO: 116288 - DNA, 80 bp, synthetic construct
  misc_feature 1..80: note = Artificially Synthesized Probe
  source 1..80: mol_type = other DNA
ctgtgcctgctgagggtgcggtgggagctgctactcattttttagtctcatccttctcatttcaaattttatgtacgaaa

SEQ ID NO: 116289 - DNA, 80 bp, synthetic construct
  misc_feature 1..80: note = Artificially Synthesized Probe
  source 1..80: mol_type = other DNA
tgggagactctgcctctacagagcattttttaaaaccagctgggaatggtggttcgcgcctgtaatcccaggaccttggg

SEQ ID NO: 116290 - DNA, 80 bp, synthetic construct
  misc_feature 1..80: note = Artificially Synthesized Probe
  source 1..80: mol_type = other DNA
cacttgagcccaggaggtcaaggctacagtgagctgggtttgcaccctgcactccatcctgggcgacagagggagacctt

SEQ ID NO: 116291 - DNA, 80 bp, synthetic construct; identical to SEQ ID NO: 38069
  misc_feature 1..80: note = Artificially Synthesized Probe
  source 1..80: mol_type = other DNA

SEQ ID NO: 116292 - DNA, 80 bp, synthetic construct
  misc_feature 1..80: note = Artificially Synthesized Probe
  source 1..80: mol_type = other DNA
ccagcccctgtcacctgactttgctttcaaacccgtggcctcaggacacagccctgccccacagccaagcccagcagagt

SEQ ID NO: 116293 - DNA, 80 bp, synthetic construct
  misc_feature 1..80: note = Artificially Synthesized Probe
  source 1..80: mol_type = other DNA
aattccaggaccacacggaaggggaggaccaggacgcttccatcccctctgggggcagaggcctgtcccaggaggggacc

SEQ ID NO: 116294 - DNA, 80 bp, synthetic construct
  misc_feature 1..80: note = Artificially Synthesized Probe
  source 1..80: mol_type = other DNA
gagagatggcctgggagtggcactgagccctcggcacctgggctctgctgcaaggtgctggcgttgcttccctgccgggg

SEQ ID NO: 116295 - DNA, 80 bp, synthetic construct
  misc_feature 1..80: note = Artificially Synthesized Probe
  source 1..80: mol_type = other DNA
tatagcaggctgccagcgactcctgctcttgcttctggatctgcagggcagtcccagcaggacccatggagtgtccttcg

SEQ ID NO: 116296 - DNA, 80 bp, synthetic construct; identical to SEQ ID NO: 38070
  misc_feature 1..80: note = Artificially Synthesized Probe
  source 1..80: mol_type = other DNA

SEQ ID NO: 116297 - DNA, 80 bp, synthetic construct
  misc_feature 1..80: note = Artificially Synthesized Probe
  source 1..80: mol_type = other DNA
ttcatttaattattcagcaaatatttaagtgctggggatatagccatgattcagacaaagctctggccttcggggtgctc

SEQ ID NO: 116298 - DNA, 80 bp, synthetic construct
  misc_feature 1..80: note = Artificially Synthesized Probe
  source 1..80: mol_type = other DNA
ggcgaggcctctcttaggaggtggtgagggatggtccccggaggtgtctgggaaggtcatgtgcagaggccctggggcag

SEQ ID NO: 116299 - DNA, 80 bp, synthetic construct; identical to SEQ ID NO: 38071
  misc_feature 1..80: note = Artificially Synthesized Probe
  source 1..80: mol_type = other DNA

SEQ ID NO: 116300 - DNA, 80 bp, synthetic construct
  misc_feature 1..80: note = Artificially Synthesized Probe
  source 1..80: mol_type = other DNA
ggagaattgcttgagcctgggaggcggaggttgcagtgagctgagatcgcagtactgcactccagccttggtaataagag

SEQ ID NO: 116301 - DNA, 80 bp, synthetic construct
  misc_feature 1..80: note = Artificially Synthesized Probe
  source 1..80: mol_type = other DNA
gacctcaagaagccagaggggaagaacagaagtgcagctgctgtgaaaaacgagaaggagcaaaaaaaccaggaagcaga

SEQ ID NO: 116302 - DNA, 80 bp, synthetic construct
  misc_feature 1..80: note = Artificially Synthesized Probe
  source 1..80: mol_type = other DNA
gaccacttaggaggtggaggggggtgggcacctgtgccagtttcttgtttcctaatagcccctggggtcctggagccagc

SEQ ID NO: 116303 - DNA, 80 bp, synthetic construct; identical to SEQ ID NO: 38072
  misc_feature 1..80: note = Artificially Synthesized Probe
  source 1..80: mol_type = other DNA

SEQ ID NO: 116304 - DNA, 80 bp, synthetic construct
  misc_feature 1..80: note = Artificially Synthesized Probe
  source 1..80: mol_type = other DNA
gtgtgcgagtgtgcgcgtgtgtgcatgtgtgtgtgcgagtgcatgtgtgtgtgcacgtgtgtgtgcgcacgtgtgtgtgt

SEQ ID NO: 116305 - DNA, 80 bp, synthetic construct
  misc_feature 1..80: note = Artificially Synthesized Probe
  source 1..80: mol_type = other DNA
tctctcttcatttcccattcaatcctgacctccataaagtcttcatcagaggaggagaagaatttggggagtcaaaatgg

SEQ ID NO: 116306 - DNA, 80 bp, synthetic construct
  misc_feature 1..80: note = Artificially Synthesized Probe
  source 1..80: mol_type = other DNA
tggagtgtggtggcaccatctcagctcactgcagcctccgcctcctgggttcaagcgattctcatgcctcagctcccaag

SEQ ID NO: 116307 - DNA, 80 bp, synthetic construct
  misc_feature 1..80: note = Artificially Synthesized Probe
  source 1..80: mol_type = other DNA
aaccctgggcagcaggcagctcaggtggggccgaggtcctctgtggctactgaggctctgtggctctgaatagccatctc

SEQ ID NO: 116308 - DNA, 80 bp, synthetic construct; identical to SEQ ID NO: 38073
  misc_feature 1..80: note = Artificially Synthesized Probe
  source 1..80: mol_type = other DNA

SEQ ID NO: 116309 - DNA, 80 bp, synthetic construct
  misc_feature 1..80: note = Artificially Synthesized Probe
  source 1..80: mol_type = other DNA
ctgttgcctaggctggagtgcaatcatgactcactgcagcctcaatctcctgggccatcatgcccagctttgtttatctg

SEQ ID NO: 116310 - DNA, 80 bp, synthetic construct
  misc_feature 1..80: note = Artificially Synthesized Probe
  source 1..80: mol_type = other DNA
tatagctttgcactccatgctacgtttgagaataactaaaatttccggggtaggaattttggatagccaaccgtatcctg

SEQ ID NO: 116311 - DNA, 80 bp, synthetic construct
  misc_feature 1..80: note = Artificially Synthesized Probe
  source 1..80: mol_type = other DNA
gagtatgagttcatttacaagcaccagcagaagaagggcgagtacgtcaaccgctgtctgttcataaaatcttcacttct

SEQ ID NO: 116312 - DNA, 80 bp, synthetic construct; identical to SEQ ID NO: 38074
  misc_feature 1..80: note = Artificially Synthesized Probe
  source 1..80: mol_type = other DNA

SEQ ID NO: 116313 - DNA, 80 bp, synthetic construct
  misc_feature 1..80: note = Artificially Synthesized Probe
  source 1..80: mol_type = other DNA
tgggattacaggagcctgtcaccacccccagctaacttttgtatttttagagagacagggtttcaccatgttggaccttg

SEQ ID NO: 116314 - DNA, 80 bp, synthetic construct
  misc_feature 1..80: note = Artificially Synthesized Probe
  source 1..80: mol_type = other DNA
gctgggtcagggacaagtgcagtgaccaggaggccactgggacttgtcccttctctagagattttcagatggttgactgg

SEQ ID NO: 116315 - DNA, 80 bp, synthetic construct
  misc_feature 1..80: note = Artificially Synthesized Probe
  source 1..80: mol_type = other DNA
tctgcaaacttgacagacagagatcaagacttgactgtgttgatcacctggactcccagtgccgcctcctcacctggggg

SEQ ID NO: 116316 - DNA, 80 bp, synthetic construct; identical to SEQ ID NO: 38075
  misc_feature 1..80: note = Artificially Synthesized Probe
  source 1..80: mol_type = other DNA

SEQ ID NO: 116317 - DNA, 80 bp, synthetic construct
  misc_feature 1..80: note = Artificially Synthesized Probe
  source 1..80: mol_type = other DNA
ccccccaagtagctgggcctacaggcgtgtgtcaccatgtctggcaaatttttcatatattttttttggagagactggtc

SEQ ID NO: 116318 - DNA, 80 bp, synthetic construct; identical to SEQ ID NO: 38044
  misc_feature 1..80: note = Artificially Synthesized Probe
  source 1..80: mol_type = other DNA

SEQ ID NO: 116319 - DNA, 80 bp, synthetic construct
  misc_feature 1..80: note = Artificially Synthesized Probe
  source 1..80: mol_type = other DNA
agctagagagtgtactctgagaacataagctttgaaagaataggcattagtccggtaattccatatataaatacatttaa

SEQ ID NO: 116320 - DNA, 80 bp, synthetic construct
  misc_feature 1..80: note = Artificially Synthesized Probe
  source 1..80: mol_type = other DNA
atcaagaccatcctggctaacacggtgaaaccccgtctctactaaaaatacaaaaaaattggccgggcgtcttggcagcg

SEQ ID NO: 116321 - DNA, 80 bp, synthetic construct
  misc_feature 1..80: note = Artificially Synthesized Probe
  source 1..80: mol_type = other DNA
actcagtctaaaaaaaaaaaaacatgtgataggggatttgacctggaggtcggcagaagcttccacaaggaggtgatgac

SEQ ID NO: 116322 - DNA, 80 bp, synthetic construct; identical to SEQ ID NO: 38076
  misc_feature 1..80: note = Artificially Synthesized Probe
  source 1..80: mol_type = other DNA

SEQ ID NO: 116323 - DNA, 80 bp, synthetic construct
  misc_feature 1..80: note = Artificially Synthesized Probe
  source 1..80: mol_type = other DNA
gaaaccaactcagtgattgaccaggacagtgctcacttgctagtggggggatgcggtttctgtatgacacattccacctc

SEQ ID NO: 116324 - DNA, 80 bp, synthetic construct
  misc_feature 1..80: note = Artificially Synthesized Probe
  source 1..80: mol_type = other DNA
gacgtctaggatgtctgtttgcacggggctggcctcagatgagaagtcagttggaggagtctggctgtcgtcagtgtgtg

SEQ ID NO: 116325 - DNA, 80 bp, synthetic construct; identical to SEQ ID NO: 38077
  misc_feature 1..80: note = Artificially Synthesized Probe
  source 1..80: mol_type = other DNA

SEQ ID NO: 116326 - DNA, 80 bp, synthetic construct
  misc_feature 1..80: note = Artificially Synthesized Probe
  source 1..80: mol_type = other DNA
gcaacagcctatgatttatgaaggacaggcacagctgtggaccgatttgcagtacagggagaaagaggtatcaggcttgc

SEQ ID NO: 116327 - DNA, 80 bp, synthetic construct
  misc_feature 1..80: note = Artificially Synthesized Probe
  source 1..80: mol_type = other DNA
cctccttttactggttgtaatctcagccccaccccagcaccagtcctgagtcctcccctggccttggagggagagtggaa

SEQ ID NO: 116328 - DNA, 80 bp, synthetic construct
  misc_feature 1..80: note = Artificially Synthesized Probe
  source 1..80: mol_type = other DNA
ctgggttagtttttgaggggccgtgagggggccccaggacctgtccaggcacctccctggctcgggaggccagtggagag

SEQ ID NO: 116329 - DNA, 80 bp, synthetic construct
  misc_feature 1..80: note = Artificially Synthesized Probe
  source 1..80: mol_type = other DNA
ctcctcctgtggctctcacaggtgtggtggtggggcacggatggggtctgctgccctagctgtggtgctggggcagctct

SEQ ID NO: 116330 - DNA, 80 bp, synthetic construct
  misc_feature 1..80: note = Artificially Synthesized Probe
  source 1..80: mol_type = other DNA
aactgaaaacaggcctgattgtcctttttgtagtggaaaaaattgagcttttattagaaggcagcctggactggttgtgt

SEQ ID NO: 116331 - DNA, 80 bp, synthetic construct; identical to SEQ ID NO: 38078
  misc_feature 1..80: note = Artificially Synthesized Probe
  source 1..80: mol_type = other DNA

SEQ ID NO: 116332 - DNA, 80 bp, synthetic construct
  misc_feature 1..80: note = Artificially Synthesized Probe
  source 1..80: mol_type = other DNA
agcctccttagtagcagggactacaggtgcacactaccacacatggctaatttttgtatttttagtagagaagggttttc

SEQ ID NO: 116333 - DNA, 80 bp, synthetic construct
  misc_feature 1..80: note = Artificially Synthesized Probe
  source 1..80: mol_type = other DNA
tgtttaggaggttgtggcgtgacgccagcctgaactcatcccctcaaggacatctgcagaagcagcgtgaatgttctccc

SEQ ID NO: 116334 - DNA, 80 bp, synthetic construct; identical to SEQ ID NO: 38079
  misc_feature 1..80: note = Artificially Synthesized Probe
  source 1..80: mol_type = other DNA

SEQ ID NO: 116335 - DNA, 80 bp, synthetic construct
  misc_feature 1..80: note = Artificially Synthesized Probe
  source 1..80: mol_type = other DNA
tttattgtagagacggggtttcaccatgttgccacggtggtcttgagctcctgaccttgtgatccgcctgcctcgacctc

SEQ ID NO: 116336 - DNA, 80 bp, synthetic construct
  misc_feature 1..80: note = Artificially Synthesized Probe
  source 1..80: mol_type = other DNA
tatcttttgactgtaggagattcaccatgtattgtttataggctcaacccttacgtttaaaaagttgttttggggccggg

SEQ ID NO: 116337 - DNA, 80 bp, synthetic construct
  misc_feature 1..80: note = Artificially Synthesized Probe
  source 1..80: mol_type = other DNA
ctaaaactagcagcccccagaccttcagcctttctgtgtccaaagcccagccccacctccactggtgagggcacctcatt

SEQ ID NO: 116338 - DNA, 80 bp, synthetic construct
  misc_feature 1..80: note = Artificially Synthesized Probe
  source 1..80: mol_type = other DNA
ctactcaggaggctgaggcaggagaatcacgtgaacccaggaggcggaggttgcagtgagccgagattgtgccactgcac

SEQ ID NO: 116339 - DNA, 80 bp, synthetic construct
  misc_feature 1..80: note = Artificially Synthesized Probe
  source 1..80: mol_type = other DNA
aaaataaaaaatagagccggccaacacagtgaaaccctgtctctacaaaaaatacaaaaaactagccaggcatggtggcg

SEQ ID NO: 116340 - DNA, 80 bp, synthetic construct; identical to SEQ ID NO: 38080
  misc_feature 1..80: note = Artificially Synthesized Probe
  source 1..80: mol_type = other DNA

SEQ ID NO: 116341 - DNA, 80 bp, synthetic construct
  misc_feature 1..80: note = Artificially Synthesized Probe
  source 1..80: mol_type = other DNA
agccaggacccctgcttctgagatccctcccctgtcctgggagtttgttgtggggattcggtgagggcctgcaaaggagc

SEQ ID NO: 116342 - DNA, 80 bp, synthetic construct
  misc_feature 1..80: note = Artificially Synthesized Probe
  source 1..80: mol_type = other DNA
tgcgggatctttattcccttccagctggcggctgtacctggtgaacctgtgccaaagatgcatggacacaaggacgtaca

SEQ ID NO: 116343 - DNA, 80 bp, synthetic construct; identical to SEQ ID NO: 38081
  misc_feature 1..80: note = Artificially Synthesized Probe
  source 1..80: mol_type = other DNA

SEQ ID NO: 116344 - DNA, 80 bp, synthetic construct
  misc_feature 1..80: note = Artificially Synthesized Probe
  source 1..80: mol_type = other DNA
caacatggtgaaaacccgtctgtacgaaaaataccaaaaaaaaaaaaaaaaaattagccaggtgtggtggcatgtgcttg

SEQ ID NO: 116345 - DNA, 80 bp, synthetic construct
  misc_feature 1..80: note = Artificially Synthesized Probe
  source 1..80: mol_type = other DNA
acttgtaacctcagaggcagccgttgttagcacggtggcatacctatttgtggttttgtccaaatatggattcgtgggtg

SEQ ID NO: 116346 - DNA, 80 bp, synthetic construct
  misc_feature 1..80: note = Artificially Synthesized Probe
  source 1..80: mol_type = other DNA
agccagttctctgttacaggacatttggttggttgtgcagtttcgttttttcagcgtgctttcataagcatccttagctt

SEQ ID NO: 116347 - DNA, 80 bp, synthetic construct
  misc_feature 1..80: note = Artificially Synthesized Probe
  source 1..80: mol_type = other DNA
acctctcctttatcacaagaaaatattaccagagaaagtttatttatttatttatttatttatttatttatttttaactt

SEQ ID NO: 116348 - DNA, 80 bp, synthetic construct
  misc_feature 1..80: note = Artificially Synthesized Probe
  source 1..80: mol_type = other DNA
gatccgcccctgcccccgctgtaactcaggacaagcaggagcccttacggtggccacgaggtcctacatagacggctgcc

SEQ ID NO: 116349 - DNA, 80 bp, synthetic construct; identical to SEQ ID NO: 38082
  misc_feature 1..80: note = Artificially Synthesized Probe
  source 1..80: mol_type = other DNA

SEQ ID NO: 116350 - DNA, 80 bp, synthetic construct
  misc_feature 1..80: note = Artificially Synthesized Probe
  source 1..80: mol_type = other DNA
gtttgattccatgtctttgctattgtgaattgtgcttcaatgaacatacatgggcatgtttctttataatagaacgattt

SEQ ID NO: 116351 - DNA, 80 bp, synthetic construct
  misc_feature 1..80: note = Artificially Synthesized Probe
  source 1..80: mol_type = other DNA
tttaccttttaatagcagccattctgactggtgttaagatggtatctcactgttttttttttttaagagacagagtctgg

SEQ ID NO: 116352 - DNA, 80 bp, synthetic construct
  misc_feature 1..80: note = Artificially Synthesized Probe
  source 1..80: mol_type = other DNA
tgttcttcaactcctgacctcaagtgatccacctgcctcggcctcccaaagttctaggattgcaggcatgagccaccacg

SEQ ID NO: 116353 - DNA, 80 bp, synthetic construct
  misc_feature 1..80: note = Artificially Synthesized Probe
  source 1..80: mol_type = other DNA
gcaccccaccatgcctggctaatttttgtatttttagtagagatggggtttcaccatgttggccaggctggtctcaaacc

SEQ ID NO: 116354 - DNA, 80 bp, synthetic construct; identical to SEQ ID NO: 38083
  misc_feature 1..80: note = Artificially Synthesized Probe
  source 1..80: mol_type = other DNA

SEQ ID NO: 116355 - DNA, 80 bp, synthetic construct
  misc_feature 1..80: note = Artificially Synthesized Probe
  source 1..80: mol_type = other DNA
gtgattgcttttggtatttttgtcgtgaaatctttgcccattcctatgtctagaatggtattgcctaggtctgggcaaag

SEQ ID NO: 116356 - DNA, 80 bp, synthetic construct
  misc_feature 1..80: note = Artificially Synthesized Probe
  source 1..80: mol_type = other DNA
cacgttggatagggggatttaaggaactcaaacaagtgaacagaaaaactcagatctaaaaatggacaaatgagttgagt

SEQ ID NO: 116357 - DNA, 80 bp, synthetic construct
  misc_feature 1..80: note = Artificially Synthesized Probe
  source 1..80: mol_type = other DNA
tgtgggaaagagaaactctcatacagtgtaggaatgtaaattagtactgccactatggaggacagtataaaggttcctga

SEQ ID NO: 116358 - DNA, 80 bp, synthetic construct; identical to SEQ ID NO: 38084
  misc_feature 1..80: note = Artificially Synthesized Probe
  source 1..80: mol_type = other DNA

SEQ ID NO: 116359 - DNA, 80 bp, synthetic construct; identical to SEQ ID NO: 38045
  misc_feature 1..80: note = Artificially Synthesized Probe
  source 1..80: mol_type = other DNA

SEQ ID NO: 116360 - DNA, 80 bp, synthetic construct
  misc_feature 1..80: note = Artificially Synthesized Probe
  source 1..80: mol_type = other DNA
agagagtagaatagtagttacgagaggcgaggaaggatggggagagggctagccaaaggttggctagtggatacaaaagt

SEQ ID NO: 116361 - DNA, 80 bp, synthetic construct
  misc_feature 1..80: note = Artificially Synthesized Probe
  source 1..80: mol_type = other DNA
tgtacacattatacactgtatgcatatatattgtatccatatatttgtacagattacagactgtatactttgtacatagt

SEQ ID NO: 116362 - DNA, 80 bp, synthetic construct
  misc_feature 1..80: note = Artificially Synthesized Probe
  source 1..80: mol_type = other DNA
tgggcttggtggctcatgcctataatcccagtactttgggaggcccaggcaggaggattgtttgaggccaggagttcaag

SEQ ID NO: 116363 - DNA, 80 bp, synthetic construct; identical to SEQ ID NO: 38085
  misc_feature 1..80: note = Artificially Synthesized Probe
  source 1..80: mol_type = other DNA

SEQ ID NO: 116364 - DNA, 80 bp, synthetic construct
  misc_feature 1..80: note = Artificially Synthesized Probe
  source 1..80: mol_type = other DNA
gtgctagaatgtattcattcattcactggatgaatacttgaagagcaccttccttgtgccaggaagtactactcaaggca

SEQ ID NO: 116365 - DNA, 80 bp, synthetic construct
  misc_feature 1..80: note = Artificially Synthesized Probe
  source 1..80: mol_type = other DNA
ctgctaaggtctgaaggtagggtaggagaacagaggtaatgactgcagcactctgggccttgcagtgagaacaagacagt

SEQ ID NO: 116366 - DNA, 80 bp, synthetic construct; identical to SEQ ID NO: 38086
  misc_feature 1..80: note = Artificially Synthesized Probe
  source 1..80: mol_type = other DNA

SEQ ID NO: 116367 - DNA, 80 bp, synthetic construct
  misc_feature 1..80: note = Artificially Synthesized Probe
  source 1..80: mol_type = other DNA
atttttgtatttttagtggagatgggttttgccatgttggccaggctggtcttgaactcctggcctcaagtgatctgccc

SEQ ID NO: 116368 - DNA, 80 bp, synthetic construct
  misc_feature 1..80: note = Artificially Synthesized Probe
  source 1..80: mol_type = other DNA
gagaaaacagtcaatatagtcagacccatggatggtccatatttacctagaaaggctagatatagtagaaatatagagta

SEQ ID NO: 116369 - DNA, 80 bp, synthetic construct
  misc_feature 1..80: note = Artificially Synthesized Probe
  source 1..80: mol_type = other DNA
gagccttgctttatttcttttccattgtcaacattttgggtctccagtactgtgttccagaatcagcattatttaagggc

SEQ ID NO: 116370 - DNA, 80 bp, synthetic construct
  misc_feature 1..80: note = Artificially Synthesized Probe
  source 1..80: mol_type = other DNA
agtgaaaccccatctctactaaaaatacaaaaaatgagccgggcgtggtggcaggcgcctgtagtcacagctactgggga

SEQ ID NO: 116371 - DNA, 80 bp, synthetic construct
  misc_feature 1..80: note = Artificially Synthesized Probe
  source 1..80: mol_type = other DNA
ctgtatttttagtagagatggggtttcaccatgttggccaggctggttttgaactcctgacctcaggtgatccacccgcc

SEQ ID NO: 116372 - DNA, 80 bp, synthetic construct; identical to SEQ ID NO: 38087
  misc_feature 1..80: note = Artificially Synthesized Probe
  source 1..80: mol_type = other DNA

SEQ ID NO: 116373 - DNA, 80 bp, synthetic construct
  misc_feature 1..80: note = Artificially Synthesized Probe
  source 1..80: mol_type = other DNA
acctcacgtgagtggaatcacacaggatttgtccttttgtgtctgatttatttcactgagcataatgtcaagattcatcc

SEQ ID NO: 116374 - DNA, 80 bp, synthetic construct
  misc_feature 1..80: note = Artificially Synthesized Probe
  source 1..80: mol_type = other DNA
cagtgaactttttttttttttgagacagttttggtctcattgcctatgctggagtacaatggcacgatcttggctcaccg

SEQ ID NO: 116375 - DNA, 80 bp, synthetic construct; identical to SEQ ID NO: 38088
  misc_feature 1..80: note = Artificially Synthesized Probe
  source 1..80: mol_type = other DNA

SEQ ID NO: 116376 - DNA, 80 bp, synthetic construct
  misc_feature 1..80: note = Artificially Synthesized Probe
  source 1..80: mol_type = other DNA
gctggagtgcagtggcgtgatctcggctcactgcaatctctgccgccggggctcaagtgattcttctgcctcagcctcct

SEQ ID NO: 116377 - DNA, 80 bp, synthetic construct
  misc_feature 1..80: note = Artificially Synthesized Probe
  source 1..80: mol_type = other DNA
gcgtgagccaccacgcccggccattaagttaattctcagtaggttgttctgtacttttcatttgattcactgcatatttt

SEQ ID NO: 116378 - DNA, 80 bp, synthetic construct
  misc_feature 1..80: note = Artificially Synthesized Probe
  source 1..80: mol_type = other DNA
atttaaatcatttttgaattcgggactgtttctgtccctccagcattggtttcctccattttccctcactgatctcactg

SEQ ID NO: 116379 - DNA, 80 bp, synthetic construct; identical to SEQ ID NO: 38089
  misc_feature 1..80: note = Artificially Synthesized Probe
  source 1..80: mol_type = other DNA

SEQ ID NO: 116380 - DNA, 80 bp, synthetic construct
  misc_feature 1..80: note = Artificially Synthesized Probe
  source 1..80: mol_type = other DNA
cgaggcgggcagatcacgaggtcaggagatcgagaccatcctggctaacacagtgaaaccccgtctctactaaaaataca

SEQ ID NO: 116381 - DNA, 80 bp, synthetic construct
  misc_feature 1..80: note = Artificially Synthesized Probe
  source 1..80: mol_type = other DNA
aaaaaaaaaaaagaaggcgtctcatgtgatgcacttcgtagctgccattcttcctttcacattttttggtggagaaaatg

SEQ ID NO: 116382 - DNA, 80 bp, synthetic construct
  misc_feature 1..80: note = Artificially Synthesized Probe
  source 1..80: mol_type = other DNA
ttgtaagaggccaggaatttggtgactctgtacatgatgcttttgaacatttatcgaaaaccaagaaatacagtgatgct

SEQ ID NO: 116383 - DNA, 80 bp, synthetic construct
  misc_feature 1..80: note = Artificially Synthesized Probe
  source 1..80: mol_type = other DNA
tctgttttagcaatgacagtggcattgtgattcaatcttttgtcctgtttttctttttttctctgccttaggatgttcag

SEQ ID NO: 116384 - DNA, 80 bp, synthetic construct
  misc_feature 1..80: note = Artificially Synthesized Probe
  source 1..80: mol_type = other DNA
tctgacccctataattggccgtgacccacatgtgctgttgtaacagcaaggtcataaattaatatgtggcccacttctct

SEQ ID NO: 116385 - DNA, 80 bp, synthetic construct; identical to SEQ ID NO: 38090
  misc_feature 1..80: note = Artificially Synthesized Probe
  source 1..80: mol_type = other DNA

SEQ ID NO: 116386 - DNA, 80 bp, synthetic construct
  misc_feature 1..80: note = Artificially Synthesized Probe
  source 1..80: mol_type = other DNA
atgccaccacgcctggctaatttttgtatttttagtagagatggggtttcaccatgttggccaggctggtcttgaacttc

SEQ ID NO: 116387 - DNA, 80 bp, synthetic construct
  misc_feature 1..80: note = Artificially Synthesized Probe
  source 1..80: mol_type = other DNA
cctatacatttttcccttacttgtaaatagtcatgatactgcatatgcctggtgggcgttctgcatttttttaatactta

SEQ ID NO: 116388 - DNA, 80 bp, synthetic construct; identical to SEQ ID NO: 38091
  misc_feature 1..80: note = Artificially Synthesized Probe
  source 1..80: mol_type = other DNA

SEQ ID NO: 116389 - DNA, 80 bp, synthetic construct
  misc_feature 1..80: note = Artificially Synthesized Probe
  source 1..80: mol_type = other DNA
ctcctaagtgtcctcttaagtctctcctgagtcccctcctgagtccctcccaaggctcctcctgagtccctcctaagcct

SEQ ID NO: 116390 - DNA, 80 bp, synthetic construct
  misc_feature 1..80: note = Artificially Synthesized Probe
  source 1..80: mol_type = other DNA
gccaattccacacgggctgcacgctcttctactatttctttctcttcctccctcctttctgtttctttctgaatattttt

SEQ ID NO: 116391 - DNA, 80 bp, synthetic construct
  misc_feature 1..80: note = Artificially Synthesized Probe
  source 1..80: mol_type = other DNA
gttcaggactgactgagattttccagacgttaacctagataaggtcaaacaaatgccctgttggtagttattttgaagga

SEQ ID NO: 116392 - DNA, 80 bp, synthetic construct
  misc_feature 1..80: note = Artificially Synthesized Probe
  source 1..80: mol_type = other DNA
tcttctctcctgtagccacagggttgaaattgtagaaaatcgagcaccagctctcacgcgattagctgagttaaaatgaa

SEQ ID NO: 116393 - DNA, 80 bp, synthetic construct
  misc_feature 1..80: note = Artificially Synthesized Probe
  source 1..80: mol_type = other DNA
acagactcctaacttttacgagggaggcatcgccccgtctgaaccgcaccgcgcagcgtccttccgacttggcgaagtcg

SEQ ID NO: 116394 - DNA, 80 bp, synthetic construct; identical to SEQ ID NO: 38092
  misc_feature 1..80: note = Artificially Synthesized Probe
  source 1..80: mol_type = other DNA

SEQ ID NO: 116395 - DNA, 80 bp, synthetic construct
  misc_feature 1..80: note = Artificially Synthesized Probe
  source 1..80: mol_type = other DNA
gtggacatttcttgtgcacctgcttgatgctgggttctgttctgggtgtggggggtgtcagtgggccagggtctgccctt

SEQ ID NO: 116396 - DNA, 80 bp, synthetic construct
  misc_feature 1..80: note = Artificially Synthesized Probe
  source 1..80: mol_type = other DNA
ctacggggaccattttcctcccaaaaaatacatgtccaaacatggtctttcccaccttcttgacattgtagcttgaatac

SEQ ID NO: 116397 - DNA, 80 bp, synthetic construct
  misc_feature 1..80: note = Artificially Synthesized Probe
  source 1..80: mol_type = other DNA
acggggtctcactctgtcacccaggctggagtgcagtggcgtgatctcggcttactgcaagctccgcctcctgggttcac

SEQ ID NO: 116398 - DNA, 80 bp, synthetic construct; identical to SEQ ID NO: 38093
  misc_feature 1..80: note = Artificially Synthesized Probe
  source 1..80: mol_type = other DNA

SEQ ID NO: 116399 - DNA, 80 bp, synthetic construct
  misc_feature 1..80: note = Artificially Synthesized Probe
  source 1..80: mol_type = other DNA
tgtttgtttttttgagatggagttttgctcttgttgcccaggctggagtgtagtggcgccatctcagctcactgcaatct

SEQ ID NO: 116400 - DNA, 80 bp, synthetic construct
  misc_feature 1..80: note = Artificially Synthesized Probe
  source 1..80: mol_type = other DNA
cctgccttggcctcccagagtgctgggattgccgatgtgagccactgcacccagcacaattttttttttttttgagacag

SEQ ID NO: 116401 - DNA, 80 bp, synthetic construct
  misc_feature 1..80: note = Artificially Synthesized Probe
  source 1..80: mol_type = other DNA
agacaggatttctacatgttggtcaggctggccttgaactcctgacctcaggtgattcgcctgcctcagcctcccaaagt

SEQ ID NO: 116402 - DNA, 80 bp, synthetic construct; identical to SEQ ID NO: 38094
  misc_feature 1..80: note = Artificially Synthesized Probe
  source 1..80: mol_type = other DNA

SEQ ID NO: 116403 - DNA, 80 bp, synthetic construct
  misc_feature 1..80: note = Artificially Synthesized Probe
  source 1..80: mol_type = other DNA
ttgcaatactaaaattaaacaaagcaaaaatacgtgacgcatgttgaagaaacttttaggtgtctgctgctgtgaaggct

SEQ ID NO: 116404 - DNA, 80 bp, synthetic construct; identical to SEQ ID NO: 38046
  misc_feature 1..80: note = Artificially Synthesized Probe
  source 1..80: mol_type = other DNA

SEQ ID NO: 116405 - DNA, 80 bp, synthetic construct
  misc_feature 1..80: note = Artificially Synthesized Probe
  source 1..80: mol_type = other DNA
agcagtgcctgtttcgttttctgtcggcccccgccccctgcgtgctgtgctctagtcactcctgtgcccagccccctctg

SEQ ID NO: 116406 - DNA, 80 bp, synthetic construct
  misc_feature 1..80: note = Artificially Synthesized Probe
  source 1..80: mol_type = other DNA
ccagcagcagccttgtcctcttgcccagctgcctcgaggcgtgggcctctcggtgcttccagtgagcacctgagcgtatc

SEQ ID NO: 116407 - DNA, 80 bp, synthetic construct
  misc_feature 1..80: note = Artificially Synthesized Probe
  source 1..80: mol_type = other DNA
gccaacatggtgaaaccctgtctctactaaaaaatacaaaaattagccaggtatggtggcatgcacttgtaatcccagct

SEQ ID NO: 116408 - DNA, 80 bp, synthetic construct; identical to SEQ ID NO: 38095
  misc_feature 1..80: note = Artificially Synthesized Probe
  source 1..80: mol_type = other DNA

SEQ ID NO: 116409 - DNA, 80 bp, synthetic construct
  misc_feature 1..80: note = Artificially Synthesized Probe
  source 1..80: mol_type = other DNA
gggacccaggtttacctccgggtcaggagcctggctgtggtctggcatggaggcagggggagggcatgatgggagcacag

SEQ ID NO: 116410 - DNA, 80 bp, synthetic construct
  misc_feature 1..80: note = Artificially Synthesized Probe
  source 1..80: mol_type = other DNA
gtctgcagggcccctctctggggcgtgcttttccccctcagtctcctgggcacagcctggggacctgctcattggcagga

SEQ ID NO: 116411 - DNA, 80 bp, synthetic construct
  misc_feature 1..80: note = Artificially Synthesized Probe
  source 1..80: mol_type = other DNA
cactagcagagattatgcatttcatgttgcagctggtagagttaggaaggcctctgagtctttgtttggttggctgaaac

SEQ ID NO: 116412 - DNA, 80 bp, synthetic construct
  misc_feature 1..80: note = Artificially Synthesized Probe
  source 1..80: mol_type = other DNA
agccactccttgagcagcctgtgccagcagggaggagaggagggggtgcagcatctcgccgggaacctgagtccacagcc

SEQ ID NO: 116413 - DNA, 80 bp, synthetic construct; identical to SEQ ID NO: 38096
  misc_feature 1..80: note = Artificially Synthesized Probe
  source 1..80: mol_type = other DNA

SEQ ID NO: 116414 - DNA, 80 bp, synthetic construct
  misc_feature 1..80: note = Artificially Synthesized Probe
  source 1..80: mol_type = other DNA
tgcctcgtgtcccctggccgggcacagtccctgtggtgatggaggtgtggaggtgatggtgatggttggtggtggtggtg

SEQ ID NO: 116415 - DNA, 80 bp, synthetic construct; identical to SEQ ID NO: 38099
  misc_feature 1..80: note = Artificially Synthesized Probe
  source 1..80: mol_type = other DNA

SEQ ID NO: 116416 - DNA, 80 bp, synthetic construct
  misc_feature 1..80: note = Artificially Synthesized Probe
  source 1..80: mol_type = other DNA
atggtggtggtgaaggtgatggtggaggtactggaggtgatggtggtggtggtggtgatggtggaggtggtggaggtaat

SEQ ID NO: 116417 - DNA, 80 bp, synthetic construct
  misc_feature 1..80: note = Artificially Synthesized Probe
  source 1..80: mol_type = other DNA
gtactggaggtgatggtggtggtgaaggtgatggtggaggtactggaggtgatggtggtggtgtaggtgatggtggaggt

SEQ ID NO: 116418 - DNA, 80 bp, synthetic construct
  misc_feature 1..80: note = Artificially Synthesized Probe
  source 1..80: mol_type = other DNA
gtggtggtggtggaggtactggaggtgatggcggtcgtggaggtgatggtggaggtaatggaggtggtggtggtggtggt

SEQ ID NO: 116419 - DNA, 80 bp, synthetic construct; identical to SEQ ID NO: 38098
  misc_feature 1..80: note = Artificially Synthesized Probe
  source 1..80: mol_type = other DNA

SEQ ID NO: 116420 - DNA, 80 bp, synthetic construct; identical to SEQ ID NO: 38097
  misc_feature 1..80: note = Artificially Synthesized Probe
  source 1..80: mol_type = other DNA

SEQ ID NO: 116421 - DNA, 80 bp, synthetic construct
  misc_feature 1..80: note = Artificially Synthesized Probe
  source 1..80: mol_type = other DNA
gaggtgatggtggtggtgaaggtgatggtggaggtaatggaggtgatggtggtaaaggtgatggtggaggtactggaggt

SEQ ID NO: 116422 - DNA, 80 bp, synthetic construct
  misc_feature 1..80: note = Artificially Synthesized Probe
  source 1..80: mol_type = other DNA
aaaatacaagaattagctggagcaggaggatcacttgagcctgggaagtcgaggctgcagtaagccatgattgtcccact

SEQ ID NO: 116423 - DNA, 80 bp, synthetic construct
  misc_feature 1..80: note = Artificially Synthesized Probe
  source 1..80: mol_type = other DNA
gaggtaatggaggtgatggtggtggtggtgatggtggaggtactagaggtgatggcggtcgtggaggtgatggtggaggt

SEQ ID NO: 116424 - DNA, 80 bp, synthetic construct
  misc_feature 1..80: note = Artificially Synthesized Probe
  source 1..80: mol_type = other DNA
gaggtgatggtggtcgtggaggtgatggtggaggtaatggaggtgatggtggtggtggtggtggtactggaggtgatggt

SEQ ID NO: 116425 - DNA, 80 bp, synthetic construct
  misc_feature 1..80: note = Artificially Synthesized Probe
  source 1..80: mol_type = other DNA
ggtggtggtggtggtggtggtggtggaggtggtggtggtggtggtggtggtgatggtgatggtggtggtggtggtggtgg

SEQ ID NO: 116426 - DNA, 80 bp, synthetic construct
  misc_feature 1..80: note = Artificially Synthesized Probe
  source 1..80: mol_type = other DNA
ggtggtggaggttatggagataatggtggtggtggaggtgatagatatttgaacatgcctgacctaagaaaagttcattt

SEQ ID NO: 116427 - DNA, 80 bp, synthetic construct
  misc_feature 1..80: note = Artificially Synthesized Probe
  source 1..80: mol_type = other DNA
atattttttttacagtgcattttcatgtgtttcaacctcctagtgtccctgccaaaaatattttaatctgaatcaaatca

SEQ ID NO: 116428 - DNA, 80 bp, synthetic construct
  misc_feature 1..80: note = Artificially Synthesized Probe
  source 1..80: mol_type = other DNA
aaaagagatgtgataagtaaatgcagaaaagagacgtgataagtaagtacagcgtgtgtcccaggaggatctaggatcca

SEQ ID NO: 116429 - DNA, 80 bp, synthetic construct
  misc_feature 1..80: note = Artificially Synthesized Probe
  source 1..80: mol_type = other DNA
ggcaaggtgccatgatgcctgcaacttactttccaacggtttgggagagaaaatgctcatttgtgcagagtccgaagagg

SEQ ID NO: 116430 - DNA, 80 bp, synthetic construct; identical to SEQ ID NO: 38100
  misc_feature 1..80: note = Artificially Synthesized Probe
  source 1..80: mol_type = other DNA

SEQ ID NO: 116431 - DNA, 80 bp, synthetic construct
  misc_feature 1..80: note = Artificially Synthesized Probe
  source 1..80: mol_type = other DNA
ttgccgtaatgctctgtctttctcctttcatgggagtgtgccgtggcatttagtcgtgagagtgggtgtgacctgtgtgc

SEQ ID NO: 116432 - DNA, 80 bp, synthetic construct
  misc_feature 1..80: note = Artificially Synthesized Probe
  source 1..80: mol_type = other DNA
ccattagcgacagccaagagatctcagcagtgcctctctgtgggcagggatggggtgaatcacagctccgtgtttctgtt

SEQ ID NO: 116433 - DNA, 80 bp, synthetic construct
  misc_feature 1..80: note = Artificially Synthesized Probe
  source 1..80: mol_type = other DNA
cgccgtgctcaaccccttgtgggagggagcacgtgagtgagtgtggcatctggccagctgctttgggagctggcaggagc

SEQ ID NO: 116434 - DNA, 80 bp, synthetic construct
  misc_feature 1..80: note = Artificially Synthesized Probe
  source 1..80: mol_type = other DNA
tgtcacccaggctggagtgcagtggtgccatttcagctcactgcaacctttacctcccaggttcaagtgatgttcctgcc

SEQ ID NO: 116435 - DNA, 80 bp, synthetic construct; identical to SEQ ID NO: 38101
  misc_feature 1..80: note = Artificially Synthesized Probe
  source 1..80: mol_type = other DNA

SEQ ID NO: 116436 - DNA, 80 bp, synthetic construct
  misc_feature 1..80: note = Artificially Synthesized Probe
  source 1..80: mol_type = other DNA
gtctttccgaagttaaaccgtctctccttggaagtccagccatccctctgaagtcaagtcacctgtttccagtgaagcta

SEQ ID NO: 116437 - DNA, 80 bp, synthetic construct
  misc_feature 1..80: note = Artificially Synthesized Probe
  source 1..80: mol_type = other DNA
cagtggggagagagtaggcacacggggatagaggttctcactttgggccatgggtttcaggcttttcggctcgaaggtgg

SEQ ID NO: 116438 - DNA, 80 bp, synthetic construct; identical to SEQ ID NO: 38102
  misc_feature 1..80: note = Artificially Synthesized Probe
  source 1..80: mol_type = other DNA

SEQ ID NO: 116439 - DNA, 80 bp, synthetic construct
  misc_feature 1..80: note = Artificially Synthesized Probe
  source 1..80: mol_type = other DNA
ctatatttttgtattttttgtagagacggggtttcaccgtgttagccaggatggtctcgatctcctgacctcgtgatcca

SEQ ID NO: 116440 - DNA, 80 bp, synthetic construct
  misc_feature 1..80: note = Artificially Synthesized Probe
  source 1..80: mol_type = other DNA
ctcataacttacctgtttttgcaagccaggtgctttttctgcagagtgggaaaagagactcttttaaattttagcctttg

SEQ ID NO: 116441 - DNA, 80 bp, synthetic construct
  misc_feature 1..80: note = Artificially Synthesized Probe
  source 1..80: mol_type = other DNA
ttgatttttgcaggaggaacccctctcccagatcactgcctactgcaatagttgctgggacaccaaaggcttagaggaca

SEQ ID NO: 116442 - DNA, 80 bp, synthetic construct
  misc_feature 1..80: note = Artificially Synthesized Probe
  source 1..80: mol_type = other DNA
taactcagagattgggaagtgggcaccctcctccctcgccaagggcaatggcgctgaaatctagttctctccggattcct

SEQ ID NO: 116443 - DNA, 80 bp, synthetic construct; identical to SEQ ID NO: 38103
  misc_feature 1..80: note = Artificially Synthesized Probe
  source 1..80: mol_type = other DNA

SEQ ID NO: 116444 - DNA, 80 bp, synthetic construct
  misc_feature 1..80: note = Artificially Synthesized Probe
  source 1..80: mol_type = other DNA
ttgcggccacaggggaagtccagaaacattgaggtcattgaattccggggaccaaggggttctaattttttaagtgactg

SEQ ID NO: 116445 - DNA, 80 bp, synthetic construct; identical to SEQ ID NO: 38047
  misc_feature 1..80: note = Artificially Synthesized Probe
  source 1..80: mol_type = other DNA

SEQ ID NO: 116446 - DNA, 80 bp, synthetic construct
  misc_feature 1..80: note = Artificially Synthesized Probe
  source 1..80: mol_type = other DNA
atcacttcaaagagaaacccggcccctttagccatcatcctcctcccctctagtcacccactcccctctgcaggcataaa

SEQ ID NO: 116447 - DNA, 80 bp, synthetic construct
  misc_feature 1..80: note = Artificially Synthesized Probe
  source 1..80: mol_type = other DNA
agtttcactctttttgcccaggctggagtgcaatggtgcgatcctggctcaccgcaaccgctgcctcccgggttcaagtg

SEQ ID NO: 116448 - DNA, 80 bp, synthetic construct; identical to SEQ ID NO: 38104
  misc_feature 1..80: note = Artificially Synthesized Probe
  source 1..80: mol_type = other DNA

SEQ ID NO: 116449 - DNA, 80 bp, synthetic construct
  misc_feature 1..80: note = Artificially Synthesized Probe
  source 1..80: mol_type = other DNA
cacacctgtggtcccagctacttgggaggctgaggtgggaggctcccttgggcccagaaggtcaaggcagcagtgagcca

SEQ ID NO: 116450 - DNA, 80 bp, synthetic construct
  misc_feature 1..80: note = Artificially Synthesized Probe
  source 1..80: mol_type = other DNA
ttcaaattttggaatatttgcatttacataatgagatgtcttccagatgggacccagagtctaaccacaaaattcacttg

SEQ ID NO: 116451 - DNA, 80 bp, synthetic construct; identical to SEQ ID NO: 38105
  misc_feature 1..80: note = Artificially Synthesized Probe
  source 1..80: mol_type = other DNA

SEQ ID NO: 116452 - DNA, 80 bp, synthetic construct
  misc_feature 1..80: note = Artificially Synthesized Probe
  source 1..80: mol_type = other DNA
gtccggccgagtcccacagcagctgaaccattttcaatccctccagcagcataggaggcttccaggttctccacatcctc

SEQ ID NO: 116453 - DNA, 80 bp, synthetic construct
  misc_feature 1..80: note = Artificially Synthesized Probe
  source 1..80: mol_type = other DNA
ctgggttcaagcaattctcctgcctcagtctctcgagtagctgggactacaggcatgtgccaccatgcccagctaatttt

SEQ ID NO: 116454 - DNA, 80 bp, synthetic construct
  misc_feature 1..80: note = Artificially Synthesized Probe
  source 1..80: mol_type = other DNA
ctaatgatatcaagcatcttttcatatgcttattggatttgtctgtatcttctttggagaaatgtttattgagatatttt

SEQ ID NO: 116455 - DNA, 80 bp, synthetic construct; identical to SEQ ID NO: 38106
  misc_feature 1..80: note = Artificially Synthesized Probe
  source 1..80: mol_type = other DNA

SEQ ID NO: 116456 - DNA, 80 bp, synthetic construct
  misc_feature 1..80: note = Artificially Synthesized Probe
  source 1..80: mol_type = other DNA
gaccagcctggccaacgtggtgaaaccccgtctctactaaaaatgcaaaaattagctgggtgtggtggctcatgcctgta

SEQ ID NO: 116457 - DNA, 80 bp, synthetic construct
  misc_feature 1..80: note = Artificially Synthesized Probe
  source 1..80: mol_type = other DNA
ctgcactccggcctgggcgacagagcgagactctgtctcaaaaaaaaaaattttttttcgtagagacagggtcttgagat

SEQ ID NO: 116458 - DNA, 80 bp, synthetic construct
  misc_feature 1..80: note = Artificially Synthesized Probe
  source 1..80: mol_type = other DNA
atacaagtcacttgtcagatatatgattgcaagtattttctcccattctatgtgttgttttttcacattcttattggttt

SEQ ID NO: 116459 - DNA, 80 bp, synthetic construct
  misc_feature 1..80: note = Artificially Synthesized Probe
  source 1..80: mol_type = other DNA
ttacatgtaggcctttgatccattttgagttcctttttatatatggtgtatatggtgtgaggtaagggttctgtttcatt

SEQ ID NO: 116460 - DNA, 80 bp, synthetic construct
  misc_feature 1..80: note = Artificially Synthesized Probe
  source 1..80: mol_type = other DNA
agattttcaattctatgtggtgatctacttgcctatccttgtgtcagtaccacactgtttggactaccattgctttctag

SEQ ID NO: 116461 - DNA, 80 bp, synthetic construct; identical to SEQ ID NO: 38107
  misc_feature 1..80: note = Artificially Synthesized Probe
  source 1..80: mol_type = other DNA

SEQ ID NO: 116462 - DNA, 80 bp, synthetic construct
  misc_feature 1..80: note = Artificially Synthesized Probe
  source 1..80: mol_type = other DNA
catgcctggctaatttttgtatttttagtagtttcaccatattggtcagggtggtctcgaactcctgacctcagatgatc

SEQ ID NO: 116463 - DNA, 80 bp, synthetic construct
  misc_feature 1..80: note = Artificially Synthesized Probe
  source 1..80: mol_type = other DNA
ggaattgttttctgaattctgtttccagattgttccttgctggtgtctagacacacagtgctccatgcgtcttgtatcct

SEQ ID NO: 116464 - DNA, 80 bp, synthetic construct; identical to SEQ ID NO: 38108
  misc_feature 1..80: note = Artificially Synthesized Probe
  source 1..80: mol_type = other DNA

SEQ ID NO: 116465 - DNA, 80 bp, synthetic construct
  misc_feature 1..80: note = Artificially Synthesized Probe
  source 1..80: mol_type = other DNA
cgtatctactgaaatgatcatgcgatattttcctaatgttattaactgatatttgatgttaaatcaacctttcatccctg

SEQ ID NO: 116466 - DNA, 80 bp, synthetic construct
  misc_feature 1..80: note = Artificially Synthesized Probe
  source 1..80: mol_type = other DNA
gaaaaatattgtttctcggaggagaattaaaaagagaattaaaatgtatatgttgtttgtaggcagctttttaaaagaat

SEQ ID NO: 116467 - DNA, 80 bp, synthetic construct
  misc_feature 1..80: note = Artificially Synthesized Probe
  source 1..80: mol_type = other DNA
tctggtgctggacacttaaggaggcagtatacaaggaaatgaaaattttcgaagaaatgtaaagtgttttactattttgc

SEQ ID NO: 116468 - DNA, 80 bp, synthetic construct
  misc_feature 1..80: note = Artificially Synthesized Probe
  source 1..80: mol_type = other DNA
atggtgaaaacccatgtctactaaaaatacaaaaattagctaggcatggtggcgtgtacctgtagtcccagctactcggg

SEQ ID NO: 116469 - DNA, 80 bp, synthetic construct; identical to SEQ ID NO: 38109
  misc_feature 1..80: note = Artificially Synthesized Probe
  source 1..80: mol_type = other DNA

SEQ ID NO: 116470 - DNA, 80 bp, synthetic construct
  misc_feature 1..80: note = Artificially Synthesized Probe
  source 1..80: mol_type = other DNA
ggaaaggtgggaggcagaagatttgacatgatgatactgaattgggatgggctgatgtttgacaaaggctgcagtttgga

SEQ ID NO: 116471 - DNA, 80 bp, synthetic construct
  misc_feature 1..80: note = Artificially Synthesized Probe
  source 1..80: mol_type = other DNA
agttttcagatcaggaaacaaatggagaaggcaatgcgacttacctaaggtctcaaagattataagtagtaaaaactaaa

SEQ ID NO: 116472 - DNA, 80 bp, synthetic construct
  misc_feature 1..80: note = Artificially Synthesized Probe
  source 1..80: mol_type = other DNA
tcctaaaaacgttagagtccagttggcgtgtgagaccttagattcatatctttcagtgagaaggcgctggatgtggaaca

SEQ ID NO: 116473 - DNA, 80 bp, synthetic construct
  misc_feature 1..80: note = Artificially Synthesized Probe
  source 1..80: mol_type = other DNA
gtatttatttatttatttatttatttatttatttattttggagatggagtctcgctctctcacccaggctggagtgcagt

SEQ ID NO: 116474 - DNA, 80 bp, synthetic construct; identical to SEQ ID NO: 38110
  misc_feature 1..80: note = Artificially Synthesized Probe
  source 1..80: mol_type = other DNA

SEQ ID NO: 116475 - DNA, 80 bp, synthetic construct
  misc_feature 1..80: note = Artificially Synthesized Probe
  source 1..80: mol_type = other DNA
tgccaccatcacacgggcagtaccctgttagtaacatgcagcattagtgtggtgcttttgttacagctgagaagccaata

SEQ ID NO: 116476 - DNA, 80 bp, synthetic construct
  misc_feature 1..80: note = Artificially Synthesized Probe
  source 1..80: mol_type = other DNA
agtcttttccagaatgtcctatggttggaatcttataggatgtcgcctttagactggcttccttcacttagtaatacgta

SEQ ID NO: 116477 - DNA, 80 bp, synthetic construct
  misc_feature 1..80: note = Artificially Synthesized Probe
  source 1..80: mol_type = other DNA
atgtttgtttcttatggtgcagataagcttcatcttctcctaatattgtatggctctaatattactgggagagaaatcct

SEQ ID NO: 116478 - DNA, 80 bp, synthetic construct; identical to SEQ ID NO: 38111
  misc_feature 1..80: note = Artificially Synthesized Probe
  source 1..80: mol_type = other DNA

SEQ ID NO: 116479 - DNA, 80 bp, synthetic construct
  misc_feature 1..80: note = Artificially Synthesized Probe
  source 1..80: mol_type = other DNA
agccttattgtgatatggagagagtttgcaatgtctggagaggtcaaaccagtcacaacattcccttaaaccacagccga

SEQ ID NO: 116480 - DNA, 80 bp, synthetic construct
  misc_feature 1..80: note = Artificially Synthesized Probe
  source 1..80: mol_type = other DNA
agaccagcctgggcaacaaagtgagaccctgttctctacaaaaaattttgaaagtttgccaggcatggtgctgtgcacct

SEQ ID NO: 116481 - DNA, 80 bp, synthetic construct
  misc_feature 1..80: note = Artificially Synthesized Probe
  source 1..80: mol_type = other DNA
acctgagaaatgtgtctcccagctgattttggccattgcgggaagtcatcttcttggacaaggaagttgttcaggggatg

SEQ ID NO: 116482 - DNA, 80 bp, synthetic construct
  misc_feature 1..80: note = Artificially Synthesized Probe
  source 1..80: mol_type = other DNA
gggagcccactgtgttaactgtgttcttcatctattcaggaaccgacgagaaaatactagcaaatgtcacagaggatgcc

SEQ ID NO: 116483 - DNA, 80 bp, synthetic construct; identical to SEQ ID NO: 38112
  misc_feature 1..80: note = Artificially Synthesized Probe
  source 1..80: mol_type = other DNA

SEQ ID NO: 116484 - DNA, 80 bp, synthetic construct
  misc_feature 1..80: note = Artificially Synthesized Probe
  source 1..80: mol_type = other DNA
tcaaagcattgccatggaaaatggcatttgttgctgtattgggttactttattggtgttcttattttccaggggaaaaaa

SEQ ID NO: 116485 - DNA, 80 bp, synthetic construct
  misc_feature 1..80: note = Artificially Synthesized Probe
  source 1..80: mol_type = other DNA
aacaaagttgagggctctcaaagggttagaggagaacacagtaagaatggatcacagtagcagatctttattttggagag

SEQ ID NO: 116486 - DNA, 80 bp, synthetic construct
  misc_feature 1..80: note = Artificially Synthesized Probe
  source 1..80: mol_type = other DNA
agaagatgagggcttagagccacacatttctggtctgtgccctgcacacatcacctttccacctcctgttgcttcctgtt

SEQ ID NO: 116487 - DNA, 80 bp, synthetic construct; identical to SEQ ID NO: 38113
  misc_feature 1..80: note = Artificially Synthesized Probe
  source 1..80: mol_type = other DNA

SEQ ID NO: 116488 - DNA, 80 bp, synthetic construct
  misc_feature 1..80: note = Artificially Synthesized Probe
  source 1..80: mol_type = other DNA
cacaccctcactggcttcctgagaaaagggcgtgtaagaggttaaaccctcgaatccttgtgtgtctaaagatgtctgtc

SEQ ID NO: 116489 - DNA, 80 bp, synthetic construct
  misc_feature 1..80: note = Artificially Synthesized Probe
  source 1..80: mol_type = other DNA
tgttttctctttcttgaagctcttgagctctttctgttactcatattctgaaataataacgtgtcttggcctggatctat

SEQ ID NO: 116490 - DNA, 80 bp, synthetic construct
  misc_feature 1..80: note = Artificially Synthesized Probe
  source 1..80: mol_type = other DNA
gtgctgctggagaagctgcagtaagttctccagatctggctaaggttattgatggaggtggctctactcaacagcagatt

SEQ ID NO: 116491 - DNA, 80 bp, synthetic construct
  misc_feature 1..80: note = Artificially Synthesized Probe
  source 1..80: mol_type = other DNA
ggtgcatgcctgtattcccaactacttgggaggctgaggcaggaggatcacttgagcctgggaagtcgaggctgcagtga

SEQ ID NO: 116492 - DNA, 80 bp, synthetic construct; identical to SEQ ID NO: 38114
  misc_feature 1..80: note = Artificially Synthesized Probe
  source 1..80: mol_type = other DNA

SEQ ID NO: 116493 - DNA, 80 bp, synthetic construct
  misc_feature 1..80: note = Artificially Synthesized Probe
  source 1..80: mol_type = other DNA
ctcggaatgttcctttttaaattctgtcctgttcttgttcacgttgcagcatcttcccttctgggttattcaccgttttg

SEQ ID NO: 116494 - DNA, 80 bp, synthetic construct
  misc_feature 1..80: note = Artificially Synthesized Probe
  source 1..80: mol_type = other DNA
gccgtggggtgctgtggctcgacctggaagttggcctgtctcctgaagtcttctgtctcctgcctggagggtgtgggcct

SEQ ID NO: 116495 - DNA, 80 bp, synthetic construct; identical to SEQ ID NO: 38115
  misc_feature 1..80: note = Artificially Synthesized Probe
  source 1..80: mol_type = other DNA

SEQ ID NO: 116496 - DNA, 80 bp, synthetic construct
  misc_feature 1..80: note = Artificially Synthesized Probe
  source 1..80: mol_type = other DNA
gtccaggctggagtgcagtggctcagtctcggctcactgcaacctctgcttcctgggttcaagtgaatcttgtgtctcag

SEQ ID NO: 116497 - DNA, 80 bp, synthetic construct
  misc_feature 1..80: note = Artificially Synthesized Probe
  source 1..80: mol_type = other DNA
gcgtgagccactgtgcccagcctggaccgtgtcttaaacagactttgaacccagtcttccttatttcatcaccacctccc

SEQ ID NO: 116498 - DNA, 80 bp, synthetic construct
  misc_feature 1..80: note = Artificially Synthesized Probe
  source 1..80: mol_type = other DNA
catttaccactggttcagctcgttttcaacttctaaaattttgttcctgttatcctgttcgccattcctcctcctgtcct

SEQ ID NO: 116499 - DNA, 80 bp, synthetic construct
  misc_feature 1..80: note = Artificially Synthesized Probe
  source 1..80: mol_type = other DNA
ctccaccacgcctggctaatttttgtatttttagtagagacagggttttgtcatgttggccaggctgctcatgaactcct

SEQ ID NO: 116500 - DNA, 80 bp, synthetic construct; identical to SEQ ID NO: 38116
  misc_feature 1..80: note = Artificially Synthesized Probe
  source 1..80: mol_type = other DNA

SEQ ID NO: 116501 - DNA, 80 bp, synthetic construct
  misc_feature 1..80: note = Artificially Synthesized Probe
  source 1..80: mol_type = other DNA
gtgcttgcagtaagacactcacaagacctcagcagtaaaagattaaatgacaccgtgacagtgagactgtccacctcctc

SEQ ID NO: 116502 - DNA, 80 bp, synthetic construct; identical to SEQ ID NO: 38048
  misc_feature 1..80: note = Artificially Synthesized Probe
  source 1..80: mol_type = other DNA

SEQ ID NO: 116503 - DNA, 80 bp, synthetic construct
  misc_feature 1..80: note = Artificially Synthesized Probe
  source 1..80: mol_type = other DNA
ctgagtgagcccgaagaagaatcagaaaggcacatccttgagcttgaagaggtgtatgactatttgtatcagccttctta

SEQ ID NO: 116504 - DNA, 80 bp, synthetic construct; identical to SEQ ID NO: 38117
  misc_feature 1..80: note = Artificially Synthesized Probe
  source 1..80: mol_type = other DNA

SEQ ID NO: 116505 - DNA, 80 bp, synthetic construct
  misc_feature 1..80: note = Artificially Synthesized Probe
  source 1..80: mol_type = other DNA
agagagcctgggactgaacggtgacttcagtgttctcaacactttactaaattttgtaagttatttgctggggactgtgg

SEQ ID NO: 116506 - DNA, 80 bp, synthetic construct
  misc_feature 1..80: note = Artificially Synthesized Probe
  source 1..80: mol_type = other DNA
ctgaatatcccaagggctttgtttttacctttgttataaatagtaccactgctccttagccagagggagtttccttgggt

SEQ ID NO: 116507 - DNA, 80 bp, synthetic construct; identical to SEQ ID NO: 38041
  misc_feature 1..80: note = Artificially Synthesized Probe
  source 1..80: mol_type = other DNA

SEQ ID NO: 116508 - DNA, 80 bp, synthetic construct
  misc_feature 1..80: note = Artificially Synthesized Probe
  source 1..80: mol_type = other DNA
gcccaactgcatctcccagttccacccaaaagcggtaaatcagttgtttctgttagagttaagaggtgactcttttgctt

SEQ ID NO: 116509 - DNA, 80 bp, synthetic construct
  misc_feature 1..80: note = Artificially Synthesized Probe
  source 1..80: mol_type = other DNA
ttttttggtatttttttttttttttagcagagacagggtttcaccgtgttagccaggatggtctcgatctcctgacctcg

SEQ ID NO: 116510 - DNA, 80 bp, synthetic construct; identical to SEQ ID NO: 38118
  misc_feature 1..80: note = Artificially Synthesized Probe
  source 1..80: mol_type = other DNA

SEQ ID NO: 116511 - DNA, 80 bp, synthetic construct
  misc_feature 1..80: note = Artificially Synthesized Probe
  source 1..80: mol_type = other DNA
gcactccagcctgggcgacagagtgagactcttatctcaaaaaaaaaaaccaaaaaaaaaacctggaatcccatccattt

SEQ ID NO: 116512 - DNA, 80 bp, synthetic construct
  misc_feature 1..80: note = Artificially Synthesized Probe
  source 1..80: mol_type = other DNA
ctttattaaaatgcttagcagaatatcaggttcccaggaatcacagttcatcttgatcagggagaaacagccatgggggt

SEQ ID NO: 116513 - DNA, 80 bp, synthetic construct; identical to SEQ ID NO: 38119
  misc_feature 1..80: note = Artificially Synthesized Probe
  source 1..80: mol_type = other DNA

SEQ ID NO: 116514 - DNA, 80 bp, synthetic construct
  misc_feature 1..80: note = Artificially Synthesized Probe
  source 1..80: mol_type = other DNA
gaagtgtggagaaagttttcagatggcgcactgtgtggcgttcctaaactctttggcaatacctccccttggccaaggac

SEQ ID NO: 116515 - DNA, 80 bp, synthetic construct
  misc_feature 1..80: note = Artificially Synthesized Probe
  source 1..80: mol_type = other DNA
cttggctattgtgaatcgtgctacagtgagcatgggtgtgcatggcaggattgctggagcccaggaggtcaacgctgcag

SEQ ID NO: 116516 - DNA, 80 bp, synthetic construct
  misc_feature 1..80: note = Artificially Synthesized Probe
  source 1..80: mol_type = other DNA
cttaaaatcttgcccccttcagctttttcttccagtagatttttactggaggacaaggagagttcctgcccacagagagg

SEQ ID NO: 116517 - DNA, 80 bp, synthetic construct
  misc_feature 1..80: note = Artificially Synthesized Probe
  source 1..80: mol_type = other DNA
ccaccacgcccggctaattttttgtgtttttagtagagacggggtttcactgtgttagccaggatggtctcgatctcctg

SEQ ID NO: 116518 - DNA, 80 bp, synthetic construct
  misc_feature 1..80: note = Artificially Synthesized Probe
  source 1..80: mol_type = other DNA
attcaagcgattttcctgtctcagtctcctgagtagctgggattacaggcgcccgccaccacacccagctacttttttgt

SEQ ID NO: 116519 - DNA, 80 bp, synthetic construct; identical to SEQ ID NO: 38120
  misc_feature 1..80: note = Artificially Synthesized Probe
  source 1..80: mol_type = other DNA

SEQ ID NO: 116520 - DNA, 80 bp, synthetic construct
  misc_feature 1..80: note = Artificially Synthesized Probe
  source 1..80: mol_type = other DNA
ggtccacactgatgcacatccttcagtgagtaatttatctgaggggaatgatctgagtgtttcatagttaattgtgaaca

SEQ ID NO: 116521 - DNA, 80 bp, synthetic construct
  misc_feature 1..80: note = Artificially Synthesized Probe
  source 1..80: mol_type = other DNA
tgggcgtggtggctcacacctgtaatctcagcactttgggaggccaagtcgtgtggatcacctgaggtcaggagttggag

SEQ ID NO: 116522 - DNA, 80 bp, synthetic construct
  misc_feature 1..80: note = Artificially Synthesized Probe
  source 1..80: mol_type = other DNA
acttcactccagcttgggtgacagagtgagactctgtctcaaaaaaaaaaaaaaaaactacaaaagattaggtgttccgg

SEQ ID NO: 116523 - DNA, 80 bp, synthetic construct; identical to SEQ ID NO: 38121
  misc_feature 1..80: note = Artificially Synthesized Probe
  source 1..80: mol_type = other DNA

SEQ ID NO: 116524 - DNA, 80 bp, synthetic construct
  misc_feature 1..80: note = Artificially Synthesized Probe
  source 1..80: mol_type = other DNA
tggtgagtcttattctgtctctaatgcagattttgttgaatagagcattgcttagcaacgttagggcagtgactgtggaa

SEQ ID NO: 116525 - DNA, 80 bp, synthetic construct
  misc_feature 1..80: note = Artificially Synthesized Probe
  source 1..80: mol_type = other DNA
aaaagacagaagggaaatatgctgaaacgttgccaggagttttctctgaatggttgtaattgtcattttattctgttact

SEQ ID NO: 116526 - DNA, 80 bp, synthetic construct
  misc_feature 1..80: note = Artificially Synthesized Probe
  source 1..80: mol_type = other DNA
caccactgtactccagcctgagtgacaaagtgagactctgtctcaaaaaaaagaaaagaaaagaaaaaagtaaacattta

SEQ ID NO: 116527 - DNA, 80 bp, synthetic construct
  misc_feature 1..80: note = Artificially Synthesized Probe
  source 1..80: mol_type = other DNA
cccattcacctcccctatttggcctttgtggaagacgggtggatcttgggaatgaaaatgaatgatcgtaagcttaatca

SEQ ID NO: 116528 - DNA, 80 bp, synthetic construct; identical to SEQ ID NO: 38122
  misc_feature 1..80: note = Artificially Synthesized Probe
  source 1..80: mol_type = other DNA

SEQ ID NO: 116529 - DNA, 80 bp, synthetic construct
  misc_feature 1..80: note = Artificially Synthesized Probe
  source 1..80: mol_type = other DNA
agccggggcaccaggcactggaggaaacgtggaacagcgagtacaaagcagcactgagtgacagatcatgttgtcagggt

SEQ ID NO: 116530 - DNA, 80 bp, synthetic construct
  misc_feature 1..80: note = Artificially Synthesized Probe
  source 1..80: mol_type = other DNA
tccccatagtgtgactccgccaggaacttggaatggctgaagactgtgaatgagagtcatgggtctgtggaacgctcatc

SEQ ID NO: 116531 - DNA, 80 bp, synthetic construct
  misc_feature 1..80: note = Artificially Synthesized Probe
  source 1..80: mol_type = other DNA
cctatgctcttcacagatttccccagacacggttctgcacttgatccttcctgagagccctggcagccacgaggagtcac

SEQ ID NO: 116532 - DNA, 80 bp, synthetic construct; identical to SEQ ID NO: 38123
  misc_feature 1..80: note = Artificially Synthesized Probe
  source 1..80: mol_type = other DNA

SEQ ID NO: 116533 - DNA, 80 bp, synthetic construct
  misc_feature 1..80: note = Artificially Synthesized Probe
  source 1..80: mol_type = other DNA
ccagcaaatagcccttagaaagacacttgaattgcctctctcactctgtaaatcagcaagaatccaaataactaagattt

SEQ ID NO: 116534 - DNA, 80 bp, synthetic construct
  misc_feature 1..80: note = Artificially Synthesized Probe
  source 1..80: mol_type = other DNA
actttgggagcccaaggtggaaggctcattttagcccaggagttcatgaccagcctgggcaacatagcgagaccctgtct

SEQ ID NO: 116535 - DNA, 80 bp, synthetic construct
  misc_feature 1..80: note = Artificially Synthesized Probe
  source 1..80: mol_type = other DNA
tcaggtgtttgagaccagcctggcgatatggtgaaaccccatctctactaaaattacaaaaattagccgggcatggtggc

SEQ ID NO: 116536 - DNA, 80 bp, synthetic construct; identical to SEQ ID NO: 38124
  misc_feature 1..80: note = Artificially Synthesized Probe
  source 1..80: mol_type = other DNA

SEQ ID NO: 116537 - DNA, 80 bp, synthetic construct
  misc_feature 1..80: note = Artificially Synthesized Probe
  source 1..80: mol_type = other DNA
aacctcatggttctgcctctccaggtcttctgcagtgtgcagaggctcagccaggccttcatcgacctgcactctgctgg

SEQ ID NO: 116538 - DNA, 80 bp, synthetic construct; identical to SEQ ID NO: 38049
  misc_feature 1..80: note = Artificially Synthesized Probe
  source 1..80: mol_type = other DNA

SEQ ID NO: 116539 - DNA, 80 bp, synthetic construct
  misc_feature 1..80: note = Artificially Synthesized Probe
  source 1..80: mol_type = other DNA
cttgacagctggaagagatttgtgacccagaagcgaatggagcacttttacctgaacttctacacggcagagcagctggt

SEQ ID NO: 116540 - DNA, 80 bp, synthetic construct; identical to SEQ ID NO: 38125
  misc_feature 1..80: note = Artificially Synthesized Probe
  source 1..80: mol_type = other DNA

SEQ ID NO: 116541 - DNA, 80 bp, synthetic construct
  misc_feature 1..80: note = Artificially Synthesized Probe
  source 1..80: mol_type = other DNA
gccctggctgtctacatgcaaaccccaagccagcccctgcccacttacgatgaggtgctgctctgcaccccggcaaccac

SEQ ID NO: 116542 - DNA, 80 bp, synthetic construct
  misc_feature 1..80: note = Artificially Synthesized Probe
  source 1..80: mol_type = other DNA
taccagctcgtcatggtctgtgatggggactgggagcactgctacctcccctctgccttcagccagcacaaggtcttcgt

SEQ ID NO: 116543 - DNA, 80 bp, synthetic construct
  misc_feature 1..80: note = Artificially Synthesized Probe
  source 1..80: mol_type = other DNA
ggcaggccccgtctcccagggactgcccggggcccttcccccctccagcagatgaagcctgtctgcaggtggagaaaccg

SEQ ID NO: 116544 - DNA, 80 bp, synthetic construct
  misc_feature 1..80: note = Artificially Synthesized Probe
  source 1..80: mol_type = other DNA
ttttttttttttttttttttttgagacagagtcttgctctgtcacccaggctggagtacagtggcgtgatcttagctcac

SEQ ID NO: 116545 - DNA, 80 bp, synthetic construct; identical to SEQ ID NO: 38126
  misc_feature 1..80: note = Artificially Synthesized Probe
  source 1..80: mol_type = other DNA

SEQ ID NO: 116546 - DNA, 80 bp, synthetic construct
  misc_feature 1..80: note = Artificially Synthesized Probe
  source 1..80: mol_type = other DNA
ccggcctaatttttgtatttttagcagagacagggtttcaccatgttggccagtctggtctcaaactcctgacctcaggt

SEQ ID NO: 116547 - DNA, 80 bp, synthetic construct
  misc_feature 1..80: note = Artificially Synthesized Probe
  source 1..80: mol_type = other DNA
ctcttgacccacccttcgtttgccatcttgtttcccttaaaaagaaatagtagcttctgttctgttgactttatcctatc

SEQ ID NO: 116548 - DNA, 80 bp, synthetic construct; identical to SEQ ID NO: 38127
  misc_feature 1..80: note = Artificially Synthesized Probe
  source 1..80: mol_type = other DNA

SEQ ID NO: 116549 - DNA, 80 bp, synthetic construct
  misc_feature 1..80: note = Artificially Synthesized Probe
  source 1..80: mol_type = other DNA
agccgacagtgtagccttcagtctgtggctgaagacccgagatccccctggcaaaccactggcgtaagtccaagtttcca

SEQ ID NO: 116550 - DNA, 80 bp, synthetic construct
  misc_feature 1..80: note = Artificially Synthesized Probe
  source 1..80: mol_type = other DNA
ataccatattttttactgtaccttttctacatttttatttttatttttgagatggagtctcactctgttgcccaggctgg

SEQ ID NO: 116551 - DNA, 80 bp, synthetic construct
  misc_feature 1..80: note = Artificially Synthesized Probe
  source 1..80: mol_type = other DNA
tcaaactcctgaccttgagtgatcacccgcctcagcctcccaaagtgctgggattacaggcctgagccaccgtgcctggc

SEQ ID NO: 116552 - DNA, 80 bp, synthetic construct
  misc_feature 1..80: note = Artificially Synthesized Probe
  source 1..80: mol_type = other DNA
ctctgatgttcacagtgacagaatcatttcacaatgcatttttcagaacgtgtccctagtgctaagtggcgcgggactct

SEQ ID NO: 116553 - DNA, 80 bp, synthetic construct; identical to SEQ ID NO: 38128
  misc_feature 1..80: note = Artificially Synthesized Probe
  source 1..80: mol_type = other DNA

SEQ ID NO: 116554 - DNA, 80 bp, synthetic construct
  misc_feature 1..80: note = Artificially Synthesized Probe
  source 1..80: mol_type = other DNA
tattctatatatacatatatagtatgtatatatatattatatatatattgtatgtatatatatattatatatatatattt

SEQ ID NO: 116555 - DNA, 80 bp, synthetic construct
  misc_feature 1..80: note = Artificially Synthesized Probe
  source 1..80: mol_type = other DNA
ctgggattacaggtgcctgccaccacgcctggctaatttttttgtatttttagtagggacgggatttcaccacgttgacc

SEQ ID NO: 116556 - DNA, 80 bp, synthetic construct
  misc_feature 1..80: note = Artificially Synthesized Probe
  source 1..80: mol_type = other DNA
agttaaacgtgaaaaatgtgcctctgaaaacaattcgactgatcgaccctcaggtggatgagagccgagtcctgggcgcc

SEQ ID NO: 116557 - DNA, 80 bp, synthetic construct
  misc_feature 1..80: note = Artificially Synthesized Probe
  source 1..80: mol_type = other DNA
tgtttccacacgcacagtcctgtgaagcttaacagtgggaatgtgctctgagaagtgtgttgtcaggcagtttcctcctt

SEQ ID NO: 116558 - DNA, 80 bp, synthetic construct; identical to SEQ ID NO: 38129
  misc_feature 1..80: note = Artificially Synthesized Probe
  source 1..80: mol_type = other DNA

SEQ ID NO: 116559 - DNA, 80 bp, synthetic construct
  misc_feature 1..80: note = Artificially Synthesized Probe
  source 1..80: mol_type = other DNA
ttttacaatacttaatggatataaatgggaaaatgtggcttcggaacccctgccatttgtatatcgttgaaatcctggaa

SEQ ID NO: 116560 - DNA, 80 bp, synthetic construct
  misc_feature 1..80: note = Artificially Synthesized Probe
  source 1..80: mol_type = other DNA
acccacatagagggtgggtcttcctctcccaggccattgactcaaatgtcagtctcctctgacaacaccctcacagacac

SEQ ID NO: 116561 - DNA, 80 bp, synthetic construct
  misc_feature 1..80: note = Artificially Synthesized Probe
  source 1..80: mol_type = other DNA
aatgcagtgttagtaaagaaaagcccatctttaaactcactttttaatcatgtctgggataaaagtactcttctgttaat

SEQ ID NO: 116562 - DNA, 80 bp, synthetic construct
  misc_feature 1..80: note = Artificially Synthesized Probe
  source 1..80: mol_type = other DNA
gcaaaagagagttttatgttcactcacatacataatacatgtatagcttagtggagaaacttagtttcaggaagttgggt

SEQ ID NO: 116563 - DNA, 80 bp, synthetic construct; identical to SEQ ID NO: 38130
  misc_feature 1..80: note = Artificially Synthesized Probe
  source 1..80: mol_type = other DNA

SEQ ID NO: 116564 - DNA, 80 bp, synthetic construct
  misc_feature 1..80: note = Artificially Synthesized Probe
  source 1..80: mol_type = other DNA
gcgaaactttccaaagaccttaccagtatttaagacgattcaatcaaaaccaagacctagacacgtttcagtatcaagaa

SEQ ID NO: 116565 - DNA, 80 bp, synthetic construct
  misc_feature 1..80: note = Artificially Synthesized Probe
  source 1..80: mol_type = other DNA
gcgacacactgaggggcttcaagaagttcgtggtgaccttcatgatctttatggcaagagattttgccacaccatcactc

SEQ ID NO: 116566 - DNA, 80 bp, synthetic construct
  misc_feature 1..80: note = Artificially Synthesized Probe
  source 1..80: mol_type = other DNA
atctgcagcccaacatcaacggcagtgtcgatgccatcagtcacttgactgggaaggtcatcaagagagacgtcatgacc

SEQ ID NO: 116567 - DNA, 80 bp, synthetic construct; identical to SEQ ID NO: 38131
  misc_feature 1..80: note = Artificially Synthesized Probe
  source 1..80: mol_type = other DNA

SEQ ID NO: 116568 - DNA, 80 bp, synthetic construct
  misc_feature 1..80: note = Artificially Synthesized Probe
  source 1..80: mol_type = other DNA
acaccatcttgttttttgatgaagccaacacaacggaagctataagctgtatcaaagaagtcctgtgtgatcatatggtg

SEQ ID NO: 116569 - DNA, 80 bp, synthetic construct
  misc_feature 1..80: note = Artificially Synthesized Probe
  source 1..80: mol_type = other DNA
tgaggcagctggtataccgggtccatgctctgcccccgagcctgattcctctggtgtgggactttggacaactgagtgac

SEQ ID NO: 116570 - DNA, 80 bp, synthetic construct
  misc_feature 1..80: note = Artificially Synthesized Probe
  source 1..80: mol_type = other DNA
aaaacagaagatgagtgcagctttgtcagcctcagggacgtggagcgctgtgtgaaagttttcaggtggttccacgagca

SEQ ID NO: 116571 - DNA, 80 bp, synthetic construct; identical to SEQ ID NO: 38132
  misc_feature 1..80: note = Artificially Synthesized Probe
  source 1..80: mol_type = other DNA

SEQ ID NO: 116572 - DNA, 80 bp, synthetic construct
  misc_feature 1..80: note = Artificially Synthesized Probe
  source 1..80: mol_type = other DNA
atccatccattcatctattctatctatccatccatctattcatccatccattcatctattctatctatccatccatccat

SEQ ID NO: 116573 - DNA, 80 bp, synthetic construct
  misc_feature 1..80: note = Artificially Synthesized Probe
  source 1..80: mol_type = other DNA
ggcccggctgcctactcagatctcttccgcagcctgaagcaggtccacctggtgtccttccagtgcagcccgcactccac

SEQ ID NO: 116574 - DNA, 80 bp, synthetic construct
  misc_feature 1..80: note = Artificially Synthesized Probe
  source 1..80: mol_type = other DNA
tgcattgaagacgatcccgccccccacaaaaaggtcggcttcgtgggcatctccaactgggcccttgaccctgccaagat

SEQ ID NO: 116575 - DNA, 80 bp, synthetic construct; identical to SEQ ID NO: 38133
  misc_feature 1..80: note = Artificially Synthesized Probe
  source 1..80: mol_type = other DNA

SEQ ID NO: 116576 - DNA, 80 bp, synthetic construct
  misc_feature 1..80: note = Artificially Synthesized Probe
  source 1..80: mol_type = other DNA
ccaatttgcccgaggccaagtgctcagaggaagtcagccccatgcagctgatcaaacagaacatctttgggccttctcag

SEQ ID NO: 116577 - DNA, 80 bp, synthetic construct
  misc_feature 1..80: note = Artificially Synthesized Probe
  source 1..80: mol_type = other DNA
attatttttggttctggtttccccaaggaccaagagtacacccagctctgcagaaacatcaatcgtgtgaagatctgcat

SEQ ID NO: 116578 - DNA, 80 bp, synthetic construct
  misc_feature 1..80: note = Artificially Synthesized Probe
  source 1..80: mol_type = other DNA
ctgattgtcattgaagagaaagacgtcgtgtacaaacactttcccatccccctcattaaccggctggagaagcactatct

SEQ ID NO: 116579 - DNA, 80 bp, synthetic construct
  misc_feature 1..80: note = Artificially Synthesized Probe
  source 1..80: mol_type = other DNA
tctgtggtgctgcaggtcatagagaggcagggtccccgggccttgacggaggaacttcaccagaaggtgtctgaggaggc

SEQ ID NO: 116580 - DNA, 80 bp, synthetic construct; identical to SEQ ID NO: 38134
  misc_feature 1..80: note = Artificially Synthesized Probe
  source 1..80: mol_type = other DNA

SEQ ID NO: 116581 - DNA, 80 bp, synthetic construct
  misc_feature 1..80: note = Artificially Synthesized Probe
  source 1..80: mol_type = other DNA
ggtgctgagtgcctggctctgtgcagtgcaccatgctggtaacagcaccatacacagtgttcacaccaacaaataaagta

SEQ ID NO: 116582 - DNA, 80 bp, synthetic construct
  misc_feature 1..80: note = Artificially Synthesized Probe
  source 1..80: mol_type = other DNA
agaccaggatgcgagctcagatgagatgttccctaggagaagcccctcgccgatggggaagaatggccgggaagggattg

SEQ ID NO: 116583 - DNA, 80 bp, synthetic construct; identical to SEQ ID NO: 38050
  misc_feature 1..80: note = Artificially Synthesized Probe
  source 1..80: mol_type = other DNA

SEQ ID NO: 116584 - DNA, 80 bp, synthetic construct
  misc_feature 1..80: note = Artificially Synthesized Probe
  source 1..80: mol_type = other DNA
acgcttgtctccctggctgggtgaagggagtctgatgaaaggctgttgtggaaaagacgggccggtagggaggccgctgg

SEQ ID NO: 116585 - DNA, 80 bp, synthetic construct; identical to SEQ ID NO: 38135
  misc_feature 1..80: note = Artificially Synthesized Probe
  source 1..80: mol_type = other DNA

SEQ ID NO: 116586 - DNA, 80 bp, synthetic construct
  misc_feature 1..80: note = Artificially Synthesized Probe
  source 1..80: mol_type = other DNA
ctgaaagcatgagtcgtactataacaggaaatggcatttgtgctgagccctaagggatcatgagaatctcaagtacggac

SEQ ID NO: 116587 - DNA, 80 bp, synthetic construct
  misc_feature 1..80: note = Artificially Synthesized Probe
  source 1..80: mol_type = other DNA
gcaactgcaccgcgctgaacatcgcaggtttctaggatctgtctaaacctggcagcagacttgcaacctttccttgaagt

SEQ ID NO: 116588 - DNA, 80 bp, synthetic construct
  misc_feature 1..80: note = Artificially Synthesized Probe
  source 1..80: mol_type = other DNA
aagaagtccggtgaggttccctgccttccctgctgccctctccctccccagccgcagccgtgtggcttctgcgtggcgat

SEQ ID NO: 116589 - DNA, 80 bp, synthetic construct; identical to SEQ ID NO: 38136
  misc_feature 1..80: note = Artificially Synthesized Probe
  source 1..80: mol_type = other DNA

SEQ ID NO: 116590 - DNA, 80 bp, synthetic construct
  misc_feature 1..80: note = Artificially Synthesized Probe
  source 1..80: mol_type = other DNA
catttttcagacagattttgaagatggaatccgtagcgcccagctcattgcctcagctaagtatgtttttagtatttttc

SEQ ID NO: 116591 - DNA, 80 bp, synthetic construct
  misc_feature 1..80: note = Artificially Synthesized Probe
  source 1..80: mol_type = other DNA
cccaagtgggattagggaaactgaagagagacaaaaagaaaaggccaataacattacaaaaatagtggaatgggcctggg

SEQ ID NO: 116592 - DNA, 80 bp, synthetic construct; identical to SEQ ID NO: 38137
  misc_feature 1..80: note = Artificially Synthesized Probe
  source 1..80: mol_type = other DNA

SEQ ID NO: 116593 - DNA, 80 bp, synthetic construct
  misc_feature 1..80: note = Artificially Synthesized Probe
  source 1..80: mol_type = other DNA
atgctcttagaattaactttgtgcctttattacttaaagtaaaagtgatttctggacctttttgaagcattggatgccat

SEQ ID NO: 116594 - DNA, 80 bp, synthetic construct
  misc_feature 1..80: note = Artificially Synthesized Probe
  source 1..80: mol_type = other DNA
aggatcgtttgaggccaggagtttgagaccaggctgggcaacacagcaagacccccatcgcttaagagaaaagaaggaat

SEQ ID NO: 116595 - DNA, 80 bp, synthetic construct
  misc_feature 1..80: note = Artificially Synthesized Probe
  source 1..80: mol_type = other DNA
gctagttaagtatgtctcttatttctgaatccagctacttacttttatgacaataaaaatgtaaatgctggttggcaaat

SEQ ID NO: 116596 - DNA, 80 bp, synthetic construct
  misc_feature 1..80: note = Artificially Synthesized Probe
  source 1..80: mol_type = other DNA
gaaaacgagccgctaagagaagatttctcatccccttgtgagagaagaaatcacgatcgcagggctctgaagtttatgta

SEQ ID NO: 116597 - DNA, 80 bp, synthetic construct; identical to SEQ ID NO: 38138
  misc_feature 1..80: note = Artificially Synthesized Probe
  source 1..80: mol_type = other DNA

SEQ ID NO: 116598 - DNA, 80 bp, synthetic construct
  misc_feature 1..80: note = Artificially Synthesized Probe
  source 1..80: mol_type = other DNA
caggctggagtgcagtggcgcgatctcagctcactacaacctcaatctcctgggttcaagcgattctcctgcctcagcct

SEQ ID NO: 116599 - DNA, 80 bp, synthetic construct
  misc_feature 1..80: note = Artificially Synthesized Probe
  source 1..80: mol_type = other DNA
gccaccgcacccagcccagtcagtgtatttatttaagtcatgttggaactgtttctcatttggttctgtgttgtacagtc

SEQ ID NO: 116600 - DNA, 80 bp, synthetic construct
  misc_feature 1..80: note = Artificially Synthesized Probe
  source 1..80: mol_type = other DNA
tcacacggcgtggagactcccgactcccgacagacactgtcaggaacgcaccgatacgcctgtttggcggggagggagag

SEQ ID NO: 116601 - DNA, 80 bp, synthetic construct; identical to SEQ ID NO: 38139
  misc_feature 1..80: note = Artificially Synthesized Probe
  source 1..80: mol_type = other DNA

SEQ ID NO: 116602 - DNA, 80 bp, synthetic construct
  misc_feature 1..80: note = Artificially Synthesized Probe
  source 1..80: mol_type = other DNA
agggtgtgcaatgtccctgcttagggctgagcagcagccgggaaagacacaaagacagttgtgggtggcttcactcttca

SEQ ID NO: 116603 - DNA, 80 bp, synthetic construct
  misc_feature 1..80: note = Artificially Synthesized Probe
  source 1..80: mol_type = other DNA
gggaggccaaggcgggtgggtcacctgaggtcgggagttcgagaccagcctggccaacatgaaaccccgtttctactaaa

SEQ ID NO: 116604 - DNA, 80 bp, synthetic construct
  misc_feature 1..80: note = Artificially Synthesized Probe
  source 1..80: mol_type = other DNA
tggaagggcagatggcaggtgtggagcgtggcgtgcacatggcactaggagcagggccaccgtgtttcgtccctcggcag

SEQ ID NO: 116605 - DNA, 80 bp, synthetic construct
  misc_feature 1..80: note = Artificially Synthesized Probe
  source 1..80: mol_type = other DNA
tgccttgggggctgatcttcatgaccgtgatctctcatctggggacctagcaccacagcaggggccggggaagcctgcac

SEQ ID NO: 116606 - DNA, 80 bp, synthetic construct; identical to SEQ ID NO: 38140
  misc_feature 1..80: note = Artificially Synthesized Probe
  source 1..80: mol_type = other DNA

SEQ ID NO: 116607 - DNA, 80 bp, synthetic construct
  misc_feature 1..80: note = Artificially Synthesized Probe
  source 1..80: mol_type = other DNA
gcagctcgtgccctgcgcatgccttgctactttcatgtacagtggctgaggcctctagtggaggacggacctcagcagcc

SEQ ID NO: 116608 - DNA, 80 bp, synthetic construct
  misc_feature 1..80: note = Artificially Synthesized Probe
  source 1..80: mol_type = other DNA
gtgaggatggcgccccactttcctcacacagtgacggtcttgttgctggttactgggggtcaagggcatctgcaccggca

SEQ ID NO: 116609 - DNA, 80 bp, synthetic construct
  misc_feature 1..80: note = Artificially Synthesized Probe
  source 1..80: mol_type = other DNA
aggtgtcgatcctggacaccaccaggctgctgagaagctgtgtgcagagcgccgtgggcatgctcagagaccagaacgag

SEQ ID NO: 116610 - DNA, 80 bp, synthetic construct
  misc_feature 1..80: note = Artificially Synthesized Probe
  source 1..80: mol_type = other DNA
tctcaggtttccatggctcagcagaagcagtgacacagtgggaatctaagagcatctctcagattttgctctagaattgg

SEQ ID NO: 116611 - DNA, 80 bp, synthetic construct
  misc_feature 1..80: note = Artificially Synthesized Probe
  source 1..80: mol_type = other DNA
gagagccagtttcaccctctggagtggttggcaagggaagcctgcaaccaggacgctctccaggaggcgggcacattcag

SEQ ID NO: 116612 - DNA, 80 bp, synthetic construct; identical to SEQ ID NO: 38141
  misc_feature 1..80: note = Artificially Synthesized Probe
  source 1..80: mol_type = other DNA

SEQ ID NO: 116613 - DNA, 80 bp, synthetic construct
  misc_feature 1..80: note = Artificially Synthesized Probe
  source 1..80: mol_type = other DNA
taacagcaaaaccaggacccagcagtatattcactgccatggttatttttctgtcacccatgagactaaccttgattatc

SEQ ID NO: 116614 - DNA, 80 bp, synthetic construct
  misc_feature 1..80: note = Artificially Synthesized Probe
  source 1..80: mol_type = other DNA
gggcccagttttcccatctctaaaagacagcggactcctccatgagtccccttccaggtccaagcttctgtgccagtgat

SEQ ID NO: 116615 - DNA, 80 bp, synthetic construct; identical to SEQ ID NO: 38142
  misc_feature 1..80: note = Artificially Synthesized Probe
  source 1..80: mol_type = other DNA

SEQ ID NO: 116616 - DNA, 80 bp, synthetic construct
  misc_feature 1..80: note = Artificially Synthesized Probe
  source 1..80: mol_type = other DNA
ggaatgggggcttacagggggaagaagcggggtgaccgggaatgggggcttacagaggaagaagcggggtggacgggaat

SEQ ID NO: 116617 - DNA, 80 bp, synthetic construct
  misc_feature 1..80: note = Artificially Synthesized Probe
  source 1..80: mol_type = other DNA
ttttctctagttatccttcgtttctctccttgtcacgccttctgaagggattttaggagatcagaaatattttcatttcc

SEQ ID NO: 116618 - DNA, 80 bp, synthetic construct
  misc_feature 1..80: note = Artificially Synthesized Probe
  source 1..80: mol_type = other DNA
agccactagcctgctggcttcaggctggcacatttacaatgcaaatctcttcaaatcccctgcacaaagcttctctggcc

SEQ ID NO: 116619 - DNA, 80 bp, synthetic construct
  misc_feature 1..80: note = Artificially Synthesized Probe
  source 1..80: mol_type = other DNA
gactataggcacccaccaccacacccagctacttttggtatttttagtagaggcgagatttcaccatgttggccaggctg

SEQ ID NO: 116620 - DNA, 80 bp, synthetic construct; identical to SEQ ID NO: 38143
  misc_feature 1..80: note = Artificially Synthesized Probe
  source 1..80: mol_type = other DNA

SEQ ID NO: 116621 - DNA, 80 bp, synthetic construct
  misc_feature 1..80: note = Artificially Synthesized Probe
  source 1..80: mol_type = other DNA
cctgtccagatacagcagaaccaggctcagcggctccagatagggcggaaccaggctcggcggctcccgcctctcccagc

SEQ ID NO: 116622 - DNA, 80 bp, synthetic construct
  misc_feature 1..80: note = Artificially Synthesized Probe
  source 1..80: mol_type = other DNA
gtatttctttttattctcttcaaaagagaggcttcgcttttcccccaacattaattaccttgtggggttttttttttttc

SEQ ID NO: 116623 - DNA, 80 bp, synthetic construct
  misc_feature 1..80: note = Artificially Synthesized Probe
  source 1..80: mol_type = other DNA
tacaggtgcctgccaccacgactgtaatttttgtatttttagtagagacgggatttcaccatgttggccaggctggtctc

SEQ ID NO: 116624 - DNA, 80 bp, synthetic construct; identical to SEQ ID NO: 38144
  misc_feature 1..80: note = Artificially Synthesized Probe
  source 1..80: mol_type = other DNA

SEQ ID NO: 116625 - DNA, 80 bp, synthetic construct
  misc_feature 1..80: note = Artificially Synthesized Probe
  source 1..80: mol_type = other DNA
caacaggaacaaatacttagttccagataaacatgtgccttcttgtttagtttgatctgggacaaattcattttggtctc

SEQ ID NO: 116626 - DNA, 80 bp, synthetic construct
  misc_feature 1..80: note = Artificially Synthesized Probe
  source 1..80: mol_type = other DNA
tgcggtggctcacacctgtaatcccaatactttgggaggccaaggcgggaggattacttgtgcccaggagtttgagacca

SEQ ID NO: 116627 - DNA, 80 bp, synthetic construct
  misc_feature 1..80: note = Artificially Synthesized Probe
  source 1..80: mol_type = other DNA
atgattgtgtcactacaccgcagttggcgtgacagagtgagaccctcacatacatgttttaaaaataaaaaagcaaacac

SEQ ID NO: 116628 - DNA, 80 bp, synthetic construct; identical to SEQ ID NO: 38051
  misc_feature 1..80: note = Artificially Synthesized Probe
  source 1..80: mol_type = other DNA

SEQ ID NO: 116629 - DNA, 80 bp, synthetic construct; identical to SEQ ID NO: 38145
  misc_feature 1..80: note = Artificially Synthesized Probe
  source 1..80: mol_type = other DNA

SEQ ID NO: 116630 - DNA, 80 bp, synthetic construct
  misc_feature 1..80: note = Artificially Synthesized Probe
  source 1..80: mol_type = other DNA
ttggatgtttattttcagtgacacgatgcttctgaacattcctcttgtgatgaataatgaaaggtgagtggaaggctttc

SEQ ID NO: 116631 - DNA, 80 bp, synthetic construct
  misc_feature 1..80: note = Artificially Synthesized Probe
  source 1..80: mol_type = other DNA
cctcttgtgatgaataatgaaaggtgagtggaaggctttctttccctggggagagaaactatcagaacacagcaggaccc

SEQ ID NO: 116632 - DNA, 80 bp, synthetic construct
  misc_feature 1..80: note = Artificially Synthesized Probe
  source 1..80: mol_type = other DNA
tcaagagatcaagaccgtcctggccaacgtggtgaaaccccgtctctactaaaaatacaaaaattagctgggcgtggtgg

SEQ ID NO: 116633 - DNA, 80 bp, synthetic construct
  misc_feature 1..80: note = Artificially Synthesized Probe
  source 1..80: mol_type = other DNA
tctgagaaatttctgttttatctccaccctcctcatttccctgctttcagagcactggttctagccagacccagcatggc

SEQ ID NO: 116634 - DNA, 80 bp, synthetic construct; identical to SEQ ID NO: 38146
  misc_feature 1..80: note = Artificially Synthesized Probe
  source 1..80: mol_type = other DNA

SEQ ID NO: 116635 - DNA, 80 bp, synthetic construct
  misc_feature 1..80: note = Artificially Synthesized Probe
  source 1..80: mol_type = other DNA
tagaagctgaggcgggaggattgcttgagcccaggagtttgaggtgagataggatcacaccactcactgcactctagcct

SEQ ID NO: 116636 - DNA, 80 bp, synthetic construct
  misc_feature 1..80: note = Artificially Synthesized Probe
  source 1..80: mol_type = other DNA
atttgaattgccagtggaaacacttatttaaaagacaaggcgctgctgatgttcatgaagcaaagactctaacaagttgt

SEQ ID NO: 116637 - DNA, 80 bp, synthetic construct
  misc_feature 1..80: note = Artificially Synthesized Probe
  source 1..80: mol_type = other DNA
cttgacccctgtcagccttggtttgtttttgttttgcctgtgaaacaaagattgcataagacagttccctagttctgtca

SEQ ID NO: 116638 - DNA, 80 bp, synthetic construct
  misc_feature 1..80: note = Artificially Synthesized Probe
  source 1..80: mol_type = other DNA
acgtctcacaaaccctcttcttatcatccctcaccttattgcagacataaaggtgagatggcctacatcgtggtgcagaa

SEQ ID NO: 116639 - DNA, 80 bp, synthetic construct; identical to SEQ ID NO: 38147
  misc_feature 1..80: note = Artificially Synthesized Probe
  source 1..80: mol_type = other DNA

SEQ ID NO: 116640 - DNA, 80 bp, synthetic construct
  misc_feature 1..80: note = Artificially Synthesized Probe
  source 1..80: mol_type = other DNA
aggggttcaagtgtactagggctttgctccatttctctgatcctgacagctctgcccttctccactgccagctttgtctg

SEQ ID NO: 116641 - DNA, 80 bp, synthetic construct
  misc_feature 1..80: note = Artificially Synthesized Probe
  source 1..80: mol_type = other DNA
gtgttctggcaagaggaggactgtcgcctctatcagctggtcattcccattctgggccttctcagactggggcactggac

SEQ ID NO: 116642 - DNA, 80 bp, synthetic construct
  misc_feature 1..80: note = Artificially Synthesized Probe
  source 1..80: mol_type = other DNA
ctagtccagaaaaaccaacgacaacgcaacacttttacaaaagccatctttcatacatgcaatagtcttttccacgttta

SEQ ID NO: 116643 - DNA, 80 bp, synthetic construct
  misc_feature 1..80: note = Artificially Synthesized Probe
  source 1..80: mol_type = other DNA
aggccggagcgaggcgtcgggatgcagcgccccgggcccttcagcaccctctacgggcgggtcttggccccgctgcccgg

SEQ ID NO: 116644 - DNA, 80 bp, synthetic construct
  misc_feature 1..80: note = Artificially Synthesized Probe
  source 1..80: mol_type = other DNA
agcgtgtccctttctgttgtaattcagtaggtcagaattagaggaaagagtatgttggataaaacagacaatagaggacc

SEQ ID NO: 116645 - DNA, 80 bp, synthetic construct
  misc_feature 1..80: note = Artificially Synthesized Probe
  source 1..80: mol_type = other DNA
actgaagtaaagaaacacttatcatagaaaagaatcttgaacatagattttgatagtctgtgactaattagataaatttc

SEQ ID NO: 116646 - DNA, 80 bp, synthetic construct; identical to SEQ ID NO: 38201
  misc_feature 1..80: note = Artificially Synthesized Probe
  source 1..80: mol_type = other DNA

SEQ ID NO: 116647 - DNA, 80 bp, synthetic construct
  misc_feature 1..80: note = Artificially Synthesized Probe
  source 1..80: mol_type = other DNA
aaaagaatgaggtttaattggacttacagttccacgtgctggggaagcctcacaatcatggcagaaagcaaggaggaaca

SEQ ID NO: 116648 - DNA, 80 bp, synthetic construct
  misc_feature 1..80: note = Artificially Synthesized Probe
  source 1..80: mol_type = other DNA
ccacaacacatgggaattatgggagtacaattcaagatgagctttgggtggggacagaatgctggcagcctgcagccagc

SEQ ID NO: 116649 - DNA, 80 bp, synthetic construct
  misc_feature 1..80: note = Artificially Synthesized Probe
  source 1..80: mol_type = other DNA
tcaaaagcaagctagttatttcccagatacactgggggtacaggtattgggtgaatacactcattccagatgggaaaaat

SEQ ID NO: 116650 - DNA, 80 bp, synthetic construct
  misc_feature 1..80: note = Artificially Synthesized Probe
  source 1..80: mol_type = other DNA
tgtggctttgcagggcacagccttcctcctggctgctttcatgggctggcattgagtgtctgcagcttttccaggtgcat

SEQ ID NO: 116651 - DNA, 80 bp, synthetic construct
  misc_feature 1..80: note = Artificially Synthesized Probe
  source 1..80: mol_type = other DNA
aatgctttacaaaattattttgcttagatgatgttggatgagcttcaccacagcctgtttgagtgggagtggacaatgtg

SEQ ID NO: 116652 - DNA, 80 bp, synthetic construct; identical to SEQ ID NO: 38202
  misc_feature 1..80: note = Artificially Synthesized Probe
  source 1..80: mol_type = other DNA

SEQ ID NO: 116653 - DNA, 80 bp, synthetic construct
  misc_feature 1..80: note = Artificially Synthesized Probe
  source 1..80: mol_type = other DNA
acagcttggggaccctgggcctggcccacaaaaccacttttttctcctaggcctccaggtgtgtgatgggaggggcttcc

SEQ ID NO: 116654 - DNA, 80 bp, synthetic construct
  misc_feature 1..80: note = Artificially Synthesized Probe
  source 1..80: mol_type = other DNA
ttttatactctgtttcccttttaaaactgaatgcttttaacagcacccaagtcacctctcgaatgctttgctgcttagaa

SEQ ID NO: 116655 - DNA, 80 bp, synthetic construct; identical to SEQ ID NO: 38203
  misc_feature 1..80: note = Artificially Synthesized Probe
  source 1..80: mol_type = other DNA

SEQ ID NO: 116656 - DNA, 80 bp, synthetic construct
  misc_feature 1..80: note = Artificially Synthesized Probe
  source 1..80: mol_type = other DNA
aaagaggtttaattggacttgcagttccacgtggctggggaagcctcacaatcatggcggaaggcagggaggagcaagtc

SEQ ID NO: 116657 - DNA, 80 bp, synthetic construct
  misc_feature 1..80: note = Artificially Synthesized Probe
  source 1..80: mol_type = other DNA
aacacatgggaattatgggagtgcaattcaagatgagatttgggtggggacacagagccaaaccatatcacttctgtacc

SEQ ID NO: 116658 - DNA, 80 bp, synthetic construct
  misc_feature 1..80: note = Artificially Synthesized Probe
  source 1..80: mol_type = other DNA
atgattctgtatctagaaaaccccatcatctcagcccaaaagctccttaagctgataagcaactttagcaaagtctcagg

SEQ ID NO: 116659 - DNA, 80 bp, synthetic construct; identical to SEQ ID NO: 38204
  misc_feature 1..80: note = Artificially Synthesized Probe
  source 1..80: mol_type = other DNA

SEQ ID NO: 116660 - DNA, 80 bp, synthetic construct
  misc_feature 1..80: note = Artificially Synthesized Probe
  source 1..80: mol_type = other DNA
aacaaagctggaggcatcacgctactggacttcaaactatagtaaccaaaacaataactaaaacagcatggtactggtac

SEQ ID NO: 116661 - DNA, 80 bp, synthetic construct
  misc_feature 1..80: note = Artificially Synthesized Probe
  source 1..80: mol_type = other DNA
tggggattaacagagataatgtaaaatgtgttaatttgaccctacctttgggattcagtgcctccgttgtaaaattgaga

SEQ ID NO: 116662 - DNA, 80 bp, synthetic construct
  misc_feature 1..80: note = Artificially Synthesized Probe
  source 1..80: mol_type = other DNA
aaactggaccttttccttacaacttatatgaaaattaactcaagatggattaaggaacttaaatgtaaaaccctagaaaa

SEQ ID NO: 116663 - DNA, 80 bp, synthetic construct
  misc_feature 1..80: note = Artificially Synthesized Probe
  source 1..80: mol_type = other DNA
gagtgaacagacagtctacagaatgggagaaaatttttgcaatctatccatctgacaaagttctaatatctagaatctac

SEQ ID NO: 116664 - DNA, 80 bp, synthetic construct
  misc_feature 1..80: note = Artificially Synthesized Probe
  source 1..80: mol_type = other DNA
gcaatgagataccatctcatgctggtcagaatggcgattattaaaaagtcaagaaacaacagatgctgaggaggctgtgg

SEQ ID NO: 116665 - DNA, 80 bp, synthetic construct; identical to SEQ ID NO: 38205
  misc_feature 1..80: note = Artificially Synthesized Probe
  source 1..80: mol_type = other DNA

SEQ ID NO: 116666 - DNA, 80 bp, synthetic construct
  misc_feature 1..80: note = Artificially Synthesized Probe
  source 1..80: mol_type = other DNA
tcacttataagttggagctgaacagtgagaacacatggaggcagggaggggaacaacacatactggggcctgtctggggg

SEQ ID NO: 116667 - DNA, 80 bp, synthetic construct
  misc_feature 1..80: note = Artificially Synthesized Probe
  source 1..80: mol_type = other DNA
aattaagggtcatatttatatgatttcaggattccaaacattttggggacagcaccaacttcctgaatttgtttacgatg

SEQ ID NO: 116668 - DNA, 80 bp, synthetic construct
  misc_feature 1..80: note = Artificially Synthesized Probe
  source 1..80: mol_type = other DNA
ttatctatgtggggtgctaatgctgtaagagtacagtgaattaagctacatattcttggtagtaattttccaggaagaag

SEQ ID NO: 116669 - DNA, 80 bp, synthetic construct; identical to SEQ ID NO: 38206
  misc_feature 1..80: note = Artificially Synthesized Probe
  source 1..80: mol_type = other DNA

SEQ ID NO: 116670 - DNA, 80 bp, synthetic construct
  misc_feature 1..80: note = Artificially Synthesized Probe
  source 1..80: mol_type = other DNA
tcctgcctttattggacctaaggttctttttgctttagttggctagtgctgttttatccaccaaacatgttgttgccatt

SEQ ID NO: 116671 - DNA, 80 bp, synthetic construct
  misc_feature 1..80: note = Artificially Synthesized Probe
  source 1..80: mol_type = other DNA
tcctctggtggtactcttgtccaccaagtagctctcattatttgatttccagtttcattagaattgtgtagaccagtcac

SEQ ID NO: 116672 - DNA, 80 bp, synthetic construct; identical to SEQ ID NO: 38191
  misc_feature 1..80: note = Artificially Synthesized Probe
  source 1..80: mol_type = other DNA

SEQ ID NO: 116673 - DNA, 80 bp, synthetic construct
  misc_feature 1..80: note = Artificially Synthesized Probe
  source 1..80: mol_type = other DNA
gtaacatagtgatctatttgtaaagtgttaaaaattgccagaccaggcatggaattgggaagaacttcctggatatcttt

SEQ ID NO: 116674 - DNA, 80 bp, synthetic construct; identical to SEQ ID NO: 38207
  misc_feature 1..80: note = Artificially Synthesized Probe
  source 1..80: mol_type = other DNA

SEQ ID NO: 116675 - DNA, 80 bp, synthetic construct
  misc_feature 1..80: note = Artificially Synthesized Probe
  source 1..80: mol_type = other DNA
tctgctttccataatcagaggtgtcaggaatctcagaaatctttaactggaggtctccagtggacttataagttcattta

SEQ ID NO: 116676 - DNA, 80 bp, synthetic construct
  misc_feature 1..80: note = Artificially Synthesized Probe
  source 1..80: mol_type = other DNA
tttccaaaaaaaaggtcccttggctagacattatggtatttaagatcttcgtctccaaggagtacaccgtaaaaagaatc

SEQ ID NO: 116677 - DNA, 80 bp, synthetic construct; identical to SEQ ID NO: 38208
  misc_feature 1..80: note = Artificially Synthesized Probe
  source 1..80: mol_type = other DNA

SEQ ID NO: 116678 - DNA, 80 bp, synthetic construct
  misc_feature 1..80: note = Artificially Synthesized Probe
  source 1..80: mol_type = other DNA
ggctaattttttgtatatttagtagagacggggtttcaccctgttggccaggatggtctccatctcttgaccttgtgatc

SEQ ID NO: 116679 - DNA, 80 bp, synthetic construct
  misc_feature 1..80: note = Artificially Synthesized Probe
  source 1..80: mol_type = other DNA
aattgagtggactgtctttctagtaaaatgagttcttctatcgctatgtaatttggaaggagttccccaagagggaatta

SEQ ID NO: 116680 - DNA, 80 bp, synthetic construct
  misc_feature 1..80: note = Artificially Synthesized Probe
  source 1..80: mol_type = other DNA
gtgggcaaaggaaaatgcccttgatatccatgaagaggctgtcctggattatgtttaggacaaactgcacatttagcata

SEQ ID NO: 116681 - DNA, 80 bp, synthetic construct; identical to SEQ ID NO: 38209
  misc_feature 1..80: note = Artificially Synthesized Probe
  source 1..80: mol_type = other DNA

SEQ ID NO: 116682 - DNA, 80 bp, synthetic construct
  misc_feature 1..80: note = Artificially Synthesized Probe
  source 1..80: mol_type = other DNA
cccccttttttttctggaaattccttagtaggggctctaagttctgcctcgtcctgggggactaaactactgaaggttct

SEQ ID NO: 116683 - DNA, 80 bp, synthetic construct
  misc_feature 1..80: note = Artificially Synthesized Probe
  source 1..80: mol_type = other DNA
agcacttcatgcctcttatgtgctttatgttgtatctcatgttttggtcatctgtgtgttcgtttcttccagccccttaa

SEQ ID NO: 116684 - DNA, 80 bp, synthetic construct
  misc_feature 1..80: note = Artificially Synthesized Probe
  source 1..80: mol_type = other DNA
ctcactgcagcctcggcctcctgggctcaagcgatcctcctgcctcagcctcctgagtagctgggactacaggtgcatgc

SEQ ID NO: 116685 - DNA, 80 bp, synthetic construct
  misc_feature 1..80: note = Artificially Synthesized Probe
  source 1..80: mol_type = other DNA
aaaggaaagaataagagggttctgaaggagcagttggaggggaggaggtgagacagtggaaacatgagacgattttttca

SEQ ID NO: 116686 - DNA, 80 bp, synthetic construct
  misc_feature 1..80: note = Artificially Synthesized Probe
  source 1..80: mol_type = other DNA
ttaagccactcctcccagttgtgcacgtaaataattcaattttggggtcttgaatgagccccattttggccaagttaagc

SEQ ID NO: 116687 - DNA, 80 bp, synthetic construct; identical to SEQ ID NO: 38210
  misc_feature 1..80: note = Artificially Synthesized Probe
  source 1..80: mol_type = other DNA

SEQ ID NO: 116688 - DNA, 80 bp, synthetic construct
  misc_feature 1..80: note = Artificially Synthesized Probe
  source 1..80: mol_type = other DNA
cctggaggagctattacaacttaagtgttttcctgttgatggtgaagctctttggaaccactacatgtcatgaggaatct

SEQ ID NO: 116689 - DNA, 80 bp, synthetic construct
  misc_feature 1..80: note = Artificially Synthesized Probe
  source 1..80: mol_type = other DNA
aaggattggtgcagacaaaggagttttgaaaagaaaaacactcagctagtcaaagaaaccaccgcaaggtggtcaagcta

SEQ ID NO: 116690 - DNA, 80 bp, synthetic construct; identical to SEQ ID NO: 38211
  misc_feature 1..80: note = Artificially Synthesized Probe
  source 1..80: mol_type = other DNA

SEQ ID NO: 116691 - DNA, 80 bp, synthetic construct
  misc_feature 1..80: note = Artificially Synthesized Probe
  source 1..80: mol_type = other DNA
acctggaaagggaaggggattctttacagaatgtagatttttttccctacaagagacagctttactgggctatttcaaaa

SEQ ID NO: 116692 - DNA, 80 bp, synthetic construct
  misc_feature 1..80: note = Artificially Synthesized Probe
  source 1..80: mol_type = other DNA
ttcatcttaagatctgttttagctgggagtggtggctcatgccagtaatcttaacactttgggaggctgaggtgtgagga

SEQ ID NO: 116693 - DNA, 80 bp, synthetic construct
  misc_feature 1..80: note = Artificially Synthesized Probe
  source 1..80: mol_type = other DNA
catcatgacctgaacttgattttcaggttttctttggaatgcacctggctgagagtagaggtccatcagtcagttgggag

SEQ ID NO: 116694 - DNA, 80 bp, synthetic construct; identical to SEQ ID NO: 38212
  misc_feature 1..80: note = Artificially Synthesized Probe
  source 1..80: mol_type = other DNA

SEQ ID NO: 116695 - DNA, 80 bp, synthetic construct
  misc_feature 1..80: note = Artificially Synthesized Probe
  source 1..80: mol_type = other DNA
cataggcctagtttcttttacctgtgtgttcaacctgcagctatcttgagctgcttttaaaattctttcagattttcttt

SEQ ID NO: 116696 - DNA, 80 bp, synthetic construct
  misc_feature 1..80: note = Artificially Synthesized Probe
  source 1..80: mol_type = other DNA
ctgttctctagtccattggagttccaatatggtgaccacttccgtgtctgagtggatggaaaacatggagagttctcagg

SEQ ID NO: 116697 - DNA, 80 bp, synthetic construct
  misc_feature 1..80: note = Artificially Synthesized Probe
  source 1..80: mol_type = other DNA
taactgtgcaagaaccacacagtgtgttatgtatgattacttttccttgcctgcccaatattttgttttccccaaagtgg

SEQ ID NO: 116698 - DNA, 80 bp, synthetic construct
  misc_feature 1..80: note = Artificially Synthesized Probe
  source 1..80: mol_type = other DNA
ggggtctcccttcacagtcaggaaatttccttctcttttctcttgttttgggttgcccttgcttcttcttcttcttcttt

SEQ ID NO: 116699 - DNA, 80 bp, synthetic construct
  misc_feature 1..80: note = Artificially Synthesized Probe
  source 1..80: mol_type = other DNA
tttttgtatttttagtagagacgaggtttcactatgttggccatgacgttttggatgtctgaatatatatatatatatat

SEQ ID NO: 116700 - DNA, 80 bp, synthetic construct; identical to SEQ ID NO: 38213
  misc_feature 1..80: note = Artificially Synthesized Probe
  source 1..80: mol_type = other DNA

SEQ ID NO: 116701 - DNA, 80 bp, synthetic construct
  misc_feature 1..80: note = Artificially Synthesized Probe
  source 1..80: mol_type = other DNA
acgtaccgttttattatcatgtttttctccagcattctgaaaacaccatgatgtgtctcttggtatggatctattttcgt

SEQ ID NO: 116702 - DNA, 80 bp, synthetic construct
  misc_feature 1..80: note = Artificially Synthesized Probe
  source 1..80: mol_type = other DNA
tctgggacccttcttgtgactttggtgcttgtggacagtcttattttgtccctttgcttcatttttagctttgccttttt

SEQ ID NO: 116703 - DNA, 80 bp, synthetic construct
  misc_feature 1..80: note = Artificially Synthesized Probe
  source 1..80: mol_type = other DNA
gtttaagggacttcttcttgtacaggtttcctcagttgttttttccagttcatgggaggtacacttcacagtaaaattca

SEQ ID NO: 116704 - DNA, 80 bp, synthetic construct
  misc_feature 1..80: note = Artificially Synthesized Probe
  source 1..80: mol_type = other DNA
tttcactctgtcgcccaggatggagtgcagtggcgcgatctgggctcactgcaacctccgcctcctgggttcaagtgatt

SEQ ID NO: 116705 - DNA, 80 bp, synthetic construct; identical to SEQ ID NO: 38214
  misc_feature 1..80: note = Artificially Synthesized Probe
  source 1..80: mol_type = other DNA

SEQ ID NO: 116706 - DNA, 80 bp, synthetic construct
  misc_feature 1..80: note = Artificially Synthesized Probe
  source 1..80: mol_type = other DNA
gtaaagaggactagaagatgtctgtcagtattctggatgtaaacttgcttttaattctcttgttttcaacacaatacctg

SEQ ID NO: 116707 - DNA, 80 bp, synthetic construct; identical to SEQ ID NO: 38192
  misc_feature 1..80: note = Artificially Synthesized Probe
  source 1..80: mol_type = other DNA

SEQ ID NO: 116708 - DNA, 80 bp, synthetic construct
  misc_feature 1..80: note = Artificially Synthesized Probe
  source 1..80: mol_type = other DNA
tttgaccttctctagagaatcagcatgctgttttgggagtacagagggaggattagaggtataacaagttttaaattagc

SEQ ID NO: 116709 - DNA, 80 bp, synthetic construct; identical to SEQ ID NO: 38215
  misc_feature 1..80: note = Artificially Synthesized Probe
  source 1..80: mol_type = other DNA

SEQ ID NO: 116710 - DNA, 80 bp, synthetic construct
  misc_feature 1..80: note = Artificially Synthesized Probe
  source 1..80: mol_type = other DNA
ctcatgctgattttgttcctcttcggggggaagggaggcttcaaactggttgatgtcaactcttcagctggaattcagga

SEQ ID NO: 116711 - DNA, 80 bp, synthetic construct
  misc_feature 1..80: note = Artificially Synthesized Probe
  source 1..80: mol_type = other DNA
aaattctatctataggaacagtgaggatacaagtgatcagtatctagagctacatgacttttggttacaaggaagtgggc

SEQ ID NO: 116712 - DNA, 80 bp, synthetic construct
  misc_feature 1..80: note = Artificially Synthesized Probe
  source 1..80: mol_type = other DNA
acgatgtccaaggccgaggaggccaagaagctggcgggccgcgcggctgtggagaaccacgtgagggtgagcacttcgaa

SEQ ID NO: 116713 - DNA, 80 bp, synthetic construct
  misc_feature 1..80: note = Artificially Synthesized Probe
  source 1..80: mol_type = other DNA
agtactggcctaggttttttgtttcttattcctgcatttaccgttgtccatcagtgttccagcttttaaaattcgttgct

SEQ ID NO: 116714 - DNA, 80 bp, synthetic construct
  misc_feature 1..80: note = Artificially Synthesized Probe
  source 1..80: mol_type = other DNA
gcctcctattttctttccaaataagagctacaaaattaaaaagctacatacctccctcaaaatttgcccacaaggaactt

SEQ ID NO: 116715 - DNA, 80 bp, synthetic construct; identical to SEQ ID NO: 38216
  misc_feature 1..80: note = Artificially Synthesized Probe
  source 1..80: mol_type = other DNA

SEQ ID NO: 116716 - DNA, 80 bp, synthetic construct
  misc_feature 1..80: note = Artificially Synthesized Probe
  source 1..80: mol_type = other DNA
attgtgacctgtctcagatacaggtttacagagctgagctaaatgcaggtgttcaaactgccatctttacctggaagttt

SEQ ID NO: 116717 - DNA, 80 bp, synthetic construct
  misc_feature 1..80: note = Artificially Synthesized Probe
  source 1..80: mol_type = other DNA
actttttttcccactcaaacgtaaacttatttttgtgttaagtttagccagatacagtctctggaaatggttgaaaggaa

SEQ ID NO: 116718 - DNA, 80 bp, synthetic construct
  misc_feature 1..80: note = Artificially Synthesized Probe
  source 1..80: mol_type = other DNA
tttttatgcttaggttcagcaaagtatggacagccatgtagagatacgattggacaaaaaggatatgatttaatgctagt

SEQ ID NO: 116719 - DNA, 80 bp, synthetic construct; identical to SEQ ID NO: 38217
  misc_feature 1..80: note = Artificially Synthesized Probe
  source 1..80: mol_type = other DNA

SEQ ID NO: 116720 - DNA, 80 bp, synthetic construct
  misc_feature 1..80: note = Artificially Synthesized Probe
  source 1..80: mol_type = other DNA
cagtcatttgattccaaggcagcagggatcacatgggtgaagagctttaggtctggcagggccttgcaattcctggtctc

SEQ ID NO: 116721 - DNA, 80 bp, synthetic construct
  misc_feature 1..80: note = Artificially Synthesized Probe
  source 1..80: mol_type = other DNA
gaacattggtttggtctggaaaggcgggacaactcgaagcaaaggcgggaagacttgaagcagggagggagcttccaggt

SEQ ID NO: 116722 - DNA, 80 bp, synthetic construct
  misc_feature 1..80: note = Artificially Synthesized Probe
  source 1..80: mol_type = other DNA
tggggccccaagatttattttccttttacatttcccccctttcttttaaaaaatcttttggagaaagtattttagaagaa

SEQ ID NO: 116723 - DNA, 80 bp, synthetic construct; identical to SEQ ID NO: 38218
  misc_feature 1..80: note = Artificially Synthesized Probe
  source 1..80: mol_type = other DNA

SEQ ID NO: 116724 - DNA, 80 bp, synthetic construct
  misc_feature 1..80: note = Artificially Synthesized Probe
  source 1..80: mol_type = other DNA
tttgcagggttgtagccaagaaaaattagaatttggttcaaattttagaaaataataaaattgaaaaacataggcaagac

SEQ ID NO: 116725 - DNA, 80 bp, synthetic construct
  misc_feature 1..80: note = Artificially Synthesized Probe
  source 1..80: mol_type = other DNA
ggcttttaaattggctttgatggaactttgttccatagaaggaatctcagataagactccttttttaaagccgagcccag

SEQ ID NO: 116726 - DNA, 80 bp, synthetic construct
  misc_feature 1..80: note = Artificially Synthesized Probe
  source 1..80: mol_type = other DNA
aggtcagtttttccaaggggctccataagtcagtttgatttctttatggaagacacaccattcaagttaaagccttggta

SEQ ID NO: 116727 - DNA, 80 bp, synthetic construct
  misc_feature 1..80: note = Artificially Synthesized Probe
  source 1..80: mol_type = other DNA
tcataagagtatactttactaaattgttaaaagctataaatagcttaaaagaagtttttttgactctgaaaaataaaaga

SEQ ID NO: 116728 - DNA, 80 bp, synthetic construct; identical to SEQ ID NO: 38219
  misc_feature 1..80: note = Artificially Synthesized Probe
  source 1..80: mol_type = other DNA

SEQ ID NO: 116729 - DNA, 80 bp, synthetic construct
  misc_feature 1..80: note = Artificially Synthesized Probe
  source 1..80: mol_type = other DNA
aggaatttggtgattgaattactgtaaagctagagttcctagcttcaggtcatatgtgaaggtcaggttaagtctatcta

SEQ ID NO: 116730 - DNA, 80 bp, synthetic construct
  misc_feature 1..80: note = Artificially Synthesized Probe
  source 1..80: mol_type = other DNA
tttcccataattttggaacacataccaataacatttatacaaatacagcccagagaaaagcaaacaccatttcatatttg

SEQ ID NO: 116731 - DNA, 80 bp, synthetic construct
  misc_feature 1..80: note = Artificially Synthesized Probe
  source 1..80: mol_type = other DNA
ttgatatcacaaaagaggatcacaggtcattgtaaaataagtcattcatttaaccaaagtgataacctaaggatttaaaa

SEQ ID NO: 116732 - DNA, 80 bp, synthetic construct
  misc_feature 1..80: note = Artificially Synthesized Probe
  source 1..80: mol_type = other DNA
tttatagactttataacctttattaaggagtcggttaatgcctcaagataaccttgttaatctgacccaggtgcccatat

SEQ ID NO: 116733 - DNA, 80 bp, synthetic construct
  misc_feature 1..80: note = Artificially Synthesized Probe
  source 1..80: mol_type = other DNA
cttggcgttgaggagttgaatagctttaatttctggcctgtgtctcaggaatgcagtttattttgattggcatcttctat

SEQ ID NO: 116734 - DNA, 80 bp, synthetic construct; identical to SEQ ID NO: 38220
  misc_feature 1..80: note = Artificially Synthesized Probe
  source 1..80: mol_type = other DNA

SEQ ID NO: 116735 - DNA, 80 bp, synthetic construct
  misc_feature 1..80: note = Artificially Synthesized Probe
  source 1..80: mol_type = other DNA
agttggagaacattattactttgctccttttaaaaggggagaaaaaactgaaaatggtgagatgtaataaatgtcaaact

SEQ ID NO: 116736 - DNA, 80 bp, synthetic construct
  misc_feature 1..80: note = Artificially Synthesized Probe
  source 1..80: mol_type = other DNA
gatgctggagaggatgtggagaaataggaatgcttttacactgttggtgagagtgtaaattagttcaaccattgtggaag

SEQ ID NO: 116737 - DNA, 80 bp, synthetic construct
  misc_feature 1..80: note = Artificially Synthesized Probe
  source 1..80: mol_type = other DNA
accagcccaaatgcccatcaataatagactggataaagaaaatgtggcacatatacaccttggaatactatgcaatcata

SEQ ID NO: 116738 - DNA, 80 bp, synthetic construct; identical to SEQ ID NO: 38221
  misc_feature 1..80: note = Artificially Synthesized Probe
  source 1..80: mol_type = other DNA

SEQ ID NO: 116739 - DNA, 80 bp, synthetic construct
  misc_feature 1..80: note = Artificially Synthesized Probe
  source 1..80: mol_type = other DNA
atataattagtataatataaaatacaacatattagtatattgttttattattataattaatatatgttaatataaaacat

SEQ ID NO: 116740 - DNA, 80 bp, synthetic construct
  misc_feature 1..80: note = Artificially Synthesized Probe
  source 1..80: mol_type = other DNA
ggtgcatatacaccatggaatgcagccataaaaaaggatgagttcatatatattatataattataattatgtattgaaac

SEQ ID NO: 116741 - DNA, 80 bp, synthetic construct
  misc_feature 1..80: note = Artificially Synthesized Probe
  source 1..80: mol_type = other DNA
ccttccacttgctcctttctctccccaatgcttttctgtcttggagctggctgtaaagaaattctgtgacctatgttgtc

SEQ ID NO: 116742 - DNA, 80 bp, synthetic construct
  misc_feature 1..80: note = Artificially Synthesized Probe
  source 1..80: mol_type = other DNA
aatctccagaaagaccattataatttgtgtttaattatagacagcttgatctataaaagttttttttttttttttaatcc

SEQ ID NO: 116743 - DNA, 80 bp, synthetic construct; identical to SEQ ID NO: 38222
  misc_feature 1..80: note = Artificially Synthesized Probe
  source 1..80: mol_type = other DNA

SEQ ID NO: 116744 - DNA, 80 bp, synthetic construct
  misc_feature 1..80: note = Artificially Synthesized Probe
  source 1..80: mol_type = other DNA
ttaactttagattctaaattatgacaagtttgtctacaagtatttatcccattacatttacttattttaattgtttagat

SEQ ID NO: 116745 - DNA, 80 bp, synthetic construct
  misc_feature 1..80: note = Artificially Synthesized Probe
  source 1..80: mol_type = other DNA
gtttagctttgaaacaaagacgtaacagtcctttgtctcatttgccattatacatgccatggtcagatcctctcacagta

SEQ ID NO: 116746 - DNA, 80 bp, synthetic construct
  misc_feature 1..80: note = Artificially Synthesized Probe
  source 1..80: mol_type = other DNA
ttaaaggggttcaactcattataaacctctagactgtttttggtactgcagatggcaaagggggaagaaggaggtatagg

SEQ ID NO: 116747 - DNA, 80 bp, synthetic construct
  misc_feature 1..80: note = Artificially Synthesized Probe
  source 1..80: mol_type = other DNA
gaattcttgcttggatttgatcaagtcaggtagagttggtcaaatctgttgggagaaagactgcaaaaaacaacaacaat

SEQ ID NO: 116748 - DNA, 80 bp, synthetic construct; identical to SEQ ID NO: 38223
  misc_feature 1..80: note = Artificially Synthesized Probe
  source 1..80: mol_type = other DNA

SEQ ID NO: 116749 - DNA, 80 bp, synthetic construct
  misc_feature 1..80: note = Artificially Synthesized Probe
  source 1..80: mol_type = other DNA
gatcagggattctctggagggtgtactcccagacctcagcaaattgtcctgttggtttgagccataaaattagctcatgc

SEQ ID NO: 116750 - DNA, 80 bp, synthetic construct; identical to SEQ ID NO: 38193
  misc_feature 1..80: note = Artificially Synthesized Probe
  source 1..80: mol_type = other DNA

SEQ ID NO: 116751 - DNA, 80 bp, synthetic construct
  misc_feature 1..80: note = Artificially Synthesized Probe
  source 1..80: mol_type = other DNA
caggaggtcctgacgacatgtgcccaaggtggtcagagcacagtttggttttgtacgttttagggagacatgaggtgtta

SEQ ID NO: 116752 - DNA, 80 bp, synthetic construct
  misc_feature 1..80: note = Artificially Synthesized Probe
  source 1..80: mol_type = other DNA
ttgcattcttttgagcatctgattagcctttccaaaggaggcaatcagatatgcatttatcacagtgagcagaggggtga

SEQ ID NO: 116753 - DNA, 80 bp, synthetic construct; identical to SEQ ID NO: 38224
  misc_feature 1..80: note = Artificially Synthesized Probe
  source 1..80: mol_type = other DNA

SEQ ID NO: 116754 - DNA, 80 bp, synthetic construct
  misc_feature 1..80: note = Artificially Synthesized Probe
  source 1..80: mol_type = other DNA
atgggattacaagcatatggcaacacacctggctaatttttttgtatttttactggagatggggtttcaccatgttggca

SEQ ID NO: 116755 - DNA, 80 bp, synthetic construct
  misc_feature 1..80: note = Artificially Synthesized Probe
  source 1..80: mol_type = other DNA
tttggggtatcctgagccctaacagtttcatgccctactttttaaacaagtaaacctgtagggatttaaatgattttggt

SEQ ID NO: 116756 - DNA, 80 bp, synthetic construct
  misc_feature 1..80: note = Artificially Synthesized Probe
  source 1..80: mol_type = other DNA
ttcggttctaccttgattaggtagtagaagggaaaatgtttatgcttctactatgtaagcaccataaaacctgaaaacca

SEQ ID NO: 116757 - DNA, 80 bp, synthetic construct; identical to SEQ ID NO: 38225
  misc_feature 1..80: note = Artificially Synthesized Probe
  source 1..80: mol_type = other DNA

SEQ ID NO: 116758 - DNA, 80 bp, synthetic construct
  misc_feature 1..80: note = Artificially Synthesized Probe
  source 1..80: mol_type = other DNA
tttgtggaactccatgcatcagtttgccaaggctgccataacaaggttccacagactgaatagcttaaaaaaaaaaaaac

SEQ ID NO: 116759 - DNA, 80 bp, synthetic construct
  misc_feature 1..80: note = Artificially Synthesized Probe
  source 1..80: mol_type = other DNA
catcccctgatctctgcctgcatgttcacatgttgttctccctgtgggcctgtttgtttctgtgtcaaaatttccgcttt

SEQ ID NO: 116760 - DNA, 80 bp, synthetic construct
  misc_feature 1..80: note = Artificially Synthesized Probe
  source 1..80: mol_type = other DNA
aacattcaggaaggatgaggctcacaccatttgtaatcaggacttctctgtagagctgctggaccactcctgcggggagg

SEQ ID NO: 116761 - DNA, 80 bp, synthetic construct; identical to SEQ ID NO: 38226
  misc_feature 1..80: note = Artificially Synthesized Probe
  source 1..80: mol_type = other DNA

SEQ ID NO: 116762 - DNA, 80 bp, synthetic construct
  misc_feature 1..80: note = Artificially Synthesized Probe
  source 1..80: mol_type = other DNA
atgcctttacctatgcatctcttcatccatatccttcatcatagcctttataagctggtaaacatgttttccctgagttc

SEQ ID NO: 116763 - DNA, 80 bp, synthetic construct
  misc_feature 1..80: note = Artificially Synthesized Probe
  source 1..80: mol_type = other DNA
aggaggcatagctcagttggttgtcgtgatcatttaaggcaagcttgtccaactcgtggcccaagatggctttaaatgtg

SEQ ID NO: 116764 - DNA, 80 bp, synthetic construct
  misc_feature 1..80: note = Artificially Synthesized Probe
  source 1..80: mol_type = other DNA
tgatttaaggtatattcatttgtataagaatagagaggcccttgtgcatggagaatgtgtgttactatcttcagtgtctg

SEQ ID NO: 116765 - DNA, 80 bp, synthetic construct; identical to SEQ ID NO: 38227
  misc_feature 1..80: note = Artificially Synthesized Probe
  source 1..80: mol_type = other DNA

SEQ ID NO: 116766 - DNA, 80 bp, synthetic construct
  misc_feature 1..80: note = Artificially Synthesized Probe
  source 1..80: mol_type = other DNA
tagtagagatggggtttcaccatgttggtcagactggtcttgaactcctggcctcaagtgatccacccaccttggcctcc

SEQ ID NO: 116767 - DNA, 80 bp, synthetic construct
  misc_feature 1..80: note = Artificially Synthesized Probe
  source 1..80: mol_type = other DNA
agccttacccctgccctccctctgcagcgttctctgtaaactaatctcagaagtgtcatatcatcacctccgctttgtgc

SEQ ID NO: 116768 - DNA, 80 bp, synthetic construct
  misc_feature 1..80: note = Artificially Synthesized Probe
  source 1..80: mol_type = other DNA
ttggggccctctttgaggccactttccaatgtttttgtagtctcagatctgaagttaggatggtttctctaatactactt

SEQ ID NO: 116769 - DNA, 80 bp, synthetic construct; identical to SEQ ID NO: 38228
  misc_feature 1..80: note = Artificially Synthesized Probe
  source 1..80: mol_type = other DNA

SEQ ID NO: 116770 - DNA, 80 bp, synthetic construct
  misc_feature 1..80: note = Artificially Synthesized Probe
  source 1..80: mol_type = other DNA
ctatttttgctgttttccttttcagcatatatttctctttgataagttcaaaatcataaggttttttttgaacttgctta

SEQ ID NO: 116771 - DNA, 80 bp, synthetic construct
  misc_feature 1..80: note = Artificially Synthesized Probe
  source 1..80: mol_type = other DNA
tcttgttatttagaaacaaattccaggcataatatcatttcattgtatatatttcatatgtctctctggaaaatggggag

SEQ ID NO: 116772 - DNA, 80 bp, synthetic construct
  misc_feature 1..80: note = Artificially Synthesized Probe
  source 1..80: mol_type = other DNA
caagatctttacgttttagccttagagtcttacgattttagattagaaggttggcctcggtcatttcatctgtccctacc

SEQ ID NO: 116773 - DNA, 80 bp, synthetic construct
  misc_feature 1..80: note = Artificially Synthesized Probe
  source 1..80: mol_type = other DNA
atctccaggtagagagtgttgaaattgaattggaggatacccagctggtgtctgctgcagagtagattgcttgcttggga

SEQ ID NO: 116774 - DNA, 80 bp, synthetic construct
  misc_feature 1..80: note = Artificially Synthesized Probe
  source 1..80: mol_type = other DNA
gcattataagcaatgacatgaacataaactcacatcactgggacttgggcattcaaacatgaaggtttgaggtatcttta

SEQ ID NO: 116775 - DNA, 80 bp, synthetic construct; identical to SEQ ID NO: 38229
  misc_feature 1..80: note = Artificially Synthesized Probe
  source 1..80: mol_type = other DNA

SEQ ID NO: 116776 - DNA, 80 bp, synthetic construct
  misc_feature 1..80: note = Artificially Synthesized Probe
  source 1..80: mol_type = other DNA
attttttgtcgcacttgttttgccagaagctttaggatgccgtggcattctctttcatcacaagtcactgacgaggagct

SEQ ID NO: 116777 - DNA, 80 bp, synthetic construct
  misc_feature 1..80: note = Artificially Synthesized Probe
  source 1..80: mol_type = other DNA
cttaaatccagaagaattctgagaatccttgtcatgaactcaagtaaatgatcgtggttgctcttccctgtcctccgcag

SEQ ID NO: 116778 - DNA, 80 bp, synthetic construct; identical to SEQ ID NO: 38230
  misc_feature 1..80: note = Artificially Synthesized Probe
  source 1..80: mol_type = other DNA

SEQ ID NO: 116779 - DNA, 80 bp, synthetic construct
  misc_feature 1..80: note = Artificially Synthesized Probe
  source 1..80: mol_type = other DNA
gagtgagccagctcatggagcttgccactaagtggaaataaggaagaatcatctgaggcagccatggacatttgaaaata

SEQ ID NO: 116780 - DNA, 80 bp, synthetic construct
  misc_feature 1..80: note = Artificially Synthesized Probe
  source 1..80: mol_type = other DNA
aatgataaaggggatatcaccaccgatcccacagaaatacaaactaccatcagagaatactacaaacacctctacgcaaa

SEQ ID NO: 116781 - DNA, 80 bp, synthetic construct
  misc_feature 1..80: note = Artificially Synthesized Probe
  source 1..80: mol_type = other DNA
ggattcacagccgaattctaccagaggtacatggaggaactggtaccattccttctgaaactattccaatcaatagaaaa

SEQ ID NO: 116782 - DNA, 80 bp, synthetic construct
  misc_feature 1..80: note = Artificially Synthesized Probe
  source 1..80: mol_type = other DNA
atcaaaaagcttatccaccatgatcaagtgggcttcatccctgggatgcaaggctggttcaatatacgcaaatcaataaa

SEQ ID NO: 116783 - DNA, 80 bp, synthetic construct; identical to SEQ ID NO: 38231
  misc_feature 1..80: note = Artificially Synthesized Probe
  source 1..80: mol_type = other DNA

SEQ ID NO: 116784 - DNA, 80 bp, synthetic construct
  misc_feature 1..80: note = Artificially Synthesized Probe
  source 1..80: mol_type = other DNA
gcccaaaatctccttaagctgataagcaacttcagcaaagtctcaggatacaaaatcaatgtacaaaaatcacaagcatt

SEQ ID NO: 116785 - DNA, 80 bp, synthetic construct
  misc_feature 1..80: note = Artificially Synthesized Probe
  source 1..80: mol_type = other DNA
tagccattttgaatgtttctgtactgtgatgtatcatttacttgtcttgaagtccttgcctttggggattgtccaggtag

SEQ ID NO: 116786 - DNA, 80 bp, synthetic construct
  misc_feature 1..80: note = Artificially Synthesized Probe
  source 1..80: mol_type = other DNA
gacacaaacaaatggaagaacattccatgctcatgggtaggaagaatcaatatcgtgaaaatggccatactgcccaaggt

SEQ ID NO: 116787 - DNA, 80 bp, synthetic construct
  misc_feature 1..80: note = Artificially Synthesized Probe
  source 1..80: mol_type = other DNA
ttcaaactatactacaaggctacagtaaccaaaacagcatggtactggtaccaaaacagagatatagatcaatggaacag

SEQ ID NO: 116788 - DNA, 80 bp, synthetic construct; identical to SEQ ID NO: 30692
  misc_feature 1..80: note = Artificially Synthesized Probe
  source 1..80: mol_type = other DNA

SEQ ID NO: 116789 - DNA, 80 bp, synthetic construct
  misc_feature 1..80: note = Artificially Synthesized Probe
  source 1..80: mol_type = other DNA
acatgggagaaaattttcgcaacctactcatctgacaaagggctaatatccagaatctacaatgaactcaaacaaattta

SEQ ID NO: 116790 - DNA, 80 bp, synthetic construct
  misc_feature 1..80: note = Artificially Synthesized Probe
  source 1..80: mol_type = other DNA
acaccagttagaatggcaatcattaaaaagtcaggaaacaacaggtgctggagaggatgcggagaaataggaacactttt

SEQ ID NO: 116791 - DNA, 80 bp, synthetic construct; identical to SEQ ID NO: 23999
  misc_feature 1..80: note = Artificially Synthesized Probe
  source 1..80: mol_type = other DNA

SEQ ID NO: 116792 - DNA, 80 bp, synthetic construct
  misc_feature 1..80: note = Artificially Synthesized Probe
  source 1..80: mol_type = other DNA
aattgaacaatgagatcacatggacacaggaaggggaatatcacactctggggactgtggtggggtcgggggagggggga

SEQ ID NO: 116793 - DNA, 80 bp, synthetic construct; identical to SEQ ID NO: 38233
  misc_feature 1..80: note = Artificially Synthesized Probe
  source 1..80: mol_type = other DNA

SEQ ID NO: 116794 - DNA, 80 bp, synthetic construct
  misc_feature 1..80: note = Artificially Synthesized Probe
  source 1..80: mol_type = other DNA
agagggtaagtcatatggctaatgccacaggttttaagtggcagaatcagaatttgaactcaggcacatcttttctagac

SEQ ID NO: 116795 - DNA, 80 bp, synthetic construct
  misc_feature 1..80: note = Artificially Synthesized Probe
  source 1..80: mol_type = other DNA
aggacagagtgagtgtactgcgttggtgcatagtggggagagggaaagcaaagctggataggaaaagtggggtggtttta

SEQ ID NO: 116796 - DNA, 80 bp, synthetic construct
  misc_feature 1..80: note = Artificially Synthesized Probe
  source 1..80: mol_type = other DNA
aaagttgttggataaagtcttctgtaggtaggagaggctatagtagcatttttagtatatatgtatatggttgtggggac

SEQ ID NO: 116797 - DNA, 80 bp, synthetic construct
  misc_feature 1..80: note = Artificially Synthesized Probe
  source 1..80: mol_type = other DNA
gctgtgaagagagtggtttgggctgaaggtgggcctggagcccagacagaaaaggttgccactttccatacccctgagaa

SEQ ID NO: 116798 - DNA, 80 bp, synthetic construct; identical to SEQ ID NO: 38234
  misc_feature 1..80: note = Artificially Synthesized Probe
  source 1..80: mol_type = other DNA

SEQ ID NO: 116799 - DNA, 80 bp, synthetic construct
  misc_feature 1..80: note = Artificially Synthesized Probe
  source 1..80: mol_type = other DNA
gtggcaatgccccagtaatttccagttcgggaactcatcagctttcttgtgtatctcttcatttgatcctcatgtccact

SEQ ID NO: 116800 - DNA, 80 bp, synthetic construct
  misc_feature 1..80: note = Artificially Synthesized Probe
  source 1..80: mol_type = other DNA
tggtgggacaaaactcattgtaatgtctaagattttttattcccccaccaaaaactaatttttgcctcttgggggaggtg

SEQ ID NO: 116801 - DNA, 80 bp, synthetic construct; identical to SEQ ID NO: 38235
  misc_feature 1..80: note = Artificially Synthesized Probe
  source 1..80: mol_type = other DNA

SEQ ID NO: 116802 - DNA, 80 bp, synthetic construct
  misc_feature 1..80: note = Artificially Synthesized Probe
  source 1..80: mol_type = other DNA
gtgctaaagagtatctgccagttaatccttagcaaagcaagatggatacagaataaacaaattgccactgtgacatatgc

SEQ ID NO: 116803 - DNA, 80 bp, synthetic construct
  misc_feature 1..80: note = Artificially Synthesized Probe
  source 1..80: mol_type = other DNA
agactttaaaaacttaaggccaaatcaaaataatactgggctagattgttaggtctgtgggcaccagtgtgtgacttttg

SEQ ID NO: 116804 - DNA, 80 bp, synthetic construct
  misc_feature 1..80: note = Artificially Synthesized Probe
  source 1..80: mol_type = other DNA
ggtgaaatcctgttctgctggttcttataatcaagcagactattgagtgatgcagcatttgtttaaaatcacactttact

SEQ ID NO: 116805 - DNA, 80 bp, synthetic construct
  misc_feature 1..80: note = Artificially Synthesized Probe
  source 1..80: mol_type = other DNA
gggttgttcaaagcgtgccctcctcagcttctagaccctcccattcatgccatgtccagatgacatctccctgaacacaa

SEQ ID NO: 116806 - DNA, 80 bp, synthetic construct; identical to SEQ ID NO: 38236
  misc_feature 1..80: note = Artificially Synthesized Probe
  source 1..80: mol_type = other DNA

SEQ ID NO: 116807 - DNA, 80 bp, synthetic construct; identical to SEQ ID NO: 38194
  misc_feature 1..80: note = Artificially Synthesized Probe
  source 1..80: mol_type = other DNA

SEQ ID NO: 116808 - DNA, 80 bp, synthetic construct
  misc_feature 1..80: note = Artificially Synthesized Probe
  source 1..80: mol_type = other DNA
ccccatttttgtgaaagaggaaatggagagctgcagggactgtctgactttctgagactgatggctaggacttagtacag

SEQ ID NO: 116809 - DNA, 80 bp, synthetic construct
  misc_feature 1..80: note = Artificially Synthesized Probe
  source 1..80: mol_type = other DNA
cttgtcaccctgttagcagagcatgctctcatgtgtcatgtcactcactggatcctcacagggagcctcagaggaggcag

SEQ ID NO: 116810 - DNA, 80 bp, synthetic construct
  misc_feature 1..80: note = Artificially Synthesized Probe
  source 1..80: mol_type = other DNA
aatatgtgtatgtgtatatttacttgtgaaatatagccacaggacgagcataaatattaaacacctacatacccacaagc

SEQ ID NO: 116811 - DNA, 80 bp, synthetic construct; identical to SEQ ID NO: 38237
  misc_feature 1..80: note = Artificially Synthesized Probe
  source 1..80: mol_type = other DNA

SEQ ID NO: 116812 - DNA, 80 bp, synthetic construct
  misc_feature 1..80: note = Artificially Synthesized Probe
  source 1..80: mol_type = other DNA
aggttttcagtgtggtgtcctcccttctgttgcagttaggtcatgtgtgcttccaccaggcaattggcttttatttattt

SEQ ID NO: 116813 - DNA, 80 bp, synthetic construct
  misc_feature 1..80: note = Artificially Synthesized Probe
  source 1..80: mol_type = other DNA
tagtttctgcattcaaactcgtgtagacaagaccacacttaatacagtgcatctcctttgtacagataggggaatgattc

SEQ ID NO: 116814 - DNA, 80 bp, synthetic construct; identical to SEQ ID NO: 38238
  misc_feature 1..80: note = Artificially Synthesized Probe
  source 1..80: mol_type = other DNA

SEQ ID NO: 116815 - DNA, 80 bp, synthetic construct
  misc_feature 1..80: note = Artificially Synthesized Probe
  source 1..80: mol_type = other DNA
aacaaataagcaaagacagcaatccagaagctaaccacagttacatatgtaactacgtaaacattttggaggatatcgaa

SEQ ID NO: 116816 - DNA, 80 bp, synthetic construct
  misc_feature 1..80: note = Artificially Synthesized Probe
  source 1..80: mol_type = other DNA
tggagaagtcgttcaaccttgaccctgtcagagttcttatttgaaagccacattgctgctagtgttcttattgtgttttg

SEQ ID NO: 116817 - DNA, 80 bp, synthetic construct
  misc_feature 1..80: note = Artificially Synthesized Probe
  source 1..80: mol_type = other DNA
gtgataattgtgacatggtcacatagtcatagtgggagctcatgtgagtaaaaatagcttgatacatttgttaagaggct

SEQ ID NO: 116818 - DNA, 80 bp, synthetic construct
  misc_feature 1..80: note = Artificially Synthesized Probe
  source 1..80: mol_type = other DNA
tgtccttctctgcctacctgtatctgcatccttggtcactgtggaaaattatcttctagggtcctgtggtgacagataat

SEQ ID NO: 116819 - DNA, 80 bp, synthetic construct
  misc_feature 1..80: note = Artificially Synthesized Probe
  source 1..80: mol_type = other DNA
atgatcacttgaggccaggagttcgagactagcctggttggcagagtgagactgtgtcttttaaaagaattaaaaaaatt

SEQ ID NO: 116820 - DNA, 80 bp, synthetic construct; identical to SEQ ID NO: 38239
  misc_feature 1..80: note = Artificially Synthesized Probe
  source 1..80: mol_type = other DNA

SEQ ID NO: 116821 - DNA, 80 bp, synthetic construct
  misc_feature 1..80: note = Artificially Synthesized Probe
  source 1..80: mol_type = other DNA
caggagctggactacagcctttttttgtgggttctcttcttaagtagcggggaaaatgactcagttaatccacattcatt

SEQ ID NO: 116822 - DNA, 80 bp, synthetic construct
  misc_feature 1..80: note = Artificially Synthesized Probe
  source 1..80: mol_type = other DNA
ctactagaggaataccaagagtctagagtgcacaaaaagtttctttttgggagaatgtgaggatgttctatggtgtagag

SEQ ID NO: 116823 - DNA, 80 bp, synthetic construct
  misc_feature 1..80: note = Artificially Synthesized Probe
  source 1..80: mol_type = other DNA
cctaagttgtctgccactagaccctgaatgtttaatgcttacttgctgaagcaccaggcgaggagaggctgtgtgaaatg

SEQ ID NO: 116824 - DNA, 80 bp, synthetic construct; identical to SEQ ID NO: 38240
  misc_feature 1..80: note = Artificially Synthesized Probe
  source 1..80: mol_type = other DNA

SEQ ID NO: 116825 - DNA, 80 bp, synthetic construct
  misc_feature 1..80: note = Artificially Synthesized Probe
  source 1..80: mol_type = other DNA
cccgagtttcttcctatgtagaaggggctagttaattctagtgcctaccttataaggttgttgggtggattaaatgagtt

SEQ ID NO: 116826 - DNA, 80 bp, synthetic construct
  misc_feature 1..80: note = Artificially Synthesized Probe
  source 1..80: mol_type = other DNA
gggatttaaaatagtgtgaatataagctgtgtaatgaaaagctagttcttccagttctactttatttattaattttttga

SEQ ID NO: 116827 - DNA, 80 bp, synthetic construct; identical to SEQ ID NO: 38190
  misc_feature 1..80: note = Artificially Synthesized Probe
  source 1..80: mol_type = other DNA

SEQ ID NO: 116828 - DNA, 80 bp, synthetic construct
  misc_feature 1..80: note = Artificially Synthesized Probe
  source 1..80: mol_type = other DNA
tatagaaacggggtttcacgatgttgtccaggctggtcttgaactgggctcaaagtctcccttggcctcccaaagtgcca

SEQ ID NO: 116829 - DNA, 80 bp, synthetic construct; identical to SEQ ID NO: 38241
  misc_feature 1..80: note = Artificially Synthesized Probe
  source 1..80: mol_type = other DNA

SEQ ID NO: 116830 - DNA, 80 bp, synthetic construct
  misc_feature 1..80: note = Artificially Synthesized Probe
  source 1..80: mol_type = other DNA
attcttcaaaaaaaagtatgtagaagctgcgtcctaaagacgttcagagttttgttaggaacttaaagtgaggaaaatga

SEQ ID NO: 116831 - DNA, 80 bp, synthetic construct
  misc_feature 1..80: note = Artificially Synthesized Probe
  source 1..80: mol_type = other DNA
cttgtatatatatttaaaacaggtaaaatcacacatatataaaacaaatatatgtcaaagattttatttaactcactaaa

SEQ ID NO: 116832 - DNA, 80 bp, synthetic construct
  misc_feature 1..80: note = Artificially Synthesized Probe
  source 1..80: mol_type = other DNA
tctctgttaccatgtgcattcgtacacagtatgtgaggacgcttagaaaacaactccctttgatgttttgttgtgttcca

SEQ ID NO: 116833 - DNA, 80 bp, synthetic construct; identical to SEQ ID NO: 38242
  misc_feature 1..80: note = Artificially Synthesized Probe
  source 1..80: mol_type = other DNA

SEQ ID NO: 116834 - DNA, 80 bp, synthetic construct
  misc_feature 1..80: note = Artificially Synthesized Probe
  source 1..80: mol_type = other DNA
tcactcgatcactactccgtttcatttgtttattgggagctgtctttgggagtttttttttaatttttaaaattatttca

SEQ ID NO: 116835 - DNA, 80 bp, synthetic construct
  misc_feature 1..80: note = Artificially Synthesized Probe
  source 1..80: mol_type = other DNA
agtctgttgtatcattcttacacctttgcgtcctcatagcttagctcccagttataagtgagaacatacgatgtttgggt

SEQ ID NO: 116836 - DNA, 80 bp, synthetic construct
  misc_feature 1..80: note = Artificially Synthesized Probe
  source 1..80: mol_type = other DNA
taggcatttaggctggttccatattgttgaaattgcaagttgttttgctatcaacatgtgtgtacaaatgtccttttcat

SEQ ID NO: 116837 - DNA, 80 bp, synthetic construct
  misc_feature 1..80: note = Artificially Synthesized Probe
  source 1..80: mol_type = other DNA
tcactgcatccatgccaacatctattatttttttattcttgcgggagtaaggtggtattgcattgtggttttgatttgca

SEQ ID NO: 116838 - DNA, 80 bp, synthetic construct; identical to SEQ ID NO: 38243
  misc_feature 1..80: note = Artificially Synthesized Probe
  source 1..80: mol_type = other DNA

SEQ ID NO: 116839 - DNA, 80 bp, synthetic construct
  misc_feature 1..80: note = Artificially Synthesized Probe
  source 1..80: mol_type = other DNA
aagtctttgatccatcttgatttgattttttgtataagagatgagaatccagtttcattcttctatatgtggcttgtcag

SEQ ID NO: 116840 - DNA, 80 bp, synthetic construct
  misc_feature 1..80: note = Artificially Synthesized Probe
  source 1..80: mol_type = other DNA
ttggtgaccatgaccttatagtgtagtttgaagtcaggtaatgtactgctgccagatttgttctttttgcttagtcttgc

SEQ ID NO: 116841 - DNA, 80 bp, synthetic construct
  misc_feature 1..80: note = Artificially Synthesized Probe
  source 1..80: mol_type = other DNA
gagcatgggatgtgtcccatttgtgttgtctgtggtttttttcagcagtattttgtagttttccttgtagagatctttca

SEQ ID NO: 116842 - DNA, 80 bp, synthetic construct
  misc_feature 1..80: note = Artificially Synthesized Probe
  source 1..80: mol_type = other DNA
catctggtgagagagacagatgttgaagtgctatgggtgggcaccaatcctacccatgagggtggagccctctgacctaa

SEQ ID NO: 116843 - DNA, 80 bp, synthetic construct; identical to SEQ ID NO: 38244
  misc_feature 1..80: note = Artificially Synthesized Probe
  source 1..80: mol_type = other DNA

SEQ ID NO: 116844 - DNA, 80 bp, synthetic construct
  misc_feature 1..80: note = Artificially Synthesized Probe
  source 1..80: mol_type = other DNA
aatactggctgtaggtttgtcataggtggcttttattacctttaggtatgtcccttctatgttgattttgctgagggttt

SEQ ID NO: 116845 - DNA, 80 bp, synthetic construct
  misc_feature 1..80: note = Artificially Synthesized Probe
  source 1..80: mol_type = other DNA
ggtgtattatctttttgatatgctgttggatttggctagctagtattttgttgagtatttttgcatttatgttcatcagg

SEQ ID NO: 116846 - DNA, 80 bp, synthetic construct; identical to SEQ ID NO: 38245
  misc_feature 1..80: note = Artificially Synthesized Probe
  source 1..80: mol_type = other DNA

SEQ ID NO: 116847 - DNA, 80 bp, synthetic construct
  misc_feature 1..80: note = Artificially Synthesized Probe
  source 1..80: mol_type = other DNA
attgagcttatttggatcttctctcttcttttcttggttaatctcactaatggtctatcgattttatcttttcaaagaac

SEQ ID NO: 116848 - DNA, 80 bp, synthetic construct
  misc_feature 1..80: note = Artificially Synthesized Probe
  source 1..80: mol_type = other DNA
agagtttttggtttaggcatttaaggctatgagctttcctcttagcactgcttttgctgtatcccagaggttttgatagg

SEQ ID NO: 116849 - DNA, 80 bp, synthetic construct
  misc_feature 1..80: note = Artificially Synthesized Probe
  source 1..80: mol_type = other DNA
atctgtgagagtacttgatataatttagattttttaaaatttattgagacttgttttgtagcctgtcatgttggagaatg

SEQ ID NO: 116850 - DNA, 80 bp, synthetic construct
  misc_feature 1..80: note = Artificially Synthesized Probe
  source 1..80: mol_type = other DNA
agtctcccactattattgtattgccatctatctcatttcttaggtctagtagtaacagttttataaatttgcgagcttta

SEQ ID NO: 116851 - DNA, 80 bp, synthetic construct; identical to SEQ ID NO: 38246
  misc_feature 1..80: note = Artificially Synthesized Probe
  source 1..80: mol_type = other DNA

SEQ ID NO: 116852 - DNA, 80 bp, synthetic construct
  misc_feature 1..80: note = Artificially Synthesized Probe
  source 1..80: mol_type = other DNA
ctcctgagtagctgggattacaggtgcccgccaccatgactggctaatttttttgtggttttagtagagacggggtttca

SEQ ID NO: 116853 - DNA, 80 bp, synthetic construct; identical to SEQ ID NO: 38195
  misc_feature 1..80: note = Artificially Synthesized Probe
  source 1..80: mol_type = other DNA

SEQ ID NO: 116854 - DNA, 80 bp, synthetic construct
  misc_feature 1..80: note = Artificially Synthesized Probe
  source 1..80: mol_type = other DNA
gtagttgtctcctggataccttgtttttttgcactgtgatattgtttcataggtcctgtgaaatttatgctttaaggagg

SEQ ID NO: 116855 - DNA, 80 bp, synthetic construct
  misc_feature 1..80: note = Artificially Synthesized Probe
  source 1..80: mol_type = other DNA
aattcttggctgataattaatttgtttaaggaggctaaagataagaccccaatcccttctggcttgtagggcttctgctg

SEQ ID NO: 116856 - DNA, 80 bp, synthetic construct; identical to SEQ ID NO: 38247
  misc_feature 1..80: note = Artificially Synthesized Probe
  source 1..80: mol_type = other DNA

SEQ ID NO: 116857 - DNA, 80 bp, synthetic construct
  misc_feature 1..80: note = Artificially Synthesized Probe
  source 1..80: mol_type = other DNA
ctctgaagttctttttttctactcgttctaatctgttgttgaaatttcccagtgtattttgcatttctaaaatgtgtctt

SEQ ID NO: 116858 - DNA, 80 bp, synthetic construct
  misc_feature 1..80: note = Artificially Synthesized Probe
  source 1..80: mol_type = other DNA
ttggtttggctccgttactggagagctagtgtgatctttgggaggtgctgtagaacctcgttttgtcgtattaccagaat

SEQ ID NO: 116859 - DNA, 80 bp, synthetic construct; identical to SEQ ID NO: 38248
  misc_feature 1..80: note = Artificially Synthesized Probe
  source 1..80: mol_type = other DNA

SEQ ID NO: 116860 - DNA, 80 bp, synthetic construct
  misc_feature 1..80: note = Artificially Synthesized Probe
  source 1..80: mol_type = other DNA
ccatgtggacagactcaggatctctggttagccaggatgttgcaggcggtggaattagctgttgtttttccctttttgga

SEQ ID NO: 116861 - DNA, 80 bp, synthetic construct
  misc_feature 1..80: note = Artificially Synthesized Probe
  source 1..80: mol_type = other DNA
agggccatagagctcccaagagtttatgtcttttgtctttggctaccagggcaggtagagaaaaaccatcaggttagggc

SEQ ID NO: 116862 - DNA, 80 bp, synthetic construct
  misc_feature 1..80: note = Artificially Synthesized Probe
  source 1..80: mol_type = other DNA
cggcagtgacagacccccacccagctgccacacagccagcaaggccagtttcactcccgccatgccccaccatggtgagc

SEQ ID NO: 116863 - DNA, 80 bp, synthetic construct
  misc_feature 1..80: note = Artificially Synthesized Probe
  source 1..80: mol_type = other DNA
ttgtgctcagttgaaattattacgaagttcagctagaagcttccttcatcctgtggcccctccccagttctgctggctgc

SEQ ID NO: 116864 - DNA, 80 bp, synthetic construct
  misc_feature 1..80: note = Artificially Synthesized Probe
  source 1..80: mol_type = other DNA
ctataaagtggaaatagtggctctgtaggtcataagtgattgttgtgagatttggctttatattaacatttataagtctt

SEQ ID NO: 116865 - DNA, 80 bp, synthetic construct; identical to SEQ ID NO: 38249
  misc_feature 1..80: note = Artificially Synthesized Probe
  source 1..80: mol_type = other DNA

SEQ ID NO: 116866 - DNA, 80 bp, synthetic construct
  misc_feature 1..80: note = Artificially Synthesized Probe
  source 1..80: mol_type = other DNA
aagtgggtgctgcacattaatcctgtcttctattgccattttcctgcaagttttcattgtatttatccttttgaatttgt

SEQ ID NO: 116867 - DNA, 80 bp, synthetic construct
  misc_feature 1..80: note = Artificially Synthesized Probe
  source 1..80: mol_type = other DNA
ttttacactagcggtagcctgctttatacatgttctgtttcctgccttgcctgtcttggagattattacacattggctta

SEQ ID NO: 116868 - DNA, 80 bp, synthetic construct; identical to SEQ ID NO: 38250
  misc_feature 1..80: note = Artificially Synthesized Probe
  source 1..80: mol_type = other DNA

SEQ ID NO: 116869 - DNA, 80 bp, synthetic construct
  misc_feature 1..80: note = Artificially Synthesized Probe
  source 1..80: mol_type = other DNA
aatattcttggtaaaggttgtgtgtagttgttaattttcactgctgaatcatattccatcatctgtatgtgtgtgaaaaa

SEQ ID NO: 116870 - DNA, 80 bp, synthetic construct
  misc_feature 1..80: note = Artificially Synthesized Probe
  source 1..80: mol_type = other DNA
gtagctgggactgcaggcatgtgccagcatgcttggctaatttttgtattttttgtagagctgccatctctatgttatgt

SEQ ID NO: 116871 - DNA, 80 bp, synthetic construct
  misc_feature 1..80: note = Artificially Synthesized Probe
  source 1..80: mol_type = other DNA
ctaataggaaaagtgccactatcaacatcttacacatgtcttttgatgaccaaatgtatgcctaacagttgtatatctag

SEQ ID NO: 116872 - DNA, 80 bp, synthetic construct
  misc_feature 1..80: note = Artificially Synthesized Probe
  source 1..80: mol_type = other DNA
gaatttcattacactgacttcagtgtgtgtgtagtgatatcttgtaatattaatttgtatttcctttcagtgaatgattt

SEQ ID NO: 116873 - DNA, 80 bp, synthetic construct; identical to SEQ ID NO: 38251
  misc_feature 1..80: note = Artificially Synthesized Probe
  source 1..80: mol_type = other DNA

SEQ ID NO: 116874 - DNA, 80 bp, synthetic construct
  misc_feature 1..80: note = Artificially Synthesized Probe
  source 1..80: mol_type = other DNA
tgggtacagaaagaaggccaaagtgggaggggagaaagaggtggcaagaagaaattaagataatcagaatctcttttcat

SEQ ID NO: 116875 - DNA, 80 bp, synthetic construct
  misc_feature 1..80: note = Artificially Synthesized Probe
  source 1..80: mol_type = other DNA
ctattcatcaacatggctgagagagtctactttgggatgcaggatggctcagtgaacatgagggagaagcctttctgttg

SEQ ID NO: 116876 - DNA, 80 bp, synthetic construct
  misc_feature 1..80: note = Artificially Synthesized Probe
  source 1..80: mol_type = other DNA
tagactcagctgagcttttactctttggtctgcttgcaggtaccttctttgtttcttcttgtttggtctgcttgtaggta

SEQ ID NO: 116877 - DNA, 80 bp, synthetic construct
  misc_feature 1..80: note = Artificially Synthesized Probe
  source 1..80: mol_type = other DNA
gggggaagagtgggagggggagttaaatccagtcttatgaagtattgttattaaatgtctttttaaaaagagaaatataa

SEQ ID NO: 116878 - DNA, 80 bp, synthetic construct; identical to SEQ ID NO: 38252
  misc_feature 1..80: note = Artificially Synthesized Probe
  source 1..80: mol_type = other DNA

SEQ ID NO: 116879 - DNA, 80 bp, synthetic construct
  misc_feature 1..80: note = Artificially Synthesized Probe
  source 1..80: mol_type = other DNA
tatggaatgacttggaatgtaagctgtcagggagaaaatgttgttacacttttgctaagatctgggggtttcttcatatt

SEQ ID NO: 116880 - DNA, 80 bp, synthetic construct
  misc_feature 1..80: note = Artificially Synthesized Probe
  source 1..80: mol_type = other DNA
tctgttcctttgttattacttgcatggtttggcgtcagaagtccttacctctttatattgtttgcaggtttaaataaaac

SEQ ID NO: 116881 - DNA, 80 bp, synthetic construct; identical to SEQ ID NO: 38196
  misc_feature 1..80: note = Artificially Synthesized Probe
  source 1..80: mol_type = other DNA

SEQ ID NO: 116882 - DNA, 80 bp, synthetic construct
  misc_feature 1..80: note = Artificially Synthesized Probe
  source 1..80: mol_type = other DNA
gccttagctttcctcccttacccaggctccaggctctattgttttttcttaggtgtttttctaattgcctccctgggatt

SEQ ID NO: 116883 - DNA, 80 bp, synthetic construct
  misc_feature 1..80: note = Artificially Synthesized Probe
  source 1..80: mol_type = other DNA
atttctgtgagggtgacgcaagttgctattcagttgcaagtaattgcaccaattatttggtagaatgtagggaggaagcg

SEQ ID NO: 116884 - DNA, 80 bp, synthetic construct
  misc_feature 1..80: note = Artificially Synthesized Probe
  source 1..80: mol_type = other DNA
acctgtcttgtacctgtgttggtggattgctgttcataataattttatagctttaggaagtaggctgacaaaggagtaaa

SEQ ID NO: 116885 - DNA, 80 bp, synthetic construct
  misc_feature 1..80: note = Artificially Synthesized Probe
  source 1..80: mol_type = other DNA
atttctctttactgacccggaagccggcggagagttggtttgctagtgctttgaaatttcagtcgaaggaggttctgggc

SEQ ID NO: 116886 - DNA, 80 bp, synthetic construct
  misc_feature 1..80: note = Artificially Synthesized Probe
  source 1..80: mol_type = other DNA
ctgtctactggatgttttgtgtgtgatgatggggtagggaggtagaggagagggaggaagtggcacacaggtttggcatt

SEQ ID NO: 116887 - DNA, 80 bp, synthetic construct; identical to SEQ ID NO: 38197
  misc_feature 1..80: note = Artificially Synthesized Probe
  source 1..80: mol_type = other DNA

SEQ ID NO: 116888 - DNA, 80 bp, synthetic construct
  misc_feature 1..80: note = Artificially Synthesized Probe
  source 1..80: mol_type = other DNA
gtctctatgcttaggaaagactcaggaattatcagcccctatggctgctcaacaggttttacttccctgctctttgtttg

SEQ ID NO: 116889 - DNA, 80 bp, synthetic construct
  misc_feature 1..80: note = Artificially Synthesized Probe
  source 1..80: mol_type = other DNA
agcttttgtgttatatacctttcaatcttaaccaagtatctggagaatactttcagggcacaggagttactatggatttt

SEQ ID NO: 116890 - DNA, 80 bp, synthetic construct
  misc_feature 1..80: note = Artificially Synthesized Probe
  source 1..80: mol_type = other DNA
ctggggcctacaaataagtatgttttttactaaaatgcaaaagtaaagttctggctttttcctagaagaggcaatatagg

SEQ ID NO: 116891 - DNA, 80 bp, synthetic construct; identical to SEQ ID NO: 38198
  misc_feature 1..80: note = Artificially Synthesized Probe
  source 1..80: mol_type = other DNA

SEQ ID NO: 116892 - DNA, 80 bp, synthetic construct
  misc_feature 1..80: note = Artificially Synthesized Probe
  source 1..80: mol_type = other DNA
gaataaagtaaggagagtgaaaaactgccaatatggcttttgtttccacagctgaaagggtgaagcaagagaatctgaac

SEQ ID NO: 116893 - DNA, 80 bp, synthetic construct
  misc_feature 1..80: note = Artificially Synthesized Probe
  source 1..80: mol_type = other DNA
ttgaccaaggattccttcttggaattgtagttttaggtgcatttgtttaatcacttggtgaatatttcagtgcatgttga

SEQ ID NO: 116894 - DNA, 80 bp, synthetic construct
  misc_feature 1..80: note = Artificially Synthesized Probe
  source 1..80: mol_type = other DNA
gcacaggagttcaagaccagcctgggcattatggtgaaagcctgcctctacaaaaaatacaaaaattagctgggtgtggt

SEQ ID NO: 116895 - DNA, 80 bp, synthetic construct; identical to SEQ ID NO: 38199
  misc_feature 1..80: note = Artificially Synthesized Probe
  source 1..80: mol_type = other DNA

SEQ ID NO: 116896 - DNA, 80 bp, synthetic construct
  misc_feature 1..80: note = Artificially Synthesized Probe
  source 1..80: mol_type = other DNA
cgctggattagtcaagatgatactatgcactggggtaggagatgagatttatgagtgactgatgctcctgggactttatg

SEQ ID NO: 116897 - DNA, 80 bp, synthetic construct
  misc_feature 1..80: note = Artificially Synthesized Probe
  source 1..80: mol_type = other DNA
cgtggtccctacttgtttgttaagtggcaggtgtggtgctgttagtggagtttttttaatccaagtggttttgctgtcac

SEQ ID NO: 116898 - DNA, 80 bp, synthetic construct
  misc_feature 1..80: note = Artificially Synthesized Probe
  source 1..80: mol_type = other DNA
caggtagacaggttagggagttggatagtgcatactgttggagcttccttgatgttaaatctcttggagaccttaaacaa

SEQ ID NO: 116899 - DNA, 80 bp, synthetic construct
  misc_feature 1..80: note = Artificially Synthesized Probe
  source 1..80: mol_type = other DNA
ttcttgaggcaatgcttttaaagcctcagtggcttgtgatggattttcttagtcttttgaaaagctaagtatctaatttt

SEQ ID NO: 116900 - DNA, 80 bp, synthetic construct; identical to SEQ ID NO: 38200
  misc_feature 1..80: note = Artificially Synthesized Probe
  source 1..80: mol_type = other DNA

SEQ ID NO: 116901 - DNA, 80 bp, synthetic construct
  misc_feature 1..80: note = Artificially Synthesized Probe
  source 1..80: mol_type = other DNA
taagagtagccaggtgttagccactttaatagaaaatatgatcaaaactcgattacaagagttcaaaaagacatagaaaa

SEQ ID NO: 116902 - DNA, 80 bp, synthetic construct
  misc_feature 1..80: note = Artificially Synthesized Probe
  source 1..80: mol_type = other DNA
cctgtaatcccaacactttgggagcccgaggcaggcggatcacaaaggcaggagattgagaccatcctggctaacacggt

SEQ ID NO: 116903 - DNA, 80 bp, synthetic construct
  misc_feature 1..80: note = Artificially Synthesized Probe
  source 1..80: mol_type = other DNA
acaaagagcaagactccgtctcaaaaaaaaaaaaaaaaaatttggctgggcacagcggttcatgcttgtaatcccgatac

SEQ ID NO: 116904 - DNA, 80 bp, synthetic construct; identical to SEQ ID NO: 38264
  misc_feature 1..80: note = Artificially Synthesized Probe
  source 1..80: mol_type = other DNA

SEQ ID NO: 116905 - DNA, 80 bp, synthetic construct
  misc_feature 1..80: note = Artificially Synthesized Probe
  source 1..80: mol_type = other DNA
atacaaaaattagccaggcgtggtggcaggcgcctataatcccagctactcgggaggctgagacaccagaatggcttgaa

SEQ ID NO: 116906 - DNA, 80 bp, synthetic construct
  misc_feature 1..80: note = Artificially Synthesized Probe
  source 1..80: mol_type = other DNA
cttgaattctgcatctcaagattcataaatgacttaagttttctatcctaaggaggcttccagaaggaaagacaatcaca

SEQ ID NO: 116907 - DNA, 80 bp, synthetic construct
  misc_feature 1..80: note = Artificially Synthesized Probe
  source 1..80: mol_type = other DNA
agaaaagccagaagtcactggatagagaaagaactaaggaaataggggatttcttgaaggacacagatgcaaacagcatc

SEQ ID NO: 116908 - DNA, 80 bp, synthetic construct; identical to SEQ ID NO: 38265
  misc_feature 1..80: note = Artificially Synthesized Probe
  source 1..80: mol_type = other DNA

SEQ ID NO: 116909 - DNA, 80 bp, synthetic construct
  misc_feature 1..80: note = Artificially Synthesized Probe
  source 1..80: mol_type = other DNA
aaatttgtaatcaaaaaatgaaagtaagacgaatggcccagaaacccgcattttattgacagtcattttcccacagagaa

SEQ ID NO: 116910 - DNA, 80 bp, synthetic construct
  misc_feature 1..80: note = Artificially Synthesized Probe
  source 1..80: mol_type = other DNA
atacaggggcaaaaaatcagcacagagcaagatctgaagaaaaaaaaaaaagctccaattacaattcagcaagcagggta

SEQ ID NO: 116911 - DNA, 80 bp, synthetic construct
  misc_feature 1..80: note = Artificially Synthesized Probe
  source 1..80: mol_type = other DNA
tcagggtccctcacttatgcttaaacacaccaaacagcaagggggatgccatggacccagtgaaatttgtctgtttctca

SEQ ID NO: 116912 - DNA, 80 bp, synthetic construct
  misc_feature 1..80: note = Artificially Synthesized Probe
  source 1..80: mol_type = other DNA
gcagcctcccgagtagctgggattacaggtgcacaccaccacacccagctaatttttttgtatttttagtggagacgggg

SEQ ID NO: 116913 - DNA, 80 bp, synthetic construct
  misc_feature 1..80: note = Artificially Synthesized Probe
  source 1..80: mol_type = other DNA
tttaagtaaaatcatttgtggaaactaaaggagaaaaacaagatagtcctctaacacctctgtgctagagcccttcttgc

SEQ ID NO: 116914 - DNA, 80 bp, synthetic construct; identical to SEQ ID NO: 38266
  misc_feature 1..80: note = Artificially Synthesized Probe
  source 1..80: mol_type = other DNA

SEQ ID NO: 116915 - DNA, 80 bp, synthetic construct
  misc_feature 1..80: note = Artificially Synthesized Probe
  source 1..80: mol_type = other DNA
cagaaacgtcataggtataaaagtccatacaaatacaaaactaacggaagtgtgctccctttgccagagggccaagaggc

SEQ ID NO: 116916 - DNA, 80 bp, synthetic construct
  misc_feature 1..80: note = Artificially Synthesized Probe
  source 1..80: mol_type = other DNA
agtctccccaatctctacaggcatgaaggtctcttagtttatgaaccacaataaaatgaacacttccttttgtttgccct

SEQ ID NO: 116917 - DNA, 80 bp, synthetic construct
  misc_feature 1..80: note = Artificially Synthesized Probe
  source 1..80: mol_type = other DNA
atccaccttctcatgaagggagttgcaaagtattctaggtgcctgtccactccagcttggacaaggttaaggctaaaacc

SEQ ID NO: 116918 - DNA, 80 bp, synthetic construct; identical to SEQ ID NO: 38267
  misc_feature 1..80: note = Artificially Synthesized Probe
  source 1..80: mol_type = other DNA

SEQ ID NO: 116919 - DNA, 80 bp, synthetic construct
  misc_feature 1..80: note = Artificially Synthesized Probe
  source 1..80: mol_type = other DNA
tattccgaacacacacaatcaatcaagagacctacccacaacgggcttgatacttctccatcaaggttttaaaccaaaag

SEQ ID NO: 116920 - DNA, 80 bp, synthetic construct
  misc_feature 1..80: note = Artificially Synthesized Probe
  source 1..80: mol_type = other DNA
atagctaaaggagaatgcaatgagagccttctccctacaccactgcaacacccgtttgggtctgtacagtgcgccctgat

SEQ ID NO: 116921 - DNA, 80 bp, synthetic construct; identical to SEQ ID NO: 38254
  misc_feature 1..80: note = Artificially Synthesized Probe
  source 1..80: mol_type = other DNA

SEQ ID NO: 116922 - DNA, 80 bp, synthetic construct; identical to SEQ ID NO: 38268
  misc_feature 1..80: note = Artificially Synthesized Probe
  source 1..80: mol_type = other DNA

SEQ ID NO: 116923 - DNA, 80 bp, synthetic construct
  misc_feature 1..80: note = Artificially Synthesized Probe
  source 1..80: mol_type = other DNA
gcagggcgccgtccccagcgagcctgggtagatgccgggctcggcgaggcccacgtgcctcccctggagccgaggcctca

SEQ ID NO: 116924 - DNA, 80 bp, synthetic construct
  misc_feature 1..80: note = Artificially Synthesized Probe
  source 1..80: mol_type = other DNA
gttatgtacgataggggagcgattggtttttcctgaatgcaaaacgcgtcctctcccaggcctggagggtttctggggaa

SEQ ID NO: 116925 - DNA, 80 bp, synthetic construct
  misc_feature 1..80: note = Artificially Synthesized Probe
  source 1..80: mol_type = other DNA
gggatggaaatcgaatctactaatttggggaagtgggaaaattccttgtagccaccgggaaatttcgttcagaggtccca

SEQ ID NO: 116926 - DNA, 80 bp, synthetic construct
  misc_feature 1..80: note = Artificially Synthesized Probe
  source 1..80: mol_type = other DNA
ccagtaagtagttgaggaccaccaggagatctggaaaatgcagattccaattccagcggtctcagtggcctgaaattctg

SEQ ID NO: 116927 - DNA, 80 bp, synthetic construct; identical to SEQ ID NO: 38269
  misc_feature 1..80: note = Artificially Synthesized Probe
  source 1..80: mol_type = other DNA

SEQ ID NO: 116928 - DNA, 80 bp, synthetic construct
  misc_feature 1..80: note = Artificially Synthesized Probe
  source 1..80: mol_type = other DNA
agggggctttgcttcctgcttgctcctgtcctgtctggtgtcatccactcttgcttctttatcctggaggtggcagttgg

SEQ ID NO: 116929 - DNA, 80 bp, synthetic construct
  misc_feature 1..80: note = Artificially Synthesized Probe
  source 1..80: mol_type = other DNA
ttaataataccacctaccagtggtagctacttcctgcagttgctactgttagtattataccccgacagttacctaaacac

SEQ ID NO: 116930 - DNA, 80 bp, synthetic construct
  misc_feature 1..80: note = Artificially Synthesized Probe
  source 1..80: mol_type = other DNA
tggctgataacggaccctaagcgagccctcagggctactgacaatcctaaatctctcccccaagggactatttccctttc

SEQ ID NO: 116931 - DNA, 80 bp, synthetic construct; identical to SEQ ID NO: 38270
  misc_feature 1..80: note = Artificially Synthesized Probe
  source 1..80: mol_type = other DNA

SEQ ID NO: 116932 - DNA, 80 bp, synthetic construct
  misc_feature 1..80: note = Artificially Synthesized Probe
  source 1..80: mol_type = other DNA
atgaaatttaatcctcgtcttcctcctcttcttcgtcctggttaatctggaagtaacgtaattcgtaactctctttgctg

SEQ ID NO: 116933 - DNA, 80 bp, synthetic construct
  misc_feature 1..80: note = Artificially Synthesized Probe
  source 1..80: mol_type = other DNA
caggtgtgcaccaccatgcccagctgcatgtttttttgttttgttttgttttgctgttgtagagagttggtgtctcacta

SEQ ID NO: 116934 - DNA, 80 bp, synthetic construct
  misc_feature 1..80: note = Artificially Synthesized Probe
  source 1..80: mol_type = other DNA
ctacacttgatctttagacaagacccacatgctcttccctttaaatatgactccccaggccaatgtgtgcagcctctacc

SEQ ID NO: 116935 - DNA, 80 bp, synthetic construct; identical to SEQ ID NO: 38271
  misc_feature 1..80: note = Artificially Synthesized Probe
  source 1..80: mol_type = other DNA

SEQ ID NO: 116936 - DNA, 80 bp, synthetic construct
  misc_feature 1..80: note = Artificially Synthesized Probe
  source 1..80: mol_type = other DNA
agaggtgcagtcacagctcactgcagcctcaacctcctggctcaagcaatccttccacctcagcctctcaagtagctggg

SEQ ID NO: 116937 - DNA, 80 bp, synthetic construct
  misc_feature 1..80: note = Artificially Synthesized Probe
  source 1..80: mol_type = other DNA
ccagccttcctggcttttcttaatttcttatcctctgggggtctcaagctcagttccccctctctgctcatggttaccta

SEQ ID NO: 116938 - DNA, 80 bp, synthetic construct
  misc_feature 1..80: note = Artificially Synthesized Probe
  source 1..80: mol_type = other DNA
acaggcatgcaccactacacccagctaatttttcctttttttcctttttttttttttttttttttttttttgagacagag

SEQ ID NO: 116939 - DNA, 80 bp, synthetic construct
  misc_feature 1..80: note = Artificially Synthesized Probe
  source 1..80: mol_type = other DNA
agacagggtttcaccatgctggccaggctggtctcgaactcctgacctcgtgatccacccgcctcggcctcccaaagtgc

SEQ ID NO: 116940 - DNA, 80 bp, synthetic construct; identical to SEQ ID NO: 38272
  misc_feature 1..80: note = Artificially Synthesized Probe
  source 1..80: mol_type = other DNA

SEQ ID NO: 116941 - DNA, 80 bp, synthetic construct
  misc_feature 1..80: note = Artificially Synthesized Probe
  source 1..80: mol_type = other DNA
tgcatcattccttaacaaagcacctacgcggttttgtataccagctccaccactttctggggtaatattttctacttttt

SEQ ID NO: 116942 - DNA, 80 bp, synthetic construct
  misc_feature 1..80: note = Artificially Synthesized Probe
  source 1..80: mol_type = other DNA
gcgggcaggtcacctgaggtcgggagttcgagaccagcctgaccaacatggagaaaccccgtctctactaaaaatacaaa

SEQ ID NO: 116943 - DNA, 80 bp, synthetic construct
  misc_feature 1..80: note = Artificially Synthesized Probe
  source 1..80: mol_type = other DNA
tcattacaattcaaggtgttttcccaagcctcaaaaatggcaaaggtaaggcaaatacacccagccaaggctctgagtta

SEQ ID NO: 116944 - DNA, 80 bp, synthetic construct; identical to SEQ ID NO: 38273
  misc_feature 1..80: note = Artificially Synthesized Probe
  source 1..80: mol_type = other DNA

SEQ ID NO: 116945 - DNA, 80 bp, synthetic construct
  misc_feature 1..80: note = Artificially Synthesized Probe
  source 1..80: mol_type = other DNA
ctgtgaatggtgaaaccctgtctctactaaaaatacaaaaaattagccggccgtggtggcgggcacctgtagtcccagct

SEQ ID NO: 116946 - DNA, 80 bp, synthetic construct
  misc_feature 1..80: note = Artificially Synthesized Probe
  source 1..80: mol_type = other DNA
aaaaagaaccagggctagggacagtcctcaaaagaacagctagtttctctctagaattcacttccttctcctagcaaact

SEQ ID NO: 116947 - DNA, 80 bp, synthetic construct
  misc_feature 1..80: note = Artificially Synthesized Probe
  source 1..80: mol_type = other DNA
cattgtactttttatttttctactaaaaatacaaaaaaaaaaaaaaaaaaaaggctgggttcagtggctcacacctgtaa

SEQ ID NO: 116948 - DNA, 80 bp, synthetic construct; identical to SEQ ID NO: 38274
  misc_feature 1..80: note = Artificially Synthesized Probe
  source 1..80: mol_type = other DNA

SEQ ID NO: 116949 - DNA, 80 bp, synthetic construct
  misc_feature 1..80: note = Artificially Synthesized Probe
  source 1..80: mol_type = other DNA
agcaagcgagcgcacgctggagaaaacgctgggatcaacacgcatctgccaggcccagacggcagagggggcactgctgg

SEQ ID NO: 116950 - DNA, 80 bp, synthetic construct
  misc_feature 1..80: note = Artificially Synthesized Probe
  source 1..80: mol_type = other DNA
acatgggaacatcaatgcaacaagtagaatttgtaaactcaagccacaaacttagttaataatcatggttaagggacatt

SEQ ID NO: 116951 - DNA, 80 bp, synthetic construct
  misc_feature 1..80: note = Artificially Synthesized Probe
  source 1..80: mol_type = other DNA
tctattttaacccagcgctgaggctctgagaggtcagtaacatggccaagagctcacaaccagcgaaaggcagggctggg

SEQ ID NO: 116952 - DNA, 80 bp, synthetic construct
  misc_feature 1..80: note = Artificially Synthesized Probe
  source 1..80: mol_type = other DNA
tggggtttggactcttttttttttttaagacagtctggctctgtagcccaggctggagtgcagtggcgcgatctcggctc

SEQ ID NO: 116953 - DNA, 80 bp, synthetic construct; identical to SEQ ID NO: 38275
  misc_feature 1..80: note = Artificially Synthesized Probe
  source 1..80: mol_type = other DNA

SEQ ID NO: 116954 - DNA, 80 bp, synthetic construct
  misc_feature 1..80: note = Artificially Synthesized Probe
  source 1..80: mol_type = other DNA
agtgcgcaaagcagatggcgagcgcggaggtcggttcggccccgccgcgcctcaaggcagcagccaccctggggaaggtg

SEQ ID NO: 116955 - DNA, 80 bp, synthetic construct
  misc_feature 1..80: note = Artificially Synthesized Probe
  source 1..80: mol_type = other DNA
ctcctcggcagagcgaccgcgcggtgtctcagagcgcggcccggagccgcactaagagcgctggacggcgggagagaggc

SEQ ID NO: 116956 - DNA, 80 bp, synthetic construct
  misc_feature 1..80: note = Artificially Synthesized Probe
  source 1..80: mol_type = other DNA
taaaaataaaaaaattagctgggcgtggtggtgcacgcctgtaatcccagctactcgggaggctgaggcatgaggatccc

SEQ ID NO: 116957 - DNA, 80 bp, synthetic construct
  misc_feature 1..80: note = Artificially Synthesized Probe
  source 1..80: mol_type = other DNA
agtcgggtccaggcgcgatagggagggcgcgggcgcccgggcagaggggccgcgggagctcaagcggggctccgtgcgtg

SEQ ID NO: 116958 - DNA, 80 bp, synthetic construct
  misc_feature 1..80: note = Artificially Synthesized Probe
  source 1..80: mol_type = other DNA
ttctgtgccggctgcctgcgtggccgcgcgaccgacggccgcctcacctgcccgctgtgccagtaagtgtcccaaagttc

SEQ ID NO: 116959 - DNA, 80 bp, synthetic construct; identical to SEQ ID NO: 38276
  misc_feature 1..80: note = Artificially Synthesized Probe
  source 1..80: mol_type = other DNA

SEQ ID NO: 116960 - DNA, 80 bp, synthetic construct
  misc_feature 1..80: note = Artificially Synthesized Probe
  source 1..80: mol_type = other DNA
tttgcccaatgccgtgagaagatgtcgaggagcagcttctgcttttgatactaggggaccaaccccactgtctgcaggag

SEQ ID NO: 116961 - DNA, 80 bp, synthetic construct
  misc_feature 1..80: note = Artificially Synthesized Probe
  source 1..80: mol_type = other DNA
gtatcagaatctcggggcctgggcttctctgcagacaccagacggtgctgaagggtcccagcgggctcccgccggtggac

SEQ ID NO: 116962 - DNA, 80 bp, synthetic construct; identical to SEQ ID NO: 38277
  misc_feature 1..80: note = Artificially Synthesized Probe
  source 1..80: mol_type = other DNA

SEQ ID NO: 116963 - DNA, 80 bp, synthetic construct
  misc_feature 1..80: note = Artificially Synthesized Probe
  source 1..80: mol_type = other DNA
ctgggccgaccctgaagggcctctgctacccaagtggcatagaagcagctacagcccaggggaggtggggacagcatgct

SEQ ID NO: 116964 - DNA, 80 bp, synthetic construct
  misc_feature 1..80: note = Artificially Synthesized Probe
  source 1..80: mol_type = other DNA
aggtagggactgcaggtagggcctgttatgtccatcattgcatgcgtccataccagggctgcaggccaagccctggaatc

SEQ ID NO: 116965 - DNA, 80 bp, synthetic construct
  misc_feature 1..80: note = Artificially Synthesized Probe
  source 1..80: mol_type = other DNA
ttgcaggtaaaaaaaaaaaaatttttttttttgagacggattcttgctttatcgcccaggctggagtgcagtggcgccaa

SEQ ID NO: 116966 - DNA, 80 bp, synthetic construct
  misc_feature 1..80: note = Artificially Synthesized Probe
  source 1..80: mol_type = other DNA
gatccgcccgcctcggcctcccaaattgttgggattacaggcgtgagccaccgcgcccggcctcggtaaaatgttttata

SEQ ID NO: 116967 - DNA, 80 bp, synthetic construct
  misc_feature 1..80: note = Artificially Synthesized Probe
  source 1..80: mol_type = other DNA
caggcggatcatgaggtcaggaaacggagaccatcctggctaacacgatgcaaccctatctctactaaaaatacaaaaaa

SEQ ID NO: 116968 - DNA, 80 bp, synthetic construct; identical to SEQ ID NO: 38278
  misc_feature 1..80: note = Artificially Synthesized Probe
  source 1..80: mol_type = other DNA

SEQ ID NO: 116969 - DNA, 80 bp, synthetic construct
  misc_feature 1..80: note = Artificially Synthesized Probe
  source 1..80: mol_type = other DNA
agtgagtgaggcttgcggggccggggacttgggggtgggggcggggcgggcactgaccggagccctcaccaccgcccgcc

SEQ ID NO: 116970 - DNA, 80 bp, synthetic construct
  misc_feature 1..80: note = Artificially Synthesized Probe
  source 1..80: mol_type = other DNA
cagggagagccgggcacactgcgtggacctggaatcggcttacgtgcagggctgcgagcggctggagcaggcggtgctgg

SEQ ID NO: 116971 - DNA, 80 bp, synthetic construct; identical to SEQ ID NO: 38255
  misc_feature 1..80: note = Artificially Synthesized Probe
  source 1..80: mol_type = other DNA

SEQ ID NO: 116972 - DNA, 80 bp, synthetic construct
  misc_feature 1..80: note = Artificially Synthesized Probe
  source 1..80: mol_type = other DNA
aaatttacagttaagtacgcaacctcaataccttttatgcagaaaatagtgggtttccaaagagctgtaagcgctgcgca

SEQ ID NO: 116973 - DNA, 80 bp, synthetic construct
  misc_feature 1..80: note = Artificially Synthesized Probe
  source 1..80: mol_type = other DNA
agtcagcctgcccaattgctgctttagccaggtgagagctaaacactcaccacaacagggatcatttaaaaactctttta

SEQ ID NO: 116974 - DNA, 80 bp, synthetic construct; identical to SEQ ID NO: 38256
  misc_feature 1..80: note = Artificially Synthesized Probe
  source 1..80: mol_type = other DNA

SEQ ID NO: 116975 - DNA, 80 bp, synthetic construct
  misc_feature 1..80: note = Artificially Synthesized Probe
  source 1..80: mol_type = other DNA
ggatcccttgaatctaggagttcgagaccagcctaggcaacatagcaagaccctgtctctacacaacattttttttttta

SEQ ID NO: 116976 - DNA, 80 bp, synthetic construct
  misc_feature 1..80: note = Artificially Synthesized Probe
  source 1..80: mol_type = other DNA
ctcccacagtgaaaggggatccctgctactaaccatctcttcagaccatagcaaggattacatgagatgctcagagagat

SEQ ID NO: 116977 - DNA, 80 bp, synthetic construct
  misc_feature 1..80: note = Artificially Synthesized Probe
  source 1..80: mol_type = other DNA
ccagctaattttgtatttttagtaagagacggggtttctccatgttggtcaggctggtctggaactcccgacctcaggtc

SEQ ID NO: 116978 - DNA, 80 bp, synthetic construct; identical to SEQ ID NO: 38257
  misc_feature 1..80: note = Artificially Synthesized Probe
  source 1..80: mol_type = other DNA

SEQ ID NO: 116979 - DNA, 80 bp, synthetic construct
  misc_feature 1..80: note = Artificially Synthesized Probe
  source 1..80: mol_type = other DNA
attatttccaccatattgtattcagatgaggttaattcaaaatttcaggtggttgaaatgttccctgacatagccggaca

SEQ ID NO: 116980 - DNA, 80 bp, synthetic construct; identical to SEQ ID NO: 38253
  misc_feature 1..80: note = Artificially Synthesized Probe
  source 1..80: mol_type = other DNA

SEQ ID NO: 116981 - DNA, 80 bp, synthetic construct
  misc_feature 1..80: note = Artificially Synthesized Probe
  source 1..80: mol_type = other DNA
atagtacactggggaaaaaaatcaggttaaaaaaaaaaaaaaaaccctgtacaggccaggcagggtgcctcatgcctgta

SEQ ID NO: 116982 - DNA, 80 bp, synthetic construct
  misc_feature 1..80: note = Artificially Synthesized Probe
  source 1..80: mol_type = other DNA
gcaggagaattgcttgaacctgggaggcggaggtttcagtgagctgaaatcgcgccattgcactccagcctagacaagaa

SEQ ID NO: 116983 - DNA, 80 bp, synthetic construct
  misc_feature 1..80: note = Artificially Synthesized Probe
  source 1..80: mol_type = other DNA
aaaggaaagctgtaatagatgattaaggcaccttccctactccactggataaagaacagaaagtttgtgaaaacgcaagt

SEQ ID NO: 116984 - DNA, 80 bp, synthetic construct; identical to SEQ ID NO: 38258
  misc_feature 1..80: note = Artificially Synthesized Probe
  source 1..80: mol_type = other DNA

SEQ ID NO: 116985 - DNA, 80 bp, synthetic construct
  misc_feature 1..80: note = Artificially Synthesized Probe
  source 1..80: mol_type = other DNA
ccgcctccctggttcaagcaattctcctgcctcagcctacccagtagctgggattacaggcatgcaccaccacacccagc

SEQ ID NO: 116986 - DNA, 80 bp, synthetic construct
  misc_feature 1..80: note = Artificially Synthesized Probe
  source 1..80: mol_type = other DNA
atatgcatatccaattcttcagcaactggtaaagtattttaacctcatcctcaaaaaccaacacataacagaggagggaa

SEQ ID NO: 116987 - DNA, 80 bp, synthetic construct; identical to SEQ ID NO: 38259
  misc_feature 1..80: note = Artificially Synthesized Probe
  source 1..80: mol_type = other DNA

SEQ ID NO: 116988 - DNA, 80 bp, synthetic construct
  misc_feature 1..80: note = Artificially Synthesized Probe
  source 1..80: mol_type = other DNA
gtcaggagatcgagaccagcctggccaacatggtgaaaccctgtctctactaaaaaacaaaaaaaattagccacgagtgg

SEQ ID NO: 116989 - DNA, 80 bp, synthetic construct
  misc_feature 1..80: note = Artificially Synthesized Probe
  source 1..80: mol_type = other DNA
aggccgggcgcagtggctcacgcctgtaatcccagcactctgggaggccgaggcgggcggatcacgaggtcaggagatcg

SEQ ID NO: 116990 - DNA, 80 bp, synthetic construct
  misc_feature 1..80: note = Artificially Synthesized Probe
  source 1..80: mol_type = other DNA
agatctcgccactgcactccagcctgggcaacaaagcgagactctgtctccaaaaaaaaaaaaaaagaaatacaagaatt

SEQ ID NO: 116991 - DNA, 80 bp, synthetic construct
  misc_feature 1..80: note = Artificially Synthesized Probe
  source 1..80: mol_type = other DNA
acaattgcatttttttcccagccttggtagcccctttcagttgtctagcctctgcactgtggcacaccactgacattaaa

SEQ ID NO: 116992 - DNA, 80 bp, synthetic construct
  misc_feature 1..80: note = Artificially Synthesized Probe
  source 1..80: mol_type = other DNA
ggcacatgcctgcaattccaaaaactcgggaagctgaggcaggagaatcgcttgaacctgggaggcagaggttgcagtga

SEQ ID NO: 116993 - DNA, 80 bp, synthetic construct; identical to SEQ ID NO: 38260
  misc_feature 1..80: note = Artificially Synthesized Probe
  source 1..80: mol_type = other DNA

SEQ ID NO: 116994 - DNA, 80 bp, synthetic construct
  misc_feature 1..80: note = Artificially Synthesized Probe
  source 1..80: mol_type = other DNA
ccaagaatatttttgagaaaacagtcttgaaagcaagtctgagtaccttactgtttaaaatactttagcctggccgggca

SEQ ID NO: 116995 - DNA, 80 bp, synthetic construct
  misc_feature 1..80: note = Artificially Synthesized Probe
  source 1..80: mol_type = other DNA
gctactcaggaggctgaggcaggacaactgcttgaacccaggaggcggaggctgcagtgagccgagatcgcgccattgca

SEQ ID NO: 116996 - DNA, 80 bp, synthetic construct
  misc_feature 1..80: note = Artificially Synthesized Probe
  source 1..80: mol_type = other DNA
acagatgcaaaccaatcactctgcgggtgcccccactcccatgcagggaaaaggcgggctgggcactgggtgcacgcagg

SEQ ID NO: 116997 - DNA, 80 bp, synthetic construct; identical to SEQ ID NO: 38261
  misc_feature 1..80: note = Artificially Synthesized Probe
  source 1..80: mol_type = other DNA

SEQ ID NO: 116998 - DNA, 80 bp, synthetic construct
  misc_feature 1..80: note = Artificially Synthesized Probe
  source 1..80: mol_type = other DNA
gccccagctgactttacaattttttttttttttttttgagatggagtttagctcttgttgcccaggctggagtgcaatgg

SEQ ID NO: 116999 - DNA, 80 bp, synthetic construct
  misc_feature 1..80: note = Artificially Synthesized Probe
  source 1..80: mol_type = other DNA
actcccgacttcaggtgattcgtccacctctgcctcccaaagtgctgggattacaggcgtgagccactgcgcctggctta

SEQ ID NO: 117000 - DNA, 80 bp, synthetic construct; identical to SEQ ID NO: 38262
  misc_feature 1..80: note = Artificially Synthesized Probe
  source 1..80: mol_type = other DNA

SEQ ID NO: 117001 - DNA, 80 bp, synthetic construct
  misc_feature 1..80: note = Artificially Synthesized Probe
  source 1..80: mol_type = other DNA
gcgaaaccctctctctacaaaaaatacaaatattagccgggtgtggtggcatgtgcctgtagtcccagctactcaggagg

SEQ ID NO: 117002 - DNA, 80 bp, synthetic construct
  misc_feature 1..80: note = Artificially Synthesized Probe
  source 1..80: mol_type = other DNA
gaccacatctggaagcactattcctacagctccctctgctggagacgaaagtgacagtttgttgcaaagacctgtagaaa

SEQ ID NO: 117003 - DNA, 80 bp, synthetic construct
  misc_feature 1..80: note = Artificially Synthesized Probe
  source 1..80: mol_type = other DNA
tctgaatctaaggagtataaaacactgttcacagcactatcagaaaataagccttcaacctagtagaaagagcaaagaca

SEQ ID NO: 117004 - DNA, 80 bp, synthetic construct
  misc_feature 1..80: note = Artificially Synthesized Probe
  source 1..80: mol_type = other DNA
acctccttgtgcttcagaaagctttgcccaaaaaggacctttttagttgttttcttgctatggcaatgacatgaagtccc

SEQ ID NO: 117005 - DNA, 80 bp, synthetic construct; identical to SEQ ID NO: 38263
  misc_feature 1..80: note = Artificially Synthesized Probe
  source 1..80: mol_type = other DNA

SEQ ID NO: 117006 - DNA, 80 bp, synthetic construct
  misc_feature 1..80: note = Artificially Synthesized Probe
  source 1..80: mol_type = other DNA
tggctaacatggtgaaaccctgtttctactaaaaatacagaaaattagccaggcgtggtggcgggcgcctgtttcccagc

SEQ ID NO: 117007 - DNA, 80 bp, synthetic construct
  misc_feature 1..80: note = Artificially Synthesized Probe
  source 1..80: mol_type = other DNA
ttcacagtccctgctttatttccatttgttcacacacgctttaaaaaaaaaaaaaaaaacacatgcactcacacaatacc

SEQ ID NO: 117008 - DNA, 80 bp, synthetic construct
  misc_feature 1..80: note = Artificially Synthesized Probe
  source 1..80: mol_type = other DNA
agagtcatccaaaataaggaggtggctggtagaaacattgccaatctcatcccggtaataaacatcctgggcagcagcag

SEQ ID NO: 117009 - DNA, 80 bp, synthetic construct; identical to SEQ ID NO: 38290
  misc_feature 1..80: note = Artificially Synthesized Probe
  source 1..80: mol_type = other DNA

SEQ ID NO: 117010 - DNA, 80 bp, synthetic construct
  misc_feature 1..80: note = Artificially Synthesized Probe
  source 1..80: mol_type = other DNA
actttattgtatcttccaaatctgtcagtgtattttgatcatgggaggaaggtataatacctttgttcacatactgaccc

SEQ ID NO: 117011 - DNA, 80 bp, synthetic construct
  misc_feature 1..80: note = Artificially Synthesized Probe
  source 1..80: mol_type = other DNA
agaaatagatcaaaatgacagctgtgtttgggtggcgcagtactatgaatatgcttttcctttttctattcaaattttca

SEQ ID NO: 117012 - DNA, 80 bp, synthetic construct
  misc_feature 1..80: note = Artificially Synthesized Probe
  source 1..80: mol_type = other DNA
aaaccccgtctctactaaaaacacaaaaaattagctgggcatggtggcgggcgcctgtagtcccagctactcgggaggct

SEQ ID NO: 117013 - DNA, 80 bp, synthetic construct; identical to SEQ ID NO: 38291
  misc_feature 1..80: note = Artificially Synthesized Probe
  source 1..80: mol_type = other DNA

SEQ ID NO: 117014 - DNA, 80 bp, synthetic construct
  misc_feature 1..80: note = Artificially Synthesized Probe
  source 1..80: mol_type = other DNA
caggcttggtggtgcatgcctgtaatcccagctactcgggaggctgaggcgggagaattgcttgaacctgggaggcggag

SEQ ID NO: 117015 - DNA, 80 bp, synthetic construct
  misc_feature 1..80: note = Artificially Synthesized Probe
  source 1..80: mol_type = other DNA
tctactaaaaatacaaaaattagccaggtgtagtggtgcatgcgtgtaatcccagctattcaggagtctgaggcagaaga

SEQ ID NO: 117016 - DNA, 80 bp, synthetic construct; identical to SEQ ID NO: 38280
  misc_feature 1..80: note = Artificially Synthesized Probe
  source 1..80: mol_type = other DNA

SEQ ID NO: 117017 - DNA, 80 bp, synthetic construct
  misc_feature 1..80: note = Artificially Synthesized Probe
  source 1..80: mol_type = other DNA
tatgggggggtattttttaagattctgttggtttctaacactgccaatcaacaagatgaacatcagtcaaccctaaacaa

SEQ ID NO: 117018 - DNA, 80 bp, synthetic construct; identical to SEQ ID NO: 38292
  misc_feature 1..80: note = Artificially Synthesized Probe
  source 1..80: mol_type = other DNA

SEQ ID NO: 117019 - DNA, 80 bp, synthetic construct
  misc_feature 1..80: note = Artificially Synthesized Probe
  source 1..80: mol_type = other DNA
cagaacgggtaaattatgatgtatctaacgtatgcaacattttaaaattatgtttactaggacttcttgctaacatatgg

SEQ ID NO: 117020 - DNA, 80 bp, synthetic construct
  misc_feature 1..80: note = Artificially Synthesized Probe
  source 1..80: mol_type = other DNA
catttgacaaataaaaatttcaagccctggcagtttccaatatcttgttcaaggtcataaacctaagtggcaatacaagg

SEQ ID NO: 117021 - DNA, 80 bp, synthetic construct
  misc_feature 1..80: note = Artificially Synthesized Probe
  source 1..80: mol_type = other DNA
acaggcgtgtgccaccacatctggctaatttttgtatttttagtagagatggggtttcaccatgttggccaagctggtct

SEQ ID NO: 117022 - DNA, 80 bp, synthetic construct; identical to SEQ ID NO: 38293
  misc_feature 1..80: note = Artificially Synthesized Probe
  source 1..80: mol_type = other DNA

SEQ ID NO: 117023 - DNA, 80 bp, synthetic construct
  misc_feature 1..80: note = Artificially Synthesized Probe
  source 1..80: mol_type = other DNA
aatcttttgaaaaactacttggcaaaatacagcaagaggtttttctttttttttctttttttttttaaattataaacggt

SEQ ID NO: 117024 - DNA, 80 bp, synthetic construct
  misc_feature 1..80: note = Artificially Synthesized Probe
  source 1..80: mol_type = other DNA
catggaatttcaccatgttccccaagctggtctcaagcaatctacccaccttgacctcccaaagtgctgggattacaagc

SEQ ID NO: 117025 - DNA, 80 bp, synthetic construct
  misc_feature 1..80: note = Artificially Synthesized Probe
  source 1..80: mol_type = other DNA
tatagaaacttggcaaataagctctaggacatcaaatcagtgagtcagccacttaaaaacggtttacaggctgggcacag

SEQ ID NO: 117026 - DNA, 80 bp, synthetic construct; identical to SEQ ID NO: 38294
  misc_feature 1..80: note = Artificially Synthesized Probe
  source 1..80: mol_type = other DNA

SEQ ID NO: 117027 - DNA, 80 bp, synthetic construct
  misc_feature 1..80: note = Artificially Synthesized Probe
  source 1..80: mol_type = other DNA
gcacctgtgatcccagctacttgaggtggaaggatcgcttgagcctggaggtggggcttgcagtgagcagagattgcgcc

SEQ ID NO: 117028 - DNA, 80 bp, synthetic construct
  misc_feature 1..80: note = Artificially Synthesized Probe
  source 1..80: mol_type = other DNA
agtgggtagatcacttgaggtcaggagtttgagaccagcctggccaacatggtgaaaccctgtctctaacaaaaaataca

SEQ ID NO: 117029 - DNA, 80 bp, synthetic construct
  misc_feature 1..80: note = Artificially Synthesized Probe
  source 1..80: mol_type = other DNA
ctccagcctgggcgagagtaagaccctgtcttaaggaaaaaaaaaaaaaggttgacaaaggtaatgtagtaatatgtaaa

SEQ ID NO: 117030 - DNA, 80 bp, synthetic construct
  misc_feature 1..80: note = Artificially Synthesized Probe
  source 1..80: mol_type = other DNA
gtccatagtgtcgatagtggttgtgaactgacctcaaatcttcctttttgccaaatggtctccataaacctttttttttt

SEQ ID NO: 117031 - DNA, 80 bp, synthetic construct
  misc_feature 1..80: note = Artificially Synthesized Probe
  source 1..80: mol_type = other DNA
tttatctttagtagagacggggtttcaccatgttggccaggctggtctcgaactcctgacctcgtgatccgccaaccttg

SEQ ID NO: 117032 - DNA, 80 bp, synthetic construct; identical to SEQ ID NO: 38295
  misc_feature 1..80: note = Artificially Synthesized Probe
  source 1..80: mol_type = other DNA

SEQ ID NO: 117033 - DNA, 80 bp, synthetic construct
  misc_feature 1..80: note = Artificially Synthesized Probe
  source 1..80: mol_type = other DNA
aggaaacactagaagaataaacctaaagctaacataaatggttaccaaggagaacaaatgaatgggagaattggaagcaa

SEQ ID NO: 117034 - DNA, 80 bp, synthetic construct
  misc_feature 1..80: note = Artificially Synthesized Probe
  source 1..80: mol_type = other DNA
ctacacccagctaatttttgtatttttagtagagatggggtttcaccacgttggccaggctggtcttgaactcctagctt

SEQ ID NO: 117035 - DNA, 80 bp, synthetic construct; identical to SEQ ID NO: 38296
  misc_feature 1..80: note = Artificially Synthesized Probe
  source 1..80: mol_type = other DNA

SEQ ID NO: 117036 - DNA, 80 bp, synthetic construct
  misc_feature 1..80: note = Artificially Synthesized Probe
  source 1..80: mol_type = other DNA
ttttgttacatacaacttgttatatatgattttgttacacataacttgttatatatgattttgttacatataacttgtta

SEQ ID NO: 117037 - DNA, 80 bp, synthetic construct
  misc_feature 1..80: note = Artificially Synthesized Probe
  source 1..80: mol_type = other DNA
aaacaggctgggcgcagtgactcacacctgctatcacagcactttgggaggccgaggcaggcggatcacctgagctcagg

SEQ ID NO: 117038 - DNA, 80 bp, synthetic construct
  misc_feature 1..80: note = Artificially Synthesized Probe
  source 1..80: mol_type = other DNA
ttactgtcctcatttacagataactcctttacatagcttgtatcaggacagggttctgaatattttgcatgcattaactc

SEQ ID NO: 117039 - DNA, 80 bp, synthetic construct
  misc_feature 1..80: note = Artificially Synthesized Probe
  source 1..80: mol_type = other DNA
tcgccccactgcactccagtctgaatgacagatcaagactccttctcaaaaaaaataaaataaaataaagacaaaaaaaa

SEQ ID NO: 117040 - DNA, 80 bp, synthetic construct
  misc_feature 1..80: note = Artificially Synthesized Probe
  source 1..80: mol_type = other DNA
agtaatcctcccacctcagcctcccaagtagctgagactacaggagtgtgtcaccatgcccagcttattattttttgtaa

SEQ ID NO: 117041 - DNA, 80 bp, synthetic construct; identical to SEQ ID NO: 38297
  misc_feature 1..80: note = Artificially Synthesized Probe
  source 1..80: mol_type = other DNA

SEQ ID NO: 117042 - DNA, 80 bp, synthetic construct
  misc_feature 1..80: note = Artificially Synthesized Probe
  source 1..80: mol_type = other DNA
aggctgagctgggaggatggactgagcccaggagtttgaggttacagtgagctatgattatgccactgtactccaggctg

SEQ ID NO: 117043 - DNA, 80 bp, synthetic construct
  misc_feature 1..80: note = Artificially Synthesized Probe
  source 1..80: mol_type = other DNA
tttgccatagtaacaaaatctttgtaagccttaattgctccctctctcttcaagttccaaccaaggcccaacattcaagg

SEQ ID NO: 117044 - DNA, 80 bp, synthetic construct; identical to SEQ ID NO: 38298
  misc_feature 1..80: note = Artificially Synthesized Probe
  source 1..80: mol_type = other DNA

SEQ ID NO: 117045 - DNA, 80 bp, synthetic construct
  misc_feature 1..80: note = Artificially Synthesized Probe
  source 1..80: mol_type = other DNA
cgcgtggggttccccagcttggtgtagctctccacatttcgagaggcaagcttcacacgcatggtttgtgtcttcgttgg

SEQ ID NO: 117046 - DNA, 80 bp, synthetic construct
  misc_feature 1..80: note = Artificially Synthesized Probe
  source 1..80: mol_type = other DNA
aagaatctcccactaaaggaagaacaaggcaagagaagtaagagagactgaggatactgaaaacagtagtagcagttcaa

SEQ ID NO: 117047 - DNA, 80 bp, synthetic construct
  misc_feature 1..80: note = Artificially Synthesized Probe
  source 1..80: mol_type = other DNA
gcctcaacctcccgaatagctgggattacctattagaatgtttttaacttttgttccattgttgaacatttacactgttt

SEQ ID NO: 117048 - DNA, 80 bp, synthetic construct
  misc_feature 1..80: note = Artificially Synthesized Probe
  source 1..80: mol_type = other DNA
tcaaacctattgattctaaagtctaggttcattttaccacaacataagcagcctgggacctagaacagtctggcctccag

SEQ ID NO: 117049 - DNA, 80 bp, synthetic construct; identical to SEQ ID NO: 38299
  misc_feature 1..80: note = Artificially Synthesized Probe
  source 1..80: mol_type = other DNA

SEQ ID NO: 117050 - DNA, 80 bp, synthetic construct
  misc_feature 1..80: note = Artificially Synthesized Probe
  source 1..80: mol_type = other DNA
tggccaacatggcaaaaccctgtctctattaaaaatacaaaaattagctgggcgtggtggtgcacacctgtagtcccagc

SEQ ID NO: 117051 - DNA, 80 bp, synthetic construct
  misc_feature 1..80: note = Artificially Synthesized Probe
  source 1..80: mol_type = other DNA
tagaaatatggcttcacacaatagaatattggcagtcattagaaatatggctaacctacatatctatattaacatggaaa

SEQ ID NO: 117052 - DNA, 80 bp, synthetic construct
  misc_feature 1..80: note = Artificially Synthesized Probe
  source 1..80: mol_type = other DNA
caacctggctaacacagtgaaagcccatctctactaaaaatacaaaaaaaaatagccgggcgttgtggcgggcacctgta

SEQ ID NO: 117053 - DNA, 80 bp, synthetic construct; identical to SEQ ID NO: 38300
  misc_feature 1..80: note = Artificially Synthesized Probe
  source 1..80: mol_type = other DNA

SEQ ID NO: 117054 - DNA, 80 bp, synthetic construct
  misc_feature 1..80: note = Artificially Synthesized Probe
  source 1..80: mol_type = other DNA
tccgccaccacgcccagctaatttttgtgtttttagtacagaggggatttcgccacgttggccaggatggtctgaactcc

SEQ ID NO: 117055 - DNA, 80 bp, synthetic construct
  misc_feature 1..80: note = Artificially Synthesized Probe
  source 1..80: mol_type = other DNA
ccagccttaccaacaaggtgaaaccctgtctctactaaaagtacaaaaattagccgggcgtggtggcaggcgcctgtagt

SEQ ID NO: 117056 - DNA, 80 bp, synthetic construct
  misc_feature 1..80: note = Artificially Synthesized Probe
  source 1..80: mol_type = other DNA
aattcacagggtactaattctaaactgaatcagttttccaagccaggagaacaatttttagaagacgtagaaaccactag

SEQ ID NO: 117057 - DNA, 80 bp, synthetic construct
  misc_feature 1..80: note = Artificially Synthesized Probe
  source 1..80: mol_type = other DNA
tatttcatattacaactgtgacgttcactactcaaaatataagtagcggaatcttctcctcaggacagtcttaaccaatt

SEQ ID NO: 117058 - DNA, 80 bp, synthetic construct; identical to SEQ ID NO: 38301
  misc_feature 1..80: note = Artificially Synthesized Probe
  source 1..80: mol_type = other DNA

SEQ ID NO: 117059 - DNA, 80 bp, synthetic construct
  misc_feature 1..80: note = Artificially Synthesized Probe
  source 1..80: mol_type = other DNA
atcccacaagcatgcaggtaagcaagagagctgcccagtgtctgccctagacaaagcagtgaggcatggagggccccaag

SEQ ID NO: 117060 - DNA, 80 bp, synthetic construct
  misc_feature 1..80: note = Artificially Synthesized Probe
  source 1..80: mol_type = other DNA
tactgcatctcttcctattaatctcctaatctcccttccccccagcccatctacacaatctcaaatcaacattcccacat

SEQ ID NO: 117061 - DNA, 80 bp, synthetic construct
  misc_feature 1..80: note = Artificially Synthesized Probe
  source 1..80: mol_type = other DNA
ctagacaacacagaactgtctaaactgatgtacatggagcaggtcttttttttttttcctaaagctcttctctagctgga

SEQ ID NO: 117062 - DNA, 80 bp, synthetic construct
  misc_feature 1..80: note = Artificially Synthesized Probe
  source 1..80: mol_type = other DNA
agctatgaaaaaaaattttttaatgttcccaactgtgggctttaaggataaagcccacgcctttaataatggttcagagc

SEQ ID NO: 117063 - DNA, 80 bp, synthetic construct; identical to SEQ ID NO: 38302
  misc_feature 1..80: note = Artificially Synthesized Probe
  source 1..80: mol_type = other DNA

SEQ ID NO: 117064 - DNA, 80 bp, synthetic construct
  misc_feature 1..80: note = Artificially Synthesized Probe
  source 1..80: mol_type = other DNA
cccaggctggcaatggcataatctcggctcaccggaacctctgcctcccggttcaagtggttctcctgcctcagcctccc

SEQ ID NO: 117065 - DNA, 80 bp, synthetic construct
  misc_feature 1..80: note = Artificially Synthesized Probe
  source 1..80: mol_type = other DNA
agccaccacgcctggccaatttagtgactcttagccatgatcatatcaggtaaacactattattttactgatgaggaaac

SEQ ID NO: 117066 - DNA, 80 bp, synthetic construct; identical to SEQ ID NO: 38303
  misc_feature 1..80: note = Artificially Synthesized Probe
  source 1..80: mol_type = other DNA

SEQ ID NO: 117067 - DNA, 80 bp, synthetic construct
  misc_feature 1..80: note = Artificially Synthesized Probe
  source 1..80: mol_type = other DNA
acgcattaaaatgtggctcctgagaggatgttgctgtacatgaactcaaagtaattcaaggattaaacttaacaaccaaa

SEQ ID NO: 117068 - DNA, 80 bp, synthetic construct
  misc_feature 1..80: note = Artificially Synthesized Probe
  source 1..80: mol_type = other DNA
aaatacaaaaaaattagctgggcgtggtggtgaacacctgtaatcccagctactcgggaggctgagacagtagaatcact

SEQ ID NO: 117069 - DNA, 80 bp, synthetic construct
  misc_feature 1..80: note = Artificially Synthesized Probe
  source 1..80: mol_type = other DNA
cactttgggaggccgaggcgggtgcatcacctgaggagttcgagaccagcctggctaacatggtgaaaccccatttctac

SEQ ID NO: 117070 - DNA, 80 bp, synthetic construct
  misc_feature 1..80: note = Artificially Synthesized Probe
  source 1..80: mol_type = other DNA
cgtctcaaaaaaaaaagaaaaaagaaaaaagggccaagagcagtggctcacacctgtaatcccagcactttgggaggcca

SEQ ID NO: 117071 - DNA, 80 bp, synthetic construct; identical to SEQ ID NO: 38281
  misc_feature 1..80: note = Artificially Synthesized Probe
  source 1..80: mol_type = other DNA

SEQ ID NO: 117072 - DNA, 80 bp, synthetic construct; identical to SEQ ID NO: 38304
  misc_feature 1..80: note = Artificially Synthesized Probe
  source 1..80: mol_type = other DNA

SEQ ID NO: 117073 - DNA, 80 bp, synthetic construct
  misc_feature 1..80: note = Artificially Synthesized Probe
  source 1..80: mol_type = other DNA
ctctactaaaaacacaaaacttgtggggcacggtggctcacatttgtaatcccagcattttgggaggccgaggcggcaga

SEQ ID NO: 117074 - DNA, 80 bp, synthetic construct
  misc_feature 1..80: note = Artificially Synthesized Probe
  source 1..80: mol_type = other DNA
gcagtgagccaagattgcgccattgcactccagcccaggcaaagagagcgaaactctctcaaaaaaaaaaaatacaaaaa

SEQ ID NO: 117075 - DNA, 80 bp, synthetic construct
  misc_feature 1..80: note = Artificially Synthesized Probe
  source 1..80: mol_type = other DNA
aataataataataataactaataagttccaggctccacgctaggtgctgaggtctgagcaaacaactatgcaagtttaac

SEQ ID NO: 117076 - DNA, 80 bp, synthetic construct; identical to SEQ ID NO: 38279
  misc_feature 1..80: note = Artificially Synthesized Probe
  source 1..80: mol_type = other DNA

SEQ ID NO: 117077 - DNA, 80 bp, synthetic construct; identical to SEQ ID NO: 38305
  misc_feature 1..80: note = Artificially Synthesized Probe
  source 1..80: mol_type = other DNA

SEQ ID NO: 117078 - DNA, 80 bp, synthetic construct
  misc_feature 1..80: note = Artificially Synthesized Probe
  source 1..80: mol_type = other DNA
gcaaagaactgcttgaggacaggagttcaagaccagcctgggtgacatggcaaaacccggtgtctactaaaaatacatac

SEQ ID NO: 117079 - DNA, 80 bp, synthetic construct
  misc_feature 1..80: note = Artificially Synthesized Probe
  source 1..80: mol_type = other DNA
aagaaaaaaaaaaaaatcctctaggacagatgcagtggttcacacctgtaatcccagcactttgagaggccaaggtagaa

SEQ ID NO: 117080 - DNA, 80 bp, synthetic construct; identical to SEQ ID NO: 38306
  misc_feature 1..80: note = Artificially Synthesized Probe
  source 1..80: mol_type = other DNA

SEQ ID NO: 117081 - DNA, 80 bp, synthetic construct
  misc_feature 1..80: note = Artificially Synthesized Probe
  source 1..80: mol_type = other DNA
aactttttagagattgaattttcttttcagtaacaatttttttttctctgaaacacaagaatattgtcaaagacttactt

SEQ ID NO: 117082 - DNA, 80 bp, synthetic construct
  misc_feature 1..80: note = Artificially Synthesized Probe
  source 1..80: mol_type = other DNA
gcagccatccaaaaatgaaatgccaccttcttggaaagtcaaagtcaaacccctactgatacctaatctggaccaggttc

SEQ ID NO: 117083 - DNA, 80 bp, synthetic construct
  misc_feature 1..80: note = Artificially Synthesized Probe
  source 1..80: mol_type = other DNA
gtggcacatgcctgtaatcccagctactcgggaggctgaggcaggagaattgcttgaacccgggaggcagaggttgcagc

SEQ ID NO: 117084 - DNA, 80 bp, synthetic construct
  misc_feature 1..80: note = Artificially Synthesized Probe
  source 1..80: mol_type = other DNA
tttgggaggctgaggcgggaggatcaccaggtcaggagtttgagaccagcctggccagtatggtgaaaccccgtctctac

SEQ ID NO: 117085 - DNA, 80 bp, synthetic construct; identical to SEQ ID NO: 38307
  misc_feature 1..80: note = Artificially Synthesized Probe
  source 1..80: mol_type = other DNA

SEQ ID NO: 117086 - DNA, 80 bp, synthetic construct
  misc_feature 1..80: note = Artificially Synthesized Probe
  source 1..80: mol_type = other DNA
gtgggcggatcacgaggtcaggagttcaagaccagtctggccaatatagtgaaaccccatctctactaaaaaaacaaaaa

SEQ ID NO: 117087 - DNA, 80 bp, synthetic construct
  misc_feature 1..80: note = Artificially Synthesized Probe
  source 1..80: mol_type = other DNA
gtttttatttttgtagagacaagatctccctatgttgcccagactggtttcgaactcttgggctcaagcgatcctcccac

SEQ ID NO: 117088 - DNA, 80 bp, synthetic construct
  misc_feature 1..80: note = Artificially Synthesized Probe
  source 1..80: mol_type = other DNA
tggccaatatagtgaaacttcatctctactaaaaaatacaacaattagctgggcgtggtggcaggtgcctgtaatccagc

SEQ ID NO: 117089 - DNA, 80 bp, synthetic construct
  misc_feature 1..80: note = Artificially Synthesized Probe
  source 1..80: mol_type = other DNA
agcattttgagaggccaatcacctgaggtcaggagtttgagagcagctggccaacatggtgaaaccccatctctactaaa

SEQ ID NO: 117090 - DNA, 80 bp, synthetic construct; identical to SEQ ID NO: 38308
  misc_feature 1..80: note = Artificially Synthesized Probe
  source 1..80: mol_type = other DNA

SEQ ID NO: 117091 - DNA, 80 bp, synthetic construct
  misc_feature 1..80: note = Artificially Synthesized Probe
  source 1..80: mol_type = other DNA
atatcccactgatctctctgccaacccaccctcaactgaaaaaaacaaaaattagactatcttttaggactgaagtagtg

SEQ ID NO: 117092 - DNA, 80 bp, synthetic construct
  misc_feature 1..80: note = Artificially Synthesized Probe
  source 1..80: mol_type = other DNA
accagcctgaccaatatggtgacatcccatctctactaaaaatagaaaaaaaaattagccgggcatggtggcaggcacct

SEQ ID NO: 117093 - DNA, 80 bp, synthetic construct
  misc_feature 1..80: note = Artificially Synthesized Probe
  source 1..80: mol_type = other DNA
aggccaagtgcagtggctcacacctgtaatcccaacactttgggaggactgcttgaggctaggtgttgaagaccagcctg

SEQ ID NO: 117094 - DNA, 80 bp, synthetic construct
  misc_feature 1..80: note = Artificially Synthesized Probe
  source 1..80: mol_type = other DNA
gtgctctaccctggggaacagattgagaacttgcctcaagaaaaaaaaaaaaaaaaggaacattctagtatatgtgtgtg

SEQ ID NO: 117095 - DNA, 80 bp, synthetic construct; identical to SEQ ID NO: 38309
  misc_feature 1..80: note = Artificially Synthesized Probe
  source 1..80: mol_type = other DNA

SEQ ID NO: 117096 - DNA, 80 bp, synthetic construct
  misc_feature 1..80: note = Artificially Synthesized Probe
  source 1..80: mol_type = other DNA
ctgtaatctcagcactttgggaggccgaggtgggcggatcatgaggtcaagagatcaagaccatcctggccaacatgcgt

SEQ ID NO: 117097 - DNA, 80 bp, synthetic construct
  misc_feature 1..80: note = Artificially Synthesized Probe
  source 1..80: mol_type = other DNA
acagagcaagactctgcatcaaaaaaaaaatacaaaaattagccaggcgtggtggcatgcacctgtaatcccagttactc

SEQ ID NO: 117098 - DNA, 80 bp, synthetic construct
  misc_feature 1..80: note = Artificially Synthesized Probe
  source 1..80: mol_type = other DNA
tcagtttccaacacaactgttggaaaatatacatctccttgttaagtttatcatccagttgtttcccactgggataggag

SEQ ID NO: 117099 - DNA, 80 bp, synthetic construct; identical to SEQ ID NO: 38310
  misc_feature 1..80: note = Artificially Synthesized Probe
  source 1..80: mol_type = other DNA

SEQ ID NO: 117100 - DNA, 80 bp, synthetic construct
  misc_feature 1..80: note = Artificially Synthesized Probe
  source 1..80: mol_type = other DNA
gacaaaaggaaacttctggaggtgacagatatgtttattacccggattgtggtaatggttacaccagtgtatacgtattt

SEQ ID NO: 117101 - DNA, 80 bp, synthetic construct
  misc_feature 1..80: note = Artificially Synthesized Probe
  source 1..80: mol_type = other DNA
tagccgagctcctgctgtggtccacttatactgtaacaagctcattaaatcacaactggcttctataaagaacgggattt

SEQ ID NO: 117102 - DNA, 80 bp, synthetic construct
  misc_feature 1..80: note = Artificially Synthesized Probe
  source 1..80: mol_type = other DNA
catttcagaaacgtaatctctataaacccatctttatagctccatattcagtcagagaacgaagtgtgcttagaagaaat

SEQ ID NO: 117103 - DNA, 80 bp, synthetic construct; identical to SEQ ID NO: 38282
  misc_feature 1..80: note = Artificially Synthesized Probe
  source 1..80: mol_type = other DNA

SEQ ID NO: 117104 - DNA, 80 bp, synthetic construct; identical to SEQ ID NO: 38311
  misc_feature 1..80: note = Artificially Synthesized Probe
  source 1..80: mol_type = other DNA

SEQ ID NO: 117105 - DNA, 80 bp, synthetic construct
  misc_feature 1..80: note = Artificially Synthesized Probe
  source 1..80: mol_type = other DNA
gcgttcactaggaaccttaaaatgcatcacattcatagggatttcaagtgattaccaacttaaaaatgcgaaacctgtta

SEQ ID NO: 117106 - DNA, 80 bp, synthetic construct
  misc_feature 1..80: note = Artificially Synthesized Probe
  source 1..80: mol_type = other DNA
aggggctgccgcgctcgccttacggaagggaggtgcgttctaccggcccgaggtctcccgagcggtgccgagaacggccc

SEQ ID NO: 117107 - DNA, 80 bp, synthetic construct
  misc_feature 1..80: note = Artificially Synthesized Probe
  source 1..80: mol_type = other DNA
ctcctcgcgggccccgaggcaatcccacggaccccctgtgccccgcccgccgcccgggtctccgcatttcctgaggccta

SEQ ID NO: 117108 - DNA, 80 bp, synthetic construct; identical to SEQ ID NO: 38312
  misc_feature 1..80: note = Artificially Synthesized Probe
  source 1..80: mol_type = other DNA

SEQ ID NO: 117109 - DNA, 80 bp, synthetic construct
  misc_feature 1..80: note = Artificially Synthesized Probe
  source 1..80: mol_type = other DNA
cctcccgccactgagcagccgttcattgggcaagggctggtgacacaagatggcggcgccgaacaaggaaggaccctgtc

SEQ ID NO: 117110 - DNA, 80 bp, synthetic construct
  misc_feature 1..80: note = Artificially Synthesized Probe
  source 1..80: mol_type = other DNA
ggctggagtgcagtggcacgatctcagctcactgcaagctccgcctcccgggttcacaccattctcctgcctcagcctcc

SEQ ID NO: 117111 - DNA, 80 bp, synthetic construct; identical to SEQ ID NO: 38313
  misc_feature 1..80: note = Artificially Synthesized Probe
  source 1..80: mol_type = other DNA

SEQ ID NO: 117112 - DNA, 80 bp, synthetic construct
  misc_feature 1..80: note = Artificially Synthesized Probe
  source 1..80: mol_type = other DNA
ttagtaggcagaacttgaagccgaaacaggatatatgcaaagtttcaaaacatctctactaaaatgtttagtaattaggc

SEQ ID NO: 117113 - DNA, 80 bp, synthetic construct
  misc_feature 1..80: note = Artificially Synthesized Probe
  source 1..80: mol_type = other DNA
attccagctacttggggtggctgaggcaggagaatcgcttgaacctgggaggcggaggttgcagtgagctaagatcgcgc

SEQ ID NO: 117114 - DNA, 80 bp, synthetic construct
  misc_feature 1..80: note = Artificially Synthesized Probe
  source 1..80: mol_type = other DNA
gcaggaggatcacttgaggtcaggcgttcaagaccagcctgggtaacataatgagactccgtctctacaaaaaaatattt

SEQ ID NO: 117115 - DNA, 80 bp, synthetic construct
  misc_feature 1..80: note = Artificially Synthesized Probe
  source 1..80: mol_type = other DNA
cagtgagccaagatcgtgccactgcactccagcctgggcgactgggcgagactccctctcaaaaggaaattaaaaaataa

SEQ ID NO: 117116 - DNA, 80 bp, synthetic construct; identical to SEQ ID NO: 38314
  misc_feature 1..80: note = Artificially Synthesized Probe
  source 1..80: mol_type = other DNA

SEQ ID NO: 117117 - DNA, 80 bp, synthetic construct
  misc_feature 1..80: note = Artificially Synthesized Probe
  source 1..80: mol_type = other DNA
ctggatcctgaccccaagagagggttcctggatctcacgcaagaaagaattcaggatgagtccgcagtgcaaagtgaaag

SEQ ID NO: 117118 - DNA, 80 bp, synthetic construct
  misc_feature 1..80: note = Artificially Synthesized Probe
  source 1..80: mol_type = other DNA
aggcgcccgccaccacgcccggctaatttttgtatttttagtagagacggggtttcaacatcttggccaggctggtcttg

SEQ ID NO: 117119 - DNA, 80 bp, synthetic construct
  misc_feature 1..80: note = Artificially Synthesized Probe
  source 1..80: mol_type = other DNA
ttatggttatttcttgatgatatgctatacaaggggtggattattcatgcctcccctttttagaccatataggataactt

SEQ ID NO: 117120 - DNA, 80 bp, synthetic construct; identical to SEQ ID NO: 38315
  misc_feature 1..80: note = Artificially Synthesized Probe
  source 1..80: mol_type = other DNA

SEQ ID NO: 117121 - DNA, 80 bp, synthetic construct
  misc_feature 1..80: note = Artificially Synthesized Probe
  source 1..80: mol_type = other DNA
ccgaggctgcgcacggcgcttgcgggccagctggagttctgggtgggcctgggcttggcgggccccgcactcggagcggc

SEQ ID NO: 117122 - DNA, 80 bp, synthetic construct
  misc_feature 1..80: note = Artificially Synthesized Probe
  source 1..80: mol_type = other DNA
ctgcagcccgccatgcctgagcctccccctcctccgtgggctgctgtgcggccccagcctccccgacgagcgccgccccc

SEQ ID NO: 117123 - DNA, 80 bp, synthetic construct
  misc_feature 1..80: note = Artificially Synthesized Probe
  source 1..80: mol_type = other DNA
tctagctaagggattgtaaatacaccaatcggcagtctgtatctagctcaaggtttgtaaacacaccaatcagcaccctg

SEQ ID NO: 117124 - DNA, 80 bp, synthetic construct
  misc_feature 1..80: note = Artificially Synthesized Probe
  source 1..80: mol_type = other DNA
agcacactgtcaaaacagacctctcccctctctgtaaaatgaaccaatcagcaggatgtgggtagggccagataagaaaa

SEQ ID NO: 117125 - DNA, 80 bp, synthetic construct; identical to SEQ ID NO: 38316
  misc_feature 1..80: note = Artificially Synthesized Probe
  source 1..80: mol_type = other DNA

SEQ ID NO: 117126 - DNA, 80 bp, synthetic construct
  misc_feature 1..80: note = Artificially Synthesized Probe
  source 1..80: mol_type = other DNA
tgtagtcccagctactcagggagctgagatggtaggatctctttagcccaggaggtcgaggctgcagtgagccctgatcg

SEQ ID NO: 117127 - DNA, 80 bp, synthetic construct
  misc_feature 1..80: note = Artificially Synthesized Probe
  source 1..80: mol_type = other DNA
ttcttgaagtcagtgagaccaagaacccaccaattcccaacacgctgtgacttaaaatgccttaactgtatgggaatgca

SEQ ID NO: 117128 - DNA, 80 bp, synthetic construct
  misc_feature 1..80: note = Artificially Synthesized Probe
  source 1..80: mol_type = other DNA
gcttcagcctgggtgacagcaagaccctgtctcaaaaaacaaaacaaggctgggcatggtggctcatgcttgtaatcaca

SEQ ID NO: 117129 - DNA, 80 bp, synthetic construct; identical to SEQ ID NO: 38317
  misc_feature 1..80: note = Artificially Synthesized Probe
  source 1..80: mol_type = other DNA

SEQ ID NO: 117130 - DNA, 80 bp, synthetic construct
  misc_feature 1..80: note = Artificially Synthesized Probe
  source 1..80: mol_type = other DNA
aatacaaaaaattagccaggtatggtggcacacacctgtaattccagctacctgggaggttgaggccggagaatcatttg

SEQ ID NO: 117131 - DNA, 80 bp, synthetic construct
  misc_feature 1..80: note = Artificially Synthesized Probe
  source 1..80: mol_type = other DNA
tcaaatattaatccttcttacctccatgtctcctcataggttgtatgtgcacctgattttccttgtgggaaaggagaaca

SEQ ID NO: 117132 - DNA, 80 bp, synthetic construct
  misc_feature 1..80: note = Artificially Synthesized Probe
  source 1..80: mol_type = other DNA
cactgcacatcagcagattagcgaaacctccttattccctaattttggaaatatagaactaaccagatatcacaggaaac

SEQ ID NO: 117133 - DNA, 80 bp, synthetic construct; identical to SEQ ID NO: 38318
  misc_feature 1..80: note = Artificially Synthesized Probe
  source 1..80: mol_type = other DNA

SEQ ID NO: 117134 - DNA, 80 bp, synthetic construct
  misc_feature 1..80: note = Artificially Synthesized Probe
  source 1..80: mol_type = other DNA
agtgagccgagatcatgccactgcactatagcctgggcgacagagcgagactccgtctcaaaaaaaaaaaaaaaagacat

SEQ ID NO: 117135 - DNA, 80 bp, synthetic construct
  misc_feature 1..80: note = Artificially Synthesized Probe
  source 1..80: mol_type = other DNA
actccccccccatcaagccattttataagggaacttaatacaattcacaaaggcaaagccttcattactcaatcatctcc

SEQ ID NO: 117136 - DNA, 80 bp, synthetic construct
  misc_feature 1..80: note = Artificially Synthesized Probe
  source 1..80: mol_type = other DNA
tgttccttccctacagagcatgagtctgcaaattaccacctgcaggccagccacaaatttctgcaaataactttttttgt

SEQ ID NO: 117137 - DNA, 80 bp, synthetic construct
  misc_feature 1..80: note = Artificially Synthesized Probe
  source 1..80: mol_type = other DNA
gagctgtgattgatcgggggacagtcagcaaaattatggactggatgttggtcaacagtactaattaactggccagttaa

SEQ ID NO: 117138 - DNA, 80 bp, synthetic construct
  misc_feature 1..80: note = Artificially Synthesized Probe
  source 1..80: mol_type = other DNA
acatgcccagctaatttttgtatttttagtagagacagagtttcgccatgttggccaggctggtctcgaactcctgacct

SEQ ID NO: 117139 - DNA, 80 bp, synthetic construct; identical to SEQ ID NO: 38319
  misc_feature 1..80: note = Artificially Synthesized Probe
  source 1..80: mol_type = other DNA

SEQ ID NO: 117140 - DNA, 80 bp, synthetic construct
  misc_feature 1..80: note = Artificially Synthesized Probe
  source 1..80: mol_type = other DNA
aggcgcacaccaccacacccagcccagaaaagttttaaacgaaaaaacgagccgggcgccgtggttcacgccagtaatcc

SEQ ID NO: 117141 - DNA, 80 bp, synthetic construct
  misc_feature 1..80: note = Artificially Synthesized Probe
  source 1..80: mol_type = other DNA
aggtgatctgcccacctctgcctcccaaagtgctgggattacaggcatgaaccactgtctgttgatcatttttaatgtga

SEQ ID NO: 117142 - DNA, 80 bp, synthetic construct; identical to SEQ ID NO: 38320
  misc_feature 1..80: note = Artificially Synthesized Probe
  source 1..80: mol_type = other DNA

SEQ ID NO: 117143 - DNA, 80 bp, synthetic construct
  misc_feature 1..80: note = Artificially Synthesized Probe
  source 1..80: mol_type = other DNA
ctgctgttctcaagcccatcagttgccctattgcttctctctgctttctccttcacagacactgataacatgaggcattg

SEQ ID NO: 117144 - DNA, 80 bp, synthetic construct
  misc_feature 1..80: note = Artificially Synthesized Probe
  source 1..80: mol_type = other DNA
gtcaggagttgcagaccagcctgaccaacatggagaccaacatgtcccgggcgtggtggcacatgcctgtaatcccagct

SEQ ID NO: 117145 - DNA, 80 bp, synthetic construct
  misc_feature 1..80: note = Artificially Synthesized Probe
  source 1..80: mol_type = other DNA
agatcgagaccatcctggctaacacagtgaaaccccgtctctactaaaaatacaaaaaattagccgggcattgtgggggg

SEQ ID NO: 117146 - DNA, 80 bp, synthetic construct; identical to SEQ ID NO: 38321
  misc_feature 1..80: note = Artificially Synthesized Probe
  source 1..80: mol_type = other DNA

SEQ ID NO: 117147 - DNA, 80 bp, synthetic construct
  misc_feature 1..80: note = Artificially Synthesized Probe
  source 1..80: mol_type = other DNA
tttcctgaatttgatcattgtattatgattatgtaagagaatacccttgctctcaggctacacacatgctcaactattca

SEQ ID NO: 117148 - DNA, 80 bp, synthetic construct
  misc_feature 1..80: note = Artificially Synthesized Probe
  source 1..80: mol_type = other DNA
atacccaaaatatacacaaaaagacaacttactaagaaaaagataatagaaaaatgagcagaagaattgacgccgtactt

SEQ ID NO: 117149 - DNA, 80 bp, synthetic construct
  misc_feature 1..80: note = Artificially Synthesized Probe
  source 1..80: mol_type = other DNA
gctacttgggaggccgaggcagagaattgcttgaacccacgtggccgacgttgcagtgagccgagattgcgtcactgcac

SEQ ID NO: 117150 - DNA, 80 bp, synthetic construct
  misc_feature 1..80: note = Artificially Synthesized Probe
  source 1..80: mol_type = other DNA
gaggctgaggcaggtagatcatccgaggtcaggagtttgagaccatggtgaaaccccatctctactaaaaatacaaaaaa

SEQ ID NO: 117151 - DNA, 80 bp, synthetic construct; identical to SEQ ID NO: 38322
  misc_feature 1..80: note = Artificially Synthesized Probe
  source 1..80: mol_type = other DNA

SEQ ID NO: 117152 - DNA, 80 bp, synthetic construct
  misc_feature 1..80: note = Artificially Synthesized Probe
  source 1..80: mol_type = other DNA
taggaatgggaaagtcaggacctctaaaaaattctgtcctccaagtcaacaaaaagtgtgaaactttgtaaaatatttga

SEQ ID NO: 117153 - DNA, 80 bp, synthetic construct
  misc_feature 1..80: note = Artificially Synthesized Probe
  source 1..80: mol_type = other DNA
gtatattggttccaccatgcgtggtggcttaagcctgtaatcccagcactctgggaggctgcagcgggtggatcacgagg

SEQ ID NO: 117154 - DNA, 80 bp, synthetic construct
  misc_feature 1..80: note = Artificially Synthesized Probe
  source 1..80: mol_type = other DNA
gaaaatcgctccattgcactccagcctgggcaacagggtgagactctgtctcaaaaaaaaaaacaaaagatgtacattgg

SEQ ID NO: 117155 - DNA, 80 bp, synthetic construct; identical to SEQ ID NO: 38323
  misc_feature 1..80: note = Artificially Synthesized Probe
  source 1..80: mol_type = other DNA

SEQ ID NO: 117156 - DNA, 80 bp, synthetic construct
  misc_feature 1..80: note = Artificially Synthesized Probe
  source 1..80: mol_type = other DNA
gtggcacaagcttggctcactgcaacctccaactcctgggttcaagcaattctcctgtctcagcctcccaagtagctggg

SEQ ID NO: 117157 - DNA, 80 bp, synthetic construct
  misc_feature 1..80: note = Artificially Synthesized Probe
  source 1..80: mol_type = other DNA
cggcctttttatttattttgtgactgcaatctgtcatgttggtatcttattgctacagagtctgctctctccgtctcaag

SEQ ID NO: 117158 - DNA, 80 bp, synthetic construct; identical to SEQ ID NO: 38283
  misc_feature 1..80: note = Artificially Synthesized Probe
  source 1..80: mol_type = other DNA

SEQ ID NO: 117159 - DNA, 80 bp, synthetic construct
  misc_feature 1..80: note = Artificially Synthesized Probe
  source 1..80: mol_type = other DNA
ttggaatgcccttggccaagaggaggaatccattcaggtggttggggggcttagaattttatttttggtttacatccatt

SEQ ID NO: 117160 - DNA, 80 bp, synthetic construct
  misc_feature 1..80: note = Artificially Synthesized Probe
  source 1..80: mol_type = other DNA
gggcaacatggtaaaaccccatttctactacaaatacaaaaaattagctgggcatggtggcacatgcctgtaattccagc

SEQ ID NO: 117161 - DNA, 80 bp, synthetic construct; identical to SEQ ID NO: 38324
  misc_feature 1..80: note = Artificially Synthesized Probe
  source 1..80: mol_type = other DNA

SEQ ID NO: 117162 - DNA, 80 bp, synthetic construct
  misc_feature 1..80: note = Artificially Synthesized Probe
  source 1..80: mol_type = other DNA
ccccgtctctacagataaattaaaaaataactgggcatggtagcatgcacctatggtcccagctactcaagaggctgagg

SEQ ID NO: 117163 - DNA, 80 bp, synthetic construct
  misc_feature 1..80: note = Artificially Synthesized Probe
  source 1..80: mol_type = other DNA
atctcaggtatctgaaccaagactgccaccactctcctccctatcagatcagcaaggcagagaatctgctgcagattgct

SEQ ID NO: 117164 - DNA, 80 bp, synthetic construct; identical to SEQ ID NO: 38325
  misc_feature 1..80: note = Artificially Synthesized Probe
  source 1..80: mol_type = other DNA

SEQ ID NO: 117165 - DNA, 80 bp, synthetic construct
  misc_feature 1..80: note = Artificially Synthesized Probe
  source 1..80: mol_type = other DNA
aaggaataggttgggctagttaactgcagcaggagcatgtccttaaggcacagattgctcatgctattgtttgtggttta

SEQ ID NO: 117166 - DNA, 80 bp, synthetic construct
  misc_feature 1..80: note = Artificially Synthesized Probe
  source 1..80: mol_type = other DNA
ccagattttggggggcttgttcccaacaatggtgaaaccccgtctctactaaaaatatgaaaattagccgggcctggttg

SEQ ID NO: 117167 - DNA, 80 bp, synthetic construct
  misc_feature 1..80: note = Artificially Synthesized Probe
  source 1..80: mol_type = other DNA
gctttatctttgggatgaggaaaaggtcagcgtttctcatcctgcctccagctacctgttgtttaatctaagatagtagg

SEQ ID NO: 117168 - DNA, 80 bp, synthetic construct
  misc_feature 1..80: note = Artificially Synthesized Probe
  source 1..80: mol_type = other DNA
cacggtgaaaccccgtctctactaaaaatacaaaaaattagccgggcgtggtggcacgtacctgtagtcccagctattcg

SEQ ID NO: 117169 - DNA, 80 bp, synthetic construct
  misc_feature 1..80: note = Artificially Synthesized Probe
  source 1..80: mol_type = other DNA
actttgcatttcaagagaggccagtggagaggaatttggcttctcccacacttccccacccactgagtgcttaggtccta

SEQ ID NO: 117170 - DNA, 80 bp, synthetic construct; identical to SEQ ID NO: 38326
  misc_feature 1..80: note = Artificially Synthesized Probe
  source 1..80: mol_type = other DNA

SEQ ID NO: 117171 - DNA, 80 bp, synthetic construct
  misc_feature 1..80: note = Artificially Synthesized Probe
  source 1..80: mol_type = other DNA
gggtgttgtcagggaaagacaggacaacacctctatcaaggcaactgtcatcccaagacagctatggatttacccatagc

SEQ ID NO: 117172 - DNA, 80 bp, synthetic construct
  misc_feature 1..80: note = Artificially Synthesized Probe
  source 1..80: mol_type = other DNA
gtggcagtcacctgtaattccagctactcaggaggctgaggcatgagaattgcttgaacccaggagaaagagattgcagt

SEQ ID NO: 117173 - DNA, 80 bp, synthetic construct
  misc_feature 1..80: note = Artificially Synthesized Probe
  source 1..80: mol_type = other DNA
gaggtgggaggatcacctgaggtcgggagttggagaccagcctgacccatatggagaaaccctatctctactaaaaatac

SEQ ID NO: 117174 - DNA, 80 bp, synthetic construct; identical to SEQ ID NO: 38327
  misc_feature 1..80: note = Artificially Synthesized Probe
  source 1..80: mol_type = other DNA

SEQ ID NO: 117175 - DNA, 80 bp, synthetic construct
  misc_feature 1..80: note = Artificially Synthesized Probe
  source 1..80: mol_type = other DNA
ctgtagtcccagctacctgggaggctgaggcaggagaatggcgtgaacccgggagcagaggttgcagtgagccgagatca

SEQ ID NO: 117176 - DNA, 80 bp, synthetic construct
  misc_feature 1..80: note = Artificially Synthesized Probe
  source 1..80: mol_type = other DNA
ttcgagaccagcctggccaacatggtgaaaccccgtctctactaaaactacaaaaattagccagatacagtggcaggcac

SEQ ID NO: 117177 - DNA, 80 bp, synthetic construct
  misc_feature 1..80: note = Artificially Synthesized Probe
  source 1..80: mol_type = other DNA
aatacaaaagcaaataattaaaccctaaaggggaggagggtcaagatctagaatccctacagcatattatccaaaatgtc

SEQ ID NO: 117178 - DNA, 80 bp, synthetic construct; identical to SEQ ID NO: 38328
  misc_feature 1..80: note = Artificially Synthesized Probe
  source 1..80: mol_type = other DNA

SEQ ID NO: 117179 - DNA, 80 bp, synthetic construct
  misc_feature 1..80: note = Artificially Synthesized Probe
  source 1..80: mol_type = other DNA
cacagttcggctggatcaacatctttgctcacaggtcctaccaaaacccctccctgctgtctcacaaacatcagcccctc

SEQ ID NO: 117180 - DNA, 80 bp, synthetic construct
  misc_feature 1..80: note = Artificially Synthesized Probe
  source 1..80: mol_type = other DNA
aacaagagtgactccggttttttgtttgtttgtttttgaggcacacttgtgctcttgttgcccaggctggagtgcaatgg

SEQ ID NO: 117181 - DNA, 80 bp, synthetic construct
  misc_feature 1..80: note = Artificially Synthesized Probe
  source 1..80: mol_type = other DNA
aactcccaacctcaggtgatccgcccaccttggccttgcagagtgctgggattacaggcctgagccaccgcgcccggccc

SEQ ID NO: 117182 - DNA, 80 bp, synthetic construct
  misc_feature 1..80: note = Artificially Synthesized Probe
  source 1..80: mol_type = other DNA
gcaccacgcccagctgattttttgcatttttagtagagacagggtttcaccgtgttagccaggatggagtgactccattt

SEQ ID NO: 117183 - DNA, 80 bp, synthetic construct; identical to SEQ ID NO: 38329
  misc_feature 1..80: note = Artificially Synthesized Probe
  source 1..80: mol_type = other DNA

SEQ ID NO: 117184 - DNA, 80 bp, synthetic construct
  misc_feature 1..80: note = Artificially Synthesized Probe
  source 1..80: mol_type = other DNA
tcgagaccagcctgaccaacatggtgaaaccccatctctactaaaaatacaaaaattagccgggtgtggtggtgtgcccc

SEQ ID NO: 117185 - DNA, 80 bp, synthetic construct
  misc_feature 1..80: note = Artificially Synthesized Probe
  source 1..80: mol_type = other DNA
ttgagagtatccagatatcccaatatctggagaacaaagacatagttcctaattttgctttaaagcaaatcgataatagt

SEQ ID NO: 117186 - DNA, 80 bp, synthetic construct; identical to SEQ ID NO: 38330
  misc_feature 1..80: note = Artificially Synthesized Probe
  source 1..80: mol_type = other DNA

SEQ ID NO: 117187 - DNA, 80 bp, synthetic construct
  misc_feature 1..80: note = Artificially Synthesized Probe
  source 1..80: mol_type = other DNA
cctcaggtgatctgcccaccttggcctcccaaagtgctgggattataggcgtgagccaccacaccgggctcactacttta

SEQ ID NO: 117188 - DNA, 80 bp, synthetic construct
  misc_feature 1..80: note = Artificially Synthesized Probe
  source 1..80: mol_type = other DNA
agaacctccttctgtcagctatgaaggttcagatgtgtcggtcatttctccctctagtccacctgaaaactctattgaga

SEQ ID NO: 117189 - DNA, 80 bp, synthetic construct
  misc_feature 1..80: note = Artificially Synthesized Probe
  source 1..80: mol_type = other DNA
tgtgagagcacatgttcccttttctatgtctgatttggctctatgcaaagagaagtttggtcttttctctgaagatccag

SEQ ID NO: 117190 - DNA, 80 bp, synthetic construct
  misc_feature 1..80: note = Artificially Synthesized Probe
  source 1..80: mol_type = other DNA
tgcagtgaatggagatcgcgccactgcactccagcatggcaacagagcgagactccatctcaaaaaaaaaaacacacgct

SEQ ID NO: 117191 - DNA, 80 bp, synthetic construct
  misc_feature 1..80: note = Artificially Synthesized Probe
  source 1..80: mol_type = other DNA
tggcgctttcctgagatgagcttctcattctcaatgtacgtgtctttcttgagcttgccagccaccaggcgctcagcctc

SEQ ID NO: 117192 - DNA, 80 bp, synthetic construct
  misc_feature 1..80: note = Artificially Synthesized Probe
  source 1..80: mol_type = other DNA
ctaggacccatgcagacgaggtattggctcacaacccaaaccattatatatatcaggcaggaggtatagcagttccagat

SEQ ID NO: 117193 - DNA, 80 bp, synthetic construct; identical to SEQ ID NO: 38331
  misc_feature 1..80: note = Artificially Synthesized Probe
  source 1..80: mol_type = other DNA

SEQ ID NO: 117194 - DNA, 80 bp, synthetic construct
  misc_feature 1..80: note = Artificially Synthesized Probe
  source 1..80: mol_type = other DNA
ggctggagtgcagtggcacgatctcagctcacagcaagctctgcctcctgggttcatgccattctgctgcctcagcctcc

SEQ ID NO: 117195 - DNA, 80 bp, synthetic construct
  misc_feature 1..80: note = Artificially Synthesized Probe
  source 1..80: mol_type = other DNA
ccaccgcacccagcctggcatttttagtttttaataacggacaaagcagaggaagcagaaagagcaagaaggacctccca

SEQ ID NO: 117196 - DNA, 80 bp, synthetic construct; identical to SEQ ID NO: 38332
  misc_feature 1..80: note = Artificially Synthesized Probe
  source 1..80: mol_type = other DNA

SEQ ID NO: 117197 - DNA, 80 bp, synthetic construct
  misc_feature 1..80: note = Artificially Synthesized Probe
  source 1..80: mol_type = other DNA
cctgtaatcctggctactcgggaggctgagtcaggagaatctcttgaaaccgggaggcggaggttgcagtgagctgagat

SEQ ID NO: 117198 - DNA, 80 bp, synthetic construct
  misc_feature 1..80: note = Artificially Synthesized Probe
  source 1..80: mol_type = other DNA
agaaaggaaccacgaaatagccaggcaagtccaggagtgacagggccaaaaccttccgccacagctcccatcagacaact

SEQ ID NO: 117199 - DNA, 80 bp, synthetic construct
  misc_feature 1..80: note = Artificially Synthesized Probe
  source 1..80: mol_type = other DNA
gtatgatcacagggtagatggacaagcccatagagagcattttacctatcatctaagctgttcttcagggactttggttt

SEQ ID NO: 117200 - DNA, 80 bp, synthetic construct; identical to SEQ ID NO: 38333
  misc_feature 1..80: note = Artificially Synthesized Probe
  source 1..80: mol_type = other DNA

SEQ ID NO: 117201 - DNA, 80 bp, synthetic construct
  misc_feature 1..80: note = Artificially Synthesized Probe
  source 1..80: mol_type = other DNA
ataatctttaaataacctttgaattagacaaaaattattttatttattatttatttatttatttattttgagatggagtc

SEQ ID NO: 117202 - DNA, 80 bp, synthetic construct; identical to SEQ ID NO: 38284
  misc_feature 1..80: note = Artificially Synthesized Probe
  source 1..80: mol_type = other DNA

SEQ ID NO: 117203 - DNA, 80 bp, synthetic construct
  misc_feature 1..80: note = Artificially Synthesized Probe
  source 1..80: mol_type = other DNA
agacggggtttcactgtgttagccaggctggtctcgatctcctgacctcgtgatccgcccgccttggcctcccaaagtgc

SEQ ID NO: 117204 - DNA, 80 bp, synthetic construct
  misc_feature 1..80: note = Artificially Synthesized Probe
  source 1..80: mol_type = other DNA
tcaagaccagcctgggcaacatggtgaatccccgtctctactaaaaatacaaaaaattagccgggcgtggtggcatatgc

SEQ ID NO: 117205 - DNA, 80 bp, synthetic construct
  misc_feature 1..80: note = Artificially Synthesized Probe
  source 1..80: mol_type = other DNA
tgggttttatttctatttttaccaataactcagaacatgatgatctcttcttttttttttttttttttttttttttgaga

SEQ ID NO: 117206 - DNA, 80 bp, synthetic construct; identical to SEQ ID NO: 38334
  misc_feature 1..80: note = Artificially Synthesized Probe
  source 1..80: mol_type = other DNA

SEQ ID NO: 117207 - DNA, 80 bp, synthetic construct
  misc_feature 1..80: note = Artificially Synthesized Probe
  source 1..80: mol_type = other DNA
ttccctcatactgtcatgtcattttactcacgtgatatgactggcttcctccacatcatgtgactgtaaagctaacattt

SEQ ID NO: 117208 - DNA, 80 bp, synthetic construct
  misc_feature 1..80: note = Artificially Synthesized Probe
  source 1..80: mol_type = other DNA
cccacccgggcatatcattgatcactgagtccatagtttgcatgaggctcagtcctggtgttggacagtctatgggtttg

SEQ ID NO: 117209 - DNA, 80 bp, synthetic construct
  misc_feature 1..80: note = Artificially Synthesized Probe
  source 1..80: mol_type = other DNA
tctccctcctgtcccacaggccggagtgcagtggtgcgatctcggctcactgcagcctccaccacctgggttcaagggat

SEQ ID NO: 117210 - DNA, 80 bp, synthetic construct
  misc_feature 1..80: note = Artificially Synthesized Probe
  source 1..80: mol_type = other DNA
ctaggattacaggcatgagccaccacgcccggcccactgatattttactgtccccataatttatgccatttccagaatgt

SEQ ID NO: 117211 - DNA, 80 bp, synthetic construct; identical to SEQ ID NO: 38335
  misc_feature 1..80: note = Artificially Synthesized Probe
  source 1..80: mol_type = other DNA

SEQ ID NO: 117212 - DNA, 80 bp, synthetic construct
  misc_feature 1..80: note = Artificially Synthesized Probe
  source 1..80: mol_type = other DNA
agcactaaataacattacattggattttccacaggaacttatccattcacctactgaaagacatcttggttgcttccaag

SEQ ID NO: 117213 - DNA, 80 bp, synthetic construct
  misc_feature 1..80: note = Artificially Synthesized Probe
  source 1..80: mol_type = other DNA
agctaaataagcaccaatcttttcatgtttttcctacctcaactgagcatccaagttactctgtctccagagccaaagca

SEQ ID NO: 117214 - DNA, 80 bp, synthetic construct
  misc_feature 1..80: note = Artificially Synthesized Probe
  source 1..80: mol_type = other DNA
tggctgtgccattttacattcccatcaacaatgaatgagagttaatgttgctccacatcctcgtcagcacttgggccatt

SEQ ID NO: 117215 - DNA, 80 bp, synthetic construct; identical to SEQ ID NO: 38336
  misc_feature 1..80: note = Artificially Synthesized Probe
  source 1..80: mol_type = other DNA

SEQ ID NO: 117216 - DNA, 80 bp, synthetic construct
  misc_feature 1..80: note = Artificially Synthesized Probe
  source 1..80: mol_type = other DNA
gatctaagctcactgcaacctccgcctcccaggttcaagcgattctcctgcctcagcctcctgagtagctgggattacag

SEQ ID NO: 117217 - DNA, 80 bp, synthetic construct
  misc_feature 1..80: note = Artificially Synthesized Probe
  source 1..80: mol_type = other DNA
ttttgtattttttgtagagatggggtttcaccatgttgcccaggttggtctcaaactcctaggctcaagtgatcctcctg

SEQ ID NO: 117218 - DNA, 80 bp, synthetic construct
  misc_feature 1..80: note = Artificially Synthesized Probe
  source 1..80: mol_type = other DNA
ctccatttctgacgtgggcctattcaccccacctaaggcagcatagtggtctctggcttctaacagggcatcacattttt

SEQ ID NO: 117219 - DNA, 80 bp, synthetic construct; identical to SEQ ID NO: 38337
  misc_feature 1..80: note = Artificially Synthesized Probe
  source 1..80: mol_type = other DNA

SEQ ID NO: 117220 - DNA, 80 bp, synthetic construct
  misc_feature 1..80: note = Artificially Synthesized Probe
  source 1..80: mol_type = other DNA
ggcaccacgcccagctaatttttgtatttttagtagagatgggatttcaccatattggccagaatgatctcaatcttttg

SEQ ID NO: 117221 - DNA, 80 bp, synthetic construct
  misc_feature 1..80: note = Artificially Synthesized Probe
  source 1..80: mol_type = other DNA
tacatgatgtagggattaaaagcaaaagcatcattgaacttcaccttccctccaaccagttgtcccaaaatcccctgccc

SEQ ID NO: 117222 - DNA, 80 bp, synthetic construct
  misc_feature 1..80: note = Artificially Synthesized Probe
  source 1..80: mol_type = other DNA
tggcaacagagacggggtaaaggcttcccctcgcagcatagtgaagtgggggctcccatagcctggggtatcaaaatggg

SEQ ID NO: 117223 - DNA, 80 bp, synthetic construct; identical to SEQ ID NO: 38338
  misc_feature 1..80: note = Artificially Synthesized Probe
  source 1..80: mol_type = other DNA

SEQ ID NO: 117224 - DNA, 80 bp, synthetic construct
  misc_feature 1..80: note = Artificially Synthesized Probe
  source 1..80: mol_type = other DNA
aggcaattctcccgcctcagcctcctgagtagctgggactacaggtgcccgtgaccacacccggctaatttttttttgta

SEQ ID NO: 117225 - DNA, 80 bp, synthetic construct
  misc_feature 1..80: note = Artificially Synthesized Probe
  source 1..80: mol_type = other DNA
aggacacaaatgacaagcaggaagaaggcagagacggtaccttggtgatggagaagtccagccgaacatagatgataacg

SEQ ID NO: 117226 - DNA, 80 bp, synthetic construct
  misc_feature 1..80: note = Artificially Synthesized Probe
  source 1..80: mol_type = other DNA
ctttgcatatctcctgaagctcttcattgttggctgcttcctccacccacttctgcagcaagggaggcagcttacacatg

SEQ ID NO: 117227 - DNA, 80 bp, synthetic construct
  misc_feature 1..80: note = Artificially Synthesized Probe
  source 1..80: mol_type = other DNA
gcctgtaacatggagaaaccccgtctctactaaaaatacaaaaattagctgggcatagtggcacatgcatgtaatcccag

SEQ ID NO: 117228 - DNA, 80 bp, synthetic construct
  misc_feature 1..80: note = Artificially Synthesized Probe
  source 1..80: mol_type = other DNA
tagccttgcttctcatgtaaataagactctctctagctgggaaagccagacaaactccaattgaccccttaatttacaag

SEQ ID NO: 117229 - DNA, 80 bp, synthetic construct; identical to SEQ ID NO: 38339
  misc_feature 1..80: note = Artificially Synthesized Probe
  source 1..80: mol_type = other DNA

SEQ ID NO: 117230 - DNA, 80 bp, synthetic construct
  misc_feature 1..80: note = Artificially Synthesized Probe
  source 1..80: mol_type = other DNA
tgagcgttagccgtctctttggccgccggcttaataaaggactcttaaatcgtctcaaagtgtggcgttctctctaacac

SEQ ID NO: 117231 - DNA, 80 bp, synthetic construct
  misc_feature 1..80: note = Artificially Synthesized Probe
  source 1..80: mol_type = other DNA
agggtgatcctcttctgcttcaggagcttggcaaattacagagctttgatgtcctgggactcgttgaggttttgctccag

SEQ ID NO: 117232 - DNA, 80 bp, synthetic construct
  misc_feature 1..80: note = Artificially Synthesized Probe
  source 1..80: mol_type = other DNA
ataccatctgcccacggaactcatgcagtggggggcacgggagaaacccccacatctcagagcctggcccaacacccggc

SEQ ID NO: 117233 - DNA, 80 bp, synthetic construct; identical to SEQ ID NO: 38340
  misc_feature 1..80: note = Artificially Synthesized Probe
  source 1..80: mol_type = other DNA

SEQ ID NO: 117234 - DNA, 80 bp, synthetic construct
  misc_feature 1..80: note = Artificially Synthesized Probe
  source 1..80: mol_type = other DNA
aattttaaaaagaaaaagagtctgcattcctgacaacacaccaatgccccatacaagactcagatgtgcctgcccttatt

SEQ ID NO: 117235 - DNA, 80 bp, synthetic construct
  misc_feature 1..80: note = Artificially Synthesized Probe
  source 1..80: mol_type = other DNA
ggagcttattctacaacagtactactttattttgtaggaggggctgcatagaattcctgttaaacaaatgtgtctttttt

SEQ ID NO: 117236 - DNA, 80 bp, synthetic construct
  misc_feature 1..80: note = Artificially Synthesized Probe
  source 1..80: mol_type = other DNA
ctgctgccccaccccaagaccagaagacgccatgagctcaaatgactccagcccaaggagggacagaaggtgagttcttg

SEQ ID NO: 117237 - DNA, 80 bp, synthetic construct; identical to SEQ ID NO: 38341
  misc_feature 1..80: note = Artificially Synthesized Probe
  source 1..80: mol_type = other DNA

SEQ ID NO: 117238 - DNA, 80 bp, synthetic construct
  misc_feature 1..80: note = Artificially Synthesized Probe
  source 1..80: mol_type = other DNA
tgaagtgcttaatcaaaggattggtacaaaggattaatgttacattaacagatatgccagcttgcctcctcatggagttg

SEQ ID NO: 117239 - DNA, 80 bp, synthetic construct
  misc_feature 1..80: note = Artificially Synthesized Probe
  source 1..80: mol_type = other DNA
acaacctggctaggcagccaggacagggattcctatttactacactctggttttataggtaagtaaacagattcccaagg

SEQ ID NO: 117240 - DNA, 80 bp, synthetic construct
  misc_feature 1..80: note = Artificially Synthesized Probe
  source 1..80: mol_type = other DNA
gtagtaccatcatccccattccccattcctcaagctggaagccattcttttcttcacttctggtggagatggggacaaaa

SEQ ID NO: 117241 - DNA, 80 bp, synthetic construct; identical to SEQ ID NO: 38342
  misc_feature 1..80: note = Artificially Synthesized Probe
  source 1..80: mol_type = other DNA

SEQ ID NO: 117242 - DNA, 80 bp, synthetic construct
  misc_feature 1..80: note = Artificially Synthesized Probe
  source 1..80: mol_type = other DNA
tgcaatggcgcaatctcagctcactgcaacctccacctcctgggttcaagtgattctcctgactcagcctcctgagtagc

SEQ ID NO: 117243 - DNA, 80 bp, synthetic construct
  misc_feature 1..80: note = Artificially Synthesized Probe
  source 1..80: mol_type = other DNA
cccgacccattttttcttttttcttttttctttttttgtatttttagtagagatggggtttcaccatgttggccaggctg

SEQ ID NO: 117244 - DNA, 80 bp, synthetic construct
  misc_feature 1..80: note = Artificially Synthesized Probe
  source 1..80: mol_type = other DNA
tcttctctttgttttcctactaggcctgcctttgcgaagtcccactgtagatcataaggaggctgcaagaactgatgagt

SEQ ID NO: 117245 - DNA, 80 bp, synthetic construct; identical to SEQ ID NO: 38343
  misc_feature 1..80: note = Artificially Synthesized Probe
  source 1..80: mol_type = other DNA

SEQ ID NO: 117246 - DNA, 80 bp, synthetic construct
  misc_feature 1..80: note = Artificially Synthesized Probe
  source 1..80: mol_type = other DNA
tattattaacagaggacactattaagaatccagcattgtaatctgaatactcattttaatccttccaacgatcccccaga

SEQ ID NO: 117247 - DNA, 80 bp, synthetic construct; identical to SEQ ID NO: 38285
  misc_feature 1..80: note = Artificially Synthesized Probe
  source 1..80: mol_type = other DNA

SEQ ID NO: 117248 - DNA, 80 bp, synthetic construct
  misc_feature 1..80: note = Artificially Synthesized Probe
  source 1..80: mol_type = other DNA
gcccgtgtgtgtgcgtgtgtgtgtgtatgtgccagagacagaaagagagagagagacaaagtttcactcttgctgcccag

SEQ ID NO: 117249 - DNA, 80 bp, synthetic construct
  misc_feature 1..80: note = Artificially Synthesized Probe
  source 1..80: mol_type = other DNA
tgatgaagctggtctcgaactcccgacctcagatgatccgcctgcctcggcctcccaaagtactgggattacaggtgtaa

SEQ ID NO: 117250 - DNA, 80 bp, synthetic construct
  misc_feature 1..80: note = Artificially Synthesized Probe
  source 1..80: mol_type = other DNA
cacgctggctaatttttgtatttttagtagagacggggtttcgccatgttggccaggctggtctcgaacccctgacctcg

SEQ ID NO: 117251 - DNA, 80 bp, synthetic construct; identical to SEQ ID NO: 38344
  misc_feature 1..80: note = Artificially Synthesized Probe
  source 1..80: mol_type = other DNA

SEQ ID NO: 117252 - DNA, 80 bp, synthetic construct
  misc_feature 1..80: note = Artificially Synthesized Probe
  source 1..80: mol_type = other DNA
tgcttcccctgaagcttcaccaaacacggagaggctttcctgtccctgggagacgcggtgatgtgacgcagcggttgcag

SEQ ID NO: 117253 - DNA, 80 bp, synthetic construct
  misc_feature 1..80: note = Artificially Synthesized Probe
  source 1..80: mol_type = other DNA
aaggagcctttcaagatcactaaattcacactcctccactctgctcccttctcagctatggagaacacccactctcttga

SEQ ID NO: 117254 - DNA, 80 bp, synthetic construct
  misc_feature 1..80: note = Artificially Synthesized Probe
  source 1..80: mol_type = other DNA
gaatccctgggaggcttgaacagatgcctcacgagctgttctgaatgttctttctcttcacatgaataagagcttcttac

SEQ ID NO: 117255 - DNA, 80 bp, synthetic construct; identical to SEQ ID NO: 38286
  misc_feature 1..80: note = Artificially Synthesized Probe
  source 1..80: mol_type = other DNA

SEQ ID NO: 117256 - DNA, 80 bp, synthetic construct
  misc_feature 1..80: note = Artificially Synthesized Probe
  source 1..80: mol_type = other DNA
ttcagtgcatactggtcacctgaaggatcaagcaagcataagcaatgatgtggaaaacggatcaaatgggcaggagagaa

SEQ ID NO: 117257 - DNA, 80 bp, synthetic construct
  misc_feature 1..80: note = Artificially Synthesized Probe
  source 1..80: mol_type = other DNA
acgttatcagtgtctgtgaaggagaacgcagagagaagaaacagggcaactgatgggcttgagaacagcagaaccccaaa

SEQ ID NO: 117258 - DNA, 80 bp, synthetic construct
  misc_feature 1..80: note = Artificially Synthesized Probe
  source 1..80: mol_type = other DNA
gtatcagccacaaatgcagccaacagcacagtgtcccagggcagcagggctggctatggaggaagataggcctggcttca

SEQ ID NO: 117259 - DNA, 80 bp, synthetic construct
  misc_feature 1..80: note = Artificially Synthesized Probe
  source 1..80: mol_type = other DNA
acagtgccctacagtgaggagaaactgctcaacacaatcaaaaatgaacatgatagggacaatggaactcaaaaaccgca

SEQ ID NO: 117260 - DNA, 80 bp, synthetic construct
  misc_feature 1..80: note = Artificially Synthesized Probe
  source 1..80: mol_type = other DNA
aaaatagcagagatctgggaaggtacaaaagccactctaaaccatccctccttcggaaaggtcacattaaaaatgatcaa

SEQ ID NO: 117261 - DNA, 80 bp, synthetic construct; identical to SEQ ID NO: 38287
  misc_feature 1..80: note = Artificially Synthesized Probe
  source 1..80: mol_type = other DNA

SEQ ID NO: 117262 - DNA, 80 bp, synthetic construct
  misc_feature 1..80: note = Artificially Synthesized Probe
  source 1..80: mol_type = other DNA
cagcaagacgcccataaaaacgaaccaggagactgctcctgctattccaaaacaagctaaaggtattaataaaatcatgt

SEQ ID NO: 117263 - DNA, 80 bp, synthetic construct
  misc_feature 1..80: note = Artificially Synthesized Probe
  source 1..80: mol_type = other DNA
ctaaaaataaaaaattagctgggcgtagtggtgcatgcctgtagtcccagctactccagaagctgaggcaggagaatctc

SEQ ID NO: 117264 - DNA, 80 bp, synthetic construct
  misc_feature 1..80: note = Artificially Synthesized Probe
  source 1..80: mol_type = other DNA
aggaaaaaaatttagaaataaaagaggcattttaggaattaaggctaattaagatggattagagtgaataacaacaaata

SEQ ID NO: 117265 - DNA, 80 bp, synthetic construct; identical to SEQ ID NO: 38288
  misc_feature 1..80: note = Artificially Synthesized Probe
  source 1..80: mol_type = other DNA

SEQ ID NO: 117266 - DNA, 80 bp, synthetic construct
  misc_feature 1..80: note = Artificially Synthesized Probe
  source 1..80: mol_type = other DNA
tctactaaaaatacaaaaaataaccaggcatgatggcgggtgcctgtagtctcagctactcgggaggctgaggcaagaga

SEQ ID NO: 117267 - DNA, 80 bp, synthetic construct
  misc_feature 1..80: note = Artificially Synthesized Probe
  source 1..80: mol_type = other DNA
actacaaagatattcaagaaagtgattactcaaagtcggggcaatgactttgagaaggaagaggtacatggaacactttt

SEQ ID NO: 117268 - DNA, 80 bp, synthetic construct
  misc_feature 1..80: note = Artificially Synthesized Probe
  source 1..80: mol_type = other DNA
gcaatgactttgagaaggaagaggtacatggaacactttttgagtagctagcaaattttgatttcttgacaggagggggt

SEQ ID NO: 117269 - DNA, 80 bp, synthetic construct; identical to SEQ ID NO: 38289
  misc_feature 1..80: note = Artificially Synthesized Probe
  source 1..80: mol_type = other DNA

SEQ ID NO: 117270 - DNA, 80 bp, synthetic construct
  misc_feature 1..80: note = Artificially Synthesized Probe
  source 1..80: mol_type = other DNA
gacttgaaagaaaatatgacaaaatgttttcaatcattagttctgggtgttcatataaaagtgttttttattattctctg

SEQ ID NO: 117271 - DNA, 80 bp, synthetic construct
  misc_feature 1..80: note = Artificially Synthesized Probe
  source 1..80: mol_type = other DNA
catcacttctctccttgcagcttgtcaaatcagttccagggattcaattaggcaaaagatcaatggcaagggaagggggg

SEQ ID NO: 117272 - DNA, 80 bp, synthetic construct
  misc_feature 1..80: note = Artificially Synthesized Probe
  source 1..80: mol_type = other DNA
aaagttgttcctgataaaaccagccttcctcagaatgacaaatgaacacaccccatctataaagactgataattgaaaga

SEQ ID NO: 117273 - DNA, 80 bp, synthetic construct
  misc_feature 1..80: note = Artificially Synthesized Probe
  source 1..80: mol_type = other DNA
tgttgtcccagatttattgaaaataatacagcactacagaaaaaattcaaacaggtccccgaggcgttttgaaattcatc

SEQ ID NO: 117274 - DNA, 80 bp, synthetic construct
  misc_feature 1..80: note = Artificially Synthesized Probe
  source 1..80: mol_type = other DNA
cacccaagtatgcaaaaggactaagataagccatagaaaaaacatcaaagtgcaatgaagatactcgtgaactacctaag

SEQ ID NO: 117275 - DNA, 80 bp, synthetic construct; identical to SEQ ID NO: 38346
  misc_feature 1..80: note = Artificially Synthesized Probe
  source 1..80: mol_type = other DNA

SEQ ID NO: 117276 - DNA, 80 bp, synthetic construct
  misc_feature 1..80: note = Artificially Synthesized Probe
  source 1..80: mol_type = other DNA
ttagtgtcaggatctacttcaataatctcctgatccaaggctgagacctacaaggaaacgaggtagggtcaaaataccaa

SEQ ID NO: 117277 - DNA, 80 bp, synthetic construct
  misc_feature 1..80: note = Artificially Synthesized Probe
  source 1..80: mol_type = other DNA
ctcattcagtattcagaacacttgaagtctgtgtttacaccaaagaatactatattaggggcaaacaatcgagccacgac

SEQ ID NO: 117278 - DNA, 80 bp, synthetic construct
  misc_feature 1..80: note = Artificially Synthesized Probe
  source 1..80: mol_type = other DNA
agccaagaacccatagctttatcatttgaggattagccagaagcccaaatatccagaaagtttacctcaggaacataatt

SEQ ID NO: 117279 - DNA, 80 bp, synthetic construct; identical to SEQ ID NO: 38347
  misc_feature 1..80: note = Artificially Synthesized Probe
  source 1..80: mol_type = other DNA

SEQ ID NO: 117280 - DNA, 80 bp, synthetic construct
  misc_feature 1..80: note = Artificially Synthesized Probe
  source 1..80: mol_type = other DNA
cctttaagagccaacagggttctcaatgcctcccacttttccagagtgatcttccttcaacacacacctgaccatgtggt

SEQ ID NO: 117281 - DNA, 80 bp, synthetic construct
  misc_feature 1..80: note = Artificially Synthesized Probe
  source 1..80: mol_type = other DNA
aattaatacgttgactttggcactattcttccaggccatatgcctataaatctctcgaacagtaactgcaactgtgaagt

SEQ ID NO: 117282 - DNA, 80 bp, synthetic construct
  misc_feature 1..80: note = Artificially Synthesized Probe
  source 1..80: mol_type = other DNA
agcacgtgcctctaatcccagctactgggaaggctgaggcatgacaatcgcttgaacccgggagacggaggttgcagtga

SEQ ID NO: 117283 - DNA, 80 bp, synthetic construct
  misc_feature 1..80: note = Artificially Synthesized Probe
  source 1..80: mol_type = other DNA
acaggcctaagttcacaacagaaatcctgcacacgcagagctctagcccttctccgggacaccagggagtctcaggctaa

SEQ ID NO: 117284 - DNA, 80 bp, synthetic construct; identical to SEQ ID NO: 38345
  misc_feature 1..80: note = Artificially Synthesized Probe
  source 1..80: mol_type = other DNA

SEQ ID NO: 117285 - DNA, 80 bp, synthetic construct; identical to SEQ ID NO: 38348
  misc_feature 1..80: note = Artificially Synthesized Probe
  source 1..80: mol_type = other DNA

SEQ ID NO: 117286 - DNA, 80 bp, synthetic construct
  misc_feature 1..80: note = Artificially Synthesized Probe
  source 1..80: mol_type = other DNA
ctccagcctgacagggctctgcgccttcccggcccagggcctctctgtgggctgaggaccgcgggaagctgcagatgggg

SEQ ID NO: 117287 - DNA, 80 bp, synthetic construct
  misc_feature 1..80: note = Artificially Synthesized Probe
  source 1..80: mol_type = other DNA
tgtgtctggacattgccaaatgtcctctaaagcaaaactctgtccctttgagaatacacagtgccacttgctttccagga

SEQ ID NO: 117288 - DNA, 80 bp, synthetic construct
  misc_feature 1..80: note = Artificially Synthesized Probe
  source 1..80: mol_type = other DNA
gtcctatttggtcctcagaaacccattttagtttcaacaaaaatgctgcattcagcgcagtggttatttcaggaagaaaa

SEQ ID NO: 117289 - DNA, 80 bp, synthetic construct
  misc_feature 1..80: note = Artificially Synthesized Probe
  source 1..80: mol_type = other DNA
ggaggagccttggctggggactgcctggaaacgggctgggcctgcctcggacgccgccggtgtcgcggattctctttccg

SEQ ID NO: 117290 - DNA, 80 bp, synthetic construct; identical to SEQ ID NO: 38359
  misc_feature 1..80: note = Artificially Synthesized Probe
  source 1..80: mol_type = other DNA

SEQ ID NO: 117291 - DNA, 80 bp, synthetic construct
  misc_feature 1..80: note = Artificially Synthesized Probe
  source 1..80: mol_type = other DNA
ggctcaggaatgctgattttcatcaacacataggcccaaagaatgaattccagcataccaaataaatgatatagaatgga

SEQ ID NO: 117292 - DNA, 80 bp, synthetic construct
  misc_feature 1..80: note = Artificially Synthesized Probe
  source 1..80: mol_type = other DNA
gaaagaaagacagaaatatgactcctttttcaccactgaatcggtaacatcatccataggctgtgctcagaatatgaatg

SEQ ID NO: 117293 - DNA, 80 bp, synthetic construct
  misc_feature 1..80: note = Artificially Synthesized Probe
  source 1..80: mol_type = other DNA
tgttcaaattcttttatttttttcagacagagtcttgctctgtcacccaggctggagtgcagtggcgcaatctcggctca

SEQ ID NO: 117294 - DNA, 80 bp, synthetic construct; identical to SEQ ID NO: 38360
  misc_feature 1..80: note = Artificially Synthesized Probe
  source 1..80: mol_type = other DNA

SEQ ID NO: 117295 - DNA, 80 bp, synthetic construct
  misc_feature 1..80: note = Artificially Synthesized Probe
  source 1..80: mol_type = other DNA
cttcctacaagcagttctcctttttctgtttccattactgtctcttacccctccgtcatgtacctgcccacaaatgcctt

SEQ ID NO: 117296 - DNA, 80 bp, synthetic construct
  misc_feature 1..80: note = Artificially Synthesized Probe
  source 1..80: mol_type = other DNA
gaaccttgattctgctcatcgtgacttttgctcatcccccaaagactgccttcagaatcctatcatttctatgtatagtc

SEQ ID NO: 117297 - DNA, 80 bp, synthetic construct
  misc_feature 1..80: note = Artificially Synthesized Probe
  source 1..80: mol_type = other DNA
cacttactctttttaaaacagaacagtccactttggaaagtgaagaatggaatccttgggaaggagatgaaaaaaatgag

SEQ ID NO: 117298 - DNA, 80 bp, synthetic construct
  misc_feature 1..80: note = Artificially Synthesized Probe
  source 1..80: mol_type = other DNA
gtcagatggcatttttagaatttccagactacttttgtaagaagttagctcactatgaatgaaagcatttatagataacg

SEQ ID NO: 117299 - DNA, 80 bp, synthetic construct
  misc_feature 1..80: note = Artificially Synthesized Probe
  source 1..80: mol_type = other DNA
atagtgatggcccatgcttataaagagcttactatgcgccaaacagttctatacacttaataacttttagtttgtttaat

SEQ ID NO: 117300 - DNA, 80 bp, synthetic construct; identical to SEQ ID NO: 38361
  misc_feature 1..80: note = Artificially Synthesized Probe
  source 1..80: mol_type = other DNA

SEQ ID NO: 117301 - DNA, 80 bp, synthetic construct
  misc_feature 1..80: note = Artificially Synthesized Probe
  source 1..80: mol_type = other DNA
ctgtattggtccctaaagatcattttcagttttttgtagtaaatggaatcttgaaatctaagaactgatgagctaagcag

SEQ ID NO: 117302 - DNA, 80 bp, synthetic construct
  misc_feature 1..80: note = Artificially Synthesized Probe
  source 1..80: mol_type = other DNA
cccatgtagtcaacataaagaaatgagaaattgccagctcttggctcttatgcctcttcaaagattaatgagcattcagg

SEQ ID NO: 117303 - DNA, 80 bp, synthetic construct; identical to SEQ ID NO: 38362
  misc_feature 1..80: note = Artificially Synthesized Probe
  source 1..80: mol_type = other DNA

SEQ ID NO: 117304 - DNA, 80 bp, synthetic construct
  misc_feature 1..80: note = Artificially Synthesized Probe
  source 1..80: mol_type = other DNA
aatccacgaaaggaaaaacagatctcagtgtacaaatctggggcaaagctgccattggtaagttaatacgtagaaggaag

SEQ ID NO: 117305 - DNA, 80 bp, synthetic construct
  misc_feature 1..80: note = Artificially Synthesized Probe
  source 1..80: mol_type = other DNA
ttcaattctataatttcatgttgaattctttttaagagatgggggtcttgctatgttgcccagactggagtgtggtgact

SEQ ID NO: 117306 - DNA, 80 bp, synthetic construct
  misc_feature 1..80: note = Artificially Synthesized Probe
  source 1..80: mol_type = other DNA
gctttgggtctagactttttttcctaatctgctacaacccagttataacctcatcttgacttttaaatgtttttagattt

SEQ ID NO: 117307 - DNA, 80 bp, synthetic construct
  misc_feature 1..80: note = Artificially Synthesized Probe
  source 1..80: mol_type = other DNA
aattttaggcacagggtgcacagtgcatgtatacacttgaagggttctctgatgcttttgcttacacaaactaaattaat

SEQ ID NO: 117308 - DNA, 80 bp, synthetic construct; identical to SEQ ID NO: 38363
  misc_feature 1..80: note = Artificially Synthesized Probe
  source 1..80: mol_type = other DNA

SEQ ID NO: 117309 - DNA, 80 bp, synthetic construct
  misc_feature 1..80: note = Artificially Synthesized Probe
  source 1..80: mol_type = other DNA
ctgaataatttttttaggttaatcgcccttacctaaaaagaactttgggatacataaaaattagaacatcaagtaaacaa

SEQ ID NO: 117310 - DNA, 80 bp, synthetic construct
  misc_feature 1..80: note = Artificially Synthesized Probe
  source 1..80: mol_type = other DNA
tagcctttaagtgataacttttcgtgttactggtacactccagtaggattctctggggccagctaaatccacctggcatg

SEQ ID NO: 117311 - DNA, 80 bp, synthetic construct
  misc_feature 1..80: note = Artificially Synthesized Probe
  source 1..80: mol_type = other DNA
cagttcttgttctcagtttcttactaagttgtcagtcacattgcttaaaactttgaccaccaaaatatcattgctcccta

SEQ ID NO: 117312 - DNA, 80 bp, synthetic construct; identical to SEQ ID NO: 38364
  misc_feature 1..80: note = Artificially Synthesized Probe
  source 1..80: mol_type = other DNA

SEQ ID NO: 117313 - DNA, 80 bp, synthetic construct
  misc_feature 1..80: note = Artificially Synthesized Probe
  source 1..80: mol_type = other DNA
aaaaaaaattaaaaataaaacagagggccgttccatagttttcattgtagcagaataaataaatatctaatttgtcagca

SEQ ID NO: 117314 - DNA, 80 bp, synthetic construct
  misc_feature 1..80: note = Artificially Synthesized Probe
  source 1..80: mol_type = other DNA
gtaatcccagcactttgggaggccaaagcaggcagatcgttttgagctcaggagtttgagaccagcctaggcagcatggc

SEQ ID NO: 117315 - DNA, 80 bp, synthetic construct; identical to SEQ ID NO: 38350
  misc_feature 1..80: note = Artificially Synthesized Probe
  source 1..80: mol_type = other DNA

SEQ ID NO: 117316 - DNA, 80 bp, synthetic construct
  misc_feature 1..80: note = Artificially Synthesized Probe
  source 1..80: mol_type = other DNA
caaaaaaaaagaagaagaagaagaagaagaagaagggccaggcatagtggctcacacctggaatcccagcagtttgggag

SEQ ID NO: 117317 - DNA, 80 bp, synthetic construct; identical to SEQ ID NO: 38365
  misc_feature 1..80: note = Artificially Synthesized Probe
  source 1..80: mol_type = other DNA

SEQ ID NO: 117318 - DNA, 80 bp, synthetic construct
  misc_feature 1..80: note = Artificially Synthesized Probe
  source 1..80: mol_type = other DNA
ctttaatctatagccatttaaactgctaatatttaaatatacccaaattatttcctgtaaaattatgggaaattattgtt

SEQ ID NO: 117319 - DNA, 80 bp, synthetic construct
  misc_feature 1..80: note = Artificially Synthesized Probe
  source 1..80: mol_type = other DNA
aataacattgatacaaaactgttatctaatttacagatacacacattcccactactgtccattttctggcccagtttcca

SEQ ID NO: 117320 - DNA, 80 bp, synthetic construct
  misc_feature 1..80: note = Artificially Synthesized Probe
  source 1..80: mol_type = other DNA
tcagttcaggttatgtattttggttccgaatacctcagaaacaacatcgtgtcatcctcagtgtgtcatatttgttcccg

SEQ ID NO: 117321 - DNA, 80 bp, synthetic construct; identical to SEQ ID NO: 38366
  misc_feature 1..80: note = Artificially Synthesized Probe
  source 1..80: mol_type = other DNA

SEQ ID NO: 117322 - DNA, 80 bp, synthetic construct
  misc_feature 1..80: note = Artificially Synthesized Probe
  source 1..80: mol_type = other DNA
tgattttaagaaacaaaagtaaaaggagcacatcatttgaatatgatgaattattttggaacaaagaattaaattgtttg

SEQ ID NO: 117323 - DNA, 80 bp, synthetic construct
  misc_feature 1..80: note = Artificially Synthesized Probe
  source 1..80: mol_type = other DNA
aaaaaaagaagaaattgagaaaataaaaaagccaactattagaagaatttagggcctaaagaaaattatatttctttttc

SEQ ID NO: 117324 - DNA, 80 bp, synthetic construct
  misc_feature 1..80: note = Artificially Synthesized Probe
  source 1..80: mol_type = other DNA
gaagagtacaaagttaaacaaggttcttcattgcaggcctttctcaagagcctttaatatgacaatgttcattgtatcag

SEQ ID NO: 117325 - DNA, 80 bp, synthetic construct
  misc_feature 1..80: note = Artificially Synthesized Probe
  source 1..80: mol_type = other DNA
catgcccagctaatttttgtatttttagtagaaatggggtttcaccatgttggccaggctggtctcgaactcctgacctc

SEQ ID NO: 117326 - DNA, 80 bp, synthetic construct; identical to SEQ ID NO: 38367
  misc_feature 1..80: note = Artificially Synthesized Probe
  source 1..80: mol_type = other DNA

SEQ ID NO: 117327 - DNA, 80 bp, synthetic construct
  misc_feature 1..80: note = Artificially Synthesized Probe
  source 1..80: mol_type = other DNA
attgagcaagggccagatcatggtgggccttgtatgtaccacattaaggctcttggactttattctagggtagtgaaaag

SEQ ID NO: 117328 - DNA, 80 bp, synthetic construct
  misc_feature 1..80: note = Artificially Synthesized Probe
  source 1..80: mol_type = other DNA
aatagggaagtggtagtgggtcagagccagggacaaatttgagaaatatttaggagcaaaatggtcggaatttagggatt

SEQ ID NO: 117329 - DNA, 80 bp, synthetic construct
  misc_feature 1..80: note = Artificially Synthesized Probe
  source 1..80: mol_type = other DNA
ttctcagcagacaaccctgcctcctctttcatcaggaaaattgaggacatcataattatctctcttaactagctgctgta

SEQ ID NO: 117330 - DNA, 80 bp, synthetic construct
  misc_feature 1..80: note = Artificially Synthesized Probe
  source 1..80: mol_type = other DNA
ctaggaccttgttccatgcattacttccttgctttcctttattctccacttcattcattattgctttatcaccttctctt

SEQ ID NO: 117331 - DNA, 80 bp, synthetic construct; identical to SEQ ID NO: 38368
  misc_feature 1..80: note = Artificially Synthesized Probe
  source 1..80: mol_type = other DNA

SEQ ID NO: 117332 - DNA, 80 bp, synthetic construct
  misc_feature 1..80: note = Artificially Synthesized Probe
  source 1..80: mol_type = other DNA
aacaggaaatgacactgacagtgtccactgattccaaggtttgagaagttctatagtgctcaacaggtgcacacatgcta

SEQ ID NO: 117333 - DNA, 80 bp, synthetic construct
  misc_feature 1..80: note = Artificially Synthesized Probe
  source 1..80: mol_type = other DNA
agcttgggagacactgaaaaatttacaggaacactaaaggtgctaagaatctctgacctacaccttggcttcgcagtatt

SEQ ID NO: 117334 - DNA, 80 bp, synthetic construct
  misc_feature 1..80: note = Artificially Synthesized Probe
  source 1..80: mol_type = other DNA
gaatagcttcatatattttattttaatacattgactaaaacctactttgtttttcttttcttttcttttttttttttttt

SEQ ID NO: 117335 - DNA, 80 bp, synthetic construct
  misc_feature 1..80: note = Artificially Synthesized Probe
  source 1..80: mol_type = other DNA
tagaaagcgctttatgtggcctttgaacatgagttgggtttatgtacaataaggcatatggatagaaagtaccagatgag

SEQ ID NO: 117336 - DNA, 80 bp, synthetic construct; identical to SEQ ID NO: 38369
  misc_feature 1..80: note = Artificially Synthesized Probe
  source 1..80: mol_type = other DNA

SEQ ID NO: 117337 - DNA, 80 bp, synthetic construct
  misc_feature 1..80: note = Artificially Synthesized Probe
  source 1..80: mol_type = other DNA
tctcaagatttccttttttttccttcataaaattggcctaacatggggaaggaggactggaagactttctcatgctctta

SEQ ID NO: 117338 - DNA, 80 bp, synthetic construct
  misc_feature 1..80: note = Artificially Synthesized Probe
  source 1..80: mol_type = other DNA
cattagtcattgccagtgctagatactgtccaaggcaaacatagtcctcaaaacatagtcctggtccctgtatgttatat

SEQ ID NO: 117339 - DNA, 80 bp, synthetic construct
  misc_feature 1..80: note = Artificially Synthesized Probe
  source 1..80: mol_type = other DNA
acttaagctctgaagtgagacagaactttgttgagaactcgtcattgccattacaagctgacagctaaagtgcaatttca

SEQ ID NO: 117340 - DNA, 80 bp, synthetic construct
  misc_feature 1..80: note = Artificially Synthesized Probe
  source 1..80: mol_type = other DNA
cagtaagaagcaatgaaagtaggctttgggtatatttgtgctgaaaattagattctatcaggatataaagaaatggttta

SEQ ID NO: 117341 - DNA, 80 bp, synthetic construct; identical to SEQ ID NO: 38370
  misc_feature 1..80: note = Artificially Synthesized Probe
  source 1..80: mol_type = other DNA

SEQ ID NO: 117342 - DNA, 80 bp, synthetic construct
  misc_feature 1..80: note = Artificially Synthesized Probe
  source 1..80: mol_type = other DNA
ttgaacccaggaggcagaggctgctgtgagctgagatcatgccacagcactccagcctgagcaacagactgagactctgt

SEQ ID NO: 117343 - DNA, 80 bp, synthetic construct
  misc_feature 1..80: note = Artificially Synthesized Probe
  source 1..80: mol_type = other DNA
ctagtccctttcatcttccttcctcctcagatacaattgctatcataaatttgatgtggatcctcccattcaaattttta

SEQ ID NO: 117344 - DNA, 80 bp, synthetic construct; identical to SEQ ID NO: 38371
  misc_feature 1..80: note = Artificially Synthesized Probe
  source 1..80: mol_type = other DNA

SEQ ID NO: 117345 - DNA, 80 bp, synthetic construct
  misc_feature 1..80: note = Artificially Synthesized Probe
  source 1..80: mol_type = other DNA
gcctgtaatcccagtactttgggagactgaggtaggtggattgcttcagccaaggagttcaagaccagcatgggcaacat

SEQ ID NO: 117346 - DNA, 80 bp, synthetic construct
  misc_feature 1..80: note = Artificially Synthesized Probe
  source 1..80: mol_type = other DNA
ggccacaagagttgagaccctgcctcaaaaaaaaaacaaaaaaacacaaaactatcacattttgtattatcatatgcaaa

SEQ ID NO: 117347 - DNA, 80 bp, synthetic construct
  misc_feature 1..80: note = Artificially Synthesized Probe
  source 1..80: mol_type = other DNA
aaagtctctaatattgatttcttcttttaaatctcagattttcatttccagacttctctcttttcaatctgataagtgca

SEQ ID NO: 117348 - DNA, 80 bp, synthetic construct
  misc_feature 1..80: note = Artificially Synthesized Probe
  source 1..80: mol_type = other DNA
acctttgttcaggctttgtttgtctcttgtttttgttgtgttgtttttaacagcttcatcactggtccagctgtaatacc

SEQ ID NO: 117349 - DNA, 80 bp, synthetic construct; identical to SEQ ID NO: 38372
  misc_feature 1..80: note = Artificially Synthesized Probe
  source 1..80: mol_type = other DNA

SEQ ID NO: 117350 - DNA, 80 bp, synthetic construct
  misc_feature 1..80: note = Artificially Synthesized Probe
  source 1..80: mol_type = other DNA
ggtacagtctttctcagagataaaaacagggtgtggtcgcatccttcaataacaattatgatgtttttaagagtatttta

SEQ ID NO: 117351 - DNA, 80 bp, synthetic construct
  misc_feature 1..80: note = Artificially Synthesized Probe
  source 1..80: mol_type = other DNA
ggcaatattattatatcaggaatataccgtaccattgtgtttgagactggctgaatttatacaaatctcttctataaaag

SEQ ID NO: 117352 - DNA, 80 bp, synthetic construct
  misc_feature 1..80: note = Artificially Synthesized Probe
  source 1..80: mol_type = other DNA
atctctaaaaaaaaaaaaaatcaaaaattatccgggcatggtgacatggactcctgtatggcgcctctagtcctagctac

SEQ ID NO: 117353 - DNA, 80 bp, synthetic construct
  misc_feature 1..80: note = Artificially Synthesized Probe
  source 1..80: mol_type = other DNA
tggaaaacatatatttttatctttctgttaataggatgtttttaattaagagcaagttgactttaagataagttgccact

SEQ ID NO: 117354 - DNA, 80 bp, synthetic construct; identical to SEQ ID NO: 38373
  misc_feature 1..80: note = Artificially Synthesized Probe
  source 1..80: mol_type = other DNA

SEQ ID NO: 117355 - DNA, 80 bp, synthetic construct
  misc_feature 1..80: note = Artificially Synthesized Probe
  source 1..80: mol_type = other DNA
atctattttttgagcagagcctgcatttgtaaaatgttttcatatagtataagatggaacctcttggtaatcatgatgtt

SEQ ID NO: 117356 - DNA, 80 bp, synthetic construct
  misc_feature 1..80: note = Artificially Synthesized Probe
  source 1..80: mol_type = other DNA
ccgcggggcctcaggaagggggcggcccccgcgcgggagagacgcggccgaggtaggactgggtcggcggcttccttccg

SEQ ID NO: 117357 - DNA, 80 bp, synthetic construct
  misc_feature 1..80: note = Artificially Synthesized Probe
  source 1..80: mol_type = other DNA
atcttggctctctgcaacctctgcctcccaggttctagccattctcctgcctcagcctcccaagtagctgggattacagg

SEQ ID NO: 117358 - DNA, 80 bp, synthetic construct; identical to SEQ ID NO: 38374
  misc_feature 1..80: note = Artificially Synthesized Probe
  source 1..80: mol_type = other DNA

SEQ ID NO: 117359 - DNA, 80 bp, synthetic construct
  misc_feature 1..80: note = Artificially Synthesized Probe
  source 1..80: mol_type = other DNA
tcactggtccaagcaattttgaaatctaaatttcatctaaatggccagctccattagatgatattgcaggcctaggaata

SEQ ID NO: 117360 - DNA, 80 bp, synthetic construct
  misc_feature 1..80: note = Artificially Synthesized Probe
  source 1..80: mol_type = other DNA
agttacatttcaggtacacagtttaatccctggtatttccaaatgctcataaaaataggtaacttttcctgtatggcata

SEQ ID NO: 117361 - DNA, 80 bp, synthetic construct
  misc_feature 1..80: note = Artificially Synthesized Probe
  source 1..80: mol_type = other DNA
atggtatatgataatggggtacaaatgatgttttgaaatatatttacaacgtagaatgcttaaatcagactaacaaatcc

SEQ ID NO: 117362 - DNA, 80 bp, synthetic construct
  misc_feature 1..80: note = Artificially Synthesized Probe
  source 1..80: mol_type = other DNA
tcgatcaacatcttccttttccccatccatctccctcccctggagtattctgtaatcttttcatcacctggttaaaatgt

SEQ ID NO: 117363 - DNA, 80 bp, synthetic construct
  misc_feature 1..80: note = Artificially Synthesized Probe
  source 1..80: mol_type = other DNA
tttaggcacaacatctctgtaacacttttgtaagagatgtcagtgtgaaattcaatttttttaagtcagtagattcaggg

SEQ ID NO: 117364 - DNA, 80 bp, synthetic construct; identical to SEQ ID NO: 38375
  misc_feature 1..80: note = Artificially Synthesized Probe
  source 1..80: mol_type = other DNA

SEQ ID NO: 117365 - DNA, 80 bp, synthetic construct
  misc_feature 1..80: note = Artificially Synthesized Probe
  source 1..80: mol_type = other DNA
gttctccagtctgagagttgctttatgtagaaacacaggtttccaaagaggcattgttaactctatttgtaccaatcttt

SEQ ID NO: 117366 - DNA, 80 bp, synthetic construct
  misc_feature 1..80: note = Artificially Synthesized Probe
  source 1..80: mol_type = other DNA
gtcacacaggagattatagatgctaatgagatacttaggttcatcactgagatgttgtgcagtggaccaattcagtgttc

SEQ ID NO: 117367 - DNA, 80 bp, synthetic construct
  misc_feature 1..80: note = Artificially Synthesized Probe
  source 1..80: mol_type = other DNA
gagactcaatagggttaaatgtcttcttttatgtagtaaccaggaaacaggtgttcatgttgtgaaggaagtaaatttgc

SEQ ID NO: 117368 - DNA, 80 bp, synthetic construct; identical to SEQ ID NO: 38376
  misc_feature 1..80: note = Artificially Synthesized Probe
  source 1..80: mol_type = other DNA

SEQ ID NO: 117369 - DNA, 80 bp, synthetic construct
  misc_feature 1..80: note = Artificially Synthesized Probe
  source 1..80: mol_type = other DNA
tggaatagccaagaaaggcattcattagaaggttacatttatgcacaggccttaagaatgtgcatgggtgagtcttgtgt

SEQ ID NO: 117370 - DNA, 80 bp, synthetic construct
  misc_feature 1..80: note = Artificially Synthesized Probe
  source 1..80: mol_type = other DNA
gtaactcctctcataccattgagccagaggtttgagtagatgttttccttgtttctcattgttgcttctagactattctc

SEQ ID NO: 117371 - DNA, 80 bp, synthetic construct; identical to SEQ ID NO: 38351
  misc_feature 1..80: note = Artificially Synthesized Probe
  source 1..80: mol_type = other DNA

SEQ ID NO: 117372 - DNA, 80 bp, synthetic construct
  misc_feature 1..80: note = Artificially Synthesized Probe
  source 1..80: mol_type = other DNA
tctgttctcaattcttagtgactggcaaatctacatagatggtctttctgtcattttggtctttgcagttccttcacctc

SEQ ID NO: 117373 - DNA, 80 bp, synthetic construct; identical to SEQ ID NO: 38377
  misc_feature 1..80: note = Artificially Synthesized Probe
  source 1..80: mol_type = other DNA

SEQ ID NO: 117374 - DNA, 80 bp, synthetic construct
  misc_feature 1..80: note = Artificially Synthesized Probe
  source 1..80: mol_type = other DNA
gaaaggtgctaattgacctttatttaaacacgtgactttgaacctcaggtgcccagcagtcttatatttcccttgtccat

SEQ ID NO: 117375 - DNA, 80 bp, synthetic construct
  misc_feature 1..80: note = Artificially Synthesized Probe
  source 1..80: mol_type = other DNA
atattctcccactctcctagaaggctgttttataccttcttctctcctacactctaacacctccgcctttcttactttat

SEQ ID NO: 117376 - DNA, 80 bp, synthetic construct
  misc_feature 1..80: note = Artificially Synthesized Probe
  source 1..80: mol_type = other DNA
cctcagcctcccgtgtagttgggattacaggtgcacgccatcacgcccggctaattattgtatttagtagagacggggtt

SEQ ID NO: 117377 - DNA, 80 bp, synthetic construct; identical to SEQ ID NO: 38378
  misc_feature 1..80: note = Artificially Synthesized Probe
  source 1..80: mol_type = other DNA

SEQ ID NO: 117378 - DNA, 80 bp, synthetic construct
  misc_feature 1..80: note = Artificially Synthesized Probe
  source 1..80: mol_type = other DNA
ggcttgctccttcatccccaactctgtgctcagatgctgccgcagtaagacagtccctcatcacttatttaagattgcaa

SEQ ID NO: 117379 - DNA, 80 bp, synthetic construct
  misc_feature 1..80: note = Artificially Synthesized Probe
  source 1..80: mol_type = other DNA
cctagcactcccaaagtatcggttgaattattattatccattcagaagtgttacggtgactcctagattttataaatgta

SEQ ID NO: 117380 - DNA, 80 bp, synthetic construct
  misc_feature 1..80: note = Artificially Synthesized Probe
  source 1..80: mol_type = other DNA
taaagtgaaaactacagttgtttttctgattttctagctggcagcctcaggaaacaaatgaaagtcttaagaattaccaa

SEQ ID NO: 117381 - DNA, 80 bp, synthetic construct; identical to SEQ ID NO: 38379
  misc_feature 1..80: note = Artificially Synthesized Probe
  source 1..80: mol_type = other DNA

SEQ ID NO: 117382 - DNA, 80 bp, synthetic construct
  misc_feature 1..80: note = Artificially Synthesized Probe
  source 1..80: mol_type = other DNA
aaaactataattttacaagaaaaaattgaaagaagaaaaatgttacttcagtggtatcagcacttcaagacagagcttaa

SEQ ID NO: 117383 - DNA, 80 bp, synthetic construct
  misc_feature 1..80: note = Artificially Synthesized Probe
  source 1..80: mol_type = other DNA
gatcttctgatccttctgaggcactagcaaaaggttgtgcagccacatccttggtcttgtttctggaacacccttttcag

SEQ ID NO: 117384 - DNA, 80 bp, synthetic construct
  misc_feature 1..80: note = Artificially Synthesized Probe
  source 1..80: mol_type = other DNA
gaaaactctacattatgtatgccacataatgacatttcagtcagtggtagactacatatatgatagtggtcccataagat

SEQ ID NO: 117385 - DNA, 80 bp, synthetic construct
  misc_feature 1..80: note = Artificially Synthesized Probe
  source 1..80: mol_type = other DNA
atatttaataatgacaataaatgactatgttactggtttatgtatttactatactatactttttacaatttgtattagtt

SEQ ID NO: 117386 - DNA, 80 bp, synthetic construct; identical to SEQ ID NO: 38380
  misc_feature 1..80: note = Artificially Synthesized Probe
  source 1..80: mol_type = other DNA

SEQ ID NO: 117387 - DNA, 80 bp, synthetic construct
  misc_feature 1..80: note = Artificially Synthesized Probe
  source 1..80: mol_type = other DNA
cttggaaccctccagctaattattaaagtttatcacaagttctgctttccatgtaactgcaggatacaatccaactaagc

SEQ ID NO: 117388 - DNA, 80 bp, synthetic construct
  misc_feature 1..80: note = Artificially Synthesized Probe
  source 1..80: mol_type = other DNA
atcacttgaggccaggagttcaagaccagcctggccatcatggtgaaaccccgtctgtaccaaaaatacaaaaattagcc

SEQ ID NO: 117389 - DNA, 80 bp, synthetic construct; identical to SEQ ID NO: 38352
  misc_feature 1..80: note = Artificially Synthesized Probe
  source 1..80: mol_type = other DNA

SEQ ID NO: 117390 - DNA, 80 bp, synthetic construct
  misc_feature 1..80: note = Artificially Synthesized Probe
  source 1..80: mol_type = other DNA
tacagtagcacctcatttccaggtaccataatcttaactgtataatccatagcatcctattgcagccataacaaattacc

SEQ ID NO: 117391 - DNA, 80 bp, synthetic construct
  misc_feature 1..80: note = Artificially Synthesized Probe
  source 1..80: mol_type = other DNA
gcttctatctttatatatcccttgcctcactctgacactcctgcctcccttgtgtgaggactcttgagattacatagggc

SEQ ID NO: 117392 - DNA, 80 bp, synthetic construct; identical to SEQ ID NO: 38353
  misc_feature 1..80: note = Artificially Synthesized Probe
  source 1..80: mol_type = other DNA

SEQ ID NO: 117393 - DNA, 80 bp, synthetic construct
  misc_feature 1..80: note = Artificially Synthesized Probe
  source 1..80: mol_type = other DNA
aaatcatgataaaacatcaggggctgccataaggagaaaagatgcaatgacatttgtctgtgaggggatcatgcattcag

SEQ ID NO: 117394 - DNA, 80 bp, synthetic construct
  misc_feature 1..80: note = Artificially Synthesized Probe
  source 1..80: mol_type = other DNA
taatataatacatttcatttcagaataagacaggtggtaaagatccatataaattaggggtttctcaaatctagagtagg

SEQ ID NO: 117395 - DNA, 80 bp, synthetic construct
  misc_feature 1..80: note = Artificially Synthesized Probe
  source 1..80: mol_type = other DNA
ccagatctcacacgccgtccccgctcccgatcccagggggtgacaggcgcgcacgcctttcaaacacgtgttaaaatcca

SEQ ID NO: 117396 - DNA, 80 bp, synthetic construct
  misc_feature 1..80: note = Artificially Synthesized Probe
  source 1..80: mol_type = other DNA
caacggcccaaaggagaggcattctggttttatagtcaaatgagtaaaagaacagaacgtaaacttgtctcatgcactaa

SEQ ID NO: 117397 - DNA, 80 bp, synthetic construct
  misc_feature 1..80: note = Artificially Synthesized Probe
  source 1..80: mol_type = other DNA
ggttgtattagttgtgcaacattaacctttgatgttttgctctgcaatattttctgtaaatactaaaagaaaaataatag

SEQ ID NO: 117398 - DNA, 80 bp, synthetic construct; identical to SEQ ID NO: 38354
  misc_feature 1..80: note = Artificially Synthesized Probe
  source 1..80: mol_type = other DNA

SEQ ID NO: 117399 - DNA, 80 bp, synthetic construct
  misc_feature 1..80: note = Artificially Synthesized Probe
  source 1..80: mol_type = other DNA
tttagatttaataaagccaatgtattgcttagacttttttggcctttttatataactcttttctatgactgcatattttc

SEQ ID NO: 117400 - DNA, 80 bp, synthetic construct
  misc_feature 1..80: note = Artificially Synthesized Probe
  source 1..80: mol_type = other DNA
tgaactaaagattctgctttgtattggaatttcagtcttttctacagaaatcaggaaaggaaaagctatagttaacctca

SEQ ID NO: 117401 - DNA, 80 bp, synthetic construct
  misc_feature 1..80: note = Artificially Synthesized Probe
  source 1..80: mol_type = other DNA
tgatctaatcccattcaagagcttaaatagacttacaatggttggatttgggtgtgtgaaagtaaatgtgtattatgtgt

SEQ ID NO: 117402 - DNA, 80 bp, synthetic construct; identical to SEQ ID NO: 38355
  misc_feature 1..80: note = Artificially Synthesized Probe
  source 1..80: mol_type = other DNA

SEQ ID NO: 117403 - DNA, 80 bp, synthetic construct
  misc_feature 1..80: note = Artificially Synthesized Probe
  source 1..80: mol_type = other DNA
aaaaaatacgtaccttaagtgaaaaatactttattgctaaaaaatgctaacagttatctgacccatcagcaagtcatctt

SEQ ID NO: 117404 - DNA, 80 bp, synthetic construct; identical to SEQ ID NO: 38349
  misc_feature 1..80: note = Artificially Synthesized Probe
  source 1..80: mol_type = other DNA

SEQ ID NO: 117405 - DNA, 80 bp, synthetic construct
  misc_feature 1..80: note = Artificially Synthesized Probe
  source 1..80: mol_type = other DNA
ttctctgtagcacatgatgctatttggtggcatttttacccatagaacttctttcaaaattggagtcaatcctaggccgg

SEQ ID NO: 117406 - DNA, 80 bp, synthetic construct; identical to SEQ ID NO: 38356
  misc_feature 1..80: note = Artificially Synthesized Probe
  source 1..80: mol_type = other DNA

SEQ ID NO: 117407 - DNA, 80 bp, synthetic construct
  misc_feature 1..80: note = Artificially Synthesized Probe
  source 1..80: mol_type = other DNA
attccatctcaggaaaccactttctctgctcattcataaaaagcaactcctcatctgttgaagttttatcatgagattga

SEQ ID NO: 117408 - DNA, 80 bp, synthetic construct
  misc_feature 1..80: note = Artificially Synthesized Probe
  source 1..80: mol_type = other DNA
tgacctcgtcccatgaatcatgaatgttcatggtatctagaataatgaatcatctccagaaggttttcatttactttgcc

SEQ ID NO: 117409 - DNA, 80 bp, synthetic construct
  misc_feature 1..80: note = Artificially Synthesized Probe
  source 1..80: mol_type = other DNA
ctgggttcaagtgattctcgtgcttcaacatcccaagtagctgggactatgggcatacgccaccacacccagctaatttt

SEQ ID NO: 117410 - DNA, 80 bp, synthetic construct
  misc_feature 1..80: note = Artificially Synthesized Probe
  source 1..80: mol_type = other DNA
agtcaaaattactccttgatccatgggctgcagaatagatattttgttagcaggtatgaggacatgaatctcctgtacat

SEQ ID NO: 117411 - DNA, 80 bp, synthetic construct; identical to SEQ ID NO: 38357
  misc_feature 1..80: note = Artificially Synthesized Probe
  source 1..80: mol_type = other DNA

SEQ ID NO: 117412 - DNA, 80 bp, synthetic construct
  misc_feature 1..80: note = Artificially Synthesized Probe
  source 1..80: mol_type = other DNA
tgtagccaccttcatcaatgatcttagctaaatcttctggataacttgatgcagcttctacattagtacttgctgcttca

SEQ ID NO: 117413 - DNA, 80 bp, synthetic construct
  misc_feature 1..80: note = Artificially Synthesized Probe
  source 1..80: mol_type = other DNA
gaatgttgtggctggtttgatcctctatccagactattaaacctttctccatatgagcaataagactatttcaccttcac

SEQ ID NO: 117414 - DNA, 80 bp, synthetic construct; identical to SEQ ID NO: 38358
  misc_feature 1..80: note = Artificially Synthesized Probe
  source 1..80: mol_type = other DNA

SEQ ID NO: 117415 - DNA, 80 bp, synthetic construct
  misc_feature 1..80: note = Artificially Synthesized Probe
  source 1..80: mol_type = other DNA
ttttgtgttggggaagagaattttcctgtctcaaggtagcattttatttctaagacttttcagagtaaaaaaagttcagt

SEQ ID NO: 117416 - DNA, 80 bp, synthetic construct
  misc_feature 1..80: note = Artificially Synthesized Probe
  source 1..80: mol_type = other DNA
gcattcattatagggttattaattatagggaacacttagagggcattatagggttaataattggcctaatagtgttgtgt

SEQ ID NO: 117417 - DNA, 80 bp, synthetic construct
  misc_feature 1..80: note = Artificially Synthesized Probe
  source 1..80: mol_type = other DNA
atgattcaattacttcccaccgggcacctcccacaacatgtgggaattgtgggagctacagttcaagatgagatttgggt

SEQ ID NO: 117418 - DNA, 80 bp, synthetic construct
  misc_feature 1..80: note = Artificially Synthesized Probe
  source 1..80: mol_type = other DNA
tgctggtattatggccaaagagtaataccgtttcctcttaggatttaagagaactatattcaagaaaggtcaccattgta

SEQ ID NO: 117419 - DNA, 80 bp, synthetic construct
  misc_feature 1..80: note = Artificially Synthesized Probe
  source 1..80: mol_type = other DNA
caagaccagattagtattttatttttcccttcctaacactcaaattcatggcaggtgaaaagataatagaacataatcaa

SEQ ID NO: 117420 - DNA, 80 bp, synthetic construct
  misc_feature 1..80: note = Artificially Synthesized Probe
  source 1..80: mol_type = other DNA
acacccagccattatgacatatcttgaaacaacatagaaatgaagtctcagacaaattccattagattccaattctaatc

SEQ ID NO: 117421 - DNA, 80 bp, synthetic construct
  misc_feature 1..80: note = Artificially Synthesized Probe
  source 1..80: mol_type = other DNA
cccaccaattcggtaatattggttagttatgacttactatgaggtagatgttgccaagtacttttggggatataaaaaat

SEQ ID NO: 117422 - DNA, 80 bp, synthetic construct; identical to SEQ ID NO: 38392
  misc_feature 1..80: note = Artificially Synthesized Probe
  source 1..80: mol_type = other DNA

SEQ ID NO: 117423 - DNA, 80 bp, synthetic construct
  misc_feature 1..80: note = Artificially Synthesized Probe
  source 1..80: mol_type = other DNA
aaaagcacagaggaaaacaccaagaaggtctgatttggttgaagcaaaaagaacgggaaggggaatagagggaaataaaa

SEQ ID NO: 117424 - DNA, 80 bp, synthetic construct
  misc_feature 1..80: note = Artificially Synthesized Probe
  source 1..80: mol_type = other DNA
actgggaccagatcatagagatcctgaatgccaggttaatgagtttggcctttattttgtaagtaatgagttagccactg

SEQ ID NO: 117425 - DNA, 80 bp, synthetic construct
  misc_feature 1..80: note = Artificially Synthesized Probe
  source 1..80: mol_type = other DNA
acactttaccaccaaaagcaattctcatttgaattggccagaagtatcatgaaaatcaccctttgcttttaaagtattta

SEQ ID NO: 117426 - DNA, 80 bp, synthetic construct; identical to SEQ ID NO: 38393
  misc_feature 1..80: note = Artificially Synthesized Probe
  source 1..80: mol_type = other DNA

SEQ ID NO: 117427 - DNA, 80 bp, synthetic construct
  misc_feature 1..80: note = Artificially Synthesized Probe
  source 1..80: mol_type = other DNA
aaaaaaaagaatcttaccttgaacatgtccacccagatcaaaagttgtaaacgtcatgccagcaatggtcagttcttcgg

SEQ ID NO: 117428 - DNA, 80 bp, synthetic construct; identical to SEQ ID NO: 38382
  misc_feature 1..80: note = Artificially Synthesized Probe
  source 1..80: mol_type = other DNA

SEQ ID NO: 117429 - DNA, 80 bp, synthetic construct
  misc_feature 1..80: note = Artificially Synthesized Probe
  source 1..80: mol_type = other DNA
taacattcttaaatatctgccagccgtaataaagaaatcaatgtactttatgttcttagctcccacaatttagcctaaat

SEQ ID NO: 117430 - DNA, 80 bp, synthetic construct; identical to SEQ ID NO: 38394
  misc_feature 1..80: note = Artificially Synthesized Probe
  source 1..80: mol_type = other DNA

SEQ ID NO: 117431 - DNA, 80 bp, synthetic construct
  misc_feature 1..80: note = Artificially Synthesized Probe
  source 1..80: mol_type = other DNA
acaatagcttatatttactacttaatgtttgatttacttttattgcaaataaggtcaaatcaaacatttacaaactggta

SEQ ID NO: 117432 - DNA, 80 bp, synthetic construct
  misc_feature 1..80: note = Artificially Synthesized Probe
  source 1..80: mol_type = other DNA
attcttcctgctgaaaatgttaatctcttcagacaattatttgctatgaattcaaataactgctccaatctaataattgt

SEQ ID NO: 117433 - DNA, 80 bp, synthetic construct
  misc_feature 1..80: note = Artificially Synthesized Probe
  source 1..80: mol_type = other DNA
aggtttgttagactgcctgatgttgtctcaccagtcattgaggctctgtttattttgctttcagtcacttttctctctgt

SEQ ID NO: 117434 - DNA, 80 bp, synthetic construct
  misc_feature 1..80: note = Artificially Synthesized Probe
  source 1..80: mol_type = other DNA
ggtgggagaatcacttgagcccaggagttcgagaccagcctgggcaacccagggagaccctgtctctattaaaaaaaaga

SEQ ID NO: 117435 - DNA, 80 bp, synthetic construct; identical to SEQ ID NO: 38395
  misc_feature 1..80: note = Artificially Synthesized Probe
  source 1..80: mol_type = other DNA

SEQ ID NO: 117436 - DNA, 80 bp, synthetic construct
  misc_feature 1..80: note = Artificially Synthesized Probe
  source 1..80: mol_type = other DNA
tacagaggcagagtcacatatcccaagagctggttcttcttttatttggttaaaaagcactaacttgaatttcaaaagaa

SEQ ID NO: 117437 - DNA, 80 bp, synthetic construct
  misc_feature 1..80: note = Artificially Synthesized Probe
  source 1..80: mol_type = other DNA
caattcctggccccatgagagctctagtaattatttggctaacagcattcttacaattgttctttgactagccttttgga

SEQ ID NO: 117438 - DNA, 80 bp, synthetic construct
  misc_feature 1..80: note = Artificially Synthesized Probe
  source 1..80: mol_type = other DNA
tcagcaagactattggactatgtttgggtgtcctctctttgcaccatggtctgaaaattacctcttggcataaaaccaaa

SEQ ID NO: 117439 - DNA, 80 bp, synthetic construct; identical to SEQ ID NO: 38396
  misc_feature 1..80: note = Artificially Synthesized Probe
  source 1..80: mol_type = other DNA

SEQ ID NO: 117440 - DNA, 80 bp, synthetic construct
  misc_feature 1..80: note = Artificially Synthesized Probe
  source 1..80: mol_type = other DNA
aaaaattagctgggtgcagcggcaggtgcctgaaatcccagctaccagggaggctgaggcaggagaatcgcttgaaccct

SEQ ID NO: 117441 - DNA, 80 bp, synthetic construct
  misc_feature 1..80: note = Artificially Synthesized Probe
  source 1..80: mol_type = other DNA
gaacccaggaggcggaggttgcagtgagccgagattgcgccattgcactccagcctgggcaacagagagagattctgtct

SEQ ID NO: 117442 - DNA, 80 bp, synthetic construct
  misc_feature 1..80: note = Artificially Synthesized Probe
  source 1..80: mol_type = other DNA
gggcgtggtggcaggcgcctgtagtcccagctactcaggaggctgaggcaggagaatggcatgaacgcgggaggcggagc

SEQ ID NO: 117443 - DNA, 80 bp, synthetic construct
  misc_feature 1..80: note = Artificially Synthesized Probe
  source 1..80: mol_type = other DNA
atcacttgagacatcaggagttctgagaccagcctggccaatgtggtgaaaccccgtctctactaaaaatacaaaaatta

SEQ ID NO: 117444 - DNA, 80 bp, synthetic construct; identical to SEQ ID NO: 38397
  misc_feature 1..80: note = Artificially Synthesized Probe
  source 1..80: mol_type = other DNA

SEQ ID NO: 117445 - DNA, 80 bp, synthetic construct
  misc_feature 1..80: note = Artificially Synthesized Probe
  source 1..80: mol_type = other DNA
accattgcactccagcctgggggacaagagcgagactttgtctcaaaaaaaaaaaaaaaagaaagaaagaaattctatgt

SEQ ID NO: 117446 - DNA, 80 bp, synthetic construct
  misc_feature 1..80: note = Artificially Synthesized Probe
  source 1..80: mol_type = other DNA
tgctttataaaagaagtctgaattaggctatttaagatacagaacactgttaacatcccagaaagtctcctctagcccct

SEQ ID NO: 117447 - DNA, 80 bp, synthetic construct
  misc_feature 1..80: note = Artificially Synthesized Probe
  source 1..80: mol_type = other DNA
ctaaaaatacaaaaattaactgggcatggtgtggtgcacctgtaatcccagctactcgggatggtgaggcacgagaatcg

SEQ ID NO: 117448 - DNA, 80 bp, synthetic construct
  misc_feature 1..80: note = Artificially Synthesized Probe
  source 1..80: mol_type = other DNA
tatgaccagcttctgccatgtagcataatatgactgaatgtatcagtggtttattcatctttcttgctaagtagcattcc

SEQ ID NO: 117449 - DNA, 80 bp, synthetic construct; identical to SEQ ID NO: 38398
  misc_feature 1..80: note = Artificially Synthesized Probe
  source 1..80: mol_type = other DNA

SEQ ID NO: 117450 - DNA, 80 bp, synthetic construct
  misc_feature 1..80: note = Artificially Synthesized Probe
  source 1..80: mol_type = other DNA
tagtataaacatttttgtacaaggtttttggtaaatgtattttctcatttctctcgggtaagtaactaggagtagaactg

SEQ ID NO: 117451 - DNA, 80 bp, synthetic construct
  misc_feature 1..80: note = Artificially Synthesized Probe
  source 1..80: mol_type = other DNA
aatgaatgtgagctgcaggaaaggttgagatagcatctgttttcccctagtatccagaacaatgtctgacataaagtagg

SEQ ID NO: 117452 - DNA, 80 bp, synthetic construct
  misc_feature 1..80: note = Artificially Synthesized Probe
  source 1..80: mol_type = other DNA
ttttttctgtgttttttgtttttttcgagacagagtctccctctgtcgcccaggctggaatgcagtggcgccatcttggc

SEQ ID NO: 117453 - DNA, 80 bp, synthetic construct; identical to SEQ ID NO: 38399
  misc_feature 1..80: note = Artificially Synthesized Probe
  source 1..80: mol_type = other DNA

SEQ ID NO: 117454 - DNA, 80 bp, synthetic construct
  misc_feature 1..80: note = Artificially Synthesized Probe
  source 1..80: mol_type = other DNA
gagaccatcctggctaacacagtgaaaccctgtctctactaaaaatacaaaaaattagccaggcgtggtggcgggcacct

SEQ ID NO: 117455 - DNA, 80 bp, synthetic construct
  misc_feature 1..80: note = Artificially Synthesized Probe
  source 1..80: mol_type = other DNA
cttttccaacctcactaattgttttatagataaaatactttgttttgttctatcctcattctttgttctttgaacattta

SEQ ID NO: 117456 - DNA, 80 bp, synthetic construct; identical to SEQ ID NO: 38400
  misc_feature 1..80: note = Artificially Synthesized Probe
  source 1..80: mol_type = other DNA

SEQ ID NO: 117457 - DNA, 80 bp, synthetic construct
  misc_feature 1..80: note = Artificially Synthesized Probe
  source 1..80: mol_type = other DNA
ctaaaaatacaaaaattagctgggcttggtagcacatgcctgtaatcccagctattccagtggctgaggcaggagaattg

SEQ ID NO: 117458 - DNA, 80 bp, synthetic construct
  misc_feature 1..80: note = Artificially Synthesized Probe
  source 1..80: mol_type = other DNA
aatcccagcactttgggagactgaggtgggcggatcatctgaggtcgggagtttgagaccagcctggccaacatgttgaa

SEQ ID NO: 117459 - DNA, 80 bp, synthetic construct
  misc_feature 1..80: note = Artificially Synthesized Probe
  source 1..80: mol_type = other DNA
tctaaactcttatatttatagcaaagcctctggcttttaatgtaggctatattttattcactattaattttgcattaaga

SEQ ID NO: 117460 - DNA, 80 bp, synthetic construct
  misc_feature 1..80: note = Artificially Synthesized Probe
  source 1..80: mol_type = other DNA
gagcaagactccatctcaaaaaaaaaaaaactttcaatttttttggtattttttgtttctttagagacagggtctcactc

SEQ ID NO: 117461 - DNA, 80 bp, synthetic construct
  misc_feature 1..80: note = Artificially Synthesized Probe
  source 1..80: mol_type = other DNA
gagtctcagtatgttgcccaggctggtcttaaactcctgggctcaagtgattctcctgcctcagcctcccaaagtgctgg

SEQ ID NO: 117462 - DNA, 80 bp, synthetic construct; identical to SEQ ID NO: 38401
  misc_feature 1..80: note = Artificially Synthesized Probe
  source 1..80: mol_type = other DNA

SEQ ID NO: 117463 - DNA, 80 bp, synthetic construct
  misc_feature 1..80: note = Artificially Synthesized Probe
  source 1..80: mol_type = other DNA
cggtggctcacacctgtaatcccagcactttgggaggccgaggaaggcggatcacaaggtcaggagatcaagaccatcct

SEQ ID NO: 117464 - DNA, 80 bp, synthetic construct
  misc_feature 1..80: note = Artificially Synthesized Probe
  source 1..80: mol_type = other DNA
ccagcctgggcgacagagtgagactccacctcaaaaaaaaaaaaatctgaaagaaaaaattcaggttatgtaaacaaggc

SEQ ID NO: 117465 - DNA, 80 bp, synthetic construct; identical to SEQ ID NO: 38402
  misc_feature 1..80: note = Artificially Synthesized Probe
  source 1..80: mol_type = other DNA

SEQ ID NO: 117466 - DNA, 80 bp, synthetic construct
  misc_feature 1..80: note = Artificially Synthesized Probe
  source 1..80: mol_type = other DNA
aacatatcgaaacctggtctctgaaaaaatataaaaattaactgggcatggtggcacatgcctgtggtcccagctacttg

SEQ ID NO: 117467 - DNA, 80 bp, synthetic construct
  misc_feature 1..80: note = Artificially Synthesized Probe
  source 1..80: mol_type = other DNA
tatgtaggaatatacttactgggatgtaatgttgggacatgttgtccaagtctgtcatcttttagcatgtgtagcaatgt

SEQ ID NO: 117468 - DNA, 80 bp, synthetic construct
  misc_feature 1..80: note = Artificially Synthesized Probe
  source 1..80: mol_type = other DNA
taaatttggcccaattaagcttgaagttctaaacctattttcagttttaaaaaagctattttaaatctattcatggccgg

SEQ ID NO: 117469 - DNA, 80 bp, synthetic construct
  misc_feature 1..80: note = Artificially Synthesized Probe
  source 1..80: mol_type = other DNA
gtaaaacaattgaaaattcacaccaagatcctagtgcaagcagtggtgtacaaaagtgcaaacaaggttagtgattaaca

SEQ ID NO: 117470 - DNA, 80 bp, synthetic construct; identical to SEQ ID NO: 38403
  misc_feature 1..80: note = Artificially Synthesized Probe
  source 1..80: mol_type = other DNA

SEQ ID NO: 117471 - DNA, 80 bp, synthetic construct; identical to SEQ ID NO: 38383
  misc_feature 1..80: note = Artificially Synthesized Probe
  source 1..80: mol_type = other DNA

SEQ ID NO: 117472 - DNA, 80 bp, synthetic construct
  misc_feature 1..80: note = Artificially Synthesized Probe
  source 1..80: mol_type = other DNA
atatctacaatgccaaaatgctgattaattttagaagtatcaatcaggtattgattgatagataaattgataaatagaaa

SEQ ID NO: 117473 - DNA, 80 bp, synthetic construct
  misc_feature 1..80: note = Artificially Synthesized Probe
  source 1..80: mol_type = other DNA
tcaagtgatcctcccacctcagcctcctgagtagctgagactactggtgtgcaccaccacgcctgactaatttttgtatt

SEQ ID NO: 117474 - DNA, 80 bp, synthetic construct
  misc_feature 1..80: note = Artificially Synthesized Probe
  source 1..80: mol_type = other DNA
gagccaccacacctgactgaaataaacaaacttttaaagacattaggcaattatagtttcaggccatccgtttttgaata

SEQ ID NO: 117475 - DNA, 80 bp, synthetic construct
  misc_feature 1..80: note = Artificially Synthesized Probe
  source 1..80: mol_type = other DNA
aagtaatttgcccaagattacataatttaaaagtaattgaacatatttgttcaatcgagtaattgaacatatttgtataa

SEQ ID NO: 117476 - DNA, 80 bp, synthetic construct; identical to SEQ ID NO: 38404
  misc_feature 1..80: note = Artificially Synthesized Probe
  source 1..80: mol_type = other DNA

SEQ ID NO: 117477 - DNA, 80 bp, synthetic construct
  misc_feature 1..80: note = Artificially Synthesized Probe
  source 1..80: mol_type = other DNA
ctatagagaacaaaggaccaatattacctagaaactgtagcaaggaggccgggcacagtggctcacgcctgtaatcctag

SEQ ID NO: 117478 - DNA, 80 bp, synthetic construct
  misc_feature 1..80: note = Artificially Synthesized Probe
  source 1..80: mol_type = other DNA
aattgcttgaaccaggaggcgaaggttgcagtgagctgagatcgcaccactgcgctccaacctgggcaacagagtgagac

SEQ ID NO: 117479 - DNA, 80 bp, synthetic construct
  misc_feature 1..80: note = Artificially Synthesized Probe
  source 1..80: mol_type = other DNA
ttacaaaaaatacaaaaattagctggtgtggtggcacacacctgtagtaccagctactcgggaggttgaggcaggagaat

SEQ ID NO: 117480 - DNA, 80 bp, synthetic construct; identical to SEQ ID NO: 38405
  misc_feature 1..80: note = Artificially Synthesized Probe
  source 1..80: mol_type = other DNA

SEQ ID NO: 117481 - DNA, 80 bp, synthetic construct
  misc_feature 1..80: note = Artificially Synthesized Probe
  source 1..80: mol_type = other DNA
ggctaaggtgaaaaaagtaatttgccaaagattacttaatttaaaagggatacaatgagtaattgaacatctatgtatga

SEQ ID NO: 117482 - DNA, 80 bp, synthetic construct
  misc_feature 1..80: note = Artificially Synthesized Probe
  source 1..80: mol_type = other DNA
aacattacctaaaaactgtagcacactgctgaaaccactgtaaatccaatcaaatatgaaggacatatccaaatctgata

SEQ ID NO: 117483 - DNA, 80 bp, synthetic construct
  misc_feature 1..80: note = Artificially Synthesized Probe
  source 1..80: mol_type = other DNA
ttatcacagttatcaccctattttaatgatttacaagtagtttatgcgctttccatcactataaagtatgggccagttga

SEQ ID NO: 117484 - DNA, 80 bp, synthetic construct
  misc_feature 1..80: note = Artificially Synthesized Probe
  source 1..80: mol_type = other DNA
aggtcagaagtttgagaccagcctggccaacatggtgaaaccccaactctactaaaaatacagaaattaaccgggtgtgg

SEQ ID NO: 117485 - DNA, 80 bp, synthetic construct; identical to SEQ ID NO: 38406
  misc_feature 1..80: note = Artificially Synthesized Probe
  source 1..80: mol_type = other DNA

SEQ ID NO: 117486 - DNA, 80 bp, synthetic construct
  misc_feature 1..80: note = Artificially Synthesized Probe
  source 1..80: mol_type = other DNA
ctagagtgcaatggctcgatctcagctcactgaaagcttctcctcccaggttcaagcgatccttctgcctcagcctctcg

SEQ ID NO: 117487 - DNA, 80 bp, synthetic construct
  misc_feature 1..80: note = Artificially Synthesized Probe
  source 1..80: mol_type = other DNA
caccccaggcctggaagtgaaatttccttctcaaaaagggtgaggcttgagtatgatgataaactaaagagaaggagata

SEQ ID NO: 117488 - DNA, 80 bp, synthetic construct
  misc_feature 1..80: note = Artificially Synthesized Probe
  source 1..80: mol_type = other DNA
atttgtggaggtggtgggaatctgactccaaaagtgaaagggtatagagaatttttgaggagcagagcaagcattacaat

SEQ ID NO: 117489 - DNA, 80 bp, synthetic construct; identical to SEQ ID NO: 38407
  misc_feature 1..80: note = Artificially Synthesized Probe
  source 1..80: mol_type = other DNA

SEQ ID NO: 117490 - DNA, 80 bp, synthetic construct
  misc_feature 1..80: note = Artificially Synthesized Probe
  source 1..80: mol_type = other DNA
gaattgtgccagcaaagtggaagagaatatagggggttcaagaattcaagagaagttcagggttgggtggtggcaaactc

SEQ ID NO: 117491 - DNA, 80 bp, synthetic construct
  misc_feature 1..80: note = Artificially Synthesized Probe
  source 1..80: mol_type = other DNA
actgatacagactgtgaatcaagtggcaaagtcctcactgaagatgattgttggtaggtgagagctaaagaatggtgaaa

SEQ ID NO: 117492 - DNA, 80 bp, synthetic construct
  misc_feature 1..80: note = Artificially Synthesized Probe
  source 1..80: mol_type = other DNA
tatttctttaaaattgtggtttcagccaggcacaatggctcacacctgtaatcccaggactttgggaggctgaggcgggt

SEQ ID NO: 117493 - DNA, 80 bp, synthetic construct
  misc_feature 1..80: note = Artificially Synthesized Probe
  source 1..80: mol_type = other DNA
ggttgcactgagccgagatcgagccactgcaccacagcctgggccacagagcaagactctgcctcaaaaaaaaaaaaaaa

SEQ ID NO: 117494 - DNA, 80 bp, synthetic construct
  misc_feature 1..80: note = Artificially Synthesized Probe
  source 1..80: mol_type = other DNA
ctgtagtcccagctactcaggaggctgaggcaggagaatcacttgaaccccggaggtggaggttgcagtaagcagagatt

SEQ ID NO: 117495 - DNA, 80 bp, synthetic construct; identical to SEQ ID NO: 38408
  misc_feature 1..80: note = Artificially Synthesized Probe
  source 1..80: mol_type = other DNA

SEQ ID NO: 117496 - DNA, 80 bp, synthetic construct
  misc_feature 1..80: note = Artificially Synthesized Probe
  source 1..80: mol_type = other DNA
ggatggctcatttaaatgaaatatcctggatagataaatccatagagtaagtatattagtggttgtcagactgaaggaag

SEQ ID NO: 117497 - DNA, 80 bp, synthetic construct
  misc_feature 1..80: note = Artificially Synthesized Probe
  source 1..80: mol_type = other DNA
ctcaaaaaagctattatagaaaaattttaaaagcaaattttaaaaagcttatatggcatttaatatttaaaactgattta

SEQ ID NO: 117498 - DNA, 80 bp, synthetic construct
  misc_feature 1..80: note = Artificially Synthesized Probe
  source 1..80: mol_type = other DNA
ggagcctgccaccacgcctggctaattttttatatttttagtagcgacggggtttcaccatgttagccaggatggtctcg

SEQ ID NO: 117499 - DNA, 80 bp, synthetic construct; identical to SEQ ID NO: 38409
  misc_feature 1..80: note = Artificially Synthesized Probe
  source 1..80: mol_type = other DNA

SEQ ID NO: 117500 - DNA, 80 bp, synthetic construct
  misc_feature 1..80: note = Artificially Synthesized Probe
  source 1..80: mol_type = other DNA
ctgtagtcccagctgctcgggaggctgaggcaggagaatggcgtgaaaccaggaggcagagcttgcagtgagccgagatt

SEQ ID NO: 117501 - DNA, 80 bp, synthetic construct
  misc_feature 1..80: note = Artificially Synthesized Probe
  source 1..80: mol_type = other DNA
cagatcacctgagttcgggagttcgagaccagcctgaccaacatggagaaaccccatctctactaaaaatacaaaattag

SEQ ID NO: 117502 - DNA, 80 bp, synthetic construct
  misc_feature 1..80: note = Artificially Synthesized Probe
  source 1..80: mol_type = other DNA
gaaaaaaaatacatatttagtttgtgaccagccttggcaacgtggaaaaaccccatttctataaaaaatacaaaaattag

SEQ ID NO: 117503 - DNA, 80 bp, synthetic construct; identical to SEQ ID NO: 38410
  misc_feature 1..80: note = Artificially Synthesized Probe
  source 1..80: mol_type = other DNA

SEQ ID NO: 117504 - DNA, 80 bp, synthetic construct
  misc_feature 1..80: note = Artificially Synthesized Probe
  source 1..80: mol_type = other DNA
aacaagatcccatctctaaaaaaaaaattttttttttttgagactaagtctcactctgtcgcccaggctggagtgcagtg

SEQ ID NO: 117505 - DNA, 80 bp, synthetic construct
  misc_feature 1..80: note = Artificially Synthesized Probe
  source 1..80: mol_type = other DNA
gatccaggtacacaaaactaaaatttaggtctgcacaggcagtatctgtgttcatatatctttggcactcatacaaagat

SEQ ID NO: 117506 - DNA, 80 bp, synthetic construct
  misc_feature 1..80: note = Artificially Synthesized Probe
  source 1..80: mol_type = other DNA
ttgaactcctgacctcgagatccactcgcctcggtgtcccaaagtgctgggattacagatgtgagccaccatgcccggta

SEQ ID NO: 117507 - DNA, 80 bp, synthetic construct
  misc_feature 1..80: note = Artificially Synthesized Probe
  source 1..80: mol_type = other DNA
ttaaaaaaaaaaaaaaaagaaggatgaactgggcatgatggctcatacctgtaatcccagcactttgggaggccaaggtg

SEQ ID NO: 117508 - DNA, 80 bp, synthetic construct; identical to SEQ ID NO: 38411
  misc_feature 1..80: note = Artificially Synthesized Probe
  source 1..80: mol_type = other DNA

SEQ ID NO: 117509 - DNA, 80 bp, synthetic construct
  misc_feature 1..80: note = Artificially Synthesized Probe
  source 1..80: mol_type = other DNA
ggctgaggcaggagaatcgcttgaacctgggaggcagaggttgcagtgagccaagatcgcgccactgcactccagcctgg

SEQ ID NO: 117510 - DNA, 80 bp, synthetic construct
  misc_feature 1..80: note = Artificially Synthesized Probe
  source 1..80: mol_type = other DNA
caagatcgtggcactgcactccagcctaggcaacagggcaacattctgtctcaaaaaaaaaaaaaagaaaaaaaagaaaa

SEQ ID NO: 117511 - DNA, 80 bp, synthetic construct; identical to SEQ ID NO: 38412
  misc_feature 1..80: note = Artificially Synthesized Probe
  source 1..80: mol_type = other DNA

SEQ ID NO: 117512 - DNA, 80 bp, synthetic construct
  misc_feature 1..80: note = Artificially Synthesized Probe
  source 1..80: mol_type = other DNA
gtgtggtggtgtatgcctgtaatcccagctactcgggaggctgaggcaggagaatcgcttgaacccaggaggcagaggtt

SEQ ID NO: 117513 - DNA, 80 bp, synthetic construct
  misc_feature 1..80: note = Artificially Synthesized Probe
  source 1..80: mol_type = other DNA
ggacagatcacttgagttcgggagttcaagaccagcctggccaacatggtgaaaccccatctctactaaaaatacaaaaa

SEQ ID NO: 117514 - DNA, 80 bp, synthetic construct
  misc_feature 1..80: note = Artificially Synthesized Probe
  source 1..80: mol_type = other DNA
aatttaaccagctgtgatccaaaagtgtaattaacggcagtcagtgaaacaggtatgggatctctttaaaagtgtaaaag

SEQ ID NO: 117515 - DNA, 80 bp, synthetic construct
  misc_feature 1..80: note = Artificially Synthesized Probe
  source 1..80: mol_type = other DNA
gaaaaaagaaaagaaatactaatatagcattccaacttgtaagcttcaaatgatgtggcaatgattttcatttccttttc

SEQ ID NO: 117516 - DNA, 80 bp, synthetic construct
  misc_feature 1..80: note = Artificially Synthesized Probe
  source 1..80: mol_type = other DNA
ttcaagcaaaccccccatctcagcagcgagtagctgggactactggcctgctagccagggccctgcacccagcaaatttt

SEQ ID NO: 117517 - DNA, 80 bp, synthetic construct; identical to SEQ ID NO: 38413
  misc_feature 1..80: note = Artificially Synthesized Probe
  source 1..80: mol_type = other DNA

SEQ ID NO: 117518 - DNA, 80 bp, synthetic construct
  misc_feature 1..80: note = Artificially Synthesized Probe
  source 1..80: mol_type = other DNA
aaatgttccttttctttccttctttcattgtttcaatgtgacctactcttcactgatactttaacacggaatataggacg

SEQ ID NO: 117519 - DNA, 80 bp, synthetic construct
  misc_feature 1..80: note = Artificially Synthesized Probe
  source 1..80: mol_type = other DNA
tcaaagttttagctgttttaaaacaaatcttcttggaaaagcttcaacaccttaaaaatcagtacagtggcccactgagg

SEQ ID NO: 117520 - DNA, 80 bp, synthetic construct
  misc_feature 1..80: note = Artificially Synthesized Probe
  source 1..80: mol_type = other DNA
ctttgggaggccgaggcaggcggatcacgaggtcaggagataagagaccatcctggctaacacggtgaaaccccatctct

SEQ ID NO: 117521 - DNA, 80 bp, synthetic construct; identical to SEQ ID NO: 38414
  misc_feature 1..80: note = Artificially Synthesized Probe
  source 1..80: mol_type = other DNA

SEQ ID NO: 117522 - DNA, 80 bp, synthetic construct
  misc_feature 1..80: note = Artificially Synthesized Probe
  source 1..80: mol_type = other DNA
actgaggcccaggggaaggaaggggcttgcctgcagccacctcgttctttcctgaaaagaccaagcgtctgacagcagca

SEQ ID NO: 117523 - DNA, 80 bp, synthetic construct
  misc_feature 1..80: note = Artificially Synthesized Probe
  source 1..80: mol_type = other DNA
gggatccatagctgctgcccaccggtcctcccagaaggaggggctgtcactcacctgcgactggagggaacgcaatcccc

SEQ ID NO: 117524 - DNA, 80 bp, synthetic construct; identical to SEQ ID NO: 38384
  misc_feature 1..80: note = Artificially Synthesized Probe
  source 1..80: mol_type = other DNA

SEQ ID NO: 117525 - DNA, 80 bp, synthetic construct
  misc_feature 1..80: note = Artificially Synthesized Probe
  source 1..80: mol_type = other DNA
tgccgccaattccccagttgagcgaggctgctcgcaacccctaacaccgcctgggtctcccagccgcctggtctccccac

SEQ ID NO: 117526 - DNA, 80 bp, synthetic construct; identical to SEQ ID NO: 38415
  misc_feature 1..80: note = Artificially Synthesized Probe
  source 1..80: mol_type = other DNA

SEQ ID NO: 117527 - DNA, 80 bp, synthetic construct
  misc_feature 1..80: note = Artificially Synthesized Probe
  source 1..80: mol_type = other DNA
gcccggctaatttttgtatttttagtagagacggggtttcaccatgttggccaggctggtctcgaactcttgacctaaag

SEQ ID NO: 117528 - DNA, 80 bp, synthetic construct
  misc_feature 1..80: note = Artificially Synthesized Probe
  source 1..80: mol_type = other DNA
agtgctgggatcaccaccgcgccctgcctaaaatacattttcaaagtacacgtgcttattgaattcatttttttttcttt

SEQ ID NO: 117529 - DNA, 80 bp, synthetic construct
  misc_feature 1..80: note = Artificially Synthesized Probe
  source 1..80: mol_type = other DNA
agcactttgggaggtcaaggtgggtgaatcacctgaggttagagttcaagaccagcctggccaacatggtgaaaccccat

SEQ ID NO: 117530 - DNA, 80 bp, synthetic construct; identical to SEQ ID NO: 38416
  misc_feature 1..80: note = Artificially Synthesized Probe
  source 1..80: mol_type = other DNA

SEQ ID NO: 117531 - DNA, 80 bp, synthetic construct
  misc_feature 1..80: note = Artificially Synthesized Probe
  source 1..80: mol_type = other DNA
taatatttgaattgttttgtagagataggggtctcattatgttgcccacgctgatcttgaactcccgggcttaagcgatc

SEQ ID NO: 117532 - DNA, 80 bp, synthetic construct
  misc_feature 1..80: note = Artificially Synthesized Probe
  source 1..80: mol_type = other DNA
aattctcctgcctcaacctcccaagtagctgggattacaggcgcagtccaccatgcctggccaattttttgtgttttagt

SEQ ID NO: 117533 - DNA, 80 bp, synthetic construct
  misc_feature 1..80: note = Artificially Synthesized Probe
  source 1..80: mol_type = other DNA
gtgagccactgcacctggccgtagtcagcctttttgtatgtttgttttactatggaacagttcatgaatttgcctatcat

SEQ ID NO: 117534 - DNA, 80 bp, synthetic construct; identical to SEQ ID NO: 38417
  misc_feature 1..80: note = Artificially Synthesized Probe
  source 1..80: mol_type = other DNA

SEQ ID NO: 117535 - DNA, 80 bp, synthetic construct
  misc_feature 1..80: note = Artificially Synthesized Probe
  source 1..80: mol_type = other DNA
aagctggttgctcctaaacatggcttcctttctagaggctcgggccataaaaatcttatgtctttgggaaaatatccaca

SEQ ID NO: 117536 - DNA, 80 bp, synthetic construct
  misc_feature 1..80: note = Artificially Synthesized Probe
  source 1..80: mol_type = other DNA
cctacacacttttcaggtctcaactcttcaggtcttcctctcatcaaggccttcctcccagatttggttaagtcctctgt

SEQ ID NO: 117537 - DNA, 80 bp, synthetic construct
  misc_feature 1..80: note = Artificially Synthesized Probe
  source 1..80: mol_type = other DNA
aacaacagcctaagaagtttgagtcataagatgtttggttctttataaaaactaaagataacatcttaacatatgtccct

SEQ ID NO: 117538 - DNA, 80 bp, synthetic construct
  misc_feature 1..80: note = Artificially Synthesized Probe
  source 1..80: mol_type = other DNA
tccataaaaaataaaaaaaattagctgggcatggttgtatgcctgtagtcccagctacttgggaggctgaggtggcagga

SEQ ID NO: 117539 - DNA, 80 bp, synthetic construct; identical to SEQ ID NO: 38418
  misc_feature 1..80: note = Artificially Synthesized Probe
  source 1..80: mol_type = other DNA

SEQ ID NO: 117540 - DNA, 80 bp, synthetic construct
  misc_feature 1..80: note = Artificially Synthesized Probe
  source 1..80: mol_type = other DNA
ggaggctgaggcagagaatcacttgaacctgggaggcggaggttgcagtgagcccaggtcgcaccattgcactccagtca

SEQ ID NO: 117541 - DNA, 80 bp, synthetic construct
  misc_feature 1..80: note = Artificially Synthesized Probe
  source 1..80: mol_type = other DNA
cattgggaagcagactccagtttggttgggtaacaagcttcctcagcaactttatgatttactttttttttttttttttt

SEQ ID NO: 117542 - DNA, 80 bp, synthetic construct
  misc_feature 1..80: note = Artificially Synthesized Probe
  source 1..80: mol_type = other DNA
agttttagtagagacgggggtttcacagtgttggccaggctggtctcgaactcctgacctcaggtgatccatccgcctta

SEQ ID NO: 117543 - DNA, 80 bp, synthetic construct; identical to SEQ ID NO: 38419
  misc_feature 1..80: note = Artificially Synthesized Probe
  source 1..80: mol_type = other DNA

SEQ ID NO: 117544 - DNA, 80 bp, synthetic construct
  misc_feature 1..80: note = Artificially Synthesized Probe
  source 1..80: mol_type = other DNA
cctggctaattttttttgtatttttagtagagacagggtttcaccatgttggtcaggctggtctcgaacgcctgacctct

SEQ ID NO: 117545 - DNA, 80 bp, synthetic construct
  misc_feature 1..80: note = Artificially Synthesized Probe
  source 1..80: mol_type = other DNA
aattgtttggtttaataaacactaatgtggcctgaggcaattcacaaggctcctcaactcctcaagattacagctattgt

SEQ ID NO: 117546 - DNA, 80 bp, synthetic construct
  misc_feature 1..80: note = Artificially Synthesized Probe
  source 1..80: mol_type = other DNA
ttagcttcttcagtatcataatagatactctaggaaatacttgaagaaaggcaggtccctgaaggtacagataacatgaa

SEQ ID NO: 117547 - DNA, 80 bp, synthetic construct; identical to SEQ ID NO: 38420
  misc_feature 1..80: note = Artificially Synthesized Probe
  source 1..80: mol_type = other DNA

SEQ ID NO: 117548 - DNA, 80 bp, synthetic construct
  misc_feature 1..80: note = Artificially Synthesized Probe
  source 1..80: mol_type = other DNA
ttaaaatgaaaaacttaatctagctacagactacaggttaaagactggttccaacattagccactcaaaagtttcagttc

SEQ ID NO: 117549 - DNA, 80 bp, synthetic construct
  misc_feature 1..80: note = Artificially Synthesized Probe
  source 1..80: mol_type = other DNA
accttttgggggttttgagcagaacagaaacatggtcagaattgtgtttttaaatgtttcctctggcagcagtgtgcaga

SEQ ID NO: 117550 - DNA, 80 bp, synthetic construct
  misc_feature 1..80: note = Artificially Synthesized Probe
  source 1..80: mol_type = other DNA
cctgtgttgagtcagtgggaacagagaaagagggaatcctatgagaaactgtaaaggttggaatctgtaagatttcatgg

SEQ ID NO: 117551 - DNA, 80 bp, synthetic construct
  misc_feature 1..80: note = Artificially Synthesized Probe
  source 1..80: mol_type = other DNA
ctcagctacttgggaggctgaggcaggagaatcacttgaacctgggaggcagaggttgaagtgagccaagattgcgccac

SEQ ID NO: 117552 - DNA, 80 bp, synthetic construct; identical to SEQ ID NO: 38421
  misc_feature 1..80: note = Artificially Synthesized Probe
  source 1..80: mol_type = other DNA

SEQ ID NO: 117553 - DNA, 80 bp, synthetic construct
  misc_feature 1..80: note = Artificially Synthesized Probe
  source 1..80: mol_type = other DNA
caaagttttacctgaattagtaagtctacttctctctatctctagtgcaaagaccttactgcaggccaccatcagctctg

SEQ ID NO: 117554 - DNA, 80 bp, synthetic construct
  misc_feature 1..80: note = Artificially Synthesized Probe
  source 1..80: mol_type = other DNA
atcctcccactttagccccccaagcagctgggaccacaggtatgcaccaccatgcccagctaatttgttaaaatttttgt

SEQ ID NO: 117555 - DNA, 80 bp, synthetic construct
  misc_feature 1..80: note = Artificially Synthesized Probe
  source 1..80: mol_type = other DNA
agttattcttctatttataaatcttcaattgcttctccaaacctctaaactcctgaaaatggcttataagtttctcatgg

SEQ ID NO: 117556 - DNA, 80 bp, synthetic construct; identical to SEQ ID NO: 38385
  misc_feature 1..80: note = Artificially Synthesized Probe
  source 1..80: mol_type = other DNA

SEQ ID NO: 117557 - DNA, 80 bp, synthetic construct; identical to SEQ ID NO: 38422
  misc_feature 1..80: note = Artificially Synthesized Probe
  source 1..80: mol_type = other DNA

SEQ ID NO: 117558 - DNA, 80 bp, synthetic construct
  misc_feature 1..80: note = Artificially Synthesized Probe
  source 1..80: mol_type = other DNA
acagatccacagaaggaagagatcttctctgtcctgttcctttttacttggtgcctggcacatgaaacgtatttagtaag

SEQ ID NO: 117559 - DNA, 80 bp, synthetic construct
  misc_feature 1..80: note = Artificially Synthesized Probe
  source 1..80: mol_type = other DNA
cgtctctactaaaaatacaaaacttagccaggcatagtagcgggtgcctgtaatcccagctacttgagaggctgaggcag

SEQ ID NO: 117560 - DNA, 80 bp, synthetic construct
  misc_feature 1..80: note = Artificially Synthesized Probe
  source 1..80: mol_type = other DNA
ctgtacacaaaattttaaaaattagctaggtgtggtggcacatgcctgtagtcctggccactcgggagggtatggtagga

SEQ ID NO: 117561 - DNA, 80 bp, synthetic construct; identical to SEQ ID NO: 38423
  misc_feature 1..80: note = Artificially Synthesized Probe
  source 1..80: mol_type = other DNA

SEQ ID NO: 117562 - DNA, 80 bp, synthetic construct
  misc_feature 1..80: note = Artificially Synthesized Probe
  source 1..80: mol_type = other DNA
aggctgaggcgggtaaatcacgaggtcaggagtttgagaccagcctggccaacatggtgaaacccggtctctactaaaaa

SEQ ID NO: 117563 - DNA, 80 bp, synthetic construct
  misc_feature 1..80: note = Artificially Synthesized Probe
  source 1..80: mol_type = other DNA
aaaaaaaaagcaaaaattagctgggtgtgttggcgggcacctgtaatcccagctactcgggaggctgaggtaggagaatt

SEQ ID NO: 117564 - DNA, 80 bp, synthetic construct
  misc_feature 1..80: note = Artificially Synthesized Probe
  source 1..80: mol_type = other DNA
tcgcttgaacctggaaggcggaggttgcattgagccgagatcgcgccattgcactccagtctgggtaacagaatgagatt

SEQ ID NO: 117565 - DNA, 80 bp, synthetic construct; identical to SEQ ID NO: 38424
  misc_feature 1..80: note = Artificially Synthesized Probe
  source 1..80: mol_type = other DNA

SEQ ID NO: 117566 - DNA, 80 bp, synthetic construct
  misc_feature 1..80: note = Artificially Synthesized Probe
  source 1..80: mol_type = other DNA
aaggactgtaactctgacatggacaatggctacagaaaacactaatttttgatattaaaattattcttgatggaattggt

SEQ ID NO: 117567 - DNA, 80 bp, synthetic construct
  misc_feature 1..80: note = Artificially Synthesized Probe
  source 1..80: mol_type = other DNA
ggtaacatggtgaaatcccgtctctacaaaaaatacacaaattagtgggtgtggtggtgtgcacctgtagtaccagctac

SEQ ID NO: 117568 - DNA, 80 bp, synthetic construct
  misc_feature 1..80: note = Artificially Synthesized Probe
  source 1..80: mol_type = other DNA
taaagacactttaaatttattccttcaaaaatgtttactgaatattgtacctgttaagtgtgaggccccaagccaagtgt

SEQ ID NO: 117569 - DNA, 80 bp, synthetic construct
  misc_feature 1..80: note = Artificially Synthesized Probe
  source 1..80: mol_type = other DNA
ctgtaatcccagcactttgggaggccgaggcaggcggatcacaaggtcaggagatcaagaccaccctggctaacacggtg

SEQ ID NO: 117570 - DNA, 80 bp, synthetic construct; identical to SEQ ID NO: 38425
  misc_feature 1..80: note = Artificially Synthesized Probe
  source 1..80: mol_type = other DNA

SEQ ID NO: 117571 - DNA, 80 bp, synthetic construct
  misc_feature 1..80: note = Artificially Synthesized Probe
  source 1..80: mol_type = other DNA
aagaaacataagcagagtaagaggaacacagagtgagctgtgtcaggtaggatatttagagaagccctcttcaattaaag

SEQ ID NO: 117572 - DNA, 80 bp, synthetic construct
  misc_feature 1..80: note = Artificially Synthesized Probe
  source 1..80: mol_type = other DNA
aagtgtaatggcaggcttgtgcttgaatagctagagaaatagcaaatgtgtctggagtggagtgagtgggaaggagtgtg

SEQ ID NO: 117573 - DNA, 80 bp, synthetic construct; identical to SEQ ID NO: 38426
  misc_feature 1..80: note = Artificially Synthesized Probe
  source 1..80: mol_type = other DNA

SEQ ID NO: 117574 - DNA, 80 bp, synthetic construct
  misc_feature 1..80: note = Artificially Synthesized Probe
  source 1..80: mol_type = other DNA
gtcctgtcagaagcaaatgaggccaaaggaactgttcttaaaatggaaccaaaagagtttcagtaaacaaaactgttgtt

SEQ ID NO: 117575 - DNA, 80 bp, synthetic construct
  misc_feature 1..80: note = Artificially Synthesized Probe
  source 1..80: mol_type = other DNA
agcaattctcctgcctcagcctcccgagtagctgggattacagggaactgccaacatgcccagctaatatttgtatttat

SEQ ID NO: 117576 - DNA, 80 bp, synthetic construct
  misc_feature 1..80: note = Artificially Synthesized Probe
  source 1..80: mol_type = other DNA
ccttcctgaaaagtaaagcaagttgatcctatttatcacctgaaaatgcaacagtcatgagcaggcaggcaaaggagctc

SEQ ID NO: 117577 - DNA, 80 bp, synthetic construct
  misc_feature 1..80: note = Artificially Synthesized Probe
  source 1..80: mol_type = other DNA
ttgaaaaactaaaattttcttagtaagcctagcaatgaggcttgcaggccctatcacatggcaagcataatatctaaaaa

SEQ ID NO: 117578 - DNA, 80 bp, synthetic construct; identical to SEQ ID NO: 38427
  misc_feature 1..80: note = Artificially Synthesized Probe
  source 1..80: mol_type = other DNA

SEQ ID NO: 117579 - DNA, 80 bp, synthetic construct
  misc_feature 1..80: note = Artificially Synthesized Probe
  source 1..80: mol_type = other DNA
gaccttgtgatctgctcgccacggcctccgaaagcgctgggattacaggcgtgagccactgccctgggcctacaattttc

SEQ ID NO: 117580 - DNA, 80 bp, synthetic construct
  misc_feature 1..80: note = Artificially Synthesized Probe
  source 1..80: mol_type = other DNA
tacatacaggtaattgaacaaagaaatatcaataacaattggtaagagcattttttttttttttttgagacagagtctcc

SEQ ID NO: 117581 - DNA, 80 bp, synthetic construct
  misc_feature 1..80: note = Artificially Synthesized Probe
  source 1..80: mol_type = other DNA
gtttcatcatgttggccaggctgctctcgaatgcctgacctcaagtgatccacccaccttggcctaccaaagtgttggga

SEQ ID NO: 117582 - DNA, 80 bp, synthetic construct; identical to SEQ ID NO: 38428
  misc_feature 1..80: note = Artificially Synthesized Probe
  source 1..80: mol_type = other DNA

SEQ ID NO: 117583 - DNA, 80 bp, synthetic construct
  misc_feature 1..80: note = Artificially Synthesized Probe
  source 1..80: mol_type = other DNA
cagctgggactacaggcatacgtcaccatgcccagctaattttttgtatgtttttgtagagatggagttttgccatattc

SEQ ID NO: 117584 - DNA, 80 bp, synthetic construct; identical to SEQ ID NO: 38381
  misc_feature 1..80: note = Artificially Synthesized Probe
  source 1..80: mol_type = other DNA

SEQ ID NO: 117585 - DNA, 80 bp, synthetic construct
  misc_feature 1..80: note = Artificially Synthesized Probe
  source 1..80: mol_type = other DNA
accgagagtgtaaaaaccatttgaaatacttaatcattgctttgaggacacgaacagtaacatagcaacttaggggtgga

SEQ ID NO: 117586 - DNA, 80 bp, synthetic construct
  misc_feature 1..80: note = Artificially Synthesized Probe
  source 1..80: mol_type = other DNA
tgaagtcatgagttcaagaccagcctggtcaacatggtgaaactctgtccctagtaaaaatacaaaaattagctgggcat

SEQ ID NO: 117587 - DNA, 80 bp, synthetic construct; identical to SEQ ID NO: 38429
  misc_feature 1..80: note = Artificially Synthesized Probe
  source 1..80: mol_type = other DNA

SEQ ID NO: 117588 - DNA, 80 bp, synthetic construct
  misc_feature 1..80: note = Artificially Synthesized Probe
  source 1..80: mol_type = other DNA
aagatcattcaaaaggagctgaataaaaagagataattaaactaatgcaggtttgagatcaggtatttgcctctttgaag

SEQ ID NO: 117589 - DNA, 80 bp, synthetic construct
  misc_feature 1..80: note = Artificially Synthesized Probe
  source 1..80: mol_type = other DNA
ggattttgttatagtggctccaaactgtaaacaatttgaccaaaagtatcatcttcatcttaagattttaactgggcgtg

SEQ ID NO: 117590 - DNA, 80 bp, synthetic construct
  misc_feature 1..80: note = Artificially Synthesized Probe
  source 1..80: mol_type = other DNA
aaaaaaagcccaacaaacaaaaagtctttgttgtatggagtaagaactacctgagagcaaataagaaaaaagaaaattgg

SEQ ID NO: 117591 - DNA, 80 bp, synthetic construct
  misc_feature 1..80: note = Artificially Synthesized Probe
  source 1..80: mol_type = other DNA
ctggaggactgcttgagcccaggaggttgaggcagcaatgagctgtgactgcaccactgcactccagcctggacaacaga

SEQ ID NO: 117592 - DNA, 80 bp, synthetic construct
  misc_feature 1..80: note = Artificially Synthesized Probe
  source 1..80: mol_type = other DNA
gctcacagcaacctccgtctcctgggttcaagcaattctcctgcctcatcctcctgagtagctgggattacaggcatgtg

SEQ ID NO: 117593 - DNA, 80 bp, synthetic construct; identical to SEQ ID NO: 38430
  misc_feature 1..80: note = Artificially Synthesized Probe
  source 1..80: mol_type = other DNA

SEQ ID NO: 117594 - DNA, 80 bp, synthetic construct
  misc_feature 1..80: note = Artificially Synthesized Probe
  source 1..80: mol_type = other DNA
actacagggatgtgccaccacactggccactttttaaaaatttatttaattaaaaacattggctgggcatggtggcttac

SEQ ID NO: 117595 - DNA, 80 bp, synthetic construct
  misc_feature 1..80: note = Artificially Synthesized Probe
  source 1..80: mol_type = other DNA
actgaggcaggagaattgcttgaacccaggaggcggaggttgcagtgagcggagatggcaccactgcactccagcctggg

SEQ ID NO: 117596 - DNA, 80 bp, synthetic construct; identical to SEQ ID NO: 38431
  misc_feature 1..80: note = Artificially Synthesized Probe
  source 1..80: mol_type = other DNA

SEQ ID NO: 117597 - DNA, 80 bp, synthetic construct
  misc_feature 1..80: note = Artificially Synthesized Probe
  source 1..80: mol_type = other DNA
taattaactatgttgtccaatcaccgcagtttcgacctccctttggcttcaaaagtcaaaaaagtcaacttgcaaaaaaa

SEQ ID NO: 117598 - DNA, 80 bp, synthetic construct
  misc_feature 1..80: note = Artificially Synthesized Probe
  source 1..80: mol_type = other DNA
gtcaaagacaaaggcctccttcttggcttgatcacactattaacatgtacacatatttaaccacctctttttaaaacccc

SEQ ID NO: 117599 - DNA, 80 bp, synthetic construct
  misc_feature 1..80: note = Artificially Synthesized Probe
  source 1..80: mol_type = other DNA
ccaccccacgaaagcggctactgaatctcagattgccccacgatcctggctctgcgagcgaggtcacgttcacaacggcg

SEQ ID NO: 117600 - DNA, 80 bp, synthetic construct
  misc_feature 1..80: note = Artificially Synthesized Probe
  source 1..80: mol_type = other DNA
ggctgctgcgagcccggagccggaagtgccacgtgtcctgattgcggctgcgcggccggcggctgacaggcacttccggc

SEQ ID NO: 117601 - DNA, 80 bp, synthetic construct; identical to SEQ ID NO: 38386
  misc_feature 1..80: note = Artificially Synthesized Probe
  source 1..80: mol_type = other DNA

SEQ ID NO: 117602 - DNA, 80 bp, synthetic construct; identical to SEQ ID NO: 38432
  misc_feature 1..80: note = Artificially Synthesized Probe
  source 1..80: mol_type = other DNA

SEQ ID NO: 117603 - DNA, 80 bp, synthetic construct
  misc_feature 1..80: note = Artificially Synthesized Probe
  source 1..80: mol_type = other DNA
ggggtctccctacaccaacggtgagtgctgtccggggggagggcgcagcctggccagggctgactgacctttgcgtgcca

SEQ ID NO: 117604 - DNA, 80 bp, synthetic construct
  misc_feature 1..80: note = Artificially Synthesized Probe
  source 1..80: mol_type = other DNA
acagggactaggacacagaccccatcagcaatggtagtggctgcattactaataaaaatacacatgattcagggatacat

SEQ ID NO: 117605 - DNA, 80 bp, synthetic construct
  misc_feature 1..80: note = Artificially Synthesized Probe
  source 1..80: mol_type = other DNA
agacacatttaaatgaaacatttgcccaacaaggatgccaaacattagagtttgttttattgcatgacgtttgcataaga

SEQ ID NO: 117606 - DNA, 80 bp, synthetic construct
  misc_feature 1..80: note = Artificially Synthesized Probe
  source 1..80: mol_type = other DNA
agtttcatgttgttaaaaagtgcttcaaatgtactgctggaaagttgctctttacaaatggcgctggggtgatgtcagat

SEQ ID NO: 117607 - DNA, 80 bp, synthetic construct; identical to SEQ ID NO: 38387
  misc_feature 1..80: note = Artificially Synthesized Probe
  source 1..80: mol_type = other DNA

SEQ ID NO: 117608 - DNA, 80 bp, synthetic construct
  misc_feature 1..80: note = Artificially Synthesized Probe
  source 1..80: mol_type = other DNA
agccccacatcccagcagaattataggttctattttagaacaaagaatggctgtgataaatccatgactgtgataaagtc

SEQ ID NO: 117609 - DNA, 80 bp, synthetic construct
  misc_feature 1..80: note = Artificially Synthesized Probe
  source 1..80: mol_type = other DNA
aataatctgacttagaaaaaaatccaaactggcttcactaatattaaagacaaacattccctgagaaggtttatgaccaa

SEQ ID NO: 117610 - DNA, 80 bp, synthetic construct
  misc_feature 1..80: note = Artificially Synthesized Probe
  source 1..80: mol_type = other DNA
cctgaggtcaggagttcgagaccagactgaccaacatggagaaaccccgtctctaccaaaaatacaaaattagctgggcg

SEQ ID NO: 117611 - DNA, 80 bp, synthetic construct; identical to SEQ ID NO: 38388
  misc_feature 1..80: note = Artificially Synthesized Probe
  source 1..80: mol_type = other DNA

SEQ ID NO: 117612 - DNA, 80 bp, synthetic construct
  misc_feature 1..80: note = Artificially Synthesized Probe
  source 1..80: mol_type = other DNA
tcagaagttcgacaagcctggacaacatggtgaaaccctgtctctactaacaatacaaatattagccagctgtggtggcg

SEQ ID NO: 117613 - DNA, 80 bp, synthetic construct
  misc_feature 1..80: note = Artificially Synthesized Probe
  source 1..80: mol_type = other DNA
aaatattccaagtttatgtcttatttatctctggtaaactcagggcctaaacacactactggtatacttaaacactcaaa

SEQ ID NO: 117614 - DNA, 80 bp, synthetic construct
  misc_feature 1..80: note = Artificially Synthesized Probe
  source 1..80: mol_type = other DNA
gaaaatgtttcattccatggtagaaagaaatgaggacattaaaaagacccacaggtataaatgacagttttctttaagaa

SEQ ID NO: 117615 - DNA, 80 bp, synthetic construct
  misc_feature 1..80: note = Artificially Synthesized Probe
  source 1..80: mol_type = other DNA
caggtctgtcgatcttattcccaagaatcagtataggcacattagcaatggtttcatctgtcattagtgactgaaaaaaa

SEQ ID NO: 117616 - DNA, 80 bp, synthetic construct
  misc_feature 1..80: note = Artificially Synthesized Probe
  source 1..80: mol_type = other DNA
aaattcttctgtcttcctaaggctcttcctgtaaatgtttactctgctcatcctttaaaggagtgacatagaacgtatag

SEQ ID NO: 117617 - DNA, 80 bp, synthetic construct; identical to SEQ ID NO: 38389
  misc_feature 1..80: note = Artificially Synthesized Probe
  source 1..80: mol_type = other DNA

SEQ ID NO: 117618 - DNA, 80 bp, synthetic construct
  misc_feature 1..80: note = Artificially Synthesized Probe
  source 1..80: mol_type = other DNA
tagctacatatgcctctgctcactcctgggagtagtgtcaaagatggcatgtcctatcatttccaggctgtggcttaaga

SEQ ID NO: 117619 - DNA, 80 bp, synthetic construct
  misc_feature 1..80: note = Artificially Synthesized Probe
  source 1..80: mol_type = other DNA
ttactccctctgcattctaagtaatcactacttaaagcaatcactgagctcaacaaattgccaagagtttcatcagagac

SEQ ID NO: 117620 - DNA, 80 bp, synthetic construct; identical to SEQ ID NO: 38390
  misc_feature 1..80: note = Artificially Synthesized Probe
  source 1..80: mol_type = other DNA

SEQ ID NO: 117621 - DNA, 80 bp, synthetic construct
  misc_feature 1..80: note = Artificially Synthesized Probe
  source 1..80: mol_type = other DNA
ctgagaataactaagagggaatttcaggctttccttgactgtgggcaagtcaaatactttagtctcttccaattatcata

SEQ ID NO: 117622 - DNA, 80 bp, synthetic construct
  misc_feature 1..80: note = Artificially Synthesized Probe
  source 1..80: mol_type = other DNA
cagtgttcattttttgacatttctagttatcagattttttttgccagtgataaatttggaatgagtgacagaaggaaatt

SEQ ID NO: 117623 - DNA, 80 bp, synthetic construct
  misc_feature 1..80: note = Artificially Synthesized Probe
  source 1..80: mol_type = other DNA
ctggacaacatagtgaaacctcatctctacaaaaaaacacaaaaaattagccaagccggacacagtggctcatgcctgta

SEQ ID NO: 117624 - DNA, 80 bp, synthetic construct
  misc_feature 1..80: note = Artificially Synthesized Probe
  source 1..80: mol_type = other DNA
agaatccatctactccagtgcagcttttccaaaaatagttctgtgtaaactcagttttctatttctgccctaaaatctat

SEQ ID NO: 117625 - DNA, 80 bp, synthetic construct
  misc_feature 1..80: note = Artificially Synthesized Probe
  source 1..80: mol_type = other DNA
ccgagatcatgccactgcactccagcctgggtgacagagagagactccgtctcaaaaaaaaaaaaaaaaaaaaaaaaaaa

SEQ ID NO: 117626 - DNA, 80 bp, synthetic construct; identical to SEQ ID NO: 38391
  misc_feature 1..80: note = Artificially Synthesized Probe
  source 1..80: mol_type = other DNA

SEQ ID NO: 117627 - DNA, 80 bp, synthetic construct
  misc_feature 1..80: note = Artificially Synthesized Probe
  source 1..80: mol_type = other DNA
cttgagctcaagtcatagtcccatctcagcctcctgagtaggtaggactatcagtgtctatcactatgccccattaattg

SEQ ID NO: 117628 - DNA, 80 bp, synthetic construct
  misc_feature 1..80: note = Artificially Synthesized Probe
  source 1..80: mol_type = other DNA
ggagctgggctcttgggtcctcagttggaagaggaatgcgcgtccaagcccagcgttccgtagggagagtgcaatgtgtt

SEQ ID NO: 117629 - DNA, 80 bp, synthetic construct; identical to SEQ ID NO: 38433
  misc_feature 1..80: note = Artificially Synthesized Probe
  source 1..80: mol_type = other DNA

SEQ ID NO: 117630 - DNA, 80 bp, synthetic construct
  misc_feature 1..80: note = Artificially Synthesized Probe
  source 1..80: mol_type = other DNA
aaccccagttataaccagtagctccttcttttagcttctttcaaagattctcctaactcaaacactcaggcccactgtga

SEQ ID NO: 117631 - DNA, 80 bp, synthetic construct
  misc_feature 1..80: note = Artificially Synthesized Probe
  source 1..80: mol_type = other DNA
tttcattcttaaccctaatcttagtcttgtatgagtctagaccccatctctaactcagaggcttttctaaaattccccag

SEQ ID NO: 117632 - DNA, 80 bp, synthetic construct
  misc_feature 1..80: note = Artificially Synthesized Probe
  source 1..80: mol_type = other DNA
aatatccaacatccatatattcatcctcccttgcttcctttcacccatccactcaccatccattaatcatccatccacca

SEQ ID NO: 117633 - DNA, 80 bp, synthetic construct; identical to SEQ ID NO: 38435
  misc_feature 1..80: note = Artificially Synthesized Probe
  source 1..80: mol_type = other DNA

SEQ ID NO: 117634 - DNA, 80 bp, synthetic construct
  misc_feature 1..80: note = Artificially Synthesized Probe
  source 1..80: mol_type = other DNA
ctttcatccatccatccacccatccatccacccaccaatccttccttctatcgatccatccatccatccatccatccgtc

SEQ ID NO: 117635 - DNA, 80 bp, synthetic construct
  misc_feature 1..80: note = Artificially Synthesized Probe
  source 1..80: mol_type = other DNA
cacccacccgtccactcaaccaatcctttcatccacccacccacccacccatccactcatccatccatccactcacccac

SEQ ID NO: 117636 - DNA, 80 bp, synthetic construct
  misc_feature 1..80: note = Artificially Synthesized Probe
  source 1..80: mol_type = other DNA
actcctccaggcttgagcctccctcctccctgtcctcataggacacggcgctccccaaaaccccaggtccctctctgttc

SEQ ID NO: 117637 - DNA, 80 bp, synthetic construct
  misc_feature 1..80: note = Artificially Synthesized Probe
  source 1..80: mol_type = other DNA
catggatccttccatccacccacccactcatccatccatccatccactcacccaccaatcctttcatccatccatccatc

SEQ ID NO: 117638 - DNA, 80 bp, synthetic construct; identical to SEQ ID NO: 38436
  misc_feature 1..80: note = Artificially Synthesized Probe
  source 1..80: mol_type = other DNA

SEQ ID NO: 117639 - DNA, 80 bp, synthetic construct
  misc_feature 1..80: note = Artificially Synthesized Probe
  source 1..80: mol_type = other DNA
gatgaatctataatcaactctaaactcaacccacccaactccacccatgcccacaccctaacctcagagtcaactaaaat

SEQ ID NO: 117640 - DNA, 80 bp, synthetic construct
  misc_feature 1..80: note = Artificially Synthesized Probe
  source 1..80: mol_type = other DNA
agggtggagatggattgggcgggccctgatttggggtcagagttggagacagagacggggcttgggacagagttggacct

SEQ ID NO: 117641 - DNA, 80 bp, synthetic construct
  misc_feature 1..80: note = Artificially Synthesized Probe
  source 1..80: mol_type = other DNA
cacagaactccctcaggaaggtgcttctcaggaccaaatcccgacgcaggagcttcagagccacagctggacctgccagg

SEQ ID NO: 117642 - DNA, 80 bp, synthetic construct; identical to SEQ ID NO: 38437
  misc_feature 1..80: note = Artificially Synthesized Probe
  source 1..80: mol_type = other DNA

SEQ ID NO: 117643 - DNA, 80 bp, synthetic construct
  misc_feature 1..80: note = Artificially Synthesized Probe
  source 1..80: mol_type = other DNA
ctcctgggaatgccccctgtctgggtggcttccgagaatgcttattgtggggcagttggggaggctgcccttgggtggct

SEQ ID NO: 117644 - DNA, 80 bp, synthetic construct
  misc_feature 1..80: note = Artificially Synthesized Probe
  source 1..80: mol_type = other DNA
tacgggagaggggcagggtgaggagggggcgcgtctggggtccactgagagtggtgggggaggaggtcacggcgcagccc

SEQ ID NO: 117645 - DNA, 80 bp, synthetic construct
  misc_feature 1..80: note = Artificially Synthesized Probe
  source 1..80: mol_type = other DNA
agccccgagtgggggtgcatcctcagcccacacagtccccctgcccaccctggtctctctctccaccgtcctcttcccct

SEQ ID NO: 117646 - DNA, 80 bp, synthetic construct; identical to SEQ ID NO: 38438
  misc_feature 1..80: note = Artificially Synthesized Probe
  source 1..80: mol_type = other DNA

SEQ ID NO: 117647 - DNA, 80 bp, synthetic construct
  misc_feature 1..80: note = Artificially Synthesized Probe
  source 1..80: mol_type = other DNA
gaaggcctcgaactcagggttgggggccagtgccacgtcccaagggaaacaggcagtggcagcacagaagagaagcaccc

SEQ ID NO: 117648 - DNA, 80 bp, synthetic construct
  misc_feature 1..80: note = Artificially Synthesized Probe
  source 1..80: mol_type = other DNA
aagaccagcacgttgtcaggtttgacatctgcgtggaccagcccccggctgtggaggaagtccagagctcctgccaactg

SEQ ID NO: 117649 - DNA, 80 bp, synthetic construct
  misc_feature 1..80: note = Artificially Synthesized Probe
  source 1..80: mol_type = other DNA
cgcagtctgcgcagggactggcgggactgcgcggcggcaacagcagacatgtcgggggtccggggcctgtcgcggctgct

SEQ ID NO: 117650 - DNA, 80 bp, synthetic construct
  misc_feature 1..80: note = Artificially Synthesized Probe
  source 1..80: mol_type = other DNA
agagtttctttattttaatgaaaatagaggcattgtagaataacggtttagacacaggccttgatataaccatgtgaggg

SEQ ID NO: 117651 - DNA, 80 bp, synthetic construct
  misc_feature 1..80: note = Artificially Synthesized Probe
  source 1..80: mol_type = other DNA
tcaacatggggttttctggcaaaatctctcttgttttagtgggtactgtattgatactgattcctcgggtgggtaagtcc

SEQ ID NO: 117652 - DNA, 80 bp, synthetic construct
  misc_feature 1..80: note = Artificially Synthesized Probe
  source 1..80: mol_type = other DNA
tactatctaaaatagcaaaaaaaaaaccctactaaaaacaacctactaaaccctactaaaaaacaaccctactaaaaatg

SEQ ID NO: 117653 - DNA, 80 bp, synthetic construct; identical to SEQ ID NO: 38450
  misc_feature 1..80: note = Artificially Synthesized Probe
  source 1..80: mol_type = other DNA

SEQ ID NO: 117654 - DNA, 80 bp, synthetic construct
  misc_feature 1..80: note = Artificially Synthesized Probe
  source 1..80: mol_type = other DNA
tggaaacaacctaaatatgtgttggtgtttaatgacaatgtggtgtgtatacacaactgaatattattcggctatgaaaa

SEQ ID NO: 117655 - DNA, 80 bp, synthetic construct
  misc_feature 1..80: note = Artificially Synthesized Probe
  source 1..80: mol_type = other DNA
ctgggggaatgcagactgtggcgatgctgattaaaggtgtaacttcccgttacaaggtgaagttctgaaggtctaatata

SEQ ID NO: 117656 - DNA, 80 bp, synthetic construct
  misc_feature 1..80: note = Artificially Synthesized Probe
  source 1..80: mol_type = other DNA
acattatacagcatgctggctatcgttaacattatacagcatggtggccagagttaacattatacagcatggtggccaga

SEQ ID NO: 117657 - DNA, 80 bp, synthetic construct; identical to SEQ ID NO: 38451
  misc_feature 1..80: note = Artificially Synthesized Probe
  source 1..80: mol_type = other DNA

SEQ ID NO: 117658 - DNA, 80 bp, synthetic construct
  misc_feature 1..80: note = Artificially Synthesized Probe
  source 1..80: mol_type = other DNA
accttttgaacagcacaaagctaaaatacaaatagggccaggtgtgcagtggctcacgcctgtaatcccggcactttggg

SEQ ID NO: 117659 - DNA, 80 bp, synthetic construct
  misc_feature 1..80: note = Artificially Synthesized Probe
  source 1..80: mol_type = other DNA
ctttttgaaatacttattaaaaatctcgttgagttaaatgtgaggattagtcatacagccatcctgccaacatcagaaag

SEQ ID NO: 117660 - DNA, 80 bp, synthetic construct
  misc_feature 1..80: note = Artificially Synthesized Probe
  source 1..80: mol_type = other DNA
cctgggagccggaggttgctgtgagccgagatcgcaccactctactccagcctggtcaacagagttagatcctatctcaa

SEQ ID NO: 117661 - DNA, 80 bp, synthetic construct; identical to SEQ ID NO: 38452
  misc_feature 1..80: note = Artificially Synthesized Probe
  source 1..80: mol_type = other DNA

SEQ ID NO: 117662 - DNA, 80 bp, synthetic construct
  misc_feature 1..80: note = Artificially Synthesized Probe
  source 1..80: mol_type = other DNA
tgtttggcttgtgtgtgtcttgtaagcatgtgatgcctactcattgctcttccatagttttatgtaataacatggttttg

SEQ ID NO: 117663 - DNA, 80 bp, synthetic construct
  misc_feature 1..80: note = Artificially Synthesized Probe
  source 1..80: mol_type = other DNA
aaggcagtttgggccaccgtcttatgtatttctcaagagcgctaaaccctgccttggtgatacttaagccagcagtaaag

SEQ ID NO: 117664 - DNA, 80 bp, synthetic construct
  misc_feature 1..80: note = Artificially Synthesized Probe
  source 1..80: mol_type = other DNA
cgtgtacctgtaatcccaggtacttgggaggctgaggtgggaggaatgcttgaacctgggaggcagaggttgcagtgagc

SEQ ID NO: 117665 - DNA, 80 bp, synthetic construct; identical to SEQ ID NO: 38453
  misc_feature 1..80: note = Artificially Synthesized Probe
  source 1..80: mol_type = other DNA

SEQ ID NO: 117666 - DNA, 80 bp, synthetic construct
  misc_feature 1..80: note = Artificially Synthesized Probe
  source 1..80: mol_type = other DNA
gtcttggggacgtctgacggttgaggttacgaatgtgcaattcggagacattaactcagaaatgacagttgaagtcttga

SEQ ID NO: 117667 - DNA, 80 bp, synthetic construct
  misc_feature 1..80: note = Artificially Synthesized Probe
  source 1..80: mol_type = other DNA
aagtggtgccaaagaaccagacctgtgtcttctctttctctgtcagtgtcagctttctgatccctggaagggatgaaaat

SEQ ID NO: 117668 - DNA, 80 bp, synthetic construct; identical to SEQ ID NO: 38440
  misc_feature 1..80: note = Artificially Synthesized Probe
  source 1..80: mol_type = other DNA

SEQ ID NO: 117669 - DNA, 80 bp, synthetic construct
  misc_feature 1..80: note = Artificially Synthesized Probe
  source 1..80: mol_type = other DNA
ctacaggcatgtgttaccatgcccagctaattttcgagggttttttcgtttttggtagagacgggatgtcaccgttttgc

SEQ ID NO: 117670 - DNA, 80 bp, synthetic construct; identical to SEQ ID NO: 38454
  misc_feature 1..80: note = Artificially Synthesized Probe
  source 1..80: mol_type = other DNA

SEQ ID NO: 117671 - DNA, 80 bp, synthetic construct
  misc_feature 1..80: note = Artificially Synthesized Probe
  source 1..80: mol_type = other DNA
gaggagtcacagagccgctgtttggagcacagaccgccggactacccaggtttgggtttgagctctgtcctcagctgcat

SEQ ID NO: 117672 - DNA, 80 bp, synthetic construct
  misc_feature 1..80: note = Artificially Synthesized Probe
  source 1..80: mol_type = other DNA
ccttgtcactgtttggataatttagatatgaatacttcaagctagtattcttaactagtcaccacagtatcatagtgcaa

SEQ ID NO: 117673 - DNA, 80 bp, synthetic construct
  misc_feature 1..80: note = Artificially Synthesized Probe
  source 1..80: mol_type = other DNA
ttatccagactttctactgtatcttaactgtcttgctgtgcagttttgcacataatgccttctgcttatctttttcctct

SEQ ID NO: 117674 - DNA, 80 bp, synthetic construct
  misc_feature 1..80: note = Artificially Synthesized Probe
  source 1..80: mol_type = other DNA
ggcgaaaggtttatggagcgatacgcccctgtcgcgaaggacctggcgtctagagatgtggtgtctcggtccatgactct

SEQ ID NO: 117675 - DNA, 80 bp, synthetic construct; identical to SEQ ID NO: 38455
  misc_feature 1..80: note = Artificially Synthesized Probe
  source 1..80: mol_type = other DNA

SEQ ID NO: 117676 - DNA, 80 bp, synthetic construct
  misc_feature 1..80: note = Artificially Synthesized Probe
  source 1..80: mol_type = other DNA
agctctttcattgcctgaccctgttctttaatgtaatgacatttgctaaatatctgctggtatggcctttagaggtttta

SEQ ID NO: 117677 - DNA, 80 bp, synthetic construct
  misc_feature 1..80: note = Artificially Synthesized Probe
  source 1..80: mol_type = other DNA
aattagccgggcgtgatggcaggtgcctgtagtcccagctactcgggaggctgaggcaggagaatggcgtgaacctggga

SEQ ID NO: 117678 - DNA, 80 bp, synthetic construct
  misc_feature 1..80: note = Artificially Synthesized Probe
  source 1..80: mol_type = other DNA
cttgatgaagttagcttttcctacagaaattctgcctgcaagcagcatatttatcggcatttcagataggctttttttcc

SEQ ID NO: 117679 - DNA, 80 bp, synthetic construct; identical to SEQ ID NO: 38456
  misc_feature 1..80: note = Artificially Synthesized Probe
  source 1..80: mol_type = other DNA

SEQ ID NO: 117680 - DNA, 80 bp, synthetic construct
  misc_feature 1..80: note = Artificially Synthesized Probe
  source 1..80: mol_type = other DNA
ttatattagggacttgagcatccacggattttggtatccgtgggggtcctggacccaacctgccacggatacgcagggac

SEQ ID NO: 117681 - DNA, 80 bp, synthetic construct
  misc_feature 1..80: note = Artificially Synthesized Probe
  source 1..80: mol_type = other DNA
cttagaaaagatttgatgagagggtgaccatacatgaggggaaattttcctcagtatcaaaacatgttgaaactcacaca

SEQ ID NO: 117682 - DNA, 80 bp, synthetic construct
  misc_feature 1..80: note = Artificially Synthesized Probe
  source 1..80: mol_type = other DNA
acctacctccagagcagctggccacgcgcctgcctggcatttcagagacagccatgatcttcgctggcgtggacgtcacg

SEQ ID NO: 117683 - DNA, 80 bp, synthetic construct
  misc_feature 1..80: note = Artificially Synthesized Probe
  source 1..80: mol_type = other DNA
cggggcccacctcgcagttgtctctttagatcttacaggaaaagatagatgtttccttcaagaaagtactgtattgtttt

SEQ ID NO: 117684 - DNA, 80 bp, synthetic construct; identical to SEQ ID NO: 38457
  misc_feature 1..80: note = Artificially Synthesized Probe
  source 1..80: mol_type = other DNA

SEQ ID NO: 117685 - DNA, 80 bp, synthetic construct
  misc_feature 1..80: note = Artificially Synthesized Probe
  source 1..80: mol_type = other DNA
ggacagtcgcagatgctgacattggaggtcctctgacctgcttgtaacagcaggtgctcaggggcagaggggaaactggg

SEQ ID NO: 117686 - DNA, 80 bp, synthetic construct
  misc_feature 1..80: note = Artificially Synthesized Probe
  source 1..80: mol_type = other DNA
tctgcctcccaggttcaagtgatttttccgcctcagcctccctagtagctgggattacaggcacccgccattatgccccg

SEQ ID NO: 117687 - DNA, 80 bp, synthetic construct
  misc_feature 1..80: note = Artificially Synthesized Probe
  source 1..80: mol_type = other DNA
aaagtccagagagaattttttaacctcattttggccagttctgtggtgttttgatcattctgtatttacaactgctttca

SEQ ID NO: 117688 - DNA, 80 bp, synthetic construct
  misc_feature 1..80: note = Artificially Synthesized Probe
  source 1..80: mol_type = other DNA
cacagacaccctgttggggaaggtgggctggtggaggcatgggcaccttgacatttcacctgaaatcttcctttccacag

SEQ ID NO: 117689 - DNA, 80 bp, synthetic construct; identical to SEQ ID NO: 38458
  misc_feature 1..80: note = Artificially Synthesized Probe
  source 1..80: mol_type = other DNA

SEQ ID NO: 117690 - DNA, 80 bp, synthetic construct
  misc_feature 1..80: note = Artificially Synthesized Probe
  source 1..80: mol_type = other DNA
attttgtagagacagggtctcacaatattgcccaggctggtcttgaactcctagactcaaacagtcctgcctcagcttcc

SEQ ID NO: 117691 - DNA, 80 bp, synthetic construct
  misc_feature 1..80: note = Artificially Synthesized Probe
  source 1..80: mol_type = other DNA
tgagactagatagaggctggttggggatcttaacagttaaggtgacatttttggggttacatttttttttaattattttg

SEQ ID NO: 117692 - DNA, 80 bp, synthetic construct; identical to SEQ ID NO: 38459
  misc_feature 1..80: note = Artificially Synthesized Probe
  source 1..80: mol_type = other DNA

SEQ ID NO: 117693 - DNA, 80 bp, synthetic construct
  misc_feature 1..80: note = Artificially Synthesized Probe
  source 1..80: mol_type = other DNA
agttagcatctctcccacctccagacatcctcacggtggttatccagcctcgtgtgctcagaacagtgtgaggtggatga

SEQ ID NO: 117694 - DNA, 80 bp, synthetic construct
  misc_feature 1..80: note = Artificially Synthesized Probe
  source 1..80: mol_type = other DNA
aacttataaacgtgcccccttttgtatctgtagttagaaaggtgcagatagtattaaaagggtagcttacttcagacact

SEQ ID NO: 117695 - DNA, 80 bp, synthetic construct
  misc_feature 1..80: note = Artificially Synthesized Probe
  source 1..80: mol_type = other DNA
gtgaggactgataccacttctctcagagcaatgtagaaattttgagctgctctttctttgaaaatgcaaaaaagaacatt

SEQ ID NO: 117696 - DNA, 80 bp, synthetic construct
  misc_feature 1..80: note = Artificially Synthesized Probe
  source 1..80: mol_type = other DNA
tgccagaggctgcttcctgattgtgctgagacttacagacacaactctgtgtgtgtcaaaatttgaaaaaccctacacta

SEQ ID NO: 117697 - DNA, 80 bp, synthetic construct; identical to SEQ ID NO: 38441
  misc_feature 1..80: note = Artificially Synthesized Probe
  source 1..80: mol_type = other DNA

SEQ ID NO: 117698 - DNA, 80 bp, synthetic construct; identical to SEQ ID NO: 38460
  misc_feature 1..80: note = Artificially Synthesized Probe
  source 1..80: mol_type = other DNA

SEQ ID NO: 117699 - DNA, 80 bp, synthetic construct
  misc_feature 1..80: note = Artificially Synthesized Probe
  source 1..80: mol_type = other DNA
tagaactgaggctgggtgcagtggctcacgcctataatcccaccgctttgggaggccgaggcaggcagattgcttgagct

SEQ ID NO: 117700 - DNA, 80 bp, synthetic construct
  misc_feature 1..80: note = Artificially Synthesized Probe
  source 1..80: mol_type = other DNA
ccaagatcacaccactgtactccagcctgggcaagagagggaggagacactgtctcaaaaaaaagaaaaagtaaattgta

SEQ ID NO: 117701 - DNA, 80 bp, synthetic construct; identical to SEQ ID NO: 38461
  misc_feature 1..80: note = Artificially Synthesized Probe
  source 1..80: mol_type = other DNA

SEQ ID NO: 117702 - DNA, 80 bp, synthetic construct
  misc_feature 1..80: note = Artificially Synthesized Probe
  source 1..80: mol_type = other DNA
ttctactgaaaatacaaaaaattagccaggtatggtggcatattcctgtagtcccagctactctggaggctgaggcagga

SEQ ID NO: 117703 - DNA, 80 bp, synthetic construct
  misc_feature 1..80: note = Artificially Synthesized Probe
  source 1..80: mol_type = other DNA
ctttcaagcacacagcagccaccttccccccgctgatgtgaagggtggccggccccttgggaccaccatctggaaggtgt

SEQ ID NO: 117704 - DNA, 80 bp, synthetic construct
  misc_feature 1..80: note = Artificially Synthesized Probe
  source 1..80: mol_type = other DNA
caagcagttctcatgcctcagcctcccgagtagctgggattatagacgcgtgccaccatacccagataatttttgtgttt

SEQ ID NO: 117705 - DNA, 80 bp, synthetic construct
  misc_feature 1..80: note = Artificially Synthesized Probe
  source 1..80: mol_type = other DNA
attcactctaagatcacttaatggatatctactgtgtgccaacaattttgcctttatgttctttaaaattggccccaact

SEQ ID NO: 117706 - DNA, 80 bp, synthetic construct
  misc_feature 1..80: note = Artificially Synthesized Probe
  source 1..80: mol_type = other DNA
caacaatggcattccattctgcattcctcatgatgtttttcctgatttatttgaaaaattgtgacttgttttttgatatg

SEQ ID NO: 117707 - DNA, 80 bp, synthetic construct; identical to SEQ ID NO: 38462
  misc_feature 1..80: note = Artificially Synthesized Probe
  source 1..80: mol_type = other DNA

SEQ ID NO: 117708 - DNA, 80 bp, synthetic construct
  misc_feature 1..80: note = Artificially Synthesized Probe
  source 1..80: mol_type = other DNA
gatgtactgggaggtggtggagtctgggcttttcatgtacccgtcacacaagtcgtgtgtgttgtacccagtaggtaatt

SEQ ID NO: 117709 - DNA, 80 bp, synthetic construct
  misc_feature 1..80: note = Artificially Synthesized Probe
  source 1..80: mol_type = other DNA
cgtgtggctgcagaagacatgattgcgttctttttttatggccgagtagtatttcatggtatatatgtaccacattttct

SEQ ID NO: 117710 - DNA, 80 bp, synthetic construct; identical to SEQ ID NO: 38463
  misc_feature 1..80: note = Artificially Synthesized Probe
  source 1..80: mol_type = other DNA

SEQ ID NO: 117711 - DNA, 80 bp, synthetic construct
  misc_feature 1..80: note = Artificially Synthesized Probe
  source 1..80: mol_type = other DNA
ggagttcaacacaacactggtgcttacatctcaggcccggatatcgatcatgtcatcatgcctggcttccagcagctcgg

SEQ ID NO: 117712 - DNA, 80 bp, synthetic construct
  misc_feature 1..80: note = Artificially Synthesized Probe
  source 1..80: mol_type = other DNA
tggcagccattagccatggggccgtggagaacctgatacatggtcagtctaagaaactgaattcctctaataacaaggat

SEQ ID NO: 117713 - DNA, 80 bp, synthetic construct
  misc_feature 1..80: note = Artificially Synthesized Probe
  source 1..80: mol_type = other DNA
tattctgaaataggtgtctaacacctatgtggtgttagacacaggagaacaggttccctgctgacattttcagaggcctg

SEQ ID NO: 117714 - DNA, 80 bp, synthetic construct
  misc_feature 1..80: note = Artificially Synthesized Probe
  source 1..80: mol_type = other DNA
ggccagctgggaaagaaagaaccattgcattagagaatgggaacatgccttcggatatagaaatggcaaatccatgagat

SEQ ID NO: 117715 - DNA, 80 bp, synthetic construct; identical to SEQ ID NO: 38464
  misc_feature 1..80: note = Artificially Synthesized Probe
  source 1..80: mol_type = other DNA

SEQ ID NO: 117716 - DNA, 80 bp, synthetic construct
  misc_feature 1..80: note = Artificially Synthesized Probe
  source 1..80: mol_type = other DNA
gggctgagagagccctgggccggtgcgaggggaagccgcggggcggactcggggacccggggagctcggtccttagtaga

SEQ ID NO: 117717 - DNA, 80 bp, synthetic construct
  misc_feature 1..80: note = Artificially Synthesized Probe
  source 1..80: mol_type = other DNA
aaaccgcttaaggcattcttaaaccacaaacaatagcatgagcgatctgtgccttaaggacatgttcctgctgcagataa

SEQ ID NO: 117718 - DNA, 80 bp, synthetic construct
  misc_feature 1..80: note = Artificially Synthesized Probe
  source 1..80: mol_type = other DNA
gtgtgtgtctttaattcctctagcgccgctgggttagggtctccatgaccgagctggtctcggcaaatggcgcccatata

SEQ ID NO: 117719 - DNA, 80 bp, synthetic construct
  misc_feature 1..80: note = Artificially Synthesized Probe
  source 1..80: mol_type = other DNA
aaacctttggtgatgctcttgagaaccagggctcacagcctatgcacagtaaccatgtgtgaactgaatttttttttttt

SEQ ID NO: 117720 - DNA, 80 bp, synthetic construct; identical to SEQ ID NO: 38465
  misc_feature 1..80: note = Artificially Synthesized Probe
  source 1..80: mol_type = other DNA

SEQ ID NO: 117721 - DNA, 80 bp, synthetic construct
  misc_feature 1..80: note = Artificially Synthesized Probe
  source 1..80: mol_type = other DNA
cagcaccttgagcgacccctctcagttctattcaggcaggaattcagcaagctagatgagagggtgatttagaggcttgg

SEQ ID NO: 117722 - DNA, 80 bp, synthetic construct
  misc_feature 1..80: note = Artificially Synthesized Probe
  source 1..80: mol_type = other DNA
ccagtcggatgattcctactgacttggacgctcttacttgagcttgtctaactcctgctcagttcttacaatttaaaact

SEQ ID NO: 117723 - DNA, 80 bp, synthetic construct
  misc_feature 1..80: note = Artificially Synthesized Probe
  source 1..80: mol_type = other DNA
gcattagagcttgggaaaaaatcacttcaggtagagaacaatacccttcctttagtgcagtaaaacagggaccaaaagaa

SEQ ID NO: 117724 - DNA, 80 bp, synthetic construct; identical to SEQ ID NO: 38466
  misc_feature 1..80: note = Artificially Synthesized Probe
  source 1..80: mol_type = other DNA

SEQ ID NO: 117725 - DNA, 80 bp, synthetic construct
  misc_feature 1..80: note = Artificially Synthesized Probe
  source 1..80: mol_type = other DNA
aaactttgggctaatcagtgtcactctaagtttgataaagatgggaaccccattttgggaaatgccatgaggggcccgtc

SEQ ID NO: 117726 - DNA, 80 bp, synthetic construct
  misc_feature 1..80: note = Artificially Synthesized Probe
  source 1..80: mol_type = other DNA
gagtctgtggacccttgcaagcagggacgataggattactcctaggcaggtctagtttaagtttaaaagggtacaaatac

SEQ ID NO: 117727 - DNA, 80 bp, synthetic construct
  misc_feature 1..80: note = Artificially Synthesized Probe
  source 1..80: mol_type = other DNA
aagcacagataaacaaggcaaagcagcctattgggtgaatcaaattactgataaacgtcctacctgtgaaataactattc

SEQ ID NO: 117728 - DNA, 80 bp, synthetic construct
  misc_feature 1..80: note = Artificially Synthesized Probe
  source 1..80: mol_type = other DNA
gaagggcccaatggacaacctgggactattcaatgataacttctgtacctataaatttatggggaagagatttattacaa

SEQ ID NO: 117729 - DNA, 80 bp, synthetic construct; identical to SEQ ID NO: 38467
  misc_feature 1..80: note = Artificially Synthesized Probe
  source 1..80: mol_type = other DNA

SEQ ID NO: 117730 - DNA, 80 bp, synthetic construct
  misc_feature 1..80: note = Artificially Synthesized Probe
  source 1..80: mol_type = other DNA
tgtttttagtagagacggggtttcaccatgttagccagaatggtctccatctcctgacctcgtgatccgcccgcctcggt

SEQ ID NO: 117731 - DNA, 80 bp, synthetic construct
  misc_feature 1..80: note = Artificially Synthesized Probe
  source 1..80: mol_type = other DNA
taagagccattaattcagttatacaacctacggggacattacagccaggattgccttctcctgctatgattccaaaaaat

SEQ ID NO: 117732 - DNA, 80 bp, synthetic construct
  misc_feature 1..80: note = Artificially Synthesized Probe
  source 1..80: mol_type = other DNA
tttcattggaaagtgttgcgacaaggcatgttaaacagtccaacgatttgccagacttgtgtagggcaagcaattgaacc

SEQ ID NO: 117733 - DNA, 80 bp, synthetic construct
  misc_feature 1..80: note = Artificially Synthesized Probe
  source 1..80: mol_type = other DNA
actctttactcctacttgggaaccttagtaaatgacattaccattgtgctacagaaagtagccatacgtagggatcaatt

SEQ ID NO: 117734 - DNA, 80 bp, synthetic construct; identical to SEQ ID NO: 38468
  misc_feature 1..80: note = Artificially Synthesized Probe
  source 1..80: mol_type = other DNA

SEQ ID NO: 117735 - DNA, 80 bp, synthetic construct
  misc_feature 1..80: note = Artificially Synthesized Probe
  source 1..80: mol_type = other DNA
gcagctgatcgaaaagcaaggccataaagcccaaataaatggaacagatccagaaaagactcaagctgcagccgatcgaa

SEQ ID NO: 117736 - DNA, 80 bp, synthetic construct
  misc_feature 1..80: note = Artificially Synthesized Probe
  source 1..80: mol_type = other DNA
tagaatcgatccagagaagacttgagctgcagctgatcgaaacgcaaggccgtaaagcccaaatcaatagaatcgatcca

SEQ ID NO: 117737 - DNA, 80 bp, synthetic construct; identical to SEQ ID NO: 38469
  misc_feature 1..80: note = Artificially Synthesized Probe
  source 1..80: mol_type = other DNA

SEQ ID NO: 117738 - DNA, 80 bp, synthetic construct
  misc_feature 1..80: note = Artificially Synthesized Probe
  source 1..80: mol_type = other DNA
aggaaatgggagaacttggattgttaaattacatggatatgatcctgaaaaaattgtccctctcacgaaggcacaaatac

SEQ ID NO: 117739 - DNA, 80 bp, synthetic construct
  misc_feature 1..80: note = Artificially Synthesized Probe
  source 1..80: mol_type = other DNA
gtttttacagatgggtctagtaatggtaaagcttcttactctggctcgaaaggtaaagttttctagacaccctatgcttc

SEQ ID NO: 117740 - DNA, 80 bp, synthetic construct
  misc_feature 1..80: note = Artificially Synthesized Probe
  source 1..80: mol_type = other DNA
atgcaattgcaaacagcagttaggagtagaatgcaccctttttacatcactcacattagggctcatacacctcttccagg

SEQ ID NO: 117741 - DNA, 80 bp, synthetic construct; identical to SEQ ID NO: 38442
  misc_feature 1..80: note = Artificially Synthesized Probe
  source 1..80: mol_type = other DNA

SEQ ID NO: 117742 - DNA, 80 bp, synthetic construct
  misc_feature 1..80: note = Artificially Synthesized Probe
  source 1..80: mol_type = other DNA
acttgccaaatggtacattcctcatcttttacaggaggagttaatcctcgaagattggaacctaattctctttgggaaat

SEQ ID NO: 117743 - DNA, 80 bp, synthetic construct; identical to SEQ ID NO: 38470
  misc_feature 1..80: note = Artificially Synthesized Probe
  source 1..80: mol_type = other DNA

SEQ ID NO: 117744 - DNA, 80 bp, synthetic construct
  misc_feature 1..80: note = Artificially Synthesized Probe
  source 1..80: mol_type = other DNA
gcatttgtaatacctctgtttctttagcggatatgcaggtgcatttttatcagttttagacttcttgcctagagagggga

SEQ ID NO: 117745 - DNA, 80 bp, synthetic construct
  misc_feature 1..80: note = Artificially Synthesized Probe
  source 1..80: mol_type = other DNA
tcgcattatttaaattttttgagcctgcctaaaggccagatcttatcagcagctgaacagcatctacagaaaccagctgc

SEQ ID NO: 117746 - DNA, 80 bp, synthetic construct
  misc_feature 1..80: note = Artificially Synthesized Probe
  source 1..80: mol_type = other DNA
tctgggaggatcccgaggacccctcggttgcagccatgtcaagactgatgctgaggaggaccccaactgtcatgagcaac

SEQ ID NO: 117747 - DNA, 80 bp, synthetic construct
  misc_feature 1..80: note = Artificially Synthesized Probe
  source 1..80: mol_type = other DNA
ctgacacagagaacaattatacttattgggcatatttatcaatcttggctggcaagaatgcctggatgtaatcactctat

SEQ ID NO: 117748 - DNA, 80 bp, synthetic construct; identical to SEQ ID NO: 38471
  misc_feature 1..80: note = Artificially Synthesized Probe
  source 1..80: mol_type = other DNA

SEQ ID NO: 117749 - DNA, 80 bp, synthetic construct
  misc_feature 1..80: note = Artificially Synthesized Probe
  source 1..80: mol_type = other DNA
aggatttgtggaaactgttaatagctcttaataagatcaaaatttgggaaagaataaaaaagcatctagaaggacaccgt

SEQ ID NO: 117750 - DNA, 80 bp, synthetic construct
  misc_feature 1..80: note = Artificially Synthesized Probe
  source 1..80: mol_type = other DNA
gatttcaatgaagattgtgcttttaatctgtgttatttgtatagtctgcagatgtggatcctgactctgcaagaagtagc

SEQ ID NO: 117751 - DNA, 80 bp, synthetic construct; identical to SEQ ID NO: 38472
  misc_feature 1..80: note = Artificially Synthesized Probe
  source 1..80: mol_type = other DNA

SEQ ID NO: 117752 - DNA, 80 bp, synthetic construct
  misc_feature 1..80: note = Artificially Synthesized Probe
  source 1..80: mol_type = other DNA
aaggctctcagctctgaaggctgtaagacccctgatttcccacttcacatgctgtatttctgtgtgtgtgtctttaattc

SEQ ID NO: 117753 - DNA, 80 bp, synthetic construct
  misc_feature 1..80: note = Artificially Synthesized Probe
  source 1..80: mol_type = other DNA
ggtgtctggataagagatttgtatctaaaaatcagtagctttacaatgtgccagcagtagtctgctcagacatcagtaaa

SEQ ID NO: 117754 - DNA, 80 bp, synthetic construct
  misc_feature 1..80: note = Artificially Synthesized Probe
  source 1..80: mol_type = other DNA
tctgagatgcaatgtttttcatttgttcttcctgaaaaaccattaggttgatgtgcattacagtgttacgattatgtatg

SEQ ID NO: 117755 - DNA, 80 bp, synthetic construct
  misc_feature 1..80: note = Artificially Synthesized Probe
  source 1..80: mol_type = other DNA
ttgctagatttcggatatgaatgtctctgcacttcttacttttcccctccacctcctaattcagtcatctgaaattctgt

SEQ ID NO: 117756 - DNA, 80 bp, synthetic construct
  misc_feature 1..80: note = Artificially Synthesized Probe
  source 1..80: mol_type = other DNA
gacgcctagttcccagcatacctacagtaaacttcaggtccactgcatagcacgtctctcatcacagtaaaactatgaag

SEQ ID NO: 117757 - DNA, 80 bp, synthetic construct; identical to SEQ ID NO: 38473
  misc_feature 1..80: note = Artificially Synthesized Probe
  source 1..80: mol_type = other DNA

SEQ ID NO: 117758 - DNA, 80 bp, synthetic construct
  misc_feature 1..80: note = Artificially Synthesized Probe
  source 1..80: mol_type = other DNA
tttaagtttggagtaataaactcatagtctgaatttcctaatttttctgtttaatttatgtaacttttaagtgaaatgca

SEQ ID NO: 117759 - DNA, 80 bp, synthetic construct
  misc_feature 1..80: note = Artificially Synthesized Probe
  source 1..80: mol_type = other DNA
atggagacctaaagcacctgaagacgttcgaccggggtgagcagacagtgggctctgtgcacactgttgggcccttcctt

SEQ ID NO: 117760 - DNA, 80 bp, synthetic construct
  misc_feature 1..80: note = Artificially Synthesized Probe
  source 1..80: mol_type = other DNA
tgcccctgatggaactttttgtgtccccaggaatggtctggaacacggacctggtggagaccctggagctgcagaacctg

SEQ ID NO: 117761 - DNA, 80 bp, synthetic construct; identical to SEQ ID NO: 38474
  misc_feature 1..80: note = Artificially Synthesized Probe
  source 1..80: mol_type = other DNA

SEQ ID NO: 117762 - DNA, 80 bp, synthetic construct
  misc_feature 1..80: note = Artificially Synthesized Probe
  source 1..80: mol_type = other DNA
tgtgctttgctgttagaaggccaaggttagaagtgcagctagagtggcaagaccaggaaataaatgccagtttattaaat

SEQ ID NO: 117763 - DNA, 80 bp, synthetic construct
  misc_feature 1..80: note = Artificially Synthesized Probe
  source 1..80: mol_type = other DNA
taagccaccgtttcaaacctgccctgtggaggaaatgccagtttattaaataacgagtaagccaccgtttcaagcctgcc

SEQ ID NO: 117764 - DNA, 80 bp, synthetic construct
  misc_feature 1..80: note = Artificially Synthesized Probe
  source 1..80: mol_type = other DNA
aggaaatgccagtttattaacgagtaagtcactgtttcaaacctgtcctgtggaggaaatgccagtttattaacgaataa

SEQ ID NO: 117765 - DNA, 80 bp, synthetic construct
  misc_feature 1..80: note = Artificially Synthesized Probe
  source 1..80: mol_type = other DNA
gtttcaagcctgccctgtggaggaaatgcccgtttattaaataaggagtaagccaccatttcaagcctgccctgtggagg

SEQ ID NO: 117766 - DNA, 80 bp, synthetic construct; identical to SEQ ID NO: 38475
  misc_feature 1..80: note = Artificially Synthesized Probe
  source 1..80: mol_type = other DNA

SEQ ID NO: 117767 - DNA, 80 bp, synthetic construct
  misc_feature 1..80: note = Artificially Synthesized Probe
  source 1..80: mol_type = other DNA
cttaaagttgggctttccaaattcaaaaatctgccccagattagatttagattgagagggttagtgtccttttcgccagg

SEQ ID NO: 117768 - DNA, 80 bp, synthetic construct
  misc_feature 1..80: note = Artificially Synthesized Probe
  source 1..80: mol_type = other DNA
ttaacgagtaagccaccgtttcagacctgccctgtggaggaaaatgccagtttattaacaagtaagtcactgtttcagac

SEQ ID NO: 117769 - DNA, 80 bp, synthetic construct
  misc_feature 1..80: note = Artificially Synthesized Probe
  source 1..80: mol_type = other DNA
ttaaataaggagtaagccaccatttcagacctgtcctgtggtttggaaaaggtattatagagcctgccctgtggtcactt

SEQ ID NO: 117770 - DNA, 80 bp, synthetic construct
  misc_feature 1..80: note = Artificially Synthesized Probe
  source 1..80: mol_type = other DNA
aaaacgacggaaagggaagcttgggatgcaaatgcaagttcaggataaaccacatcagcaaaaggacaaaggctccacaa

SEQ ID NO: 117771 - DNA, 80 bp, synthetic construct; identical to SEQ ID NO: 38476
  misc_feature 1..80: note = Artificially Synthesized Probe
  source 1..80: mol_type = other DNA

SEQ ID NO: 117772 - DNA, 80 bp, synthetic construct
  misc_feature 1..80: note = Artificially Synthesized Probe
  source 1..80: mol_type = other DNA
tgccaccatgcctaattttgtattttcagtagagatggggtttcaccatattggccgggctggtctcgaactcctgacct

SEQ ID NO: 117773 - DNA, 80 bp, synthetic construct
  misc_feature 1..80: note = Artificially Synthesized Probe
  source 1..80: mol_type = other DNA
aggcaggccaatgacttgagccccagagttgtagaccagcctgggcaacatggcgaaacgtgtctctacaaaaacataaa

SEQ ID NO: 117774 - DNA, 80 bp, synthetic construct
  misc_feature 1..80: note = Artificially Synthesized Probe
  source 1..80: mol_type = other DNA
caggctgaaagaaaagattgaggtagtctcccagcacatggagcaaaaagacaaagtatttgataaactcttaggtacat

SEQ ID NO: 117775 - DNA, 80 bp, synthetic construct; identical to SEQ ID NO: 38477
  misc_feature 1..80: note = Artificially Synthesized Probe
  source 1..80: mol_type = other DNA

SEQ ID NO: 117776 - DNA, 80 bp, synthetic construct
  misc_feature 1..80: note = Artificially Synthesized Probe
  source 1..80: mol_type = other DNA
cggccccgcccaggcctgcgggctggccttgctgatggtgaacggggaagagcaggccagatttaaatcaactcccgaca

SEQ ID NO: 117777 - DNA, 80 bp, synthetic construct
  misc_feature 1..80: note = Artificially Synthesized Probe
  source 1..80: mol_type = other DNA
tggtggtaggggaggagatgatgattgtggacctagcgagaaagcatctgtggggtggggacacacagccattaccagaa

SEQ ID NO: 117778 - DNA, 80 bp, synthetic construct; identical to SEQ ID NO: 38478
  misc_feature 1..80: note = Artificially Synthesized Probe
  source 1..80: mol_type = other DNA

SEQ ID NO: 117779 - DNA, 80 bp, synthetic construct
  misc_feature 1..80: note = Artificially Synthesized Probe
  source 1..80: mol_type = other DNA
ggtataatatactgttcttactggtgctattactatgttaatagggcactttacaacattttcaagaacatttgtattaa

SEQ ID NO: 117780 - DNA, 80 bp, synthetic construct
  misc_feature 1..80: note = Artificially Synthesized Probe
  source 1..80: mol_type = other DNA
aagcttttacccttaaacttttcatagcttgtaagagtcgtataatcacttagctgtgtctgtggaagttacctttggac

SEQ ID NO: 117781 - DNA, 80 bp, synthetic construct
  misc_feature 1..80: note = Artificially Synthesized Probe
  source 1..80: mol_type = other DNA
ttttctgagatagagtctcatctctgttgcccaggctgatatgtgttggcttgatctcgtctcactgcagcctcaacctc

SEQ ID NO: 117782 - DNA, 80 bp, synthetic construct
  misc_feature 1..80: note = Artificially Synthesized Probe
  source 1..80: mol_type = other DNA
gcatgaaccaacacccccagccagttttagtgatttttcaagaaatacatactcattttagaaagtacaaagagattgaa

SEQ ID NO: 117783 - DNA, 80 bp, synthetic construct; identical to SEQ ID NO: 38479
  misc_feature 1..80: note = Artificially Synthesized Probe
  source 1..80: mol_type = other DNA

SEQ ID NO: 117784 - DNA, 80 bp, synthetic construct
  misc_feature 1..80: note = Artificially Synthesized Probe
  source 1..80: mol_type = other DNA
ctttgaagtagaaaaactggaagtagatggtttaaacataaagtgtcttggtatagacaagggttctcccactttacatg

SEQ ID NO: 117785 - DNA, 80 bp, synthetic construct
  misc_feature 1..80: note = Artificially Synthesized Probe
  source 1..80: mol_type = other DNA
acttaccactgactcttcttttcaaggtcactctggaatatagacccgtgatcgacaaaactttgaacgaggctgactgt

SEQ ID NO: 117786 - DNA, 80 bp, synthetic construct
  misc_feature 1..80: note = Artificially Synthesized Probe
  source 1..80: mol_type = other DNA
gattggcacctagtggctgggagcttgccaggaacccagtggccagggagcgtggcacttacctttgtcccttgcttcat

SEQ ID NO: 117787 - DNA, 80 bp, synthetic construct
  misc_feature 1..80: note = Artificially Synthesized Probe
  source 1..80: mol_type = other DNA
atccagatattttgtatagtttcttttttctttttcttttcttttttttttttgagacaggatcggtgcagtagtacaat

SEQ ID NO: 117788 - DNA, 80 bp, synthetic construct; identical to SEQ ID NO: 38480
  misc_feature 1..80: note = Artificially Synthesized Probe
  source 1..80: mol_type = other DNA

SEQ ID NO: 117789 - DNA, 80 bp, synthetic construct; identical to SEQ ID NO: 38443
  misc_feature 1..80: note = Artificially Synthesized Probe
  source 1..80: mol_type = other DNA

SEQ ID NO: 117790 - DNA, 80 bp, synthetic construct
  misc_feature 1..80: note = Artificially Synthesized Probe
  source 1..80: mol_type = other DNA
ctcccaagtagctgggattacaggtgcccgccacgacgcccagctaattgttagtagagatggggttttgccatgttggc

SEQ ID NO: 117791 - DNA, 80 bp, synthetic construct
  misc_feature 1..80: note = Artificially Synthesized Probe
  source 1..80: mol_type = other DNA
gaaaacgtatcccctaaatggctggccaaccttagcatatggacagtgtcacctctctcacacagagccactaaaaacta

SEQ ID NO: 117792 - DNA, 80 bp, synthetic construct
  misc_feature 1..80: note = Artificially Synthesized Probe
  source 1..80: mol_type = other DNA
cgtccctctaggctgtcagcttttactgttccaggatacagatctcctgattcaatgttgagtgccttttgaactgacca

SEQ ID NO: 117793 - DNA, 80 bp, synthetic construct
  misc_feature 1..80: note = Artificially Synthesized Probe
  source 1..80: mol_type = other DNA
tcacccgggcggatagcggccggtggccgccctggctgggctgggcctctgccgccctctgtgcgggttgtcctgaggag

SEQ ID NO: 117794 - DNA, 80 bp, synthetic construct; identical to SEQ ID NO: 38444
  misc_feature 1..80: note = Artificially Synthesized Probe
  source 1..80: mol_type = other DNA

SEQ ID NO: 117795 - DNA, 80 bp, synthetic construct
  misc_feature 1..80: note = Artificially Synthesized Probe
  source 1..80: mol_type = other DNA
aggtgaacagtttgcaaggggaaattactatcccccacagcatttgttccttcaggacactaaccctctggatctgtgtc

SEQ ID NO: 117796 - DNA, 80 bp, synthetic construct
  misc_feature 1..80: note = Artificially Synthesized Probe
  source 1..80: mol_type = other DNA
tataccagtttgttttcatatgagtcatagacataagggaaaaatttctcataggtatccaatgcatgctgaaattattt

SEQ ID NO: 117797 - DNA, 80 bp, synthetic construct
  misc_feature 1..80: note = Artificially Synthesized Probe
  source 1..80: mol_type = other DNA
tcctactgaaaataggacggtggggccagtgaacagtatctgctgtgatagatgataaaatcctactgaaaataggatgg

SEQ ID NO: 117798 - DNA, 80 bp, synthetic construct; identical to SEQ ID NO: 38445
  misc_feature 1..80: note = Artificially Synthesized Probe
  source 1..80: mol_type = other DNA

SEQ ID NO: 117799 - DNA, 80 bp, synthetic construct
  misc_feature 1..80: note = Artificially Synthesized Probe
  source 1..80: mol_type = other DNA
tttcttttccagatttctgctcagtatccagtagtggatcatgaatttgatgcagtggtggtaggcgctggaggggcagg

SEQ ID NO: 117800 - DNA, 80 bp, synthetic construct
  misc_feature 1..80: note = Artificially Synthesized Probe
  source 1..80: mol_type = other DNA
ctgggcagccccctgcctcctccccctgctccagccacatggcctcttgctgtgccttactcagctcaccctctcagggg

SEQ ID NO: 117801 - DNA, 80 bp, synthetic construct
  misc_feature 1..80: note = Artificially Synthesized Probe
  source 1..80: mol_type = other DNA
ctaaagaggaggaatcagaatttaggttggggaagaaaagggcaagggtttcatttgtccctgtgcttctgtcttctggg

SEQ ID NO: 117802 - DNA, 80 bp, synthetic construct
  misc_feature 1..80: note = Artificially Synthesized Probe
  source 1..80: mol_type = other DNA
atctggaaagatttgttgagtaccttttctgtgccagataggttaggttataagcatattacaggtagcctttcactcac

SEQ ID NO: 117803 - DNA, 80 bp, synthetic construct; identical to SEQ ID NO: 38446
  misc_feature 1..80: note = Artificially Synthesized Probe
  source 1..80: mol_type = other DNA

SEQ ID NO: 117804 - DNA, 80 bp, synthetic construct; identical to SEQ ID NO: 38439
  misc_feature 1..80: note = Artificially Synthesized Probe
  source 1..80: mol_type = other DNA

SEQ ID NO: 117805 - DNA, 80 bp, synthetic construct
  misc_feature 1..80: note = Artificially Synthesized Probe
  source 1..80: mol_type = other DNA
gccgccgtggtcgaggtgatgggcgggaggctctgggtgttctcgtggtctgtttctagtacaaaagaatcctggaaaaa

SEQ ID NO: 117806 - DNA, 80 bp, synthetic construct
  misc_feature 1..80: note = Artificially Synthesized Probe
  source 1..80: mol_type = other DNA
gcagatttgtgttaaacttgtttagtgtagattagctgcgaatatcttgactcctttaaggtgttaaggtttttgtttgt

SEQ ID NO: 117807 - DNA, 80 bp, synthetic construct
  misc_feature 1..80: note = Artificially Synthesized Probe
  source 1..80: mol_type = other DNA
tgcacaccttatatggaagggtaaggccgcccccgtccacctgagacaggacacgtagtgctggggcttatggtgacagt

SEQ ID NO: 117808 - DNA, 80 bp, synthetic construct; identical to SEQ ID NO: 38447
  misc_feature 1..80: note = Artificially Synthesized Probe
  source 1..80: mol_type = other DNA

SEQ ID NO: 117809 - DNA, 80 bp, synthetic construct
  misc_feature 1..80: note = Artificially Synthesized Probe
  source 1..80: mol_type = other DNA
caaaaagtttaaaaattagctgggcatggtggtacatgcttgtaatcccagttactcaggaggctgaggctcctggatca

SEQ ID NO: 117810 - DNA, 80 bp, synthetic construct
  misc_feature 1..80: note = Artificially Synthesized Probe
  source 1..80: mol_type = other DNA
cacaaggtcaggagtttgaggccatcttgcctaacactgtgaaaccccgtctctactaaaaatacaaaaaaattagccag

SEQ ID NO: 117811 - DNA, 80 bp, synthetic construct; identical to SEQ ID NO: 38448
  misc_feature 1..80: note = Artificially Synthesized Probe
  source 1..80: mol_type = other DNA

SEQ ID NO: 117812 - DNA, 80 bp, synthetic construct
  misc_feature 1..80: note = Artificially Synthesized Probe
  source 1..80: mol_type = other DNA
tttagtagagacagggtttcccatgttgcccaggctggtcccgaactcctgagctcaggcagtccacctgccttggcctc

SEQ ID NO: 117813 - DNA, 80 bp, synthetic construct
  misc_feature 1..80: note = Artificially Synthesized Probe
  source 1..80: mol_type = other DNA
gagtaatcaatattctgaactttgttgttttctgatgcatggggacggatcgttaatttgcaggttgttagaacaccagt

SEQ ID NO: 117814 - DNA, 80 bp, synthetic construct
  misc_feature 1..80: note = Artificially Synthesized Probe
  source 1..80: mol_type = other DNA
cctacctttctgcggtgccggaatctgctcgtctgcaaccgtccgctttggtagctgccagccacatggggctgttgcta

SEQ ID NO: 117815 - DNA, 80 bp, synthetic construct; identical to SEQ ID NO: 38449
  misc_feature 1..80: note = Artificially Synthesized Probe
  source 1..80: mol_type = other DNA

SEQ ID NO: 117816 - DNA, 80 bp, synthetic construct
  misc_feature 1..80: note = Artificially Synthesized Probe
  source 1..80: mol_type = other DNA
ccttgctctctgagtgtctgaatgtgccctctacgattgcatcttaagaatcggccttctagggttttatttaatcaagc

SEQ ID NO: 117817 - DNA, 80 bp, synthetic construct
  misc_feature 1..80: note = Artificially Synthesized Probe
  source 1..80: mol_type = other DNA
ttaacacttcttgccctttttttttcctttcttttagtctctgcgatatgataccagctattttgtggagtattttgcct

SEQ ID NO: 117818 - DNA, 80 bp, synthetic construct
  misc_feature 1..80: note = Artificially Synthesized Probe
  source 1..80: mol_type = other DNA
gcaccaataaatgtttatttataaataatagaagtgtacaattgtacaatatattatgtacattataaaacacacaaaaa

SEQ ID NO: 117819 - DNA, 80 bp, synthetic construct
  misc_feature 1..80: note = Artificially Synthesized Probe
  source 1..80: mol_type = other DNA
acatgagtggcacttaacaagaaaattaaattctgcttaaaccgagggttaggactaccactgtaggcatatttgtatac

SEQ ID NO: 117820 - DNA, 80 bp, synthetic construct; identical to SEQ ID NO: 38491
  misc_feature 1..80: note = Artificially Synthesized Probe
  source 1..80: mol_type = other DNA

SEQ ID NO: 117821 - DNA, 80 bp, synthetic construct
  misc_feature 1..80: note = Artificially Synthesized Probe
  source 1..80: mol_type = other DNA
taagtcattttgacatttgtcagaaacatcattacaacaagtagggaatgtaagcagcacaggattatgttaaagattat

SEQ ID NO: 117822 - DNA, 80 bp, synthetic construct
  misc_feature 1..80: note = Artificially Synthesized Probe
  source 1..80: mol_type = other DNA
aagtcgggagtttaagaccagcctgaccaacatggagaaaccctgtctctactaaaaatacaacatcagctgggtgtgtt

SEQ ID NO: 117823 - DNA, 80 bp, synthetic construct; identical to SEQ ID NO: 38492
  misc_feature 1..80: note = Artificially Synthesized Probe
  source 1..80: mol_type = other DNA

SEQ ID NO: 117824 - DNA, 80 bp, synthetic construct
  misc_feature 1..80: note = Artificially Synthesized Probe
  source 1..80: mol_type = other DNA
tggtagttaggttacttaggtaagaaacacggaaatgtagacaggtagagaggttagaaagatcctaaataaattttgtt

SEQ ID NO: 117825 - DNA, 80 bp, synthetic construct
  misc_feature 1..80: note = Artificially Synthesized Probe
  source 1..80: mol_type = other DNA
gcccggctaatgtttttatttttgagacagagtttcactcttgttgcccaggctggagtgcaatggcacaatctcagctt

SEQ ID NO: 117826 - DNA, 80 bp, synthetic construct
  misc_feature 1..80: note = Artificially Synthesized Probe
  source 1..80: mol_type = other DNA
gtgatccacccacctcgtccccacaaagtgctgggattacaggcatgagccactgcactcggccctaaatacattttatc

SEQ ID NO: 117827 - DNA, 80 bp, synthetic construct
  misc_feature 1..80: note = Artificially Synthesized Probe
  source 1..80: mol_type = other DNA
gtcatccaagctggagttcagtggcacaatcacagttcaatgcagcctcaatctcctgggctcaagtgatcctccaacct

SEQ ID NO: 117828 - DNA, 80 bp, synthetic construct
  misc_feature 1..80: note = Artificially Synthesized Probe
  source 1..80: mol_type = other DNA
acttgtggtcaaaaataacatgcctagagagcctcattatatctctccctccctgtttccacatcagttgtttgacatcc

SEQ ID NO: 117829 - DNA, 80 bp, synthetic construct; identical to SEQ ID NO: 38493
  misc_feature 1..80: note = Artificially Synthesized Probe
  source 1..80: mol_type = other DNA

SEQ ID NO: 117830 - DNA, 80 bp, synthetic construct
  misc_feature 1..80: note = Artificially Synthesized Probe
  source 1..80: mol_type = other DNA
aatttgccttaagcagtccccagaaactctagattgacatcctcgagcagaaagcagatttatacatgaaatcacctgcc

SEQ ID NO: 117831 - DNA, 80 bp, synthetic construct
  misc_feature 1..80: note = Artificially Synthesized Probe
  source 1..80: mol_type = other DNA
aacacaggctatcaaggagatcgaaagttgagcaggctgcaattacaaagtaaacaaggacaaggcaacaaatagcacta

SEQ ID NO: 117832 - DNA, 80 bp, synthetic construct; identical to SEQ ID NO: 38494
  misc_feature 1..80: note = Artificially Synthesized Probe
  source 1..80: mol_type = other DNA

SEQ ID NO: 117833 - DNA, 80 bp, synthetic construct
  misc_feature 1..80: note = Artificially Synthesized Probe
  source 1..80: mol_type = other DNA
ataacactcagtaatcagggcacagaaaagacagaagcaaagaaaaccacagaaatacttaagaagctaacaatctcttt

SEQ ID NO: 117834 - DNA, 80 bp, synthetic construct
  misc_feature 1..80: note = Artificially Synthesized Probe
  source 1..80: mol_type = other DNA
ggaacacagtagcctgtatataactcacctcaggaaagtaaaggctatacacaggatgtgttatttttgatttggtttcc

SEQ ID NO: 117835 - DNA, 80 bp, synthetic construct
  misc_feature 1..80: note = Artificially Synthesized Probe
  source 1..80: mol_type = other DNA
tattcctgacaatgctaattaactacttaggattagaacaagttcagtctcacaaatctgatcatctccctgctcatcct

SEQ ID NO: 117836 - DNA, 80 bp, synthetic construct
  misc_feature 1..80: note = Artificially Synthesized Probe
  source 1..80: mol_type = other DNA
ttaccaaactatttcactcctcctaaaccctgtttggactttgatttctccctttctctgcctactcattattatttagg

SEQ ID NO: 117837 - DNA, 80 bp, synthetic construct; identical to SEQ ID NO: 38495
  misc_feature 1..80: note = Artificially Synthesized Probe
  source 1..80: mol_type = other DNA

SEQ ID NO: 117838 - DNA, 80 bp, synthetic construct
  misc_feature 1..80: note = Artificially Synthesized Probe
  source 1..80: mol_type = other DNA
gacagattttagtttcctggcaatcaatttaattctccaagtacaaaaacagccaaggccctgcaaatgctaacaataga

SEQ ID NO: 117839 - DNA, 80 bp, synthetic construct
  misc_feature 1..80: note = Artificially Synthesized Probe
  source 1..80: mol_type = other DNA
aaaaaaaaattatgaaaaatgtttaaaaaattcaaaaaggacatgaacatctaactctgagattgagatattaacacctc

SEQ ID NO: 117840 - DNA, 80 bp, synthetic construct
  misc_feature 1..80: note = Artificially Synthesized Probe
  source 1..80: mol_type = other DNA
gatcaatggccactcaaaaagaacaacgctaacaaacctaaaagaaatggccgagcagtttatttgcagtgagcctctaa

SEQ ID NO: 117841 - DNA, 80 bp, synthetic construct; identical to SEQ ID NO: 38496
  misc_feature 1..80: note = Artificially Synthesized Probe
  source 1..80: mol_type = other DNA

SEQ ID NO: 117842 - DNA, 80 bp, synthetic construct
  misc_feature 1..80: note = Artificially Synthesized Probe
  source 1..80: mol_type = other DNA
ttaagaaaacgaggatttccaatccttgttagaaatcatttttctgtataaccttgactaccattccttaaaaacgttct

SEQ ID NO: 117843 - DNA, 80 bp, synthetic construct
  misc_feature 1..80: note = Artificially Synthesized Probe
  source 1..80: mol_type = other DNA
ttgttttgtttttcatcttgctctctatcagagtctctgtcactaccatcatctttctcactttgggaatctctattggt

SEQ ID NO: 117844 - DNA, 80 bp, synthetic construct
  misc_feature 1..80: note = Artificially Synthesized Probe
  source 1..80: mol_type = other DNA
atctgaatccctgaagttaacttattgtcaatttaactaaactgactcgatgacaatttcactattcatatacaattttt

SEQ ID NO: 117845 - DNA, 80 bp, synthetic construct
  misc_feature 1..80: note = Artificially Synthesized Probe
  source 1..80: mol_type = other DNA
atttctatttgcaaagcccaataacacaaaggctaagatggttctgctttcaaaaacatcaatcatattttatttaagga

SEQ ID NO: 117846 - DNA, 80 bp, synthetic construct; identical to SEQ ID NO: 38497
  misc_feature 1..80: note = Artificially Synthesized Probe
  source 1..80: mol_type = other DNA

SEQ ID NO: 117847 - DNA, 80 bp, synthetic construct
  misc_feature 1..80: note = Artificially Synthesized Probe
  source 1..80: mol_type = other DNA
gcagtaagtaaaggcaatatcttcagcaaaatactagctcactttaagaatcaagaacagcaaattaaatgcaaagaaag

SEQ ID NO: 117848 - DNA, 80 bp, synthetic construct
  misc_feature 1..80: note = Artificially Synthesized Probe
  source 1..80: mol_type = other DNA
atagctgggcatggtggcacatgcctgtaatctcagctactcgggaggctcaggcaggagaatcgcttgaacttggtagg

SEQ ID NO: 117849 - DNA, 80 bp, synthetic construct
  misc_feature 1..80: note = Artificially Synthesized Probe
  source 1..80: mol_type = other DNA
tcaagaaaaaaaaagaataaaaattaccaatattaggaacaagaggcgtaactatatccaacagacattaaaagaaaatt

SEQ ID NO: 117850 - DNA, 80 bp, synthetic construct; identical to SEQ ID NO: 38482
  misc_feature 1..80: note = Artificially Synthesized Probe
  source 1..80: mol_type = other DNA

SEQ ID NO: 117851 - DNA, 80 bp, synthetic construct; identical to SEQ ID NO: 38498
  misc_feature 1..80: note = Artificially Synthesized Probe
  source 1..80: mol_type = other DNA

SEQ ID NO: 117852 - DNA, 80 bp, synthetic construct
  misc_feature 1..80: note = Artificially Synthesized Probe
  source 1..80: mol_type = other DNA
tgaccaaatgatatttgttccaggaatgcagggatggtttcaaattttttaaatccatcaatctaattcaacagaaagga

SEQ ID NO: 117853 - DNA, 80 bp, synthetic construct
  misc_feature 1..80: note = Artificially Synthesized Probe
  source 1..80: mol_type = other DNA
tgctttcttcctaagaccaaaaataagacaaggttcctactatcatcactctgaatcagtattacactgacagttctagc

SEQ ID NO: 117854 - DNA, 80 bp, synthetic construct
  misc_feature 1..80: note = Artificially Synthesized Probe
  source 1..80: mol_type = other DNA
atacaaggtcaatatttagaagcaactatttctatacaccagcaacaaacaccaaataaaaattttaatgacatttacag

SEQ ID NO: 117855 - DNA, 80 bp, synthetic construct; identical to SEQ ID NO: 38499
  misc_feature 1..80: note = Artificially Synthesized Probe
  source 1..80: mol_type = other DNA

SEQ ID NO: 117856 - DNA, 80 bp, synthetic construct
  misc_feature 1..80: note = Artificially Synthesized Probe
  source 1..80: mol_type = other DNA
gacaaataatcaatagaatgaactagagtccataaacagacctacagtatcatctgttgtttttttttaaaattatactt

SEQ ID NO: 117857 - DNA, 80 bp, synthetic construct
  misc_feature 1..80: note = Artificially Synthesized Probe
  source 1..80: mol_type = other DNA
atgttcccctccctgtgtccatgtgttctcattgttcaactcccacttatgagtgagaacatggcggtgtttggatttct

SEQ ID NO: 117858 - DNA, 80 bp, synthetic construct
  misc_feature 1..80: note = Artificially Synthesized Probe
  source 1..80: mol_type = other DNA
ccaagtctttgttattgtgaacagtgccgcaataaacatacatctgtatgtgtctttatagtaaaatgatttataatcct

SEQ ID NO: 117859 - DNA, 80 bp, synthetic construct; identical to SEQ ID NO: 38500
  misc_feature 1..80: note = Artificially Synthesized Probe
  source 1..80: mol_type = other DNA

SEQ ID NO: 117860 - DNA, 80 bp, synthetic construct
  misc_feature 1..80: note = Artificially Synthesized Probe
  source 1..80: mol_type = other DNA
tgtgtcagatggatagattataaaaactttctcccattctgtgggttgcctgttcactctgatgatagttttttgttttt

SEQ ID NO: 117861 - DNA, 80 bp, synthetic construct
  misc_feature 1..80: note = Artificially Synthesized Probe
  source 1..80: mol_type = other DNA
gaggaaattttattttacttagttgggaagtacatacacatcacacaaagagaaaaggaaaacaaactggtggaattttc

SEQ ID NO: 117862 - DNA, 80 bp, synthetic construct
  misc_feature 1..80: note = Artificially Synthesized Probe
  source 1..80: mol_type = other DNA
gtttttatggttttaagtcttaagtctttagtccaccttgagttaatttttgtataaggtgtagttagaatggcaatcat

SEQ ID NO: 117863 - DNA, 80 bp, synthetic construct; identical to SEQ ID NO: 38501
  misc_feature 1..80: note = Artificially Synthesized Probe
  source 1..80: mol_type = other DNA

SEQ ID NO: 117864 - DNA, 80 bp, synthetic construct
  misc_feature 1..80: note = Artificially Synthesized Probe
  source 1..80: mol_type = other DNA
agtaaactattgcaagaacaaaaaaccaaacaccgcatattctcactcataggtgggaattgaacaatgagatcacatgg

SEQ ID NO: 117865 - DNA, 80 bp, synthetic construct
  misc_feature 1..80: note = Artificially Synthesized Probe
  source 1..80: mol_type = other DNA
acatgtaccctaaaacttaaagtataactaaaaaaaaaatttttttgtataagatgtaaggaaggaatccagttcctgct

SEQ ID NO: 117866 - DNA, 80 bp, synthetic construct
  misc_feature 1..80: note = Artificially Synthesized Probe
  source 1..80: mol_type = other DNA
ttggtacgagtaccatgctgttttggttactgtagccttgtagcacagtttgaagtcaggtagcgtgatgcctccagctt

SEQ ID NO: 117867 - DNA, 80 bp, synthetic construct
  misc_feature 1..80: note = Artificially Synthesized Probe
  source 1..80: mol_type = other DNA
aatactgattcttcctatccatgagcatgtaatgttttccatttgtttgtgtcctctctcatttccttgagcagtggttt

SEQ ID NO: 117868 - DNA, 80 bp, synthetic construct; identical to SEQ ID NO: 38502
  misc_feature 1..80: note = Artificially Synthesized Probe
  source 1..80: mol_type = other DNA

SEQ ID NO: 117869 - DNA, 80 bp, synthetic construct
  misc_feature 1..80: note = Artificially Synthesized Probe
  source 1..80: mol_type = other DNA
gagaaggcttccagtttttgcccattcagtatgatactggctgtgggtttgtcataaatagctcttattttgaggtacgt

SEQ ID NO: 117870 - DNA, 80 bp, synthetic construct
  misc_feature 1..80: note = Artificially Synthesized Probe
  source 1..80: mol_type = other DNA
tgcatcccagggatgaagccaacttgatcgtggtggataaactttctgatgtgctgctggattcagtttgccagtatttt

SEQ ID NO: 117871 - DNA, 80 bp, synthetic construct; identical to SEQ ID NO: 38503
  misc_feature 1..80: note = Artificially Synthesized Probe
  source 1..80: mol_type = other DNA

SEQ ID NO: 117872 - DNA, 80 bp, synthetic construct
  misc_feature 1..80: note = Artificially Synthesized Probe
  source 1..80: mol_type = other DNA
tcttgaaatctttcaagaaaactaggaaatatgcattctacacattgttctgtcttgtctgctcagtttccttgccttcg

SEQ ID NO: 117873 - DNA, 80 bp, synthetic construct
  misc_feature 1..80: note = Artificially Synthesized Probe
  source 1..80: mol_type = other DNA
gatggtagtttgtatttctgtgggatcagtggtgacatcccctttatctttttttattgcatctatttgattcttctctc

SEQ ID NO: 117874 - DNA, 80 bp, synthetic construct
  misc_feature 1..80: note = Artificially Synthesized Probe
  source 1..80: mol_type = other DNA
tgctcttgcttctctagttcttttgtgatgttagggtgtcgattttagatctttcctgctttctcttgtaggcatttagt

SEQ ID NO: 117875 - DNA, 80 bp, synthetic construct
  misc_feature 1..80: note = Artificially Synthesized Probe
  source 1..80: mol_type = other DNA
ttgtgcagttctgagcgagtttcctaatcctgagttctagtttgattgcactgtggtctgagagacagtctgttataatt

SEQ ID NO: 117876 - DNA, 80 bp, synthetic construct
  misc_feature 1..80: note = Artificially Synthesized Probe
  source 1..80: mol_type = other DNA
agtcctggatatccttgttaattttctgtctaatattgacagtggggtgttaaagtctcccactattattgtgtgggagt

SEQ ID NO: 117877 - DNA, 80 bp, synthetic construct; identical to SEQ ID NO: 38504
  misc_feature 1..80: note = Artificially Synthesized Probe
  source 1..80: mol_type = other DNA

SEQ ID NO: 117878 - DNA, 80 bp, synthetic construct
  misc_feature 1..80: note = Artificially Synthesized Probe
  source 1..80: mol_type = other DNA
tcctgccattatgatgctatctcgttattctgccccttagtttatgcagtttcttcacagcattgacagtctttacaatt

SEQ ID NO: 117879 - DNA, 80 bp, synthetic construct
  misc_feature 1..80: note = Artificially Synthesized Probe
  source 1..80: mol_type = other DNA
tggatattaaattctgggttgaaaattcttttctttaagaatgttgaatatcaggccccactctcttctggcttgtaagg

SEQ ID NO: 117880 - DNA, 80 bp, synthetic construct; identical to SEQ ID NO: 38505
  misc_feature 1..80: note = Artificially Synthesized Probe
  source 1..80: mol_type = other DNA

SEQ ID NO: 117881 - DNA, 80 bp, synthetic construct
  misc_feature 1..80: note = Artificially Synthesized Probe
  source 1..80: mol_type = other DNA
tcaatctctgatatcctttcttctgcttgatcaatatggctattgatacttgtgtatgcttcacgaagttctcgtgctgt

SEQ ID NO: 117882 - DNA, 80 bp, synthetic construct
  misc_feature 1..80: note = Artificially Synthesized Probe
  source 1..80: mol_type = other DNA
tttgaaaattaaacccaccctcctacttgtacaatgaagtaaatgaaaaaaatcctcagtgacactgcctcctgcctgcc

SEQ ID NO: 117883 - DNA, 80 bp, synthetic construct
  misc_feature 1..80: note = Artificially Synthesized Probe
  source 1..80: mol_type = other DNA
gtcagttcgtcacattcattctccatccagttttgttcccttgctggtgaggagctgtgatcctttggagaagaggcatt

SEQ ID NO: 117884 - DNA, 80 bp, synthetic construct
  misc_feature 1..80: note = Artificially Synthesized Probe
  source 1..80: mol_type = other DNA
aaatatgtacaagatcgcatctttttaagttttgcaaaatagccctagcatcaagtttaaatggatgagaatgcttggtg

SEQ ID NO: 117885 - DNA, 80 bp, synthetic construct
  misc_feature 1..80: note = Artificially Synthesized Probe
  source 1..80: mol_type = other DNA
ttctaacaggcccctctgctgcaggtctgctggagtttgctggaggtctgctccagaccctctttgcctgggtatcacca

SEQ ID NO: 117886 - DNA, 80 bp, synthetic construct
  misc_feature 1..80: note = Artificially Synthesized Probe
  source 1..80: mol_type = other DNA
gaggaggcagtctgtcccttatcagagctcgaatgctgtgctggtagatctgctgctgtcttcagagctgccaggtaggg

SEQ ID NO: 117887 - DNA, 80 bp, synthetic construct; identical to SEQ ID NO: 38506
  misc_feature 1..80: note = Artificially Synthesized Probe
  source 1..80: mol_type = other DNA

SEQ ID NO: 117888 - DNA, 80 bp, synthetic construct
  misc_feature 1..80: note = Artificially Synthesized Probe
  source 1..80: mol_type = other DNA
attagccatcgatgaaagatgacctcactgacgaaaaaaagagactaatgaaattgacctcattaaaataataaacatta

SEQ ID NO: 117889 - DNA, 80 bp, synthetic construct
  misc_feature 1..80: note = Artificially Synthesized Probe
  source 1..80: mol_type = other DNA
aatgcaaacaaaaaccacataaagagatatcactacagatctgccaaatagctaaaagactggtaaaaccaagtgttggt

SEQ ID NO: 117890 - DNA, 80 bp, synthetic construct
  misc_feature 1..80: note = Artificially Synthesized Probe
  source 1..80: mol_type = other DNA
taagcatagcaccctttattcatattaggttaagaactacaaacaatccaaacgtcgaaccaccacaaaacaggtaaatg

SEQ ID NO: 117891 - DNA, 80 bp, synthetic construct; identical to SEQ ID NO: 38507
  misc_feature 1..80: note = Artificially Synthesized Probe
  source 1..80: mol_type = other DNA

SEQ ID NO: 117892 - DNA, 80 bp, synthetic construct
  misc_feature 1..80: note = Artificially Synthesized Probe
  source 1..80: mol_type = other DNA
cattcccaacgactccatttgcctgcttttgtttctgttgctttgactgtggtaatagcacaggtgtaggtttttttttt

SEQ ID NO: 117893 - DNA, 80 bp, synthetic construct
  misc_feature 1..80: note = Artificially Synthesized Probe
  source 1..80: mol_type = other DNA
gttagtttcaccctgctgtgaatcataacacgtcacactcttaagttatagcaacagattcaattgaaggttgtagtaat

SEQ ID NO: 117894 - DNA, 80 bp, synthetic construct
  misc_feature 1..80: note = Artificially Synthesized Probe
  source 1..80: mol_type = other DNA
cggtagtattctgcactgaaagtggcaaccttttaaagtaaacaaggttgcaaattttagtattccaacaatattttgac

SEQ ID NO: 117895 - DNA, 80 bp, synthetic construct; identical to SEQ ID NO: 38508
  misc_feature 1..80: note = Artificially Synthesized Probe
  source 1..80: mol_type = other DNA

SEQ ID NO: 117896 - DNA, 80 bp, synthetic construct
  misc_feature 1..80: note = Artificially Synthesized Probe
  source 1..80: mol_type = other DNA
aagtatctcacatctgtcttgaacaagttttgaaaagtacagtctactcaagtttacaaacacagtaaggatacatacag

SEQ ID NO: 117897 - DNA, 80 bp, synthetic construct
  misc_feature 1..80: note = Artificially Synthesized Probe
  source 1..80: mol_type = other DNA
agtttattcactattgtcagtgatactgcttattggacctgagacctgagactaagaactgaatcatcacaggtggagca

SEQ ID NO: 117898 - DNA, 80 bp, synthetic construct
  misc_feature 1..80: note = Artificially Synthesized Probe
  source 1..80: mol_type = other DNA
caccatgaaaatctacatatcctaaagctatatccaccaaccatacaatccatttagaatcagtacagaaccagtaaatt

SEQ ID NO: 117899 - DNA, 80 bp, synthetic construct
  misc_feature 1..80: note = Artificially Synthesized Probe
  source 1..80: mol_type = other DNA
gctaacaagtaaaaagttataatttttaggctctatacaataaaaacagcctaattcaggagtcaactctgaacagtcca

SEQ ID NO: 117900 - DNA, 80 bp, synthetic construct; identical to SEQ ID NO: 38509
  misc_feature 1..80: note = Artificially Synthesized Probe
  source 1..80: mol_type = other DNA

SEQ ID NO: 117901 - DNA, 80 bp, synthetic construct
  misc_feature 1..80: note = Artificially Synthesized Probe
  source 1..80: mol_type = other DNA
ccattccattcttttttctaccaattactccagaaatgtcaatagttcaagaccaaatttttgctcatttttcaggctgg

SEQ ID NO: 117902 - DNA, 80 bp, synthetic construct
  misc_feature 1..80: note = Artificially Synthesized Probe
  source 1..80: mol_type = other DNA
tatcctactacaaaacatgattttcaggccaggcttggtggctcacacctgtaatcccagcactttaggaggctgaaatg

SEQ ID NO: 117903 - DNA, 80 bp, synthetic construct; identical to SEQ ID NO: 38510
  misc_feature 1..80: note = Artificially Synthesized Probe
  source 1..80: mol_type = other DNA

SEQ ID NO: 117904 - DNA, 80 bp, synthetic construct
  misc_feature 1..80: note = Artificially Synthesized Probe
  source 1..80: mol_type = other DNA
taggccaggcatggtggctcatgcctgtaatcccagcactttgggaggctgaggggtacatatcacttgaggacaggcat

SEQ ID NO: 117905 - DNA, 80 bp, synthetic construct
  misc_feature 1..80: note = Artificially Synthesized Probe
  source 1..80: mol_type = other DNA
gcaccactgcactcaagcctaggtaacacagtgagaccgtgtctcaacaaaaaataaaataggctgggcgcagttgctca

SEQ ID NO: 117906 - DNA, 80 bp, synthetic construct; identical to SEQ ID NO: 38483
  misc_feature 1..80: note = Artificially Synthesized Probe
  source 1..80: mol_type = other DNA

SEQ ID NO: 117907 - DNA, 80 bp, synthetic construct
  misc_feature 1..80: note = Artificially Synthesized Probe
  source 1..80: mol_type = other DNA
gagactgaggcagaagaatcacttgaacctgggaggcagaggttgcagtgagccaagattgcaccactgcattccagcct

SEQ ID NO: 117908 - DNA, 80 bp, synthetic construct; identical to SEQ ID NO: 38511
  misc_feature 1..80: note = Artificially Synthesized Probe
  source 1..80: mol_type = other DNA

SEQ ID NO: 117909 - DNA, 80 bp, synthetic construct
  misc_feature 1..80: note = Artificially Synthesized Probe
  source 1..80: mol_type = other DNA
tggtggcgtgtgcctgtaatcccagctactcgggaggctgaggcaggagaatcacttgaacccaggagatgggaggttgc

SEQ ID NO: 117910 - DNA, 80 bp, synthetic construct
  misc_feature 1..80: note = Artificially Synthesized Probe
  source 1..80: mol_type = other DNA
aaaaacatcatttagctctacaggtatacatacattaggctacatacagggatgagcctcaaaacgaatcatctcgaagt

SEQ ID NO: 117911 - DNA, 80 bp, synthetic construct
  misc_feature 1..80: note = Artificially Synthesized Probe
  source 1..80: mol_type = other DNA
actgactaaaaaggaataggtgatgaaattctcatcagtaacaacttctgtatagcacttcacagctcaagaactatatc

SEQ ID NO: 117912 - DNA, 80 bp, synthetic construct
  misc_feature 1..80: note = Artificially Synthesized Probe
  source 1..80: mol_type = other DNA
acagttttgactttgacaatgagggaaataaatataaaagccttgacacacaactcttaaagcataaaaatacagataga

SEQ ID NO: 117913 - DNA, 80 bp, synthetic construct; identical to SEQ ID NO: 38512
  misc_feature 1..80: note = Artificially Synthesized Probe
  source 1..80: mol_type = other DNA

SEQ ID NO: 117914 - DNA, 80 bp, synthetic construct
  misc_feature 1..80: note = Artificially Synthesized Probe
  source 1..80: mol_type = other DNA
ttaattcatttaatccttaaaatagctctacaaagtatttccactttcagaaactaaggtttagccaggcttggtggctc

SEQ ID NO: 117915 - DNA, 80 bp, synthetic construct
  misc_feature 1..80: note = Artificially Synthesized Probe
  source 1..80: mol_type = other DNA
ggctgaggtggaggatagcttgaacctgggagccggaggttgcagtgagcccagatcgtaccactgcacttcagggcaag

SEQ ID NO: 117916 - DNA, 80 bp, synthetic construct; identical to SEQ ID NO: 38513
  misc_feature 1..80: note = Artificially Synthesized Probe
  source 1..80: mol_type = other DNA

SEQ ID NO: 117917 - DNA, 80 bp, synthetic construct
  misc_feature 1..80: note = Artificially Synthesized Probe
  source 1..80: mol_type = other DNA
cttactttccttaaaaagctcctgatagagtcaagtagactgaaaactaaggatgtagttcagcttttagagtgaacctt

SEQ ID NO: 117918 - DNA, 80 bp, synthetic construct
  misc_feature 1..80: note = Artificially Synthesized Probe
  source 1..80: mol_type = other DNA
ttaatttttaaaaccatatttcccacacatatccccaaaaactctactataaagttaataaaacaaaataaataaaaata

SEQ ID NO: 117919 - DNA, 80 bp, synthetic construct
  misc_feature 1..80: note = Artificially Synthesized Probe
  source 1..80: mol_type = other DNA
ttgaaaagaatggcctccaataatctgcaattgctatctccattacccgctacaaggtgcagcagctgggtatcaacaaa

SEQ ID NO: 117920 - DNA, 80 bp, synthetic construct
  misc_feature 1..80: note = Artificially Synthesized Probe
  source 1..80: mol_type = other DNA
tgaagaaaaggactacaggagattctattacagattctagcaaggtagggaaggagatccaccatctccagcattattat

SEQ ID NO: 117921 - DNA, 80 bp, synthetic construct; identical to SEQ ID NO: 38514
  misc_feature 1..80: note = Artificially Synthesized Probe
  source 1..80: mol_type = other DNA

SEQ ID NO: 117922 - DNA, 80 bp, synthetic construct
  misc_feature 1..80: note = Artificially Synthesized Probe
  source 1..80: mol_type = other DNA
cccagctacttgggagggctgaggcaggagaatcacttgaacctagagttggaggttgcagtaagcccagatagtgccac

SEQ ID NO: 117923 - DNA, 80 bp, synthetic construct
  misc_feature 1..80: note = Artificially Synthesized Probe
  source 1..80: mol_type = other DNA
tacagcttttaaattagtatttttaaagtctgaaaactcatggccccacaaggcaaccccaactcctcaccaaagcaaac

SEQ ID NO: 117924 - DNA, 80 bp, synthetic construct
  misc_feature 1..80: note = Artificially Synthesized Probe
  source 1..80: mol_type = other DNA
ttaccactgcttccctagcacctagaggagtgcacagcattcaatatttgctgtataaataaatggtacaatgtctgtgt

SEQ ID NO: 117925 - DNA, 80 bp, synthetic construct; identical to SEQ ID NO: 38515
  misc_feature 1..80: note = Artificially Synthesized Probe
  source 1..80: mol_type = other DNA

SEQ ID NO: 117926 - DNA, 80 bp, synthetic construct
  misc_feature 1..80: note = Artificially Synthesized Probe
  source 1..80: mol_type = other DNA
acctgtagtcccagctactcaggaggctgaggtagaaggattgcttgagcccgggaggcagaggacgcagtgagccaaaa

SEQ ID NO: 117927 - DNA, 80 bp, synthetic construct
  misc_feature 1..80: note = Artificially Synthesized Probe
  source 1..80: mol_type = other DNA
tcagaccaccaccacaatgaaagaatggagcagatagtctctaattctctcagtattctaagaccattcagatattgaaa

SEQ ID NO: 117928 - DNA, 80 bp, synthetic construct
  misc_feature 1..80: note = Artificially Synthesized Probe
  source 1..80: mol_type = other DNA
tatttttttccctcaaagaaaatatagaggtagggcaagaaaaacacatgaaatgtggcataaaacacagtaattttcaa

SEQ ID NO: 117929 - DNA, 80 bp, synthetic construct
  misc_feature 1..80: note = Artificially Synthesized Probe
  source 1..80: mol_type = other DNA
tctgtctgataactctgggcaattaagaaaaggaaaattccaaaacgtagccctctatatcatgtggaatgtgagagaat

SEQ ID NO: 117930 - DNA, 80 bp, synthetic construct; identical to SEQ ID NO: 38516
  misc_feature 1..80: note = Artificially Synthesized Probe
  source 1..80: mol_type = other DNA

SEQ ID NO: 117931 - DNA, 80 bp, synthetic construct
  misc_feature 1..80: note = Artificially Synthesized Probe
  source 1..80: mol_type = other DNA
cccacttaccctgtgattttatatccatggtcacatatggaaaactcccaaggacagccataacctcttcatatttttca

SEQ ID NO: 117932 - DNA, 80 bp, synthetic construct
  misc_feature 1..80: note = Artificially Synthesized Probe
  source 1..80: mol_type = other DNA
caacaaaatccagcaacttttagaaaagtgttgattaatgtgcatttcaaagtacaaaataacgatatggcatttcatga

SEQ ID NO: 117933 - DNA, 80 bp, synthetic construct
  misc_feature 1..80: note = Artificially Synthesized Probe
  source 1..80: mol_type = other DNA
taataacaaaaacctttaattagcaattaataggtttactattaacaaacctttaataataaacgtttacttttacctaa

SEQ ID NO: 117934 - DNA, 80 bp, synthetic construct; identical to SEQ ID NO: 38517
  misc_feature 1..80: note = Artificially Synthesized Probe
  source 1..80: mol_type = other DNA

SEQ ID NO: 117935 - DNA, 80 bp, synthetic construct
  misc_feature 1..80: note = Artificially Synthesized Probe
  source 1..80: mol_type = other DNA
aataatgtttaaaatctcctactagaattgtaacttcagtttcttatatttcctcaagtttttcatttacacaaattttt

SEQ ID NO: 117936 - DNA, 80 bp, synthetic construct
  misc_feature 1..80: note = Artificially Synthesized Probe
  source 1..80: mol_type = other DNA
tacatttatttttggtaacataatataaggaactaactgttgactttttaaatgcaacaacccccaaaataataaaacta

SEQ ID NO: 117937 - DNA, 80 bp, synthetic construct
  misc_feature 1..80: note = Artificially Synthesized Probe
  source 1..80: mol_type = other DNA
ggacaaactgctgaaaactgactttaaagtagcaaagaattaccttcttatgattagaaacccgtctaagattgtcctct

SEQ ID NO: 117938 - DNA, 80 bp, synthetic construct
  misc_feature 1..80: note = Artificially Synthesized Probe
  source 1..80: mol_type = other DNA
acatgttcaggagtatacaattcatcacaaaaacaaaattcacactaaatccataacacctcaaatttgaggatcatagt

SEQ ID NO: 117939 - DNA, 80 bp, synthetic construct; identical to SEQ ID NO: 38518
  misc_feature 1..80: note = Artificially Synthesized Probe
  source 1..80: mol_type = other DNA

SEQ ID NO: 117940 - DNA, 80 bp, synthetic construct; identical to SEQ ID NO: 38484
  misc_feature 1..80: note = Artificially Synthesized Probe
  source 1..80: mol_type = other DNA

SEQ ID NO: 117941 - DNA, 80 bp, synthetic construct
  misc_feature 1..80: note = Artificially Synthesized Probe
  source 1..80: mol_type = other DNA
caaagtgagatcccacctctacacaaaatgtaaagttagctccgtgctgtggtatgcacctgtagttccagctactcgga

SEQ ID NO: 117942 - DNA, 80 bp, synthetic construct
  misc_feature 1..80: note = Artificially Synthesized Probe
  source 1..80: mol_type = other DNA
actgttagaaaaaatgacctaactcaaaaattattcaaagaaagagaaattttaaatctttgcaaacaattgaacaataa

SEQ ID NO: 117943 - DNA, 80 bp, synthetic construct
  misc_feature 1..80: note = Artificially Synthesized Probe
  source 1..80: mol_type = other DNA
ccagctactcaggaggctgaggcaggagaatcacttgaccctgggaggcggaggttgcagtgagccaagatcgcgccact

SEQ ID NO: 117944 - DNA, 80 bp, synthetic construct; identical to SEQ ID NO: 38519
  misc_feature 1..80: note = Artificially Synthesized Probe
  source 1..80: mol_type = other DNA

SEQ ID NO: 117945 - DNA, 80 bp, synthetic construct
  misc_feature 1..80: note = Artificially Synthesized Probe
  source 1..80: mol_type = other DNA
gaaatatgaaaagacatgagtaaaattgaagaagctcactgaactggccgacagaagtctgagtacccataaatcctaaa

SEQ ID NO: 117946 - DNA, 80 bp, synthetic construct
  misc_feature 1..80: note = Artificially Synthesized Probe
  source 1..80: mol_type = other DNA
gggccattactattagttggcagattacattaaccatttcttgaagtagggcaggacacttttttagcatgaattgctga

SEQ ID NO: 117947 - DNA, 80 bp, synthetic construct; identical to SEQ ID NO: 38520
  misc_feature 1..80: note = Artificially Synthesized Probe
  source 1..80: mol_type = other DNA

SEQ ID NO: 117948 - DNA, 80 bp, synthetic construct
  misc_feature 1..80: note = Artificially Synthesized Probe
  source 1..80: mol_type = other DNA
agagataagagacgtagaagagaagaagagggcaacttacagaaagagaaagactctttcatttatactgcatataatag

SEQ ID NO: 117949 - DNA, 80 bp, synthetic construct
  misc_feature 1..80: note = Artificially Synthesized Probe
  source 1..80: mol_type = other DNA
attgcctaaatagtgctccttcattccaccataagcatcctgtcctatcaccaattactaagcgtcacatggccttgttt

SEQ ID NO: 117950 - DNA, 80 bp, synthetic construct
  misc_feature 1..80: note = Artificially Synthesized Probe
  source 1..80: mol_type = other DNA
gtcggtgaaaaagagataattaatgacatccctggaaacactgttgcctccatcaactacttttcttttaagcagaatac

SEQ ID NO: 117951 - DNA, 80 bp, synthetic construct
  misc_feature 1..80: note = Artificially Synthesized Probe
  source 1..80: mol_type = other DNA
tggggaggtgagaggtgttggttgttgtgaaatccattttgctccctccaaaaacttacaaagtcctttaaaaaaattat

SEQ ID NO: 117952 - DNA, 80 bp, synthetic construct
  misc_feature 1..80: note = Artificially Synthesized Probe
  source 1..80: mol_type = other DNA
ttatattatgcacccatttcaagagtaaaaaaactacacctccctcaacatcagttctgtactgtttctggtttatgata

SEQ ID NO: 117953 - DNA, 80 bp, synthetic construct; identical to SEQ ID NO: 38521
  misc_feature 1..80: note = Artificially Synthesized Probe
  source 1..80: mol_type = other DNA

SEQ ID NO: 117954 - DNA, 80 bp, synthetic construct
  misc_feature 1..80: note = Artificially Synthesized Probe
  source 1..80: mol_type = other DNA
atctctctcttcctcctgctctggccatgtgaagacacttgctctgcctttgcctgctctggctttgccttctgccatga

SEQ ID NO: 117955 - DNA, 80 bp, synthetic construct
  misc_feature 1..80: note = Artificially Synthesized Probe
  source 1..80: mol_type = other DNA
ctgctttcatcccactaaacctctgtagataccggaatcacaaataccttcttcaagggtctcaggaattttcattctag

SEQ ID NO: 117956 - DNA, 80 bp, synthetic construct; identical to SEQ ID NO: 38522
  misc_feature 1..80: note = Artificially Synthesized Probe
  source 1..80: mol_type = other DNA

SEQ ID NO: 117957 - DNA, 80 bp, synthetic construct
  misc_feature 1..80: note = Artificially Synthesized Probe
  source 1..80: mol_type = other DNA
tgcacaatgctaaaaattatctgaactccactgacaagtatttatttcttccataaaaaaagtaacatctcgctttttaa

SEQ ID NO: 117958 - DNA, 80 bp, synthetic construct
  misc_feature 1..80: note = Artificially Synthesized Probe
  source 1..80: mol_type = other DNA
ccctatgattaaataaagctgaaaataatgtaaacaagagttaaaggtttctttactacatgacttctcaaggccttttg

SEQ ID NO: 117959 - DNA, 80 bp, synthetic construct
  misc_feature 1..80: note = Artificially Synthesized Probe
  source 1..80: mol_type = other DNA
atttgagaccagccagtttgagaccaagctggccaaaatggtgaaaccccatctctactaaaaatacaaaaattagccag

SEQ ID NO: 117960 - DNA, 80 bp, synthetic construct; identical to SEQ ID NO: 38523
  misc_feature 1..80: note = Artificially Synthesized Probe
  source 1..80: mol_type = other DNA

SEQ ID NO: 117961 - DNA, 80 bp, synthetic construct
  misc_feature 1..80: note = Artificially Synthesized Probe
  source 1..80: mol_type = other DNA
aaatccaccagctaaacaatgcttctctgacaaagctgtgtaaggataccaccctcagaaaagaaacagaaatcaaaatg

SEQ ID NO: 117962 - DNA, 80 bp, synthetic construct
  misc_feature 1..80: note = Artificially Synthesized Probe
  source 1..80: mol_type = other DNA
gtcatatatgaccatgagaagtctctctcattactaagaaaattagtaaaattgccaaatccaaaatgcagaaaagtcca

SEQ ID NO: 117963 - DNA, 80 bp, synthetic construct
  misc_feature 1..80: note = Artificially Synthesized Probe
  source 1..80: mol_type = other DNA
cactgtgggtgattttctggcacaggcttagcctcatgaacttccaactagaaagaagaattaaatgtagacatcagaaa

SEQ ID NO: 117964 - DNA, 80 bp, synthetic construct
  misc_feature 1..80: note = Artificially Synthesized Probe
  source 1..80: mol_type = other DNA
gaaagtgaaaatagtattttttttcttaaatttttaaataagaactgggaatgaaatactctagcactagttttctttca

SEQ ID NO: 117965 - DNA, 80 bp, synthetic construct; identical to SEQ ID NO: 38524
  misc_feature 1..80: note = Artificially Synthesized Probe
  source 1..80: mol_type = other DNA

SEQ ID NO: 117966 - DNA, 80 bp, synthetic construct
  misc_feature 1..80: note = Artificially Synthesized Probe
  source 1..80: mol_type = other DNA
gtgacaaagggtgctggcatttttctctagctttaattatataaattaactatttataaaactgtacaatagaatctcaa

SEQ ID NO: 117967 - DNA, 80 bp, synthetic construct
  misc_feature 1..80: note = Artificially Synthesized Probe
  source 1..80: mol_type = other DNA
gtatgtataaatctgtgttgtgcgtattagaatctggtctccactatagcgtattgagcgataccaccaagagccctaaa

SEQ ID NO: 117968 - DNA, 80 bp, synthetic construct
  misc_feature 1..80: note = Artificially Synthesized Probe
  source 1..80: mol_type = other DNA
ctacaaaagaaaaagaaaaatgcaaacattagctgggcatggtggcacatgcctctagtcccagctgctcaggaagctga

SEQ ID NO: 117969 - DNA, 80 bp, synthetic construct
  misc_feature 1..80: note = Artificially Synthesized Probe
  source 1..80: mol_type = other DNA
ggtcaaatcttctaaatattcataaaacaataaaaatacctgagtcttacaacaaggacctctttcttgcatatttcaag

SEQ ID NO: 117970 - DNA, 80 bp, synthetic construct; identical to SEQ ID NO: 38525
  misc_feature 1..80: note = Artificially Synthesized Probe
  source 1..80: mol_type = other DNA

SEQ ID NO: 117971 - DNA, 80 bp, synthetic construct
  misc_feature 1..80: note = Artificially Synthesized Probe
  source 1..80: mol_type = other DNA
ctaaaaggaactccaggatcagaaaggacacaagtcacaaaagtaacaaatggtgaatatcaaattgtatggtatctccg

SEQ ID NO: 117972 - DNA, 80 bp, synthetic construct
  misc_feature 1..80: note = Artificially Synthesized Probe
  source 1..80: mol_type = other DNA
tttaaagaaaaaacacccaacttcccaatgattcctaaataaatgaagttgagggtggtagtgcgggaagactttcattt

SEQ ID NO: 117973 - DNA, 80 bp, synthetic construct
  misc_feature 1..80: note = Artificially Synthesized Probe
  source 1..80: mol_type = other DNA
gcagggcatggtggtacacacttgtggtcttagctacttgggaggctgaggtgggaggatttgcttgaacccaggaggta

SEQ ID NO: 117974 - DNA, 80 bp, synthetic construct; identical to SEQ ID NO: 38526
  misc_feature 1..80: note = Artificially Synthesized Probe
  source 1..80: mol_type = other DNA

SEQ ID NO: 117975 - DNA, 80 bp, synthetic construct
  misc_feature 1..80: note = Artificially Synthesized Probe
  source 1..80: mol_type = other DNA
tgtaaatgtagttaaatttctaatacagtttgatattttgattctgtatgttatactatttatgaatgtatttctatggc

SEQ ID NO: 117976 - DNA, 80 bp, synthetic construct
  misc_feature 1..80: note = Artificially Synthesized Probe
  source 1..80: mol_type = other DNA
ctctgtcacccaggctggagtgtagtggcacaatctcggctcattgcaacctctgcctcctgggttcaaaccagcatgtc

SEQ ID NO: 117977 - DNA, 80 bp, synthetic construct
  misc_feature 1..80: note = Artificially Synthesized Probe
  source 1..80: mol_type = other DNA
atacacatcatgctcaagtaatgtcacatttagaagaccattaaaagtatagttatataatttttttttcagttggggtc

SEQ ID NO: 117978 - DNA, 80 bp, synthetic construct
  misc_feature 1..80: note = Artificially Synthesized Probe
  source 1..80: mol_type = other DNA
ggagactccaaaacatgtcaatctcctttccaaaaaaaacattaacttaaaaagctaaaacttaccacaacaactggaag

SEQ ID NO: 117979 - DNA, 80 bp, synthetic construct; identical to SEQ ID NO: 38527
  misc_feature 1..80: note = Artificially Synthesized Probe
  source 1..80: mol_type = other DNA

SEQ ID NO: 117980 - DNA, 80 bp, synthetic construct
  misc_feature 1..80: note = Artificially Synthesized Probe
  source 1..80: mol_type = other DNA
ttgtaaattacatttctcttccagtcaggcaggtatttatatatccacaacctctcagtagttagtgctctgggaacaaa

SEQ ID NO: 117981 - DNA, 80 bp, synthetic construct
  misc_feature 1..80: note = Artificially Synthesized Probe
  source 1..80: mol_type = other DNA
agtaacttattccttctcgactattcctactaaccagaagcatgacaaacaagcttatgcagcaactgtataccccctca

SEQ ID NO: 117982 - DNA, 80 bp, synthetic construct; identical to SEQ ID NO: 38528
  misc_feature 1..80: note = Artificially Synthesized Probe
  source 1..80: mol_type = other DNA

SEQ ID NO: 117983 - DNA, 80 bp, synthetic construct
  misc_feature 1..80: note = Artificially Synthesized Probe
  source 1..80: mol_type = other DNA
ggcatggtggtgggtacctgtaatcccagctactcagcgggggctgaggcaggagaatcgcttgaacccaggaggcagag

SEQ ID NO: 117984 - DNA, 80 bp, synthetic construct
  misc_feature 1..80: note = Artificially Synthesized Probe
  source 1..80: mol_type = other DNA
atacatcataatgtatcttatttaaatgcactcaccagaattgagtttttctggtcaactatccaagctggcagggcaat

SEQ ID NO: 117985 - DNA, 80 bp, synthetic construct
  misc_feature 1..80: note = Artificially Synthesized Probe
  source 1..80: mol_type = other DNA
gcccccattacacaaaagttcagggatatagtttatatctgaaacttcaaatttttcaaggaaaaagaaaccctgtaagt

SEQ ID NO: 117986 - DNA, 80 bp, synthetic construct; identical to SEQ ID NO: 38485
  misc_feature 1..80: note = Artificially Synthesized Probe
  source 1..80: mol_type = other DNA

SEQ ID NO: 117987 - DNA, 80 bp, synthetic construct
  misc_feature 1..80: note = Artificially Synthesized Probe
  source 1..80: mol_type = other DNA
ctctatggatcaacttaaattatatctttcaaactagtctttagaaagaaaaataaagcaaaaattaatgagagctcaat

SEQ ID NO: 117988 - DNA, 80 bp, synthetic construct; identical to SEQ ID NO: 38529
  misc_feature 1..80: note = Artificially Synthesized Probe
  source 1..80: mol_type = other DNA

SEQ ID NO: 117989 - DNA, 80 bp, synthetic construct
  misc_feature 1..80: note = Artificially Synthesized Probe
  source 1..80: mol_type = other DNA
ttcctggttggcccatggttctcaagcttaaccagttctcatgttcaaccagatggttctcagttcaaccagatcaaact

SEQ ID NO: 117990 - DNA, 80 bp, synthetic construct
  misc_feature 1..80: note = Artificially Synthesized Probe
  source 1..80: mol_type = other DNA
tagcttccccacaaaacaatagcaccacattctgaaagaaacagatgaccaccacatgtaaaactccattgctgtgggta

SEQ ID NO: 117991 - DNA, 80 bp, synthetic construct; identical to SEQ ID NO: 38530
  misc_feature 1..80: note = Artificially Synthesized Probe
  source 1..80: mol_type = other DNA

SEQ ID NO: 117992 - DNA, 80 bp, synthetic construct
  misc_feature 1..80: note = Artificially Synthesized Probe
  source 1..80: mol_type = other DNA
gatcttccatatggtcaaatctaattttaaccgtacttctacttctcaaaacttaagaggcaatgtagtttctatttaac

SEQ ID NO: 117993 - DNA, 80 bp, synthetic construct
  misc_feature 1..80: note = Artificially Synthesized Probe
  source 1..80: mol_type = other DNA
tccacttacactatttgatgaaaggccacagaaaaatacaggagccaataaaaagcattactagacaggttgcaagataa

SEQ ID NO: 117994 - DNA, 80 bp, synthetic construct
  misc_feature 1..80: note = Artificially Synthesized Probe
  source 1..80: mol_type = other DNA
gtccccttctgcctttgtgattatgcaaaacaaactgctctgtcctctatacaatactcccagattttgccaaataaagc

SEQ ID NO: 117995 - DNA, 80 bp, synthetic construct
  misc_feature 1..80: note = Artificially Synthesized Probe
  source 1..80: mol_type = other DNA
taagaagcaaatgaatttttgttacttagcatttcagtataataccacttctaagagttaaagtacttaaaagctgcgta

SEQ ID NO: 117996 - DNA, 80 bp, synthetic construct; identical to SEQ ID NO: 38531
  misc_feature 1..80: note = Artificially Synthesized Probe
  source 1..80: mol_type = other DNA

SEQ ID NO: 117997 - DNA, 80 bp, synthetic construct
  misc_feature 1..80: note = Artificially Synthesized Probe
  source 1..80: mol_type = other DNA
ttctaaagaaaaaagaacccatttgctgaggccttataaagttacagcacattaaaatgcatccctaaagtaatttatat

SEQ ID NO: 117998 - DNA, 80 bp, synthetic construct
  misc_feature 1..80: note = Artificially Synthesized Probe
  source 1..80: mol_type = other DNA
aacatatctttaaggtgacaacaacgctgcccacttgctatacaatagctttaaagacaggttttacatctgagagcaaa

SEQ ID NO: 117999 - DNA, 80 bp, synthetic construct
  misc_feature 1..80: note = Artificially Synthesized Probe
  source 1..80: mol_type = other DNA
taaaaaactttgcacatcaaagcctatataactgcattccaaggctgctagagttattcatgagataggaacttcaactc

SEQ ID NO: 118000 - DNA, 80 bp, synthetic construct
  misc_feature 1..80: note = Artificially Synthesized Probe
  source 1..80: mol_type = other DNA
ttaaaggaaaggatgatgatttgttgtttttgttttttttccaaaaaaacccaacaggctgggcgcagtggctcatgcct

SEQ ID NO: 118001 - DNA, 80 bp, synthetic construct
  misc_feature 1..80: note = Artificially Synthesized Probe
  source 1..80: mol_type = other DNA
gttctaggtcccacgatcacttcactttttcattggtcttacagaacgtcaactatttaagacattttatacataaaata

SEQ ID NO: 118002 - DNA, 80 bp, synthetic construct; identical to SEQ ID NO: 38532
  misc_feature 1..80: note = Artificially Synthesized Probe
  source 1..80: mol_type = other DNA

SEQ ID NO: 118003 - DNA, 80 bp, synthetic construct
  misc_feature 1..80: note = Artificially Synthesized Probe
  source 1..80: mol_type = other DNA
actgaaagacagtaacctcaaggacaactgctacgcagaaaatgtagtacacacttcaaaagtcctaatggcactgcttt

SEQ ID NO: 118004 - DNA, 80 bp, synthetic construct
  misc_feature 1..80: note = Artificially Synthesized Probe
  source 1..80: mol_type = other DNA
aacttagtatgctattgcaagcaaacttcttattgcactttgcagataatcgtgtttttctgccatttgtgttaaccctg

SEQ ID NO: 118005 - DNA, 80 bp, synthetic construct; identical to SEQ ID NO: 38533
  misc_feature 1..80: note = Artificially Synthesized Probe
  source 1..80: mol_type = other DNA

SEQ ID NO: 118006 - DNA, 80 bp, synthetic construct
  misc_feature 1..80: note = Artificially Synthesized Probe
  source 1..80: mol_type = other DNA
gacacacaagattcaaattgggcaaattactaaccctaaaatggcctctgttgggagcaagcccccacaaaatctggcca

SEQ ID NO: 118007 - DNA, 80 bp, synthetic construct
  misc_feature 1..80: note = Artificially Synthesized Probe
  source 1..80: mol_type = other DNA
ccacaaacaacagcatgagcgatttgtaccttaaggacatgctcctgctgcagttaactagcccaacctattcctttaat

SEQ ID NO: 118008 - DNA, 80 bp, synthetic construct
  misc_feature 1..80: note = Artificially Synthesized Probe
  source 1..80: mol_type = other DNA
cagctctgaaggctgtgagacccctaatttcccacttcacacctctctatttctgtatgtgtgtctttaattcctctagg

SEQ ID NO: 118009 - DNA, 80 bp, synthetic construct
  misc_feature 1..80: note = Artificially Synthesized Probe
  source 1..80: mol_type = other DNA
cctcttgtgccagacagtcaagttgtgaattcagagcaacagcgcttaaaggaacttaaaagtgaacacacaaataataa

SEQ ID NO: 118010 - DNA, 80 bp, synthetic construct
  misc_feature 1..80: note = Artificially Synthesized Probe
  source 1..80: mol_type = other DNA
acatttatacagaaaactcttatttattgaagagtcactattcttaccttcaatggtttaatctgatccaaacccatata

SEQ ID NO: 118011 - DNA, 80 bp, synthetic construct; identical to SEQ ID NO: 38534
  misc_feature 1..80: note = Artificially Synthesized Probe
  source 1..80: mol_type = other DNA

SEQ ID NO: 118012 - DNA, 80 bp, synthetic construct
  misc_feature 1..80: note = Artificially Synthesized Probe
  source 1..80: mol_type = other DNA
tgactttcttggtaggggctaacgttgctggcgactttaacttgaagccaatgctggtgtgccattccaaaagtcctaga

SEQ ID NO: 118013 - DNA, 80 bp, synthetic construct
  misc_feature 1..80: note = Artificially Synthesized Probe
  source 1..80: mol_type = other DNA
gctcattgacaacgcacgtggtcactcaagaactctgatggagctgtacaaacagattaatgttttcacacctgctaaca

SEQ ID NO: 118014 - DNA, 80 bp, synthetic construct; identical to SEQ ID NO: 38535
  misc_feature 1..80: note = Artificially Synthesized Probe
  source 1..80: mol_type = other DNA

SEQ ID NO: 118015 - DNA, 80 bp, synthetic construct
  misc_feature 1..80: note = Artificially Synthesized Probe
  source 1..80: mol_type = other DNA
gatacctctgatggatctgggtaaagtaaattgaaaaccttctggaaaggattcactattctaaatgccattaagaacat

SEQ ID NO: 118016 - DNA, 80 bp, synthetic construct
  misc_feature 1..80: note = Artificially Synthesized Probe
  source 1..80: mol_type = other DNA
cccaggttcaagtgagtctcctgcctcagcctctcaagtagctgggattacaggcatgccccaccacacccggctaagtt

SEQ ID NO: 118017 - DNA, 80 bp, synthetic construct
  misc_feature 1..80: note = Artificially Synthesized Probe
  source 1..80: mol_type = other DNA
tggagcagttcaagacttcagtagagaaagtcactacagatgtgctagaaatagcaggagaactaaacaagtggaacctg

SEQ ID NO: 118018 - DNA, 80 bp, synthetic construct; identical to SEQ ID NO: 38536
  misc_feature 1..80: note = Artificially Synthesized Probe
  source 1..80: mol_type = other DNA

SEQ ID NO: 118019 - DNA, 80 bp, synthetic construct
  misc_feature 1..80: note = Artificially Synthesized Probe
  source 1..80: mol_type = other DNA
ctgaggcaggagaatggcgtgaacccgggaggcggaagttgcagtgagccaagatcgcgccactccactccagcctgggc

SEQ ID NO: 118020 - DNA, 80 bp, synthetic construct
  misc_feature 1..80: note = Artificially Synthesized Probe
  source 1..80: mol_type = other DNA
agctcactccctaaaattcctagaccacagtatttaacagccaggttttttctgcagatgatacagaaagtcctaataaa

SEQ ID NO: 118021 - DNA, 80 bp, synthetic construct
  misc_feature 1..80: note = Artificially Synthesized Probe
  source 1..80: mol_type = other DNA
tcacagccagcccaaccttcagtaaccactatcctgatcagtcaacagccatcaacatcaaggcaagaccctccaccagc

SEQ ID NO: 118022 - DNA, 80 bp, synthetic construct
  misc_feature 1..80: note = Artificially Synthesized Probe
  source 1..80: mol_type = other DNA
atcacgacgtcaggaaatcgagaccatcctggctaacatggtaaaaccccatctctgctaaaaatacaaaaaaacattag

SEQ ID NO: 118023 - DNA, 80 bp, synthetic construct
  misc_feature 1..80: note = Artificially Synthesized Probe
  source 1..80: mol_type = other DNA
aaaaaaaaaagacataaggctactgcacgcttaatagactatggtgtagtataaacaacttttatatgcagtaggaaaca

SEQ ID NO: 118024 - DNA, 80 bp, synthetic construct; identical to SEQ ID NO: 38537
  misc_feature 1..80: note = Artificially Synthesized Probe
  source 1..80: mol_type = other DNA

SEQ ID NO: 118025 - DNA, 80 bp, synthetic construct
  misc_feature 1..80: note = Artificially Synthesized Probe
  source 1..80: mol_type = other DNA
caccttacctaaggcataagaccaacaaggaaaattatttggaagttctgaaaagatttgtgaagacagtttctgagcag

SEQ ID NO: 118026 - DNA, 80 bp, synthetic construct
  misc_feature 1..80: note = Artificially Synthesized Probe
  source 1..80: mol_type = other DNA
tacacattgccaaaacaagagaaacagatcaagcctaaaaaaaaaaaatctagaaatggtaagatctaagtataccctcc

SEQ ID NO: 118027 - DNA, 80 bp, synthetic construct
  misc_feature 1..80: note = Artificially Synthesized Probe
  source 1..80: mol_type = other DNA
gtagcccctaaatgatagactcaacatgaagtaagcacttggaaaaagtgtatgacaactattttaatattttattaaaa

SEQ ID NO: 118028 - DNA, 80 bp, synthetic construct; identical to SEQ ID NO: 38538
  misc_feature 1..80: note = Artificially Synthesized Probe
  source 1..80: mol_type = other DNA

SEQ ID NO: 118029 - DNA, 80 bp, synthetic construct
  misc_feature 1..80: note = Artificially Synthesized Probe
  source 1..80: mol_type = other DNA
tcctttatctggatgatatttaagtgacagcaaacgatattgttttttaatttctgctactgtggctccctggggaaaaa

SEQ ID NO: 118030 - DNA, 80 bp, synthetic construct
  misc_feature 1..80: note = Artificially Synthesized Probe
  source 1..80: mol_type = other DNA
tattaaataaaaacacttatattgtccaatatatgtattttattgagcacctactatgtgccacatagtaaactaagcac

SEQ ID NO: 118031 - DNA, 80 bp, synthetic construct
  misc_feature 1..80: note = Artificially Synthesized Probe
  source 1..80: mol_type = other DNA
ctatcatcttgaagaaattaagcaggtataaaagcataagtaaatgaaatgttggaataaaacaacagacttcactagat

SEQ ID NO: 118032 - DNA, 80 bp, synthetic construct
  misc_feature 1..80: note = Artificially Synthesized Probe
  source 1..80: mol_type = other DNA
tatagtgaaaccccaactctactaaaaaatacaaaaattagctcgtgtggtgatgcacacctgtagtcccagctacttgg

SEQ ID NO: 118033 - DNA, 80 bp, synthetic construct; identical to SEQ ID NO: 38539
  misc_feature 1..80: note = Artificially Synthesized Probe
  source 1..80: mol_type = other DNA

SEQ ID NO: 118034 - DNA, 80 bp, synthetic construct
  misc_feature 1..80: note = Artificially Synthesized Probe
  source 1..80: mol_type = other DNA
aaactagatgatacacaccctccttagtttgtattatatgaatgtctggatcaagccatctactgagcaaagactcaaag

SEQ ID NO: 118035 - DNA, 80 bp, synthetic construct
  misc_feature 1..80: note = Artificially Synthesized Probe
  source 1..80: mol_type = other DNA
agattgagcttggctactaagtaagaagcttggaaccccagacaagacacaaattatccaggcctcattttctttaaaaa

SEQ ID NO: 118036 - DNA, 80 bp, synthetic construct
  misc_feature 1..80: note = Artificially Synthesized Probe
  source 1..80: mol_type = other DNA
tttgagacagtcttgctctgtcgcccaggctggagtgcagtggtgcaatcacagctcgctgcagccttgacttcccaagt

SEQ ID NO: 118037 - DNA, 80 bp, synthetic construct; identical to SEQ ID NO: 38540
  misc_feature 1..80: note = Artificially Synthesized Probe
  source 1..80: mol_type = other DNA

SEQ ID NO: 118038 - DNA, 80 bp, synthetic construct
  misc_feature 1..80: note = Artificially Synthesized Probe
  source 1..80: mol_type = other DNA
tggcctcccaagtagctaggactataggtgtgttgctatcacacccaggtaattttttttttttttttttgatacagcct

SEQ ID NO: 118039 - DNA, 80 bp, synthetic construct
  misc_feature 1..80: note = Artificially Synthesized Probe
  source 1..80: mol_type = other DNA
caaggtcataagatttttatcattcaactaacacaaattatcctcccagttttaactttgcattaaccaatattacagat

SEQ ID NO: 118040 - DNA, 80 bp, synthetic construct; identical to SEQ ID NO: 38541
  misc_feature 1..80: note = Artificially Synthesized Probe
  source 1..80: mol_type = other DNA

SEQ ID NO: 118041 - DNA, 80 bp, synthetic construct
  misc_feature 1..80: note = Artificially Synthesized Probe
  source 1..80: mol_type = other DNA
aaggtcaggagatcgagaccatcctggctaacatggtgaaaccccgtttctactaaaaatacaaaaaattagacaggcgt

SEQ ID NO: 118042 - DNA, 80 bp, synthetic construct; identical to SEQ ID NO: 38486
  misc_feature 1..80: note = Artificially Synthesized Probe
  source 1..80: mol_type = other DNA

SEQ ID NO: 118043 - DNA, 80 bp, synthetic construct
  misc_feature 1..80: note = Artificially Synthesized Probe
  source 1..80: mol_type = other DNA
tcttatattttagcaattgaaaaccaattattaataacataacaatcaacagttatagcttaaattataataacagagga

SEQ ID NO: 118044 - DNA, 80 bp, synthetic construct
  misc_feature 1..80: note = Artificially Synthesized Probe
  source 1..80: mol_type = other DNA
aaggattgtattcttggtattctcggtctgttttggaaactttatatgcaaggaataagaacaatgcccatcctgcaagc

SEQ ID NO: 118045 - DNA, 80 bp, synthetic construct; identical to SEQ ID NO: 38542
  misc_feature 1..80: note = Artificially Synthesized Probe
  source 1..80: mol_type = other DNA

SEQ ID NO: 118046 - DNA, 80 bp, synthetic construct
  misc_feature 1..80: note = Artificially Synthesized Probe
  source 1..80: mol_type = other DNA
gaaaaacaattggtcaattgtgcaaaaataaatacatagccttgtttatagtagtaaaactttggaaacaacctaaatta

SEQ ID NO: 118047 - DNA, 80 bp, synthetic construct
  misc_feature 1..80: note = Artificially Synthesized Probe
  source 1..80: mol_type = other DNA
aaactaatttctgctccctccaatgtgttctagtgagtaaaattatgtaaaagattaacattaccagcactggagaggtt

SEQ ID NO: 118048 - DNA, 80 bp, synthetic construct
  misc_feature 1..80: note = Artificially Synthesized Probe
  source 1..80: mol_type = other DNA
aagagaaagtatttcactgtagagatgtatcattagttcatttgtacatttgattaacttttttttttagacggagtctc

SEQ ID NO: 118049 - DNA, 80 bp, synthetic construct
  misc_feature 1..80: note = Artificially Synthesized Probe
  source 1..80: mol_type = other DNA
ctcctgacctcaagtgatccgctcgcctcagcctcccaaagtgctggaattacaggggtgagcgactgcgcccagcctct

SEQ ID NO: 118050 - DNA, 80 bp, synthetic construct; identical to SEQ ID NO: 38543
  misc_feature 1..80: note = Artificially Synthesized Probe
  source 1..80: mol_type = other DNA

SEQ ID NO: 118051 - DNA, 80 bp, synthetic construct
  misc_feature 1..80: note = Artificially Synthesized Probe
  source 1..80: mol_type = other DNA
gagccaccgcggccagcctacaacagcaaacttttttttaacactttttaaacccaaaatttggtaatagcctcaatatg

SEQ ID NO: 118052 - DNA, 80 bp, synthetic construct
  misc_feature 1..80: note = Artificially Synthesized Probe
  source 1..80: mol_type = other DNA
aaggcaaaaggaacaaaacacctaggatatgctaaaccgtatgttttacatggagcatccagttctccaagccaaggaat

SEQ ID NO: 118053 - DNA, 80 bp, synthetic construct; identical to SEQ ID NO: 38544
  misc_feature 1..80: note = Artificially Synthesized Probe
  source 1..80: mol_type = other DNA

SEQ ID NO: 118054 - DNA, 80 bp, synthetic construct
  misc_feature 1..80: note = Artificially Synthesized Probe
  source 1..80: mol_type = other DNA
ataaacaaataggtatttatatttctatctggtagaaacaaccagaatagtacaacaaactggggagaaatacttgcaac

SEQ ID NO: 118055 - DNA, 80 bp, synthetic construct
  misc_feature 1..80: note = Artificially Synthesized Probe
  source 1..80: mol_type = other DNA
caagcaattctcctgcctcagcctccggagtagctgggaccacaggcacgcaccaccatgcctggctaattttttgtatt

SEQ ID NO: 118056 - DNA, 80 bp, synthetic construct
  misc_feature 1..80: note = Artificially Synthesized Probe
  source 1..80: mol_type = other DNA
cagcctgaagggtcatctttagaagcaacttccaaaaattacatgccttagtttcgcacatgtgtcagaaaagaagcatt

SEQ ID NO: 118057 - DNA, 80 bp, synthetic construct
  misc_feature 1..80: note = Artificially Synthesized Probe
  source 1..80: mol_type = other DNA
aagcttcataaaagtttttttccttgaaaacaggttcagatacccacaaagtgttgaacaaagccagataagagactggg

SEQ ID NO: 118058 - DNA, 80 bp, synthetic construct
  misc_feature 1..80: note = Artificially Synthesized Probe
  source 1..80: mol_type = other DNA
cctatatacatcctcccatgcacattagatcatctctaaattactgatattacctaatataatacacactgtggaaacag

SEQ ID NO: 118059 - DNA, 80 bp, synthetic construct; identical to SEQ ID NO: 38545
  misc_feature 1..80: note = Artificially Synthesized Probe
  source 1..80: mol_type = other DNA

SEQ ID NO: 118060 - DNA, 80 bp, synthetic construct
  misc_feature 1..80: note = Artificially Synthesized Probe
  source 1..80: mol_type = other DNA
tggaggccgaggcaggcagaccacttgagcccaagagttcgagaccagcctggggaacatggtgaaaccccatccctata

SEQ ID NO: 118061 - DNA, 80 bp, synthetic construct
  misc_feature 1..80: note = Artificially Synthesized Probe
  source 1..80: mol_type = other DNA
tctgtctcaaaaaaaaaaaaaagaaaagaaaaataaactaaattaggtaaagtaaaaccttacaaagaaaaactaaacgc

SEQ ID NO: 118062 - DNA, 80 bp, synthetic construct; identical to SEQ ID NO: 38546
  misc_feature 1..80: note = Artificially Synthesized Probe
  source 1..80: mol_type = other DNA

SEQ ID NO: 118063 - DNA, 80 bp, synthetic construct
  misc_feature 1..80: note = Artificially Synthesized Probe
  source 1..80: mol_type = other DNA
caaaaccatctactttgaagttaatacagaattaaattagataacatataaagccctagcacagattctagcatacagta

SEQ ID NO: 118064 - DNA, 80 bp, synthetic construct
  misc_feature 1..80: note = Artificially Synthesized Probe
  source 1..80: mol_type = other DNA
tacccccgacctccagcaacagtatactccccttcctttgaacttctaaaccaatctgttcagactgttcccacattttc

SEQ ID NO: 118065 - DNA, 80 bp, synthetic construct
  misc_feature 1..80: note = Artificially Synthesized Probe
  source 1..80: mol_type = other DNA
ctgaatagaatgagcagagtaaaaattgattcagaaaagaatcatcaacatatgtttaaaacgattgggtaaaacactgt

SEQ ID NO: 118066 - DNA, 80 bp, synthetic construct
  misc_feature 1..80: note = Artificially Synthesized Probe
  source 1..80: mol_type = other DNA
gggttttaataaccgtaaacgataccacatacaccttccatatacttttctgatattctttaatcgaatttgctctgtca

SEQ ID NO: 118067 - DNA, 80 bp, synthetic construct; identical to SEQ ID NO: 38547
  misc_feature 1..80: note = Artificially Synthesized Probe
  source 1..80: mol_type = other DNA

SEQ ID NO: 118068 - DNA, 80 bp, synthetic construct
  misc_feature 1..80: note = Artificially Synthesized Probe
  source 1..80: mol_type = other DNA
caaacacaaaaataaatgcctatcaaaatgtcttctaatcaacaaagtttagatctcatctatttaagatataaaactag

SEQ ID NO: 118069 - DNA, 80 bp, synthetic construct
  misc_feature 1..80: note = Artificially Synthesized Probe
  source 1..80: mol_type = other DNA
ttgcaaagtattcttttttttttttttttttttttttgtagaaactgggtcttgctatgttgccaaggctggtctcaaac

SEQ ID NO: 118070 - DNA, 80 bp, synthetic construct
  misc_feature 1..80: note = Artificially Synthesized Probe
  source 1..80: mol_type = other DNA
aggagttcgagaccagcctcaacatggagaaaccctgtctctaccaaaaatacaaaattagccaggcgtggtggtgcatg

SEQ ID NO: 118071 - DNA, 80 bp, synthetic construct; identical to SEQ ID NO: 38548
  misc_feature 1..80: note = Artificially Synthesized Probe
  source 1..80: mol_type = other DNA

SEQ ID NO: 118072 - DNA, 80 bp, synthetic construct
  misc_feature 1..80: note = Artificially Synthesized Probe
  source 1..80: mol_type = other DNA
gctactcaggaggctgaggcacaagaatcacttgaacccaggaggcagaggttgcagtgagctgagatccctccagcctg

SEQ ID NO: 118073 - DNA, 80 bp, synthetic construct
  misc_feature 1..80: note = Artificially Synthesized Probe
  source 1..80: mol_type = other DNA
aattcgagaccagccagttcaagaccagcctggccaacatggtgaaactccatctctactaaaaatacaaaattagccag

SEQ ID NO: 118074 - DNA, 80 bp, synthetic construct
  misc_feature 1..80: note = Artificially Synthesized Probe
  source 1..80: mol_type = other DNA
tattattttaatcctcatgaaaaacttgcagctcaattaaaaagaaattaagcccaagcaaaaatagtatgtattgtttt

SEQ ID NO: 118075 - DNA, 80 bp, synthetic construct
  misc_feature 1..80: note = Artificially Synthesized Probe
  source 1..80: mol_type = other DNA
aacacagtgaaaccctctctctactaaaaagacaaataattagccaggcgtggtggcacgtgcctgtagtcccagctact

SEQ ID NO: 118076 - DNA, 80 bp, synthetic construct; identical to SEQ ID NO: 38549
  misc_feature 1..80: note = Artificially Synthesized Probe
  source 1..80: mol_type = other DNA

SEQ ID NO: 118077 - DNA, 80 bp, synthetic construct; identical to SEQ ID NO: 38487
  misc_feature 1..80: note = Artificially Synthesized Probe
  source 1..80: mol_type = other DNA

SEQ ID NO: 118078 - DNA, 80 bp, synthetic construct
  misc_feature 1..80: note = Artificially Synthesized Probe
  source 1..80: mol_type = other DNA
ggcagttcaaatgtcctaggaagaacacccccacaaaaaacaagctttatcattatgccattatcaagttccccttgacc

SEQ ID NO: 118079 - DNA, 80 bp, synthetic construct
  misc_feature 1..80: note = Artificially Synthesized Probe
  source 1..80: mol_type = other DNA
tcatcaggtctgatggagagaagaaggtgtatgttcaactggctcgtaacttaacgatgttttgaatgctgccaacacaa

SEQ ID NO: 118080 - DNA, 80 bp, synthetic construct; identical to SEQ ID NO: 38550
  misc_feature 1..80: note = Artificially Synthesized Probe
  source 1..80: mol_type = other DNA

SEQ ID NO: 118081 - DNA, 80 bp, synthetic construct
  misc_feature 1..80: note = Artificially Synthesized Probe
  source 1..80: mol_type = other DNA
gaaaaaggagtgaaaaaatagaaaacaagaatgaaccctgtactgttggactggaattaaaaatatcactacgaatgaat

SEQ ID NO: 118082 - DNA, 80 bp, synthetic construct
  misc_feature 1..80: note = Artificially Synthesized Probe
  source 1..80: mol_type = other DNA
ccaggaatccaagtatcctcccacaaaatactaattacaaaggggaaacgaatgactttgcagtggggtaggctgaataa

SEQ ID NO: 118083 - DNA, 80 bp, synthetic construct
  misc_feature 1..80: note = Artificially Synthesized Probe
  source 1..80: mol_type = other DNA
gaagggtcaaagacagatggtaatgtgacaacggaagcagatgctggactaatgccctttttaaagatgaaggaagggcc

SEQ ID NO: 118084 - DNA, 80 bp, synthetic construct
  misc_feature 1..80: note = Artificially Synthesized Probe
  source 1..80: mol_type = other DNA
gattttggacttctggcctccagaattattaagagaacaaatttgtgctgttttaaaccaatgagtttgtagtaatttgt

SEQ ID NO: 118085 - DNA, 80 bp, synthetic construct; identical to SEQ ID NO: 38551
  misc_feature 1..80: note = Artificially Synthesized Probe
  source 1..80: mol_type = other DNA

SEQ ID NO: 118086 - DNA, 80 bp, synthetic construct
  misc_feature 1..80: note = Artificially Synthesized Probe
  source 1..80: mol_type = other DNA
gcccacggtctccctctccctctctttccacggtctccctctgatgtctagccgaagctggactgtactgctgccatctt

SEQ ID NO: 118087 - DNA, 80 bp, synthetic construct
  misc_feature 1..80: note = Artificially Synthesized Probe
  source 1..80: mol_type = other DNA
gatccgccagcctcggcctcccgaggtgccgggtttgcagacggagtctggttcactcagtgctcaatggtgcccaggct

SEQ ID NO: 118088 - DNA, 80 bp, synthetic construct
  misc_feature 1..80: note = Artificially Synthesized Probe
  source 1..80: mol_type = other DNA
tggctaacacagtgaaaccccgtctctactaaaaaaatataaaaaattagctgggtgcagtggcgggcgtctgtaatccc

SEQ ID NO: 118089 - DNA, 80 bp, synthetic construct; identical to SEQ ID NO: 38552
  misc_feature 1..80: note = Artificially Synthesized Probe
  source 1..80: mol_type = other DNA

SEQ ID NO: 118090 - DNA, 80 bp, synthetic construct
  misc_feature 1..80: note = Artificially Synthesized Probe
  source 1..80: mol_type = other DNA
ccgcgaccccgtctgggaggtgaggagcgtctctgcccggccgctccatctgagaagtgaggagcccctccgcccggcag

SEQ ID NO: 118091 - DNA, 80 bp, synthetic construct
  misc_feature 1..80: note = Artificially Synthesized Probe
  source 1..80: mol_type = other DNA
ccccctgcccggccagccgccccgtccggcagggaggtggggggggtcagccccccgcccggccagccaccccgtccggg

SEQ ID NO: 118092 - DNA, 80 bp, synthetic construct
  misc_feature 1..80: note = Artificially Synthesized Probe
  source 1..80: mol_type = other DNA
ccaccccgtccaggagggaggtgggggggtcagccccctgcccggccagccgccccgtccggcagggaggtgggggggtc

SEQ ID NO: 118093 - DNA, 80 bp, synthetic construct
  misc_feature 1..80: note = Artificially Synthesized Probe
  source 1..80: mol_type = other DNA
gggaggtgggggggtcagccccccgcccggccagccgcccgtctgggagatgaggggcgcctctgcccggccgcccctac

SEQ ID NO: 118094 - DNA, 80 bp, synthetic construct; identical to SEQ ID NO: 35880
  misc_feature 1..80: note = Artificially Synthesized Probe
  source 1..80: mol_type = other DNA

SEQ ID NO: 118095 - DNA, 80 bp, synthetic construct
  misc_feature 1..80: note = Artificially Synthesized Probe
  source 1..80: mol_type = other DNA
cacaaacactgcggaaggccgcagggtcctctgcctaggaaaaccagagacctttgttcacttgtttatctgctgacctt

SEQ ID NO: 118096 - DNA, 80 bp, synthetic construct
  misc_feature 1..80: note = Artificially Synthesized Probe
  source 1..80: mol_type = other DNA
ctgagaaagtgacaaaacccaaatggagtcagacgatgagatggcggtaatgttaattttctgattttcatggtttagag

SEQ ID NO: 118097 - DNA, 80 bp, synthetic construct
  misc_feature 1..80: note = Artificially Synthesized Probe
  source 1..80: mol_type = other DNA
atgctgaagtctctttatgaagcaggcagtttgatctattcaaaggtatgatgttctactgttcctggccaagagaaagt

SEQ ID NO: 118098 - DNA, 80 bp, synthetic construct; identical to SEQ ID NO: 38554
  misc_feature 1..80: note = Artificially Synthesized Probe
  source 1..80: mol_type = other DNA

SEQ ID NO: 118099 - DNA, 80 bp, synthetic construct
  misc_feature 1..80: note = Artificially Synthesized Probe
  source 1..80: mol_type = other DNA
tccacatttatagaaacaggaaatcctaagatcataaaacaatataaataatgtgtcataattgctgtcagcagccgaac

SEQ ID NO: 118100 - DNA, 80 bp, synthetic construct
  misc_feature 1..80: note = Artificially Synthesized Probe
  source 1..80: mol_type = other DNA
actaaagaggcatgacaaccaaatacaatgtaaaaatctctttttttctttctttcgagacatgtcactctgttgcccag

SEQ ID NO: 118101 - DNA, 80 bp, synthetic construct
  misc_feature 1..80: note = Artificially Synthesized Probe
  source 1..80: mol_type = other DNA
aaagaggtgaaggaacgttagccagatctaaagtcttcaaacctgtttgcctgcttaccacatagtatccaacagttttt

SEQ ID NO: 118102 - DNA, 80 bp, synthetic construct
  misc_feature 1..80: note = Artificially Synthesized Probe
  source 1..80: mol_type = other DNA
cctccagctgcatttatgtgctataaaggacatttcattctttttaatggctgtgtagtattctacagtgtatatgtacc

SEQ ID NO: 118103 - DNA, 80 bp, synthetic construct
  misc_feature 1..80: note = Artificially Synthesized Probe
  source 1..80: mol_type = other DNA
cccggctagctaattttgaatttttagtagagatagggtttctccatgttggtcaggctggtctcgaactcctgacctca

SEQ ID NO: 118104 - DNA, 80 bp, synthetic construct; identical to SEQ ID NO: 38555
  misc_feature 1..80: note = Artificially Synthesized Probe
  source 1..80: mol_type = other DNA

SEQ ID NO: 118105 - DNA, 80 bp, synthetic construct
  misc_feature 1..80: note = Artificially Synthesized Probe
  source 1..80: mol_type = other DNA
tttccctgtaacctccctagcatctgttttttgacttttttataatagccattctgactggtatgagatgatctctcact

SEQ ID NO: 118106 - DNA, 80 bp, synthetic construct
  misc_feature 1..80: note = Artificially Synthesized Probe
  source 1..80: mol_type = other DNA
tctggattagacctttgttggatgcataatttgtaaatattttctcttattctgtaggttgtctgtttactctgttgata

SEQ ID NO: 118107 - DNA, 80 bp, synthetic construct
  misc_feature 1..80: note = Artificially Synthesized Probe
  source 1..80: mol_type = other DNA
aaagctaaaaaccacagcaatttcatacccatcatcatccatttacaaaaatttatgaaaagtccttcattctacttctc

SEQ ID NO: 118108 - DNA, 80 bp, synthetic construct; identical to SEQ ID NO: 38556
  misc_feature 1..80: note = Artificially Synthesized Probe
  source 1..80: mol_type = other DNA

SEQ ID NO: 118109 - DNA, 80 bp, synthetic construct
  misc_feature 1..80: note = Artificially Synthesized Probe
  source 1..80: mol_type = other DNA
cacccaggctggagtgcaatggcgtgatctcagctcactgcaacctccaactcccaggttcaagcaatgcctcagcctcc

SEQ ID NO: 118110 - DNA, 80 bp, synthetic construct
  misc_feature 1..80: note = Artificially Synthesized Probe
  source 1..80: mol_type = other DNA
caccgcccacgcccagctagtcctagtaaatcctttcttataataccgaaatatgcttcttaaaattatttttttaattc

SEQ ID NO: 118111 - DNA, 80 bp, synthetic construct
  misc_feature 1..80: note = Artificially Synthesized Probe
  source 1..80: mol_type = other DNA
taaaaccaaaaactgtaacagacattagtggaatcgttgaggaaatctgaatacagactgcgtattagataattatgcca

SEQ ID NO: 118112 - DNA, 80 bp, synthetic construct
  misc_feature 1..80: note = Artificially Synthesized Probe
  source 1..80: mol_type = other DNA
aagtctagcctgggcaacacagggagaccttgtccctacagaaactttaaaaattacctgggagtggtggtacacaccta

SEQ ID NO: 118113 - DNA, 80 bp, synthetic construct; identical to SEQ ID NO: 38557
  misc_feature 1..80: note = Artificially Synthesized Probe
  source 1..80: mol_type = other DNA

SEQ ID NO: 118114 - DNA, 80 bp, synthetic construct
  misc_feature 1..80: note = Artificially Synthesized Probe
  source 1..80: mol_type = other DNA
ggccaacatggcaaaaccccatctctactaaaaatacaaaaattagacaggtgtgggtggtgagcacctgttactgggga

SEQ ID NO: 118115 - DNA, 80 bp, synthetic construct
  misc_feature 1..80: note = Artificially Synthesized Probe
  source 1..80: mol_type = other DNA
ttaaccgtggtttgtttgccagaatgtttcagaatataaaaggcatgaaaataacttggaagtgaaaaattgggaaatac

SEQ ID NO: 118116 - DNA, 80 bp, synthetic construct
  misc_feature 1..80: note = Artificially Synthesized Probe
  source 1..80: mol_type = other DNA
aggcagaagaatcgcttgaagctgggaggcggaggttgcagtgagctgagatcgtgccactgcactcctccagcctggag

SEQ ID NO: 118117 - DNA, 80 bp, synthetic construct; identical to SEQ ID NO: 38558
  misc_feature 1..80: note = Artificially Synthesized Probe
  source 1..80: mol_type = other DNA

SEQ ID NO: 118118 - DNA, 80 bp, synthetic construct
  misc_feature 1..80: note = Artificially Synthesized Probe
  source 1..80: mol_type = other DNA
ttctcaggaatgcctgaacaatctaagtgcaaaccaatacaaaccaagtagttcaaataaatcaagagctttgtcttcct

SEQ ID NO: 118119 - DNA, 80 bp, synthetic construct
  misc_feature 1..80: note = Artificially Synthesized Probe
  source 1..80: mol_type = other DNA
tttggactatacaattcttataattcaatgtttctgtgcattttaggatgtttagcagcatcgtgatctctacccactag

SEQ ID NO: 118120 - DNA, 80 bp, synthetic construct
  misc_feature 1..80: note = Artificially Synthesized Probe
  source 1..80: mol_type = other DNA
acacacacagctacagacggtacatgaaaagcaagttaaacgatatgacctacatatcaggaacacagggaaaagaaaga

SEQ ID NO: 118121 - DNA, 80 bp, synthetic construct
  misc_feature 1..80: note = Artificially Synthesized Probe
  source 1..80: mol_type = other DNA
ttcattattaatttactaaccaccctgttagctctgtcctcctatttttcttttagtcttaatcttatagtgataatcca

SEQ ID NO: 118122 - DNA, 80 bp, synthetic construct; identical to SEQ ID NO: 38559
  misc_feature 1..80: note = Artificially Synthesized Probe
  source 1..80: mol_type = other DNA

SEQ ID NO: 118123 - DNA, 80 bp, synthetic construct
  misc_feature 1..80: note = Artificially Synthesized Probe
  source 1..80: mol_type = other DNA
tccagctacatagtcctactacttagaagcttcctcaagaaggcagaggaatcagctccttgagcccaggagatccaggc

SEQ ID NO: 118124 - DNA, 80 bp, synthetic construct
  misc_feature 1..80: note = Artificially Synthesized Probe
  source 1..80: mol_type = other DNA
cccaaaatgctggaattacaggtgtaagccactgcacccagcccaaggccctggttcttaagggatacatgtcaagtagt

SEQ ID NO: 118125 - DNA, 80 bp, synthetic construct
  misc_feature 1..80: note = Artificially Synthesized Probe
  source 1..80: mol_type = other DNA
attgtagtatcctttttagttctatttaggaaaatatctggaaaagcaaaggagacaggagagttggcgaggttgaacgt

SEQ ID NO: 118126 - DNA, 80 bp, synthetic construct; identical to SEQ ID NO: 38560
  misc_feature 1..80: note = Artificially Synthesized Probe
  source 1..80: mol_type = other DNA

SEQ ID NO: 118127 - DNA, 80 bp, synthetic construct
  misc_feature 1..80: note = Artificially Synthesized Probe
  source 1..80: mol_type = other DNA
accacaatatacctaccattctataattagatatataaaatgtttctaatttcttggtattgtggatctctttggtcctg

SEQ ID NO: 118128 - DNA, 80 bp, synthetic construct
  misc_feature 1..80: note = Artificially Synthesized Probe
  source 1..80: mol_type = other DNA
ttaaagccgatttgattcctctgtactgaagttcaagggcagagactgtatcttacccacagtgttcacccctcctcttt

SEQ ID NO: 118129 - DNA, 80 bp, synthetic construct
  misc_feature 1..80: note = Artificially Synthesized Probe
  source 1..80: mol_type = other DNA
ccatagcaataaacaaagtaaattatatagtacagttaacccttgaacaacgttggggttaggggccctgtccccacccc

SEQ ID NO: 118130 - DNA, 80 bp, synthetic construct
  misc_feature 1..80: note = Artificially Synthesized Probe
  source 1..80: mol_type = other DNA
agacaatgttaagaaaatcataaggaagagaaaatatatttacagtactgttattaataccttaagtttatgtcacctgt

SEQ ID NO: 118131 - DNA, 80 bp, synthetic construct; identical to SEQ ID NO: 38561
  misc_feature 1..80: note = Artificially Synthesized Probe
  source 1..80: mol_type = other DNA

SEQ ID NO: 118132 - DNA, 80 bp, synthetic construct
  misc_feature 1..80: note = Artificially Synthesized Probe
  source 1..80: mol_type = other DNA
tatgatttaatactacatttctctcaactgcaaatggctccatgtcctgtctatagtgtttgtgtgaataagttttgata

SEQ ID NO: 118133 - DNA, 80 bp, synthetic construct; identical to SEQ ID NO: 38488
  misc_feature 1..80: note = Artificially Synthesized Probe
  source 1..80: mol_type = other DNA

SEQ ID NO: 118134 - DNA, 80 bp, synthetic construct
  misc_feature 1..80: note = Artificially Synthesized Probe
  source 1..80: mol_type = other DNA
tacaagtctccaaaaagttttccaatatatttactgaaaaaaatccacgtataagtggacctacatagttcaaacccatg

SEQ ID NO: 118135 - DNA, 80 bp, synthetic construct; identical to SEQ ID NO: 38562
  misc_feature 1..80: note = Artificially Synthesized Probe
  source 1..80: mol_type = other DNA

SEQ ID NO: 118136 - DNA, 80 bp, synthetic construct
  misc_feature 1..80: note = Artificially Synthesized Probe
  source 1..80: mol_type = other DNA
atccctgaagagttctgagcagaactgtatgagctgacttctgttataaaggatccttgctaatattctgagaaaagact

SEQ ID NO: 118137 - DNA, 80 bp, synthetic construct
  misc_feature 1..80: note = Artificially Synthesized Probe
  source 1..80: mol_type = other DNA
gagccaaaagaacatactagtagtctgaaagtggagtatgagaaagagatgaatcaagagtaacttctaatccagtccac

SEQ ID NO: 118138 - DNA, 80 bp, synthetic construct
  misc_feature 1..80: note = Artificially Synthesized Probe
  source 1..80: mol_type = other DNA
gaggggaggggaagaaagtaatcctgtcaattttgtgcatattcatagaaagatctctattagatatccaagtggaaatg

SEQ ID NO: 118139 - DNA, 80 bp, synthetic construct; identical to SEQ ID NO: 38563
  misc_feature 1..80: note = Artificially Synthesized Probe
  source 1..80: mol_type = other DNA

SEQ ID NO: 118140 - DNA, 80 bp, synthetic construct
  misc_feature 1..80: note = Artificially Synthesized Probe
  source 1..80: mol_type = other DNA
attagtctaatcctaagcctgtcaccccacctgggttacaaattctaccaaaataagactatgtttatactgcattcatc

SEQ ID NO: 118141 - DNA, 80 bp, synthetic construct
  misc_feature 1..80: note = Artificially Synthesized Probe
  source 1..80: mol_type = other DNA
aggccgaggcgggcggatcacgaggtcaggagatcgagaccatcccggctaaaacggtgaaaccccgtctctactaaaaa

SEQ ID NO: 118142 - DNA, 80 bp, synthetic construct
  misc_feature 1..80: note = Artificially Synthesized Probe
  source 1..80: mol_type = other DNA
tgcactccagcctgggcaacagagcgagactccgtctcaaaaaaaaaaaaaaaaaatctaaagcaaaaaaagagttggaa

SEQ ID NO: 118143 - DNA, 80 bp, synthetic construct
  misc_feature 1..80: note = Artificially Synthesized Probe
  source 1..80: mol_type = other DNA
accctgtctctacaaaaaatacaaaaattagccgggcgtggctaatttttacggggtgcacgtatgtagtcccagctatt

SEQ ID NO: 118144 - DNA, 80 bp, synthetic construct
  misc_feature 1..80: note = Artificially Synthesized Probe
  source 1..80: mol_type = other DNA
ggttcaatcaattctcctgcctcagcctcccgagcagctgggactaaaggtgcacaccactacgcccagctaatttttgt

SEQ ID NO: 118145 - DNA, 80 bp, synthetic construct; identical to SEQ ID NO: 38564
  misc_feature 1..80: note = Artificially Synthesized Probe
  source 1..80: mol_type = other DNA

SEQ ID NO: 118146 - DNA, 80 bp, synthetic construct
  misc_feature 1..80: note = Artificially Synthesized Probe
  source 1..80: mol_type = other DNA
ggcatctaagaaaagaaaataagcctatctttatcaggtcctcccaagatcaagcagatatgcaacaagatgtttaaata

SEQ ID NO: 118147 - DNA, 80 bp, synthetic construct
  misc_feature 1..80: note = Artificially Synthesized Probe
  source 1..80: mol_type = other DNA
attctcctgcctcagcctcccgagtagctgggactacaagcgtgtaccaccatgcccagctaatttttgtatttttagta

SEQ ID NO: 118148 - DNA, 80 bp, synthetic construct
  misc_feature 1..80: note = Artificially Synthesized Probe
  source 1..80: mol_type = other DNA
agagtgcagtggcacaatctctgctcactgcatcctccacctcccgggtccaagcaattctcctgcctcagcctctcgag

SEQ ID NO: 118149 - DNA, 80 bp, synthetic construct; identical to SEQ ID NO: 38565
  misc_feature 1..80: note = Artificially Synthesized Probe
  source 1..80: mol_type = other DNA

SEQ ID NO: 118150 - DNA, 80 bp, synthetic construct
  misc_feature 1..80: note = Artificially Synthesized Probe
  source 1..80: mol_type = other DNA
tgggaggctgaggcgggcggatcatctgaggtcaggagttcaagaccagcctggccaacatggaaaaaccccgtctctac

SEQ ID NO: 118151 - DNA, 80 bp, synthetic construct
  misc_feature 1..80: note = Artificially Synthesized Probe
  source 1..80: mol_type = other DNA
ctcaaaccaaacatcaaccataagctctaaatatgaacattaagacatatccctttgaatacaaagctgatacaagctag

SEQ ID NO: 118152 - DNA, 80 bp, synthetic construct
  misc_feature 1..80: note = Artificially Synthesized Probe
  source 1..80: mol_type = other DNA
atgatggcgcacctgtagtcccagctacttggaggctgtggtgggaggatcacttgagcctgggaggcagaggttgcagt

SEQ ID NO: 118153 - DNA, 80 bp, synthetic construct; identical to SEQ ID NO: 38566
  misc_feature 1..80: note = Artificially Synthesized Probe
  source 1..80: mol_type = other DNA

SEQ ID NO: 118154 - DNA, 80 bp, synthetic construct
  misc_feature 1..80: note = Artificially Synthesized Probe
  source 1..80: mol_type = other DNA
aataacatgaagatctaagatgctatttttcacctttccaactagcaatgatattcaaaatgtctgacatgctgagaggt

SEQ ID NO: 118155 - DNA, 80 bp, synthetic construct
  misc_feature 1..80: note = Artificially Synthesized Probe
  source 1..80: mol_type = other DNA
ctgcacttaaatccccaaactgatcattgggccaatcaccaaaagctttcaagaggacaagaaataagtaatcctagaaa

SEQ ID NO: 118156 - DNA, 80 bp, synthetic construct
  misc_feature 1..80: note = Artificially Synthesized Probe
  source 1..80: mol_type = other DNA
gccatcaccaacctccccctccacccaccaaaccattctccacacaatattccacaaaagccaaactgaccatgttttat

SEQ ID NO: 118157 - DNA, 80 bp, synthetic construct
  misc_feature 1..80: note = Artificially Synthesized Probe
  source 1..80: mol_type = other DNA
atgcccttctcccacttaccttttaagacctatctcgtgtcacctcctctgcatgaaacacttccccaaatcccaaaata

SEQ ID NO: 118158 - DNA, 80 bp, synthetic construct; identical to SEQ ID NO: 38567
  misc_feature 1..80: note = Artificially Synthesized Probe
  source 1..80: mol_type = other DNA

SEQ ID NO: 118159 - DNA, 80 bp, synthetic construct
  misc_feature 1..80: note = Artificially Synthesized Probe
  source 1..80: mol_type = other DNA
aaattacgaaggctgttggtcaattttagttccttggtttgtacctccatgttggggctcagtgatacccaaaatatggc

SEQ ID NO: 118160 - DNA, 80 bp, synthetic construct
  misc_feature 1..80: note = Artificially Synthesized Probe
  source 1..80: mol_type = other DNA
accacacctaaacagacccttcacaagataatgtacaagttaatctctgttctctgatccattgtccctagcaatcctat

SEQ ID NO: 118161 - DNA, 80 bp, synthetic construct; identical to SEQ ID NO: 38568
  misc_feature 1..80: note = Artificially Synthesized Probe
  source 1..80: mol_type = other DNA

SEQ ID NO: 118162 - DNA, 80 bp, synthetic construct
  misc_feature 1..80: note = Artificially Synthesized Probe
  source 1..80: mol_type = other DNA
caatatttaggatgtttaatgtaatccccatggtaaccacacaaaaagtaactacagaatatactcaaaagaaaatgaga

SEQ ID NO: 118163 - DNA, 80 bp, synthetic construct
  misc_feature 1..80: note = Artificially Synthesized Probe
  source 1..80: mol_type = other DNA
acatttcactacaaaaaaaatcagctaaacaaaaaaatagtaatgcaggaaataaggaacaaaaggatatatgcctatag

SEQ ID NO: 118164 - DNA, 80 bp, synthetic construct
  misc_feature 1..80: note = Artificially Synthesized Probe
  source 1..80: mol_type = other DNA
ctaggactaaaggtgcgtgccaccatgcctggctaatatttttttgtttgtttgtttgtaggaacacggtctcattatgt

SEQ ID NO: 118165 - DNA, 80 bp, synthetic construct
  misc_feature 1..80: note = Artificially Synthesized Probe
  source 1..80: mol_type = other DNA
aaaaatatgtactaaaaatcaacatcatagggctatcttgaaaagcttttgtccaccaagtacaggcagacagaaccttc

SEQ ID NO: 118166 - DNA, 80 bp, synthetic construct; identical to SEQ ID NO: 38569
  misc_feature 1..80: note = Artificially Synthesized Probe
  source 1..80: mol_type = other DNA

SEQ ID NO: 118167 - DNA, 80 bp, synthetic construct
  misc_feature 1..80: note = Artificially Synthesized Probe
  source 1..80: mol_type = other DNA
tagtaagaggttcaatacagcaagaagatataacatttataaacatttacgtatctaatgatcatcaaaatgtacaatgc

SEQ ID NO: 118168 - DNA, 80 bp, synthetic construct
  misc_feature 1..80: note = Artificially Synthesized Probe
  source 1..80: mol_type = other DNA
gctcactaccctacagcagcagcacatacattgttcagaagtgccatgggacgttttgcaggatagactatatgttaagc

SEQ ID NO: 118169 - DNA, 80 bp, synthetic construct
  misc_feature 1..80: note = Artificially Synthesized Probe
  source 1..80: mol_type = other DNA
atacagatgagtatactgaaacacacggaagttaaataacttgcctaaaattacagtaggctgcagagccacatttcaaa

SEQ ID NO: 118170 - DNA, 80 bp, synthetic construct
  misc_feature 1..80: note = Artificially Synthesized Probe
  source 1..80: mol_type = other DNA
gcttttgattattcgaaattctaataattacaagcaatcagttattttctcttgtcagataatactcttgtcaaatatat

SEQ ID NO: 118171 - DNA, 80 bp, synthetic construct; identical to SEQ ID NO: 38489
  misc_feature 1..80: note = Artificially Synthesized Probe
  source 1..80: mol_type = other DNA

SEQ ID NO: 118172 - DNA, 80 bp, synthetic construct; identical to SEQ ID NO: 38570
  misc_feature 1..80: note = Artificially Synthesized Probe
  source 1..80: mol_type = other DNA

SEQ ID NO: 118173 - DNA, 80 bp, synthetic construct
  misc_feature 1..80: note = Artificially Synthesized Probe
  source 1..80: mol_type = other DNA
aaaaatatctggcttttaactcccagaactttacgttactgttctgtaagtgcttcttagctatgtaaaacaaaaaggct

SEQ ID NO: 118174 - DNA, 80 bp, synthetic construct
  misc_feature 1..80: note = Artificially Synthesized Probe
  source 1..80: mol_type = other DNA
tagggatatttaaaaaataccagtacataacacccactccagaccaaataaatcagagtatctggggatgggtacaagtg

SEQ ID NO: 118175 - DNA, 80 bp, synthetic construct
  misc_feature 1..80: note = Artificially Synthesized Probe
  source 1..80: mol_type = other DNA
tgggcgcctgtggtcccagatactcgggaggctgaggcaggagaatggggtgaacccaggaggcagaccttgcagtgagc

SEQ ID NO: 118176 - DNA, 80 bp, synthetic construct; identical to SEQ ID NO: 38571
  misc_feature 1..80: note = Artificially Synthesized Probe
  source 1..80: mol_type = other DNA

SEQ ID NO: 118177 - DNA, 80 bp, synthetic construct
  misc_feature 1..80: note = Artificially Synthesized Probe
  source 1..80: mol_type = other DNA
agctgtgaaatggtgctatgctttctggtgtattcaagagcccactaattccaaaacagccatgctgaaacgactgtcaa

SEQ ID NO: 118178 - DNA, 80 bp, synthetic construct
  misc_feature 1..80: note = Artificially Synthesized Probe
  source 1..80: mol_type = other DNA
cagcctggccaacatggtgaaactctgtctctactaaaaatacaaaaattagccgggcgtagtggcaggcacctgtaata

SEQ ID NO: 118179 - DNA, 80 bp, synthetic construct; identical to SEQ ID NO: 38572
  misc_feature 1..80: note = Artificially Synthesized Probe
  source 1..80: mol_type = other DNA

SEQ ID NO: 118180 - DNA, 80 bp, synthetic construct
  misc_feature 1..80: note = Artificially Synthesized Probe
  source 1..80: mol_type = other DNA
gaggaggaggaaaggtgtatgttcttagacactaacagtgaaaactcccaaaacaagctgagaacaaatttttaaaacat

SEQ ID NO: 118181 - DNA, 80 bp, synthetic construct
  misc_feature 1..80: note = Artificially Synthesized Probe
  source 1..80: mol_type = other DNA
attgaggtcagaagttcgagaccagcctggccaacatggtgaaaccccatctctactaaaaatacaaaaataagccaggc

SEQ ID NO: 118182 - DNA, 80 bp, synthetic construct
  misc_feature 1..80: note = Artificially Synthesized Probe
  source 1..80: mol_type = other DNA
atgctgttgtgtttccccaaaactgtactacgggggtcctcatcttttacttaaaatccttaagaacaaatgtgcttcag

SEQ ID NO: 118183 - DNA, 80 bp, synthetic construct
  misc_feature 1..80: note = Artificially Synthesized Probe
  source 1..80: mol_type = other DNA
tggggggtcagccccccgcccggccagccgccccgtccgggagggaggtgggggggtcagccccccgcccggccagccgc

SEQ ID NO: 118184 - DNA, 80 bp, synthetic construct
  misc_feature 1..80: note = Artificially Synthesized Probe
  source 1..80: mol_type = other DNA
cgcccggccagccgccccgtccgggagggaggtgggggtgtgagccccccgcccggccagccgccccgtccgggagggag

SEQ ID NO: 118185 - DNA, 80 bp, synthetic construct; identical to SEQ ID NO: 38573
  misc_feature 1..80: note = Artificially Synthesized Probe
  source 1..80: mol_type = other DNA

SEQ ID NO: 118186 - DNA, 80 bp, synthetic construct
  misc_feature 1..80: note = Artificially Synthesized Probe
  source 1..80: mol_type = other DNA
tccactcagggttaaatggattaagggcggtgcaagatgtgctttgttaaacagatgcttgaaggcagcatgctcgttaa

SEQ ID NO: 118187 - DNA, 80 bp, synthetic construct
  misc_feature 1..80: note = Artificially Synthesized Probe
  source 1..80: mol_type = other DNA
tccactattgtcctatgaccctgccaaatccccctctgtgagaaacacccaagaatgatcaattaaaaaaaaaaaaaaaa

SEQ ID NO: 118188 - DNA, 80 bp, synthetic construct
  misc_feature 1..80: note = Artificially Synthesized Probe
  source 1..80: mol_type = other DNA
gcctcctgtcagtacaagtcggcaaattattttgcagcaaacttctgaaaaaagttccttattcagagctttgaatgagg

SEQ ID NO: 118189 - DNA, 80 bp, synthetic construct
  misc_feature 1..80: note = Artificially Synthesized Probe
  source 1..80: mol_type = other DNA
ttagggtaaatccaagaaaaaagtccaagtggtgcccaacaattttcataatgattagaatagcatttaagtattcacct

SEQ ID NO: 118190 - DNA, 80 bp, synthetic construct; identical to SEQ ID NO: 38574
  misc_feature 1..80: note = Artificially Synthesized Probe
  source 1..80: mol_type = other DNA

SEQ ID NO: 118191 - DNA, 80 bp, synthetic construct
  misc_feature 1..80: note = Artificially Synthesized Probe
  source 1..80: mol_type = other DNA
cccagctaactttttgtatttttgtagagacggggtttcaccatgttggccaggctggtcttgaactcctgactttaggt

SEQ ID NO: 118192 - DNA, 80 bp, synthetic construct
  misc_feature 1..80: note = Artificially Synthesized Probe
  source 1..80: mol_type = other DNA
ctgtgccttgttaaacactgaaatcatgttgcttgatagttacctcctctgtatctttcagcgtacacacatgatatggc

SEQ ID NO: 118193 - DNA, 80 bp, synthetic construct
  misc_feature 1..80: note = Artificially Synthesized Probe
  source 1..80: mol_type = other DNA
aatagtattaattccctccacctaaactaccaccactttttcaaagacacttacatgctgaagggggtcaagtatgactt

SEQ ID NO: 118194 - DNA, 80 bp, synthetic construct; identical to SEQ ID NO: 38575
  misc_feature 1..80: note = Artificially Synthesized Probe
  source 1..80: mol_type = other DNA

SEQ ID NO: 118195 - DNA, 80 bp, synthetic construct
  misc_feature 1..80: note = Artificially Synthesized Probe
  source 1..80: mol_type = other DNA
ctgacacagtggctcaagtctgtaaggccagctactcggggggctgaagcgggaggatgacttgaagcaagttcaagacc

SEQ ID NO: 118196 - DNA, 80 bp, synthetic construct
  misc_feature 1..80: note = Artificially Synthesized Probe
  source 1..80: mol_type = other DNA
gccaaacccaccgactactctcccaatacctttttgttttctacactaccaattgcacacataatggctgttaggtgaaa

SEQ ID NO: 118197 - DNA, 80 bp, synthetic construct
  misc_feature 1..80: note = Artificially Synthesized Probe
  source 1..80: mol_type = other DNA
ggaagaacctacacaatttaaatgcacttaggaaataaggcacaacagtccaagatccaaatttcataaactacccattg

SEQ ID NO: 118198 - DNA, 80 bp, synthetic construct
  misc_feature 1..80: note = Artificially Synthesized Probe
  source 1..80: mol_type = other DNA
tttagttctattccaagtcaagaatgttagtttcctgcagatcacatggggcgggggggaaaaagaatgttacaggacac

SEQ ID NO: 118199 - DNA, 80 bp, synthetic construct; identical to SEQ ID NO: 38576
  misc_feature 1..80: note = Artificially Synthesized Probe
  source 1..80: mol_type = other DNA

SEQ ID NO: 118200 - DNA, 80 bp, synthetic construct
  misc_feature 1..80: note = Artificially Synthesized Probe
  source 1..80: mol_type = other DNA
atcgacccactacctcaaaattccctacaagattaattaaacgagacttaatccttcatacttgcactttttccgtcaca

SEQ ID NO: 118201 - DNA, 80 bp, synthetic construct
  misc_feature 1..80: note = Artificially Synthesized Probe
  source 1..80: mol_type = other DNA
gaaagaatataattttggcctctcttatcttagagatcctctgcactgacaaactgcttggtacaaaataggtattcaaa

SEQ ID NO: 118202 - DNA, 80 bp, synthetic construct
  misc_feature 1..80: note = Artificially Synthesized Probe
  source 1..80: mol_type = other DNA
gccacccggctcagagatgccctaaaacatctgttaagagcagctgcaacagggaaaccggagtcgggggatgagggccg

SEQ ID NO: 118203 - DNA, 80 bp, synthetic construct; identical to SEQ ID NO: 38577
  misc_feature 1..80: note = Artificially Synthesized Probe
  source 1..80: mol_type = other DNA

SEQ ID NO: 118204 - DNA, 80 bp, synthetic construct
  misc_feature 1..80: note = Artificially Synthesized Probe
  source 1..80: mol_type = other DNA
ctcaccggcattctgatctcggggccagaggtagtatgtcgccgggatcacgatgagccccacgaaggaggtgaggaagt

SEQ ID NO: 118205 - DNA, 80 bp, synthetic construct
  misc_feature 1..80: note = Artificially Synthesized Probe
  source 1..80: mol_type = other DNA
gcctctcctccccgcccccacgccactctcacggacacgccgccgccacctctgccgctgccgccgccgtcgccagctct

SEQ ID NO: 118206 - DNA, 80 bp, synthetic construct; identical to SEQ ID NO: 38490
  misc_feature 1..80: note = Artificially Synthesized Probe
  source 1..80: mol_type = other DNA

SEQ ID NO: 118207 - DNA, 80 bp, synthetic construct
  misc_feature 1..80: note = Artificially Synthesized Probe
  source 1..80: mol_type = other DNA
acctcagttcactatttagtcacctgcttattaacacctgttttaagagttgggtagggaagtatctttctaaaacagtt

SEQ ID NO: 118208 - DNA, 80 bp, synthetic construct; identical to SEQ ID NO: 38481
  misc_feature 1..80: note = Artificially Synthesized Probe
  source 1..80: mol_type = other DNA

SEQ ID NO: 118209 - DNA, 80 bp, synthetic construct
  misc_feature 1..80: note = Artificially Synthesized Probe
  source 1..80: mol_type = other DNA
ggttttgttttttgttgagacagggtctcactctgtcacccaggctggagtgcagtggcaccatctcagctcacctcact

SEQ ID NO: 118210 - DNA, 80 bp, synthetic construct
  misc_feature 1..80: note = Artificially Synthesized Probe
  source 1..80: mol_type = other DNA
atcctcccatttaggcctcccaaagtgctaggattacaggcatgagtcaccacgcctggcccatatttatgtttttaaac

SEQ ID NO: 118211 - DNA, 80 bp, synthetic construct
  misc_feature 1..80: note = Artificially Synthesized Probe
  source 1..80: mol_type = other DNA
aggttttccaagcaagatgaagcccaacatcatctttgtactttccctgctcctcatcttggagaagcaagcagctgtga

SEQ ID NO: 118212 - DNA, 80 bp, synthetic construct; identical to SEQ ID NO: 38579
  misc_feature 1..80: note = Artificially Synthesized Probe
  source 1..80: mol_type = other DNA

SEQ ID NO: 118213 - DNA, 80 bp, synthetic construct
  misc_feature 1..80: note = Artificially Synthesized Probe
  source 1..80: mol_type = other DNA
gaaaatgcaaaaggagagtctggccaatctacaaatagagaacaagacctactcagtcatgaacaaaaaggcagacacca

SEQ ID NO: 118214 - DNA, 80 bp, synthetic construct
  misc_feature 1..80: note = Artificially Synthesized Probe
  source 1..80: mol_type = other DNA
aataggggagatatctctctcattgtttagaattgttggggactctccaggacttttgtgggattgataaccattgttcg

SEQ ID NO: 118215 - DNA, 80 bp, synthetic construct
  misc_feature 1..80: note = Artificially Synthesized Probe
  source 1..80: mol_type = other DNA
atgcctacctgctaaaggtttttttgaacaggtactgactacatatgcatatttataagtttatggtatactcttgtcag

SEQ ID NO: 118216 - DNA, 80 bp, synthetic construct; identical to SEQ ID NO: 38580
  misc_feature 1..80: note = Artificially Synthesized Probe
  source 1..80: mol_type = other DNA

SEQ ID NO: 118217 - DNA, 80 bp, synthetic construct
  misc_feature 1..80: note = Artificially Synthesized Probe
  source 1..80: mol_type = other DNA
gcaagcagtagaaacagtggccccagctggcaactagtggcctggtatcctagtagtagagggctggtacagttggagct

SEQ ID NO: 118218 - DNA, 80 bp, synthetic construct; identical to SEQ ID NO: 38578
  misc_feature 1..80: note = Artificially Synthesized Probe
  source 1..80: mol_type = other DNA

SEQ ID NO: 118219 - DNA, 80 bp, synthetic construct
  misc_feature 1..80: note = Artificially Synthesized Probe
  source 1..80: mol_type = other DNA
gatgacaccacctgcccatgcttccttgaattaggctttcctaacctgaagcgccttcaaacttccaataaagagatcat

SEQ ID NO: 118220 - DNA, 80 bp, synthetic construct
  misc_feature 1..80: note = Artificially Synthesized Probe
  source 1..80: mol_type = other DNA
atgatcatgaccagtcccgaaaaagtcagcaatatgatttgaatgccctacataagacgacaaaatcacaacgacatcta

SEQ ID NO: 118221 - DNA, 80 bp, synthetic construct
  misc_feature 1..80: note = Artificially Synthesized Probe
  source 1..80: mol_type = other DNA
tcaatattcaaacacagaagaaaggctgtgggttcatggactaagtaaagaacaaacttccgtctctggtgcacaaaaag

SEQ ID NO: 118222 - DNA, 80 bp, synthetic construct
  misc_feature 1..80: note = Artificially Synthesized Probe
  source 1..80: mol_type = other DNA
gcgcaccaagacaaactccaacatggatccaaagacattttttctacccaagatgagctcctagtatataacaagaatca

SEQ ID NO: 118223 - DNA, 80 bp, synthetic construct
  misc_feature 1..80: note = Artificially Synthesized Probe
  source 1..80: mol_type = other DNA
gcagagagtgaggagcacccaagtggggccagaggaacgttgtgtgtggcagcaaggagcccgcagaggtatgaggggag

SEQ ID NO: 118224 - DNA, 80 bp, synthetic construct
  misc_feature 1..80: note = Artificially Synthesized Probe
  source 1..80: mol_type = other DNA
gctgagtcagagctgtcctgtgtcctgctcttttccagggcttcgggagcggggagagggttgaatatgagcccccagac

SEQ ID NO: 118225 - DNA, 80 bp, synthetic construct
  misc_feature 1..80: note = Artificially Synthesized Probe
  source 1..80: mol_type = other DNA
gggtgtcacactgttaaagaaatgctgggtggagtggctcatgcctgtaatcccagcacgttgggaagctgaagtgggtg

SEQ ID NO: 118226 - DNA, 80 bp, synthetic construct; identical to SEQ ID NO: 38592
  misc_feature 1..80: note = Artificially Synthesized Probe
  source 1..80: mol_type = other DNA

SEQ ID NO: 118227 - DNA, 80 bp, synthetic construct
  misc_feature 1..80: note = Artificially Synthesized Probe
  source 1..80: mol_type = other DNA
ccataatcccagctacttgggaggctgaggcaggagaattgcttgaacctgggaggaggaggttgcagtgagccgagatc

SEQ ID NO: 118228 - DNA, 80 bp, synthetic construct
  misc_feature 1..80: note = Artificially Synthesized Probe
  source 1..80: mol_type = other DNA
accatgtacaaacagctgagtctaatggggtgggcagacgagcaatcacatacttactacagcataagcgataagacaga

SEQ ID NO: 118229 - DNA, 80 bp, synthetic construct
  misc_feature 1..80: note = Artificially Synthesized Probe
  source 1..80: mol_type = other DNA
caagctgttccctggccaggatctcagacaccctcccaagcagctccaggagcctgtgaggccaagggcagctctgacca

SEQ ID NO: 118230 - DNA, 80 bp, synthetic construct; identical to SEQ ID NO: 38593
  misc_feature 1..80: note = Artificially Synthesized Probe
  source 1..80: mol_type = other DNA

SEQ ID NO: 118231 - DNA, 80 bp, synthetic construct
  misc_feature 1..80: note = Artificially Synthesized Probe
  source 1..80: mol_type = other DNA
aaacttgtgccccccatggaggaggattacccccagtttggcagccccaagtgaggggccgtggctgtggcatccagagt

SEQ ID NO: 118232 - DNA, 80 bp, synthetic construct
  misc_feature 1..80: note = Artificially Synthesized Probe
  source 1..80: mol_type = other DNA
tcagcctcccgagtagctgggattacaggggcccaccaccacgcctggctaattttgtattttcagtagagatggggttt

SEQ ID NO: 118233 - DNA, 80 bp, synthetic construct
  misc_feature 1..80: note = Artificially Synthesized Probe
  source 1..80: mol_type = other DNA
ggcaggcatcggggagccgggagcctgaccctcatctttcttccaaacaggctcagagggtgtcctgcaccggggcctgg

SEQ ID NO: 118234 - DNA, 80 bp, synthetic construct
  misc_feature 1..80: note = Artificially Synthesized Probe
  source 1..80: mol_type = other DNA
agagacgggccctggtggtggctcgggaggcgaagcgttgtcctcagccccgcgtggaactcgtgtctggcacagcctgg

SEQ ID NO: 118235 - DNA, 80 bp, synthetic construct; identical to SEQ ID NO: 38594
  misc_feature 1..80: note = Artificially Synthesized Probe
  source 1..80: mol_type = other DNA

SEQ ID NO: 118236 - DNA, 80 bp, synthetic construct
  misc_feature 1..80: note = Artificially Synthesized Probe
  source 1..80: mol_type = other DNA
gggaggccgaggcaggaggatcacctgaggtcgggagtttaagaccagcctgactaacacagagaaaccccgtttctact

SEQ ID NO: 118237 - DNA, 80 bp, synthetic construct
  misc_feature 1..80: note = Artificially Synthesized Probe
  source 1..80: mol_type = other DNA
ctcaaaaaataaacaacaaaaaatcccaaaaagacggtcttattttggtcctcaccatgcatgtgagaagagtgagggac

SEQ ID NO: 118238 - DNA, 80 bp, synthetic construct
  misc_feature 1..80: note = Artificially Synthesized Probe
  source 1..80: mol_type = other DNA
cctcctattcaccaaaacaccctcagtgcatgaaatgcatgaaatatgaaacaccagaaactaaaaagggggagaagcca

SEQ ID NO: 118239 - DNA, 80 bp, synthetic construct; identical to SEQ ID NO: 38583
  misc_feature 1..80: note = Artificially Synthesized Probe
  source 1..80: mol_type = other DNA

SEQ ID NO: 118240 - DNA, 80 bp, synthetic construct
  misc_feature 1..80: note = Artificially Synthesized Probe
  source 1..80: mol_type = other DNA
ccatggagcccttgggccggcaggtactggggagtgaggagcctgtgatggggggaaggtcccgggggtctcactggtgg

SEQ ID NO: 118241 - DNA, 80 bp, synthetic construct
  misc_feature 1..80: note = Artificially Synthesized Probe
  source 1..80: mol_type = other DNA
gagtcggggccctggccaagggctcttgtgtgggatgggggtggggccggggggaccaaaggatcctccagaagggttgg

SEQ ID NO: 118242 - DNA, 80 bp, synthetic construct
  misc_feature 1..80: note = Artificially Synthesized Probe
  source 1..80: mol_type = other DNA
gctagagggaggagggcccatcggcaggggtcggggggtgggggcgcgtgctgaggctgaggctctggagtccagaggcc

SEQ ID NO: 118243 - DNA, 80 bp, synthetic construct
  misc_feature 1..80: note = Artificially Synthesized Probe
  source 1..80: mol_type = other DNA
ctggagctgaccccttgacctccctgacccctgatctgtccctgcaggagcctggtggccagactgccctgaagagtccc

SEQ ID NO: 118244 - DNA, 80 bp, synthetic construct; identical to SEQ ID NO: 38584
  misc_feature 1..80: note = Artificially Synthesized Probe
  source 1..80: mol_type = other DNA

SEQ ID NO: 118245 - DNA, 80 bp, synthetic construct
  misc_feature 1..80: note = Artificially Synthesized Probe
  source 1..80: mol_type = other DNA
aacatggtgaaactctctctactaaaaatacaaaaaatttagctgtgcgtggtggtgcgcacctgtaattccagctactc

SEQ ID NO: 118246 - DNA, 80 bp, synthetic construct
  misc_feature 1..80: note = Artificially Synthesized Probe
  source 1..80: mol_type = other DNA
ctgtctatgtgaatcagatctcagggactgggccggggaatctgcttatttacaagtcctcctggtgatttttttttttt

SEQ ID NO: 118247 - DNA, 80 bp, synthetic construct
  misc_feature 1..80: note = Artificially Synthesized Probe
  source 1..80: mol_type = other DNA
atttttagtagagacggggtttcaccatgttggccagggtggtctcgaactctcgacctaaggtgatcaacctgcctcag

SEQ ID NO: 118248 - DNA, 80 bp, synthetic construct; identical to SEQ ID NO: 38585
  misc_feature 1..80: note = Artificially Synthesized Probe
  source 1..80: mol_type = other DNA

SEQ ID NO: 118249 - DNA, 80 bp, synthetic construct
  misc_feature 1..80: note = Artificially Synthesized Probe
  source 1..80: mol_type = other DNA
ctcccccatctgctgagccgcctctgccaggacctgggccccggcgcgttccgactggctgccaggatgtacctgcagaa

SEQ ID NO: 118250 - DNA, 80 bp, synthetic construct
  misc_feature 1..80: note = Artificially Synthesized Probe
  source 1..80: mol_type = other DNA
aagaagatttcctggaacaatccgaacagctatttggggcaaagcccgtgagcctgacgggaaagcaggaagatgacctg

SEQ ID NO: 118251 - DNA, 80 bp, synthetic construct; identical to SEQ ID NO: 38581
  misc_feature 1..80: note = Artificially Synthesized Probe
  source 1..80: mol_type = other DNA

SEQ ID NO: 118252 - DNA, 80 bp, synthetic construct
  misc_feature 1..80: note = Artificially Synthesized Probe
  source 1..80: mol_type = other DNA
acgtgcaggcctttttgttttttgagacaagtctcgctctgtcacccagggtggagcgcagtggcgcgatctcggctccc

SEQ ID NO: 118253 - DNA, 80 bp, synthetic construct; identical to SEQ ID NO: 38586
  misc_feature 1..80: note = Artificially Synthesized Probe
  source 1..80: mol_type = other DNA

SEQ ID NO: 118254 - DNA, 80 bp, synthetic construct
  misc_feature 1..80: note = Artificially Synthesized Probe
  source 1..80: mol_type = other DNA
tgtaatcccaacactttgggaggccgaggcgggcagatcatgaggtcaggagatggagaccatcctggctaacacggtga

SEQ ID NO: 118255 - DNA, 80 bp, synthetic construct
  misc_feature 1..80: note = Artificially Synthesized Probe
  source 1..80: mol_type = other DNA
ctaaaaaaaaaaaaaaagatccaggaggaggttcctaggagaattgcaggggttggggaaaacacaagcccagatttcaa

SEQ ID NO: 118256 - DNA, 80 bp, synthetic construct
  misc_feature 1..80: note = Artificially Synthesized Probe
  source 1..80: mol_type = other DNA
gtgacccctgccctctgccccaagctggtccccgtcgacgtgacccctgccctctgctgggtttcaggtttctggaggaa

SEQ ID NO: 118257 - DNA, 80 bp, synthetic construct
  misc_feature 1..80: note = Artificially Synthesized Probe
  source 1..80: mol_type = other DNA
aggctgggcctgaggctgggaggtggggaagggagtggacaggctgtggagcaggcacagggatgggtggaggctgtctc

SEQ ID NO: 118258 - DNA, 80 bp, synthetic construct; identical to SEQ ID NO: 38587
  misc_feature 1..80: note = Artificially Synthesized Probe
  source 1..80: mol_type = other DNA

SEQ ID NO: 118259 - DNA, 80 bp, synthetic construct
  misc_feature 1..80: note = Artificially Synthesized Probe
  source 1..80: mol_type = other DNA
tttgagaccagcctggccaagatttgaaaccccgtttctactaaaaatacaaaaattagccaggcgtggtggcaggtgcc

SEQ ID NO: 118260 - DNA, 80 bp, synthetic construct
  misc_feature 1..80: note = Artificially Synthesized Probe
  source 1..80: mol_type = other DNA
agccagccatggtggcgggcgcctgtaatcccagatactctggaggctgaggcaggagaatcacttgaacccgggagacg

SEQ ID NO: 118261 - DNA, 80 bp, synthetic construct
  misc_feature 1..80: note = Artificially Synthesized Probe
  source 1..80: mol_type = other DNA
tgagccaccaggcctggccttatttaggcattttagagtggtaagggagaattctgtgaggagggggcattgaattgaga

SEQ ID NO: 118262 - DNA, 80 bp, synthetic construct
  misc_feature 1..80: note = Artificially Synthesized Probe
  source 1..80: mol_type = other DNA
ccctgtctctactaaaaatacaaaattagccaggcatggtggcacatgcctgtaatcccagctactcgggaggctgaggc

SEQ ID NO: 118263 - DNA, 80 bp, synthetic construct; identical to SEQ ID NO: 38588
  misc_feature 1..80: note = Artificially Synthesized Probe
  source 1..80: mol_type = other DNA

SEQ ID NO: 118264 - DNA, 80 bp, synthetic construct
  misc_feature 1..80: note = Artificially Synthesized Probe
  source 1..80: mol_type = other DNA
gcctggctaattttgttcgtttgtttgtttgtttttgagacggagtttctctctatcgcccagactggagtgcagtggtg

SEQ ID NO: 118265 - DNA, 80 bp, synthetic construct
  misc_feature 1..80: note = Artificially Synthesized Probe
  source 1..80: mol_type = other DNA
atggtctcaatctcctgacctcgtgatccgcctgcctcagcctcccaacgtgctgggattacaggtgtgagccaccgtgc

SEQ ID NO: 118266 - DNA, 80 bp, synthetic construct; identical to SEQ ID NO: 38589
  misc_feature 1..80: note = Artificially Synthesized Probe
  source 1..80: mol_type = other DNA

SEQ ID NO: 118267 - DNA, 80 bp, synthetic construct
  misc_feature 1..80: note = Artificially Synthesized Probe
  source 1..80: mol_type = other DNA
gcgtcctggcttccctgcagctcattctgaaaggccagtctgatccacctccccgaggctcccctttcctgcttcccctt

SEQ ID NO: 118268 - DNA, 80 bp, synthetic construct
  misc_feature 1..80: note = Artificially Synthesized Probe
  source 1..80: mol_type = other DNA
gcctggaacccaaggagtcacagctgcaggaggccctcgagccctgtggtgtccacactgcttttgctgcagaatccctt

SEQ ID NO: 118269 - DNA, 80 bp, synthetic construct
  misc_feature 1..80: note = Artificially Synthesized Probe
  source 1..80: mol_type = other DNA
tggccaggtgagatggtgagcgcctgtagtcccagctactcgggaggctgaggcaggagaatcacttgaacccgggtggc

SEQ ID NO: 118270 - DNA, 80 bp, synthetic construct
  misc_feature 1..80: note = Artificially Synthesized Probe
  source 1..80: mol_type = other DNA
gatcacgaggtcaggagattgagaccatcctggctaacacggtgaaaccccatctcttctaaaaatacaaaaaattagcc

SEQ ID NO: 118271 - DNA, 80 bp, synthetic construct; identical to SEQ ID NO: 38590
  misc_feature 1..80: note = Artificially Synthesized Probe
  source 1..80: mol_type = other DNA

SEQ ID NO: 118272 - DNA, 80 bp, synthetic construct
  misc_feature 1..80: note = Artificially Synthesized Probe
  source 1..80: mol_type = other DNA
gagagaaaaccaccaggtattattgagcaccgtctgtgacagcggacactgctacaatgttgttttttttctttttttga

SEQ ID NO: 118273 - DNA, 80 bp, synthetic construct; identical to SEQ ID NO: 38582
  misc_feature 1..80: note = Artificially Synthesized Probe
  source 1..80: mol_type = other DNA

SEQ ID NO: 118274 - DNA, 80 bp, synthetic construct
  misc_feature 1..80: note = Artificially Synthesized Probe
  source 1..80: mol_type = other DNA
catttttgtatttttagtagagatgaggttttgccatgttggtcaggctggtcttgaactcctgacctcaggtgatctgc

SEQ ID NO: 118275 - DNA, 80 bp, synthetic construct
  misc_feature 1..80: note = Artificially Synthesized Probe
  source 1..80: mol_type = other DNA
gagcagtggggtcagtcacacgcctggcaggatggccaggagccccattgtctgccttaggagcacctgctggccccacc

SEQ ID NO: 118276 - DNA, 80 bp, synthetic construct; identical to SEQ ID NO: 38591
  misc_feature 1..80: note = Artificially Synthesized Probe
  source 1..80: mol_type = other DNA

SEQ ID NO: 118277 - DNA, 80 bp, synthetic construct
  misc_feature 1..80: note = Artificially Synthesized Probe
  source 1..80: mol_type = other DNA
cgtagtagttctcaggtcggcgggctgtggaggtgatcagagtgggagtcaggcgggctaggccggacccggagggaggg

SEQ ID NO: 118278 - DNA, 80 bp, synthetic construct
  misc_feature 1..80: note = Artificially Synthesized Probe
  source 1..80: mol_type = other DNA
ctcaagggcatccttcactcttcactcttcccaccagccaacttggcaggacctcctgggaagtctctctggttaaaccc

SEQ ID NO: 118279 - DNA, 80 bp, synthetic construct; identical to SEQ ID NO: 38605
  misc_feature 1..80: note = Artificially Synthesized Probe
  source 1..80: mol_type = other DNA

SEQ ID NO: 118280 - DNA, 80 bp, synthetic construct
  misc_feature 1..80: note = Artificially Synthesized Probe
  source 1..80: mol_type = other DNA
atacaaaaattagctggacgcggtgatgcacacctgtaatcccagctacttgggaggctaaggcaggaggattgcttgaa

SEQ ID NO: 118281 - DNA, 80 bp, synthetic construct
  misc_feature 1..80: note = Artificially Synthesized Probe
  source 1..80: mol_type = other DNA
tcaggttcagcagttcacaagaatggctcataatggggagtgggggcgggggggtgaaagggcaaaaaataatataaatg

SEQ ID NO: 118282 - DNA, 80 bp, synthetic construct
  misc_feature 1..80: note = Artificially Synthesized Probe
  source 1..80: mol_type = other DNA
tgactcatagaatgcaggaaagcactacacttgggattacagctttacaaagaatacaaagcagggccagccaatgaaga

SEQ ID NO: 118283 - DNA, 80 bp, synthetic construct
  misc_feature 1..80: note = Artificially Synthesized Probe
  source 1..80: mol_type = other DNA
agtctcgctctgttgcccaggctggagtgcagtggcgcaatctcggctcactgcaagctccgcctcctgggttcacgcca

SEQ ID NO: 118284 - DNA, 80 bp, synthetic construct; identical to SEQ ID NO: 38606
  misc_feature 1..80: note = Artificially Synthesized Probe
  source 1..80: mol_type = other DNA

SEQ ID NO: 118285 - DNA, 80 bp, synthetic construct; identical to SEQ ID NO: 38596
  misc_feature 1..80: note = Artificially Synthesized Probe
  source 1..80: mol_type = other DNA

SEQ ID NO: 118286 - DNA, 80 bp, synthetic construct
  misc_feature 1..80: note = Artificially Synthesized Probe
  source 1..80: mol_type = other DNA
gctcacgcctgtaatcccagcattttgggaggcaggggtaggtggctcacctgaggtcaggagttcgagagcagcctggc

SEQ ID NO: 118287 - DNA, 80 bp, synthetic construct
  misc_feature 1..80: note = Artificially Synthesized Probe
  source 1..80: mol_type = other DNA
cagcctgggagacagtgagactctgtctcaaacaaaaaaactcaggtgttacataaggaacttctgagtaacagacattt

SEQ ID NO: 118288 - DNA, 80 bp, synthetic construct; identical to SEQ ID NO: 38607
  misc_feature 1..80: note = Artificially Synthesized Probe
  source 1..80: mol_type = other DNA

SEQ ID NO: 118289 - DNA, 80 bp, synthetic construct
  misc_feature 1..80: note = Artificially Synthesized Probe
  source 1..80: mol_type = other DNA
tttatttggttttttttagagacaggatcttgctgtgcatgatcttggctcactgcaacctctgcctccctggttcaagc

SEQ ID NO: 118290 - DNA, 80 bp, synthetic construct
  misc_feature 1..80: note = Artificially Synthesized Probe
  source 1..80: mol_type = other DNA
atgtgttgggattacaggtgtgagccaccatgcccagcctatttatttaagttttattttaggtttggggatacatgtga

SEQ ID NO: 118291 - DNA, 80 bp, synthetic construct
  misc_feature 1..80: note = Artificially Synthesized Probe
  source 1..80: mol_type = other DNA
tagctattgggaaagctatactctttttctgccagggttgtttaagctggtagaatgaggcttggctattttgctactta

SEQ ID NO: 118292 - DNA, 80 bp, synthetic construct
  misc_feature 1..80: note = Artificially Synthesized Probe
  source 1..80: mol_type = other DNA
tttaagctggtagaatgaggcttggctattttgctacttacgagatgacaacctccctgagaatgaagacagtccaggga

SEQ ID NO: 118293 - DNA, 80 bp, synthetic construct
  misc_feature 1..80: note = Artificially Synthesized Probe
  source 1..80: mol_type = other DNA
agagagaaaaagaaagaaagtccagggaaaagcagaactaaaagagactgagaccaagttcaaatcaacattgtttgagc

SEQ ID NO: 118294 - DNA, 80 bp, synthetic construct; identical to SEQ ID NO: 38608
  misc_feature 1..80: note = Artificially Synthesized Probe
  source 1..80: mol_type = other DNA

SEQ ID NO: 118295 - DNA, 80 bp, synthetic construct
  misc_feature 1..80: note = Artificially Synthesized Probe
  source 1..80: mol_type = other DNA
cttacaacctgccttatctctgtcctccccttttcagccaaactgtgtagaacatctctccacatttttcctcccacttc

SEQ ID NO: 118296 - DNA, 80 bp, synthetic construct
  misc_feature 1..80: note = Artificially Synthesized Probe
  source 1..80: mol_type = other DNA
ccacgcctggctaattttagtagagacagggttttgccatgttggccaggcgggtctcaaactcctgacctcaggtgatc

SEQ ID NO: 118297 - DNA, 80 bp, synthetic construct
  misc_feature 1..80: note = Artificially Synthesized Probe
  source 1..80: mol_type = other DNA
tagtacagatggggtttcacctcgttggccagacggctctcgaactccagacctcaagtgatccgcccattgtggcctcc

SEQ ID NO: 118298 - DNA, 80 bp, synthetic construct; identical to SEQ ID NO: 38609
  misc_feature 1..80: note = Artificially Synthesized Probe
  source 1..80: mol_type = other DNA

SEQ ID NO: 118299 - DNA, 80 bp, synthetic construct
  misc_feature 1..80: note = Artificially Synthesized Probe
  source 1..80: mol_type = other DNA
tggctcactgcaacctccacctcccaggttcaagcgattctcgtgcctcagcctcccaagcagctgggattacaggcacg

SEQ ID NO: 118300 - DNA, 80 bp, synthetic construct
  misc_feature 1..80: note = Artificially Synthesized Probe
  source 1..80: mol_type = other DNA
ccatgcccagcacttttttgttttttgagatggagtctcgctctgttgcccaggctggagtgccgtgggacgattttggc

SEQ ID NO: 118301 - DNA, 80 bp, synthetic construct
  misc_feature 1..80: note = Artificially Synthesized Probe
  source 1..80: mol_type = other DNA
tcatgatgcgcccgcctcagcctcccagtgttgggattacaggcgtgagccactgcgcccggccatcttagaacattttt

SEQ ID NO: 118302 - DNA, 80 bp, synthetic construct
  misc_feature 1..80: note = Artificially Synthesized Probe
  source 1..80: mol_type = other DNA
tttgtatttttagcagagatggggtttcaccgtgttagccaggatggtcttgatctcctgacctcatgatccgcctgtct

SEQ ID NO: 118303 - DNA, 80 bp, synthetic construct; identical to SEQ ID NO: 38610
  misc_feature 1..80: note = Artificially Synthesized Probe
  source 1..80: mol_type = other DNA

SEQ ID NO: 118304 - DNA, 80 bp, synthetic construct
  misc_feature 1..80: note = Artificially Synthesized Probe
  source 1..80: mol_type = other DNA
gggccatagcttcctttactgtttaggccagctggagccgggtcaatcagacactggatgggtggaggatctcactgtgc

SEQ ID NO: 118305 - DNA, 80 bp, synthetic construct
  misc_feature 1..80: note = Artificially Synthesized Probe
  source 1..80: mol_type = other DNA
cgctcttttgcccaggctggattgcagtggcgcagtcttggctcactgcaacttccgactctggggttcaagtgattctt

SEQ ID NO: 118306 - DNA, 80 bp, synthetic construct
  misc_feature 1..80: note = Artificially Synthesized Probe
  source 1..80: mol_type = other DNA
gctgggattacaggcgtgagccactgcgtccggccttgacctcaattctttttttttttttttttttttgatagggagtc

SEQ ID NO: 118307 - DNA, 80 bp, synthetic construct; identical to SEQ ID NO: 38611
  misc_feature 1..80: note = Artificially Synthesized Probe
  source 1..80: mol_type = other DNA

SEQ ID NO: 118308 - DNA, 80 bp, synthetic construct
  misc_feature 1..80: note = Artificially Synthesized Probe
  source 1..80: mol_type = other DNA
ctgggcaacacggtgaaactctgtctctactaaaatacaaaaaattagctgggcgtggcagtgtgcacctgtagtaccag

SEQ ID NO: 118309 - DNA, 80 bp, synthetic construct
  misc_feature 1..80: note = Artificially Synthesized Probe
  source 1..80: mol_type = other DNA
ctctgcctccggagggactgggactacaggcgcgcgccaccatgcccggctaatttttgtatttttagtagagacggggt

SEQ ID NO: 118310 - DNA, 80 bp, synthetic construct
  misc_feature 1..80: note = Artificially Synthesized Probe
  source 1..80: mol_type = other DNA
tccagcctcagagatgcaaactcctggaccgcctgcccctttcctcagataaaccaaggtcgtaagttcaggctccgcct

SEQ ID NO: 118311 - DNA, 80 bp, synthetic construct
  misc_feature 1..80: note = Artificially Synthesized Probe
  source 1..80: mol_type = other DNA
tagccctcagccgggccctgggactctatcccctaaggccggttctctatggtcgacatcgcccctttgtcccgaatttc

SEQ ID NO: 118312 - DNA, 80 bp, synthetic construct; identical to SEQ ID NO: 38612
  misc_feature 1..80: note = Artificially Synthesized Probe
  source 1..80: mol_type = other DNA

SEQ ID NO: 118313 - DNA, 80 bp, synthetic construct
  misc_feature 1..80: note = Artificially Synthesized Probe
  source 1..80: mol_type = other DNA
ctggcgcccgagaggattcctgggtgggggtgggcgtggagggccgggggctggagaggcactcggccccggagagtgca

SEQ ID NO: 118314 - DNA, 80 bp, synthetic construct
  misc_feature 1..80: note = Artificially Synthesized Probe
  source 1..80: mol_type = other DNA
tcagaactgagccaggaggcaggtgcaccgggaaaatgtgtctgagtcctgcttggcagaagagaaactgagtcaccagc

SEQ ID NO: 118315 - DNA, 80 bp, synthetic construct
  misc_feature 1..80: note = Artificially Synthesized Probe
  source 1..80: mol_type = other DNA
gtttctcgttggtttggagttgtccctgcggttggagccatctgagcttgtagggtcgaggcccaggaggaaggggaggg

SEQ ID NO: 118316 - DNA, 80 bp, synthetic construct; identical to SEQ ID NO: 38613
  misc_feature 1..80: note = Artificially Synthesized Probe
  source 1..80: mol_type = other DNA

SEQ ID NO: 118317 - DNA, 80 bp, synthetic construct
  misc_feature 1..80: note = Artificially Synthesized Probe
  source 1..80: mol_type = other DNA
gagggatcattagctttgtttaacagatagaaaaacggaggctcagagaggacgtggaatttgttcaagataacatcgct

SEQ ID NO: 118318 - DNA, 80 bp, synthetic construct
  misc_feature 1..80: note = Artificially Synthesized Probe
  source 1..80: mol_type = other DNA
aggtgaaaaatcctagggccccagctctccctgtgatgttttgtttacgtgaggccagcaaagacttgacctgagccaac

SEQ ID NO: 118319 - DNA, 80 bp, synthetic construct
  misc_feature 1..80: note = Artificially Synthesized Probe
  source 1..80: mol_type = other DNA
atcctcattaatgaatcggccccctccaaagagttggaccctaagatgcgtgaggcaggctctctaaggtctagaatccc

SEQ ID NO: 118320 - DNA, 80 bp, synthetic construct
  misc_feature 1..80: note = Artificially Synthesized Probe
  source 1..80: mol_type = other DNA
aactctgaactagagctttatgatgttcaggcattcctattgtttcacaatcagcgctcccagtgctaccctgggtagta

SEQ ID NO: 118321 - DNA, 80 bp, synthetic construct; identical to SEQ ID NO: 38614
  misc_feature 1..80: note = Artificially Synthesized Probe
  source 1..80: mol_type = other DNA

SEQ ID NO: 118322 - DNA, 80 bp, synthetic construct
  misc_feature 1..80: note = Artificially Synthesized Probe
  source 1..80: mol_type = other DNA
gcagggtgccaggatctgggagagggaagggaggtgttgggctcccttccccattgctctctgcggagtctgaagtaggg

SEQ ID NO: 118323 - DNA, 80 bp, synthetic construct
  misc_feature 1..80: note = Artificially Synthesized Probe
  source 1..80: mol_type = other DNA
ggggcccatcatgaatggtgccccttccccagaggacggggcctccccctcgtctcccccgctgcccccacccccgcccc

SEQ ID NO: 118324 - DNA, 80 bp, synthetic construct
  misc_feature 1..80: note = Artificially Synthesized Probe
  source 1..80: mol_type = other DNA
agccgaggtggcccgggcctctggctccctgtcgccacccatcctggctcccctgagccctggtgcggagatttcgccac

SEQ ID NO: 118325 - DNA, 80 bp, synthetic construct
  misc_feature 1..80: note = Artificially Synthesized Probe
  source 1..80: mol_type = other DNA
agtgggtcgctctgtccgaggctcagtccgtggcatcctgcagtggcgggggaccgttgaccctccctcctccgctgggc

SEQ ID NO: 118326 - DNA, 80 bp, synthetic construct; identical to SEQ ID NO: 38615
  misc_feature 1..80: note = Artificially Synthesized Probe
  source 1..80: mol_type = other DNA

SEQ ID NO: 118327 - DNA, 80 bp, synthetic construct
  misc_feature 1..80: note = Artificially Synthesized Probe
  source 1..80: mol_type = other DNA
tggagggtgggtgactgagagcaagtgagagagtgctcagagtggtcacagccctgcagataagctctggggtttaccag

SEQ ID NO: 118328 - DNA, 80 bp, synthetic construct
  misc_feature 1..80: note = Artificially Synthesized Probe
  source 1..80: mol_type = other DNA
tctttggaaaccaaacacccagatctgtttctttctcctgacttaggcctctcggccccgactcagcatcccctgctctt

SEQ ID NO: 118329 - DNA, 80 bp, synthetic construct; identical to SEQ ID NO: 38616
  misc_feature 1..80: note = Artificially Synthesized Probe
  source 1..80: mol_type = other DNA

SEQ ID NO: 118330 - DNA, 80 bp, synthetic construct
  misc_feature 1..80: note = Artificially Synthesized Probe
  source 1..80: mol_type = other DNA
cgtcctgcctcagccctctaaggagctgggactacaggcatgtgacaccatgcctggctaattttgttacttacttacat

SEQ ID NO: 118331 - DNA, 80 bp, synthetic construct
  misc_feature 1..80: note = Artificially Synthesized Probe
  source 1..80: mol_type = other DNA
gcagtgacacgatctcggctcactgcaacctccatctcccaggttcaagcgattctcctgcctcagcctcccgagtagct

SEQ ID NO: 118332 - DNA, 80 bp, synthetic construct
  misc_feature 1..80: note = Artificially Synthesized Probe
  source 1..80: mol_type = other DNA
tgtttagcagaaatgggttttgccatgttcggcaggctggtctcaaactggcctcaagtgatccaccccacttggcctcc

SEQ ID NO: 118333 - DNA, 80 bp, synthetic construct
  misc_feature 1..80: note = Artificially Synthesized Probe
  source 1..80: mol_type = other DNA
ttttcctgcctcagcctcccgagtagctgggactactggcgtccgccaccacgcccggataatttttttgtatttttagt

SEQ ID NO: 118334 - DNA, 80 bp, synthetic construct; identical to SEQ ID NO: 31421
  misc_feature 1..80: note = Artificially Synthesized Probe
  source 1..80: mol_type = other DNA

SEQ ID NO: 118335 - DNA, 80 bp, synthetic construct; identical to SEQ ID NO: 38617
  misc_feature 1..80: note = Artificially Synthesized Probe
  source 1..80: mol_type = other DNA

SEQ ID NO: 118336 - DNA, 80 bp, synthetic construct
  misc_feature 1..80: note = Artificially Synthesized Probe
  source 1..80: mol_type = other DNA
cctgcccctgccccagctgaggcgtcgtctcatctctgtaggtggaaggtccatccgagtatatcatggagacagtggat

SEQ ID NO: 118337 - DNA, 80 bp, synthetic construct
  misc_feature 1..80: note = Artificially Synthesized Probe
  source 1..80: mol_type = other DNA
cagaccctgccctgctaccagtccccgccccatgaccctccctctggcccctgggacctcattccttacaagggagaaca

SEQ ID NO: 118338 - DNA, 80 bp, synthetic construct
  misc_feature 1..80: note = Artificially Synthesized Probe
  source 1..80: mol_type = other DNA
caggcgccatgccctctccagacgccactgtgcccccatccctgttttccagatgccctaccccaaccccaccaaatgtt

SEQ ID NO: 118339 - DNA, 80 bp, synthetic construct; identical to SEQ ID NO: 38618
  misc_feature 1..80: note = Artificially Synthesized Probe
  source 1..80: mol_type = other DNA

SEQ ID NO: 118340 - DNA, 80 bp, synthetic construct
  misc_feature 1..80: note = Artificially Synthesized Probe
  source 1..80: mol_type = other DNA
acagtgcctagcacacaggctgtattcagtgaatgaacacatgaatcatggaatcttagatctagagtggaccttgcatc

SEQ ID NO: 118341 - DNA, 80 bp, synthetic construct
  misc_feature 1..80: note = Artificially Synthesized Probe
  source 1..80: mol_type = other DNA
agcactgcctgcctatgacatttgtgtaggcagtggcctgctgttggacagacttggaggatggccctagtgcatacctg

SEQ ID NO: 118342 - DNA, 80 bp, synthetic construct; identical to SEQ ID NO: 38597
  misc_feature 1..80: note = Artificially Synthesized Probe
  source 1..80: mol_type = other DNA

SEQ ID NO: 118343 - DNA, 80 bp, synthetic construct
  misc_feature 1..80: note = Artificially Synthesized Probe
  source 1..80: mol_type = other DNA
agcagcacaagcaggaatcacgttgggagctcaggaggaagagagcaggggaaggtgggagagacagggactgcgacgcc

SEQ ID NO: 118344 - DNA, 80 bp, synthetic construct; identical to SEQ ID NO: 38619
  misc_feature 1..80: note = Artificially Synthesized Probe
  source 1..80: mol_type = other DNA

SEQ ID NO: 118345 - DNA, 80 bp, synthetic construct
  misc_feature 1..80: note = Artificially Synthesized Probe
  source 1..80: mol_type = other DNA
ggacgcctttcggggatggggtgaagtgtgacctccctcttcgctgagactttgttttctaatctgtaaaatgggaatag

SEQ ID NO: 118346 - DNA, 80 bp, synthetic construct
  misc_feature 1..80: note = Artificially Synthesized Probe
  source 1..80: mol_type = other DNA
gcttaaggtgctgggaccacaggcgtgtgccaccaccacacctagctaattttttattttttgtaagagatggggtctca

SEQ ID NO: 118347 - DNA, 80 bp, synthetic construct
  misc_feature 1..80: note = Artificially Synthesized Probe
  source 1..80: mol_type = other DNA
gtgtgtgtgtgtgtgtgtgtgtgtgtgttttgagacagaggcttgctctgtcgcccaggctgcagtgcagtgaaacaatc

SEQ ID NO: 118348 - DNA, 80 bp, synthetic construct
  misc_feature 1..80: note = Artificially Synthesized Probe
  source 1..80: mol_type = other DNA
taagctcaagtgatcctcctgcctcaacctcccaaagtgcgggtattacaggtgtgagccactgcgcctggcccaggact

SEQ ID NO: 118349 - DNA, 80 bp, synthetic construct; identical to SEQ ID NO: 38620
  misc_feature 1..80: note = Artificially Synthesized Probe
  source 1..80: mol_type = other DNA

SEQ ID NO: 118350 - DNA, 80 bp, synthetic construct
  misc_feature 1..80: note = Artificially Synthesized Probe
  source 1..80: mol_type = other DNA
agtcctttagaagaggaatttcttgggttctcagctttgccctttttttttccaggggcatatgggggcctctcagaccg

SEQ ID NO: 118351 - DNA, 80 bp, synthetic construct
  misc_feature 1..80: note = Artificially Synthesized Probe
  source 1..80: mol_type = other DNA
actccggaaacagccacaggtaccggaggtgtgagtgtgcatgtctccaggcctgggtgcctaccttcctgaccacctct

SEQ ID NO: 118352 - DNA, 80 bp, synthetic construct; identical to SEQ ID NO: 38621
  misc_feature 1..80: note = Artificially Synthesized Probe
  source 1..80: mol_type = other DNA

SEQ ID NO: 118353 - DNA, 80 bp, synthetic construct
  misc_feature 1..80: note = Artificially Synthesized Probe
  source 1..80: mol_type = other DNA
cagtggggtgggggagcactgccgggggagggggtttgtacctggcagggcctttgcctcctacctcacctcccccatcc

SEQ ID NO: 118354 - DNA, 80 bp, synthetic construct
  misc_feature 1..80: note = Artificially Synthesized Probe
  source 1..80: mol_type = other DNA
tctacctcagcctcccaaatagctgggattacaagcatacaccaccacacctggctaatttttgtattttttgtagagat

SEQ ID NO: 118355 - DNA, 80 bp, synthetic construct
  misc_feature 1..80: note = Artificially Synthesized Probe
  source 1..80: mol_type = other DNA
catcctcccagcgacagcagggtgagcagagcaggtctgcaggggaggaggtgcccgtgcacccaagaagtgaggtgtgt

SEQ ID NO: 118356 - DNA, 80 bp, synthetic construct
  misc_feature 1..80: note = Artificially Synthesized Probe
  source 1..80: mol_type = other DNA
cagctgagaggtgggcgggcgcatccccattccatcggatcctctgttccattgtctgtctgtctcctggacccatcctg

SEQ ID NO: 118357 - DNA, 80 bp, synthetic construct
  misc_feature 1..80: note = Artificially Synthesized Probe
  source 1..80: mol_type = other DNA
cccaggccgggagcaggctgggagccatgcgggggtgtgcgagggagatggatgccaccccgatgcctcctgcaccctca

SEQ ID NO: 118358 - DNA, 80 bp, synthetic construct; identical to SEQ ID NO: 38622
  misc_feature 1..80: note = Artificially Synthesized Probe
  source 1..80: mol_type = other DNA

SEQ ID NO: 118359 - DNA, 80 bp, synthetic construct
  misc_feature 1..80: note = Artificially Synthesized Probe
  source 1..80: mol_type = other DNA
tccccgtggttgaattggaagaggccatagccccaggctcagaggcccagggcgctgggtctggtggggacgcgggggtg

SEQ ID NO: 118360 - DNA, 80 bp, synthetic construct
  misc_feature 1..80: note = Artificially Synthesized Probe
  source 1..80: mol_type = other DNA
gggacagaggaggccgaaatccctcccccatgcttcctgacccttgttggccaagggcatctttgatggtacaagcagag

SEQ ID NO: 118361 - DNA, 80 bp, synthetic construct; identical to SEQ ID NO: 38623
  misc_feature 1..80: note = Artificially Synthesized Probe
  source 1..80: mol_type = other DNA

SEQ ID NO: 118362 - DNA, 80 bp, synthetic construct
  misc_feature 1..80: note = Artificially Synthesized Probe
  source 1..80: mol_type = other DNA
ggaatttatcctaagacactattggccactagcaagttatgagtttttgggggtggtatttgaattaatggtttatattt

SEQ ID NO: 118363 - DNA, 80 bp, synthetic construct
  misc_feature 1..80: note = Artificially Synthesized Probe
  source 1..80: mol_type = other DNA
gggaggtcgaggcaggcggatcacttgaggccaggagttcgagaccagcctggccaacatggtgaaatcccgtctttact

SEQ ID NO: 118364 - DNA, 80 bp, synthetic construct; identical to SEQ ID NO: 38598
  misc_feature 1..80: note = Artificially Synthesized Probe
  source 1..80: mol_type = other DNA

SEQ ID NO: 118365 - DNA, 80 bp, synthetic construct
  misc_feature 1..80: note = Artificially Synthesized Probe
  source 1..80: mol_type = other DNA
ttaggcagcttacagaattgtggggcaaactggagaactaattccaagccatagaactgatttgacctgataagaaaact

SEQ ID NO: 118366 - DNA, 80 bp, synthetic construct
  misc_feature 1..80: note = Artificially Synthesized Probe
  source 1..80: mol_type = other DNA
aataaaaaaatttgccagatatggcagcacatgcttgtataatcccagttactggggaggctgagacaggaagatcactt

SEQ ID NO: 118367 - DNA, 80 bp, synthetic construct; identical to SEQ ID NO: 38599
  misc_feature 1..80: note = Artificially Synthesized Probe
  source 1..80: mol_type = other DNA

SEQ ID NO: 118368 - DNA, 80 bp, synthetic construct
  misc_feature 1..80: note = Artificially Synthesized Probe
  source 1..80: mol_type = other DNA
ttaaaaagggccggacgtggtggctcatgcctgtaatcccagcactttgggaggccaaggcaggtgggtcacgaggtcaa

SEQ ID NO: 118369 - DNA, 80 bp, synthetic construct
  misc_feature 1..80: note = Artificially Synthesized Probe
  source 1..80: mol_type = other DNA
gattgcgccactgcactccagcctgccgacagagcaagactctgtctcaaaaagaaaaaaaaaaaaaccaacctatccaa

SEQ ID NO: 118370 - DNA, 80 bp, synthetic construct
  misc_feature 1..80: note = Artificially Synthesized Probe
  source 1..80: mol_type = other DNA
ctgtggttcaattgggatcatctctcatccaggttacctcaggagctctccagtgggtctcctggcttctgttctcattc

SEQ ID NO: 118371 - DNA, 80 bp, synthetic construct
  misc_feature 1..80: note = Artificially Synthesized Probe
  source 1..80: mol_type = other DNA
acccctgtagtccctcagcagcctaaggagcagttccgttgggcatcgccccacccatctaattttgcagatgaggagcc

SEQ ID NO: 118372 - DNA, 80 bp, synthetic construct; identical to SEQ ID NO: 38600
  misc_feature 1..80: note = Artificially Synthesized Probe
  source 1..80: mol_type = other DNA

SEQ ID NO: 118373 - DNA, 80 bp, synthetic construct
  misc_feature 1..80: note = Artificially Synthesized Probe
  source 1..80: mol_type = other DNA
gatcacgaggtcaggagttcgagaccagtctgaccaacatggtgaaactccgtctctattaaaaatacaaaaaatagttg

SEQ ID NO: 118374 - DNA, 80 bp, synthetic construct
  misc_feature 1..80: note = Artificially Synthesized Probe
  source 1..80: mol_type = other DNA
atttaaaaaaaagagtaaagaaaaaggccacttctctaatatgcagggaataaactatgagtgaataaactatgagcaag

SEQ ID NO: 118375 - DNA, 80 bp, synthetic construct
  misc_feature 1..80: note = Artificially Synthesized Probe
  source 1..80: mol_type = other DNA
tttacatatatatatttacatatatatatttacatatatatatttacatatatatttacatatatatttatatatatatt

SEQ ID NO: 118376 - DNA, 80 bp, synthetic construct
  misc_feature 1..80: note = Artificially Synthesized Probe
  source 1..80: mol_type = other DNA
tatacatacatatatttatatatatacacatatatttatatatatacacatatatttatatatatacacatatttatata

SEQ ID NO: 118377 - DNA, 80 bp, synthetic construct
  misc_feature 1..80: note = Artificially Synthesized Probe
  source 1..80: mol_type = other DNA
tatatatatacatatatatatttacatatatatgtatatatatatttatatatatatttacatatatatttacatatata

SEQ ID NO: 118378 - DNA, 80 bp, synthetic construct
  misc_feature 1..80: note = Artificially Synthesized Probe
  source 1..80: mol_type = other DNA
atatatgtacatatatattttatatgtacatatatatgtacatatatatttatatatgtacatatatatgtacatatata

SEQ ID NO: 118379 - DNA, 80 bp, synthetic construct
  misc_feature 1..80: note = Artificially Synthesized Probe
  source 1..80: mol_type = other DNA
atatatataaaaatgtatatataaatatatatatatatatgcacacacacatacatatattggctgggcactgcaacctg

SEQ ID NO: 118380 - DNA, 80 bp, synthetic construct
  misc_feature 1..80: note = Artificially Synthesized Probe
  source 1..80: mol_type = other DNA
attctggccaggctggtctcgaactcctgacctcatgatccgcccacttcagcctcccaaagtgctgagattacaggcat

SEQ ID NO: 118381 - DNA, 80 bp, synthetic construct; identical to SEQ ID NO: 38595
  misc_feature 1..80: note = Artificially Synthesized Probe
  source 1..80: mol_type = other DNA

SEQ ID NO: 118382 - DNA, 80 bp, synthetic construct; identical to SEQ ID NO: 38601
  misc_feature 1..80: note = Artificially Synthesized Probe
  source 1..80: mol_type = other DNA

SEQ ID NO: 118383 - DNA, 80 bp, synthetic construct
  misc_feature 1..80: note = Artificially Synthesized Probe
  source 1..80: mol_type = other DNA
aaaaaattagccgggcgtaggtggtgcacgcctgtagtcccagctactcgggaggctgagacaggagaatggcgtaaaac

SEQ ID NO: 118384 - DNA, 80 bp, synthetic construct
  misc_feature 1..80: note = Artificially Synthesized Probe
  source 1..80: mol_type = other DNA
gtttcaagactagcctgggcaatgtagtgagactccatctctacaaaaaatttgaaaaattagcagggcatggtggcaag

SEQ ID NO: 118385 - DNA, 80 bp, synthetic construct; identical to SEQ ID NO: 38602
  misc_feature 1..80: note = Artificially Synthesized Probe
  source 1..80: mol_type = other DNA

SEQ ID NO: 118386 - DNA, 80 bp, synthetic construct
  misc_feature 1..80: note = Artificially Synthesized Probe
  source 1..80: mol_type = other DNA
gggcaacatggcaagaacccgtctctacaagaaatagaaaaattagctgggcatggtagtgcacccctggagtcccaact

SEQ ID NO: 118387 - DNA, 80 bp, synthetic construct
  misc_feature 1..80: note = Artificially Synthesized Probe
  source 1..80: mol_type = other DNA
acgacaataataataaaattctccgtgtgtcccacaaggcctgcataatctggccagctctttgaacccatgtagttcat

SEQ ID NO: 118388 - DNA, 80 bp, synthetic construct
  misc_feature 1..80: note = Artificially Synthesized Probe
  source 1..80: mol_type = other DNA
tcctgggttcaagcgattctcctgcctcagcctcctgagtagctaggattacagatgaccactaccacaccctgctaatt

SEQ ID NO: 118389 - DNA, 80 bp, synthetic construct; identical to SEQ ID NO: 38603
  misc_feature 1..80: note = Artificially Synthesized Probe
  source 1..80: mol_type = other DNA

SEQ ID NO: 118390 - DNA, 80 bp, synthetic construct
  misc_feature 1..80: note = Artificially Synthesized Probe
  source 1..80: mol_type = other DNA
aagtgccaccacacccgactaattttttatttttagtaaagacgaggggtttcaccatgttggccaggctggcctcaaac

SEQ ID NO: 118391 - DNA, 80 bp, synthetic construct
  misc_feature 1..80: note = Artificially Synthesized Probe
  source 1..80: mol_type = other DNA
cccaaaattatcttactattttgcttgttttcttcccatctcaccagctcgtggcactaagaacttatttatttatttat

SEQ ID NO: 118392 - DNA, 80 bp, synthetic construct
  misc_feature 1..80: note = Artificially Synthesized Probe
  source 1..80: mol_type = other DNA
aattttttttttttttttttttttggatttttagtagagatggggtttcactgtgttggccaggatggtctcgatctcct

SEQ ID NO: 118393 - DNA, 80 bp, synthetic construct
  misc_feature 1..80: note = Artificially Synthesized Probe
  source 1..80: mol_type = other DNA
gaagaggctgggcacggtggctatagtgccagcctatagtcccagcagtttgggaggctgaggtgggaggacggtttgaa

SEQ ID NO: 118394 - DNA, 80 bp, synthetic construct
  misc_feature 1..80: note = Artificially Synthesized Probe
  source 1..80: mol_type = other DNA
ggtggatgaatcacgaggtcaggagttaaagaccagcctggccaaccccatctgtactaaaaatacaaaaaaaaaaaaaa

SEQ ID NO: 118395 - DNA, 80 bp, synthetic construct; identical to SEQ ID NO: 38604
  misc_feature 1..80: note = Artificially Synthesized Probe
  source 1..80: mol_type = other DNA

SEQ ID NO: 118396 - DNA, 80 bp, synthetic construct
  misc_feature 1..80: note = Artificially Synthesized Probe
  source 1..80: mol_type = other DNA
ataaagatgggtcactgtaccttcttggccctcagcttcattatctacaaattgggggtggaggttaaatcatatgatga

SEQ ID NO: 118397 - DNA, 80 bp, synthetic construct
  misc_feature 1..80: note = Artificially Synthesized Probe
  source 1..80: mol_type = other DNA
atttactttttatttttaacttaaacgactgtgtattttccacagtcttatgatgagaaaggctccagaatcacgtgtag

SEQ ID NO: 118398 - DNA, 80 bp, synthetic construct; identical to SEQ ID NO: 38734
  misc_feature 1..80: note = Artificially Synthesized Probe
  source 1..80: mol_type = other DNA

SEQ ID NO: 118399 - DNA, 80 bp, synthetic construct
  misc_feature 1..80: note = Artificially Synthesized Probe
  source 1..80: mol_type = other DNA
gcaaagcttccaacaaggataacctagaaagcaggcccgcaggcagctgtagctgcagcctcttccgcgagacttaagct

SEQ ID NO: 118400 - DNA, 80 bp, synthetic construct
  misc_feature 1..80: note = Artificially Synthesized Probe
  source 1..80: mol_type = other DNA
cagctccctgaaagctccttgcagagaacttctctgtttaataacctcggaaaagcattaaaagcgagtctgaagaactc

SEQ ID NO: 118401 - DNA, 80 bp, synthetic construct
  misc_feature 1..80: note = Artificially Synthesized Probe
  source 1..80: mol_type = other DNA
tggagagaaactgtttgaatttccccaaagccaattcgagttgttgttccttctgggaggatacatctcccagcacctcc

SEQ ID NO: 118402 - DNA, 80 bp, synthetic construct; identical to SEQ ID NO: 38735
  misc_feature 1..80: note = Artificially Synthesized Probe
  source 1..80: mol_type = other DNA

SEQ ID NO: 118403 - DNA, 80 bp, synthetic construct
  misc_feature 1..80: note = Artificially Synthesized Probe
  source 1..80: mol_type = other DNA
agctgtgtggccagtggactcagcatccacgtccgagggactgctcacgttctctgaagatgttcaaggctgcccatgtg

SEQ ID NO: 118404 - DNA, 80 bp, synthetic construct
  misc_feature 1..80: note = Artificially Synthesized Probe
  source 1..80: mol_type = other DNA
tcctctcagggccaatcggactgaggacagtcccaaacccccgggccatcccgagcctaagtgtgtagtgaccccagggg

SEQ ID NO: 118405 - DNA, 80 bp, synthetic construct
  misc_feature 1..80: note = Artificially Synthesized Probe
  source 1..80: mol_type = other DNA
ctgagggagaaggcggctcgtaggctgctgtgctgggcagagggtggatggcggggttgaccaacgatgaggccccagga

SEQ ID NO: 118406 - DNA, 80 bp, synthetic construct; identical to SEQ ID NO: 38736
  misc_feature 1..80: note = Artificially Synthesized Probe
  source 1..80: mol_type = other DNA

SEQ ID NO: 118407 - DNA, 80 bp, synthetic construct
  misc_feature 1..80: note = Artificially Synthesized Probe
  source 1..80: mol_type = other DNA
gcaggaggtcagtacgaggagacggggacgacggtacagagcaagacagagacactcaccgagacagagacacagagaca

SEQ ID NO: 118408 - DNA, 80 bp, synthetic construct
  misc_feature 1..80: note = Artificially Synthesized Probe
  source 1..80: mol_type = other DNA
aatcaaggtaattgagacactcagagaggtgctcttatttcatcagtcagtacaagttaattggggtgaggtaagtaaag

SEQ ID NO: 118409 - DNA, 80 bp, synthetic construct
  misc_feature 1..80: note = Artificially Synthesized Probe
  source 1..80: mol_type = other DNA
cggttgggcctcataagctgtcgctacctgactgttttttgacctataaaaatggcagcttcacaaggcttgaccgaatg

SEQ ID NO: 118410 - DNA, 80 bp, synthetic construct
  misc_feature 1..80: note = Artificially Synthesized Probe
  source 1..80: mol_type = other DNA
gggtttacaaggggcccaggtcgctcccgttcttgatgattaattttctaaaactggtatttctaattcctgatggtaga

SEQ ID NO: 118411 - DNA, 80 bp, synthetic construct
  misc_feature 1..80: note = Artificially Synthesized Probe
  source 1..80: mol_type = other DNA
ctgaaaggggccctgggcagcccgagctgtgaactcctcctttggacagggctagctcctcacctgctctgctgcaggcc

SEQ ID NO: 118412 - DNA, 80 bp, synthetic construct; identical to SEQ ID NO: 38737
  misc_feature 1..80: note = Artificially Synthesized Probe
  source 1..80: mol_type = other DNA

SEQ ID NO: 118413 - DNA, 80 bp, synthetic construct
  misc_feature 1..80: note = Artificially Synthesized Probe
  source 1..80: mol_type = other DNA
gagagtggacagtttcataaatcttgtagttatcttgtgcataacataactatgctgcatcttgggggtcaaagcactcc

SEQ ID NO: 118414 - DNA, 80 bp, synthetic construct
  misc_feature 1..80: note = Artificially Synthesized Probe
  source 1..80: mol_type = other DNA
ataacataactatgctgcatcttgggggtcaaagcactcctgtgcggtggtgttcatgggtgttagcatttctttcttct

SEQ ID NO: 118415 - DNA, 80 bp, synthetic construct
  misc_feature 1..80: note = Artificially Synthesized Probe
  source 1..80: mol_type = other DNA
ctctgcatctgcacccgtgtttgtgactctccattgccctgcagaagatggcatttaatcctccccgctgcgggccaagg

SEQ ID NO: 118416 - DNA, 80 bp, synthetic construct
  misc_feature 1..80: note = Artificially Synthesized Probe
  source 1..80: mol_type = other DNA
agggcatggcagcaggtcctggatacttggataccatcgtgctactttttctttgaaataaaatgttcattttccagtat

SEQ ID NO: 118417 - DNA, 80 bp, synthetic construct; identical to SEQ ID NO: 38738
  misc_feature 1..80: note = Artificially Synthesized Probe
  source 1..80: mol_type = other DNA

SEQ ID NO: 118418 - DNA, 80 bp, synthetic construct
  misc_feature 1..80: note = Artificially Synthesized Probe
  source 1..80: mol_type = other DNA
aggcaagggctgaggtcgatactggaggagtcggcaaaggagggtggtgcgtgcagggagaagtgatgaaccctgaggag

SEQ ID NO: 118419 - DNA, 80 bp, synthetic construct
  misc_feature 1..80: note = Artificially Synthesized Probe
  source 1..80: mol_type = other DNA
agcctctggcatagctagagtaatctgctctttaactgtagctgaacatgggccaggggctggtcagtgatgctgattag

SEQ ID NO: 118420 - DNA, 80 bp, synthetic construct
  misc_feature 1..80: note = Artificially Synthesized Probe
  source 1..80: mol_type = other DNA
atggcccatgtcttcctggcttagttctttgccaatagacacaaattctctcttgctccaagccttagcatgtggtttgc

SEQ ID NO: 118421 - DNA, 80 bp, synthetic construct
  misc_feature 1..80: note = Artificially Synthesized Probe
  source 1..80: mol_type = other DNA
tctgcaacattcctgggttggaccctaacctccaatggcatggtgttgggggtgaggcctctgggaggagactgagccct

SEQ ID NO: 118422 - DNA, 80 bp, synthetic construct
  misc_feature 1..80: note = Artificially Synthesized Probe
  source 1..80: mol_type = other DNA
cctccagaactgggagaaaatcaacccctgttgggttttgagacggagtctcactctgtcgcccaggctggagtgcagtg

SEQ ID NO: 118423 - DNA, 80 bp, synthetic construct
  misc_feature 1..80: note = Artificially Synthesized Probe
  source 1..80: mol_type = other DNA
tgaactcctgacctcaagtgatcctcctgtctcggcctcccaaagtgctcgaattacagccgtgagccaccatgcctggt

SEQ ID NO: 118424 - DNA, 80 bp, synthetic construct; identical to SEQ ID NO: 38739
  misc_feature 1..80: note = Artificially Synthesized Probe
  source 1..80: mol_type = other DNA

SEQ ID NO: 118425 - DNA, 80 bp, synthetic construct
  misc_feature 1..80: note = Artificially Synthesized Probe
  source 1..80: mol_type = other DNA
catccatctatcacgtgacccaggctttcctcttctgagtatccaagagaaatgaaggcacctaactaccccaagtctag

SEQ ID NO: 118426 - DNA, 80 bp, synthetic construct
  misc_feature 1..80: note = Artificially Synthesized Probe
  source 1..80: mol_type = other DNA
gaataatcacactgcctgagaggaaccaacccaaaaaatagcttcagtcgcgtgactccattttatgtgatgttctagag

SEQ ID NO: 118427 - DNA, 80 bp, synthetic construct
  misc_feature 1..80: note = Artificially Synthesized Probe
  source 1..80: mol_type = other DNA
aggagcaagccggctggtggatggacttgtcaccttgaccttggcgatggtttcccaagaatacacacgtgaaaacttat

SEQ ID NO: 118428 - DNA, 80 bp, synthetic construct; identical to SEQ ID NO: 38740
  misc_feature 1..80: note = Artificially Synthesized Probe
  source 1..80: mol_type = other DNA

SEQ ID NO: 118429 - DNA, 80 bp, synthetic construct
  misc_feature 1..80: note = Artificially Synthesized Probe
  source 1..80: mol_type = other DNA
ccaacggccacttttatgttctgtctgacttagagtatgcaaagtacttctcacaccgaagacttcaaggcacacttacc

SEQ ID NO: 118430 - DNA, 80 bp, synthetic construct
  misc_feature 1..80: note = Artificially Synthesized Probe
  source 1..80: mol_type = other DNA
acatggacacttctcaggaagtctgatctcctcctaccagcgccgagggatggccaagcccccagcatggtgctgatgga

SEQ ID NO: 118431 - DNA, 80 bp, synthetic construct
  misc_feature 1..80: note = Artificially Synthesized Probe
  source 1..80: mol_type = other DNA
tgtttggggcctttcttctgagcttccccacactccccacagcctgctgggaactcataccacagggcactaaattcccc

SEQ ID NO: 118432 - DNA, 80 bp, synthetic construct
  misc_feature 1..80: note = Artificially Synthesized Probe
  source 1..80: mol_type = other DNA
ttatttccaaactgctttcttattttttccatctttacagcctcctgataagcagggcattgaaaagatagaaccggagg

SEQ ID NO: 118433 - DNA, 80 bp, synthetic construct; identical to SEQ ID NO: 38741
  misc_feature 1..80: note = Artificially Synthesized Probe
  source 1..80: mol_type = other DNA

SEQ ID NO: 118434 - DNA, 80 bp, synthetic construct
  misc_feature 1..80: note = Artificially Synthesized Probe
  source 1..80: mol_type = other DNA
accgggggtctcagtctatgaactgggggattaggtcacatgtttgctgtagtgcgaggacacccaggacatggaagccc

SEQ ID NO: 118435 - DNA, 80 bp, synthetic construct
  misc_feature 1..80: note = Artificially Synthesized Probe
  source 1..80: mol_type = other DNA
cctgcccaaccatccccatccccacactcacacacaggaagccacacacacaaagggcacatttctgtttcaaagccttc

SEQ ID NO: 118436 - DNA, 80 bp, synthetic construct; identical to SEQ ID NO: 38742
  misc_feature 1..80: note = Artificially Synthesized Probe
  source 1..80: mol_type = other DNA

SEQ ID NO: 118437 - DNA, 80 bp, synthetic construct
  misc_feature 1..80: note = Artificially Synthesized Probe
  source 1..80: mol_type = other DNA
catggtggtgggtgcctgtaatcccagctactcaggaggctgagtcaggagaattgcttgaacccgggaggcagaggttg

SEQ ID NO: 118438 - DNA, 80 bp, synthetic construct
  misc_feature 1..80: note = Artificially Synthesized Probe
  source 1..80: mol_type = other DNA
ccctctgcctccacctttggtgtttccacatgtgttttgcaatgtgtgagcgctttacagactgcaagtaagtcgacact

SEQ ID NO: 118439 - DNA, 80 bp, synthetic construct
  misc_feature 1..80: note = Artificially Synthesized Probe
  source 1..80: mol_type = other DNA
ggcgtgggctggatagggtggaggatgctgagctcctgtgaggttcctcggagctaggctggggccctggtaggttttaa

SEQ ID NO: 118440 - DNA, 80 bp, synthetic construct; identical to SEQ ID NO: 38743
  misc_feature 1..80: note = Artificially Synthesized Probe
  source 1..80: mol_type = other DNA

SEQ ID NO: 118441 - DNA, 80 bp, synthetic construct
  misc_feature 1..80: note = Artificially Synthesized Probe
  source 1..80: mol_type = other DNA
ccccatgcacctcctggggagagagccgtgccagtggggagcactggacttagagtcaaaaaacccacactcatgcctgt

SEQ ID NO: 118442 - DNA, 80 bp, synthetic construct
  misc_feature 1..80: note = Artificially Synthesized Probe
  source 1..80: mol_type = other DNA
aggcaggagaatggcatgaacccgggaggcggagcttgcagtgagccgagatcttgccactgcactgcagcctcggcgac

SEQ ID NO: 118443 - DNA, 80 bp, synthetic construct
  misc_feature 1..80: note = Artificially Synthesized Probe
  source 1..80: mol_type = other DNA
ttgaggtctggcccagaacaggggtgcgataaataattgttgactgaagtgttgatggataatatatccttttcccagat

SEQ ID NO: 118444 - DNA, 80 bp, synthetic construct
  misc_feature 1..80: note = Artificially Synthesized Probe
  source 1..80: mol_type = other DNA
gaaagcccctgcaaacaggtttcatcatacccttatccctcacttttctcccctactaaatagggcagtagtgctgccaa

SEQ ID NO: 118445 - DNA, 80 bp, synthetic construct
  misc_feature 1..80: note = Artificially Synthesized Probe
  source 1..80: mol_type = other DNA
cctgcacctgccacggaggccacgccgctgtctccctccctggggatgagctcccccagtgtccccagccccacatcacc

SEQ ID NO: 118446 - DNA, 80 bp, synthetic construct
  misc_feature 1..80: note = Artificially Synthesized Probe
  source 1..80: mol_type = other DNA
tgactgaagtgttgatggataatatatccttttcccagatcagaaagttaagtgacttgaccgagttacagagccagacc

SEQ ID NO: 118447 - DNA, 80 bp, synthetic construct; identical to SEQ ID NO: 38744
  misc_feature 1..80: note = Artificially Synthesized Probe
  source 1..80: mol_type = other DNA

SEQ ID NO: 118448 - DNA, 80 bp, synthetic construct
  misc_feature 1..80: note = Artificially Synthesized Probe
  source 1..80: mol_type = other DNA
tggggaaagtcacatgattccctgagcctcaattccactgcaaatggggaccaaaagccacaggcgggtttgcagaattg

SEQ ID NO: 118449 - DNA, 80 bp, synthetic construct
  misc_feature 1..80: note = Artificially Synthesized Probe
  source 1..80: mol_type = other DNA
gattgatttgaggggccaggactggtttcccacccaggcccacccccacctgagcattcaggcactggactcgtggctcc

SEQ ID NO: 118450 - DNA, 80 bp, synthetic construct
  misc_feature 1..80: note = Artificially Synthesized Probe
  source 1..80: mol_type = other DNA
attagggtgggccctgacctagtaggactggtgtcctttaaggagatgaggacactgacacactggtggggatgacctgt

SEQ ID NO: 118451 - DNA, 80 bp, synthetic construct; identical to SEQ ID NO: 38745
  misc_feature 1..80: note = Artificially Synthesized Probe
  source 1..80: mol_type = other DNA

SEQ ID NO: 118452 - DNA, 80 bp, synthetic construct
  misc_feature 1..80: note = Artificially Synthesized Probe
  source 1..80: mol_type = other DNA
tgctcccccaagacaggaggaacgcagattgcttttgaacttttattccagccccgcaagagtgggtttcaggaatggca

SEQ ID NO: 118453 - DNA, 80 bp, synthetic construct
  misc_feature 1..80: note = Artificially Synthesized Probe
  source 1..80: mol_type = other DNA
gctcgtggccacgacgggctccggaggcccacatccttcatttgcaccattctggtactgacagtggttcctcccctgtg

SEQ ID NO: 118454 - DNA, 80 bp, synthetic construct; identical to SEQ ID NO: 38746
  misc_feature 1..80: note = Artificially Synthesized Probe
  source 1..80: mol_type = other DNA

SEQ ID NO: 118455 - DNA, 80 bp, synthetic construct
  misc_feature 1..80: note = Artificially Synthesized Probe
  source 1..80: mol_type = other DNA
ggaagattttagcccagttcagagataaccaagagattggttttcttctcaaagggggatgattgctctttccttggaaa

SEQ ID NO: 118456 - DNA, 80 bp, synthetic construct
  misc_feature 1..80: note = Artificially Synthesized Probe
  source 1..80: mol_type = other DNA
ttttcttctcaaagggggatgattgctctttccttggaaatgttacttattcatgatggtttagatgtcggggatgcaat

SEQ ID NO: 118457 - DNA, 80 bp, synthetic construct
  misc_feature 1..80: note = Artificially Synthesized Probe
  source 1..80: mol_type = other DNA
ctgaacacagaggagcatgaatgcaggtgagaacgaggcctgtgctggatccaggggagtagaaacacagggctgcacac

SEQ ID NO: 118458 - DNA, 80 bp, synthetic construct
  misc_feature 1..80: note = Artificially Synthesized Probe
  source 1..80: mol_type = other DNA
tgagctcactgggctaccttagcaactacatgaaacacagatcaaagtccctcataggagcatgaagtgtccctgaaaag

SEQ ID NO: 118459 - DNA, 80 bp, synthetic construct
  misc_feature 1..80: note = Artificially Synthesized Probe
  source 1..80: mol_type = other DNA
tggggaggaagattctgacttgagatttgcctgttgatgggcaaggacgaggcactcccattcatccttgcccaacgccc

SEQ ID NO: 118460 - DNA, 80 bp, synthetic construct
  misc_feature 1..80: note = Artificially Synthesized Probe
  source 1..80: mol_type = other DNA
caggcatggatgaggctgggccccaggtggcatctcccaggcctgggcggtgatggcatgaatgtaagacaggcatggat

SEQ ID NO: 118461 - DNA, 80 bp, synthetic construct; identical to SEQ ID NO: 38747
  misc_feature 1..80: note = Artificially Synthesized Probe
  source 1..80: mol_type = other DNA

SEQ ID NO: 118462 - DNA, 80 bp, synthetic construct
  misc_feature 1..80: note = Artificially Synthesized Probe
  source 1..80: mol_type = other DNA
agaaaccagccctgaccacaccttgactttaggccagtgagccctgcattggacttctggctttcacaacgctaagataa

SEQ ID NO: 118463 - DNA, 80 bp, synthetic construct
  misc_feature 1..80: note = Artificially Synthesized Probe
  source 1..80: mol_type = other DNA
cttttggtcattaataaacaggggcgtggggtggctgggctgaggcacagcgcagccttactggctacattttgcaactg

SEQ ID NO: 118464 - DNA, 80 bp, synthetic construct; identical to SEQ ID NO: 38748
  misc_feature 1..80: note = Artificially Synthesized Probe
  source 1..80: mol_type = other DNA

SEQ ID NO: 118465 - DNA, 80 bp, synthetic construct
  misc_feature 1..80: note = Artificially Synthesized Probe
  source 1..80: mol_type = other DNA
ccgcttccccgctgctggctgcccagccagagccagggctggggcaggcgggaacagcgaggccagcaggccacgggcca

SEQ ID NO: 118466 - DNA, 80 bp, synthetic construct
  misc_feature 1..80: note = Artificially Synthesized Probe
  source 1..80: mol_type = other DNA
ctctgccctgacctggagcccaccaggtccaggggctctcaaagttctggctcttccccgtcatcagcacctaagtgttc

SEQ ID NO: 118467 - DNA, 80 bp, synthetic construct
  misc_feature 1..80: note = Artificially Synthesized Probe
  source 1..80: mol_type = other DNA
gtttgaagggcaagggaagaaaagctcttgtagtcactgaaataaaaccacaaacctgactggctgttccagtaccttag

SEQ ID NO: 118468 - DNA, 80 bp, synthetic construct; identical to SEQ ID NO: 38749
  misc_feature 1..80: note = Artificially Synthesized Probe
  source 1..80: mol_type = other DNA

SEQ ID NO: 118469 - DNA, 80 bp, synthetic construct
  misc_feature 1..80: note = Artificially Synthesized Probe
  source 1..80: mol_type = other DNA
agatggcagatcactcgaggttgggagtttgagaccagtctggccaatatggcgaaaccccatctctactaaaaatacaa

SEQ ID NO: 118470 - DNA, 80 bp, synthetic construct
  misc_feature 1..80: note = Artificially Synthesized Probe
  source 1..80: mol_type = other DNA
tcaatcaatcaatcaagctagctagctgaaggcaaagactgaagttggggcctggtgcacacagcagcattccatgagta

SEQ ID NO: 118471 - DNA, 80 bp, synthetic construct
  misc_feature 1..80: note = Artificially Synthesized Probe
  source 1..80: mol_type = other DNA
cctgggaagccacttaatctctttggactatgatttaatgtcctgtagagcaaagctcctgatctcctctcttgggcaca

SEQ ID NO: 118472 - DNA, 80 bp, synthetic construct; identical to SEQ ID NO: 38636
  misc_feature 1..80: note = Artificially Synthesized Probe
  source 1..80: mol_type = other DNA

SEQ ID NO: 118473 - DNA, 80 bp, synthetic construct
  misc_feature 1..80: note = Artificially Synthesized Probe
  source 1..80: mol_type = other DNA
ttggcctggggagacagcagacagacccagggcggagagtccaaggtgccatcagtcagagaaggccttgcaaagaaagc

SEQ ID NO: 118474 - DNA, 80 bp, synthetic construct
  misc_feature 1..80: note = Artificially Synthesized Probe
  source 1..80: mol_type = other DNA
gggcagagataactttttaacaacccaaagttatttgaaaatcaagaggctgtcaggataatactgcagagagcccagta

SEQ ID NO: 118475 - DNA, 80 bp, synthetic construct; identical to SEQ ID NO: 38750
  misc_feature 1..80: note = Artificially Synthesized Probe
  source 1..80: mol_type = other DNA

SEQ ID NO: 118476 - DNA, 80 bp, synthetic construct
  misc_feature 1..80: note = Artificially Synthesized Probe
  source 1..80: mol_type = other DNA
caggcagcagatataagctcaggtccatatctgaccagtgcgtgcaggctaggcagcgggaggatacgcaaacctctccc

SEQ ID NO: 118477 - DNA, 80 bp, synthetic construct
  misc_feature 1..80: note = Artificially Synthesized Probe
  source 1..80: mol_type = other DNA
gcatctgtgtgtgctatggtggtgttctagaagctggcggagcttcagaaccacctggggggctttagacaaatgtagac

SEQ ID NO: 118478 - DNA, 80 bp, synthetic construct
  misc_feature 1..80: note = Artificially Synthesized Probe
  source 1..80: mol_type = other DNA
gcagcaggctcgtggggccagggtgctgccctgtggctgggggtgcagctcagcactctgacagccacatggagcggggg

SEQ ID NO: 118479 - DNA, 80 bp, synthetic construct; identical to SEQ ID NO: 38751
  misc_feature 1..80: note = Artificially Synthesized Probe
  source 1..80: mol_type = other DNA

SEQ ID NO: 118480 - DNA, 80 bp, synthetic construct
  misc_feature 1..80: note = Artificially Synthesized Probe
  source 1..80: mol_type = other DNA
gcacagcaagtgctcggtgaatactggcaggtgcgattttcatgagctctgattcttgcaaggggctggctgacttctgg

SEQ ID NO: 118481 - DNA, 80 bp, synthetic construct
  misc_feature 1..80: note = Artificially Synthesized Probe
  source 1..80: mol_type = other DNA
agtggctcaggataaaatctggagcctgtccactccacgctcactgtcaggagcctcctaatgaaccatcgaggctgtgt

SEQ ID NO: 118482 - DNA, 80 bp, synthetic construct
  misc_feature 1..80: note = Artificially Synthesized Probe
  source 1..80: mol_type = other DNA
cagccatgcctcccctctctcccttgccactctctgcagcttgctcagcccagctgcacagccctcctgcttccctctaa

SEQ ID NO: 118483 - DNA, 80 bp, synthetic construct; identical to SEQ ID NO: 38752
  misc_feature 1..80: note = Artificially Synthesized Probe
  source 1..80: mol_type = other DNA

SEQ ID NO: 118484 - DNA, 80 bp, synthetic construct
  misc_feature 1..80: note = Artificially Synthesized Probe
  source 1..80: mol_type = other DNA
ggacctggagtttcacaggacaaatctccctgaagcccatccatcccatggggaagcgaaggccaatctcgaggtccctt

SEQ ID NO: 118485 - DNA, 80 bp, synthetic construct
  misc_feature 1..80: note = Artificially Synthesized Probe
  source 1..80: mol_type = other DNA
ccctcaagaatcaggcaattcctagagaaagtaaacagctcacctgagagctggattttcaaatgctaaccaactaaaac

SEQ ID NO: 118486 - DNA, 80 bp, synthetic construct
  misc_feature 1..80: note = Artificially Synthesized Probe
  source 1..80: mol_type = other DNA
aatgattccagctgccaacgctaaacccacttacactgcctacttagtctgctccttcctgcagaaatcatggtaaagct

SEQ ID NO: 118487 - DNA, 80 bp, synthetic construct; identical to SEQ ID NO: 38753
  misc_feature 1..80: note = Artificially Synthesized Probe
  source 1..80: mol_type = other DNA

SEQ ID NO: 118488 - DNA, 80 bp, synthetic construct
  misc_feature 1..80: note = Artificially Synthesized Probe
  source 1..80: mol_type = other DNA
cgtggctaccaccccaggggcttggatgcactggattttgtgtgtgggggcatggtgaataccgcctcgcagcccctctg

SEQ ID NO: 118489 - DNA, 80 bp, synthetic construct
  misc_feature 1..80: note = Artificially Synthesized Probe
  source 1..80: mol_type = other DNA
cactgccaatggggcagggatgaccagtagagccagctggatgggctgatttttgaagcagagaatttgggaccagtgac

SEQ ID NO: 118490 - DNA, 80 bp, synthetic construct
  misc_feature 1..80: note = Artificially Synthesized Probe
  source 1..80: mol_type = other DNA
tactctccaatttcacctggcatttaacacaaattgaccagaatcattccctgttctttgttcctaataaggacaggctt

SEQ ID NO: 118491 - DNA, 80 bp, synthetic construct
  misc_feature 1..80: note = Artificially Synthesized Probe
  source 1..80: mol_type = other DNA
ccattcatccacccaccccactacccactcatctatccatttgcctacccattcacccactcattcgtccatccaactag

SEQ ID NO: 118492 - DNA, 80 bp, synthetic construct; identical to SEQ ID NO: 38754
  misc_feature 1..80: note = Artificially Synthesized Probe
  source 1..80: mol_type = other DNA

SEQ ID NO: 118493 - DNA, 80 bp, synthetic construct
  misc_feature 1..80: note = Artificially Synthesized Probe
  source 1..80: mol_type = other DNA
ggaggctattctaattagggggaaggtcagggaaggcttctctaggatgtaactgtcaggactgaatgtcgcccaggagt

SEQ ID NO: 118494 - DNA, 80 bp, synthetic construct
  misc_feature 1..80: note = Artificially Synthesized Probe
  source 1..80: mol_type = other DNA
caggaggggcaggtgcgaatgagggaggttctggggccggggtcacctattggcttctcttaaggcgtggccggggctag

SEQ ID NO: 118495 - DNA, 80 bp, synthetic construct; identical to SEQ ID NO: 38755
  misc_feature 1..80: note = Artificially Synthesized Probe
  source 1..80: mol_type = other DNA

SEQ ID NO: 118496 - DNA, 80 bp, synthetic construct
  misc_feature 1..80: note = Artificially Synthesized Probe
  source 1..80: mol_type = other DNA
agaaatttagcaatttgaaaaaagcatttccttcccttatttatatctcttgacccttatcctaggggaatggcgaggga

SEQ ID NO: 118497 - DNA, 80 bp, synthetic construct
  misc_feature 1..80: note = Artificially Synthesized Probe
  source 1..80: mol_type = other DNA
atggaagcgatggtaaagaacatcagatttatctggctttactatcggcgcctggtatgtgtcagtatctctcaataaag

SEQ ID NO: 118498 - DNA, 80 bp, synthetic construct
  misc_feature 1..80: note = Artificially Synthesized Probe
  source 1..80: mol_type = other DNA
cagaatacgtcactcctgggaaagatgaaaataatgcagaaaaggcaaagtctccctcttccctcccccacctcactcct

SEQ ID NO: 118499 - DNA, 80 bp, synthetic construct
  misc_feature 1..80: note = Artificially Synthesized Probe
  source 1..80: mol_type = other DNA
atacagacacatgccagtgctcttgttgaacaaaatggggtcacactctagcccatggctcctctgcagcccactccctt

SEQ ID NO: 118500 - DNA, 80 bp, synthetic construct
  misc_feature 1..80: note = Artificially Synthesized Probe
  source 1..80: mol_type = other DNA
ccagggatgccacgccacatgaatcaccaagaaatgaagcaatgcacttgccagtccctcctctaaatgctttctctaaa

SEQ ID NO: 118501 - DNA, 80 bp, synthetic construct; identical to SEQ ID NO: 38756
  misc_feature 1..80: note = Artificially Synthesized Probe
  source 1..80: mol_type = other DNA

SEQ ID NO: 118502 - DNA, 80 bp, synthetic construct
  misc_feature 1..80: note = Artificially Synthesized Probe
  source 1..80: mol_type = other DNA
aaaaatattccccacatgttcagaaaaaaagggtaggttacaaaatggtatggaacagcgagtccgacattcagagaaaa

SEQ ID NO: 118503 - DNA, 80 bp, synthetic construct
  misc_feature 1..80: note = Artificially Synthesized Probe
  source 1..80: mol_type = other DNA
caaaatggtatggaacagcgagtccgacattcagagaaaaggtataaaaaagatgcagaggcatatcttgttttattacc

SEQ ID NO: 118504 - DNA, 80 bp, synthetic construct
  misc_feature 1..80: note = Artificially Synthesized Probe
  source 1..80: mol_type = other DNA
ctgtcacccaggctggagtacagtggcgagatcacagctcactgcagcctcaaactcttggcctcaagtgaacctcccac

SEQ ID NO: 118505 - DNA, 80 bp, synthetic construct; identical to SEQ ID NO: 38637
  misc_feature 1..80: note = Artificially Synthesized Probe
  source 1..80: mol_type = other DNA

SEQ ID NO: 118506 - DNA, 80 bp, synthetic construct
  misc_feature 1..80: note = Artificially Synthesized Probe
  source 1..80: mol_type = other DNA
tgatatctgtcatggtgatctgagatgactgatctttgatgcttctattgtaattgttttggggtgccatgaactgtacc

SEQ ID NO: 118507 - DNA, 80 bp, synthetic construct
  misc_feature 1..80: note = Artificially Synthesized Probe
  source 1..80: mol_type = other DNA
ggaataaaaaaagaaataaggccaattaatgatcacacaatggcctctaactgctcaagtgaaaggaagagtcactcatc

SEQ ID NO: 118508 - DNA, 80 bp, synthetic construct
  misc_feature 1..80: note = Artificially Synthesized Probe
  source 1..80: mol_type = other DNA
tgaacacacaactgataagaaactggaacaaccatatcactgatatggagaaagttttaactggtttggatagaaaatca

SEQ ID NO: 118509 - DNA, 80 bp, synthetic construct; identical to SEQ ID NO: 38757
  misc_feature 1..80: note = Artificially Synthesized Probe
  source 1..80: mol_type = other DNA

SEQ ID NO: 118510 - DNA, 80 bp, synthetic construct
  misc_feature 1..80: note = Artificially Synthesized Probe
  source 1..80: mol_type = other DNA
gctccgcctcccgggttcatgccattctcctgcctcagcctcccgagtagctgggactacaggcgcccgccaccacaccc

SEQ ID NO: 118511 - DNA, 80 bp, synthetic construct
  misc_feature 1..80: note = Artificially Synthesized Probe
  source 1..80: mol_type = other DNA
agatgccatctaggattttcatagctagagaggagaaatcgatgtctggtttcaaagattcaaaggacaggctgactccc

SEQ ID NO: 118512 - DNA, 80 bp, synthetic construct; identical to SEQ ID NO: 38758
  misc_feature 1..80: note = Artificially Synthesized Probe
  source 1..80: mol_type = other DNA

SEQ ID NO: 118513 - DNA, 80 bp, synthetic construct
  misc_feature 1..80: note = Artificially Synthesized Probe
  source 1..80: mol_type = other DNA
tatagctgccataaatagtgattcctctgacggatctcggcaaagtcaattgaaaaccttctggaaaggattcaccattc

SEQ ID NO: 118514 - DNA, 80 bp, synthetic construct
  misc_feature 1..80: note = Artificially Synthesized Probe
  source 1..80: mol_type = other DNA
tcgaagtggagctggccgggcacggtggctcacgcctgtaatcccagcactttgggaggccgaggcaggaggatcacgag

SEQ ID NO: 118515 - DNA, 80 bp, synthetic construct
  misc_feature 1..80: note = Artificially Synthesized Probe
  source 1..80: mol_type = other DNA
ccaagactttgctgaagccctctgaaggcagccatatctggaactccattcagctcatgcccattacctgcaagcctctt

SEQ ID NO: 118516 - DNA, 80 bp, synthetic construct
  misc_feature 1..80: note = Artificially Synthesized Probe
  source 1..80: mol_type = other DNA
gagctgagatcagagattgcgtcactgcactccagcctgggcaacagagggagactctgtctaaacaaacaaacaaacaa

SEQ ID NO: 118517 - DNA, 80 bp, synthetic construct
  misc_feature 1..80: note = Artificially Synthesized Probe
  source 1..80: mol_type = other DNA
acaaaggattgagaatattccataagcctagttgataaagcagcagcagggtttcagagaaaagactccaattctgagaa

SEQ ID NO: 118518 - DNA, 80 bp, synthetic construct; identical to SEQ ID NO: 38759
  misc_feature 1..80: note = Artificially Synthesized Probe
  source 1..80: mol_type = other DNA

SEQ ID NO: 118519 - DNA, 80 bp, synthetic construct
  misc_feature 1..80: note = Artificially Synthesized Probe
  source 1..80: mol_type = other DNA
aaaaagtgtgcatctcgctttaatgtggtatttgctttcctgtggtggtctggggctgaacccacaaatatccccaggtc

SEQ ID NO: 118520 - DNA, 80 bp, synthetic construct
  misc_feature 1..80: note = Artificially Synthesized Probe
  source 1..80: mol_type = other DNA
tgttatcttttaaaaaaggaaaagacaaagaaatggagggaaagggaaggtctacaaatgggtcagaaaaaggaaggtag

SEQ ID NO: 118521 - DNA, 80 bp, synthetic construct
  misc_feature 1..80: note = Artificially Synthesized Probe
  source 1..80: mol_type = other DNA
gtgagtgcctgggatcccagctactagggagattgaggcaggagaatcgcttgaatctgggaggcagaggttgcagtgag

SEQ ID NO: 118522 - DNA, 80 bp, synthetic construct; identical to SEQ ID NO: 38760
  misc_feature 1..80: note = Artificially Synthesized Probe
  source 1..80: mol_type = other DNA

SEQ ID NO: 118523 - DNA, 80 bp, synthetic construct
  misc_feature 1..80: note = Artificially Synthesized Probe
  source 1..80: mol_type = other DNA
gaaatagtgttttctctcaagggcagacctgagctacactgatctcctgaaacattttttaaaatgcagagatgtgggcc

SEQ ID NO: 118524 - DNA, 80 bp, synthetic construct
  misc_feature 1..80: note = Artificially Synthesized Probe
  source 1..80: mol_type = other DNA
atacaaaaaaatgaggtgggtgtggtggtgtgtgcctgaagtcccagctactcgggaggctgaggcaggagaaccgctga

SEQ ID NO: 118525 - DNA, 80 bp, synthetic construct
  misc_feature 1..80: note = Artificially Synthesized Probe
  source 1..80: mol_type = other DNA
tctgcaaggttggctcctttttaaatttctggtcattcaaatgtcatttccttgcagagtgtcagtccctttctgcacat

SEQ ID NO: 118526 - DNA, 80 bp, synthetic construct; identical to SEQ ID NO: 38761
  misc_feature 1..80: note = Artificially Synthesized Probe
  source 1..80: mol_type = other DNA

SEQ ID NO: 118527 - DNA, 80 bp, synthetic construct
  misc_feature 1..80: note = Artificially Synthesized Probe
  source 1..80: mol_type = other DNA
cgctggtcccccaggggacagccagggcaggtgaggactgggtcctgcctggggaggctggcactgtctttgggtcagtc

SEQ ID NO: 118528 - DNA, 80 bp, synthetic construct
  misc_feature 1..80: note = Artificially Synthesized Probe
  source 1..80: mol_type = other DNA
gactcaagcagcacacacccagctctgcatcccagcacaccccctccagccacggccaggggagtctttctgaaggccgt

SEQ ID NO: 118529 - DNA, 80 bp, synthetic construct
  misc_feature 1..80: note = Artificially Synthesized Probe
  source 1..80: mol_type = other DNA
gccccctcccatttcggcccatcatctaagcaacagtggctgcgtctgcccttttgctatggcccaaggcagctgcggat

SEQ ID NO: 118530 - DNA, 80 bp, synthetic construct
  misc_feature 1..80: note = Artificially Synthesized Probe
  source 1..80: mol_type = other DNA
gatgcaaccccaagatgtccagcaaaccctcgccgaaaggagggactcacgaagggagcctgcagctatcggaggggtgg

SEQ ID NO: 118531 - DNA, 80 bp, synthetic construct; identical to SEQ ID NO: 38762
  misc_feature 1..80: note = Artificially Synthesized Probe
  source 1..80: mol_type = other DNA

SEQ ID NO: 118532 - DNA, 80 bp, synthetic construct
  misc_feature 1..80: note = Artificially Synthesized Probe
  source 1..80: mol_type = other DNA
tctggggctgtgaaatgttgtttctagatctggatcctggaatgctcaagagctcttacaccaaagtggtcctggaggag

SEQ ID NO: 118533 - DNA, 80 bp, synthetic construct
  misc_feature 1..80: note = Artificially Synthesized Probe
  source 1..80: mol_type = other DNA
cacaaccaactcctgttgagtgaatgaacggagtgaagagtgagctaaagggcattcagtgtcaggaggcctggggcagg

SEQ ID NO: 118534 - DNA, 80 bp, synthetic construct
  misc_feature 1..80: note = Artificially Synthesized Probe
  source 1..80: mol_type = other DNA
tcaatgaattgctacagtccagatgctgttctaggctctggtgatacaatagtgactgatgcacatgtgggacctgctgg

SEQ ID NO: 118535 - DNA, 80 bp, synthetic construct; identical to SEQ ID NO: 38763
  misc_feature 1..80: note = Artificially Synthesized Probe
  source 1..80: mol_type = other DNA

SEQ ID NO: 118536 - DNA, 80 bp, synthetic construct
  misc_feature 1..80: note = Artificially Synthesized Probe
  source 1..80: mol_type = other DNA
ggctcctttgtggcatttgtcacagtttgggtttgtcttattatttgttgtccatttctcccctcgagaatttgagctcc

SEQ ID NO: 118537 - DNA, 80 bp, synthetic construct
  misc_feature 1..80: note = Artificially Synthesized Probe
  source 1..80: mol_type = other DNA
acacacggttgcccttggtgcactctggagatcggtcccaggaccccagcacagacccaaatccaagaatattcaaaagt

SEQ ID NO: 118538 - DNA, 80 bp, synthetic construct
  misc_feature 1..80: note = Artificially Synthesized Probe
  source 1..80: mol_type = other DNA
atgaagtcaacccaaggagcttgagtatcaacagtatatgaaaagcctggaatagacacacttttagaggagaagtagct

SEQ ID NO: 118539 - DNA, 80 bp, synthetic construct
  misc_feature 1..80: note = Artificially Synthesized Probe
  source 1..80: mol_type = other DNA
ttatttgttgtccatttctcccctcgagaatttgagctccccaaagggaggggcatctggaatgttttcttgttcagtga

SEQ ID NO: 118540 - DNA, 80 bp, synthetic construct; identical to SEQ ID NO: 38764
  misc_feature 1..80: note = Artificially Synthesized Probe
  source 1..80: mol_type = other DNA

SEQ ID NO: 118541 - DNA, 80 bp, synthetic construct
  misc_feature 1..80: note = Artificially Synthesized Probe
  source 1..80: mol_type = other DNA
gaccccatgttcgtggttcattttacctcagtaaaatttcaaaaaaagtgaccctgaacaaatgatgagagaagggcttc

SEQ ID NO: 118542 - DNA, 80 bp, synthetic construct
  misc_feature 1..80: note = Artificially Synthesized Probe
  source 1..80: mol_type = other DNA
ctgccagggtacaagaaaaacccaggctggcccctcacatcggccaccggatggagtggggggtggccctccaggcagct

SEQ ID NO: 118543 - DNA, 80 bp, synthetic construct
  misc_feature 1..80: note = Artificially Synthesized Probe
  source 1..80: mol_type = other DNA
tttaataaatttatttataaagcgactgaggcttcttttaaagtcgagtttttatccctgagatgaggctcctgaggcct

SEQ ID NO: 118544 - DNA, 80 bp, synthetic construct
  misc_feature 1..80: note = Artificially Synthesized Probe
  source 1..80: mol_type = other DNA
aggttcccctggaccgtgttgaatggcatctgcccaaaattcgtgtctacccacaaggggcttgccagcccttccccagc

SEQ ID NO: 118545 - DNA, 80 bp, synthetic construct; identical to SEQ ID NO: 38765
  misc_feature 1..80: note = Artificially Synthesized Probe
  source 1..80: mol_type = other DNA

SEQ ID NO: 118546 - DNA, 80 bp, synthetic construct
  misc_feature 1..80: note = Artificially Synthesized Probe
  source 1..80: mol_type = other DNA
agcctcagctccacgcctatagcagcggtcacagaagcagattttgacgttttgcataattctgaaataacatgcacgta

SEQ ID NO: 118547 - DNA, 80 bp, synthetic construct
  misc_feature 1..80: note = Artificially Synthesized Probe
  source 1..80: mol_type = other DNA
cttggtttcagaattctggcctctagagctgcaggaggatcaatctctgcggtgctgagctgtcctgcgtgtggtgattt

SEQ ID NO: 118548 - DNA, 80 bp, synthetic construct
  misc_feature 1..80: note = Artificially Synthesized Probe
  source 1..80: mol_type = other DNA
gggcaccagttccggaaggagccacaggcaccaggcagagaaactgtccagggtatttccaagggacaggccagggtggg

SEQ ID NO: 118549 - DNA, 80 bp, synthetic construct
  misc_feature 1..80: note = Artificially Synthesized Probe
  source 1..80: mol_type = other DNA
actgcaggactttcctgaagtagaaaccactgagggcagaatcctgatgcgggggggcggcaggcccagcagggcaactg

SEQ ID NO: 118550 - DNA, 80 bp, synthetic construct; identical to SEQ ID NO: 38766
  misc_feature 1..80: note = Artificially Synthesized Probe
  source 1..80: mol_type = other DNA

SEQ ID NO: 118551 - DNA, 80 bp, synthetic construct
  misc_feature 1..80: note = Artificially Synthesized Probe
  source 1..80: mol_type = other DNA
atatctgttttgcaagcgcagacatcctcagaccctatgaacaaagctgaataattgtgcaccggtgctcagggggtgac

SEQ ID NO: 118552 - DNA, 80 bp, synthetic construct
  misc_feature 1..80: note = Artificially Synthesized Probe
  source 1..80: mol_type = other DNA
agaaagtagctcagtgaactcctgactggtgaattcaggagacagtggggctgggccatgattccaagtctgagtgtcca

SEQ ID NO: 118553 - DNA, 80 bp, synthetic construct
  misc_feature 1..80: note = Artificially Synthesized Probe
  source 1..80: mol_type = other DNA
ctgccccccgcctttgagctactcccttccactacccaggcaccccataataactgtggagatgccaagaagcagcaagt

SEQ ID NO: 118554 - DNA, 80 bp, synthetic construct; identical to SEQ ID NO: 38767
  misc_feature 1..80: note = Artificially Synthesized Probe
  source 1..80: mol_type = other DNA

SEQ ID NO: 118555 - DNA, 80 bp, synthetic construct
  misc_feature 1..80: note = Artificially Synthesized Probe
  source 1..80: mol_type = other DNA
ctcatccctactaaaaatacaaaaattagctgggcagaatggtgggcacctgtaatcccagctacttgggaggctgaggc

SEQ ID NO: 118556 - DNA, 80 bp, synthetic construct
  misc_feature 1..80: note = Artificially Synthesized Probe
  source 1..80: mol_type = other DNA
atgcaacccctgagagaggccttgcgggcacccctgcaccaaccaagtctgacagcagctcctggaagctgtgcttcgtc

SEQ ID NO: 118557 - DNA, 80 bp, synthetic construct
  misc_feature 1..80: note = Artificially Synthesized Probe
  source 1..80: mol_type = other DNA
agacagggtcccatagaggggcagatggagcccgtttgcagctgcaggcgatggggcgggacgaatgactgaggtcattt

SEQ ID NO: 118558 - DNA, 80 bp, synthetic construct
  misc_feature 1..80: note = Artificially Synthesized Probe
  source 1..80: mol_type = other DNA
gagctgaaaatggatctgaagttagcacaaatgacacaagaaaaaataaaaactcgaagagttctgtaaccttgaaagag

SEQ ID NO: 118559 - DNA, 80 bp, synthetic construct; identical to SEQ ID NO: 38768
  misc_feature 1..80: note = Artificially Synthesized Probe
  source 1..80: mol_type = other DNA

SEQ ID NO: 118560 - DNA, 80 bp, synthetic construct
  misc_feature 1..80: note = Artificially Synthesized Probe
  source 1..80: mol_type = other DNA
acaattcattagcaaagaaaagccatgtaatttttgcaagtgatacaaaaaaggacttgaggaaattaattatccgcttg

SEQ ID NO: 118561 - DNA, 80 bp, synthetic construct
  misc_feature 1..80: note = Artificially Synthesized Probe
  source 1..80: mol_type = other DNA
ttttaaagatcaagaacaaagcaggtattcccactattcccacttctattcagcattttattgcaggtcctagctagcgg

SEQ ID NO: 118562 - DNA, 80 bp, synthetic construct
  misc_feature 1..80: note = Artificially Synthesized Probe
  source 1..80: mol_type = other DNA
atatcatgaagtgacatcagtgaaactacctaggaataaatctaaaaaaggttttgcagaagctctttgtggagatactt

SEQ ID NO: 118563 - DNA, 80 bp, synthetic construct; identical to SEQ ID NO: 38769
  misc_feature 1..80: note = Artificially Synthesized Probe
  source 1..80: mol_type = other DNA

SEQ ID NO: 118564 - DNA, 80 bp, synthetic construct; identical to SEQ ID NO: 38638
  misc_feature 1..80: note = Artificially Synthesized Probe
  source 1..80: mol_type = other DNA

SEQ ID NO: 118565 - DNA, 80 bp, synthetic construct
  misc_feature 1..80: note = Artificially Synthesized Probe
  source 1..80: mol_type = other DNA
cgggaggctgaggcaggagaatggcgtgaaccccagggggcggagcctgcagtgagccgagattgcgccactgcactcca

SEQ ID NO: 118566 - DNA, 80 bp, synthetic construct
  misc_feature 1..80: note = Artificially Synthesized Probe
  source 1..80: mol_type = other DNA
ttgagattgtgccattgcactccagcccgggttacagtgtgagattctgaaagaagaaaagaaaagaaagaagagggaga

SEQ ID NO: 118567 - DNA, 80 bp, synthetic construct
  misc_feature 1..80: note = Artificially Synthesized Probe
  source 1..80: mol_type = other DNA
atcatgttcttgaacaggaagacaacattgtgaaggggttaatttttcccaaattggtctattctgggtcaatgcaattc

SEQ ID NO: 118568 - DNA, 80 bp, synthetic construct; identical to SEQ ID NO: 38770
  misc_feature 1..80: note = Artificially Synthesized Probe
  source 1..80: mol_type = other DNA

SEQ ID NO: 118569 - DNA, 80 bp, synthetic construct
  misc_feature 1..80: note = Artificially Synthesized Probe
  source 1..80: mol_type = other DNA
gaacacaaaaattagccgggcgcggtggtgcaaacctgtaatcccagctactcaggaggctgaggcatgagaattgcttg

SEQ ID NO: 118570 - DNA, 80 bp, synthetic construct
  misc_feature 1..80: note = Artificially Synthesized Probe
  source 1..80: mol_type = other DNA
gagccaacgattgctcaaataatcctgaagagataaaaggtgggtgggttgggggtgaaggggagaaatattcagaggta

SEQ ID NO: 118571 - DNA, 80 bp, synthetic construct
  misc_feature 1..80: note = Artificially Synthesized Probe
  source 1..80: mol_type = other DNA
attccaccaatgctgctggaaggatggggtgtcctcaggggaaaaagtgaaattagatccatgcctcacataacacacac

SEQ ID NO: 118572 - DNA, 80 bp, synthetic construct
  misc_feature 1..80: note = Artificially Synthesized Probe
  source 1..80: mol_type = other DNA
ggaaacagctttacaaactcttgggagaagataatttcttaaataagacagaaaaatcacaaactctgaaggaaagtttg

SEQ ID NO: 118573 - DNA, 80 bp, synthetic construct; identical to SEQ ID NO: 38771
  misc_feature 1..80: note = Artificially Synthesized Probe
  source 1..80: mol_type = other DNA

SEQ ID NO: 118574 - DNA, 80 bp, synthetic construct
  misc_feature 1..80: note = Artificially Synthesized Probe
  source 1..80: mol_type = other DNA
aacctttgcctcctggattcaagtgattctcctgcctcagccttctgagtagctgggactacaggcgcatgccaccacac

SEQ ID NO: 118575 - DNA, 80 bp, synthetic construct
  misc_feature 1..80: note = Artificially Synthesized Probe
  source 1..80: mol_type = other DNA
acattatgtactaaagagaactacttcatcatcttcctttcgtcggcgtatttgtaattaagacgcctgcaaattccatg

SEQ ID NO: 118576 - DNA, 80 bp, synthetic construct
  misc_feature 1..80: note = Artificially Synthesized Probe
  source 1..80: mol_type = other DNA
gcacaaccgcacctggccaatctttgtatttttagtggagacagggtttcaccatgttggccaggcttgtctccaactcc

SEQ ID NO: 118577 - DNA, 80 bp, synthetic construct
  misc_feature 1..80: note = Artificially Synthesized Probe
  source 1..80: mol_type = other DNA
caactcagtagaaaactggcagaagatgagaataagaatttcccagcaaaggcaccacaaacagtccagaaacataaaag

SEQ ID NO: 118578 - DNA, 80 bp, synthetic construct; identical to SEQ ID NO: 38772
  misc_feature 1..80: note = Artificially Synthesized Probe
  source 1..80: mol_type = other DNA

SEQ ID NO: 118579 - DNA, 80 bp, synthetic construct
  misc_feature 1..80: note = Artificially Synthesized Probe
  source 1..80: mol_type = other DNA
tgatacagtttggatatttaaccctgcccaaatctcaagttgaaatctaattcccaatgttggaggtggggcctggcagg

SEQ ID NO: 118580 - DNA, 80 bp, synthetic construct
  misc_feature 1..80: note = Artificially Synthesized Probe
  source 1..80: mol_type = other DNA
cttctgctgtgtgaactgcctactcccatttcaccttccaccatgagtaaaagctccctgagccctccccagaagcagat

SEQ ID NO: 118581 - DNA, 80 bp, synthetic construct
  misc_feature 1..80: note = Artificially Synthesized Probe
  source 1..80: mol_type = other DNA
acttgcctcctagtgatctagcagctgctctcctaacacctacactcagacatcaggagaatacgcaggagtgctcagag

SEQ ID NO: 118582 - DNA, 80 bp, synthetic construct
  misc_feature 1..80: note = Artificially Synthesized Probe
  source 1..80: mol_type = other DNA
tatactggtggcaacgcctgtatttactctctgcatttatcccactgaatagttggacattttgatgcagaaaaatcagt

SEQ ID NO: 118583 - DNA, 80 bp, synthetic construct; identical to SEQ ID NO: 38773
  misc_feature 1..80: note = Artificially Synthesized Probe
  source 1..80: mol_type = other DNA

SEQ ID NO: 118584 - DNA, 80 bp, synthetic construct
  misc_feature 1..80: note = Artificially Synthesized Probe
  source 1..80: mol_type = other DNA
tgtccatttacagaaagctggaaaacaggtaaacgttagctttgtttagtgatatcaacacaggtggtaaaaccccaagg

SEQ ID NO: 118585 - DNA, 80 bp, synthetic construct
  misc_feature 1..80: note = Artificially Synthesized Probe
  source 1..80: mol_type = other DNA
gttgagcccgaggctcaggccccatgagcagttgtgggcaggaagcttggctgccgtcctgagaccaacaccaagccaca

SEQ ID NO: 118586 - DNA, 80 bp, synthetic construct
  misc_feature 1..80: note = Artificially Synthesized Probe
  source 1..80: mol_type = other DNA
tcccatcctggattcttgcaagaagtgaaaagaaaggaagaatccaaggatgagaggaactttaaaagggtcaagttcag

SEQ ID NO: 118587 - DNA, 80 bp, synthetic construct; identical to SEQ ID NO: 38774
  misc_feature 1..80: note = Artificially Synthesized Probe
  source 1..80: mol_type = other DNA

SEQ ID NO: 118588 - DNA, 80 bp, synthetic construct
  misc_feature 1..80: note = Artificially Synthesized Probe
  source 1..80: mol_type = other DNA
caacagccttggtgctttcagaaaaactcaagaggcgccaggagaatcccacagtcccccttctcagcctaatttgcagg

SEQ ID NO: 118589 - DNA, 80 bp, synthetic construct
  misc_feature 1..80: note = Artificially Synthesized Probe
  source 1..80: mol_type = other DNA
aatccaaggatgagaggaactttaaaagggtcaagttcagctgaggtttctgcccatttcatgaatgaacatttgaggaa

SEQ ID NO: 118590 - DNA, 80 bp, synthetic construct
  misc_feature 1..80: note = Artificially Synthesized Probe
  source 1..80: mol_type = other DNA
attatttatgcaaatatttaaccacaggcactgcagcaatgcaaaagtaacatcgaggggcccatgaaatgttagctgcc

SEQ ID NO: 118591 - DNA, 80 bp, synthetic construct
  misc_feature 1..80: note = Artificially Synthesized Probe
  source 1..80: mol_type = other DNA
ctcctttaataaacacccatgaagggctctctcacccatggtggggcatttccatggtgagcaaaactgggagacacaag

SEQ ID NO: 118592 - DNA, 80 bp, synthetic construct
  misc_feature 1..80: note = Artificially Synthesized Probe
  source 1..80: mol_type = other DNA
ctgaggtttctgcccatttcatgaatgaacatttgaggaacagctctaaaaattgtccctttcttgggcagtcaaaactt

SEQ ID NO: 118593 - DNA, 80 bp, synthetic construct
  misc_feature 1..80: note = Artificially Synthesized Probe
  source 1..80: mol_type = other DNA
tggttgggacagtgagtccaggagggccagggggtggcctgggagaggtggtgctggtgctctgggctgcagtgggcact

SEQ ID NO: 118594 - DNA, 80 bp, synthetic construct; identical to SEQ ID NO: 38775
  misc_feature 1..80: note = Artificially Synthesized Probe
  source 1..80: mol_type = other DNA

SEQ ID NO: 118595 - DNA, 80 bp, synthetic construct
  misc_feature 1..80: note = Artificially Synthesized Probe
  source 1..80: mol_type = other DNA
cagctctaaaaattgtccctttcttgggcagtcaaaacttgtttctatggaaatgggatttttacaccactgcttatctg

SEQ ID NO: 118596 - DNA, 80 bp, synthetic construct
  misc_feature 1..80: note = Artificially Synthesized Probe
  source 1..80: mol_type = other DNA
gccacacaagggtgctggacacagggcagtggtgtgtgggcagcgtgtgagtcacaaggcaggttccgcggtttcagggc

SEQ ID NO: 118597 - DNA, 80 bp, synthetic construct; identical to SEQ ID NO: 38639
  misc_feature 1..80: note = Artificially Synthesized Probe
  source 1..80: mol_type = other DNA

SEQ ID NO: 118598 - DNA, 80 bp, synthetic construct
  misc_feature 1..80: note = Artificially Synthesized Probe
  source 1..80: mol_type = other DNA
ctttttaacagggccacgtgtctttctacataaaaaaagccccctgtcatgccaaatcttaaagtaaacatgcctcttct

SEQ ID NO: 118599 - DNA, 80 bp, synthetic construct
  misc_feature 1..80: note = Artificially Synthesized Probe
  source 1..80: mol_type = other DNA
gcccagaaggcagcaagcgggtgagcccgcgacaggcgcaccctcagtggctaggaaagggcccttggcaggaagccccc

SEQ ID NO: 118600 - DNA, 80 bp, synthetic construct; identical to SEQ ID NO: 38776
  misc_feature 1..80: note = Artificially Synthesized Probe
  source 1..80: mol_type = other DNA

SEQ ID NO: 118601 - DNA, 80 bp, synthetic construct
  misc_feature 1..80: note = Artificially Synthesized Probe
  source 1..80: mol_type = other DNA
gtttccctgggctcattgcacaaattgagttacagatgcagatttccaacccatttcttgatgttttcctcctggaacca

SEQ ID NO: 118602 - DNA, 80 bp, synthetic construct
  misc_feature 1..80: note = Artificially Synthesized Probe
  source 1..80: mol_type = other DNA
acctattattcccccccctccttggggtaaaaagatggcatgaagtaccctcagttaagaatcctggggaaagataacca

SEQ ID NO: 118603 - DNA, 80 bp, synthetic construct; identical to SEQ ID NO: 38777
  misc_feature 1..80: note = Artificially Synthesized Probe
  source 1..80: mol_type = other DNA

SEQ ID NO: 118604 - DNA, 80 bp, synthetic construct
  misc_feature 1..80: note = Artificially Synthesized Probe
  source 1..80: mol_type = other DNA
cacatgccatcatatgacccgggggtgggggggtgtcacgtgattgtaccactgaactccagcatgaaccacagagtgaa

SEQ ID NO: 118605 - DNA, 80 bp, synthetic construct
  misc_feature 1..80: note = Artificially Synthesized Probe
  source 1..80: mol_type = other DNA
tctttgagggcctgtggtcatcctcaccatttctgtaacttctaggtcctggcttggggttaggagctgcccaggtgcaa

SEQ ID NO: 118606 - DNA, 80 bp, synthetic construct
  misc_feature 1..80: note = Artificially Synthesized Probe
  source 1..80: mol_type = other DNA
ccttaaatctctgcacagccctggagaaggatgaggctcgggacctgagttcccagtcatgtcgtctgtgtctgcagctc

SEQ ID NO: 118607 - DNA, 80 bp, synthetic construct; identical to SEQ ID NO: 38778
  misc_feature 1..80: note = Artificially Synthesized Probe
  source 1..80: mol_type = other DNA

SEQ ID NO: 118608 - DNA, 80 bp, synthetic construct
  misc_feature 1..80: note = Artificially Synthesized Probe
  source 1..80: mol_type = other DNA
gccccacacccagctccccaaccaagtacatgcttggccaggtcttcccggaagtcagaggtgaccaactgggtcctggt

SEQ ID NO: 118609 - DNA, 80 bp, synthetic construct
  misc_feature 1..80: note = Artificially Synthesized Probe
  source 1..80: mol_type = other DNA
atcctcagatgatcaaatgcccagggcccatcagtgaagaccacgcccagcaaaggagacatgctgagagataggtctgt

SEQ ID NO: 118610 - DNA, 80 bp, synthetic construct
  misc_feature 1..80: note = Artificially Synthesized Probe
  source 1..80: mol_type = other DNA
tcagcttggaagaaggcatggcctccctgtatacccctggcttgtccaaggagaacaagggcaactcccaactccccaca

SEQ ID NO: 118611 - DNA, 80 bp, synthetic construct
  misc_feature 1..80: note = Artificially Synthesized Probe
  source 1..80: mol_type = other DNA
tgagtattctgtctcttggacaacatatagcccccctttcagaaagaagaatctggttccagctccatccttgcgttcct

SEQ ID NO: 118612 - DNA, 80 bp, synthetic construct
  misc_feature 1..80: note = Artificially Synthesized Probe
  source 1..80: mol_type = other DNA
ccgattcctgctgcctttgccagataaaggtaaatgtgccagctgctcttgtgggaaatcggaatctgaccctaatttgc

SEQ ID NO: 118613 - DNA, 80 bp, synthetic construct; identical to SEQ ID NO: 38779
  misc_feature 1..80: note = Artificially Synthesized Probe
  source 1..80: mol_type = other DNA

SEQ ID NO: 118614 - DNA, 80 bp, synthetic construct
  misc_feature 1..80: note = Artificially Synthesized Probe
  source 1..80: mol_type = other DNA
gcctttccctgagcctcagcttcttcatctgtaaaatggggtcatgtaaaggctctgcaggtgggcaggacacagcactc

SEQ ID NO: 118615 - DNA, 80 bp, synthetic construct
  misc_feature 1..80: note = Artificially Synthesized Probe
  source 1..80: mol_type = other DNA
gaaagctcgtgctatttagtctcatctgtgtgcagccgatcagagaattgatctcaaattacaaacctctcagctaaacg

SEQ ID NO: 118616 - DNA, 80 bp, synthetic construct; identical to SEQ ID NO: 38780
  misc_feature 1..80: note = Artificially Synthesized Probe
  source 1..80: mol_type = other DNA

SEQ ID NO: 118617 - DNA, 80 bp, synthetic construct
  misc_feature 1..80: note = Artificially Synthesized Probe
  source 1..80: mol_type = other DNA
tgtttgttcacggacctgtggcaccgggcggcccagagagggcctggccggctcccacctctcaaagccctgctcggaca

SEQ ID NO: 118618 - DNA, 80 bp, synthetic construct
  misc_feature 1..80: note = Artificially Synthesized Probe
  source 1..80: mol_type = other DNA
tctgttcaaattagagacccccagaaagatgatgacctggcgtgtgaagaaaccagcatgggtcacaggaagcattcaga

SEQ ID NO: 118619 - DNA, 80 bp, synthetic construct
  misc_feature 1..80: note = Artificially Synthesized Probe
  source 1..80: mol_type = other DNA
cggtggaaacagccccaacgcacatccactggtgaatgaacaaacaaaacgtggcacgtacaaatgatgcgggatatatg

SEQ ID NO: 118620 - DNA, 80 bp, synthetic construct
  misc_feature 1..80: note = Artificially Synthesized Probe
  source 1..80: mol_type = other DNA
ctatattgcatattgtatatacatgtactatattgtatattgtatatgtatatagatatacataatatatctatattgta

SEQ ID NO: 118621 - DNA, 80 bp, synthetic construct
  misc_feature 1..80: note = Artificially Synthesized Probe
  source 1..80: mol_type = other DNA
gctcagcctggtgaggttattagatccgagaagcaagggcgagggagaggattgagcctagtttagtgcctacagtgaat

SEQ ID NO: 118622 - DNA, 80 bp, synthetic construct; identical to SEQ ID NO: 38781
  misc_feature 1..80: note = Artificially Synthesized Probe
  source 1..80: mol_type = other DNA

SEQ ID NO: 118623 - DNA, 80 bp, synthetic construct
  misc_feature 1..80: note = Artificially Synthesized Probe
  source 1..80: mol_type = other DNA
aatggcacattttacattacatgtatttgaccacaatgaaaagaaaacagttatgggaccaatgggagctttggtgcccc

SEQ ID NO: 118624 - DNA, 80 bp, synthetic construct
  misc_feature 1..80: note = Artificially Synthesized Probe
  source 1..80: mol_type = other DNA
cttgctgctcagctgcaaaaaaatgaattattgcctggttttatgagtctaatgttgtgacctgctcctgccactgatgc

SEQ ID NO: 118625 - DNA, 80 bp, synthetic construct
  misc_feature 1..80: note = Artificially Synthesized Probe
  source 1..80: mol_type = other DNA
ccaagcaggctacatttgtaaagtaatcctcgactctccgttttatattaatgaaagccagccagagctgctgatcggct

SEQ ID NO: 118626 - DNA, 80 bp, synthetic construct
  misc_feature 1..80: note = Artificially Synthesized Probe
  source 1..80: mol_type = other DNA
actccattccagggcctgtggggatccacaggactcatgccaagaatgacggaaatctttctgagctcaaaactctctga

SEQ ID NO: 118627 - DNA, 80 bp, synthetic construct
  misc_feature 1..80: note = Artificially Synthesized Probe
  source 1..80: mol_type = other DNA
caagaatgacggaaatctttctgagctcaaaactctctgaatttgaaaaacaaatggtcctttgaagaacactgcttcca

SEQ ID NO: 118628 - DNA, 80 bp, synthetic construct; identical to SEQ ID NO: 38782
  misc_feature 1..80: note = Artificially Synthesized Probe
  source 1..80: mol_type = other DNA

SEQ ID NO: 118629 - DNA, 80 bp, synthetic construct
  misc_feature 1..80: note = Artificially Synthesized Probe
  source 1..80: mol_type = other DNA
aaaagtggcagctttcaaaaggagtttggaggttctcagatttaagcgcaaatgccacttcctgaggctggtgctaaaac

SEQ ID NO: 118630 - DNA, 80 bp, synthetic construct
  misc_feature 1..80: note = Artificially Synthesized Probe
  source 1..80: mol_type = other DNA
gttttctcaactcatcgtcactccagccagagccctgggctgctccccacctgccctgcttccccatcttccctgcaatg

SEQ ID NO: 118631 - DNA, 80 bp, synthetic construct
  misc_feature 1..80: note = Artificially Synthesized Probe
  source 1..80: mol_type = other DNA
ttattttgggtctaattcaaaccatgatttcaaaaaggctaagaatgtacaaagggaagggacccactggccccagggca

SEQ ID NO: 118632 - DNA, 80 bp, synthetic construct
  misc_feature 1..80: note = Artificially Synthesized Probe
  source 1..80: mol_type = other DNA
ttaggaaactgccttcgtttctactgaaaatggagaaaaaaggcaattttcagttcttgcagcactcagcagtgtgaaac

SEQ ID NO: 118633 - DNA, 80 bp, synthetic construct
  misc_feature 1..80: note = Artificially Synthesized Probe
  source 1..80: mol_type = other DNA
tccgggcgtgacacaggcccaggaggggagctggatggggtggtggggaagttgcctgcgactcctgcctgggaaccagg

SEQ ID NO: 118634 - DNA, 80 bp, synthetic construct
  misc_feature 1..80: note = Artificially Synthesized Probe
  source 1..80: mol_type = other DNA
cgcagggtgacctcctagtgactaagcctgctattagcctcttgctgaccaaagagcttggcctaaggacagtcagaggc

SEQ ID NO: 118635 - DNA, 80 bp, synthetic construct; identical to SEQ ID NO: 38783
  misc_feature 1..80: note = Artificially Synthesized Probe
  source 1..80: mol_type = other DNA

SEQ ID NO: 118636 - DNA, 80 bp, synthetic construct
  misc_feature 1..80: note = Artificially Synthesized Probe
  source 1..80: mol_type = other DNA
tgtacaattacgaatatctttagatccatgcatactttctgatggaacttcatccctgaagtatgcatactgtacaggca

SEQ ID NO: 118637 - DNA, 80 bp, synthetic construct
  misc_feature 1..80: note = Artificially Synthesized Probe
  source 1..80: mol_type = other DNA
gatggaacttcatccctgaagtatgcatactgtacaggcaaggttaaacgaaactccacgaagaaaaatgcaaaacgctc

SEQ ID NO: 118638 - DNA, 80 bp, synthetic construct
  misc_feature 1..80: note = Artificially Synthesized Probe
  source 1..80: mol_type = other DNA
acagatatcattttggcctttttttctttggaactttccatacgcaatatcagactctatgtattcctctgtggcctcca

SEQ ID NO: 118639 - DNA, 80 bp, synthetic construct
  misc_feature 1..80: note = Artificially Synthesized Probe
  source 1..80: mol_type = other DNA
tcttgttcacaggcacttgcatcatttccagcgtcttgctgttatgaacagaggtgcttggaaacttctcgtgtgtgtct

SEQ ID NO: 118640 - DNA, 80 bp, synthetic construct; identical to SEQ ID NO: 38784
  misc_feature 1..80: note = Artificially Synthesized Probe
  source 1..80: mol_type = other DNA

SEQ ID NO: 118641 - DNA, 80 bp, synthetic construct
  misc_feature 1..80: note = Artificially Synthesized Probe
  source 1..80: mol_type = other DNA
gttcatgccattctcctgcctccgcctcccaagtaggtgggactacaggcgcccgttgccatgtccagctaattttttgt

SEQ ID NO: 118642 - DNA, 80 bp, synthetic construct
  misc_feature 1..80: note = Artificially Synthesized Probe
  source 1..80: mol_type = other DNA
ggccatgtttttctttttttaaaaacaaagtgtagaaactcaaaaggctctggaagacctggccatgtgcagcagtgtta

SEQ ID NO: 118643 - DNA, 80 bp, synthetic construct
  misc_feature 1..80: note = Artificially Synthesized Probe
  source 1..80: mol_type = other DNA
gtccttgtaagaagaggggaacttgtttttttttttttttctttgagatggagtctcacactgtcacccaggctggagtg

SEQ ID NO: 118644 - DNA, 80 bp, synthetic construct; identical to SEQ ID NO: 38785
  misc_feature 1..80: note = Artificially Synthesized Probe
  source 1..80: mol_type = other DNA

SEQ ID NO: 118645 - DNA, 80 bp, synthetic construct
  misc_feature 1..80: note = Artificially Synthesized Probe
  source 1..80: mol_type = other DNA
gagggagcgctgccctgctgacaccctgacctttgtcttccagcatccaatgacacagtaaaagtttgctgttttaagcc

SEQ ID NO: 118646 - DNA, 80 bp, synthetic construct
  misc_feature 1..80: note = Artificially Synthesized Probe
  source 1..80: mol_type = other DNA
ctcctgcctcagcctccagagtagctgggattgcaggcgtgccccaacatgcctggctaattttgcattttttaagtaga

SEQ ID NO: 118647 - DNA, 80 bp, synthetic construct
  misc_feature 1..80: note = Artificially Synthesized Probe
  source 1..80: mol_type = other DNA
gtggtttcttagcagccctaagaaataagtacaagcagcattccaggcccttccttcatcccatcctccagtctttgtct

SEQ ID NO: 118648 - DNA, 80 bp, synthetic construct
  misc_feature 1..80: note = Artificially Synthesized Probe
  source 1..80: mol_type = other DNA
agcctcggctcagtagcttcaccgccctgccttctgcttccttgttcacacagtgggaaaaattacaggccctggctcag

SEQ ID NO: 118649 - DNA, 80 bp, synthetic construct
  misc_feature 1..80: note = Artificially Synthesized Probe
  source 1..80: mol_type = other DNA
acacagggctgcaggcctcccctccccactaacttaacaacacgggagtactggatgtccccatggccgtgttagaggtt

SEQ ID NO: 118650 - DNA, 80 bp, synthetic construct; identical to SEQ ID NO: 38786
  misc_feature 1..80: note = Artificially Synthesized Probe
  source 1..80: mol_type = other DNA

SEQ ID NO: 118651 - DNA, 80 bp, synthetic construct
  misc_feature 1..80: note = Artificially Synthesized Probe
  source 1..80: mol_type = other DNA
ctctaggtggccttggacgagcccagttctcccctctcttttgctttcagttcttaagaataaccatagaatgtgctaga

SEQ ID NO: 118652 - DNA, 80 bp, synthetic construct
  misc_feature 1..80: note = Artificially Synthesized Probe
  source 1..80: mol_type = other DNA
aaacccaggaggagctgctttccagggtcccttagtggcggcgcaagggagcacatgcagtcaagactccggtcagcttt

SEQ ID NO: 118653 - DNA, 80 bp, synthetic construct; identical to SEQ ID NO: 38787
  misc_feature 1..80: note = Artificially Synthesized Probe
  source 1..80: mol_type = other DNA

SEQ ID NO: 118654 - DNA, 80 bp, synthetic construct
  misc_feature 1..80: note = Artificially Synthesized Probe
  source 1..80: mol_type = other DNA
atgcctgagataatctacattagattgcaagtcgggcagctttttgtttaattcagacagtgttcactgtttgtttgcaa

SEQ ID NO: 118655 - DNA, 80 bp, synthetic construct
  misc_feature 1..80: note = Artificially Synthesized Probe
  source 1..80: mol_type = other DNA
tactggggccactcagaccccagctgtccctgagagggctgctgaggaaggagtggcagacagcgtggatgccgagacca

SEQ ID NO: 118656 - DNA, 80 bp, synthetic construct
  misc_feature 1..80: note = Artificially Synthesized Probe
  source 1..80: mol_type = other DNA
tgagattgccattcttgtaggttgataagagttcaatatttgctagtttgacatgatgcaactgaacggaccccacggcc

SEQ ID NO: 118657 - DNA, 80 bp, synthetic construct
  misc_feature 1..80: note = Artificially Synthesized Probe
  source 1..80: mol_type = other DNA
cctggatggcacctctgagttggggcctacaatgagatcagagggtgagctgagcagaggatgtgaattcgagtgctagg

SEQ ID NO: 118658 - DNA, 80 bp, synthetic construct; identical to SEQ ID NO: 38788
  misc_feature 1..80: note = Artificially Synthesized Probe
  source 1..80: mol_type = other DNA

SEQ ID NO: 118659 - DNA, 80 bp, synthetic construct
  misc_feature 1..80: note = Artificially Synthesized Probe
  source 1..80: mol_type = other DNA
gaagaggagatgacaaatgccccgcaaagggccacagggtgcagcagccaggggcagagccgtgtgtgctcctgtgtgtg

SEQ ID NO: 118660 - DNA, 80 bp, synthetic construct; identical to SEQ ID NO: 38640
  misc_feature 1..80: note = Artificially Synthesized Probe
  source 1..80: mol_type = other DNA

SEQ ID NO: 118661 - DNA, 80 bp, synthetic construct
  misc_feature 1..80: note = Artificially Synthesized Probe
  source 1..80: mol_type = other DNA
gtgtatgtgtgtgagtgtgactgagagtatgctaatgtatgtgtgtcactgaaagggtgtgtgagctgtctgtgtgtgtg

SEQ ID NO: 118662 - DNA, 80 bp, synthetic construct
  misc_feature 1..80: note = Artificially Synthesized Probe
  source 1..80: mol_type = other DNA
tacatgcatgttaaaaccctttaaaaatgtaaaaatcttcctcagaaactcagtcatggatggaatgtggcccccaggcc

SEQ ID NO: 118663 - DNA, 80 bp, synthetic construct
  misc_feature 1..80: note = Artificially Synthesized Probe
  source 1..80: mol_type = other DNA
agagttcacccagccctgccataaaagaaagaaacgcgaggaacggagtggggaggtggagcagatttgtcaaaacgggc

SEQ ID NO: 118664 - DNA, 80 bp, synthetic construct; identical to SEQ ID NO: 38789
  misc_feature 1..80: note = Artificially Synthesized Probe
  source 1..80: mol_type = other DNA

SEQ ID NO: 118665 - DNA, 80 bp, synthetic construct
  misc_feature 1..80: note = Artificially Synthesized Probe
  source 1..80: mol_type = other DNA
cccacgtgcatatgaccaaaactctgaaaaacagtatttttctgaataaacgtctaccatgccaagcatgttagaaatgt

SEQ ID NO: 118666 - DNA, 80 bp, synthetic construct
  misc_feature 1..80: note = Artificially Synthesized Probe
  source 1..80: mol_type = other DNA
taatgggtgcagcacaccaacatggcacatggatacatatgtaacaaacctgcacgttgtgcacatgtaccctaaaactt

SEQ ID NO: 118667 - DNA, 80 bp, synthetic construct
  misc_feature 1..80: note = Artificially Synthesized Probe
  source 1..80: mol_type = other DNA
tacaaaaattagccagacgtggtggcacgcctgtaatcccagctactcaggaggctgaagcaggagaatcatttgaaccc

SEQ ID NO: 118668 - DNA, 80 bp, synthetic construct
  misc_feature 1..80: note = Artificially Synthesized Probe
  source 1..80: mol_type = other DNA
gagggaaaagtctttgaacaaaaggacaaaagtctccagagttaaccgccatttatgtctagcctaaccatctgaggaag

SEQ ID NO: 118669 - DNA, 80 bp, synthetic construct; identical to SEQ ID NO: 38790
  misc_feature 1..80: note = Artificially Synthesized Probe
  source 1..80: mol_type = other DNA

SEQ ID NO: 118670 - DNA, 80 bp, synthetic construct
  misc_feature 1..80: note = Artificially Synthesized Probe
  source 1..80: mol_type = other DNA
cacgctatgctgagcatttgtcattgtgtggaataaaaataaacctgagcttggaaaactgggcaggtgaccctggaaag

SEQ ID NO: 118671 - DNA, 80 bp, synthetic construct
  misc_feature 1..80: note = Artificially Synthesized Probe
  source 1..80: mol_type = other DNA
tgcaggtgccgtgcacagccgccccagtcccttacccacacccttcgtcctgcaggctcgatctcccttcaggacccccg

SEQ ID NO: 118672 - DNA, 80 bp, synthetic construct
  misc_feature 1..80: note = Artificially Synthesized Probe
  source 1..80: mol_type = other DNA
aacaaaaatgttcttacgtgccagttctgtaggtcagagggccaacccagggctcaggaggctgagagagcggcgttggc

SEQ ID NO: 118673 - DNA, 80 bp, synthetic construct; identical to SEQ ID NO: 38791
  misc_feature 1..80: note = Artificially Synthesized Probe
  source 1..80: mol_type = other DNA

SEQ ID NO: 118674 - DNA, 80 bp, synthetic construct
  misc_feature 1..80: note = Artificially Synthesized Probe
  source 1..80: mol_type = other DNA
gagtgctcaggggagcacagcttggtgcaggatgccctgctgacctgaacagtggattccttcctccagccctagagcca

SEQ ID NO: 118675 - DNA, 80 bp, synthetic construct
  misc_feature 1..80: note = Artificially Synthesized Probe
  source 1..80: mol_type = other DNA
gtgataacgcctcagggcccctctcttccccatctccctcattctctttggggctgtcctggctgcctccatgaggcgtg

SEQ ID NO: 118676 - DNA, 80 bp, synthetic construct
  misc_feature 1..80: note = Artificially Synthesized Probe
  source 1..80: mol_type = other DNA
ggaggggagagttttaaaagagccacaaagtaccccggaacttagaaggacacttgaggaccttgtttaagactggaaca

SEQ ID NO: 118677 - DNA, 80 bp, synthetic construct
  misc_feature 1..80: note = Artificially Synthesized Probe
  source 1..80: mol_type = other DNA
gctcctgacaccatcctggtgggggttagggttccaacatttgagtgtgggggtcacacagacattcggtccacggcacc

SEQ ID NO: 118678 - DNA, 80 bp, synthetic construct
  misc_feature 1..80: note = Artificially Synthesized Probe
  source 1..80: mol_type = other DNA
attgttttgtgccttttagaaacctcctgagttgggagaaatggagattttggtggctgtccatgaagtacttaattaag

SEQ ID NO: 118679 - DNA, 80 bp, synthetic construct; identical to SEQ ID NO: 38792
  misc_feature 1..80: note = Artificially Synthesized Probe
  source 1..80: mol_type = other DNA

SEQ ID NO: 118680 - DNA, 80 bp, synthetic construct
  misc_feature 1..80: note = Artificially Synthesized Probe
  source 1..80: mol_type = other DNA
gcttgtcttgcccccagacaaaatgtggagtctgttgttaccgtctgaatgtctgtatccccccaagttcctatgttgac

SEQ ID NO: 118681 - DNA, 80 bp, synthetic construct
  misc_feature 1..80: note = Artificially Synthesized Probe
  source 1..80: mol_type = other DNA
ctttcacacacactctctctctctcctctctctgccatgtgaggaagccagctgcctataagcaggaagcgacccctcac

SEQ ID NO: 118682 - DNA, 80 bp, synthetic construct
  misc_feature 1..80: note = Artificially Synthesized Probe
  source 1..80: mol_type = other DNA
tccggtatgacgtaatatctgtgtgaccacaacaggcctcagtttctccatctgaaatggggatggatggtaacagcacc

SEQ ID NO: 118683 - DNA, 80 bp, synthetic construct; identical to SEQ ID NO: 38793
  misc_feature 1..80: note = Artificially Synthesized Probe
  source 1..80: mol_type = other DNA

SEQ ID NO: 118684 - DNA, 80 bp, synthetic construct
  misc_feature 1..80: note = Artificially Synthesized Probe
  source 1..80: mol_type = other DNA
ttggagcccagcactgcatggctattgcttatgccctgcacaccatctgcccatttctttctggcctggctcctgcctct

SEQ ID NO: 118685 - DNA, 80 bp, synthetic construct
  misc_feature 1..80: note = Artificially Synthesized Probe
  source 1..80: mol_type = other DNA
tcctctgaaaaatgggtgtgactcatacctgctccccagttgtcataaaaattacccacccatgagaaagtgttttgtaa

SEQ ID NO: 118686 - DNA, 80 bp, synthetic construct
  misc_feature 1..80: note = Artificially Synthesized Probe
  source 1..80: mol_type = other DNA
agaggggactggaaattcttcccagctccttcatttcccagatggaaggtgatttcatcagatgggaggtctgatacggt

SEQ ID NO: 118687 - DNA, 80 bp, synthetic construct
  misc_feature 1..80: note = Artificially Synthesized Probe
  source 1..80: mol_type = other DNA
ccattgctgtaactcttctggagacacccataaatgatcccagaaaagcatgattgagggcttaatggcagaggtgatca

SEQ ID NO: 118688 - DNA, 80 bp, synthetic construct
  misc_feature 1..80: note = Artificially Synthesized Probe
  source 1..80: mol_type = other DNA
gcgccatgtggaggggcctggcccaccttgctgggctggctgccccaggcacattggggcaaaggggtgtttgcctgtca

SEQ ID NO: 118689 - DNA, 80 bp, synthetic construct; identical to SEQ ID NO: 38794
  misc_feature 1..80: note = Artificially Synthesized Probe
  source 1..80: mol_type = other DNA

SEQ ID NO: 118690 - DNA, 80 bp, synthetic construct
  misc_feature 1..80: note = Artificially Synthesized Probe
  source 1..80: mol_type = other DNA
gttcaggcggcctccagtccaagaccaaagcttctgggaggggccatccgttccggggccctccctcagctccaggggct

SEQ ID NO: 118691 - DNA, 80 bp, synthetic construct
  misc_feature 1..80: note = Artificially Synthesized Probe
  source 1..80: mol_type = other DNA
ggacacagttctgtggaacaccatccaaccccctactgtctccaatccagtctccgaacggaagtcaaacaagctgaaca

SEQ ID NO: 118692 - DNA, 80 bp, synthetic construct
  misc_feature 1..80: note = Artificially Synthesized Probe
  source 1..80: mol_type = other DNA
ccagcctgaccaacatggtgaaaccccatctctactaaaaatacaaaattagccaggcatggtggcacacacctgcaatc

SEQ ID NO: 118693 - DNA, 80 bp, synthetic construct; identical to SEQ ID NO: 38795
  misc_feature 1..80: note = Artificially Synthesized Probe
  source 1..80: mol_type = other DNA

SEQ ID NO: 118694 - DNA, 80 bp, synthetic construct
  misc_feature 1..80: note = Artificially Synthesized Probe
  source 1..80: mol_type = other DNA
ccatttgcccttttggaggatcatcgttatttattcatttctttctggcctggctcctgcctctgtcccatcatgcagcc

SEQ ID NO: 118695 - DNA, 80 bp, synthetic construct
  misc_feature 1..80: note = Artificially Synthesized Probe
  source 1..80: mol_type = other DNA
ttttcatcaaatgggaggtctgatacagtagccccagccacccgcggctgcttaagtttcaattaattgatattaaatac

SEQ ID NO: 118696 - DNA, 80 bp, synthetic construct; identical to SEQ ID NO: 38796
  misc_feature 1..80: note = Artificially Synthesized Probe
  source 1..80: mol_type = other DNA

SEQ ID NO: 118697 - DNA, 80 bp, synthetic construct
  misc_feature 1..80: note = Artificially Synthesized Probe
  source 1..80: mol_type = other DNA
gaggctgaggtgagtggttcgtttgagcccaggagttcgagaccagcctgggacacatggtgagacctcatctctaccaa

SEQ ID NO: 118698 - DNA, 80 bp, synthetic construct
  misc_feature 1..80: note = Artificially Synthesized Probe
  source 1..80: mol_type = other DNA
gggcagccttgggtgtggacttctgggagcagaggccctggtttccctaggggaggggtgggcccggagcttcctgggag

SEQ ID NO: 118699 - DNA, 80 bp, synthetic construct
  misc_feature 1..80: note = Artificially Synthesized Probe
  source 1..80: mol_type = other DNA
gtgggaatggagcaacgcccccagccaatcccctggttccctggtgctcccaagggattcctgccagctctgcggccctc

SEQ ID NO: 118700 - DNA, 80 bp, synthetic construct
  misc_feature 1..80: note = Artificially Synthesized Probe
  source 1..80: mol_type = other DNA
aaaaaaaagaaaaagcctcaaaccgtctttcccttaaggcagcagtcctcagccaggggtgatggtgcccccccaaaccc

SEQ ID NO: 118701 - DNA, 80 bp, synthetic construct
  misc_feature 1..80: note = Artificially Synthesized Probe
  source 1..80: mol_type = other DNA
tagaaacgtccccggtgtcgtcctggggcaacactgtcccagttccacacctggcagggcggctctgcgaaatgcctcca

SEQ ID NO: 118702 - DNA, 80 bp, synthetic construct; identical to SEQ ID NO: 38797
  misc_feature 1..80: note = Artificially Synthesized Probe
  source 1..80: mol_type = other DNA

SEQ ID NO: 118703 - DNA, 80 bp, synthetic construct
  misc_feature 1..80: note = Artificially Synthesized Probe
  source 1..80: mol_type = other DNA
tagaactcactaaaagcacctatgctcacagttatggtttattacagcaaagggatccaggctgagatcaggcaaggaca

SEQ ID NO: 118704 - DNA, 80 bp, synthetic construct
  misc_feature 1..80: note = Artificially Synthesized Probe
  source 1..80: mol_type = other DNA
gctggggctctgtcacacactgccttggtggcagggctttagtttccagctcctcctggaggttagggctaatccttctg

SEQ ID NO: 118705 - DNA, 80 bp, synthetic construct
  misc_feature 1..80: note = Artificially Synthesized Probe
  source 1..80: mol_type = other DNA
gtgaaggcaaaggttagctctctctttggatcaagttggtgcttcactacccagacctccctccctccattttagatcag

SEQ ID NO: 118706 - DNA, 80 bp, synthetic construct; identical to SEQ ID NO: 38798
  misc_feature 1..80: note = Artificially Synthesized Probe
  source 1..80: mol_type = other DNA

SEQ ID NO: 118707 - DNA, 80 bp, synthetic construct
  misc_feature 1..80: note = Artificially Synthesized Probe
  source 1..80: mol_type = other DNA
acctggagtattaatcctctaaacctggggcccctcccgctcggagggctgagggctgcaggcctctggggcctccccgc

SEQ ID NO: 118708 - DNA, 80 bp, synthetic construct
  misc_feature 1..80: note = Artificially Synthesized Probe
  source 1..80: mol_type = other DNA
ggcccatttaggaagacatgttttctggtccactcaatgcctcatcctctttgcaaacatttcaaacgttttcttttaca

SEQ ID NO: 118709 - DNA, 80 bp, synthetic construct
  misc_feature 1..80: note = Artificially Synthesized Probe
  source 1..80: mol_type = other DNA
tggcttctagatatcacttagcatgcactctatatttaggaacggttatgaaacaaacatatcacccacaatatctgcac

SEQ ID NO: 118710 - DNA, 80 bp, synthetic construct; identical to SEQ ID NO: 38641
  misc_feature 1..80: note = Artificially Synthesized Probe
  source 1..80: mol_type = other DNA

SEQ ID NO: 118711 - DNA, 80 bp, synthetic construct
  misc_feature 1..80: note = Artificially Synthesized Probe
  source 1..80: mol_type = other DNA
ctcatctggtcaagttcgacaacccccaggtggcaagctttacgccacaaagcccattggactgcaggaaacaggaaaga

SEQ ID NO: 118712 - DNA, 80 bp, synthetic construct
  misc_feature 1..80: note = Artificially Synthesized Probe
  source 1..80: mol_type = other DNA
gttgagtgtacttgtaggtgtatacgtacataattcttagactttctccttgactggaggcactgtctgaatgtctgcag

SEQ ID NO: 118713 - DNA, 80 bp, synthetic construct; identical to SEQ ID NO: 38799
  misc_feature 1..80: note = Artificially Synthesized Probe
  source 1..80: mol_type = other DNA

SEQ ID NO: 118714 - DNA, 80 bp, synthetic construct
  misc_feature 1..80: note = Artificially Synthesized Probe
  source 1..80: mol_type = other DNA
actccatcccagcaaggatgaaggctgcggttcccaggtcctccgtcagcacgtatctcatttcctgggcacccaagaca

SEQ ID NO: 118715 - DNA, 80 bp, synthetic construct
  misc_feature 1..80: note = Artificially Synthesized Probe
  source 1..80: mol_type = other DNA
ctcacagctcgctctagcactaaaggttcctgtttttgaggtttgtgatattagagttgttccccaaaattccgattttc

SEQ ID NO: 118716 - DNA, 80 bp, synthetic construct
  misc_feature 1..80: note = Artificially Synthesized Probe
  source 1..80: mol_type = other DNA
cccaccacactgcccttgaacccagatgtggcaactataaatggatgatggtccagctggtgggggcgtcacccaacccg

SEQ ID NO: 118717 - DNA, 80 bp, synthetic construct
  misc_feature 1..80: note = Artificially Synthesized Probe
  source 1..80: mol_type = other DNA
tacagcagaatagcccttatcctaaacgcttggactagaagtattctggattgcatatatttttggattttggaatattt

SEQ ID NO: 118718 - DNA, 80 bp, synthetic construct; identical to SEQ ID NO: 38800
  misc_feature 1..80: note = Artificially Synthesized Probe
  source 1..80: mol_type = other DNA

SEQ ID NO: 118719 - DNA, 80 bp, synthetic construct
  misc_feature 1..80: note = Artificially Synthesized Probe
  source 1..80: mol_type = other DNA
aaacagagtctcgctctgtcgcccaggctggagtgcaatggtgtgagcttggctcactgaaatagcggccttccagcttc

SEQ ID NO: 118720 - DNA, 80 bp, synthetic construct
  misc_feature 1..80: note = Artificially Synthesized Probe
  source 1..80: mol_type = other DNA
caccatgcctggctgagagttcttaaaactgaagatctcccaggtaagcccatctttgtgtggcaggatccacaggttag

SEQ ID NO: 118721 - DNA, 80 bp, synthetic construct; identical to SEQ ID NO: 38801
  misc_feature 1..80: note = Artificially Synthesized Probe
  source 1..80: mol_type = other DNA

SEQ ID NO: 118722 - DNA, 80 bp, synthetic construct
  misc_feature 1..80: note = Artificially Synthesized Probe
  source 1..80: mol_type = other DNA
gagacccaccatacagcaggctgttagcaccgcctctgggtggtgaggggctgccgaagtttcggcccacctgccctccc

SEQ ID NO: 118723 - DNA, 80 bp, synthetic construct
  misc_feature 1..80: note = Artificially Synthesized Probe
  source 1..80: mol_type = other DNA
acaggatgtacttggggagaggctgtaccattgttgtgagcggaagagaaattaattttaagcctggagttgattccagc

SEQ ID NO: 118724 - DNA, 80 bp, synthetic construct
  misc_feature 1..80: note = Artificially Synthesized Probe
  source 1..80: mol_type = other DNA
taatgcactgagtggcttaaatcaaatgcctgcccagcaggggtatggagagaggcttcattagtcaaaatgatgaaacc

SEQ ID NO: 118725 - DNA, 80 bp, synthetic construct
  misc_feature 1..80: note = Artificially Synthesized Probe
  source 1..80: mol_type = other DNA
tgtcagtgttccaagccacccccacatcccagcaccggaagagcctggcccctccttccatctagagagccttgggtgtg

SEQ ID NO: 118726 - DNA, 80 bp, synthetic construct; identical to SEQ ID NO: 38802
  misc_feature 1..80: note = Artificially Synthesized Probe
  source 1..80: mol_type = other DNA

SEQ ID NO: 118727 - DNA, 80 bp, synthetic construct
  misc_feature 1..80: note = Artificially Synthesized Probe
  source 1..80: mol_type = other DNA
ggactccagctcccctaagggcctccgaactgctgccacagccgctactgctaggtgcactctgacatcagctccaagcc

SEQ ID NO: 118728 - DNA, 80 bp, synthetic construct
  misc_feature 1..80: note = Artificially Synthesized Probe
  source 1..80: mol_type = other DNA
cctatctctgggcctcagtttccccaagtgtgcaatgaagggcctggccatccagacccccagcagatccggccccctga

SEQ ID NO: 118729 - DNA, 80 bp, synthetic construct
  misc_feature 1..80: note = Artificially Synthesized Probe
  source 1..80: mol_type = other DNA
ccagggtgcttatcaatgagacaggagaggacatcgtctgtgggcttccagagaggggcagacagcatgcacactgcttt

SEQ ID NO: 118730 - DNA, 80 bp, synthetic construct
  misc_feature 1..80: note = Artificially Synthesized Probe
  source 1..80: mol_type = other DNA
gagcaagagaaaggtcagccatcctgctgggctggcactgaccttgcaggtgccctgaggccagacggcaggcagcagcg

SEQ ID NO: 118731 - DNA, 80 bp, synthetic construct; identical to SEQ ID NO: 38803
  misc_feature 1..80: note = Artificially Synthesized Probe
  source 1..80: mol_type = other DNA

SEQ ID NO: 118732 - DNA, 80 bp, synthetic construct
  misc_feature 1..80: note = Artificially Synthesized Probe
  source 1..80: mol_type = other DNA
gaaaatacagacacacagagacatggccacgtgcagatggaagcagagactgggggatgtggccacaagccaaagaacac

SEQ ID NO: 118733 - DNA, 80 bp, synthetic construct
  misc_feature 1..80: note = Artificially Synthesized Probe
  source 1..80: mol_type = other DNA
tctgttgttcaagccccagctggtggctttgaaccctttgtgagagcagccccaggacaccagcacaaagggtgagcatg

SEQ ID NO: 118734 - DNA, 80 bp, synthetic construct
  misc_feature 1..80: note = Artificially Synthesized Probe
  source 1..80: mol_type = other DNA
acagagcctgcattccggaatctgacccacaaagggctgtggcattcataggagaagccacggaagaccggcaggaatga

SEQ ID NO: 118735 - DNA, 80 bp, synthetic construct
  misc_feature 1..80: note = Artificially Synthesized Probe
  source 1..80: mol_type = other DNA
cccaaagccacagactgctgagccctgatacggtttggatctgtgttcccacccaaatctcatatgtgaaattgtagtct

SEQ ID NO: 118736 - DNA, 80 bp, synthetic construct; identical to SEQ ID NO: 38804
  misc_feature 1..80: note = Artificially Synthesized Probe
  source 1..80: mol_type = other DNA

SEQ ID NO: 118737 - DNA, 80 bp, synthetic construct
  misc_feature 1..80: note = Artificially Synthesized Probe
  source 1..80: mol_type = other DNA
ctccctcccacctgccttctccaaataaaaccatgtccctggtccttttctcttggtatccaccttctccatcatggagg

SEQ ID NO: 118738 - DNA, 80 bp, synthetic construct
  misc_feature 1..80: note = Artificially Synthesized Probe
  source 1..80: mol_type = other DNA
ggtgtctgtgaggatgcttcctgcatgacaagctggggttataagaacacaaaagcctgtaggatgaagcctggcccaaa

SEQ ID NO: 118739 - DNA, 80 bp, synthetic construct
  misc_feature 1..80: note = Artificially Synthesized Probe
  source 1..80: mol_type = other DNA
caagtctcagagaaggaaagcagttgccacaggtaattttctatcaaatatattacatttcttggaatcacacgcagaaa

SEQ ID NO: 118740 - DNA, 80 bp, synthetic construct
  misc_feature 1..80: note = Artificially Synthesized Probe
  source 1..80: mol_type = other DNA
ttaactaattagattcccccttatttttgaaatgctttcagaggacaatggaaaggttcactctgttctgggaaacgctt

SEQ ID NO: 118741 - DNA, 80 bp, synthetic construct; identical to SEQ ID NO: 38805
  misc_feature 1..80: note = Artificially Synthesized Probe
  source 1..80: mol_type = other DNA

SEQ ID NO: 118742 - DNA, 80 bp, synthetic construct
  misc_feature 1..80: note = Artificially Synthesized Probe
  source 1..80: mol_type = other DNA
catttagacgctaaacattagaatgcgatttgtccttcaatcagggaagagtggactgagcggacatttttgtttttgtt

SEQ ID NO: 118743 - DNA, 80 bp, synthetic construct
  misc_feature 1..80: note = Artificially Synthesized Probe
  source 1..80: mol_type = other DNA
ctacaggtgcccaccatcacgcccggctaattttttttttgtatttttagtagagacggggttttaccgtgttagccagg

SEQ ID NO: 118744 - DNA, 80 bp, synthetic construct
  misc_feature 1..80: note = Artificially Synthesized Probe
  source 1..80: mol_type = other DNA
acctctctggttcaaccagaggctcctttctctccttgataacaatccaaattgtgattgttttatagaaccgcctttta

SEQ ID NO: 118745 - DNA, 80 bp, synthetic construct
  misc_feature 1..80: note = Artificially Synthesized Probe
  source 1..80: mol_type = other DNA
aacaatccaaattgtgattgttttatagaaccgccttttacaacagaatcatctccccacataccattttccctgatgct

SEQ ID NO: 118746 - DNA, 80 bp, synthetic construct
  misc_feature 1..80: note = Artificially Synthesized Probe
  source 1..80: mol_type = other DNA
gcatgagggtacatccgggctgcagaagaacatactaattggtttattttttgaaacaaggtcatgttgatctggaaggt

SEQ ID NO: 118747 - DNA, 80 bp, synthetic construct
  misc_feature 1..80: note = Artificially Synthesized Probe
  source 1..80: mol_type = other DNA
aactcgggggaagagtagacaggaccagagggaggacagaggacaaggacatcattcagcaagatgagggcttgggaagc

SEQ ID NO: 118748 - DNA, 80 bp, synthetic construct; identical to SEQ ID NO: 38806
  misc_feature 1..80: note = Artificially Synthesized Probe
  source 1..80: mol_type = other DNA

SEQ ID NO: 118749 - DNA, 80 bp, synthetic construct
  misc_feature 1..80: note = Artificially Synthesized Probe
  source 1..80: mol_type = other DNA
gtttaaatagactgtggtacctcccccgactccctcttgctccccctttggtgatcactgaaagtttcttgaggcttctc

SEQ ID NO: 118750 - DNA, 80 bp, synthetic construct
  misc_feature 1..80: note = Artificially Synthesized Probe
  source 1..80: mol_type = other DNA
gaatatacaaaaatcctgagttcataatgacatactggtgaggaagagagagacagaccagggcagagaagacacaggga

SEQ ID NO: 118751 - DNA, 80 bp, synthetic construct
  misc_feature 1..80: note = Artificially Synthesized Probe
  source 1..80: mol_type = other DNA
gagtgaaaaagaccctacttcatccctcaacaacatgatagaaaaccaactcactggacatcagtagagatcactgaagc

SEQ ID NO: 118752 - DNA, 80 bp, synthetic construct
  misc_feature 1..80: note = Artificially Synthesized Probe
  source 1..80: mol_type = other DNA
gaaaaccaactcactggacatcagtagagatcactgaagcatcagcttcctatagagagacttgacaatgaaaaagaaag

SEQ ID NO: 118753 - DNA, 80 bp, synthetic construct
  misc_feature 1..80: note = Artificially Synthesized Probe
  source 1..80: mol_type = other DNA
caggattaggaagtcatcagatgcaagcctgcaagcctcagtgtactcctcaatgtctgcagggcccaccccagagagag

SEQ ID NO: 118754 - DNA, 80 bp, synthetic construct; identical to SEQ ID NO: 38807
  misc_feature 1..80: note = Artificially Synthesized Probe
  source 1..80: mol_type = other DNA

SEQ ID NO: 118755 - DNA, 80 bp, synthetic construct
  misc_feature 1..80: note = Artificially Synthesized Probe
  source 1..80: mol_type = other DNA
ggtcaaagtcaccaccgtgaaaagacatttctgagataatttgggacatgtgctaatggaggggtttcagattccaccca

SEQ ID NO: 118756 - DNA, 80 bp, synthetic construct
  misc_feature 1..80: note = Artificially Synthesized Probe
  source 1..80: mol_type = other DNA
gaaaaaaaaaagaataaaaaggtccgtctgtatatggatggcaagaatttcttggtaacaaaagcacagccaataaaaga

SEQ ID NO: 118757 - DNA, 80 bp, synthetic construct; identical to SEQ ID NO: 38808
  misc_feature 1..80: note = Artificially Synthesized Probe
  source 1..80: mol_type = other DNA

SEQ ID NO: 118758 - DNA, 80 bp, synthetic construct
  misc_feature 1..80: note = Artificially Synthesized Probe
  source 1..80: mol_type = other DNA
ggaacccaggaggcaaaggtcgcagtgaggtgagatcacgccactgcactctagcctgggtgacagagtgagactccgtc

SEQ ID NO: 118759 - DNA, 80 bp, synthetic construct
  misc_feature 1..80: note = Artificially Synthesized Probe
  source 1..80: mol_type = other DNA
tgttaggatggccacgatcctaaaacagaaagtaatgacgctggtgagtatgtggggaaactggagcccttgggcaccgc

SEQ ID NO: 118760 - DNA, 80 bp, synthetic construct
  misc_feature 1..80: note = Artificially Synthesized Probe
  source 1..80: mol_type = other DNA
tcacggtggcagcactattcatggtagctaagaggtggacgcaacctaagtgtccacctacagatgaacagacacacaaa

SEQ ID NO: 118761 - DNA, 80 bp, synthetic construct; identical to SEQ ID NO: 38642
  misc_feature 1..80: note = Artificially Synthesized Probe
  source 1..80: mol_type = other DNA

SEQ ID NO: 118762 - DNA, 80 bp, synthetic construct
  misc_feature 1..80: note = Artificially Synthesized Probe
  source 1..80: mol_type = other DNA
tccctagagtggtcaaattcatagggagagaaagtgggatggtgggtgccaggggccgggggaggggatggggatgagtg

SEQ ID NO: 118763 - DNA, 80 bp, synthetic construct; identical to SEQ ID NO: 38809
  misc_feature 1..80: note = Artificially Synthesized Probe
  source 1..80: mol_type = other DNA

SEQ ID NO: 118764 - DNA, 80 bp, synthetic construct
  misc_feature 1..80: note = Artificially Synthesized Probe
  source 1..80: mol_type = other DNA
cgttcagttccaatggaaataatgtaaaccctgcacaatactgtgaagggctgacatggacacagctagaggcttctgcc

SEQ ID NO: 118765 - DNA, 80 bp, synthetic construct
  misc_feature 1..80: note = Artificially Synthesized Probe
  source 1..80: mol_type = other DNA
aaagtctaaaaagaataaaagcacaaaagtaacagcaacatagataatgcgaacacgtgttgttacacaaactatagtgt

SEQ ID NO: 118766 - DNA, 80 bp, synthetic construct
  misc_feature 1..80: note = Artificially Synthesized Probe
  source 1..80: mol_type = other DNA
cgcccctttctctgccacatccacccctcccgaatgttccagaatacgcagagtctttccctggtccaggtggggccttg

SEQ ID NO: 118767 - DNA, 80 bp, synthetic construct
  misc_feature 1..80: note = Artificially Synthesized Probe
  source 1..80: mol_type = other DNA
gtatatgcgtgagcatgtgtgaatgcatgtcagcacgtgtgtgtgtgtgaatgtgagtctgagtgtatgagcatgcgtgt

SEQ ID NO: 118768 - DNA, 80 bp, synthetic construct; identical to SEQ ID NO: 38810
  misc_feature 1..80: note = Artificially Synthesized Probe
  source 1..80: mol_type = other DNA

SEQ ID NO: 118769 - DNA, 80 bp, synthetic construct
  misc_feature 1..80: note = Artificially Synthesized Probe
  source 1..80: mol_type = other DNA
atgtgtgagcatgtgtgcaaatgtgtgagcatatgaatatatgtgtgagcacgtgtgagcatctgtgtatgtgtaagcac

SEQ ID NO: 118770 - DNA, 80 bp, synthetic construct
  misc_feature 1..80: note = Artificially Synthesized Probe
  source 1..80: mol_type = other DNA
tgtgtgagaacttgtgtatttataagaatgtatgtaagcatgtgtgaacatgtgtgtgcacatggtagcatgtgtgcaag

SEQ ID NO: 118771 - DNA, 80 bp, synthetic construct
  misc_feature 1..80: note = Artificially Synthesized Probe
  source 1..80: mol_type = other DNA
tgtgtgtgaacatgtgtaccgtttcctggggttgtcacgacaaatcaccgcaaaccaaggggcttcaaacaacaggaatt

SEQ ID NO: 118772 - DNA, 80 bp, synthetic construct
  misc_feature 1..80: note = Artificially Synthesized Probe
  source 1..80: mol_type = other DNA
atgtgtgtgtgcattagtatgtgtgtgtttccattcacagcacagccacagcctccagttatggagcctgttgacccaca

SEQ ID NO: 118773 - DNA, 80 bp, synthetic construct; identical to SEQ ID NO: 38811
  misc_feature 1..80: note = Artificially Synthesized Probe
  source 1..80: mol_type = other DNA

SEQ ID NO: 118774 - DNA, 80 bp, synthetic construct
  misc_feature 1..80: note = Artificially Synthesized Probe
  source 1..80: mol_type = other DNA
gcgctcaggaaggccggggcacaaaggatgctaggcactgggagtgaggctggcgccctggcgaggggagactggctgct

SEQ ID NO: 118775 - DNA, 80 bp, synthetic construct
  misc_feature 1..80: note = Artificially Synthesized Probe
  source 1..80: mol_type = other DNA
cccagtgacggggctggagccctgtttggggtctgcgagctgcccacagctcacgccaagccggcttccgctctgtccat

SEQ ID NO: 118776 - DNA, 80 bp, synthetic construct
  misc_feature 1..80: note = Artificially Synthesized Probe
  source 1..80: mol_type = other DNA
ggggctaattttctcctgcaaagaagttgatcccataatctggcaaatacactaatcgtcactgcactgctcagagcagg

SEQ ID NO: 118777 - DNA, 80 bp, synthetic construct
  misc_feature 1..80: note = Artificially Synthesized Probe
  source 1..80: mol_type = other DNA
cgctgccctcttggggcagctagtctcctgcaaccaactcgaagcttggtttgggctttggcgaggctctaaacggcctt

SEQ ID NO: 118778 - DNA, 80 bp, synthetic construct
  misc_feature 1..80: note = Artificially Synthesized Probe
  source 1..80: mol_type = other DNA
tgctgggcacaatgcttctattgtcacggaaccctgcatccacgcccggccccgcttgcagatgggaaagctgagggtct

SEQ ID NO: 118779 - DNA, 80 bp, synthetic construct; identical to SEQ ID NO: 38812
  misc_feature 1..80: note = Artificially Synthesized Probe
  source 1..80: mol_type = other DNA

SEQ ID NO: 118780 - DNA, 80 bp, synthetic construct
  misc_feature 1..80: note = Artificially Synthesized Probe
  source 1..80: mol_type = other DNA
aaaccccgtctctactaaaaatacaaaaattagctgggcatggttgcaggtacctgtaatcccagctacttgggaggctg

SEQ ID NO: 118781 - DNA, 80 bp, synthetic construct
  misc_feature 1..80: note = Artificially Synthesized Probe
  source 1..80: mol_type = other DNA
aaaaacaaaaaaaacattgagagtccatggctcacactgccctgagtctcacagagccagcctgggctggtgctgggaag

SEQ ID NO: 118782 - DNA, 80 bp, synthetic construct
  misc_feature 1..80: note = Artificially Synthesized Probe
  source 1..80: mol_type = other DNA
caggcctttgctcagggtgccgtagcaaaatgccacaaactggtggcttctagacaacagaaatgtatttctcaccatgc

SEQ ID NO: 118783 - DNA, 80 bp, synthetic construct; identical to SEQ ID NO: 38813
  misc_feature 1..80: note = Artificially Synthesized Probe
  source 1..80: mol_type = other DNA

SEQ ID NO: 118784 - DNA, 80 bp, synthetic construct
  misc_feature 1..80: note = Artificially Synthesized Probe
  source 1..80: mol_type = other DNA
aggatttactgtatgaatttttcaggtgacacagaccatcacaccacagcaaagagggcctggtttttctttttcttttc

SEQ ID NO: 118785 - DNA, 80 bp, synthetic construct
  misc_feature 1..80: note = Artificially Synthesized Probe
  source 1..80: mol_type = other DNA
tttttgagagtcaatttccatctgattttcccagcaacacattaattgggtaaagccaaatccacatgagtaggtggggt

SEQ ID NO: 118786 - DNA, 80 bp, synthetic construct
  misc_feature 1..80: note = Artificially Synthesized Probe
  source 1..80: mol_type = other DNA
cagtggtggagttctacgtggctgggattgggacatcagtggacccagggacggccccaaggaaggggctaggtctcaga

SEQ ID NO: 118787 - DNA, 80 bp, synthetic construct
  misc_feature 1..80: note = Artificially Synthesized Probe
  source 1..80: mol_type = other DNA
gcagtgggctgagtggtgtctcccagaaagatgtgcccaggtcctaatctccggaactgagaatgggatcttatttggaa

SEQ ID NO: 118788 - DNA, 80 bp, synthetic construct
  misc_feature 1..80: note = Artificially Synthesized Probe
  source 1..80: mol_type = other DNA
tgagacacagaatcgcagagaggagaaggccacgtgaagatggaggcagagacgagcgacgcagccatgagccaagggac

SEQ ID NO: 118789 - DNA, 80 bp, synthetic construct; identical to SEQ ID NO: 38814
  misc_feature 1..80: note = Artificially Synthesized Probe
  source 1..80: mol_type = other DNA

SEQ ID NO: 118790 - DNA, 80 bp, synthetic construct
  misc_feature 1..80: note = Artificially Synthesized Probe
  source 1..80: mol_type = other DNA
cccggagtccaggagcatgagaaaaagaagtgttactgcattaacagacgtggcccacacaggctttacgaattcccctc

SEQ ID NO: 118791 - DNA, 80 bp, synthetic construct
  misc_feature 1..80: note = Artificially Synthesized Probe
  source 1..80: mol_type = other DNA
gctgggctctggaatcctctgtaagttgctccatctcagaaagcctcagtttactcatctgtaaaacggagagtcaggca

SEQ ID NO: 118792 - DNA, 80 bp, synthetic construct
  misc_feature 1..80: note = Artificially Synthesized Probe
  source 1..80: mol_type = other DNA
catgggctggctactgcctggcatccctccctgatgaaaaataacaatagatcgtgtacagaatttttaaaattctaagt

SEQ ID NO: 118793 - DNA, 80 bp, synthetic construct
  misc_feature 1..80: note = Artificially Synthesized Probe
  source 1..80: mol_type = other DNA
tccacctcctgggttcacaccgttctcctgcctcagcctcctgagtagctgggactacaggcgcatgccaccacgcctgg

SEQ ID NO: 118794 - DNA, 80 bp, synthetic construct; identical to SEQ ID NO: 38815
  misc_feature 1..80: note = Artificially Synthesized Probe
  source 1..80: mol_type = other DNA

SEQ ID NO: 118795 - DNA, 80 bp, synthetic construct
  misc_feature 1..80: note = Artificially Synthesized Probe
  source 1..80: mol_type = other DNA
ccgccagttgagattgcagtcaacggaacagaagcggaagtgatatgcactttctcttctgccagccagaggcggccgag

SEQ ID NO: 118796 - DNA, 80 bp, synthetic construct
  misc_feature 1..80: note = Artificially Synthesized Probe
  source 1..80: mol_type = other DNA
gctcaaatgaacagccagttttcagtatgtggcttgttacggtgtccagcattgcgggcacggacacacaatgtctaaaa

SEQ ID NO: 118797 - DNA, 80 bp, synthetic construct
  misc_feature 1..80: note = Artificially Synthesized Probe
  source 1..80: mol_type = other DNA
gtgaccaaggttcaggctctttcctgggagttcctgggtctggagagaaggctacgggggactgggtaccaggatgggta

SEQ ID NO: 118798 - DNA, 80 bp, synthetic construct; identical to SEQ ID NO: 38816
  misc_feature 1..80: note = Artificially Synthesized Probe
  source 1..80: mol_type = other DNA

SEQ ID NO: 118799 - DNA, 80 bp, synthetic construct
  misc_feature 1..80: note = Artificially Synthesized Probe
  source 1..80: mol_type = other DNA
accccatgtgaactgctttggagaacagagtggtagctttgttagatttatggggacggcggctcagcctgtctaatcgc

SEQ ID NO: 118800 - DNA, 80 bp, synthetic construct
  misc_feature 1..80: note = Artificially Synthesized Probe
  source 1..80: mol_type = other DNA
ggaaatttatatctggctcaggagttgcacctgctgaagaggtgaagatgacaaaggccctccatgcgactgagaataac

SEQ ID NO: 118801 - DNA, 80 bp, synthetic construct; identical to SEQ ID NO: 38817
  misc_feature 1..80: note = Artificially Synthesized Probe
  source 1..80: mol_type = other DNA

SEQ ID NO: 118802 - DNA, 80 bp, synthetic construct
  misc_feature 1..80: note = Artificially Synthesized Probe
  source 1..80: mol_type = other DNA
tttctctcggttcatttgctgtaggatagagttcaattcactaataacgtttgcctttgggcctgagagaatcgggcttt

SEQ ID NO: 118803 - DNA, 80 bp, synthetic construct
  misc_feature 1..80: note = Artificially Synthesized Probe
  source 1..80: mol_type = other DNA
accttggaggaaggcttatcttgaaggattatcacattggtgtggagctttccagaacttttgcataacatttatgttcc

SEQ ID NO: 118804 - DNA, 80 bp, synthetic construct
  misc_feature 1..80: note = Artificially Synthesized Probe
  source 1..80: mol_type = other DNA
cagtgaaaacccgtctctactaaaaatacaaaaaaattagccgggcgtggtggcaggtgcctgtagtcccagctcctcag

SEQ ID NO: 118805 - DNA, 80 bp, synthetic construct
  misc_feature 1..80: note = Artificially Synthesized Probe
  source 1..80: mol_type = other DNA
ctgtgacctgtggttagtatttgggatggtgtcttgggaatcacgtcgtggttggtatgcaaatattcctctttctttta

SEQ ID NO: 118806 - DNA, 80 bp, synthetic construct
  misc_feature 1..80: note = Artificially Synthesized Probe
  source 1..80: mol_type = other DNA
ggggaagactgaccaacaacaaaaggtgaacagaaaccataccgtgtgctggccagagctatgaataaacaggaagccga

SEQ ID NO: 118807 - DNA, 80 bp, synthetic construct; identical to SEQ ID NO: 38818
  misc_feature 1..80: note = Artificially Synthesized Probe
  source 1..80: mol_type = other DNA

SEQ ID NO: 118808 - DNA, 80 bp, synthetic construct
  misc_feature 1..80: note = Artificially Synthesized Probe
  source 1..80: mol_type = other DNA
cacaaagcataaaatttgccattttacagtggccagttcatggcattaactacatttacagtgtgtgcagccatcaccag

SEQ ID NO: 118809 - DNA, 80 bp, synthetic construct
  misc_feature 1..80: note = Artificially Synthesized Probe
  source 1..80: mol_type = other DNA
gtgacggatgtgactactctaggaacctcacttgagcggaatcatacagttcaaaggaagagaatgttgtatttggccac

SEQ ID NO: 118810 - DNA, 80 bp, synthetic construct
  misc_feature 1..80: note = Artificially Synthesized Probe
  source 1..80: mol_type = other DNA
gatcttggaagaacacacctttccaacatgcattcccagagacaatgcagatctcagcaaagtcaggggtgaggacagtg

SEQ ID NO: 118811 - DNA, 80 bp, synthetic construct; identical to SEQ ID NO: 38819
  misc_feature 1..80: note = Artificially Synthesized Probe
  source 1..80: mol_type = other DNA

SEQ ID NO: 118812 - DNA, 80 bp, synthetic construct
  misc_feature 1..80: note = Artificially Synthesized Probe
  source 1..80: mol_type = other DNA
tgggaggctgaagcgggcagatcacctgagttcaggagttcgagacgagcctggccaacatggtgaaacccagtctttac

SEQ ID NO: 118813 - DNA, 80 bp, synthetic construct; identical to SEQ ID NO: 38643
  misc_feature 1..80: note = Artificially Synthesized Probe
  source 1..80: mol_type = other DNA

SEQ ID NO: 118814 - DNA, 80 bp, synthetic construct
  misc_feature 1..80: note = Artificially Synthesized Probe
  source 1..80: mol_type = other DNA
caaaaacaaaaataaaaaacacatcaagaatgctttgaagaagcacacaaggtacacacaagcttcatcctgctcaatgc

SEQ ID NO: 118815 - DNA, 80 bp, synthetic construct; identical to SEQ ID NO: 38820
  misc_feature 1..80: note = Artificially Synthesized Probe
  source 1..80: mol_type = other DNA

SEQ ID NO: 118816 - DNA, 80 bp, synthetic construct
  misc_feature 1..80: note = Artificially Synthesized Probe
  source 1..80: mol_type = other DNA
ctgccacaggccctcagggctgagtcccctcaaattcagtggccgacacctcacagtttcgcttcagtccagcagcagac

SEQ ID NO: 118817 - DNA, 80 bp, synthetic construct
  misc_feature 1..80: note = Artificially Synthesized Probe
  source 1..80: mol_type = other DNA
tcactccctcatcatcacctgtgatgggtcatcctatgttcaccaaacctcagctgttccatgtgcaaactgacactaat

SEQ ID NO: 118818 - DNA, 80 bp, synthetic construct
  misc_feature 1..80: note = Artificially Synthesized Probe
  source 1..80: mol_type = other DNA
cagcgtttggatctcctgtgcttggtgccccctcaaacccaggacattcagtgtaaatgactgtgagcctcaggctggaa

SEQ ID NO: 118819 - DNA, 80 bp, synthetic construct
  misc_feature 1..80: note = Artificially Synthesized Probe
  source 1..80: mol_type = other DNA
ccaaggcaaagtgcccaatcaggctctctactctccaagttcgtggtgcatggtagccacagctcacctctcccaataca

SEQ ID NO: 118820 - DNA, 80 bp, synthetic construct; identical to SEQ ID NO: 38821
  misc_feature 1..80: note = Artificially Synthesized Probe
  source 1..80: mol_type = other DNA

SEQ ID NO: 118821 - DNA, 80 bp, synthetic construct
  misc_feature 1..80: note = Artificially Synthesized Probe
  source 1..80: mol_type = other DNA
cacagtccagataccaaacagatagaaaacagggtttctgatctttaatagtacttctccagttattaaaaggaatctaa

SEQ ID NO: 118822 - DNA, 80 bp, synthetic construct
  misc_feature 1..80: note = Artificially Synthesized Probe
  source 1..80: mol_type = other DNA
agcctcccgagtagctggtactacaggtgtccgccaccatgcccagcaaatttttgtattttttttagtagagatagggg

SEQ ID NO: 118823 - DNA, 80 bp, synthetic construct
  misc_feature 1..80: note = Artificially Synthesized Probe
  source 1..80: mol_type = other DNA
cttaaagcacaaagcaatatcttttggtagccccaacttttatcatctgtatgtagaagtaagcccccagttttccttca

SEQ ID NO: 118824 - DNA, 80 bp, synthetic construct; identical to SEQ ID NO: 38822
  misc_feature 1..80: note = Artificially Synthesized Probe
  source 1..80: mol_type = other DNA

SEQ ID NO: 118825 - DNA, 80 bp, synthetic construct
  misc_feature 1..80: note = Artificially Synthesized Probe
  source 1..80: mol_type = other DNA
agtcttgcctgtgcataacttttgttccttccggctttctgcctaagctccctctgtttctttgttttcctctttcctct

SEQ ID NO: 118826 - DNA, 80 bp, synthetic construct
  misc_feature 1..80: note = Artificially Synthesized Probe
  source 1..80: mol_type = other DNA
cgatcccagagtcggcgacggcgtcaaagctttcagggggtggcaggaatgaggcaggcagacagtttgaaagactggct

SEQ ID NO: 118827 - DNA, 80 bp, synthetic construct
  misc_feature 1..80: note = Artificially Synthesized Probe
  source 1..80: mol_type = other DNA
ccactctgtgctgtggcctcctcatgcagagaaaggagctgataaaagtcaccgagttaaacttaacacaaagtgagttc

SEQ ID NO: 118828 - DNA, 80 bp, synthetic construct
  misc_feature 1..80: note = Artificially Synthesized Probe
  source 1..80: mol_type = other DNA
ctcagcagttaagcttttgttggatctgagctctgtcttaacaaaaggggacaggacccccttccctctgcggtccttct

SEQ ID NO: 118829 - DNA, 80 bp, synthetic construct; identical to SEQ ID NO: 38626
  misc_feature 1..80: note = Artificially Synthesized Probe
  source 1..80: mol_type = other DNA

SEQ ID NO: 118830 - DNA, 80 bp, synthetic construct
  misc_feature 1..80: note = Artificially Synthesized Probe
  source 1..80: mol_type = other DNA
aaaacgaaaactggtacaaaaacgtttatgtcgacattattcacaaccataagttagaaacagcccaagtgtccctgaac

SEQ ID NO: 118831 - DNA, 80 bp, synthetic construct
  misc_feature 1..80: note = Artificially Synthesized Probe
  source 1..80: mol_type = other DNA
tagtgaatggataaactaattgtggtctaaccacatggtggaacgttattcacccacaaacagaaggtagtacggacaca

SEQ ID NO: 118832 - DNA, 80 bp, synthetic construct
  misc_feature 1..80: note = Artificially Synthesized Probe
  source 1..80: mol_type = other DNA
gatgagtatttgcctggggctgggagggagatggagagtgagtgctaatgggtttgatggtaaattttatggtctgtgta

SEQ ID NO: 118833 - DNA, 80 bp, synthetic construct; identical to SEQ ID NO: 38823
  misc_feature 1..80: note = Artificially Synthesized Probe
  source 1..80: mol_type = other DNA

SEQ ID NO: 118834 - DNA, 80 bp, synthetic construct
  misc_feature 1..80: note = Artificially Synthesized Probe
  source 1..80: mol_type = other DNA
gctggctatcaggcagatatgggggtaaagtttactcaaaatttcctaggaccaggggtacaattccccctgtaaacccc

SEQ ID NO: 118835 - DNA, 80 bp, synthetic construct
  misc_feature 1..80: note = Artificially Synthesized Probe
  source 1..80: mol_type = other DNA
acccttgtccaagacggaagttctatcctggctgtgctctcctcagtggtgccttcctttccttaaggaatatttattgg

SEQ ID NO: 118836 - DNA, 80 bp, synthetic construct
  misc_feature 1..80: note = Artificially Synthesized Probe
  source 1..80: mol_type = other DNA
caagtgtctggggacaggaggggtgtggcacattccggagaccagagagagtgtccaatggcgacgttcatctcctcact

SEQ ID NO: 118837 - DNA, 80 bp, synthetic construct; identical to SEQ ID NO: 38824
  misc_feature 1..80: note = Artificially Synthesized Probe
  source 1..80: mol_type = other DNA

SEQ ID NO: 118838 - DNA, 80 bp, synthetic construct
  misc_feature 1..80: note = Artificially Synthesized Probe
  source 1..80: mol_type = other DNA
acaaactccatcaattaaaagatcctgtggggcacttagcacagggccttcctccagttcatttgccagtctaaccactt

SEQ ID NO: 118839 - DNA, 80 bp, synthetic construct
  misc_feature 1..80: note = Artificially Synthesized Probe
  source 1..80: mol_type = other DNA
tcggggatatcaaaactatttgcaaattccaggggaggaggcaatggctctgtaaaaataaaatcctcatccaagtccac

SEQ ID NO: 118840 - DNA, 80 bp, synthetic construct
  misc_feature 1..80: note = Artificially Synthesized Probe
  source 1..80: mol_type = other DNA
gtatcatgaaactccccacgaaagggcaccaaaggcgaagagaaatcagtactaacaagagcctgctgagaacactggga

SEQ ID NO: 118841 - DNA, 80 bp, synthetic construct
  misc_feature 1..80: note = Artificially Synthesized Probe
  source 1..80: mol_type = other DNA
tgtacagcatccacacacagaaaaagatggctgttaagattacatcccaatgatctgggacttacctggagcatcagaca

SEQ ID NO: 118842 - DNA, 80 bp, synthetic construct; identical to SEQ ID NO: 38825
  misc_feature 1..80: note = Artificially Synthesized Probe
  source 1..80: mol_type = other DNA

SEQ ID NO: 118843 - DNA, 80 bp, synthetic construct
  misc_feature 1..80: note = Artificially Synthesized Probe
  source 1..80: mol_type = other DNA
gtggaagagatttctccatcgagtagatgagactgtcactaagtaatgagcctctatgcccagaaactccaaggacacag

SEQ ID NO: 118844 - DNA, 80 bp, synthetic construct
  misc_feature 1..80: note = Artificially Synthesized Probe
  source 1..80: mol_type = other DNA
gccacacaagggttcagcaccctggagagatccagcaatgctcttgctctgtgcagctgtacagccacacacatttgtac

SEQ ID NO: 118845 - DNA, 80 bp, synthetic construct
  misc_feature 1..80: note = Artificially Synthesized Probe
  source 1..80: mol_type = other DNA
tcaaagcctggagccaacaccatctttcatgaagcccttttcctgatttactttggggccttcaccacactctgcttttt

SEQ ID NO: 118846 - DNA, 80 bp, synthetic construct; identical to SEQ ID NO: 38826
  misc_feature 1..80: note = Artificially Synthesized Probe
  source 1..80: mol_type = other DNA

SEQ ID NO: 118847 - DNA, 80 bp, synthetic construct
  misc_feature 1..80: note = Artificially Synthesized Probe
  source 1..80: mol_type = other DNA
agtcccatggcatctgagcacagcagccatggtcccctgaagtgattctgaatctttttatagcctgaaattgaaatcac

SEQ ID NO: 118848 - DNA, 80 bp, synthetic construct
  misc_feature 1..80: note = Artificially Synthesized Probe
  source 1..80: mol_type = other DNA
gttcccagtcaatatggaggacaaagagaacgacctccccaggcccagaaggccacatgcagaaaagggatccaacctcc

SEQ ID NO: 118849 - DNA, 80 bp, synthetic construct
  misc_feature 1..80: note = Artificially Synthesized Probe
  source 1..80: mol_type = other DNA
tgctattagccttagagagtaaaggcccccaatgctattacccttggtcaatggatcctgacgacacggtgagaagccac

SEQ ID NO: 118850 - DNA, 80 bp, synthetic construct
  misc_feature 1..80: note = Artificially Synthesized Probe
  source 1..80: mol_type = other DNA
agctggtgtttggtctttaacttggttattaagtagccattcaaaaccatctaaataagagtggaagaaattttggggat

SEQ ID NO: 118851 - DNA, 80 bp, synthetic construct; identical to SEQ ID NO: 38827
  misc_feature 1..80: note = Artificially Synthesized Probe
  source 1..80: mol_type = other DNA

SEQ ID NO: 118852 - DNA, 80 bp, synthetic construct
  misc_feature 1..80: note = Artificially Synthesized Probe
  source 1..80: mol_type = other DNA
ggcgagctgtctggcttcatctccacctctgccttctcgtcctcttcctgcagggcgttgtccagcttagtggcgtccac

SEQ ID NO: 118853 - DNA, 80 bp, synthetic construct
  misc_feature 1..80: note = Artificially Synthesized Probe
  source 1..80: mol_type = other DNA
tgggcatcaggaataggaattccaaggtgatctaaaagccagacccatgccaacagagaattgtacaggctggtaagtgc

SEQ ID NO: 118854 - DNA, 80 bp, synthetic construct
  misc_feature 1..80: note = Artificially Synthesized Probe
  source 1..80: mol_type = other DNA
acttggcacatggtgggtgtgccctgtgactgctacatgcttcaaataatagtggtaacaaacatcagtcattattataa

SEQ ID NO: 118855 - DNA, 80 bp, synthetic construct
  misc_feature 1..80: note = Artificially Synthesized Probe
  source 1..80: mol_type = other DNA
tattattatccccgtttgttcaactaatagccactggtttcctcttctgagtcaggcatcattaatgatgatgaaagaca

SEQ ID NO: 118856 - DNA, 80 bp, synthetic construct
  misc_feature 1..80: note = Artificially Synthesized Probe
  source 1..80: mol_type = other DNA
cctcttctgagtcaggcatcattaatgatgatgaaagacaagatgataatcaatgacaaatactgactgaggccgggtgg

SEQ ID NO: 118857 - DNA, 80 bp, synthetic construct
  misc_feature 1..80: note = Artificially Synthesized Probe
  source 1..80: mol_type = other DNA
aagttagctacgtatggtggtgcgtgcctgtagtctgaactacttggaaggctgaggtgggaggatcttttgaacccagg

SEQ ID NO: 118858 - DNA, 80 bp, synthetic construct; identical to SEQ ID NO: 38828
  misc_feature 1..80: note = Artificially Synthesized Probe
  source 1..80: mol_type = other DNA

SEQ ID NO: 118859 - DNA, 80 bp, synthetic construct
  misc_feature 1..80: note = Artificially Synthesized Probe
  source 1..80: mol_type = other DNA
atttttttgtatttttagtagagacggggtttcaccatgttagccaggatggtctcgatttcctgacctcgtgatccgcc

SEQ ID NO: 118860 - DNA, 80 bp, synthetic construct
  misc_feature 1..80: note = Artificially Synthesized Probe
  source 1..80: mol_type = other DNA
aagtcaaacatgctagaggccacctcacatttctcaagtcccattttaaaataccagcccaagaaacatatatatttttt

SEQ ID NO: 118861 - DNA, 80 bp, synthetic construct; identical to SEQ ID NO: 38829
  misc_feature 1..80: note = Artificially Synthesized Probe
  source 1..80: mol_type = other DNA

SEQ ID NO: 118862 - DNA, 80 bp, synthetic construct
  misc_feature 1..80: note = Artificially Synthesized Probe
  source 1..80: mol_type = other DNA
agacagggtttcaccatgttggccatgctggtctcgaactcctgacctcaagtgatctgcctgccttggcctcccaaagt

SEQ ID NO: 118863 - DNA, 80 bp, synthetic construct
  misc_feature 1..80: note = Artificially Synthesized Probe
  source 1..80: mol_type = other DNA
gaagatccacgccctctctcgtgcaagtatttaatacgaggaaaatgtaattagcaaactcgagcaccacttttcaagga

SEQ ID NO: 118864 - DNA, 80 bp, synthetic construct
  misc_feature 1..80: note = Artificially Synthesized Probe
  source 1..80: mol_type = other DNA
gaaaatgtaattagcaaactcgagcaccacttttcaaggatgaaggatactgccacctgctttaactgcaagggaaaacc

SEQ ID NO: 118865 - DNA, 80 bp, synthetic construct
  misc_feature 1..80: note = Artificially Synthesized Probe
  source 1..80: mol_type = other DNA
tgaaggatactgccacctgctttaactgcaagggaaaacctatttgcagaaattaacacaaaaatgagattggccacttc

SEQ ID NO: 118866 - DNA, 80 bp, synthetic construct; identical to SEQ ID NO: 38644
  misc_feature 1..80: note = Artificially Synthesized Probe
  source 1..80: mol_type = other DNA

SEQ ID NO: 118867 - DNA, 80 bp, synthetic construct
  misc_feature 1..80: note = Artificially Synthesized Probe
  source 1..80: mol_type = other DNA
agcactatctgtgccaagggggctgaacatttgtctcctctgtgagataactttcttctaagacacagtttcctatgtat

SEQ ID NO: 118868 - DNA, 80 bp, synthetic construct; identical to SEQ ID NO: 38830
  misc_feature 1..80: note = Artificially Synthesized Probe
  source 1..80: mol_type = other DNA

SEQ ID NO: 118869 - DNA, 80 bp, synthetic construct
  misc_feature 1..80: note = Artificially Synthesized Probe
  source 1..80: mol_type = other DNA
cttgtaaacatcatttttaatgctttcttatgaattcacaacagatgtccattgccactgaaccattctcctattagccc

SEQ ID NO: 118870 - DNA, 80 bp, synthetic construct
  misc_feature 1..80: note = Artificially Synthesized Probe
  source 1..80: mol_type = other DNA
ccgggttcaagcgattctcctgcctcagcctcctgagtagctgggatttcagacacgcaccaccacgcccagctaatttt

SEQ ID NO: 118871 - DNA, 80 bp, synthetic construct
  misc_feature 1..80: note = Artificially Synthesized Probe
  source 1..80: mol_type = other DNA
gatgtaaaattcctggttcagctttatggctcttgttacatactaccacattgattgtgaaaacatttatggcaacttag

SEQ ID NO: 118872 - DNA, 80 bp, synthetic construct
  misc_feature 1..80: note = Artificially Synthesized Probe
  source 1..80: mol_type = other DNA
tatacataaagcacatcaaagtgttgttcaggcatctttgagccatgacattacagagtcagacaatgtgggttggaatt

SEQ ID NO: 118873 - DNA, 80 bp, synthetic construct; identical to SEQ ID NO: 38831
  misc_feature 1..80: note = Artificially Synthesized Probe
  source 1..80: mol_type = other DNA

SEQ ID NO: 118874 - DNA, 80 bp, synthetic construct
  misc_feature 1..80: note = Artificially Synthesized Probe
  source 1..80: mol_type = other DNA
ttaacgcagcacctgcttgtgtttgggtcgaggagactttagttggcaggccacatcaagaggctggaatgtcaacttgc

SEQ ID NO: 118875 - DNA, 80 bp, synthetic construct
  misc_feature 1..80: note = Artificially Synthesized Probe
  source 1..80: mol_type = other DNA
tttcactgagtgagacctacagtgagccctgcatgacatccaagtggcgtccccacctccacatctccttacacacttga

SEQ ID NO: 118876 - DNA, 80 bp, synthetic construct
  misc_feature 1..80: note = Artificially Synthesized Probe
  source 1..80: mol_type = other DNA
ggcaggctcactctcctttgaaactctctggtctcagcttcctgacaagctctaatcattatgaaaaccagtttggactg

SEQ ID NO: 118877 - DNA, 80 bp, synthetic construct
  misc_feature 1..80: note = Artificially Synthesized Probe
  source 1..80: mol_type = other DNA
acgggcattctccgcaggggcattcaacttcccgccgccctgcccctcccacggcctctgaaatctctttggctccttct

SEQ ID NO: 118878 - DNA, 80 bp, synthetic construct; identical to SEQ ID NO: 38832
  misc_feature 1..80: note = Artificially Synthesized Probe
  source 1..80: mol_type = other DNA

SEQ ID NO: 118879 - DNA, 80 bp, synthetic construct
  misc_feature 1..80: note = Artificially Synthesized Probe
  source 1..80: mol_type = other DNA
ctgctctcgggcccctgggctttggacgtggaattcagcggcctcccagcctcacccggagcactggcctcggcgccacc

SEQ ID NO: 118880 - DNA, 80 bp, synthetic construct
  misc_feature 1..80: note = Artificially Synthesized Probe
  source 1..80: mol_type = other DNA
aactcttcccaaaagcttaggtaggagagaaataaattctacaagctaagtacccaagaaagtcatgcacagcaggaaat

SEQ ID NO: 118881 - DNA, 80 bp, synthetic construct
  misc_feature 1..80: note = Artificially Synthesized Probe
  source 1..80: mol_type = other DNA
ggtgcccattggtccaaaagttcaaaccgcagcatgcatttttaaagagaaaataaaaatctgtcacactttcgaggttc

SEQ ID NO: 118882 - DNA, 80 bp, synthetic construct
  misc_feature 1..80: note = Artificially Synthesized Probe
  source 1..80: mol_type = other DNA
tttaaagagaaaataaaaatctgtcacactttcgaggttctttcaaaatagcagagagaaaggaaggcttgccaagggct

SEQ ID NO: 118883 - DNA, 80 bp, synthetic construct
  misc_feature 1..80: note = Artificially Synthesized Probe
  source 1..80: mol_type = other DNA
aattcacgtgagacatgtgaggctatttcacaccatccctccaaggtcaaagctcttcactaaaaatagagaaacatggt

SEQ ID NO: 118884 - DNA, 80 bp, synthetic construct
  misc_feature 1..80: note = Artificially Synthesized Probe
  source 1..80: mol_type = other DNA
ccaaggtcaaagctcttcactaaaaatagagaaacatggtctgttggaacaaacacgcacctattatgctatacaagatt

SEQ ID NO: 118885 - DNA, 80 bp, synthetic construct
  misc_feature 1..80: note = Artificially Synthesized Probe
  source 1..80: mol_type = other DNA
ctgttggaacaaacacgcacctattatgctatacaagattttaatattccggtggcaaaatccagtcgctaggaacacaa

SEQ ID NO: 118886 - DNA, 80 bp, synthetic construct; identical to SEQ ID NO: 38833
  misc_feature 1..80: note = Artificially Synthesized Probe
  source 1..80: mol_type = other DNA

SEQ ID NO: 118887 - DNA, 80 bp, synthetic construct
  misc_feature 1..80: note = Artificially Synthesized Probe
  source 1..80: mol_type = other DNA
cataatgcaggcgcagccctaatgcatctcaggaccagccattcctagaatactggaagtcagaggttacccagaatata

SEQ ID NO: 118888 - DNA, 80 bp, synthetic construct
  misc_feature 1..80: note = Artificially Synthesized Probe
  source 1..80: mol_type = other DNA
attcctagaatactggaagtcagaggttacccagaatataaaacctgccccaaaatggcaaatctatttgcataccagag

SEQ ID NO: 118889 - DNA, 80 bp, synthetic construct
  misc_feature 1..80: note = Artificially Synthesized Probe
  source 1..80: mol_type = other DNA
aaacctgccccaaaatggcaaatctatttgcataccagaggttaaaagcaatgtcagaggaggtgcttagaaacagaagt

SEQ ID NO: 118890 - DNA, 80 bp, synthetic construct
  misc_feature 1..80: note = Artificially Synthesized Probe
  source 1..80: mol_type = other DNA
gttaaaagcaatgtcagaggaggtgcttagaaacagaagtgtggaaactctcaaagctccaaatttccacaaaggcttca

SEQ ID NO: 118891 - DNA, 80 bp, synthetic construct
  misc_feature 1..80: note = Artificially Synthesized Probe
  source 1..80: mol_type = other DNA
aggaaacagtccaatgagctgaacaacgggggttgttcttgcatctgcagccctcttttattattgaaaatcaagaacca

SEQ ID NO: 118892 - DNA, 80 bp, synthetic construct
  misc_feature 1..80: note = Artificially Synthesized Probe
  source 1..80: mol_type = other DNA
acacagacacacacacacacacagacacacacacacacacacacacacagacacacacacacgaaggggactcacatccc

SEQ ID NO: 118893 - DNA, 80 bp, synthetic construct; identical to SEQ ID NO: 38834
  misc_feature 1..80: note = Artificially Synthesized Probe
  source 1..80: mol_type = other DNA

SEQ ID NO: 118894 - DNA, 80 bp, synthetic construct
  misc_feature 1..80: note = Artificially Synthesized Probe
  source 1..80: mol_type = other DNA
aaatgatcacgggtagccctctcaccacgggtggagatgtgggctcctcatttacagaatgaatgtctgtctgtccagcc

SEQ ID NO: 118895 - DNA, 80 bp, synthetic construct
  misc_feature 1..80: note = Artificially Synthesized Probe
  source 1..80: mol_type = other DNA
aagaaatgcgcactcccaacgaggaccattcgagtctactgaacctttaaaatatcatctttttcaacctgtaacattct

SEQ ID NO: 118896 - DNA, 80 bp, synthetic construct
  misc_feature 1..80: note = Artificially Synthesized Probe
  source 1..80: mol_type = other DNA
gtggagaggaaggccggggagttcctcctggcttccagccgcttctcacggtcgcggacggctccggcgatggcggcggc

SEQ ID NO: 118897 - DNA, 80 bp, synthetic construct
  misc_feature 1..80: note = Artificially Synthesized Probe
  source 1..80: mol_type = other DNA
gagcactcaaacctctattctctaaaggaagagaatgctctttccttttcagtaccagcaaaagttcattttcaaagcat

SEQ ID NO: 118898 - DNA, 80 bp, synthetic construct; identical to SEQ ID NO: 38835
  misc_feature 1..80: note = Artificially Synthesized Probe
  source 1..80: mol_type = other DNA

SEQ ID NO: 118899 - DNA, 80 bp, synthetic construct
  misc_feature 1..80: note = Artificially Synthesized Probe
  source 1..80: mol_type = other DNA
aagaagggacgatgactcctcttggtgcctatttagtcacaactaaaccacccacaggtctgcacatgtccccaacatca

SEQ ID NO: 118900 - DNA, 80 bp, synthetic construct
  misc_feature 1..80: note = Artificially Synthesized Probe
  source 1..80: mol_type = other DNA
gaaagttcatggcagcctccacaagcacccccagactgggcctcgtggctgtgctgccaggactacgaccctctccccga

SEQ ID NO: 118901 - DNA, 80 bp, synthetic construct
  misc_feature 1..80: note = Artificially Synthesized Probe
  source 1..80: mol_type = other DNA
aatgggtgtgtcagctgggaagacaagcagcacctggttacaagcctgggagatgtcttccaagttcacattgcctgacc

SEQ ID NO: 118902 - DNA, 80 bp, synthetic construct
  misc_feature 1..80: note = Artificially Synthesized Probe
  source 1..80: mol_type = other DNA
ttggcctctctgctgaaaccacaggataatgtgctctgtggtacatgtctacacgcctgtcattttctttaaaagcatca

SEQ ID NO: 118903 - DNA, 80 bp, synthetic construct; identical to SEQ ID NO: 38836
  misc_feature 1..80: note = Artificially Synthesized Probe
  source 1..80: mol_type = other DNA

SEQ ID NO: 118904 - DNA, 80 bp, synthetic construct
  misc_feature 1..80: note = Artificially Synthesized Probe
  source 1..80: mol_type = other DNA
cagtgtccctgggcactggcatgtgtgtgtgtgggtgctgaaccactactgcccagcacagtgaggcttggcttctgggg

SEQ ID NO: 118905 - DNA, 80 bp, synthetic construct
  misc_feature 1..80: note = Artificially Synthesized Probe
  source 1..80: mol_type = other DNA
atctgctctttctctctctggacagctcgctatggagctgcctgagtctgaggcaggtgggcatgccagctggggaggag

SEQ ID NO: 118906 - DNA, 80 bp, synthetic construct
  misc_feature 1..80: note = Artificially Synthesized Probe
  source 1..80: mol_type = other DNA
gactggcaggtgcaccgccatggactgcattcctgagcctcccacgacgggccacgtaacgtgtgtgctgccggctcagt

SEQ ID NO: 118907 - DNA, 80 bp, synthetic construct; identical to SEQ ID NO: 38837
  misc_feature 1..80: note = Artificially Synthesized Probe
  source 1..80: mol_type = other DNA

SEQ ID NO: 118908 - DNA, 80 bp, synthetic construct
  misc_feature 1..80: note = Artificially Synthesized Probe
  source 1..80: mol_type = other DNA
gtctagcaactgagtgcccccaggaaaaatgcttatttaatgcttattcctgagctggggaacgtttttcatgcaggcgt

SEQ ID NO: 118909 - DNA, 80 bp, synthetic construct
  misc_feature 1..80: note = Artificially Synthesized Probe
  source 1..80: mol_type = other DNA
ttctcggggctgtcctccacgttggactgcttcaccagcatccccttccgcctggcgggcttggcggggacgtagacggc

SEQ ID NO: 118910 - DNA, 80 bp, synthetic construct
  misc_feature 1..80: note = Artificially Synthesized Probe
  source 1..80: mol_type = other DNA
tctcctcaataatgcagtcactgtagagagaattccggggacagcgaccattattgtagcccgtcatcatcaccgcggcc

SEQ ID NO: 118911 - DNA, 80 bp, synthetic construct
  misc_feature 1..80: note = Artificially Synthesized Probe
  source 1..80: mol_type = other DNA
ggtgggggcaggcagagccggagccagccggaggaaggagtcatacatggtggggcggctgcctgagggatggctgagct

SEQ ID NO: 118912 - DNA, 80 bp, synthetic construct; identical to SEQ ID NO: 38838
  misc_feature 1..80: note = Artificially Synthesized Probe
  source 1..80: mol_type = other DNA

SEQ ID NO: 118913 - DNA, 80 bp, synthetic construct
  misc_feature 1..80: note = Artificially Synthesized Probe
  source 1..80: mol_type = other DNA
tcatcccgcgcgagcatccgcaggctgggctgggagagggcggggagggggagcggctggggctctctctgcatcccccc

SEQ ID NO: 118914 - DNA, 80 bp, synthetic construct
  misc_feature 1..80: note = Artificially Synthesized Probe
  source 1..80: mol_type = other DNA
gagggggtatgtggctgcccctttgagatgacaaagctaaagccacaactgcttgcctctagccatggcatttttttttt

SEQ ID NO: 118915 - DNA, 80 bp, synthetic construct
  misc_feature 1..80: note = Artificially Synthesized Probe
  source 1..80: mol_type = other DNA
agccacaactgcttgcctctagccatggcattttttttttttaaggaaagaaaccaaaaaagctccaactttgctctagt

SEQ ID NO: 118916 - DNA, 80 bp, synthetic construct; identical to SEQ ID NO: 38839
  misc_feature 1..80: note = Artificially Synthesized Probe
  source 1..80: mol_type = other DNA

SEQ ID NO: 118917 - DNA, 80 bp, synthetic construct
  misc_feature 1..80: note = Artificially Synthesized Probe
  source 1..80: mol_type = other DNA
caggcccccgtcgcacaggggcagtcccagggatgcaaatttcaaacaaggccatgtgctgacggactcttggtcccaga

SEQ ID NO: 118918 - DNA, 80 bp, synthetic construct
  misc_feature 1..80: note = Artificially Synthesized Probe
  source 1..80: mol_type = other DNA
tcctggacaagggacgagcagcggcccctcgatcctcccattttacagatgaggctggtgaggctcagagagatcggagg

SEQ ID NO: 118919 - DNA, 80 bp, synthetic construct
  misc_feature 1..80: note = Artificially Synthesized Probe
  source 1..80: mol_type = other DNA
ctggtcactcccgttgtcagcagctgggaggggggttctggcccctgaccttccttaccttgccccctccccagagacag

SEQ ID NO: 118920 - DNA, 80 bp, synthetic construct; identical to SEQ ID NO: 38840
  misc_feature 1..80: note = Artificially Synthesized Probe
  source 1..80: mol_type = other DNA

SEQ ID NO: 118921 - DNA, 80 bp, synthetic construct
  misc_feature 1..80: note = Artificially Synthesized Probe
  source 1..80: mol_type = other DNA
atcatggtggccacggtgtcggacctggtggcgggggacaccttggcggcagaattctgattgaacgcaggcttaatcgt

SEQ ID NO: 118922 - DNA, 80 bp, synthetic construct
  misc_feature 1..80: note = Artificially Synthesized Probe
  source 1..80: mol_type = other DNA
gggagagctggggctctactgccatggatttaggggtccatgaggcattgatgagcagaccctctaccaggtccctcgac

SEQ ID NO: 118923 - DNA, 80 bp, synthetic construct
  misc_feature 1..80: note = Artificially Synthesized Probe
  source 1..80: mol_type = other DNA
agcctgtgtgtctcctgtgtctccttcatggaaggttctctaaaggccaaggctgccaaagccaagagcctctgctcaac

SEQ ID NO: 118924 - DNA, 80 bp, synthetic construct
  misc_feature 1..80: note = Artificially Synthesized Probe
  source 1..80: mol_type = other DNA
gggaacctgtcatgcgctccaggcgtgctcacttgcactgctgggcagctcctcctgcagtgcccaacgccatccaaacc

SEQ ID NO: 118925 - DNA, 80 bp, synthetic construct
  misc_feature 1..80: note = Artificially Synthesized Probe
  source 1..80: mol_type = other DNA
atcacacggagcgtggttcaaatcccagctttgctttgaccccaaggtcactgacctatcaggccccagagcctgctctg

SEQ ID NO: 118926 - DNA, 80 bp, synthetic construct; identical to SEQ ID NO: 38841
  misc_feature 1..80: note = Artificially Synthesized Probe
  source 1..80: mol_type = other DNA

SEQ ID NO: 118927 - DNA, 80 bp, synthetic construct
  misc_feature 1..80: note = Artificially Synthesized Probe
  source 1..80: mol_type = other DNA
cagggctaaaaccttttcagtgattcctaatgcacccaagaacttagttttttaaaattagagacggggttttgctctgc

SEQ ID NO: 118928 - DNA, 80 bp, synthetic construct
  misc_feature 1..80: note = Artificially Synthesized Probe
  source 1..80: mol_type = other DNA
cccagctaatttttaatttttttgtagagacagggtctcactgtgttgcccatgatggtcttaaactcctggcctcaagg

SEQ ID NO: 118929 - DNA, 80 bp, synthetic construct
  misc_feature 1..80: note = Artificially Synthesized Probe
  source 1..80: mol_type = other DNA
taatggccctgtcctgtttattcagtaaaacaccaaactgcttagtctctgacattaagaaggactgtttctaacttctc

SEQ ID NO: 118930 - DNA, 80 bp, synthetic construct; identical to SEQ ID NO: 38842
  misc_feature 1..80: note = Artificially Synthesized Probe
  source 1..80: mol_type = other DNA

SEQ ID NO: 118931 - DNA, 80 bp, synthetic construct
  misc_feature 1..80: note = Artificially Synthesized Probe
  source 1..80: mol_type = other DNA
ttgtctcttgtgggggaggggacattttctacaaggtcaatgggggcagtgacctcatcctgcagaccaccccaaatgcc

SEQ ID NO: 118932 - DNA, 80 bp, synthetic construct
  misc_feature 1..80: note = Artificially Synthesized Probe
  source 1..80: mol_type = other DNA
atgactacagggtttcgagtaaaaaggcaccagaacaatccctggattcctagttaaacccagaaggtagactcagtgct

SEQ ID NO: 118933 - DNA, 80 bp, synthetic construct
  misc_feature 1..80: note = Artificially Synthesized Probe
  source 1..80: mol_type = other DNA
actttcaatgttttggggaattcatgaaaagcaatgggacactctagaagagacattccttgaaaggagctgcagtcact

SEQ ID NO: 118934 - DNA, 80 bp, synthetic construct; identical to SEQ ID NO: 38645
  misc_feature 1..80: note = Artificially Synthesized Probe
  source 1..80: mol_type = other DNA

SEQ ID NO: 118935 - DNA, 80 bp, synthetic construct
  misc_feature 1..80: note = Artificially Synthesized Probe
  source 1..80: mol_type = other DNA
tgctggttcatgaatctaaaacctatcccaggatgacagctgcggctgggtccggaagttgtggcattgagttctgtgtg

SEQ ID NO: 118936 - DNA, 80 bp, synthetic construct
  misc_feature 1..80: note = Artificially Synthesized Probe
  source 1..80: mol_type = other DNA
caatccagtttcatggggaaatgaccgaggcgcctacacgttccccacgctgtgttgggacagccttctccaagcccgtc

SEQ ID NO: 118937 - DNA, 80 bp, synthetic construct
  misc_feature 1..80: note = Artificially Synthesized Probe
  source 1..80: mol_type = other DNA
tttagctttaagtcacaatagcaacaaagcctaagttcctaggaacgtgcgatacgctacatctccacaaactcacaaat

SEQ ID NO: 118938 - DNA, 80 bp, synthetic construct; identical to SEQ ID NO: 38843
  misc_feature 1..80: note = Artificially Synthesized Probe
  source 1..80: mol_type = other DNA

SEQ ID NO: 118939 - DNA, 80 bp, synthetic construct
  misc_feature 1..80: note = Artificially Synthesized Probe
  source 1..80: mol_type = other DNA
aggaacgtgcgatacgctacatctccacaaactcacaaattcagatgatgaaccggatgttcaggaaacacagcacaagc

SEQ ID NO: 118940 - DNA, 80 bp, synthetic construct
  misc_feature 1..80: note = Artificially Synthesized Probe
  source 1..80: mol_type = other DNA
tggtaatttcgtcacagagggaagaaaaacgtcttaaggaaggggcaagcaccttttcctagttcaaacaaagatggggt

SEQ ID NO: 118941 - DNA, 80 bp, synthetic construct
  misc_feature 1..80: note = Artificially Synthesized Probe
  source 1..80: mol_type = other DNA
tcccactgtatgctgcaagagagcttatgggatacacttggagcacttagcaccttgaagcaagacaggagggttgtgga

SEQ ID NO: 118942 - DNA, 80 bp, synthetic construct
  misc_feature 1..80: note = Artificially Synthesized Probe
  source 1..80: mol_type = other DNA
ctcacagggaaggctgcactttccctggtccagcgggcagcaggtgccagtgatgacagttggcgtttaggatctgtcag

SEQ ID NO: 118943 - DNA, 80 bp, synthetic construct; identical to SEQ ID NO: 38844
  misc_feature 1..80: note = Artificially Synthesized Probe
  source 1..80: mol_type = other DNA

SEQ ID NO: 118944 - DNA, 80 bp, synthetic construct
  misc_feature 1..80: note = Artificially Synthesized Probe
  source 1..80: mol_type = other DNA
tgtgcgcagacaccctggaaaaggtatcttggcaggtatacataatttacattttgagagatttgggttttgtatacaca

SEQ ID NO: 118945 - DNA, 80 bp, synthetic construct
  misc_feature 1..80: note = Artificially Synthesized Probe
  source 1..80: mol_type = other DNA
tcaagccgccgtgtaaatcaataaatcaatccagctgttacatcctgaatacccactgagagtcaggggatgaactgggt

SEQ ID NO: 118946 - DNA, 80 bp, synthetic construct
  misc_feature 1..80: note = Artificially Synthesized Probe
  source 1..80: mol_type = other DNA
aggtataattagttaagggtcttgagttgagatcttcctggatttagggagggtcctaaaccaatgactgtgcccttacg

SEQ ID NO: 118947 - DNA, 80 bp, synthetic construct
  misc_feature 1..80: note = Artificially Synthesized Probe
  source 1..80: mol_type = other DNA
cccctggagcccccggagggagcgtggccctgctgtcatcttggttttggacctctggcctccagggctgtgacaggtaa

SEQ ID NO: 118948 - DNA, 80 bp, synthetic construct; identical to SEQ ID NO: 38845
  misc_feature 1..80: note = Artificially Synthesized Probe
  source 1..80: mol_type = other DNA

SEQ ID NO: 118949 - DNA, 80 bp, synthetic construct
  misc_feature 1..80: note = Artificially Synthesized Probe
  source 1..80: mol_type = other DNA
ggtgtcagcagggccccagccactcacgctttaccccagtttcacccatgaggactgaaatggcagaagagctgttgccc

SEQ ID NO: 118950 - DNA, 80 bp, synthetic construct
  misc_feature 1..80: note = Artificially Synthesized Probe
  source 1..80: mol_type = other DNA
gccatcagcgtgaacactgtcgtgctcctgcctagaagccctggctgttctcttaaagcggctgtgagtggtctgtgggg

SEQ ID NO: 118951 - DNA, 80 bp, synthetic construct
  misc_feature 1..80: note = Artificially Synthesized Probe
  source 1..80: mol_type = other DNA
tgtcagaacatgtgcacgtgtgaggtccaaggtccaggccagcagaggagggggctgcacatctgagcattcggtggggg

SEQ ID NO: 118952 - DNA, 80 bp, synthetic construct
  misc_feature 1..80: note = Artificially Synthesized Probe
  source 1..80: mol_type = other DNA
ctgacgctgagccgtgtgccagtctgcaggccaagtgggcagctcgccttggggctgcttgtgcgtgtgtgtgtgcgctt

SEQ ID NO: 118953 - DNA, 80 bp, synthetic construct; identical to SEQ ID NO: 38846
  misc_feature 1..80: note = Artificially Synthesized Probe
  source 1..80: mol_type = other DNA

SEQ ID NO: 118954 - DNA, 80 bp, synthetic construct
  misc_feature 1..80: note = Artificially Synthesized Probe
  source 1..80: mol_type = other DNA
cactggctccaaaatccaaagagaaaacaacagtgcggttaatctctgttgaattcagtgtctctgatatttaacacggg

SEQ ID NO: 118955 - DNA, 80 bp, synthetic construct
  misc_feature 1..80: note = Artificially Synthesized Probe
  source 1..80: mol_type = other DNA
aatctctgttgaattcagtgtctctgatatttaacacggggtcaacgtcacgacccatttaagctggtatccataaacgc

SEQ ID NO: 118956 - DNA, 80 bp, synthetic construct
  misc_feature 1..80: note = Artificially Synthesized Probe
  source 1..80: mol_type = other DNA
ctcacggccaaacaagttcaaaggcggaatgattaaatcacttctgaatgtttttcatggcagaaaggtacattgaacat

SEQ ID NO: 118957 - DNA, 80 bp, synthetic construct
  misc_feature 1..80: note = Artificially Synthesized Probe
  source 1..80: mol_type = other DNA
agagactgggtggtgcgtttattgcccctgaaagtccttcccagagcagctggagccaggagatctgccttctccaaggc

SEQ ID NO: 118958 - DNA, 80 bp, synthetic construct
  misc_feature 1..80: note = Artificially Synthesized Probe
  source 1..80: mol_type = other DNA
gtgatggcagtggatgtcctagaaatttccgggctctgccaatcaggaaagatgaggctaagcagagagctttcagcagt

SEQ ID NO: 118959 - DNA, 80 bp, synthetic construct
  misc_feature 1..80: note = Artificially Synthesized Probe
  source 1..80: mol_type = other DNA
tgcgggagaacaggagggtttccccgtcatctgtcactcccaaggggcatgggggagcttctcagcccatgaccacacgt

SEQ ID NO: 118960 - DNA, 80 bp, synthetic construct; identical to SEQ ID NO: 38847
  misc_feature 1..80: note = Artificially Synthesized Probe
  source 1..80: mol_type = other DNA

SEQ ID NO: 118961 - DNA, 80 bp, synthetic construct
  misc_feature 1..80: note = Artificially Synthesized Probe
  source 1..80: mol_type = other DNA
atcggcaattatgaaaacgccctgcccggcgcttattatgaccattttcctcctcattgctaacatgataagcaatgcaa

SEQ ID NO: 118962 - DNA, 80 bp, synthetic construct
  misc_feature 1..80: note = Artificially Synthesized Probe
  source 1..80: mol_type = other DNA
tcaaattaaattgtctcattactttgtaataaatcacccacaagcatttcctgagcactaccaggcatgttacctgccag

SEQ ID NO: 118963 - DNA, 80 bp, synthetic construct
  misc_feature 1..80: note = Artificially Synthesized Probe
  source 1..80: mol_type = other DNA
cagcttccccaaaccagcgccacgcccctggccaagttcctcaacctcgtcgagcgccagtatcctcacttgacgactac

SEQ ID NO: 118964 - DNA, 80 bp, synthetic construct; identical to SEQ ID NO: 38848
  misc_feature 1..80: note = Artificially Synthesized Probe
  source 1..80: mol_type = other DNA

SEQ ID NO: 118965 - DNA, 80 bp, synthetic construct
  misc_feature 1..80: note = Artificially Synthesized Probe
  source 1..80: mol_type = other DNA
cacagggctgtgggcagatgggatgagggcagggggcccccaagcaagggatgccaggatgcctccctgtgcttccaaag

SEQ ID NO: 118966 - DNA, 80 bp, synthetic construct; identical to SEQ ID NO: 38646
  misc_feature 1..80: note = Artificially Synthesized Probe
  source 1..80: mol_type = other DNA

SEQ ID NO: 118967 - DNA, 80 bp, synthetic construct
  misc_feature 1..80: note = Artificially Synthesized Probe
  source 1..80: mol_type = other DNA
tctctattctgagcccactgaaaagtctcctctgaattcactctttatgtaaaaaccttaaatcacactgtatctccccc

SEQ ID NO: 118968 - DNA, 80 bp, synthetic construct
  misc_feature 1..80: note = Artificially Synthesized Probe
  source 1..80: mol_type = other DNA
ctctttatgtaaaaaccttaaatcacactgtatctcccccacttaaaacaccccaacagatccccaccatacttttcttt

SEQ ID NO: 118969 - DNA, 80 bp, synthetic construct
  misc_feature 1..80: note = Artificially Synthesized Probe
  source 1..80: mol_type = other DNA
atgcctggctaatttttatatttttagtagagacagggtttcaccatgttggccaggatggtctcaaactcctgacctca

SEQ ID NO: 118970 - DNA, 80 bp, synthetic construct; identical to SEQ ID NO: 38849
  misc_feature 1..80: note = Artificially Synthesized Probe
  source 1..80: mol_type = other DNA

SEQ ID NO: 118971 - DNA, 80 bp, synthetic construct
  misc_feature 1..80: note = Artificially Synthesized Probe
  source 1..80: mol_type = other DNA
ccagcttttctctctgctttgctttcttctggccagttactatgtttgaaattgtgatttgcttgttcactcatttgctg

SEQ ID NO: 118972 - DNA, 80 bp, synthetic construct
  misc_feature 1..80: note = Artificially Synthesized Probe
  source 1..80: mol_type = other DNA
ttctaggtggagaaggcccactttctagtcctggctctggcaagagctggcagtgggaccctggacaggaccctcaacca

SEQ ID NO: 118973 - DNA, 80 bp, synthetic construct
  misc_feature 1..80: note = Artificially Synthesized Probe
  source 1..80: mol_type = other DNA
tgcaggctgggtgtccccctgtcctgatgtttcctgacaaaggggttttctgggatatggggctgtcagttttaaaacca

SEQ ID NO: 118974 - DNA, 80 bp, synthetic construct
  misc_feature 1..80: note = Artificially Synthesized Probe
  source 1..80: mol_type = other DNA
gcctcagcctttgactctgaactgaatgttctttaaaaaaaaaaaaaaatcaggggaacagtacaactgcctggcatttt

SEQ ID NO: 118975 - DNA, 80 bp, synthetic construct; identical to SEQ ID NO: 38850
  misc_feature 1..80: note = Artificially Synthesized Probe
  source 1..80: mol_type = other DNA

SEQ ID NO: 118976 - DNA, 80 bp, synthetic construct
  misc_feature 1..80: note = Artificially Synthesized Probe
  source 1..80: mol_type = other DNA
gctgtgagtgcaggaagggactgttgatgacttttccttcattcgttaattaaaatgacaggccaagcctgccccatctg

SEQ ID NO: 118977 - DNA, 80 bp, synthetic construct
  misc_feature 1..80: note = Artificially Synthesized Probe
  source 1..80: mol_type = other DNA
actcagtgtgacagtcacctgatgtcctgggctttgtagggaaggctgattctagggctgggggcccacctgcagcccgt

SEQ ID NO: 118978 - DNA, 80 bp, synthetic construct
  misc_feature 1..80: note = Artificially Synthesized Probe
  source 1..80: mol_type = other DNA
tttgcttctcttccaagtgctgatgcttcattaagagactggtgtcaccagaggggcagttgtaaaaacagttaaaagta

SEQ ID NO: 118979 - DNA, 80 bp, synthetic construct; identical to SEQ ID NO: 38851
  misc_feature 1..80: note = Artificially Synthesized Probe
  source 1..80: mol_type = other DNA

SEQ ID NO: 118980 - DNA, 80 bp, synthetic construct
  misc_feature 1..80: note = Artificially Synthesized Probe
  source 1..80: mol_type = other DNA
gctctctggaccttcagagagatggatggctggggaattgcagctcagaggaggggccatgtgggctctagagcctgccc

SEQ ID NO: 118981 - DNA, 80 bp, synthetic construct
  misc_feature 1..80: note = Artificially Synthesized Probe
  source 1..80: mol_type = other DNA
atgcagctgaactaagatagaggctgacacattgtaatgggaagtattttaatgatgtccccttttttttttttgagacg

SEQ ID NO: 118982 - DNA, 80 bp, synthetic construct
  misc_feature 1..80: note = Artificially Synthesized Probe
  source 1..80: mol_type = other DNA
ccaccaggcctgtctactttttgtatttttagtacagacggggttttgccatgttggccaggctggtctcgaactcctga

SEQ ID NO: 118983 - DNA, 80 bp, synthetic construct
  misc_feature 1..80: note = Artificially Synthesized Probe
  source 1..80: mol_type = other DNA
ggtccctgttgcaactactcactctgctagttgtggcacagaggcagccatgacaatatgtaaatgatgggtggggctgt

SEQ ID NO: 118984 - DNA, 80 bp, synthetic construct
  misc_feature 1..80: note = Artificially Synthesized Probe
  source 1..80: mol_type = other DNA
gtacatggcatataactatgtataataaaaactaagaaaagtctcaatcttgctgcagaagccatgctgacattactgtg

SEQ ID NO: 118985 - DNA, 80 bp, synthetic construct
  misc_feature 1..80: note = Artificially Synthesized Probe
  source 1..80: mol_type = other DNA
actttctggaaaacaaagaaacacctctttactttgtctaggtttttatgctctggttggctccaagtggggatagacct

SEQ ID NO: 118986 - DNA, 80 bp, synthetic construct
  misc_feature 1..80: note = Artificially Synthesized Probe
  source 1..80: mol_type = other DNA
ggtttttatgctctggttggctccaagtggggatagacctgaattctggcttaatgagtaataattcataattagagtaa

SEQ ID NO: 118987 - DNA, 80 bp, synthetic construct; identical to SEQ ID NO: 38852
  misc_feature 1..80: note = Artificially Synthesized Probe
  source 1..80: mol_type = other DNA

SEQ ID NO: 118988 - DNA, 80 bp, synthetic construct
  misc_feature 1..80: note = Artificially Synthesized Probe
  source 1..80: mol_type = other DNA
aggctgtctgaaccactgtgggttactgaacgatagtgatactgaagcactgttgattcctggccaggtgggggccagtt

SEQ ID NO: 118989 - DNA, 80 bp, synthetic construct
  misc_feature 1..80: note = Artificially Synthesized Probe
  source 1..80: mol_type = other DNA
ctgggatgctctgagaagattttgccaggagatcctgctctgtatcaaaaaatttgaaattggaaatggtggaccaaatg

SEQ ID NO: 118990 - DNA, 80 bp, synthetic construct
  misc_feature 1..80: note = Artificially Synthesized Probe
  source 1..80: mol_type = other DNA
cccatgctggttatggctgtgttttatgattcccatctcaatgaactggcaatgtgtcagaagacaaggcatctcctggg

SEQ ID NO: 118991 - DNA, 80 bp, synthetic construct; identical to SEQ ID NO: 38853
  misc_feature 1..80: note = Artificially Synthesized Probe
  source 1..80: mol_type = other DNA

SEQ ID NO: 118992 - DNA, 80 bp, synthetic construct
  misc_feature 1..80: note = Artificially Synthesized Probe
  source 1..80: mol_type = other DNA
cccgaggtctgctgggacctctgggaaaggctggactatttggaaagggagtgggggttggggaactgctccctggcacc

SEQ ID NO: 118993 - DNA, 80 bp, synthetic construct
  misc_feature 1..80: note = Artificially Synthesized Probe
  source 1..80: mol_type = other DNA
gtctcagccactgtgagtgaggttttttattacttgcagccaaatgctttctaatgaacataatgtgaatatttggagct

SEQ ID NO: 118994 - DNA, 80 bp, synthetic construct
  misc_feature 1..80: note = Artificially Synthesized Probe
  source 1..80: mol_type = other DNA
caaatgctttctaatgaacataatgtgaatatttggagcttggagtgagggggcagggtagttattaattagaagatacg

SEQ ID NO: 118995 - DNA, 80 bp, synthetic construct
  misc_feature 1..80: note = Artificially Synthesized Probe
  source 1..80: mol_type = other DNA
ataatcgcaactaaccagggtccaagtgtggctgacctggcacaaagtatgagttgacctaatgaaaatatgtggatgtt

SEQ ID NO: 118996 - DNA, 80 bp, synthetic construct
  misc_feature 1..80: note = Artificially Synthesized Probe
  source 1..80: mol_type = other DNA
caactgtccagagaagatctagtcacaacccctcatctcaaatgaactttggttcagaaaacagaactaaggaaaagtgg

SEQ ID NO: 118997 - DNA, 80 bp, synthetic construct; identical to SEQ ID NO: 38854
  misc_feature 1..80: note = Artificially Synthesized Probe
  source 1..80: mol_type = other DNA

SEQ ID NO: 118998 - DNA, 80 bp, synthetic construct
  misc_feature 1..80: note = Artificially Synthesized Probe
  source 1..80: mol_type = other DNA
gagtggatcagaagatacagccaaggcccacggtctggtctggacctgatgagtggatgtctgaggccagacgctgcctc

SEQ ID NO: 118999 - DNA, 80 bp, synthetic construct
  misc_feature 1..80: note = Artificially Synthesized Probe
  source 1..80: mol_type = other DNA
tcctctatcctttaagtgttcctagaacccgggccaccacccacgattctgaaaattagcctcgctcgaatgaaaccctg

SEQ ID NO: 119000 - DNA, 80 bp, synthetic construct
  misc_feature 1..80: note = Artificially Synthesized Probe
  source 1..80: mol_type = other DNA
caaccctgctcattgcacccacccaaggaagtccaccattaatatgaccacgtccactgctgagatgacctccaagaagc

SEQ ID NO: 119001 - DNA, 80 bp, synthetic construct
  misc_feature 1..80: note = Artificially Synthesized Probe
  source 1..80: mol_type = other DNA
catttcccagatgtgtgcaaacttctcgctgaggaagacacatcttaagaacgagctgcttgtcccagttgtaggctcgc

SEQ ID NO: 119002 - DNA, 80 bp, synthetic construct; identical to SEQ ID NO: 38855
  misc_feature 1..80: note = Artificially Synthesized Probe
  source 1..80: mol_type = other DNA

SEQ ID NO: 119003 - DNA, 80 bp, synthetic construct
  misc_feature 1..80: note = Artificially Synthesized Probe
  source 1..80: mol_type = other DNA
gcctcggcctcctgggtgggaatacaggcatgcgccaccaggcccagctaatttttgtagagatggggtctcgctttgtt

SEQ ID NO: 119004 - DNA, 80 bp, synthetic construct
  misc_feature 1..80: note = Artificially Synthesized Probe
  source 1..80: mol_type = other DNA
gagttatctgtcctgcctctccctgcctctccctgcctctcgacctgctcatttccagtctgctaagaacaggctttttt

SEQ ID NO: 119005 - DNA, 80 bp, synthetic construct
  misc_feature 1..80: note = Artificially Synthesized Probe
  source 1..80: mol_type = other DNA
cacccagctaatttttgtatttttagtagagacagggtttcaccatgttggccaggttggtctcaaattcctgaccttgt

SEQ ID NO: 119006 - DNA, 80 bp, synthetic construct; identical to SEQ ID NO: 38856
  misc_feature 1..80: note = Artificially Synthesized Probe
  source 1..80: mol_type = other DNA

SEQ ID NO: 119007 - DNA, 80 bp, synthetic construct
  misc_feature 1..80: note = Artificially Synthesized Probe
  source 1..80: mol_type = other DNA
acaccgacagacgcgtggcacagggatttcatgttgggagcatgcaggttttcaaagaggtagcaaaataaattacttga

SEQ ID NO: 119008 - DNA, 80 bp, synthetic construct
  misc_feature 1..80: note = Artificially Synthesized Probe
  source 1..80: mol_type = other DNA
gagcccctgccctcattctctctctcacacaacacactgtggagggaggcaccattttctttcccattttacaaacaagg

SEQ ID NO: 119009 - DNA, 80 bp, synthetic construct
  misc_feature 1..80: note = Artificially Synthesized Probe
  source 1..80: mol_type = other DNA
catcagggaggtgggagatctccctgcaccctcggccccctcttttggggtgtgcacctgcctggggcagtccctctgtg

SEQ ID NO: 119010 - DNA, 80 bp, synthetic construct
  misc_feature 1..80: note = Artificially Synthesized Probe
  source 1..80: mol_type = other DNA
ccggtgccatctgtcgtgctgactatacgccccagggcctggaacggtgtctggcgcattttggggtatcatgaggatgt

SEQ ID NO: 119011 - DNA, 80 bp, synthetic construct; identical to SEQ ID NO: 38857
  misc_feature 1..80: note = Artificially Synthesized Probe
  source 1..80: mol_type = other DNA

SEQ ID NO: 119012 - DNA, 80 bp, synthetic construct
  misc_feature 1..80: note = Artificially Synthesized Probe
  source 1..80: mol_type = other DNA
tccttttctactgcatgtcttggccctggggaagggagcagaactcctgcagcctcggtttctccatctgtaacgtgggg

SEQ ID NO: 119013 - DNA, 80 bp, synthetic construct
  misc_feature 1..80: note = Artificially Synthesized Probe
  source 1..80: mol_type = other DNA
agtgtcctgtgacggctgtaacaacgtaacacaaacttggcagctagacacatttagcctcttacagttctgggggtccg

SEQ ID NO: 119014 - DNA, 80 bp, synthetic construct
  misc_feature 1..80: note = Artificially Synthesized Probe
  source 1..80: mol_type = other DNA
caatgaaaacttccattcgataagggtattccaaatttaacatactccttgtgggaggacattttggcattgcaaagatg

SEQ ID NO: 119015 - DNA, 80 bp, synthetic construct
  misc_feature 1..80: note = Artificially Synthesized Probe
  source 1..80: mol_type = other DNA
ccccactctctgcctctgaccccctgccctctgatgaggatccctgtgatggcacagggcccacctgcattcgccaggac

SEQ ID NO: 119016 - DNA, 80 bp, synthetic construct; identical to SEQ ID NO: 38858
  misc_feature 1..80: note = Artificially Synthesized Probe
  source 1..80: mol_type = other DNA

SEQ ID NO: 119017 - DNA, 80 bp, synthetic construct
  misc_feature 1..80: note = Artificially Synthesized Probe
  source 1..80: mol_type = other DNA
actcttcctagtaaatcacactctccctgggtgtgaaccatccccgtcaatgctcagaccacaggccagtacccacttaa

SEQ ID NO: 119018 - DNA, 80 bp, synthetic construct
  misc_feature 1..80: note = Artificially Synthesized Probe
  source 1..80: mol_type = other DNA
ccggctctgccaagtcccccgttctctctctgctgctcagcgtggggtcccttttctcttggcaaagtctgacggcggaa

SEQ ID NO: 119019 - DNA, 80 bp, synthetic construct; identical to SEQ ID NO: 38859
  misc_feature 1..80: note = Artificially Synthesized Probe
  source 1..80: mol_type = other DNA

SEQ ID NO: 119020 - DNA, 80 bp, synthetic construct
  misc_feature 1..80: note = Artificially Synthesized Probe
  source 1..80: mol_type = other DNA
ccagctcattcgcatgaagggagactgaacggacgctggggcacgctgagctccccagattactcacagcaaccctcctg

SEQ ID NO: 119021 - DNA, 80 bp, synthetic construct
  misc_feature 1..80: note = Artificially Synthesized Probe
  source 1..80: mol_type = other DNA
ctaggttttagcaacagaaaccacctccagagatcttgaacactgtggggttctgcacgggcttcaggtcaaagatgtgg

SEQ ID NO: 119022 - DNA, 80 bp, synthetic construct
  misc_feature 1..80: note = Artificially Synthesized Probe
  source 1..80: mol_type = other DNA
cagcccaaacctgctggagggtgctttgtgagagggcctttgacccacaggccaggttccaggactgatccgacagaaac

SEQ ID NO: 119023 - DNA, 80 bp, synthetic construct; identical to SEQ ID NO: 38647
  misc_feature 1..80: note = Artificially Synthesized Probe
  source 1..80: mol_type = other DNA

SEQ ID NO: 119024 - DNA, 80 bp, synthetic construct
  misc_feature 1..80: note = Artificially Synthesized Probe
  source 1..80: mol_type = other DNA
aagctgggcaccaacagagtgcagaaacaaactgcaggatgctgtgtggcggagcccgctgtgccccacaaatacatgag

SEQ ID NO: 119025 - DNA, 80 bp, synthetic construct
  misc_feature 1..80: note = Artificially Synthesized Probe
  source 1..80: mol_type = other DNA
agtgggaccaggaggatgatattgactttctatatttctgcattctttgaatatcttgagatggaaaagtgggcactgtt

SEQ ID NO: 119026 - DNA, 80 bp, synthetic construct; identical to SEQ ID NO: 38860
  misc_feature 1..80: note = Artificially Synthesized Probe
  source 1..80: mol_type = other DNA

SEQ ID NO: 119027 - DNA, 80 bp, synthetic construct
  misc_feature 1..80: note = Artificially Synthesized Probe
  source 1..80: mol_type = other DNA
aaagacaaaacgcaagtcctaagcacaggaggatgacgtgaggatggggaatgacactgctcttcaccgcaccaccgagg

SEQ ID NO: 119028 - DNA, 80 bp, synthetic construct
  misc_feature 1..80: note = Artificially Synthesized Probe
  source 1..80: mol_type = other DNA
cctcagtttccctgctggtctctccaccaggctcaccgctggctcaggatttgacaattaccgctccctccttttttact

SEQ ID NO: 119029 - DNA, 80 bp, synthetic construct
  misc_feature 1..80: note = Artificially Synthesized Probe
  source 1..80: mol_type = other DNA
tcttcctgtctctggccagctctcacctcagcgagctccactctgccgtttctgtgtaattcagcaacatgccctcttcc

SEQ ID NO: 119030 - DNA, 80 bp, synthetic construct
  misc_feature 1..80: note = Artificially Synthesized Probe
  source 1..80: mol_type = other DNA
ttaaacagcagaaatgggttctctcacagcgctggaggccagaggtgcagtatcagcatgaccactgtggtgaaatcaag

SEQ ID NO: 119031 - DNA, 80 bp, synthetic construct; identical to SEQ ID NO: 38861
  misc_feature 1..80: note = Artificially Synthesized Probe
  source 1..80: mol_type = other DNA

SEQ ID NO: 119032 - DNA, 80 bp, synthetic construct
  misc_feature 1..80: note = Artificially Synthesized Probe
  source 1..80: mol_type = other DNA
acgcccagctaatttttgtatttttagtagagacaggatttcaccatgttggccaggctggtctcgaacttctggcctca

SEQ ID NO: 119033 - DNA, 80 bp, synthetic construct
  misc_feature 1..80: note = Artificially Synthesized Probe
  source 1..80: mol_type = other DNA
cccagggtcttcactgtccccgtccccctacccagtcatcacccttgaagtgtgaaaaatggctcccagagcctgaaacc

SEQ ID NO: 119034 - DNA, 80 bp, synthetic construct
  misc_feature 1..80: note = Artificially Synthesized Probe
  source 1..80: mol_type = other DNA
ctgagactcacaagcacgctgcgcttttgcacagcagcccagaggcatttccagaacacacaggacagtgcccctggggt

SEQ ID NO: 119035 - DNA, 80 bp, synthetic construct
  misc_feature 1..80: note = Artificially Synthesized Probe
  source 1..80: mol_type = other DNA
gtggtgcacacctgtactgtggccccagctacttgggaggctgaggtgggaggatcacttgagcccaggaattcaaggct

SEQ ID NO: 119036 - DNA, 80 bp, synthetic construct; identical to SEQ ID NO: 38862
  misc_feature 1..80: note = Artificially Synthesized Probe
  source 1..80: mol_type = other DNA

SEQ ID NO: 119037 - DNA, 80 bp, synthetic construct
  misc_feature 1..80: note = Artificially Synthesized Probe
  source 1..80: mol_type = other DNA
cttggctcaaatgcaaaggtgaggataatttgggaaaagaggcaggacaattactttgtgcattttggcagtgggaatgc

SEQ ID NO: 119038 - DNA, 80 bp, synthetic construct
  misc_feature 1..80: note = Artificially Synthesized Probe
  source 1..80: mol_type = other DNA
gactccagttccttaatccctgccttcccatctgacagtcccagaggcttggcgaaaaaacccccaaaaaacaaaaaact

SEQ ID NO: 119039 - DNA, 80 bp, synthetic construct
  misc_feature 1..80: note = Artificially Synthesized Probe
  source 1..80: mol_type = other DNA
agctccacggggccaactccaggccaggggacctgggacacatggtgccagctgttataccaggcattagaccaccgagc

SEQ ID NO: 119040 - DNA, 80 bp, synthetic construct; identical to SEQ ID NO: 38863
  misc_feature 1..80: note = Artificially Synthesized Probe
  source 1..80: mol_type = other DNA

SEQ ID NO: 119041 - DNA, 80 bp, synthetic construct
  misc_feature 1..80: note = Artificially Synthesized Probe
  source 1..80: mol_type = other DNA
aagtgaaaatttattgagtgctgacaatgtaccaagtactgcctatagagaggtctgagcacactgcccaactttggtcc

SEQ ID NO: 119042 - DNA, 80 bp, synthetic construct
  misc_feature 1..80: note = Artificially Synthesized Probe
  source 1..80: mol_type = other DNA
ccagctccccttccttccttccttccttccatccatctatccatcacccatctacccatccatccatccatccacccatc

SEQ ID NO: 119043 - DNA, 80 bp, synthetic construct
  misc_feature 1..80: note = Artificially Synthesized Probe
  source 1..80: mol_type = other DNA
cttccatctatccatcatccatctacccatccatccactcatccacccattcacacacccatccagcccctcatctattc

SEQ ID NO: 119044 - DNA, 80 bp, synthetic construct; identical to SEQ ID NO: 38864
  misc_feature 1..80: note = Artificially Synthesized Probe
  source 1..80: mol_type = other DNA

SEQ ID NO: 119045 - DNA, 80 bp, synthetic construct
  misc_feature 1..80: note = Artificially Synthesized Probe
  source 1..80: mol_type = other DNA
ctttgcctgcaacagggtcaataggaataattgtgacattaagaagaaaggaaggcagttttctgcaacacacagtacat

SEQ ID NO: 119046 - DNA, 80 bp, synthetic construct
  misc_feature 1..80: note = Artificially Synthesized Probe
  source 1..80: mol_type = other DNA
tgttgagtcagggaggtctgattgcttctcactctagctctacaagtcaggcaccaaagacacctccctgcttcctggag

SEQ ID NO: 119047 - DNA, 80 bp, synthetic construct
  misc_feature 1..80: note = Artificially Synthesized Probe
  source 1..80: mol_type = other DNA
ccctggagaggcaccccttggccttgtatgccactgatggcccctgtctggaccccaactaagagcactcctgcccatct

SEQ ID NO: 119048 - DNA, 80 bp, synthetic construct
  misc_feature 1..80: note = Artificially Synthesized Probe
  source 1..80: mol_type = other DNA
aagaagaaaggaaggcagttttctgcaacacacagtacattatttcatttcgagacctgacccaaccacccttggaagta

SEQ ID NO: 119049 - DNA, 80 bp, synthetic construct
  misc_feature 1..80: note = Artificially Synthesized Probe
  source 1..80: mol_type = other DNA
ccagtggttatggcagtttcaggcccaatgtgtagaattttatattcacaagagatctcagcaatgatgtaggcatttta

SEQ ID NO: 119050 - DNA, 80 bp, synthetic construct; identical to SEQ ID NO: 38865
  misc_feature 1..80: note = Artificially Synthesized Probe
  source 1..80: mol_type = other DNA

SEQ ID NO: 119051 - DNA, 80 bp, synthetic construct
  misc_feature 1..80: note = Artificially Synthesized Probe
  source 1..80: mol_type = other DNA
agaggcacggatattgcccagggatgagccgaagctggctcttaggagctgccagggctgactgtgggcgcctctttcca

SEQ ID NO: 119052 - DNA, 80 bp, synthetic construct
  misc_feature 1..80: note = Artificially Synthesized Probe
  source 1..80: mol_type = other DNA
ggaggcagaggtcagctttggcagctattgtcagaacagctccagagagaacatgactaactcctctcctttgcctgccg

SEQ ID NO: 119053 - DNA, 80 bp, synthetic construct
  misc_feature 1..80: note = Artificially Synthesized Probe
  source 1..80: mol_type = other DNA
cctcctctgctgctgctccgatggccccacccaccaccggtgtccccaccatccacccactcgccacctgggaaatgtac

SEQ ID NO: 119054 - DNA, 80 bp, synthetic construct
  misc_feature 1..80: note = Artificially Synthesized Probe
  source 1..80: mol_type = other DNA
cacagaaaaggccgtcatgagggtgtccaggctgctgagagcttggcctccctgctctccagccagagtggtcctggagc

SEQ ID NO: 119055 - DNA, 80 bp, synthetic construct; identical to SEQ ID NO: 38866
  misc_feature 1..80: note = Artificially Synthesized Probe
  source 1..80: mol_type = other DNA

SEQ ID NO: 119056 - DNA, 80 bp, synthetic construct
  misc_feature 1..80: note = Artificially Synthesized Probe
  source 1..80: mol_type = other DNA
agactcatgacccactgtgcacccaggaaacatagcaagtgtcagctttatgcttggctctttgaaattatatatttcac

SEQ ID NO: 119057 - DNA, 80 bp, synthetic construct
  misc_feature 1..80: note = Artificially Synthesized Probe
  source 1..80: mol_type = other DNA
tggagaggctgggagggaacacgggcttgtctaactcatgagtctaggccctttgtgcctcactgccccctttcccatca

SEQ ID NO: 119058 - DNA, 80 bp, synthetic construct
  misc_feature 1..80: note = Artificially Synthesized Probe
  source 1..80: mol_type = other DNA
cttcaattttcaatttggatcctactacttgtcccataggtatgcatgagaacctatgtctatctttgcttagaacttct

SEQ ID NO: 119059 - DNA, 80 bp, synthetic construct; identical to SEQ ID NO: 38648
  misc_feature 1..80: note = Artificially Synthesized Probe
  source 1..80: mol_type = other DNA

SEQ ID NO: 119060 - DNA, 80 bp, synthetic construct; identical to SEQ ID NO: 38867
  misc_feature 1..80: note = Artificially Synthesized Probe
  source 1..80: mol_type = other DNA

SEQ ID NO: 119061 - DNA, 80 bp, synthetic construct
  misc_feature 1..80: note = Artificially Synthesized Probe
  source 1..80: mol_type = other DNA
taagtgacaaatggggagaacgtaaatggtctaatagaggaaatccagaaaggctgaactgaaagaggaagcgatggaat

SEQ ID NO: 119062 - DNA, 80 bp, synthetic construct
  misc_feature 1..80: note = Artificially Synthesized Probe
  source 1..80: mol_type = other DNA
gaacactaagaaaaagtagaaaatatgacattcctacaaacttctagggaggaaaataaagggtcgctacctacagtgga

SEQ ID NO: 119063 - DNA, 80 bp, synthetic construct
  misc_feature 1..80: note = Artificially Synthesized Probe
  source 1..80: mol_type = other DNA
tgaacttccaggcctaggaccatcaccaagaagacaaaacagtcctgaatgagtacaaacctaacatcagaacttcaaaa

SEQ ID NO: 119064 - DNA, 80 bp, synthetic construct; identical to SEQ ID NO: 38868
  misc_feature 1..80: note = Artificially Synthesized Probe
  source 1..80: mol_type = other DNA

SEQ ID NO: 119065 - DNA, 80 bp, synthetic construct
  misc_feature 1..80: note = Artificially Synthesized Probe
  source 1..80: mol_type = other DNA
tggagttcaaattggagcagaatgtcagaggactccaacaagaagaggacagattccagtgatacatcagaaaaagaatg

SEQ ID NO: 119066 - DNA, 80 bp, synthetic construct
  misc_feature 1..80: note = Artificially Synthesized Probe
  source 1..80: mol_type = other DNA
aaactcattgggttgtgatactattagtacccttcttctcataggtctgtaaagaggaattggaatactaaccccatttg

SEQ ID NO: 119067 - DNA, 80 bp, synthetic construct; identical to SEQ ID NO: 38869
  misc_feature 1..80: note = Artificially Synthesized Probe
  source 1..80: mol_type = other DNA

SEQ ID NO: 119068 - DNA, 80 bp, synthetic construct
  misc_feature 1..80: note = Artificially Synthesized Probe
  source 1..80: mol_type = other DNA
atgttatttaaaggtaatccattagcatactggcaagaactattcaaaattggaggtgagggtcaaactatgaaagcctc

SEQ ID NO: 119069 - DNA, 80 bp, synthetic construct
  misc_feature 1..80: note = Artificially Synthesized Probe
  source 1..80: mol_type = other DNA
agtgggcacataataatttatttctactcttggccctatctctgtagtttaattaattactttcattacatgcatgcagt

SEQ ID NO: 119070 - DNA, 80 bp, synthetic construct
  misc_feature 1..80: note = Artificially Synthesized Probe
  source 1..80: mol_type = other DNA
gacgaggagaagacaggactccttgacccttgtgatggactaaaggagggaaggagggagaaaggcaagggagaatgagg

SEQ ID NO: 119071 - DNA, 80 bp, synthetic construct
  misc_feature 1..80: note = Artificially Synthesized Probe
  source 1..80: mol_type = other DNA
aaggctgtgtttgaaagcccaggggcaacttctgtgggggagtgccacacttcttacctattgatttctgccttcgcatc

SEQ ID NO: 119072 - DNA, 80 bp, synthetic construct; identical to SEQ ID NO: 38870
  misc_feature 1..80: note = Artificially Synthesized Probe
  source 1..80: mol_type = other DNA

SEQ ID NO: 119073 - DNA, 80 bp, synthetic construct
  misc_feature 1..80: note = Artificially Synthesized Probe
  source 1..80: mol_type = other DNA
caggccaacatggtgaaaccccgtctctactaaaaatacaaaataattagccaggcatggtggcacatgcctgtaattcc

SEQ ID NO: 119074 - DNA, 80 bp, synthetic construct
  misc_feature 1..80: note = Artificially Synthesized Probe
  source 1..80: mol_type = other DNA
catgtcccaaagggggagaacagtgggtggtgatttgaatgaggaactattgctttcagtaccaaaataagcagatagag

SEQ ID NO: 119075 - DNA, 80 bp, synthetic construct
  misc_feature 1..80: note = Artificially Synthesized Probe
  source 1..80: mol_type = other DNA
tatgaaataaacagtgaaataatctcttgccctgccccaaactatgcctcaaagaagccgccatgggggcttccaaatta

SEQ ID NO: 119076 - DNA, 80 bp, synthetic construct
  misc_feature 1..80: note = Artificially Synthesized Probe
  source 1..80: mol_type = other DNA
ggggtgtgcttccttctgtgtccagacagtagacatactcagggataaagccttcttttcaagtctaagaaataagaaaa

SEQ ID NO: 119077 - DNA, 80 bp, synthetic construct
  misc_feature 1..80: note = Artificially Synthesized Probe
  source 1..80: mol_type = other DNA
cacccctctggatttatatagcacatgcctcttaggagctgcaagtactaaacatattttctcattcatccttaacacga

SEQ ID NO: 119078 - DNA, 80 bp, synthetic construct; identical to SEQ ID NO: 38871
  misc_feature 1..80: note = Artificially Synthesized Probe
  source 1..80: mol_type = other DNA

SEQ ID NO: 119079 - DNA, 80 bp, synthetic construct
  misc_feature 1..80: note = Artificially Synthesized Probe
  source 1..80: mol_type = other DNA
ctgatttagaaaagataaaaattgggctgtgaggctcgaaagccatgaaaatagggagctgtggacagtggatattcaat

SEQ ID NO: 119080 - DNA, 80 bp, synthetic construct
  misc_feature 1..80: note = Artificially Synthesized Probe
  source 1..80: mol_type = other DNA
ggtgagcaggcatactttgccatccttctaattcgctctctaagagaaaactggttttctctaagggagaacaaaaaaca

SEQ ID NO: 119081 - DNA, 80 bp, synthetic construct
  misc_feature 1..80: note = Artificially Synthesized Probe
  source 1..80: mol_type = other DNA
taagagaaaactggttttctctaagggagaacaaaaaacagatgctcagcaccttcttaaaccttttccttgagtggcat

SEQ ID NO: 119082 - DNA, 80 bp, synthetic construct
  misc_feature 1..80: note = Artificially Synthesized Probe
  source 1..80: mol_type = other DNA
atgtccatgcccctatccaatctaactccatcctacccctcagttccatccacctctctaccccacctcctccaccagcc

SEQ ID NO: 119083 - DNA, 80 bp, synthetic construct; identical to SEQ ID NO: 38872
  misc_feature 1..80: note = Artificially Synthesized Probe
  source 1..80: mol_type = other DNA

SEQ ID NO: 119084 - DNA, 80 bp, synthetic construct
  misc_feature 1..80: note = Artificially Synthesized Probe
  source 1..80: mol_type = other DNA
tatgacagcactcatctgcttcatagcattaactacaaagtgagatcctctgcttcatttgttaactttattgtgtacct

SEQ ID NO: 119085 - DNA, 80 bp, synthetic construct
  misc_feature 1..80: note = Artificially Synthesized Probe
  source 1..80: mol_type = other DNA
gcttgtcttgtttatatcctcagctcccagaatagtcagatcttgataaatattcattaaacagatggacagatgaatgc

SEQ ID NO: 119086 - DNA, 80 bp, synthetic construct
  misc_feature 1..80: note = Artificially Synthesized Probe
  source 1..80: mol_type = other DNA
ccacaagggaacttccgtcactgtggcttccccaagctgcttctggagccacctaaagtctccagtggggctgatgagaa

SEQ ID NO: 119087 - DNA, 80 bp, synthetic construct
  misc_feature 1..80: note = Artificially Synthesized Probe
  source 1..80: mol_type = other DNA
caggtggacaggtgactgggtggatagataaataggtggatagatgagtgatagaaagataaatggctgagtgagtggat

SEQ ID NO: 119088 - DNA, 80 bp, synthetic construct
  misc_feature 1..80: note = Artificially Synthesized Probe
  source 1..80: mol_type = other DNA
aacgaggagtgggaacttaagattcccattccctgagtggagacatgtttttaaaaatgacattgaaatatctgtaaagt

SEQ ID NO: 119089 - DNA, 80 bp, synthetic construct; identical to SEQ ID NO: 38873
  misc_feature 1..80: note = Artificially Synthesized Probe
  source 1..80: mol_type = other DNA

SEQ ID NO: 119090 - DNA, 80 bp, synthetic construct
  misc_feature 1..80: note = Artificially Synthesized Probe
  source 1..80: mol_type = other DNA
actgtggataattggcccacagggctggcactgcacccaggtttctgctgctcattagtctacttgcaacatgaatgcca

SEQ ID NO: 119091 - DNA, 80 bp, synthetic construct
  misc_feature 1..80: note = Artificially Synthesized Probe
  source 1..80: mol_type = other DNA
actcatctctgtccacaagctcccatgctgcctgccctccttccatgctgcctgctctccttccacactgcccgctctct

SEQ ID NO: 119092 - DNA, 80 bp, synthetic construct
  misc_feature 1..80: note = Artificially Synthesized Probe
  source 1..80: mol_type = other DNA
gaaccagctcagacagtcagggatgaacaacgataataccatcatcctgaatacgtcaggattccactcatctgaggttc

SEQ ID NO: 119093 - DNA, 80 bp, synthetic construct; identical to SEQ ID NO: 38874
  misc_feature 1..80: note = Artificially Synthesized Probe
  source 1..80: mol_type = other DNA

SEQ ID NO: 119094 - DNA, 80 bp, synthetic construct
  misc_feature 1..80: note = Artificially Synthesized Probe
  source 1..80: mol_type = other DNA
gattccatctatgtgcatctctcccaacaatgctttgggaggtgctgactgttaccacaagaaacactggccctcctcct

SEQ ID NO: 119095 - DNA, 80 bp, synthetic construct
  misc_feature 1..80: note = Artificially Synthesized Probe
  source 1..80: mol_type = other DNA
tcattaacttggccttcctttccctccatcagtgtccctctagcaggtggaatgtaacacctgcgttaccaggttgctgg

SEQ ID NO: 119096 - DNA, 80 bp, synthetic construct
  misc_feature 1..80: note = Artificially Synthesized Probe
  source 1..80: mol_type = other DNA
cacagcttgtctgatccctcgccatgggagtactggagctgactcctaactctgatcaaggctgaagctttttcaccatt

SEQ ID NO: 119097 - DNA, 80 bp, synthetic construct; identical to SEQ ID NO: 38875
  misc_feature 1..80: note = Artificially Synthesized Probe
  source 1..80: mol_type = other DNA

SEQ ID NO: 119098 - DNA, 80 bp, synthetic construct
  misc_feature 1..80: note = Artificially Synthesized Probe
  source 1..80: mol_type = other DNA
ttttctggccctgctgttagccatgtgtcacacctttactacaacaccctagccagctttgcccacagatgtctctcttc

SEQ ID NO: 119099 - DNA, 80 bp, synthetic construct
  misc_feature 1..80: note = Artificially Synthesized Probe
  source 1..80: mol_type = other DNA
tctctgagaggggggccaggctggatgtcctgtgggaaagggcacagcgtggtgggcagtggggtctggcctgggtccat

SEQ ID NO: 119100 - DNA, 80 bp, synthetic construct
  misc_feature 1..80: note = Artificially Synthesized Probe
  source 1..80: mol_type = other DNA
cagaaacaattcatctggctcaaataaaggctcatcaggagaagctgtggtcagtccctgacctgcctttagggctgcgt

SEQ ID NO: 119101 - DNA, 80 bp, synthetic construct; identical to SEQ ID NO: 38876
  misc_feature 1..80: note = Artificially Synthesized Probe
  source 1..80: mol_type = other DNA

SEQ ID NO: 119102 - DNA, 80 bp, synthetic construct
  misc_feature 1..80: note = Artificially Synthesized Probe
  source 1..80: mol_type = other DNA
gtccgtccatacaatgaaacattattcaatcctaaaaaagggaagaaaatccagacacgctacaacacgaatgaaccttg

SEQ ID NO: 119103 - DNA, 80 bp, synthetic construct
  misc_feature 1..80: note = Artificially Synthesized Probe
  source 1..80: mol_type = other DNA
tggagtctgagggaggtagagtggggagtttgcattaatgcagacagagttccaactttgcaagacaaaagagctctgga

SEQ ID NO: 119104 - DNA, 80 bp, synthetic construct
  misc_feature 1..80: note = Artificially Synthesized Probe
  source 1..80: mol_type = other DNA
aaaaaattgggggcggggaaggaatgaagtactggtatgtgccaccatgtggatagactttgaaaacatgatgcagcgtg

SEQ ID NO: 119105 - DNA, 80 bp, synthetic construct
  misc_feature 1..80: note = Artificially Synthesized Probe
  source 1..80: mol_type = other DNA
gaagaggccagacatgaaagatcacgtagcggctgattccatctacgcgcagcaccgaggcaggcagagcccacagacag

SEQ ID NO: 119106 - DNA, 80 bp, synthetic construct; identical to SEQ ID NO: 38877
  misc_feature 1..80: note = Artificially Synthesized Probe
  source 1..80: mol_type = other DNA

SEQ ID NO: 119107 - DNA, 80 bp, synthetic construct
  misc_feature 1..80: note = Artificially Synthesized Probe
  source 1..80: mol_type = other DNA
tcacatccccggggcctgcacctgcacctccttctcttttctacctcacacactggcccttgttgagcttcaacatccag

SEQ ID NO: 119108 - DNA, 80 bp, synthetic construct
  misc_feature 1..80: note = Artificially Synthesized Probe
  source 1..80: mol_type = other DNA
caggtgtggtttctgcagaaaaatccaaccacgtgcctgtgccagtcacattgtcaaagatgcagggctctttccacaca

SEQ ID NO: 119109 - DNA, 80 bp, synthetic construct
  misc_feature 1..80: note = Artificially Synthesized Probe
  source 1..80: mol_type = other DNA
ccacagagaaggcagaaacccagacctgaggcatccgaaatactcccccgggggatgctgctgccccaatactgcctcaa

SEQ ID NO: 119110 - DNA, 80 bp, synthetic construct
  misc_feature 1..80: note = Artificially Synthesized Probe
  source 1..80: mol_type = other DNA
tggcaccaagtacacctctcaggcaggggctccaggagatggtggcttccatagtcctagcccggtaacaggcacaggga

SEQ ID NO: 119111 - DNA, 80 bp, synthetic construct
  misc_feature 1..80: note = Artificially Synthesized Probe
  source 1..80: mol_type = other DNA
agcaagccctggagctgctcaggggcacagcctggagtctgcagcagtgagctgtccccagcttcctccctcttcagcct

SEQ ID NO: 119112 - DNA, 80 bp, synthetic construct; identical to SEQ ID NO: 38878
  misc_feature 1..80: note = Artificially Synthesized Probe
  source 1..80: mol_type = other DNA

SEQ ID NO: 119113 - DNA, 80 bp, synthetic construct
  misc_feature 1..80: note = Artificially Synthesized Probe
  source 1..80: mol_type = other DNA
gaggaaaatgaggcctggttctggggctcaactttgtgaaatttggggaatgcatgtgcacctcaatgctggctactgaa

SEQ ID NO: 119114 - DNA, 80 bp, synthetic construct
  misc_feature 1..80: note = Artificially Synthesized Probe
  source 1..80: mol_type = other DNA
ccgtggtgctgctgagccttccagcaaaactgaaaacctgcagacaactgccatttgggaaagaaagaacatttattgtc

SEQ ID NO: 119115 - DNA, 80 bp, synthetic construct
  misc_feature 1..80: note = Artificially Synthesized Probe
  source 1..80: mol_type = other DNA
tcatgggaaatgatatgagtgatgtaattagatttaatggatagctcagtgctggagggagaaaaaaaacacacacacaa

SEQ ID NO: 119116 - DNA, 80 bp, synthetic construct
  misc_feature 1..80: note = Artificially Synthesized Probe
  source 1..80: mol_type = other DNA
tcaggaaaatggcccaaagtttaatctaaactctgtaaacaaccttctctgttgttagcctcctccatcccaaattctga

SEQ ID NO: 119117 - DNA, 80 bp, synthetic construct; identical to SEQ ID NO: 38879
  misc_feature 1..80: note = Artificially Synthesized Probe
  source 1..80: mol_type = other DNA

SEQ ID NO: 119118 - DNA, 80 bp, synthetic construct
  misc_feature 1..80: note = Artificially Synthesized Probe
  source 1..80: mol_type = other DNA
ttgagcccaggactacatttcccagcctcccttgaacccagatgtggccacgtgactagttctcaccactgagatgtgag

SEQ ID NO: 119119 - DNA, 80 bp, synthetic construct
  misc_feature 1..80: note = Artificially Synthesized Probe
  source 1..80: mol_type = other DNA
gagtttcatttctaccacattaggctgcagcctcggattaatttgacacagtggctaagtctttcacatggaagctccca

SEQ ID NO: 119120 - DNA, 80 bp, synthetic construct
  misc_feature 1..80: note = Artificially Synthesized Probe
  source 1..80: mol_type = other DNA
gcacttactctgtaccaggccctgctataaagtgttgcccgagtattcaatagtttaactgccatgaccacccagggagt

SEQ ID NO: 119121 - DNA, 80 bp, synthetic construct; identical to SEQ ID NO: 38880
  misc_feature 1..80: note = Artificially Synthesized Probe
  source 1..80: mol_type = other DNA

SEQ ID NO: 119122 - DNA, 80 bp, synthetic construct
  misc_feature 1..80: note = Artificially Synthesized Probe
  source 1..80: mol_type = other DNA
cagccaggcccgtgcctcgactgcagggattagaagaattcagcagggcagggcctcaggatcccggggatggggcgaag

SEQ ID NO: 119123 - DNA, 80 bp, synthetic construct
  misc_feature 1..80: note = Artificially Synthesized Probe
  source 1..80: mol_type = other DNA
cagagtagctcacaatgccaatgaagggccacagggactggctgttaattgctattattacttttaattgtctctgctcc

SEQ ID NO: 119124 - DNA, 80 bp, synthetic construct; identical to SEQ ID NO: 38649
  misc_feature 1..80: note = Artificially Synthesized Probe
  source 1..80: mol_type = other DNA

SEQ ID NO: 119125 - DNA, 80 bp, synthetic construct
  misc_feature 1..80: note = Artificially Synthesized Probe
  source 1..80: mol_type = other DNA
tgtgtatttaccagaaaaaaagactatttcagtaaaggaaccatttctaggctaggtaaggtagccagtgtgtcccagac

SEQ ID NO: 119126 - DNA, 80 bp, synthetic construct
  misc_feature 1..80: note = Artificially Synthesized Probe
  source 1..80: mol_type = other DNA
ccatttctaggctaggtaaggtagccagtgtgtcccagactggagtttcatggaccaacaaaactttaaacaaagagaaa

SEQ ID NO: 119127 - DNA, 80 bp, synthetic construct; identical to SEQ ID NO: 38881
  misc_feature 1..80: note = Artificially Synthesized Probe
  source 1..80: mol_type = other DNA

SEQ ID NO: 119128 - DNA, 80 bp, synthetic construct
  misc_feature 1..80: note = Artificially Synthesized Probe
  source 1..80: mol_type = other DNA
tttattgctccagctttgagatgcagtttccatgtgtccacagcctctgtttgtctcactctatggccctgaggctgagg

SEQ ID NO: 119129 - DNA, 80 bp, synthetic construct
  misc_feature 1..80: note = Artificially Synthesized Probe
  source 1..80: mol_type = other DNA
cggccagaaaaagaagcctttaaaaggacattatctctgactgcttcatgcaggaatccccctgcacaggccttccctgt

SEQ ID NO: 119130 - DNA, 80 bp, synthetic construct
  misc_feature 1..80: note = Artificially Synthesized Probe
  source 1..80: mol_type = other DNA
ccaccatcaccaccaccaccatcaccataattactgccatcatcaccatcatcatcaccactatcatcatcatcagcatc

SEQ ID NO: 119131 - DNA, 80 bp, synthetic construct
  misc_feature 1..80: note = Artificially Synthesized Probe
  source 1..80: mol_type = other DNA
tactgccatcaccaccaccatcatcaccactatcatcatcatcattaccaccaccagcgcattcttcactatcatcacca

SEQ ID NO: 119132 - DNA, 80 bp, synthetic construct; identical to SEQ ID NO: 38882
  misc_feature 1..80: note = Artificially Synthesized Probe
  source 1..80: mol_type = other DNA

SEQ ID NO: 119133 - DNA, 80 bp, synthetic construct
  misc_feature 1..80: note = Artificially Synthesized Probe
  source 1..80: mol_type = other DNA
atcattatcatcatcactgcagcagaagacacatttatctactgtcaagtgtggaatgctctgctaaattatctcatttc

SEQ ID NO: 119134 - DNA, 80 bp, synthetic construct
  misc_feature 1..80: note = Artificially Synthesized Probe
  source 1..80: mol_type = other DNA
gctgcaagtcctcattatttcatctttaaaaggatgatgatagtaacagtccctccttaaaggggaaggattgaggaatc

SEQ ID NO: 119135 - DNA, 80 bp, synthetic construct
  misc_feature 1..80: note = Artificially Synthesized Probe
  source 1..80: mol_type = other DNA
tagtaacagtccctccttaaaggggaaggattgaggaatcaatacatgtaaggcactagaatggtgcatggcatgttgaa

SEQ ID NO: 119136 - DNA, 80 bp, synthetic construct
  misc_feature 1..80: note = Artificially Synthesized Probe
  source 1..80: mol_type = other DNA
aatacatgtaaggcactagaatggtgcatggcatgttgaaagtgctatgtaatgttaactaatgctgtcgtggtcataca

SEQ ID NO: 119137 - DNA, 80 bp, synthetic construct
  misc_feature 1..80: note = Artificially Synthesized Probe
  source 1..80: mol_type = other DNA
gccatagttggtgatccacttaccaggggccacacgtattctaggtgtgtgtgcttcacctgtctgagctcagtaacgtt

SEQ ID NO: 119138 - DNA, 80 bp, synthetic construct
  misc_feature 1..80: note = Artificially Synthesized Probe
  source 1..80: mol_type = other DNA
ctgggaggtggcatctcatgagcgacccgtgtaaatccaggtggtcttcttaactctgccacatcctgtggaggtgccct

SEQ ID NO: 119139 - DNA, 80 bp, synthetic construct; identical to SEQ ID NO: 38883
  misc_feature 1..80: note = Artificially Synthesized Probe
  source 1..80: mol_type = other DNA

SEQ ID NO: 119140 - DNA, 80 bp, synthetic construct
  misc_feature 1..80: note = Artificially Synthesized Probe
  source 1..80: mol_type = other DNA
gctggccacatcctccctgtcttctgtgggaccagccctttctcagctccagccatgtggtcaggtgatgccaccctgcc

SEQ ID NO: 119141 - DNA, 80 bp, synthetic construct
  misc_feature 1..80: note = Artificially Synthesized Probe
  source 1..80: mol_type = other DNA
atgggaggaggtgtgagggcagatattgtaactgtaattattaacagttgtttaatgcacattacagaaaagccttgtgg

SEQ ID NO: 119142 - DNA, 80 bp, synthetic construct
  misc_feature 1..80: note = Artificially Synthesized Probe
  source 1..80: mol_type = other DNA
caggccacagagggaggccagcctcctgagggggatacccatgtgcaggatggcacagggctcgggaggaagaagggcag

SEQ ID NO: 119143 - DNA, 80 bp, synthetic construct; identical to SEQ ID NO: 38884
  misc_feature 1..80: note = Artificially Synthesized Probe
  source 1..80: mol_type = other DNA

SEQ ID NO: 119144 - DNA, 80 bp, synthetic construct
  misc_feature 1..80: note = Artificially Synthesized Probe
  source 1..80: mol_type = other DNA
gggcccacttaaggacaggtggctttttttctgagatgttctgtagtctgactgctgagaaaggtgatcttggcttcctt

SEQ ID NO: 119145 - DNA, 80 bp, synthetic construct
  misc_feature 1..80: note = Artificially Synthesized Probe
  source 1..80: mol_type = other DNA
gggagagatggacacaaaagaccttgatgctaggagtccctggattgtggcttgtggtggtcactgaggctactaatcaa

SEQ ID NO: 119146 - DNA, 80 bp, synthetic construct
  misc_feature 1..80: note = Artificially Synthesized Probe
  source 1..80: mol_type = other DNA
tacttcttagctctcctgtggttgagtaggcccttgaaattaattttggccagtgaattttgagaggaagtgaattctgt

SEQ ID NO: 119147 - DNA, 80 bp, synthetic construct
  misc_feature 1..80: note = Artificially Synthesized Probe
  source 1..80: mol_type = other DNA
cctcaagtcaccccctgttgatgtatgatgggcataaggtgtgaatgagaaagaaacttttgttgttccaaaccacagag

SEQ ID NO: 119148 - DNA, 80 bp, synthetic construct
  misc_feature 1..80: note = Artificially Synthesized Probe
  source 1..80: mol_type = other DNA
gctagacataggcagtttgatactggttcaaagagaatactaaggtaagcaatcaggacaggtaggcagtgctagaatct

SEQ ID NO: 119149 - DNA, 80 bp, synthetic construct
  misc_feature 1..80: note = Artificially Synthesized Probe
  source 1..80: mol_type = other DNA
tcagagcagccaaggggaatgcttgttactgcagcttcatatagggcaagctgactgatacacatctccatggccctctt

SEQ ID NO: 119150 - DNA, 80 bp, synthetic construct; identical to SEQ ID NO: 38885
  misc_feature 1..80: note = Artificially Synthesized Probe
  source 1..80: mol_type = other DNA

SEQ ID NO: 119151 - DNA, 80 bp, synthetic construct
  misc_feature 1..80: note = Artificially Synthesized Probe
  source 1..80: mol_type = other DNA
aaaccacctactagacaatggaaatggatcccattaagcatggccagaacacagcatagcagcaggcactttatgtgtct

SEQ ID NO: 119152 - DNA, 80 bp, synthetic construct
  misc_feature 1..80: note = Artificially Synthesized Probe
  source 1..80: mol_type = other DNA
tcatatagcaagggctcagcaatgtttgtagtgctccacatacatggaggctagcagttactaccactctagtctgaacc

SEQ ID NO: 119153 - DNA, 80 bp, synthetic construct
  misc_feature 1..80: note = Artificially Synthesized Probe
  source 1..80: mol_type = other DNA
atcaggtgattttcaactctgctgcttaacgttttccaacagcttcccaatgcaaccagagtcacgttcaagctgccttc

SEQ ID NO: 119154 - DNA, 80 bp, synthetic construct
  misc_feature 1..80: note = Artificially Synthesized Probe
  source 1..80: mol_type = other DNA
agctcattcacacctcagggcctttgtgtgtgcttaactctgcctggaacattccttccccagctcacatttcactgcaa

SEQ ID NO: 119155 - DNA, 80 bp, synthetic construct
  misc_feature 1..80: note = Artificially Synthesized Probe
  source 1..80: mol_type = other DNA
gagatacaggaagctggatgattacagctccagctggggattgccgaggcaggggacacagccctggctggggcagtggc

SEQ ID NO: 119156 - DNA, 80 bp, synthetic construct; identical to SEQ ID NO: 38886
  misc_feature 1..80: note = Artificially Synthesized Probe
  source 1..80: mol_type = other DNA

SEQ ID NO: 119157 - DNA, 80 bp, synthetic construct
  misc_feature 1..80: note = Artificially Synthesized Probe
  source 1..80: mol_type = other DNA
cctgaaagctgttttctgagtatggcctagaaaaatctacactgaaaggaaaaaaaaaaaaggccaaacctagaaatccc

SEQ ID NO: 119158 - DNA, 80 bp, synthetic construct
  misc_feature 1..80: note = Artificially Synthesized Probe
  source 1..80: mol_type = other DNA
actgaaaggaaaaaaaaaaaaggccaaacctagaaatcccacttaatataccttttgggactcacgagaggcagtgacag

SEQ ID NO: 119159 - DNA, 80 bp, synthetic construct
  misc_feature 1..80: note = Artificially Synthesized Probe
  source 1..80: mol_type = other DNA
acttaatataccttttgggactcacgagaggcagtgacagattgcatgacaagcttcagactgtcagcatttaaaataga

SEQ ID NO: 119160 - DNA, 80 bp, synthetic construct
  misc_feature 1..80: note = Artificially Synthesized Probe
  source 1..80: mol_type = other DNA
aaaggccaaaagctaatctttaaggatgggttgggaggaggtgggctatagaactaagagatagaaggtggggcaaggtg

SEQ ID NO: 119161 - DNA, 80 bp, synthetic construct
  misc_feature 1..80: note = Artificially Synthesized Probe
  source 1..80: mol_type = other DNA
agctgtgtgccctcctgactgcctagggaaggtgaccatggcacgggcagcctgctctgagccaggcacccactgcgccc

SEQ ID NO: 119162 - DNA, 80 bp, synthetic construct
  misc_feature 1..80: note = Artificially Synthesized Probe
  source 1..80: mol_type = other DNA
ctacttgggaggctgaggcaggagaatcgcctgaacccgagaggtggaggttgcagtgagccgagattgtgccattgcag

SEQ ID NO: 119163 - DNA, 80 bp, synthetic construct; identical to SEQ ID NO: 38887
  misc_feature 1..80: note = Artificially Synthesized Probe
  source 1..80: mol_type = other DNA

SEQ ID NO: 119164 - DNA, 80 bp, synthetic construct
  misc_feature 1..80: note = Artificially Synthesized Probe
  source 1..80: mol_type = other DNA
gccgtcgagtcacgttggctactgttgtctgtccaggaatccagcttggacgttctggtctacaagtctctctgaaaaca

SEQ ID NO: 119165 - DNA, 80 bp, synthetic construct
  misc_feature 1..80: note = Artificially Synthesized Probe
  source 1..80: mol_type = other DNA
catcagaacctcccctgggaatctggagtagatgtggacagtctgctcccggtgtgcaccgaggacatcacagctggggc

SEQ ID NO: 119166 - DNA, 80 bp, synthetic construct
  misc_feature 1..80: note = Artificially Synthesized Probe
  source 1..80: mol_type = other DNA
gtccatttcttcatgcaacccagctcaggcaagctttgtatttcttgcaatgggaggagtgccatctttcagtctgtctg

SEQ ID NO: 119167 - DNA, 80 bp, synthetic construct; identical to SEQ ID NO: 38888
  misc_feature 1..80: note = Artificially Synthesized Probe
  source 1..80: mol_type = other DNA

SEQ ID NO: 119168 - DNA, 80 bp, synthetic construct
  misc_feature 1..80: note = Artificially Synthesized Probe
  source 1..80: mol_type = other DNA
tgtgtccatgacaaagacagtgaggccccgaggtttggccaaggaccttaaggctgacttcaaatgaccacagagcactt

SEQ ID NO: 119169 - DNA, 80 bp, synthetic construct
  misc_feature 1..80: note = Artificially Synthesized Probe
  source 1..80: mol_type = other DNA
aaatttacttttgtaaattgacaataagcacagatgccacgggagagtgggaagatgatgccatgcgtcctgaagagggg

SEQ ID NO: 119170 - DNA, 80 bp, synthetic construct
  misc_feature 1..80: note = Artificially Synthesized Probe
  source 1..80: mol_type = other DNA
tgaccaacatggcaaaaccccatctctacaaaaaatacacaaattagctgggcatggtggcatgtgcctataatcccagt

SEQ ID NO: 119171 - DNA, 80 bp, synthetic construct; identical to SEQ ID NO: 38889
  misc_feature 1..80: note = Artificially Synthesized Probe
  source 1..80: mol_type = other DNA

SEQ ID NO: 119172 - DNA, 80 bp, synthetic construct
  misc_feature 1..80: note = Artificially Synthesized Probe
  source 1..80: mol_type = other DNA
ggtcaggtctgacctggctgaggaaggaggaggaagtctcagcagagatggggaaatatcatatgtcagctatagcttga

SEQ ID NO: 119173 - DNA, 80 bp, synthetic construct; identical to SEQ ID NO: 38650
  misc_feature 1..80: note = Artificially Synthesized Probe
  source 1..80: mol_type = other DNA

SEQ ID NO: 119174 - DNA, 80 bp, synthetic construct
  misc_feature 1..80: note = Artificially Synthesized Probe
  source 1..80: mol_type = other DNA
gggtaaatgctcaggacaagccctagaaaaattctgtaggatgcccatttcacagacacggacactgaggcagagcatag

SEQ ID NO: 119175 - DNA, 80 bp, synthetic construct
  misc_feature 1..80: note = Artificially Synthesized Probe
  source 1..80: mol_type = other DNA
aggctggggagagaggagagaagaggagccagccgcaggcctcaggtcaccagtggggcgggtgggctccgggggtccag

SEQ ID NO: 119176 - DNA, 80 bp, synthetic construct; identical to SEQ ID NO: 38890
  misc_feature 1..80: note = Artificially Synthesized Probe
  source 1..80: mol_type = other DNA

SEQ ID NO: 119177 - DNA, 80 bp, synthetic construct
  misc_feature 1..80: note = Artificially Synthesized Probe
  source 1..80: mol_type = other DNA
caagggtgagcaaccactgcacacaacctttgacctgcagagaggactgtaggagactgtgtcccactgccccctctcgg

SEQ ID NO: 119178 - DNA, 80 bp, synthetic construct
  misc_feature 1..80: note = Artificially Synthesized Probe
  source 1..80: mol_type = other DNA
ggttgatggtgaaagggggattatcaggtgggaccgaactaatctcatcatctcatgagccctttgaaagcaagtacttt

SEQ ID NO: 119179 - DNA, 80 bp, synthetic construct
  misc_feature 1..80: note = Artificially Synthesized Probe
  source 1..80: mol_type = other DNA
accggagccctgtgagagcctgggcagagaacccagtccagctgcctgactttggactcacagagcctcggggtcggggg

SEQ ID NO: 119180 - DNA, 80 bp, synthetic construct; identical to SEQ ID NO: 38891
  misc_feature 1..80: note = Artificially Synthesized Probe
  source 1..80: mol_type = other DNA

SEQ ID NO: 119181 - DNA, 80 bp, synthetic construct
  misc_feature 1..80: note = Artificially Synthesized Probe
  source 1..80: mol_type = other DNA
ttgagtccgctctggccacccttcctgccgtttagagggctcagggtcacccgggtggcaacgtggctgggctgtccagc

SEQ ID NO: 119182 - DNA, 80 bp, synthetic construct
  misc_feature 1..80: note = Artificially Synthesized Probe
  source 1..80: mol_type = other DNA
agaccgaaataacttttcttttttaaaaccaaagatgctgatgggctccttgcaaggcagaggaacacacaggcagcagt

SEQ ID NO: 119183 - DNA, 80 bp, synthetic construct
  misc_feature 1..80: note = Artificially Synthesized Probe
  source 1..80: mol_type = other DNA
tctggacagcacgaaccagacatgaaagcgtgtgcacctcagctactgagacagcccacccacttcctgggcaccgtcgg

SEQ ID NO: 119184 - DNA, 80 bp, synthetic construct
  misc_feature 1..80: note = Artificially Synthesized Probe
  source 1..80: mol_type = other DNA
tcagaactacccaactgagaggcacagagctttgatttgaaaagcaacacgtatcacaaaaatgccgccaactggctcgg

SEQ ID NO: 119185 - DNA, 80 bp, synthetic construct; identical to SEQ ID NO: 38892
  misc_feature 1..80: note = Artificially Synthesized Probe
  source 1..80: mol_type = other DNA

SEQ ID NO: 119186 - DNA, 80 bp, synthetic construct
  misc_feature 1..80: note = Artificially Synthesized Probe
  source 1..80: mol_type = other DNA
cctcaaacaacacaaacgtctccccttacagagctgcaggctggaagtctgaccaggtctctgggctgaagttagggcgt

SEQ ID NO: 119187 - DNA, 80 bp, synthetic construct
  misc_feature 1..80: note = Artificially Synthesized Probe
  source 1..80: mol_type = other DNA
atccctctgactctcagccctatgcctcctttcccacatttaaggacccttggggtcacactgaacccatccagataacc

SEQ ID NO: 119188 - DNA, 80 bp, synthetic construct
  misc_feature 1..80: note = Artificially Synthesized Probe
  source 1..80: mol_type = other DNA
ctgggcaggctgtgctctgaaaactgtttacctccccatcagcaacagagctcagaactttcaacaggacagaaactatg

SEQ ID NO: 119189 - DNA, 80 bp, synthetic construct
  misc_feature 1..80: note = Artificially Synthesized Probe
  source 1..80: mol_type = other DNA
gagactcctcctgcaatgggtgggcgtggccctcactcagactgagccgccagcacgatggttcctcgctcggctaaaag

SEQ ID NO: 119190 - DNA, 80 bp, synthetic construct; identical to SEQ ID NO: 38893
  misc_feature 1..80: note = Artificially Synthesized Probe
  source 1..80: mol_type = other DNA

SEQ ID NO: 119191 - DNA, 80 bp, synthetic construct
  misc_feature 1..80: note = Artificially Synthesized Probe
  source 1..80: mol_type = other DNA
tcacgtgctttgaattcccttaacattggcatgggtttgtgtgtgggcaggggaggcaccagccctgtcgggcacgtgcc

SEQ ID NO: 119192 - DNA, 80 bp, synthetic construct
  misc_feature 1..80: note = Artificially Synthesized Probe
  source 1..80: mol_type = other DNA
gtttttcttagtcatctcaggaaattgttggttgtactgcaagatgagtgaagcaccttaagaagaacacgggttacagt

SEQ ID NO: 119193 - DNA, 80 bp, synthetic construct
  misc_feature 1..80: note = Artificially Synthesized Probe
  source 1..80: mol_type = other DNA
ggtgtccagcaaggcagtggctcagttgcatgttccactgatcatcggaaagccagggtgaggtgtcagcctccaagagt

SEQ ID NO: 119194 - DNA, 80 bp, synthetic construct; identical to SEQ ID NO: 38894
  misc_feature 1..80: note = Artificially Synthesized Probe
  source 1..80: mol_type = other DNA

SEQ ID NO: 119195 - DNA, 80 bp, synthetic construct
  misc_feature 1..80: note = Artificially Synthesized Probe
  source 1..80: mol_type = other DNA
ggtttatctgcaatagaaccgtgaggattggagcagcaacaccagtgggggaagctgggtgtagataggaaagcgcacag

SEQ ID NO: 119196 - DNA, 80 bp, synthetic construct
  misc_feature 1..80: note = Artificially Synthesized Probe
  source 1..80: mol_type = other DNA
tgtggccatgctaagtgccttcttccttccaacaaactgctttggctcactcaacagctatttgcaagcagcagctcctc

SEQ ID NO: 119197 - DNA, 80 bp, synthetic construct
  misc_feature 1..80: note = Artificially Synthesized Probe
  source 1..80: mol_type = other DNA
tccctgtctggaatgtggaagtggctctacatctatgctgcccccagagcatgctgaggacacggaggagaaggagagaa

SEQ ID NO: 119198 - DNA, 80 bp, synthetic construct; identical to SEQ ID NO: 38895
  misc_feature 1..80: note = Artificially Synthesized Probe
  source 1..80: mol_type = other DNA

SEQ ID NO: 119199 - DNA, 80 bp, synthetic construct
  misc_feature 1..80: note = Artificially Synthesized Probe
  source 1..80: mol_type = other DNA
tataataatcacttatcagatgtggaaatcgaggcaccggaaggttaaatggtattcctctataacacaatcagcaactg

SEQ ID NO: 119200 - DNA, 80 bp, synthetic construct
  misc_feature 1..80: note = Artificially Synthesized Probe
  source 1..80: mol_type = other DNA
ctggctctgagagtcaaggtcaccccatggcctctggctacatcctccctacggcatttttcttccttcctttttttttt

SEQ ID NO: 119201 - DNA, 80 bp, synthetic construct
  misc_feature 1..80: note = Artificially Synthesized Probe
  source 1..80: mol_type = other DNA
gggctcaagcaatcctcctgcctcagcctcccgagtagctgaaactataggtgtgcaccaccacacttggcttttttttt

SEQ ID NO: 119202 - DNA, 80 bp, synthetic construct
  misc_feature 1..80: note = Artificially Synthesized Probe
  source 1..80: mol_type = other DNA
ccagccccacctataacatttttgaaaggataaatctcagaggtgagtggtgccctgtagataatattttttacaatgct

SEQ ID NO: 119203 - DNA, 80 bp, synthetic construct
  misc_feature 1..80: note = Artificially Synthesized Probe
  source 1..80: mol_type = other DNA
aggtgagtggtgccctgtagataatattttttacaatgctacacttgagaattatccgggaatgtgggaaaaacctggaa

SEQ ID NO: 119204 - DNA, 80 bp, synthetic construct
  misc_feature 1..80: note = Artificially Synthesized Probe
  source 1..80: mol_type = other DNA
ttgcctgctttgtaagctcagtggatgcctcccaccctgggcacccagtgcctatggggagggcagtgtggacttctctt

SEQ ID NO: 119205 - DNA, 80 bp, synthetic construct
  misc_feature 1..80: note = Artificially Synthesized Probe
  source 1..80: mol_type = other DNA
ctactctatagtaattagaatgttttaaaaaaaatcagcccaggagctcagtggaagcatgtataccaatacatcgagcc

SEQ ID NO: 119206 - DNA, 80 bp, synthetic construct; identical to SEQ ID NO: 38896
  misc_feature 1..80: note = Artificially Synthesized Probe
  source 1..80: mol_type = other DNA

SEQ ID NO: 119207 - DNA, 80 bp, synthetic construct
  misc_feature 1..80: note = Artificially Synthesized Probe
  source 1..80: mol_type = other DNA
aaactcacagtttaaatggaaattagagtaaatggatgaatctgtgcctgatttgcatttgctgatgagctcggctggga

SEQ ID NO: 119208 - DNA, 80 bp, synthetic construct; identical to SEQ ID NO: 38651
  misc_feature 1..80: note = Artificially Synthesized Probe
  source 1..80: mol_type = other DNA

SEQ ID NO: 119209 - DNA, 80 bp, synthetic construct
  misc_feature 1..80: note = Artificially Synthesized Probe
  source 1..80: mol_type = other DNA
ggagtatctttaagaaagggaataacatctggccctcaccaactggctgccaaagttcaacaaaccgaagtcacgagttt

SEQ ID NO: 119210 - DNA, 80 bp, synthetic construct
  misc_feature 1..80: note = Artificially Synthesized Probe
  source 1..80: mol_type = other DNA
aaagacttgtccacggctgagctaatccggcctgggcccagaggggagcagagcctgcctctggctgtggacagggcgtc

SEQ ID NO: 119211 - DNA, 80 bp, synthetic construct
  misc_feature 1..80: note = Artificially Synthesized Probe
  source 1..80: mol_type = other DNA
gtcggcctctttccccggccaatcagagcacctcgaagaaggccgatgataatcagagccaccattctcagagcaaacac

SEQ ID NO: 119212 - DNA, 80 bp, synthetic construct; identical to SEQ ID NO: 38897
  misc_feature 1..80: note = Artificially Synthesized Probe
  source 1..80: mol_type = other DNA

SEQ ID NO: 119213 - DNA, 80 bp, synthetic construct
  misc_feature 1..80: note = Artificially Synthesized Probe
  source 1..80: mol_type = other DNA
gatgaggtgggtcccactggtgctaacaaagaccacccgccctccgcccctggccgtgaccttagcaagccagggccaga

SEQ ID NO: 119214 - DNA, 80 bp, synthetic construct
  misc_feature 1..80: note = Artificially Synthesized Probe
  source 1..80: mol_type = other DNA
tcaccgtagtctcgacagctcatggctcacatagatctcttcaaccgcaaagcaacatctgggagggatgctcctcggtg

SEQ ID NO: 119215 - DNA, 80 bp, synthetic construct
  misc_feature 1..80: note = Artificially Synthesized Probe
  source 1..80: mol_type = other DNA
gagaagctactggagaagctgatataaaccattatgcagcctgcaaacgcacagggtgtttctccctctccaccgttacc

SEQ ID NO: 119216 - DNA, 80 bp, synthetic construct
  misc_feature 1..80: note = Artificially Synthesized Probe
  source 1..80: mol_type = other DNA
gcagggactttcaatacagtttgtcgggttaggaaagaacacgccagaaaatgaacaagccacatctgtagccacagcac

SEQ ID NO: 119217 - DNA, 80 bp, synthetic construct; identical to SEQ ID NO: 38898
  misc_feature 1..80: note = Artificially Synthesized Probe
  source 1..80: mol_type = other DNA

SEQ ID NO: 119218 - DNA, 80 bp, synthetic construct
  misc_feature 1..80: note = Artificially Synthesized Probe
  source 1..80: mol_type = other DNA
ctcgtaaagaacaaaggctccgcacaccagcccacagcgtacctccaaaatgaactttcttcttgaaccgtgaattctcg

SEQ ID NO: 119219 - DNA, 80 bp, synthetic construct
  misc_feature 1..80: note = Artificially Synthesized Probe
  source 1..80: mol_type = other DNA
aaaaaaagttgcagccctctgggggcagaattgaagaagaaaagaaaaaaaaaatcagatgaagaagaaagatggctccg

SEQ ID NO: 119220 - DNA, 80 bp, synthetic construct
  misc_feature 1..80: note = Artificially Synthesized Probe
  source 1..80: mol_type = other DNA
aatcttggctcactgcaacctccgcctcccaggtttaagcaattctcttgcgtcagcctcaagagtagctgggattacag

SEQ ID NO: 119221 - DNA, 80 bp, synthetic construct; identical to SEQ ID NO: 38899
  misc_feature 1..80: note = Artificially Synthesized Probe
  source 1..80: mol_type = other DNA

SEQ ID NO: 119222 - DNA, 80 bp, synthetic construct
  misc_feature 1..80: note = Artificially Synthesized Probe
  source 1..80: mol_type = other DNA
tcgtccccagtaattgctttctcattttgcaaggcttggtgtttcctcggtcttggccgttcagagccctgctttctgtg

SEQ ID NO: 119223 - DNA, 80 bp, synthetic construct
  misc_feature 1..80: note = Artificially Synthesized Probe
  source 1..80: mol_type = other DNA
ggcaaggagggatttggggaaaaatccatggacatgctgcagattccatctgcaaggtcacggccagcagtccaccctgc

SEQ ID NO: 119224 - DNA, 80 bp, synthetic construct
  misc_feature 1..80: note = Artificially Synthesized Probe
  source 1..80: mol_type = other DNA
cagggagggagtgctcctccctttttgatagagctcattctctttttttttttttgaattgctggcctgaatgtccatca

SEQ ID NO: 119225 - DNA, 80 bp, synthetic construct
  misc_feature 1..80: note = Artificially Synthesized Probe
  source 1..80: mol_type = other DNA
gtcactggcgctatgagcttgggcttgtttccagttatcttgatttgtcagctggggataatcacgaattatcggtaaga

SEQ ID NO: 119226 - DNA, 80 bp, synthetic construct
  misc_feature 1..80: note = Artificially Synthesized Probe
  source 1..80: mol_type = other DNA
tgatttgtcagctggggataatcacgaattatcggtaagatggaaatcagggtcatgagaatacaatgaattaaagaagg

SEQ ID NO: 119227 - DNA, 80 bp, synthetic construct; identical to SEQ ID NO: 38900
  misc_feature 1..80: note = Artificially Synthesized Probe
  source 1..80: mol_type = other DNA

SEQ ID NO: 119228 - DNA, 80 bp, synthetic construct
  misc_feature 1..80: note = Artificially Synthesized Probe
  source 1..80: mol_type = other DNA
cactcctggggacatggacgtcatggtgctgtgtgcatgggcacccagtgggttgctggggatgaggatggagctgggct

SEQ ID NO: 119229 - DNA, 80 bp, synthetic construct
  misc_feature 1..80: note = Artificially Synthesized Probe
  source 1..80: mol_type = other DNA
tctgcccgtggtctgatgtgatctatgggcaaatcggagggtcataaaaatagccctacctggcacgccaggggcccagg

SEQ ID NO: 119230 - DNA, 80 bp, synthetic construct; identical to SEQ ID NO: 38901
  misc_feature 1..80: note = Artificially Synthesized Probe
  source 1..80: mol_type = other DNA

SEQ ID NO: 119231 - DNA, 80 bp, synthetic construct
  misc_feature 1..80: note = Artificially Synthesized Probe
  source 1..80: mol_type = other DNA
gtgctgggattacagccatttgggccatttctttagtggaatcacttgattctttctaatgggatttattcttgtgaggg

SEQ ID NO: 119232 - DNA, 80 bp, synthetic construct
  misc_feature 1..80: note = Artificially Synthesized Probe
  source 1..80: mol_type = other DNA
cctctctgagattcagcttctgcatcaagaataagcaggcagaccagaacagctcctgctggaaggcagagccagaacca

SEQ ID NO: 119233 - DNA, 80 bp, synthetic construct
  misc_feature 1..80: note = Artificially Synthesized Probe
  source 1..80: mol_type = other DNA
ttataaactgtagagtactgtacaaagtgccacggtcatttctgatgtaggggtcatcacctcgtctaactggtttatca

SEQ ID NO: 119234 - DNA, 80 bp, synthetic construct
  misc_feature 1..80: note = Artificially Synthesized Probe
  source 1..80: mol_type = other DNA
gaaaaagtggggatggagaaagtgccagctcccagggggccatgaggagaacccatgagggtgtgtggaaagtgtctcag

SEQ ID NO: 119235 - DNA, 80 bp, synthetic construct
  misc_feature 1..80: note = Artificially Synthesized Probe
  source 1..80: mol_type = other DNA
tgttcttgcggtatacatgtgctgacacacgtgaacacgcatgtgaacatacacacacacattcatgtagcacaccggca

SEQ ID NO: 119236 - DNA, 80 bp, synthetic construct; identical to SEQ ID NO: 38902
  misc_feature 1..80: note = Artificially Synthesized Probe
  source 1..80: mol_type = other DNA

SEQ ID NO: 119237 - DNA, 80 bp, synthetic construct
  misc_feature 1..80: note = Artificially Synthesized Probe
  source 1..80: mol_type = other DNA
gtgcccctccctttcctccagttaacacctggacatctctccaccgacgtctagggagacaaaggtctccctggcacgct

SEQ ID NO: 119238 - DNA, 80 bp, synthetic construct
  misc_feature 1..80: note = Artificially Synthesized Probe
  source 1..80: mol_type = other DNA
gttctcaatgaactcttgcccatttggatttaatacatgagtcaggattaaatgcaggggtcagagatgccaacatcttg

SEQ ID NO: 119239 - DNA, 80 bp, synthetic construct
  misc_feature 1..80: note = Artificially Synthesized Probe
  source 1..80: mol_type = other DNA
cagcgttcttactgaggcagttctgcccccagggtgtggtctggaggttcgtgggccagctagtgctgtcccagtgctgg

SEQ ID NO: 119240 - DNA, 80 bp, synthetic construct; identical to SEQ ID NO: 38903
  misc_feature 1..80: note = Artificially Synthesized Probe
  source 1..80: mol_type = other DNA

SEQ ID NO: 119241 - DNA, 80 bp, synthetic construct
  misc_feature 1..80: note = Artificially Synthesized Probe
  source 1..80: mol_type = other DNA
ttcaggaatgccaatgacttcaacatcaagggaagaatgtcctttgtttagctgaggctttgaaagaactgctcaccaat

SEQ ID NO: 119242 - DNA, 80 bp, synthetic construct
  misc_feature 1..80: note = Artificially Synthesized Probe
  source 1..80: mol_type = other DNA
agtgcatggatctggaaatcatcttcccgctttgtcatgccatcctctcctctgtcctcactgtcactgctgggatgtgt

SEQ ID NO: 119243 - DNA, 80 bp, synthetic construct
  misc_feature 1..80: note = Artificially Synthesized Probe
  source 1..80: mol_type = other DNA
cccaggcgttagtaagtgttgcagagggaaggtctctgtttattttccccaatgcagaaccttcccatttcctttaaaaa

SEQ ID NO: 119244 - DNA, 80 bp, synthetic construct
  misc_feature 1..80: note = Artificially Synthesized Probe
  source 1..80: mol_type = other DNA
gaggaatgtcaataggatgctcctcacgctctcagcaatacctcttggttctttttactcctgtaaccctaagggacatg

SEQ ID NO: 119245 - DNA, 80 bp, synthetic construct
  misc_feature 1..80: note = Artificially Synthesized Probe
  source 1..80: mol_type = other DNA
acaatttcctgattcaatcccctctgtttgaaatacctacataggcgattgttttttctgactgcatggattcataaaag

SEQ ID NO: 119246 - DNA, 80 bp, synthetic construct; identical to SEQ ID NO: 38904
  misc_feature 1..80: note = Artificially Synthesized Probe
  source 1..80: mol_type = other DNA

SEQ ID NO: 119247 - DNA, 80 bp, synthetic construct
  misc_feature 1..80: note = Artificially Synthesized Probe
  source 1..80: mol_type = other DNA
tttcttaaagggttgaggatggtggagctaggaataaaggtcaaaaccactacctcctaacatagtgtacctcgaaggct

SEQ ID NO: 119248 - DNA, 80 bp, synthetic construct
  misc_feature 1..80: note = Artificially Synthesized Probe
  source 1..80: mol_type = other DNA
tcaaaaccactacctcctaacatagtgtacctcgaaggctgctggtgacttaacctggagacttattaaaagaatctctt

SEQ ID NO: 119249 - DNA, 80 bp, synthetic construct
  misc_feature 1..80: note = Artificially Synthesized Probe
  source 1..80: mol_type = other DNA
gctggtgacttaacctggagacttattaaaagaatctcttagcttaaaagcaggacttacgacttatgagaagtggcagg

SEQ ID NO: 119250 - DNA, 80 bp, synthetic construct
  misc_feature 1..80: note = Artificially Synthesized Probe
  source 1..80: mol_type = other DNA
ctcagttttaacttttctgcctggtccctcatctccttacctttatgggacttttttacaaagcaccgtcagaccccatg

SEQ ID NO: 119251 - DNA, 80 bp, synthetic construct
  misc_feature 1..80: note = Artificially Synthesized Probe
  source 1..80: mol_type = other DNA
cagacttgcttcttccaagtagaatacagcaaaggggacaagatatacatgacttcatgcacatgattataggattatac

SEQ ID NO: 119252 - DNA, 80 bp, synthetic construct
  misc_feature 1..80: note = Artificially Synthesized Probe
  source 1..80: mol_type = other DNA
cccccagccagcaatgaagcccttactgataaaaatacaaggaactgaatttctgccaacaacctgtgagagcttggaag

SEQ ID NO: 119253 - DNA, 80 bp, synthetic construct; identical to SEQ ID NO: 38905
  misc_feature 1..80: note = Artificially Synthesized Probe
  source 1..80: mol_type = other DNA

SEQ ID NO: 119254 - DNA, 80 bp, synthetic construct
  misc_feature 1..80: note = Artificially Synthesized Probe
  source 1..80: mol_type = other DNA
ttgtcatgcagcaacaggtgactaatcaagtcccacactgtttagacttatgagccatgccatatagccttacttggtgt

SEQ ID NO: 119255 - DNA, 80 bp, synthetic construct
  misc_feature 1..80: note = Artificially Synthesized Probe
  source 1..80: mol_type = other DNA
tttagacttatgagccatgccatatagccttacttggtgtaacactataaaatactctatgggtgaaactgtctctccta

SEQ ID NO: 119256 - DNA, 80 bp, synthetic construct
  misc_feature 1..80: note = Artificially Synthesized Probe
  source 1..80: mol_type = other DNA
tcttctgagtactctagggacagaaataagagcagttccttttcacagctcaagaccttgccaaatccacttaaaaaaaa

SEQ ID NO: 119257 - DNA, 80 bp, synthetic construct
  misc_feature 1..80: note = Artificially Synthesized Probe
  source 1..80: mol_type = other DNA
tttcacagctcaagaccttgccaaatccacttaaaaaaaaaaatcccgcatcaaaccctgactcctcaagaggtgtgttc

SEQ ID NO: 119258 - DNA, 80 bp, synthetic construct
  misc_feature 1..80: note = Artificially Synthesized Probe
  source 1..80: mol_type = other DNA
aattctcctgcctcatcctcctgagtacctgggattacaggtgcacaccaccactcccagctaatttttgtatttttagt

SEQ ID NO: 119259 - DNA, 80 bp, synthetic construct
  misc_feature 1..80: note = Artificially Synthesized Probe
  source 1..80: mol_type = other DNA
agttcattcttacactttgctcagttaaggaagaaccatctgtgcagcaggttttgttgtggtggtggggtgtgtgtgta

SEQ ID NO: 119260 - DNA, 80 bp, synthetic construct; identical to SEQ ID NO: 38906
  misc_feature 1..80: note = Artificially Synthesized Probe
  source 1..80: mol_type = other DNA

SEQ ID NO: 119261 - DNA, 80 bp, synthetic construct; identical to SEQ ID NO: 38652
  misc_feature 1..80: note = Artificially Synthesized Probe
  source 1..80: mol_type = other DNA

SEQ ID NO: 119262 - DNA, 80 bp, synthetic construct
  misc_feature 1..80: note = Artificially Synthesized Probe
  source 1..80: mol_type = other DNA
tccaaacaccagctcagaggcagcaggaagacgctaactctgcgttccggaaatgtcacctgctcagtgtttgggaaggg

SEQ ID NO: 119263 - DNA, 80 bp, synthetic construct
  misc_feature 1..80: note = Artificially Synthesized Probe
  source 1..80: mol_type = other DNA
agtcctcaaggtagttaaaaccagtcccaaccaaatgtcggtctaaaaggaaggaaaccaacatttgctaaatgcctact

SEQ ID NO: 119264 - DNA, 80 bp, synthetic construct
  misc_feature 1..80: note = Artificially Synthesized Probe
  source 1..80: mol_type = other DNA
tgggggggaaaacacttaagctaaggccattataagactatctttagcgtaaataacatgggcaaaaataagcaccgtac

SEQ ID NO: 119265 - DNA, 80 bp, synthetic construct
  misc_feature 1..80: note = Artificially Synthesized Probe
  source 1..80: mol_type = other DNA
tggttctgtgtcatatttaaaatgaatcatttttcaacatttgcggactcttaaaagctgagcgtggcaggaggaatttc

SEQ ID NO: 119266 - DNA, 80 bp, synthetic construct
  misc_feature 1..80: note = Artificially Synthesized Probe
  source 1..80: mol_type = other DNA
tgcccaaagaggctcactatggaccgagtcacttggaccagtgggtgttgttcagatgaacctcaccccaataccgcacg

SEQ ID NO: 119267 - DNA, 80 bp, synthetic construct; identical to SEQ ID NO: 38907
  misc_feature 1..80: note = Artificially Synthesized Probe
  source 1..80: mol_type = other DNA

SEQ ID NO: 119268 - DNA, 80 bp, synthetic construct
  misc_feature 1..80: note = Artificially Synthesized Probe
  source 1..80: mol_type = other DNA
tagacctctgaagacaactgaaagatggtgtacaatgaatgaaaaaatgtgtacagaagcatggggggaagaacagccac

SEQ ID NO: 119269 - DNA, 80 bp, synthetic construct
  misc_feature 1..80: note = Artificially Synthesized Probe
  source 1..80: mol_type = other DNA
gaaaaaatgtgtacagaagcatggggggaagaacagccaccttctaagctgcatcatctctgttcctcacaaatacctag

SEQ ID NO: 119270 - DNA, 80 bp, synthetic construct
  misc_feature 1..80: note = Artificially Synthesized Probe
  source 1..80: mol_type = other DNA
cttctccatgctcagctgagtttctcagagctgtacttggtaagtgcattgaggacttttacacctacttccccgcttta

SEQ ID NO: 119271 - DNA, 80 bp, synthetic construct
  misc_feature 1..80: note = Artificially Synthesized Probe
  source 1..80: mol_type = other DNA
gtaccaaaagcaggaagtgcagaggtctggccactaaaaggagcaccagaaacctctggtcaaggtgcactttgttaatt

SEQ ID NO: 119272 - DNA, 80 bp, synthetic construct; identical to SEQ ID NO: 38908
  misc_feature 1..80: note = Artificially Synthesized Probe
  source 1..80: mol_type = other DNA

SEQ ID NO: 119273 - DNA, 80 bp, synthetic construct
  misc_feature 1..80: note = Artificially Synthesized Probe
  source 1..80: mol_type = other DNA
ctgtctgcccagaccttaaacttggtctggtcctgtgatactggccaatagcatgtggtgcaattgaccagttctgagtc

SEQ ID NO: 119274 - DNA, 80 bp, synthetic construct
  misc_feature 1..80: note = Artificially Synthesized Probe
  source 1..80: mol_type = other DNA
tggaaatctacctgggaacagaagaccctccctgcagaacccaccctaatttgacttacagaatcatgagacaaatgacg

SEQ ID NO: 119275 - DNA, 80 bp, synthetic construct
  misc_feature 1..80: note = Artificially Synthesized Probe
  source 1..80: mol_type = other DNA
gaacattctgccttctggccaccctaagcccactcttggggtctggtggctcccatgaagtgtatgctagggccttgccc

SEQ ID NO: 119276 - DNA, 80 bp, synthetic construct
  misc_feature 1..80: note = Artificially Synthesized Probe
  source 1..80: mol_type = other DNA
gatgacaaatcttgcctctggcacggagcagttgtgagagtcacatgggaaactatgtaaaaatgcattgcgaattttaa

SEQ ID NO: 119277 - DNA, 80 bp, synthetic construct; identical to SEQ ID NO: 38909
  misc_feature 1..80: note = Artificially Synthesized Probe
  source 1..80: mol_type = other DNA

SEQ ID NO: 119278 - DNA, 80 bp, synthetic construct
  misc_feature 1..80: note = Artificially Synthesized Probe
  source 1..80: mol_type = other DNA
gggcaggcatacggtaaaaatgaggtggcccatgtcaaaaattggtaccaccctgggttaagactcaggatagaggacct

SEQ ID NO: 119279 - DNA, 80 bp, synthetic construct
  misc_feature 1..80: note = Artificially Synthesized Probe
  source 1..80: mol_type = other DNA
gtgcacaaacatttacatcaacaaaagaaaacttccagagcagtaagtaattttcctcaagggacaaaggaggcgagagg

SEQ ID NO: 119280 - DNA, 80 bp, synthetic construct
  misc_feature 1..80: note = Artificially Synthesized Probe
  source 1..80: mol_type = other DNA
cagtaagtaattttcctcaagggacaaaggaggcgagaggtgttctgatgagttttgttggctgacatttttcagaagtt

SEQ ID NO: 119281 - DNA, 80 bp, synthetic construct
  misc_feature 1..80: note = Artificially Synthesized Probe
  source 1..80: mol_type = other DNA
caccatagaaaccgagccatggggttaaaccgactcccaaagggcagtgcttggttaggaacacagggaaaagtactccc

SEQ ID NO: 119282 - DNA, 80 bp, synthetic construct
  misc_feature 1..80: note = Artificially Synthesized Probe
  source 1..80: mol_type = other DNA
ctcggtttacttggtagaaggcagcccccttactgccaatataactcaagacagcctggcagctggactggttcatcacg

SEQ ID NO: 119283 - DNA, 80 bp, synthetic construct; identical to SEQ ID NO: 38910
  misc_feature 1..80: note = Artificially Synthesized Probe
  source 1..80: mol_type = other DNA

SEQ ID NO: 119284 - DNA, 80 bp, synthetic construct
  misc_feature 1..80: note = Artificially Synthesized Probe
  source 1..80: mol_type = other DNA
gaaaaacaaaaaaccagttccaaacactttcagtgacactcacaccttctcctacgcatgccctctgatcacgtaaggag

SEQ ID NO: 119285 - DNA, 80 bp, synthetic construct
  misc_feature 1..80: note = Artificially Synthesized Probe
  source 1..80: mol_type = other DNA
tggatcacctgagctcaggagttcgagaccagcctggccaacatagcaaaaccctgtctctactaaaagtacaaaattag

SEQ ID NO: 119286 - DNA, 80 bp, synthetic construct
  misc_feature 1..80: note = Artificially Synthesized Probe
  source 1..80: mol_type = other DNA
agaagaaagaaagaaatactgatacacgtggcaacacagatgcgtctcaggaacttcctgctcagtgaatgaagccagac

SEQ ID NO: 119287 - DNA, 80 bp, synthetic construct; identical to SEQ ID NO: 38911
  misc_feature 1..80: note = Artificially Synthesized Probe
  source 1..80: mol_type = other DNA

SEQ ID NO: 119288 - DNA, 80 bp, synthetic construct
  misc_feature 1..80: note = Artificially Synthesized Probe
  source 1..80: mol_type = other DNA
cacggatcagggttgtccaacacaaaggcatcaggctcctgacaaaggcagcccagaccagaggtccccacaagaggaag

SEQ ID NO: 119289 - DNA, 80 bp, synthetic construct
  misc_feature 1..80: note = Artificially Synthesized Probe
  source 1..80: mol_type = other DNA
ggactacaggtgcccgctaccacacccggctaatttttttttgtatttttttttttagtagagacggggtttcaccatgt

SEQ ID NO: 119290 - DNA, 80 bp, synthetic construct
  misc_feature 1..80: note = Artificially Synthesized Probe
  source 1..80: mol_type = other DNA
tagttctggcgtttgagaatgatatctcaacaaagtgttactaaaaaaaaaaaaaaaaagccgataggtgcctgagccag

SEQ ID NO: 119291 - DNA, 80 bp, synthetic construct; identical to SEQ ID NO: 38912
  misc_feature 1..80: note = Artificially Synthesized Probe
  source 1..80: mol_type = other DNA

SEQ ID NO: 119292 - DNA, 80 bp, synthetic construct
  misc_feature 1..80: note = Artificially Synthesized Probe
  source 1..80: mol_type = other DNA
tatgtgtttcaatcttatcatcaatgctatttgcagcatgaggccccaggagctggcacaggtgaatctccttctgtgga

SEQ ID NO: 119293 - DNA, 80 bp, synthetic construct
  misc_feature 1..80: note = Artificially Synthesized Probe
  source 1..80: mol_type = other DNA
tccccatgatctcatcacaaatagatgcccaggactcacccccgaagcccatccctataaagctgtgcacacccctaact

SEQ ID NO: 119294 - DNA, 80 bp, synthetic construct
  misc_feature 1..80: note = Artificially Synthesized Probe
  source 1..80: mol_type = other DNA
cctggtccctgcagatgagcagccaggctcctggccaggccagcatctcctcctctccctgctgaaggatgaggctgctg

SEQ ID NO: 119295 - DNA, 80 bp, synthetic construct
  misc_feature 1..80: note = Artificially Synthesized Probe
  source 1..80: mol_type = other DNA
atttacaaaactgaatactaatcattaaaaaaatacaatttgttggcagttaacacatccacaatgctgtgcaaccagca

SEQ ID NO: 119296 - DNA, 80 bp, synthetic construct; identical to SEQ ID NO: 38913
  misc_feature 1..80: note = Artificially Synthesized Probe
  source 1..80: mol_type = other DNA

SEQ ID NO: 119297 - DNA, 80 bp, synthetic construct
  misc_feature 1..80: note = Artificially Synthesized Probe
  source 1..80: mol_type = other DNA
gtgtctgttgtttaagcaacagtctgtggcattttgttatgaaagtccaggctgactgacatactccccgctccttctcc

SEQ ID NO: 119298 - DNA, 80 bp, synthetic construct
  misc_feature 1..80: note = Artificially Synthesized Probe
  source 1..80: mol_type = other DNA
actcagcatcctgtttcccacactcatgtgtgctgtgtcagtccctcattccttttaagggctgaataatattccattca

SEQ ID NO: 119299 - DNA, 80 bp, synthetic construct
  misc_feature 1..80: note = Artificially Synthesized Probe
  source 1..80: mol_type = other DNA
acctgtttttaattctctggggctctcttctttcttgagccctcaaaaccagattcacaccagctaccagcaaggtgcct

SEQ ID NO: 119300 - DNA, 80 bp, synthetic construct
  misc_feature 1..80: note = Artificially Synthesized Probe
  source 1..80: mol_type = other DNA
agacccttgggccagtcctgcccccaccgggccagaacctcagggcagtctatacttttttttcttttctttaagatgga

SEQ ID NO: 119301 - DNA, 80 bp, synthetic construct
  misc_feature 1..80: note = Artificially Synthesized Probe
  source 1..80: mol_type = other DNA
gcctcctcctcagctccccatcctctgaacgcagtcctctgtgtcttcctctctggccacacacacccccagggtgacct

SEQ ID NO: 119302 - DNA, 80 bp, synthetic construct; identical to SEQ ID NO: 38914
  misc_feature 1..80: note = Artificially Synthesized Probe
  source 1..80: mol_type = other DNA

SEQ ID NO: 119303 - DNA, 80 bp, synthetic construct
  misc_feature 1..80: note = Artificially Synthesized Probe
  source 1..80: mol_type = other DNA
gaacccatcacatctcttgcctgctcagacccttgcatggcccaggatttttttctgtgtcccccagcctcactgagctg

SEQ ID NO: 119304 - DNA, 80 bp, synthetic construct
  misc_feature 1..80: note = Artificially Synthesized Probe
  source 1..80: mol_type = other DNA
gcccatgcccttgcttctgtccggtctctgctgacacatcccacctctaggtggccatttttgtcctgcctaggaagcct

SEQ ID NO: 119305 - DNA, 80 bp, synthetic construct; identical to SEQ ID NO: 38915
  misc_feature 1..80: note = Artificially Synthesized Probe
  source 1..80: mol_type = other DNA

SEQ ID NO: 119306 - DNA, 80 bp, synthetic construct
  misc_feature 1..80: note = Artificially Synthesized Probe
  source 1..80: mol_type = other DNA
gagagtgccgggagaggactttgcttgaagcgtggagaggagggactgtcacagctgggttttgcaggatgagtaggagt

SEQ ID NO: 119307 - DNA, 80 bp, synthetic construct
  misc_feature 1..80: note = Artificially Synthesized Probe
  source 1..80: mol_type = other DNA
caatttatgtgtgatacagaatgtctcattcaatgcacatattagccctgtgtggtgggtacagtgatcatcgccatttt

SEQ ID NO: 119308 - DNA, 80 bp, synthetic construct
  misc_feature 1..80: note = Artificially Synthesized Probe
  source 1..80: mol_type = other DNA
gcatgctgccactccattcatgggggtactgtctgtggctgctgcctgctacaaaggcagagctgagaggctgccacagg

SEQ ID NO: 119309 - DNA, 80 bp, synthetic construct
  misc_feature 1..80: note = Artificially Synthesized Probe
  source 1..80: mol_type = other DNA
gggaagagggaggcccaagaagaggggcaggctcagctcccatgaggtgtctgtgcaggcacagggaacggtgaggacag

SEQ ID NO: 119310 - DNA, 80 bp, synthetic construct; identical to SEQ ID NO: 38916
  misc_feature 1..80: note = Artificially Synthesized Probe
  source 1..80: mol_type = other DNA

SEQ ID NO: 119311 - DNA, 80 bp, synthetic construct
  misc_feature 1..80: note = Artificially Synthesized Probe
  source 1..80: mol_type = other DNA
accgtgacgggggaactggctatgcgaggagatgttttaactgggttgttcgagaatgttttgcctgatgcttctgagca

SEQ ID NO: 119312 - DNA, 80 bp, synthetic construct
  misc_feature 1..80: note = Artificially Synthesized Probe
  source 1..80: mol_type = other DNA
ggccaggctggtctcagactcctgacctcaagtgatgtgcccgccttggcctcccaaagtgctgggattacaggtgtgag

SEQ ID NO: 119313 - DNA, 80 bp, synthetic construct
  misc_feature 1..80: note = Artificially Synthesized Probe
  source 1..80: mol_type = other DNA
cccatacccagtccacacgctccacactgacagctcagggtgcctgtagctgggctggcaaaattcagccaggcttcacc

SEQ ID NO: 119314 - DNA, 80 bp, synthetic construct
  misc_feature 1..80: note = Artificially Synthesized Probe
  source 1..80: mol_type = other DNA
cccgaccaataccaactctcctcccagccagaggctgccctggcccaggctttcagcaggggccccacagcctgtgccct

SEQ ID NO: 119315 - DNA, 80 bp, synthetic construct; identical to SEQ ID NO: 38917
  misc_feature 1..80: note = Artificially Synthesized Probe
  source 1..80: mol_type = other DNA

SEQ ID NO: 119316 - DNA, 80 bp, synthetic construct
  misc_feature 1..80: note = Artificially Synthesized Probe
  source 1..80: mol_type = other DNA
cgtggcctccccccaggtgggcaggttttcgggactctgcccaatctgtcagggaacccactgccctgtgttcaagggac

SEQ ID NO: 119317 - DNA, 80 bp, synthetic construct
  misc_feature 1..80: note = Artificially Synthesized Probe
  source 1..80: mol_type = other DNA
agagaggaagaggaagccacacctgtggaggcttcctggggtcccgcaagccagcctcacccagcatgatagaaaatgtg

SEQ ID NO: 119318 - DNA, 80 bp, synthetic construct
  misc_feature 1..80: note = Artificially Synthesized Probe
  source 1..80: mol_type = other DNA
ctgtaatcccagctacttgggaggctgaggcagaagaattgcttgaacctaggaggtggaggttgcagtgagctgagatc

SEQ ID NO: 119319 - DNA, 80 bp, synthetic construct; identical to SEQ ID NO: 38918
  misc_feature 1..80: note = Artificially Synthesized Probe
  source 1..80: mol_type = other DNA

SEQ ID NO: 119320 - DNA, 80 bp, synthetic construct
  misc_feature 1..80: note = Artificially Synthesized Probe
  source 1..80: mol_type = other DNA
ggactcacggaattttgcggtatcatcaaatggaagacaaattaatggccaaaccaccatttttacattttctaaaatat

SEQ ID NO: 119321 - DNA, 80 bp, synthetic construct
  misc_feature 1..80: note = Artificially Synthesized Probe
  source 1..80: mol_type = other DNA
aaactagatccaagcctgacccaggtctgaggctcgggaacaagaacccagccaagcccagtggcagaggagccagtcaa

SEQ ID NO: 119322 - DNA, 80 bp, synthetic construct
  misc_feature 1..80: note = Artificially Synthesized Probe
  source 1..80: mol_type = other DNA
agtgctggtccccaaaagatgtgactgtaccctagcccccgaaacccacgagtgtgacctgatttggaaaacagctcctt

SEQ ID NO: 119323 - DNA, 80 bp, synthetic construct
  misc_feature 1..80: note = Artificially Synthesized Probe
  source 1..80: mol_type = other DNA
gggccacagccgatgaatgcctggagccaccaggaggtggacgaggcaggaaggaccctcccctagcaactgtggaggga

SEQ ID NO: 119324 - DNA, 80 bp, synthetic construct; identical to SEQ ID NO: 38653
  misc_feature 1..80: note = Artificially Synthesized Probe
  source 1..80: mol_type = other DNA

SEQ ID NO: 119325 - DNA, 80 bp, synthetic construct; identical to SEQ ID NO: 38919
  misc_feature 1..80: note = Artificially Synthesized Probe
  source 1..80: mol_type = other DNA

SEQ ID NO: 119326 - DNA, 80 bp, synthetic construct
  misc_feature 1..80: note = Artificially Synthesized Probe
  source 1..80: mol_type = other DNA
ctgtgtgaatttcttgtaccatgtgtgttcccaggggcctggggaacctgtccctactctccttcacccgcggccaaagt

SEQ ID NO: 119327 - DNA, 80 bp, synthetic construct
  misc_feature 1..80: note = Artificially Synthesized Probe
  source 1..80: mol_type = other DNA
gcattcactatcatttcccagccatgtggcgcatcctcccgtttcaatgttaaaatagaaacaagttcaaggaagatgca

SEQ ID NO: 119328 - DNA, 80 bp, synthetic construct
  misc_feature 1..80: note = Artificially Synthesized Probe
  source 1..80: mol_type = other DNA
gtttcaatgttaaaatagaaacaagttcaaggaagatgcattcacctgcctgatctgcctgccagcttcctgtgaggtgg

SEQ ID NO: 119329 - DNA, 80 bp, synthetic construct
  misc_feature 1..80: note = Artificially Synthesized Probe
  source 1..80: mol_type = other DNA
cgagttccccagccctgcatgcatctcgctccagacatccctggccacctccatcgcattgagtccaaacccacatgata

SEQ ID NO: 119330 - DNA, 80 bp, synthetic construct; identical to SEQ ID NO: 38920
  misc_feature 1..80: note = Artificially Synthesized Probe
  source 1..80: mol_type = other DNA

SEQ ID NO: 119331 - DNA, 80 bp, synthetic construct
  misc_feature 1..80: note = Artificially Synthesized Probe
  source 1..80: mol_type = other DNA
acagatggcaaggaggcccgtcatttgcaagagctggcacttaaatgaaaaaacactaagtatatttgctaataaggttc

SEQ ID NO: 119332 - DNA, 80 bp, synthetic construct
  misc_feature 1..80: note = Artificially Synthesized Probe
  source 1..80: mol_type = other DNA
ttaaatgaaaaaacactaagtatatttgctaataaggttccagggtgagcatgtgtgacaatgacaagtgtgaaggtgcc

SEQ ID NO: 119333 - DNA, 80 bp, synthetic construct
  misc_feature 1..80: note = Artificially Synthesized Probe
  source 1..80: mol_type = other DNA
ttggctgaaagccccgaaatctgtcctgacaccaaagcaaccatgcatcgcacaagagaatcagcacacattccaggagg

SEQ ID NO: 119334 - DNA, 80 bp, synthetic construct
  misc_feature 1..80: note = Artificially Synthesized Probe
  source 1..80: mol_type = other DNA
tcaacaatgtgcagggaaaggcgctcccctctgtcttctgtgcaccaaccccaaccataaacactcagtggaggctgcac

SEQ ID NO: 119335 - DNA, 80 bp, synthetic construct; identical to SEQ ID NO: 38921
  misc_feature 1..80: note = Artificially Synthesized Probe
  source 1..80: mol_type = other DNA

SEQ ID NO: 119336 - DNA, 80 bp, synthetic construct
  misc_feature 1..80: note = Artificially Synthesized Probe
  source 1..80: mol_type = other DNA
cctctttggagggaagtggtagtttacaacaaaagcagtaagcaaaccacctcacggcctccagccacgtccatgcactg

SEQ ID NO: 119337 - DNA, 80 bp, synthetic construct
  misc_feature 1..80: note = Artificially Synthesized Probe
  source 1..80: mol_type = other DNA
ttcagtgagtagggctggtgagtttctccagccaagatgctgcatatcccaccatctggccccattgtctggggacagga

SEQ ID NO: 119338 - DNA, 80 bp, synthetic construct
  misc_feature 1..80: note = Artificially Synthesized Probe
  source 1..80: mol_type = other DNA
cattcccccagtggatgctaagcatctgcttctcagggaactggtcaggcacggtaggaaacacccgattctcatctcac

SEQ ID NO: 119339 - DNA, 80 bp, synthetic construct
  misc_feature 1..80: note = Artificially Synthesized Probe
  source 1..80: mol_type = other DNA
cccggggcatctcccatctccacccatctccactcatctccacccatctccacacatctccacacatctccacctcccca

SEQ ID NO: 119340 - DNA, 80 bp, synthetic construct; identical to SEQ ID NO: 38922
  misc_feature 1..80: note = Artificially Synthesized Probe
  source 1..80: mol_type = other DNA

SEQ ID NO: 119341 - DNA, 80 bp, synthetic construct
  misc_feature 1..80: note = Artificially Synthesized Probe
  source 1..80: mol_type = other DNA
aggtctttaaagaggtgattaagttaaaacgaggtactgtgatgggccctcatccagcatgacagtgtctttgtaagaca

SEQ ID NO: 119342 - DNA, 80 bp, synthetic construct
  misc_feature 1..80: note = Artificially Synthesized Probe
  source 1..80: mol_type = other DNA
accttggacagtcacacgacccagaccaggggcccggcaggggcaggaattttgggattgttaatggctccgtccacagc

SEQ ID NO: 119343 - DNA, 80 bp, synthetic construct; identical to SEQ ID NO: 38923
  misc_feature 1..80: note = Artificially Synthesized Probe
  source 1..80: mol_type = other DNA

SEQ ID NO: 119344 - DNA, 80 bp, synthetic construct
  misc_feature 1..80: note = Artificially Synthesized Probe
  source 1..80: mol_type = other DNA
tgagattcccctaggctgggaccacccaccctccaccttgagttcctgaagcttccccggtcttttctgggtctctcaaa

SEQ ID NO: 119345 - DNA, 80 bp, synthetic construct
  misc_feature 1..80: note = Artificially Synthesized Probe
  source 1..80: mol_type = other DNA
ccagcaagcagcatcagtcagcccaagtttatttttaatcacatgattacccggggtcttttgtcacttaagcagtttaa

SEQ ID NO: 119346 - DNA, 80 bp, synthetic construct
  misc_feature 1..80: note = Artificially Synthesized Probe
  source 1..80: mol_type = other DNA
atgtccaaggccagtctggtcctatccagcagatgggaaagggcagaatccctcactgagggaacatcctgagtacctgc

SEQ ID NO: 119347 - DNA, 80 bp, synthetic construct; identical to SEQ ID NO: 38924
  misc_feature 1..80: note = Artificially Synthesized Probe
  source 1..80: mol_type = other DNA

SEQ ID NO: 119348 - DNA, 80 bp, synthetic construct
  misc_feature 1..80: note = Artificially Synthesized Probe
  source 1..80: mol_type = other DNA
ccatccatccatccatccatccattcatccatccgtgcatccaactatccatccatccatgcatccaactacccatctat

SEQ ID NO: 119349 - DNA, 80 bp, synthetic construct
  misc_feature 1..80: note = Artificially Synthesized Probe
  source 1..80: mol_type = other DNA
ctgggctgcacgggctgggtccacctgccatggtcccagcaatttgcttcctccaaggagcctttcccctcccagggctg

SEQ ID NO: 119350 - DNA, 80 bp, synthetic construct
  misc_feature 1..80: note = Artificially Synthesized Probe
  source 1..80: mol_type = other DNA
ccaccccatgtatctgtctgtacctcactgagtacctaccaggtaccttcccccactttcttggaggtactgcctactca

SEQ ID NO: 119351 - DNA, 80 bp, synthetic construct
  misc_feature 1..80: note = Artificially Synthesized Probe
  source 1..80: mol_type = other DNA
gtgttgagcacacaggctgcctctgttttttcattaaacagtcatcacacgtccataagggaccatcctacttttctaag

SEQ ID NO: 119352 - DNA, 80 bp, synthetic construct
  misc_feature 1..80: note = Artificially Synthesized Probe
  source 1..80: mol_type = other DNA
gtcatcacacgtccataagggaccatcctacttttctaagaagtcacaactggcaaggagtaaggaacagaaggcatatt

SEQ ID NO: 119353 - DNA, 80 bp, synthetic construct; identical to SEQ ID NO: 38925
  misc_feature 1..80: note = Artificially Synthesized Probe
  source 1..80: mol_type = other DNA

SEQ ID NO: 119354 - DNA, 80 bp, synthetic construct
  misc_feature 1..80: note = Artificially Synthesized Probe
  source 1..80: mol_type = other DNA
ctcatccttcaaaacccaggtggactgttgcgcactctgggaagtcacagctctccagaccctattgtctcttggtttct

SEQ ID NO: 119355 - DNA, 80 bp, synthetic construct
  misc_feature 1..80: note = Artificially Synthesized Probe
  source 1..80: mol_type = other DNA
tttttcaaaaggtaggcatattagttctctgcctaggtccaggacaattcttggcaggtttctcttactagtaactaccc

SEQ ID NO: 119356 - DNA, 80 bp, synthetic construct
  misc_feature 1..80: note = Artificially Synthesized Probe
  source 1..80: mol_type = other DNA
tgaatgtcagcactaatctgtttaggctcaaaaggaggcggattcagagctctccatgcacagccaccccactgggcagc

SEQ ID NO: 119357 - DNA, 80 bp, synthetic construct; identical to SEQ ID NO: 38926
  misc_feature 1..80: note = Artificially Synthesized Probe
  source 1..80: mol_type = other DNA

SEQ ID NO: 119358 - DNA, 80 bp, synthetic construct
  misc_feature 1..80: note = Artificially Synthesized Probe
  source 1..80: mol_type = other DNA
gtgctgagcggtggggacacaaaggcacagggcgggggctggaggggaaacctgcagaatgatcgataacagcacagcca

SEQ ID NO: 119359 - DNA, 80 bp, synthetic construct
  misc_feature 1..80: note = Artificially Synthesized Probe
  source 1..80: mol_type = other DNA
tcatgagggtgggctctggtgattagtgtctttgcgagaatagacgccagtacccctcgccccccaatgcgagcacatgg

SEQ ID NO: 119360 - DNA, 80 bp, synthetic construct
  misc_feature 1..80: note = Artificially Synthesized Probe
  source 1..80: mol_type = other DNA
caggaggagacgtgattcctactgggactttattcatcaacatttactgcacacacactggatgctttgggataagcaca

SEQ ID NO: 119361 - DNA, 80 bp, synthetic construct; identical to SEQ ID NO: 38927
  misc_feature 1..80: note = Artificially Synthesized Probe
  source 1..80: mol_type = other DNA

SEQ ID NO: 119362 - DNA, 80 bp, synthetic construct
  misc_feature 1..80: note = Artificially Synthesized Probe
  source 1..80: mol_type = other DNA
atccctggaaatgggggcgctaggcagtggctgttctttgcctcaagtgagatgtggccgctggtggcccccagagtatt

SEQ ID NO: 119363 - DNA, 80 bp, synthetic construct
  misc_feature 1..80: note = Artificially Synthesized Probe
  source 1..80: mol_type = other DNA
tccctccggatctaactccagctgggcatcccgggccacacttcacgcagcagccaccctgagctgccaccaatgtgtgg

SEQ ID NO: 119364 - DNA, 80 bp, synthetic construct
  misc_feature 1..80: note = Artificially Synthesized Probe
  source 1..80: mol_type = other DNA
tgcccttgtgggctcgggcgatcagatcccagggaggtctttccatgactgcagtagaggctggtcacaccctgcagcaa

SEQ ID NO: 119365 - DNA, 80 bp, synthetic construct
  misc_feature 1..80: note = Artificially Synthesized Probe
  source 1..80: mol_type = other DNA
ctggggggttcctgctaggatctgcctacgggaggaatgaatgagcccagaaggttggaagagggcaggcagcttcctcc

SEQ ID NO: 119366 - DNA, 80 bp, synthetic construct; identical to SEQ ID NO: 38928
  misc_feature 1..80: note = Artificially Synthesized Probe
  source 1..80: mol_type = other DNA

SEQ ID NO: 119367 - DNA, 80 bp, synthetic construct
  misc_feature 1..80: note = Artificially Synthesized Probe
  source 1..80: mol_type = other DNA
ttgagcgataagcactgtcttgctccccaccaaggcttgagtccaggtagccacttcccccagcccaggcagtggcagct

SEQ ID NO: 119368 - DNA, 80 bp, synthetic construct
  misc_feature 1..80: note = Artificially Synthesized Probe
  source 1..80: mol_type = other DNA
cattttcaccccaatttctacccgacctccaactcagggtcaaccagagaaagccaaatctgctaccccaaccaatgact

SEQ ID NO: 119369 - DNA, 80 bp, synthetic construct
  misc_feature 1..80: note = Artificially Synthesized Probe
  source 1..80: mol_type = other DNA
ccacgtatttccatgccagccctgggtgcccacatctctcatctatcaccctccttgggttgaaacacccgtgtctcagc

SEQ ID NO: 119370 - DNA, 80 bp, synthetic construct
  misc_feature 1..80: note = Artificially Synthesized Probe
  source 1..80: mol_type = other DNA
gcctggcctgaggtaagcctggaactcagagagccccaatcctctccggggaacgtgggtctcgtgtagagtaagcttgg

SEQ ID NO: 119371 - DNA, 80 bp, synthetic construct; identical to SEQ ID NO: 38929
  misc_feature 1..80: note = Artificially Synthesized Probe
  source 1..80: mol_type = other DNA

SEQ ID NO: 119372 - DNA, 80 bp, synthetic construct
  misc_feature 1..80: note = Artificially Synthesized Probe
  source 1..80: mol_type = other DNA
cccagggcctgggggctttcatgggagttactgaagggaaaatcacacaggtgctgacccgagacagggctgaggacctg

SEQ ID NO: 119373 - DNA, 80 bp, synthetic construct
  misc_feature 1..80: note = Artificially Synthesized Probe
  source 1..80: mol_type = other DNA
tctccaggacagggaaggctgggcctcccttcagggtgggggatgcgggctgccccatgctcacagcccccatctcctct

SEQ ID NO: 119374 - DNA, 80 bp, synthetic construct; identical to SEQ ID NO: 38654
  misc_feature 1..80: note = Artificially Synthesized Probe
  source 1..80: mol_type = other DNA

SEQ ID NO: 119375 - DNA, 80 bp, synthetic construct
  misc_feature 1..80: note = Artificially Synthesized Probe
  source 1..80: mol_type = other DNA
atgcggggtgccccgtgctcacagcacgcatctcctctcccaccactctcccgcttctccaggacgggaaggctgggcct

SEQ ID NO: 119376 - DNA, 80 bp, synthetic construct; identical to SEQ ID NO: 38930
  misc_feature 1..80: note = Artificially Synthesized Probe
  source 1..80: mol_type = other DNA

SEQ ID NO: 119377 - DNA, 80 bp, synthetic construct
  misc_feature 1..80: note = Artificially Synthesized Probe
  source 1..80: mol_type = other DNA
ccctccatccctgcacccccctacccctgtactcccctccctccacccctgcactcccctccctccacccctgcactccc

SEQ ID NO: 119378 - DNA, 80 bp, synthetic construct
  misc_feature 1..80: note = Artificially Synthesized Probe
  source 1..80: mol_type = other DNA
cagagtttgcagcaagtgcacagggaggtggcaggcggggaggtggggctcggtgccatgcttaggattgccctgctctc

SEQ ID NO: 119379 - DNA, 80 bp, synthetic construct; identical to SEQ ID NO: 38931
  misc_feature 1..80: note = Artificially Synthesized Probe
  source 1..80: mol_type = other DNA

SEQ ID NO: 119380 - DNA, 80 bp, synthetic construct
  misc_feature 1..80: note = Artificially Synthesized Probe
  source 1..80: mol_type = other DNA
atgtgtgtgtgcatgcttgctgcacatatgtatagtgtgcatatgtgtgaacaggcacgtgtgtgcatgtatgccacatg

SEQ ID NO: 119381 - DNA, 80 bp, synthetic construct
  misc_feature 1..80: note = Artificially Synthesized Probe
  source 1..80: mol_type = other DNA
gtgtgtgcatacatgcacacatgatgtacatatagcacacacatgagcatacgtgtatgtgcacatatgtgaatgtgtgt

SEQ ID NO: 119382 - DNA, 80 bp, synthetic construct
  misc_feature 1..80: note = Artificially Synthesized Probe
  source 1..80: mol_type = other DNA
ctcctagtcaggaaaactaaagaagtcacatgacttgtctgagatcacacagcagagaaggaccctgggtcttgactccc

SEQ ID NO: 119383 - DNA, 80 bp, synthetic construct
  misc_feature 1..80: note = Artificially Synthesized Probe
  source 1..80: mol_type = other DNA
gtgccgcaggtcccccatggatggaatccctggggcaaaaggtccttttggcaagagtgaggaagtcaagggtgaacatc

SEQ ID NO: 119384 - DNA, 80 bp, synthetic construct
  misc_feature 1..80: note = Artificially Synthesized Probe
  source 1..80: mol_type = other DNA
cctaacccatcagctcctaatgacctcagatccaacagtccacctttaaaataaatattttctaatgccaccccgatatt

SEQ ID NO: 119385 - DNA, 80 bp, synthetic construct
  misc_feature 1..80: note = Artificially Synthesized Probe
  source 1..80: mol_type = other DNA
gccaggaaataaaattcacagatactagaaactttcagtatacccacccccaatataattccttctaactgttaaggtgc

SEQ ID NO: 119386 - DNA, 80 bp, synthetic construct; identical to SEQ ID NO: 38932
  misc_feature 1..80: note = Artificially Synthesized Probe
  source 1..80: mol_type = other DNA

SEQ ID NO: 119387 - DNA, 80 bp, synthetic construct
  misc_feature 1..80: note = Artificially Synthesized Probe
  source 1..80: mol_type = other DNA
ggcccatccgagccagaaacgcctgggcatccctccaggcctgacttccaggctatggtaagctcagaggctaaggtggc

SEQ ID NO: 119388 - DNA, 80 bp, synthetic construct
  misc_feature 1..80: note = Artificially Synthesized Probe
  source 1..80: mol_type = other DNA
agacaaactagaagaaggacattgtttacaacacaaccgtctgcatctccatgtgaaatgctcatacctacacagatgga

SEQ ID NO: 119389 - DNA, 80 bp, synthetic construct
  misc_feature 1..80: note = Artificially Synthesized Probe
  source 1..80: mol_type = other DNA
actggagagtgctgcccttaggacactgtagaacaaccctccactgacagcaatcagaacactacacaacagaaacaata

SEQ ID NO: 119390 - DNA, 80 bp, synthetic construct
  misc_feature 1..80: note = Artificially Synthesized Probe
  source 1..80: mol_type = other DNA
tgctgcagacacacaaccatgtggcacaggcgactaaaaccccagtacagctgacatctttcaggctgaaggattcaggg

SEQ ID NO: 119391 - DNA, 80 bp, synthetic construct
  misc_feature 1..80: note = Artificially Synthesized Probe
  source 1..80: mol_type = other DNA
caaaagcttaaatgagtgatctgagactttaaccactgaaggcaagatggagattccagtttgagtctaatcatagtagc

SEQ ID NO: 119392 - DNA, 80 bp, synthetic construct; identical to SEQ ID NO: 38933
  misc_feature 1..80: note = Artificially Synthesized Probe
  source 1..80: mol_type = other DNA

SEQ ID NO: 119393 - DNA, 80 bp, synthetic construct
  misc_feature 1..80: note = Artificially Synthesized Probe
  source 1..80: mol_type = other DNA
gtaggataaaagtgacgaagacaagactcagggaacttgacaaatcaatgacatttgtctaatctgaagaagaaagaaaa

SEQ ID NO: 119394 - DNA, 80 bp, synthetic construct
  misc_feature 1..80: note = Artificially Synthesized Probe
  source 1..80: mol_type = other DNA
gattcaagaaactcagcaagtacttctagttccaggaaagatggagtacacacaccacactctgtttccctagttaacgc

SEQ ID NO: 119395 - DNA, 80 bp, synthetic construct; identical to SEQ ID NO: 38934
  misc_feature 1..80: note = Artificially Synthesized Probe
  source 1..80: mol_type = other DNA

SEQ ID NO: 119396 - DNA, 80 bp, synthetic construct
  misc_feature 1..80: note = Artificially Synthesized Probe
  source 1..80: mol_type = other DNA
tttggcctctctctctctttttctgccatttgaccgtggatgaaggtccatttgcagtaagtttatggcaaagcagggaa

SEQ ID NO: 119397 - DNA, 80 bp, synthetic construct
  misc_feature 1..80: note = Artificially Synthesized Probe
  source 1..80: mol_type = other DNA
tgaaggtccatttgcagtaagtttatggcaaagcagggaaattaattaaggtcccagtttttcatccagaagcctgataa

SEQ ID NO: 119398 - DNA, 80 bp, synthetic construct
  misc_feature 1..80: note = Artificially Synthesized Probe
  source 1..80: mol_type = other DNA
ctgacctcgaacagcatatcaatgatattcagaaaagaactaagagataaaaaccaccaccatctccaagcttggcgagt

SEQ ID NO: 119399 - DNA, 80 bp, synthetic construct
  misc_feature 1..80: note = Artificially Synthesized Probe
  source 1..80: mol_type = other DNA
ctcatgtcaacctattccatcgggtttaaacaagacccagagtatcttaacaaaatattccaaatgtccatgatacaggt

SEQ ID NO: 119400 - DNA, 80 bp, synthetic construct
  misc_feature 1..80: note = Artificially Synthesized Probe
  source 1..80: mol_type = other DNA
agtatcttaacaaaatattccaaatgtccatgatacaggtttcatttacttggcataccaagaactagaaatatgccaac

SEQ ID NO: 119401 - DNA, 80 bp, synthetic construct
  misc_feature 1..80: note = Artificially Synthesized Probe
  source 1..80: mol_type = other DNA
tgtctgggcacatcaaggaaggtgggactctagggcataacagctttcctgggattacaatttaaatgagccaaatcttc

SEQ ID NO: 119402 - DNA, 80 bp, synthetic construct
  misc_feature 1..80: note = Artificially Synthesized Probe
  source 1..80: mol_type = other DNA
tcaatgcatcctaaacaggattagctcaaaaaatccattcccagacacgtccaaatcaaattgctgaagactaaaaacga

SEQ ID NO: 119403 - DNA, 80 bp, synthetic construct; identical to SEQ ID NO: 38935
  misc_feature 1..80: note = Artificially Synthesized Probe
  source 1..80: mol_type = other DNA

SEQ ID NO: 119404 - DNA, 80 bp, synthetic construct
  misc_feature 1..80: note = Artificially Synthesized Probe
  source 1..80: mol_type = other DNA
ctttaagaggaatgccaaagataatgcttggaatggaatggatatgataccagagagcctttgaaagtcaggaataaaga

SEQ ID NO: 119405 - DNA, 80 bp, synthetic construct
  misc_feature 1..80: note = Artificially Synthesized Probe
  source 1..80: mol_type = other DNA
gtttaatacacgtgatagctacaccaaaaaagggagagaataaagcgatctatatggtggtaaggtttccatgttctact

SEQ ID NO: 119406 - DNA, 80 bp, synthetic construct
  misc_feature 1..80: note = Artificially Synthesized Probe
  source 1..80: mol_type = other DNA
taaagcgatctatatggtggtaaggtttccatgttctacttgcagtggtaaagcattaagtaaactgggaaaagctacat

SEQ ID NO: 119407 - DNA, 80 bp, synthetic construct
  misc_feature 1..80: note = Artificially Synthesized Probe
  source 1..80: mol_type = other DNA
atcgggaaagaaaaatagagaataacgtgcaaaggaaacaaatagaaaataagaaataaaatggtagatataaatactaa

SEQ ID NO: 119408 - DNA, 80 bp, synthetic construct
  misc_feature 1..80: note = Artificially Synthesized Probe
  source 1..80: mol_type = other DNA
cctcaagcaatccctccccccttggcctcccaatcagatggactttcagaaaactaaccaatgacatgcagtctataagg

SEQ ID NO: 119409 - DNA, 80 bp, synthetic construct; identical to SEQ ID NO: 38936
  misc_feature 1..80: note = Artificially Synthesized Probe
  source 1..80: mol_type = other DNA

SEQ ID NO: 119410 - DNA, 80 bp, synthetic construct
  misc_feature 1..80: note = Artificially Synthesized Probe
  source 1..80: mol_type = other DNA
tactaaaaatacaaaaagttagccgggcgaagtggcgggcgcctgtagtcccagctactcgggaggctgaggcaggagaa

SEQ ID NO: 119411 - DNA, 80 bp, synthetic construct
  misc_feature 1..80: note = Artificially Synthesized Probe
  source 1..80: mol_type = other DNA
cacgccagtcgtgaataacctaaccagtataataatacctaatgccagcataaacctacaacctaacattggaacttcaa

SEQ ID NO: 119412 - DNA, 80 bp, synthetic construct
  misc_feature 1..80: note = Artificially Synthesized Probe
  source 1..80: mol_type = other DNA
ggcaggtacctgtaatcccagctacttgagaggctgaggcaggagaatcgcttgaacccaggagatggaggttgcagtga

SEQ ID NO: 119413 - DNA, 80 bp, synthetic construct; identical to SEQ ID NO: 38937
  misc_feature 1..80: note = Artificially Synthesized Probe
  source 1..80: mol_type = other DNA

SEQ ID NO: 119414 - DNA, 80 bp, synthetic construct
  misc_feature 1..80: note = Artificially Synthesized Probe
  source 1..80: mol_type = other DNA
ctcagcaatcaacaacagaggacaagtcagcaaggctataaacacttaaaaataccatcaaaaggaccgaactgacattt

SEQ ID NO: 119415 - DNA, 80 bp, synthetic construct
  misc_feature 1..80: note = Artificially Synthesized Probe
  source 1..80: mol_type = other DNA
aaagcatggagaaggaagcaaataacaaaataaggacagcaatcaataagctaaaagcacagggagaaaggagaaaactt

SEQ ID NO: 119416 - DNA, 80 bp, synthetic construct
  misc_feature 1..80: note = Artificially Synthesized Probe
  source 1..80: mol_type = other DNA
cccaaaatgaacaggctgcaggctgcgattttaggacctcagggcctgcggcaggcatcttgttaaatacacctcatgta

SEQ ID NO: 119417 - DNA, 80 bp, synthetic construct
  misc_feature 1..80: note = Artificially Synthesized Probe
  source 1..80: mol_type = other DNA
agaagacacaaattactaaaagagatgatatcactacagggctgactttaaacagataatgagggaatactgtgaccaag

SEQ ID NO: 119418 - DNA, 80 bp, synthetic construct
  misc_feature 1..80: note = Artificially Synthesized Probe
  source 1..80: mol_type = other DNA
tggagtgcagtggtgcaatctcagctcactccaaactctgcctcctgggttcaagtgagtctcctgcctcagcctcctca

SEQ ID NO: 119419 - DNA, 80 bp, synthetic construct; identical to SEQ ID NO: 38938
  misc_feature 1..80: note = Artificially Synthesized Probe
  source 1..80: mol_type = other DNA

SEQ ID NO: 119420 - DNA, 80 bp, synthetic construct
  misc_feature 1..80: note = Artificially Synthesized Probe
  source 1..80: mol_type = other DNA
aaagacagcataagacatcaatacaccaacatccctcaggaacatagacacagatccttaaaatattaggaagtcaaatc

SEQ ID NO: 119421 - DNA, 80 bp, synthetic construct
  misc_feature 1..80: note = Artificially Synthesized Probe
  source 1..80: mol_type = other DNA
aaaaacagataatcatagcaactggtgcagaaaaagcctttgaggaaattctacataggtgacagcctccccccggtgag

SEQ ID NO: 119422 - DNA, 80 bp, synthetic construct
  misc_feature 1..80: note = Artificially Synthesized Probe
  source 1..80: mol_type = other DNA
ggaggaggtggaaataaagagctttctggcccccatggtctctgacattacttgaataccatggacccataagagttagt

SEQ ID NO: 119423 - DNA, 80 bp, synthetic construct; identical to SEQ ID NO: 38939
  misc_feature 1..80: note = Artificially Synthesized Probe
  source 1..80: mol_type = other DNA

SEQ ID NO: 119424 - DNA, 80 bp, synthetic construct; identical to SEQ ID NO: 38655
  misc_feature 1..80: note = Artificially Synthesized Probe
  source 1..80: mol_type = other DNA

SEQ ID NO: 119425 - DNA, 80 bp, synthetic construct
  misc_feature 1..80: note = Artificially Synthesized Probe
  source 1..80: mol_type = other DNA
tcggctcactgcaacctctgcttcccaggttcaagtgattctcctgacttggcctcccaagtaactgggattacaggtgg

SEQ ID NO: 119426 - DNA, 80 bp, synthetic construct
  misc_feature 1..80: note = Artificially Synthesized Probe
  source 1..80: mol_type = other DNA
agccttcttcctgtgggtgtccaccctccaggggcttcctgcagaaactgtgtgcaggggtgcactccggcccctcatcc

SEQ ID NO: 119427 - DNA, 80 bp, synthetic construct
  misc_feature 1..80: note = Artificially Synthesized Probe
  source 1..80: mol_type = other DNA
ttctcctggcaaccggcctttctcgtgcggaagggactcactcctggaggccgccctcggctccgcaccccgcggctgcc

SEQ ID NO: 119428 - DNA, 80 bp, synthetic construct; identical to SEQ ID NO: 38940
  misc_feature 1..80: note = Artificially Synthesized Probe
  source 1..80: mol_type = other DNA

SEQ ID NO: 119429 - DNA, 80 bp, synthetic construct; identical to SEQ ID NO: 38627
  misc_feature 1..80: note = Artificially Synthesized Probe
  source 1..80: mol_type = other DNA

SEQ ID NO: 119430 - DNA, 80 bp, synthetic construct
  misc_feature 1..80: note = Artificially Synthesized Probe
  source 1..80: mol_type = other DNA
ctctgagctcgtttcctcactggccgcagcgggttcagggtgacagctgcagcccccgtgcgagcaggtgcaggagacat

SEQ ID NO: 119431 - DNA, 80 bp, synthetic construct
  misc_feature 1..80: note = Artificially Synthesized Probe
  source 1..80: mol_type = other DNA
gatgggaaagatcctttacctgaaaacgctcaaatgctggcctgggttctctgagccttagaggcacattttctgaaaca

SEQ ID NO: 119432 - DNA, 80 bp, synthetic construct
  misc_feature 1..80: note = Artificially Synthesized Probe
  source 1..80: mol_type = other DNA
gaatccaccgccgcctgcacgctccttccctccagctgtgtgggcaggggctgtggctacctctctaactagtctcacaa

SEQ ID NO: 119433 - DNA, 80 bp, synthetic construct
  misc_feature 1..80: note = Artificially Synthesized Probe
  source 1..80: mol_type = other DNA
cagtggccacgcagcgttgaacatattctgacatacggaattttgctttgtaagctgctttgtctttctgggaacgtgtc

SEQ ID NO: 119434 - DNA, 80 bp, synthetic construct; identical to SEQ ID NO: 38941
  misc_feature 1..80: note = Artificially Synthesized Probe
  source 1..80: mol_type = other DNA

SEQ ID NO: 119435 - DNA, 80 bp, synthetic construct
  misc_feature 1..80: note = Artificially Synthesized Probe
  source 1..80: mol_type = other DNA
ctctaagctcacctttacacagatctgcagcttgtcttatgtagatcagcacagaatgttacaaaagagaacggatacat

SEQ ID NO: 119436 - DNA, 80 bp, synthetic construct
  misc_feature 1..80: note = Artificially Synthesized Probe
  source 1..80: mol_type = other DNA
ggctggcaggtaacaaatgcttaataaatgtgactattcttatttttattcctccatgcatccctttagtagacaagtat

SEQ ID NO: 119437 - DNA, 80 bp, synthetic construct
  misc_feature 1..80: note = Artificially Synthesized Probe
  source 1..80: mol_type = other DNA
gggcaacggctgcagaaagtttgtttggaaatggttggggtcaccattggcatggtttgcctcgtccaggagaaccacga

SEQ ID NO: 119438 - DNA, 80 bp, synthetic construct
  misc_feature 1..80: note = Artificially Synthesized Probe
  source 1..80: mol_type = other DNA
ctgtaaaaagggataacaaccatatcaacccatgcagataagagtgagcatagcaggcctgtggctgctgccctgagaaa

SEQ ID NO: 119439 - DNA, 80 bp, synthetic construct
  misc_feature 1..80: note = Artificially Synthesized Probe
  source 1..80: mol_type = other DNA
ggtgtatgcaagcaaaaccccagctttccttccagaagtcgggaattgtggcacgtgccaggctgagggtgcctacgtga

SEQ ID NO: 119440 - DNA, 80 bp, synthetic construct; identical to SEQ ID NO: 38942
  misc_feature 1..80: note = Artificially Synthesized Probe
  source 1..80: mol_type = other DNA

SEQ ID NO: 119441 - DNA, 80 bp, synthetic construct
  misc_feature 1..80: note = Artificially Synthesized Probe
  source 1..80: mol_type = other DNA
gtctgtaggatgggctccttctggaggtgagagacagaactagatggatttcctaggcagactaagaatccctaagccca

SEQ ID NO: 119442 - DNA, 80 bp, synthetic construct
  misc_feature 1..80: note = Artificially Synthesized Probe
  source 1..80: mol_type = other DNA
acaatgatcgggatgtaaacccaggcattccagccggcaatggctacccgctttgggtcccctcccgttgtatgggagct

SEQ ID NO: 119443 - DNA, 80 bp, synthetic construct
  misc_feature 1..80: note = Artificially Synthesized Probe
  source 1..80: mol_type = other DNA
acttccgatccagcgaggcggcgcccattgctgctcccaattgggctagaggctcgccattgttcctgcgccagctaagt

SEQ ID NO: 119444 - DNA, 80 bp, synthetic construct; identical to SEQ ID NO: 38943
  misc_feature 1..80: note = Artificially Synthesized Probe
  source 1..80: mol_type = other DNA

SEQ ID NO: 119445 - DNA, 80 bp, synthetic construct
  misc_feature 1..80: note = Artificially Synthesized Probe
  source 1..80: mol_type = other DNA
gcctgtaatcccagcactttgggaggctgaggcaggcggatcacgaggtcaagagatcaagaccttcctggccaacatgg

SEQ ID NO: 119446 - DNA, 80 bp, synthetic construct
  misc_feature 1..80: note = Artificially Synthesized Probe
  source 1..80: mol_type = other DNA
tgttttaaacctttcccttcctaataaccccaaaacaaatgttcttttgaactagagcatgtgagagcagccgggcgtgt

SEQ ID NO: 119447 - DNA, 80 bp, synthetic construct
  misc_feature 1..80: note = Artificially Synthesized Probe
  source 1..80: mol_type = other DNA
tgggcaacagaacaagactccatcacaaaaccaaaccaaaccaaaccaaaacaaaacaaaaaaactgagttctggccggg

SEQ ID NO: 119448 - DNA, 80 bp, synthetic construct
  misc_feature 1..80: note = Artificially Synthesized Probe
  source 1..80: mol_type = other DNA
ggaggctgaggcagagttgctagaacccgggaggcggaggttgcagtgagcccagatcgcaccactgcactccagcctgg

SEQ ID NO: 119449 - DNA, 80 bp, synthetic construct
  misc_feature 1..80: note = Artificially Synthesized Probe
  source 1..80: mol_type = other DNA
tgatagaatgggctcctggtggcaataagagactggattgtaagcaagacctaagactgtgtgaggcaagggtgaagtca

SEQ ID NO: 119450 - DNA, 80 bp, synthetic construct; identical to SEQ ID NO: 38944
  misc_feature 1..80: note = Artificially Synthesized Probe
  source 1..80: mol_type = other DNA

SEQ ID NO: 119451 - DNA, 80 bp, synthetic construct
  misc_feature 1..80: note = Artificially Synthesized Probe
  source 1..80: mol_type = other DNA
tggggtggtagggtcaggggctagcattcgtttttaagttagagttagtgtaattcaaatgaaaaaggaaaaccctgcat

SEQ ID NO: 119452 - DNA, 80 bp, synthetic construct
  misc_feature 1..80: note = Artificially Synthesized Probe
  source 1..80: mol_type = other DNA
cgttcctgcttcaccttttgacatacagagcctgactgtaatgcctttaaatgtgaagcctccaccccaggtgaacatgg

SEQ ID NO: 119453 - DNA, 80 bp, synthetic construct
  misc_feature 1..80: note = Artificially Synthesized Probe
  source 1..80: mol_type = other DNA
ctgcctctggttttggctagaggcccaattcccagctcacaggttgtaaccctttataatagtctcccttctaaatttat

SEQ ID NO: 119454 - DNA, 80 bp, synthetic construct; identical to SEQ ID NO: 38945
  misc_feature 1..80: note = Artificially Synthesized Probe
  source 1..80: mol_type = other DNA

SEQ ID NO: 119455 - DNA, 80 bp, synthetic construct
  misc_feature 1..80: note = Artificially Synthesized Probe
  source 1..80: mol_type = other DNA
cagtggcctggaggcttccagctgaaggcagttgctgaggctgcaggtaccccaggagcaaatgaagggattaacctgga

SEQ ID NO: 119456 - DNA, 80 bp, synthetic construct
  misc_feature 1..80: note = Artificially Synthesized Probe
  source 1..80: mol_type = other DNA
tgcccaggggcagtggtggaggtgccggctttccaggctgcaggtcgggtgggagaggccccactgggaggagagcgtgg

SEQ ID NO: 119457 - DNA, 80 bp, synthetic construct
  misc_feature 1..80: note = Artificially Synthesized Probe
  source 1..80: mol_type = other DNA
ataaggtcatgatggtggggcccctatgatgggatttgtgcccttactaggagagataagagagtcccagtctttttctc

SEQ ID NO: 119458 - DNA, 80 bp, synthetic construct; identical to SEQ ID NO: 38946
  misc_feature 1..80: note = Artificially Synthesized Probe
  source 1..80: mol_type = other DNA

SEQ ID NO: 119459 - DNA, 80 bp, synthetic construct
  misc_feature 1..80: note = Artificially Synthesized Probe
  source 1..80: mol_type = other DNA
cagggcttccccggctttgccatgtgttccagtccctgggggtcttgccagcaggcaggctctcattcagtaggttctgg

SEQ ID NO: 119460 - DNA, 80 bp, synthetic construct
  misc_feature 1..80: note = Artificially Synthesized Probe
  source 1..80: mol_type = other DNA
agcatagaacttcagattccagggtggagtctgggattctgcattcctagcaagttcccggctgctgctgctgctgctgc

SEQ ID NO: 119461 - DNA, 80 bp, synthetic construct
  misc_feature 1..80: note = Artificially Synthesized Probe
  source 1..80: mol_type = other DNA
gagacttttcagaaaagccacaggactgagattcctgcttctcattctaggctcctaaggattatgcttaatttataaaa

SEQ ID NO: 119462 - DNA, 80 bp, synthetic construct
  misc_feature 1..80: note = Artificially Synthesized Probe
  source 1..80: mol_type = other DNA
ctcctgctctcttttcctcaatctgccaatgctcatctcatgaatatttcatctttaaagcagacagaatagagcaaagc

SEQ ID NO: 119463 - DNA, 80 bp, synthetic construct
  misc_feature 1..80: note = Artificially Synthesized Probe
  source 1..80: mol_type = other DNA
tgaatatttcatctttaaagcagacagaatagagcaaagctccaacaaagcaaaacctaagccaacgcggtagttctcaa

SEQ ID NO: 119464 - DNA, 80 bp, synthetic construct; identical to SEQ ID NO: 38947
  misc_feature 1..80: note = Artificially Synthesized Probe
  source 1..80: mol_type = other DNA

SEQ ID NO: 119465 - DNA, 80 bp, synthetic construct
  misc_feature 1..80: note = Artificially Synthesized Probe
  source 1..80: mol_type = other DNA
aattctgtggttttacaaacgtggcctgaaattagcttatttttaagccgaaggaaaatgaagcccatgtcaatcgcaga

SEQ ID NO: 119466 - DNA, 80 bp, synthetic construct; identical to SEQ ID NO: 38656
  misc_feature 1..80: note = Artificially Synthesized Probe
  source 1..80: mol_type = other DNA

SEQ ID NO: 119467 - DNA, 80 bp, synthetic construct
  misc_feature 1..80: note = Artificially Synthesized Probe
  source 1..80: mol_type = other DNA
tggtgggcagctggtctgagggccatggtgagagtcttccaccagggtttttgtggtgccaagtgtccgggtgcttggag

SEQ ID NO: 119468 - DNA, 80 bp, synthetic construct
  misc_feature 1..80: note = Artificially Synthesized Probe
  source 1..80: mol_type = other DNA
agtgtctaccttagggcaggtgcccctgggtcctctcaggtaagccacactgacctggagaggcaagaggtgaggggcat

SEQ ID NO: 119469 - DNA, 80 bp, synthetic construct
  misc_feature 1..80: note = Artificially Synthesized Probe
  source 1..80: mol_type = other DNA
ccacgtgatgggagcacgctcacctgcacaccaccatgaggcccggccatactgcattccacctgggcacatccctccca

SEQ ID NO: 119470 - DNA, 80 bp, synthetic construct; identical to SEQ ID NO: 38948
  misc_feature 1..80: note = Artificially Synthesized Probe
  source 1..80: mol_type = other DNA

SEQ ID NO: 119471 - DNA, 80 bp, synthetic construct
  misc_feature 1..80: note = Artificially Synthesized Probe
  source 1..80: mol_type = other DNA
gtggatgtgggtgaagcatcagggcctggctctgcagggaagtgtagcagaagttggacgttctcatgactcccatgccc

SEQ ID NO: 119472 - DNA, 80 bp, synthetic construct
  misc_feature 1..80: note = Artificially Synthesized Probe
  source 1..80: mol_type = other DNA
ctgagcctgttgggccatatggatgcccgatgcataatggtctgcagctgactgcaataaagagcaggcaggcagaatgc

SEQ ID NO: 119473 - DNA, 80 bp, synthetic construct
  misc_feature 1..80: note = Artificially Synthesized Probe
  source 1..80: mol_type = other DNA
actattaaaccgctttttaaaagggtggaatgtatgaaagttagatgctgacatgaaatcataccacattaaactgcatg

SEQ ID NO: 119474 - DNA, 80 bp, synthetic construct; identical to SEQ ID NO: 38949
  misc_feature 1..80: note = Artificially Synthesized Probe
  source 1..80: mol_type = other DNA

SEQ ID NO: 119475 - DNA, 80 bp, synthetic construct
  misc_feature 1..80: note = Artificially Synthesized Probe
  source 1..80: mol_type = other DNA
agatgccccagcagtcacccgcatttcagccctctgagcaaacgtgtgttctctctactagatacgtgatgctgaccagg

SEQ ID NO: 119476 - DNA, 80 bp, synthetic construct
  misc_feature 1..80: note = Artificially Synthesized Probe
  source 1..80: mol_type = other DNA
ccacacatccatccatccatccatccacgcacccatccatccacccacccatacatccacacatgcatctatcatccatc

SEQ ID NO: 119477 - DNA, 80 bp, synthetic construct
  misc_feature 1..80: note = Artificially Synthesized Probe
  source 1..80: mol_type = other DNA
acccacccacccatgcatccattcacatatccacccacccactcatgcatccacacgtgcatctatccatccacacttgc

SEQ ID NO: 119478 - DNA, 80 bp, synthetic construct
  misc_feature 1..80: note = Artificially Synthesized Probe
  source 1..80: mol_type = other DNA
ccagttggtcacatatttattagcacctgttttatgccaagttctatgcagggcaggcactgatgaatcagagagggtgt

SEQ ID NO: 119479 - DNA, 80 bp, synthetic construct
  misc_feature 1..80: note = Artificially Synthesized Probe
  source 1..80: mol_type = other DNA
tgaggtggaagggaagagggagttgggcctgccttccatccatttcctgtttcctggggaaacattatagcccacgtctg

SEQ ID NO: 119480 - DNA, 80 bp, synthetic construct; identical to SEQ ID NO: 38950
  misc_feature 1..80: note = Artificially Synthesized Probe
  source 1..80: mol_type = other DNA

SEQ ID NO: 119481 - DNA, 80 bp, synthetic construct
  misc_feature 1..80: note = Artificially Synthesized Probe
  source 1..80: mol_type = other DNA
ctaagcacctggatccagccaggactgaagctgttattcctaaacttaaaagccgttaaatttctgtttggtttcagcca

SEQ ID NO: 119482 - DNA, 80 bp, synthetic construct
  misc_feature 1..80: note = Artificially Synthesized Probe
  source 1..80: mol_type = other DNA
taaacttaaaagccgttaaatttctgtttggtttcagccaggataggcttgttttctgtcatctgtaactaagtgtcctt

SEQ ID NO: 119483 - DNA, 80 bp, synthetic construct
  misc_feature 1..80: note = Artificially Synthesized Probe
  source 1..80: mol_type = other DNA
ggataggcttgttttctgtcatctgtaactaagtgtccttaataacatggcagggtatagcctcagcaaagagatccagg

SEQ ID NO: 119484 - DNA, 80 bp, synthetic construct
  misc_feature 1..80: note = Artificially Synthesized Probe
  source 1..80: mol_type = other DNA
cttaaagcttcccaacacttttcttgaatgacattttgtaccttatatcctgaactgctctgaaattgggaggaagtaga

SEQ ID NO: 119485 - DNA, 80 bp, synthetic construct; identical to SEQ ID NO: 38951
  misc_feature 1..80: note = Artificially Synthesized Probe
  source 1..80: mol_type = other DNA

SEQ ID NO: 119486 - DNA, 80 bp, synthetic construct
  misc_feature 1..80: note = Artificially Synthesized Probe
  source 1..80: mol_type = other DNA
gatgatgttatggctgatcatccataattggaagcagagtggacaatgtgcatgtccttaaaagagggaatgttttcttg

SEQ ID NO: 119487 - DNA, 80 bp, synthetic construct
  misc_feature 1..80: note = Artificially Synthesized Probe
  source 1..80: mol_type = other DNA
ggacaatgtgcatgtccttaaaagagggaatgttttcttgaacctttcgctcttcctctattggaacgcagatacaatgg

SEQ ID NO: 119488 - DNA, 80 bp, synthetic construct
  misc_feature 1..80: note = Artificially Synthesized Probe
  source 1..80: mol_type = other DNA
aagcagtgtgccctgtgctagagaaatcttgccactgctctgcatcctcagcaaatcacaagggagtcaccaaatcgagg

SEQ ID NO: 119489 - DNA, 80 bp, synthetic construct
  misc_feature 1..80: note = Artificially Synthesized Probe
  source 1..80: mol_type = other DNA
ccctctgtcttctttaatatgacagagaaatatgcctctgtgtcatgtaagccatgttctttagttgtttttctgtcaca

SEQ ID NO: 119490 - DNA, 80 bp, synthetic construct
  misc_feature 1..80: note = Artificially Synthesized Probe
  source 1..80: mol_type = other DNA
aatttgaaagcatcttatttgatgctttcgaattacagaacatttccctcaaacacctccaggccctggtttaagtcact

SEQ ID NO: 119491 - DNA, 80 bp, synthetic construct
  misc_feature 1..80: note = Artificially Synthesized Probe
  source 1..80: mol_type = other DNA
ggtaggcagggattgctcctcgcttgttaaaatgtacctgtcgattttcctcttgtttcataacaactccattttgtcac

SEQ ID NO: 119492 - DNA, 80 bp, synthetic construct; identical to SEQ ID NO: 38952
  misc_feature 1..80: note = Artificially Synthesized Probe
  source 1..80: mol_type = other DNA

SEQ ID NO: 119493 - DNA, 80 bp, synthetic construct
  misc_feature 1..80: note = Artificially Synthesized Probe
  source 1..80: mol_type = other DNA
gaaaatggacatgggcgctgggcttttgaactgaaggctggctgtagagatgatgttaggccaagcagctgggagagcct

SEQ ID NO: 119494 - DNA, 80 bp, synthetic construct
  misc_feature 1..80: note = Artificially Synthesized Probe
  source 1..80: mol_type = other DNA
attcccaggtaggcacacccaaaagaaaaagaaggaaaaacaggtaagcatatccttacatatggacgttcacagccgca

SEQ ID NO: 119495 - DNA, 80 bp, synthetic construct
  misc_feature 1..80: note = Artificially Synthesized Probe
  source 1..80: mol_type = other DNA
tggcactgagtgaaggatgccagtcacaaaggccatgctggaggatttcattgataggaaatgcacaggaaagggaatct

SEQ ID NO: 119496 - DNA, 80 bp, synthetic construct; identical to SEQ ID NO: 38953
  misc_feature 1..80: note = Artificially Synthesized Probe
  source 1..80: mol_type = other DNA

SEQ ID NO: 119497 - DNA, 80 bp, synthetic construct
  misc_feature 1..80: note = Artificially Synthesized Probe
  source 1..80: mol_type = other DNA
tggggtgggggggctgaggatgttgctgaatttcttggagcctgtttccttctctgtaaagtggcgacagctgcacatcc

SEQ ID NO: 119498 - DNA, 80 bp, synthetic construct
  misc_feature 1..80: note = Artificially Synthesized Probe
  source 1..80: mol_type = other DNA
atggaggaagtcgtggacagggaggataaagtccccagcatcacctgagagataggcaagaatagagctccccaaatcag

SEQ ID NO: 119499 - DNA, 80 bp, synthetic construct
  misc_feature 1..80: note = Artificially Synthesized Probe
  source 1..80: mol_type = other DNA
cctgcaggagtgagggccggaaggaggggccatctctaaccactttggcatctcaggagtctgtggggcacacaccacag

SEQ ID NO: 119500 - DNA, 80 bp, synthetic construct
  misc_feature 1..80: note = Artificially Synthesized Probe
  source 1..80: mol_type = other DNA
tgggagccagccccattgaggggcagagtgcccagctgtttgcctgttgactcttcagaaccttctgggggaaagcagca

SEQ ID NO: 119501 - DNA, 80 bp, synthetic construct
  misc_feature 1..80: note = Artificially Synthesized Probe
  source 1..80: mol_type = other DNA
cctggagatggagggaggaggcgggcagtggtggctgcaggggtgtgagggtgaggccaaggacttggctgctgaggcct

SEQ ID NO: 119502 - DNA, 80 bp, synthetic construct; identical to SEQ ID NO: 38954
  misc_feature 1..80: note = Artificially Synthesized Probe
  source 1..80: mol_type = other DNA

SEQ ID NO: 119503 - DNA, 80 bp, synthetic construct
  misc_feature 1..80: note = Artificially Synthesized Probe
  source 1..80: mol_type = other DNA
gaatgaatgggtgggtgggtggttgagtgaatgactcgcctgagaagttccagttccggtctccttcagcggagcgagtg

SEQ ID NO: 119504 - DNA, 80 bp, synthetic construct
  misc_feature 1..80: note = Artificially Synthesized Probe
  source 1..80: mol_type = other DNA
aggatccaggagaaatgccaggagcttcaggaacaacaaataggtcaggtcgccactggggttttctatctgtgccagag

SEQ ID NO: 119505 - DNA, 80 bp, synthetic construct
  misc_feature 1..80: note = Artificially Synthesized Probe
  source 1..80: mol_type = other DNA
gcacatgtacacatgtgtaaatgtgagggtgtacgtgtgctgagcacaagtgaagcatgtgcagcatgtgtgtagtatgt

SEQ ID NO: 119506 - DNA, 80 bp, synthetic construct; identical to SEQ ID NO: 38955
  misc_feature 1..80: note = Artificially Synthesized Probe
  source 1..80: mol_type = other DNA

SEQ ID NO: 119507 - DNA, 80 bp, synthetic construct
  misc_feature 1..80: note = Artificially Synthesized Probe
  source 1..80: mol_type = other DNA
ttgtgttgagcatgtaccttcccagtggcccacggacagtgtgacctgggccctctggctccctctgattctggtcgcaa

SEQ ID NO: 119508 - DNA, 80 bp, synthetic construct
  misc_feature 1..80: note = Artificially Synthesized Probe
  source 1..80: mol_type = other DNA
ggctgtgtctcctgctctttgcctctggtgtcctcctgggaatcagcaccaccagaccagcctggtctctgatagtagga

SEQ ID NO: 119509 - DNA, 80 bp, synthetic construct
  misc_feature 1..80: note = Artificially Synthesized Probe
  source 1..80: mol_type = other DNA
gtagagaccagctgtccagctgtgttaacactgaggcccccagctggcctgaaaatgcccacctggacagaagccactgt

SEQ ID NO: 119510 - DNA, 80 bp, synthetic construct; identical to SEQ ID NO: 38956
  misc_feature 1..80: note = Artificially Synthesized Probe
  source 1..80: mol_type = other DNA

SEQ ID NO: 119511 - DNA, 80 bp, synthetic construct
  misc_feature 1..80: note = Artificially Synthesized Probe
  source 1..80: mol_type = other DNA
agaagttaacaggcacagttaatctgtgcacagatctgcaggaccctggtagtcaataagagatccctccttctctcctt

SEQ ID NO: 119512 - DNA, 80 bp, synthetic construct
  misc_feature 1..80: note = Artificially Synthesized Probe
  source 1..80: mol_type = other DNA
ggaccacaggcatgtgccatcacacctggctaatttttttgtatttttggtagagatgagttttcatcatgttgcccagg

SEQ ID NO: 119513 - DNA, 80 bp, synthetic construct; identical to SEQ ID NO: 38657
  misc_feature 1..80: note = Artificially Synthesized Probe
  source 1..80: mol_type = other DNA

SEQ ID NO: 119514 - DNA, 80 bp, synthetic construct
  misc_feature 1..80: note = Artificially Synthesized Probe
  source 1..80: mol_type = other DNA
cagagacatggagggccaggcaccttgtgaccacatgcacaagtgaccagcacacagaagtggtgggggcagctgggtcc

SEQ ID NO: 119515 - DNA, 80 bp, synthetic construct
  misc_feature 1..80: note = Artificially Synthesized Probe
  source 1..80: mol_type = other DNA
tgggtgggtatccatcgggtcggacgatggctccaggggatctggcagtttttggcagttacttcacaggacagaggctc

SEQ ID NO: 119516 - DNA, 80 bp, synthetic construct; identical to SEQ ID NO: 38957
  misc_feature 1..80: note = Artificially Synthesized Probe
  source 1..80: mol_type = other DNA

SEQ ID NO: 119517 - DNA, 80 bp, synthetic construct
  misc_feature 1..80: note = Artificially Synthesized Probe
  source 1..80: mol_type = other DNA
taagctgtgagaccccgggcaaaatgacaaagagccccttgtttaaaatgattcagagtctccgggtgctgacagcagaa

SEQ ID NO: 119518 - DNA, 80 bp, synthetic construct
  misc_feature 1..80: note = Artificially Synthesized Probe
  source 1..80: mol_type = other DNA
cacttgaggtcaggagtttgagaccagcctggccaacatggtgaaatcccatctccaagaaaaatacaaaaattagctgg

SEQ ID NO: 119519 - DNA, 80 bp, synthetic construct
  misc_feature 1..80: note = Artificially Synthesized Probe
  source 1..80: mol_type = other DNA
tattattccatgcctctgaaagagtgaaggacaggccatcctcacatatgcctgattatactgactatatcatgttgaaa

SEQ ID NO: 119520 - DNA, 80 bp, synthetic construct
  misc_feature 1..80: note = Artificially Synthesized Probe
  source 1..80: mol_type = other DNA
ctcacatatgcctgattatactgactatatcatgttgaaacattggagaaactatagtttcagaaagggtgagctgacct

SEQ ID NO: 119521 - DNA, 80 bp, synthetic construct; identical to SEQ ID NO: 38958
  misc_feature 1..80: note = Artificially Synthesized Probe
  source 1..80: mol_type = other DNA

SEQ ID NO: 119522 - DNA, 80 bp, synthetic construct
  misc_feature 1..80: note = Artificially Synthesized Probe
  source 1..80: mol_type = other DNA
tcttgcttgggtcacttctctgcatttcgctctcttgcagaagatccccatgtatatgtaaaaccaatacaattggtatg

SEQ ID NO: 119523 - DNA, 80 bp, synthetic construct
  misc_feature 1..80: note = Artificially Synthesized Probe
  source 1..80: mol_type = other DNA
tccccagggctgtgggcaggtcttatctttactgagctgccaagagctgaaccagagagaggccttctagaacttgtagg

SEQ ID NO: 119524 - DNA, 80 bp, synthetic construct
  misc_feature 1..80: note = Artificially Synthesized Probe
  source 1..80: mol_type = other DNA
gtgtgcttggaccctggtggactggtcctggcctgcaggctctgagtcacacaccttccaagggctagagtctgaaggta

SEQ ID NO: 119525 - DNA, 80 bp, synthetic construct
  misc_feature 1..80: note = Artificially Synthesized Probe
  source 1..80: mol_type = other DNA
cctaaagacaagagcaaagctttgagatgatgaggccgttcctgaagcgttattcacaagagggaaacatgcgaacaact

SEQ ID NO: 119526 - DNA, 80 bp, synthetic construct; identical to SEQ ID NO: 38959
  misc_feature 1..80: note = Artificially Synthesized Probe
  source 1..80: mol_type = other DNA

SEQ ID NO: 119527 - DNA, 80 bp, synthetic construct
  misc_feature 1..80: note = Artificially Synthesized Probe
  source 1..80: mol_type = other DNA
gcctcagtggtgactatgaacgtgggatagactcaggagtgattttaattttcttccttatacctttctttattttccaa

SEQ ID NO: 119528 - DNA, 80 bp, synthetic construct
  misc_feature 1..80: note = Artificially Synthesized Probe
  source 1..80: mol_type = other DNA
gtctaatacccactaagatgcctataacgataacaacaaaccagataataggtgttggcgaagatgatggggaaaactgg

SEQ ID NO: 119529 - DNA, 80 bp, synthetic construct
  misc_feature 1..80: note = Artificially Synthesized Probe
  source 1..80: mol_type = other DNA
tatacccaagagaagtggaaacaggtgttccaacaaaccatgcacacaaatgttcacagcagccaaaaactggaaacaac

SEQ ID NO: 119530 - DNA, 80 bp, synthetic construct; identical to SEQ ID NO: 38960
  misc_feature 1..80: note = Artificially Synthesized Probe
  source 1..80: mol_type = other DNA

SEQ ID NO: 119531 - DNA, 80 bp, synthetic construct
  misc_feature 1..80: note = Artificially Synthesized Probe
  source 1..80: mol_type = other DNA
aagcaattctcctgcctccacctcctgagtagctgggactacaggtgcataccaccatacccagctaatttttgtatttt

SEQ ID NO: 119532 - DNA, 80 bp, synthetic construct
  misc_feature 1..80: note = Artificially Synthesized Probe
  source 1..80: mol_type = other DNA
gtgaattctaatgggtacaaaatttcttttggggtgatgcaaatgctctgagattagagagtggtgatgtttgcacaatc

SEQ ID NO: 119533 - DNA, 80 bp, synthetic construct
  misc_feature 1..80: note = Artificially Synthesized Probe
  source 1..80: mol_type = other DNA
gaaaagaaaaaaaggttggtgtcctgtgtgaattccttcggatcacagaataatataaaactaaacaggcgagggttaac

SEQ ID NO: 119534 - DNA, 80 bp, synthetic construct; identical to SEQ ID NO: 38961
  misc_feature 1..80: note = Artificially Synthesized Probe
  source 1..80: mol_type = other DNA

SEQ ID NO: 119535 - DNA, 80 bp, synthetic construct
  misc_feature 1..80: note = Artificially Synthesized Probe
  source 1..80: mol_type = other DNA
cactagggcaggtgctcagagaacacttaaagactaaacaaggattttacagatggagaactgaaaacctgggatcacta

SEQ ID NO: 119536 - DNA, 80 bp, synthetic construct
  misc_feature 1..80: note = Artificially Synthesized Probe
  source 1..80: mol_type = other DNA
cagccttggcaacatggtgaaaccccgtctctactaaaaacataaaaattagctgggggcattggcacgtgtttgtaatc

SEQ ID NO: 119537 - DNA, 80 bp, synthetic construct
  misc_feature 1..80: note = Artificially Synthesized Probe
  source 1..80: mol_type = other DNA
tgaatgagaaaaaattattttgcagactgctttgattcaattaaccactttgaggtatctggaggttgcgtctgctgaag

SEQ ID NO: 119538 - DNA, 80 bp, synthetic construct
  misc_feature 1..80: note = Artificially Synthesized Probe
  source 1..80: mol_type = other DNA
gagtgtcatccaagatgctctccttggttacatgatttgtttgagcaggagcctgccctttacacatccactctacatat

SEQ ID NO: 119539 - DNA, 80 bp, synthetic construct
  misc_feature 1..80: note = Artificially Synthesized Probe
  source 1..80: mol_type = other DNA
tgacgaagttctagcaaagatagaaaatataacacagctctgctggttcagatgcatccaaataaggttgatttaaaaag

SEQ ID NO: 119540 - DNA, 80 bp, synthetic construct; identical to SEQ ID NO: 38962
  misc_feature 1..80: note = Artificially Synthesized Probe
  source 1..80: mol_type = other DNA

SEQ ID NO: 119541 - DNA, 80 bp, synthetic construct
  misc_feature 1..80: note = Artificially Synthesized Probe
  source 1..80: mol_type = other DNA
agtgtttccactgcatgtactgggagcagcccattccttccaccttttcagggcatgacaacatcagacttctggaacac

SEQ ID NO: 119542 - DNA, 80 bp, synthetic construct
  misc_feature 1..80: note = Artificially Synthesized Probe
  source 1..80: mol_type = other DNA
aaactggacttgggggataggacaggcatgcaaagtctaaggccacagtgcatctgggttggctgaaggtaactgatacc

SEQ ID NO: 119543 - DNA, 80 bp, synthetic construct
  misc_feature 1..80: note = Artificially Synthesized Probe
  source 1..80: mol_type = other DNA
atggttttaaagacatctcattgggtaatgtaaaggtttacaataggaagggatgcacaacttgaattgtggtgagctgt

SEQ ID NO: 119544 - DNA, 80 bp, synthetic construct
  misc_feature 1..80: note = Artificially Synthesized Probe
  source 1..80: mol_type = other DNA
cctacccacctaactgggtgggtcttactagattcccacctactcacctatttatccatctactcacccactcagccacc

SEQ ID NO: 119545 - DNA, 80 bp, synthetic construct; identical to SEQ ID NO: 38963
  misc_feature 1..80: note = Artificially Synthesized Probe
  source 1..80: mol_type = other DNA

SEQ ID NO: 119546 - DNA, 80 bp, synthetic construct
  misc_feature 1..80: note = Artificially Synthesized Probe
  source 1..80: mol_type = other DNA
aggctggaagtccaaggtcaggctccttcaggggtctggagaggatcaaatccatggtgtttcttggcttgttccttcct

SEQ ID NO: 119547 - DNA, 80 bp, synthetic construct
  misc_feature 1..80: note = Artificially Synthesized Probe
  source 1..80: mol_type = other DNA
ccatccatttacccatccacctacccatccattcacccatccatctatcctcccagctacccatccattcatccacttat

SEQ ID NO: 119548 - DNA, 80 bp, synthetic construct
  misc_feature 1..80: note = Artificially Synthesized Probe
  source 1..80: mol_type = other DNA
taatccatctaacctcccactactcttcatccttccaaccctgctagcccattcatccatctgatcacccacccatccat

SEQ ID NO: 119549 - DNA, 80 bp, synthetic construct; identical to SEQ ID NO: 38964
  misc_feature 1..80: note = Artificially Synthesized Probe
  source 1..80: mol_type = other DNA

SEQ ID NO: 119550 - DNA, 80 bp, synthetic construct
  misc_feature 1..80: note = Artificially Synthesized Probe
  source 1..80: mol_type = other DNA
tacttttctatagtccaggttgagggccataccctaacacatggctgtccagacacacacaacccatgtttcctgggtat

SEQ ID NO: 119551 - DNA, 80 bp, synthetic construct
  misc_feature 1..80: note = Artificially Synthesized Probe
  source 1..80: mol_type = other DNA
ggagacataaatcaggagtcatggactctgatgtttgccttttcaatggaaaagaatccaggtcaaacccccagaacagc

SEQ ID NO: 119552 - DNA, 80 bp, synthetic construct
  misc_feature 1..80: note = Artificially Synthesized Probe
  source 1..80: mol_type = other DNA
gtaagaaagggtgaaactgagaagtcatccacagaatgcagcttggtttacagctgtgactctttgcctctgaaatagac

SEQ ID NO: 119553 - DNA, 80 bp, synthetic construct; identical to SEQ ID NO: 38965
  misc_feature 1..80: note = Artificially Synthesized Probe
  source 1..80: mol_type = other DNA

SEQ ID NO: 119554 - DNA, 80 bp, synthetic construct
  misc_feature 1..80: note = Artificially Synthesized Probe
  source 1..80: mol_type = other DNA
agctgcccattctacagtatttcatgatagcagcccaaactgactaatatagactcttccctgcctactgccctccacac

SEQ ID NO: 119555 - DNA, 80 bp, synthetic construct
  misc_feature 1..80: note = Artificially Synthesized Probe
  source 1..80: mol_type = other DNA
caccacatcctgtagcggcaggaggggctgtggagaaaaaaaggacagggttggtacccagcattaccaggttgccatag

SEQ ID NO: 119556 - DNA, 80 bp, synthetic construct; identical to SEQ ID NO: 38658
  misc_feature 1..80: note = Artificially Synthesized Probe
  source 1..80: mol_type = other DNA

SEQ ID NO: 119557 - DNA, 80 bp, synthetic construct
  misc_feature 1..80: note = Artificially Synthesized Probe
  source 1..80: mol_type = other DNA
ctattttgagggtgaacccaagcatggaagctggtccttaaaacacagagcggctgctacgaaacagcagcacatacttc

SEQ ID NO: 119558 - DNA, 80 bp, synthetic construct
  misc_feature 1..80: note = Artificially Synthesized Probe
  source 1..80: mol_type = other DNA
cgtcctcatagctattttatgttctgtgagggaacagctagtaacttctttggaagctggcttttgtggcttattaatat

SEQ ID NO: 119559 - DNA, 80 bp, synthetic construct; identical to SEQ ID NO: 38966
  misc_feature 1..80: note = Artificially Synthesized Probe
  source 1..80: mol_type = other DNA

SEQ ID NO: 119560 - DNA, 80 bp, synthetic construct
  misc_feature 1..80: note = Artificially Synthesized Probe
  source 1..80: mol_type = other DNA
tatcctcctctgatcttcaaggagctgaggcgcttggcgtccctgctgaaggcatatctctaactatggcctgcagaggt

SEQ ID NO: 119561 - DNA, 80 bp, synthetic construct
  misc_feature 1..80: note = Artificially Synthesized Probe
  source 1..80: mol_type = other DNA
ggtcggtcccatcaggactctcgctaagaagctagcacagagccattttctttctgcaggacttggacctataaggacat

SEQ ID NO: 119562 - DNA, 80 bp, synthetic construct
  misc_feature 1..80: note = Artificially Synthesized Probe
  source 1..80: mol_type = other DNA
gatccaactatgcctgatgccagacaattttaggcttctccattgtgtacactaataaattcctttcgtagggacagggg

SEQ ID NO: 119563 - DNA, 80 bp, synthetic construct
  misc_feature 1..80: note = Artificially Synthesized Probe
  source 1..80: mol_type = other DNA
accagaagcccagatttccttctctgaaaaatagaggcctggctctaaatgagtttttccaaattggagtccagaaactc

SEQ ID NO: 119564 - DNA, 80 bp, synthetic construct; identical to SEQ ID NO: 38967
  misc_feature 1..80: note = Artificially Synthesized Probe
  source 1..80: mol_type = other DNA

SEQ ID NO: 119565 - DNA, 80 bp, synthetic construct
  misc_feature 1..80: note = Artificially Synthesized Probe
  source 1..80: mol_type = other DNA
caagtcatctgaggggcatctcatgtctgtttatttggtgccaacatgtagatgataacctaaatacatgaccctatact

SEQ ID NO: 119566 - DNA, 80 bp, synthetic construct
  misc_feature 1..80: note = Artificially Synthesized Probe
  source 1..80: mol_type = other DNA
agtagctgggattacagacgcctgccaccatatctggctaattttttgtacttttagtagagacggggattcaccatgtt

SEQ ID NO: 119567 - DNA, 80 bp, synthetic construct
  misc_feature 1..80: note = Artificially Synthesized Probe
  source 1..80: mol_type = other DNA
cgcaggagatttccctcttaacagtgacctacacgttactaagtcagagagattttgaactaagcagtaactatcatccc

SEQ ID NO: 119568 - DNA, 80 bp, synthetic construct
  misc_feature 1..80: note = Artificially Synthesized Probe
  source 1..80: mol_type = other DNA
agaggcaggggctgtcagcaacgctcggtgtcttcagtccccagctggatcccccagtgtgaccaggctgggccacggct

SEQ ID NO: 119569 - DNA, 80 bp, synthetic construct; identical to SEQ ID NO: 38968
  misc_feature 1..80: note = Artificially Synthesized Probe
  source 1..80: mol_type = other DNA

SEQ ID NO: 119570 - DNA, 80 bp, synthetic construct
  misc_feature 1..80: note = Artificially Synthesized Probe
  source 1..80: mol_type = other DNA
gaacgacaatactgaacacacagttcacgattgttctggagattggaggaaaaccatgagaaacgtccggtttgaagcca

SEQ ID NO: 119571 - DNA, 80 bp, synthetic construct
  misc_feature 1..80: note = Artificially Synthesized Probe
  source 1..80: mol_type = other DNA
ccattgcttggtcatcctcaaagctgcagggcagagttttccaaacacagtcattcctacacatttatttctaaaagcag

SEQ ID NO: 119572 - DNA, 80 bp, synthetic construct
  misc_feature 1..80: note = Artificially Synthesized Probe
  source 1..80: mol_type = other DNA
acattaggtatatctcctaatgctatccttctcccctccccccaccccacaacaggccccagtgtgatgttccaaaggaa

SEQ ID NO: 119573 - DNA, 80 bp, synthetic construct
  misc_feature 1..80: note = Artificially Synthesized Probe
  source 1..80: mol_type = other DNA
atgatgagctcatgtcctttgtagggacatggatgaagctggaaaccctcattctcagcaaactatcgcaaggacaaaaa

SEQ ID NO: 119574 - DNA, 80 bp, synthetic construct
  misc_feature 1..80: note = Artificially Synthesized Probe
  source 1..80: mol_type = other DNA
ctcagcctcctgagtagctgggattacaggtgcccgctaccaagcctggctaatttttaatagagacaagattttgccat

SEQ ID NO: 119575 - DNA, 80 bp, synthetic construct; identical to SEQ ID NO: 38969
  misc_feature 1..80: note = Artificially Synthesized Probe
  source 1..80: mol_type = other DNA

SEQ ID NO: 119576 - DNA, 80 bp, synthetic construct
  misc_feature 1..80: note = Artificially Synthesized Probe
  source 1..80: mol_type = other DNA
tgcaccactgacaaaggtcttgcttctgaagtatacaaggactgaccacaaatcaatacgaaacagacaagcctgaagaa

SEQ ID NO: 119577 - DNA, 80 bp, synthetic construct
  misc_feature 1..80: note = Artificially Synthesized Probe
  source 1..80: mol_type = other DNA
actgaccacaaatcaatacgaaacagacaagcctgaagaaaaacaggcagaagacccaaactggcgcatggccaaagacg

SEQ ID NO: 119578 - DNA, 80 bp, synthetic construct
  misc_feature 1..80: note = Artificially Synthesized Probe
  source 1..80: mol_type = other DNA
tactcttacagactaaatgtctgtgaccccctctagaattcacggacccgcaatgtgatggggactttggggtgtgattg

SEQ ID NO: 119579 - DNA, 80 bp, synthetic construct; identical to SEQ ID NO: 38970
  misc_feature 1..80: note = Artificially Synthesized Probe
  source 1..80: mol_type = other DNA

SEQ ID NO: 119580 - DNA, 80 bp, synthetic construct
  misc_feature 1..80: note = Artificially Synthesized Probe
  source 1..80: mol_type = other DNA
cggactacgactgcccacggcgggacagagggacaaatccccagtgaacgacctcacagtgaaaacaagtgacccagatc

SEQ ID NO: 119581 - DNA, 80 bp, synthetic construct
  misc_feature 1..80: note = Artificially Synthesized Probe
  source 1..80: mol_type = other DNA
gtcccagcaggccacaggcgcccacggtggctcagccacctgagtcccgaactgttctccctgacaagggacttctgttg

SEQ ID NO: 119582 - DNA, 80 bp, synthetic construct
  misc_feature 1..80: note = Artificially Synthesized Probe
  source 1..80: mol_type = other DNA
gctgtgtaataagagcctgggactagtaataaaatcaggaagcaactgtgtgcgagaccagccctgggcagagacagtta

SEQ ID NO: 119583 - DNA, 80 bp, synthetic construct
  misc_feature 1..80: note = Artificially Synthesized Probe
  source 1..80: mol_type = other DNA
atgcttgttacgcgccacacagaaaaattaaaaataaaagcatcacacaggcaccaaacaggatcctcccatctattcgg

SEQ ID NO: 119584 - DNA, 80 bp, synthetic construct; identical to SEQ ID NO: 38971
  misc_feature 1..80: note = Artificially Synthesized Probe
  source 1..80: mol_type = other DNA

SEQ ID NO: 119585 - DNA, 80 bp, synthetic construct
  misc_feature 1..80: note = Artificially Synthesized Probe
  source 1..80: mol_type = other DNA
ctccgcctcccaggttcaagtgattattgtgcctcggccccccaagtagctgggactacagggcgtgcgccaccacaccg

SEQ ID NO: 119586 - DNA, 80 bp, synthetic construct
  misc_feature 1..80: note = Artificially Synthesized Probe
  source 1..80: mol_type = other DNA
ggtgtcatgttggccaggctggtctcgaactcctgacctctcaggtgatctgcccacctcagcctcccaaagtgctggga

SEQ ID NO: 119587 - DNA, 80 bp, synthetic construct
  misc_feature 1..80: note = Artificially Synthesized Probe
  source 1..80: mol_type = other DNA
agatgctgggtggggaagtcaggactcctctggcttccccatctcggtaaatgtcagggcctctgcccagagtccttcag

SEQ ID NO: 119588 - DNA, 80 bp, synthetic construct; identical to SEQ ID NO: 38972
  misc_feature 1..80: note = Artificially Synthesized Probe
  source 1..80: mol_type = other DNA

SEQ ID NO: 119589 - DNA, 80 bp, synthetic construct
  misc_feature 1..80: note = Artificially Synthesized Probe
  source 1..80: mol_type = other DNA
ccctgggggcgcctgggccccctcctaccctcgtccacacaccatcttacccccagacttgaggaggcatgaggtttgct

SEQ ID NO: 119590 - DNA, 80 bp, synthetic construct
  misc_feature 1..80: note = Artificially Synthesized Probe
  source 1..80: mol_type = other DNA
tccttttttttgccagctggccctgctccccacaaccccgccaagctccatcacccgctcagtggagcagaggcagcctg

SEQ ID NO: 119591 - DNA, 80 bp, synthetic construct
  misc_feature 1..80: note = Artificially Synthesized Probe
  source 1..80: mol_type = other DNA
cacacacaaacgtaattgcacgacatagaaagaagggtattctgtaccccgggtgtccaccacatcctcggcgcagcagt

SEQ ID NO: 119592 - DNA, 80 bp, synthetic construct
  misc_feature 1..80: note = Artificially Synthesized Probe
  source 1..80: mol_type = other DNA
tgctggaccctgccacaccttccaggggctcacatgttccaggacagggggtgcagtgacaaagcaagagaggtaacagc

SEQ ID NO: 119593 - DNA, 80 bp, synthetic construct
  misc_feature 1..80: note = Artificially Synthesized Probe
  source 1..80: mol_type = other DNA
gctgagggtggtcgcctgggaccactgatgggctggtgtcctacctgctatgcacagatgggcccgggaccagacctcta

SEQ ID NO: 119594 - DNA, 80 bp, synthetic construct; identical to SEQ ID NO: 38973
  misc_feature 1..80: note = Artificially Synthesized Probe
  source 1..80: mol_type = other DNA

SEQ ID NO: 119595 - DNA, 80 bp, synthetic construct
  misc_feature 1..80: note = Artificially Synthesized Probe
  source 1..80: mol_type = other DNA
ttcccaggtattactatcaggaagcccattccatcagtgctgttggtaacaattcttgtatgcgtatggacttttatacc

SEQ ID NO: 119596 - DNA, 80 bp, synthetic construct
  misc_feature 1..80: note = Artificially Synthesized Probe
  source 1..80: mol_type = other DNA
aagggcaccaagtgtggtgttgatttctttacatcaagaggggatgtgaggaaagaaatgaaatttcaagaactagaagg

SEQ ID NO: 119597 - DNA, 80 bp, synthetic construct; identical to SEQ ID NO: 38974
  misc_feature 1..80: note = Artificially Synthesized Probe
  source 1..80: mol_type = other DNA

SEQ ID NO: 119598 - DNA, 80 bp, synthetic construct
  misc_feature 1..80: note = Artificially Synthesized Probe
  source 1..80: mol_type = other DNA
accagcatcattgctagtcacatcactaccaccatcaatcaccatgactatcaccatcaatagaatcactaccatcatca

SEQ ID NO: 119599 - DNA, 80 bp, synthetic construct
  misc_feature 1..80: note = Artificially Synthesized Probe
  source 1..80: mol_type = other DNA
accatgactatcaccatcaatagaatcactaccatcatcaccaacaaaaacagcatcaccactatcatcaccatgaccac

SEQ ID NO: 119600 - DNA, 80 bp, synthetic construct
  misc_feature 1..80: note = Artificially Synthesized Probe
  source 1..80: mol_type = other DNA
catcatcaccatgaccaccaccagcatcaccaccatcaccaagatcaccaccaccagcatcaccaccaccagcatgacca

SEQ ID NO: 119601 - DNA, 80 bp, synthetic construct
  misc_feature 1..80: note = Artificially Synthesized Probe
  source 1..80: mol_type = other DNA
ccagcatcaccaccatcatcaccatgaccaccatgaccaccaccaccaccagcatcaccaccagcatcaccatgaccacc

SEQ ID NO: 119602 - DNA, 80 bp, synthetic construct
  misc_feature 1..80: note = Artificially Synthesized Probe
  source 1..80: mol_type = other DNA
atcaccaccatcatcaccaagaccaccaccaccagcatcaacaccatcatcaccatgaccatcaccatgaccaccaccac

SEQ ID NO: 119603 - DNA, 80 bp, synthetic construct
  misc_feature 1..80: note = Artificially Synthesized Probe
  source 1..80: mol_type = other DNA
tccaaggccacaaaatcttaacatctcagaggctggctgaccctggggatgctccagcctccaggtaaaggaaacagatg

SEQ ID NO: 119604 - DNA, 80 bp, synthetic construct; identical to SEQ ID NO: 38659
  misc_feature 1..80: note = Artificially Synthesized Probe
  source 1..80: mol_type = other DNA

SEQ ID NO: 119605 - DNA, 80 bp, synthetic construct; identical to SEQ ID NO: 38975
  misc_feature 1..80: note = Artificially Synthesized Probe
  source 1..80: mol_type = other DNA

SEQ ID NO: 119606 - DNA, 80 bp, synthetic construct
  misc_feature 1..80: note = Artificially Synthesized Probe
  source 1..80: mol_type = other DNA
acaggtcccccaccagggccattgtggatgaggactttcctcattgtgtcgtcttcttatcaatggccacagacaagaaa

SEQ ID NO: 119607 - DNA, 80 bp, synthetic construct
  misc_feature 1..80: note = Artificially Synthesized Probe
  source 1..80: mol_type = other DNA
gtttatttgaaggctcgtattaaaatttcaaaattggcatgaacaaagagttccagagtggaatcaatggacagggattg

SEQ ID NO: 119608 - DNA, 80 bp, synthetic construct
  misc_feature 1..80: note = Artificially Synthesized Probe
  source 1..80: mol_type = other DNA
ccattctgagtagcgtgatgtcgagtgccgttccgcccgggggaagtgactcatccctttgtccagcgcactcctgctgt

SEQ ID NO: 119609 - DNA, 80 bp, synthetic construct; identical to SEQ ID NO: 38976
  misc_feature 1..80: note = Artificially Synthesized Probe
  source 1..80: mol_type = other DNA

SEQ ID NO: 119610 - DNA, 80 bp, synthetic construct
  misc_feature 1..80: note = Artificially Synthesized Probe
  source 1..80: mol_type = other DNA
gcctcaccaccaccctgtcgggtccacacgatctgaaggagagatccgagaatgttatgcccattagtccttggggtgtg

SEQ ID NO: 119611 - DNA, 80 bp, synthetic construct
  misc_feature 1..80: note = Artificially Synthesized Probe
  source 1..80: mol_type = other DNA
tgggaatctggacagcctggcacacatgcttcccagacatacacaacacgtgtttccttatgaataagcggggatcataa

SEQ ID NO: 119612 - DNA, 80 bp, synthetic construct
  misc_feature 1..80: note = Artificially Synthesized Probe
  source 1..80: mol_type = other DNA
ctgactttctgatctagatcctatgcttatggctagcttctagaaacttctagagagccatggggcctattcttaaatgc

SEQ ID NO: 119613 - DNA, 80 bp, synthetic construct
  misc_feature 1..80: note = Artificially Synthesized Probe
  source 1..80: mol_type = other DNA
ctctgcagctgattgaggatcccgactccaacaggctctggtggtgcatacggcacaggacatgccaaaactacactggg

SEQ ID NO: 119614 - DNA, 80 bp, synthetic construct; identical to SEQ ID NO: 38977
  misc_feature 1..80: note = Artificially Synthesized Probe
  source 1..80: mol_type = other DNA

SEQ ID NO: 119615 - DNA, 80 bp, synthetic construct
  misc_feature 1..80: note = Artificially Synthesized Probe
  source 1..80: mol_type = other DNA
gttctacatgaatggtgctcactgatagtcaagtcttttgtttgtttcagcaactaaaatacgatttgctctggtgctgc

SEQ ID NO: 119616 - DNA, 80 bp, synthetic construct
  misc_feature 1..80: note = Artificially Synthesized Probe
  source 1..80: mol_type = other DNA
cctcatccatgggtgccaactgattacttcggaaatattttatctttgtttcttagtcaagatacatcaacaggggcacc

SEQ ID NO: 119617 - DNA, 80 bp, synthetic construct
  misc_feature 1..80: note = Artificially Synthesized Probe
  source 1..80: mol_type = other DNA
tatctttgtttcttagtcaagatacatcaacaggggcacccctgatttcaatgtgtagaattctgaggaggaaggatcaa

SEQ ID NO: 119618 - DNA, 80 bp, synthetic construct
  misc_feature 1..80: note = Artificially Synthesized Probe
  source 1..80: mol_type = other DNA
agccaaagggctcacactgctcccttctccttctagtgccccacagggcacagggcagcctcttggggaatgggtgattt

SEQ ID NO: 119619 - DNA, 80 bp, synthetic construct
  misc_feature 1..80: note = Artificially Synthesized Probe
  source 1..80: mol_type = other DNA
gtccacccagggcactgtctctccacccagggtgcataaagagggtcagctttatgggccaacggaccaggctatagcac

SEQ ID NO: 119620 - DNA, 80 bp, synthetic construct
  misc_feature 1..80: note = Artificially Synthesized Probe
  source 1..80: mol_type = other DNA
ctccaatcatttaaaaggcctcaagagcaaaattgaggtttctttgaggaagaagagattctgcatcaagtttgcagcac

SEQ ID NO: 119621 - DNA, 80 bp, synthetic construct; identical to SEQ ID NO: 38978
  misc_feature 1..80: note = Artificially Synthesized Probe
  source 1..80: mol_type = other DNA

SEQ ID NO: 119622 - DNA, 80 bp, synthetic construct
  misc_feature 1..80: note = Artificially Synthesized Probe
  source 1..80: mol_type = other DNA
gatgtgccagagcctcacacaagagggcagcgtttctccattctctctccccgtctctgcaggctgggggcaggggaccc

SEQ ID NO: 119623 - DNA, 80 bp, synthetic construct
  misc_feature 1..80: note = Artificially Synthesized Probe
  source 1..80: mol_type = other DNA
gaaaaaaacctgcactccattaagccactgaagttgtgggttcacttgtcgtagcagctgacattgagctacctaataca

SEQ ID NO: 119624 - DNA, 80 bp, synthetic construct
  misc_feature 1..80: note = Artificially Synthesized Probe
  source 1..80: mol_type = other DNA
tcagagagcctaaactccagcaggatggggtgaggacatgcatgtaattaagcaccaattttctagagcaccatcttcca

SEQ ID NO: 119625 - DNA, 80 bp, synthetic construct; identical to SEQ ID NO: 38979
  misc_feature 1..80: note = Artificially Synthesized Probe
  source 1..80: mol_type = other DNA

SEQ ID NO: 119626 - DNA, 80 bp, synthetic construct
  misc_feature 1..80: note = Artificially Synthesized Probe
  source 1..80: mol_type = other DNA
cctgatgcaggtacaggtcacagctcaagcatcagtagttacaaataatgggtcatagtccctgcccagtaactccctat

SEQ ID NO: 119627 - DNA, 80 bp, synthetic construct
  misc_feature 1..80: note = Artificially Synthesized Probe
  source 1..80: mol_type = other DNA
agtggcacaaaggctgcctagtagaccagccacttttttttcttaaaatattgtgcttataaactatctgtacaactatt

SEQ ID NO: 119628 - DNA, 80 bp, synthetic construct
  misc_feature 1..80: note = Artificially Synthesized Probe
  source 1..80: mol_type = other DNA
tgaagtcccataaacatgcagccttaagaaattacaactaaggctcaggtgagtaagcccactatatcttgaaggcataa

SEQ ID NO: 119629 - DNA, 80 bp, synthetic construct
  misc_feature 1..80: note = Artificially Synthesized Probe
  source 1..80: mol_type = other DNA
aggctcaggtgagtaagcccactatatcttgaaggcataactaccaaactattcatggaactaagctgaacttgtatcat

SEQ ID NO: 119630 - DNA, 80 bp, synthetic construct
  misc_feature 1..80: note = Artificially Synthesized Probe
  source 1..80: mol_type = other DNA
ctaccaaactattcatggaactaagctgaacttgtatcatttgaccaaccatccatccaaccaacaaaccaatcagccag

SEQ ID NO: 119631 - DNA, 80 bp, synthetic construct
  misc_feature 1..80: note = Artificially Synthesized Probe
  source 1..80: mol_type = other DNA
ccagccagctagccagccagccagccaagcaatcaatcaaccaaccaaccaaccaaccaaccaaccaaccaaccaaccaa

SEQ ID NO: 119632 - DNA, 80 bp, synthetic construct; identical to SEQ ID NO: 38980
  misc_feature 1..80: note = Artificially Synthesized Probe
  source 1..80: mol_type = other DNA

SEQ ID NO: 119633 - DNA, 80 bp, synthetic construct
  misc_feature 1..80: note = Artificially Synthesized Probe
  source 1..80: mol_type = other DNA
aggtcagggaagaaacacaggacacgctggggaatcacagacagaagccaagcagaaagaacagacagatgaatgtgctc

SEQ ID NO: 119634 - DNA, 80 bp, synthetic construct
  misc_feature 1..80: note = Artificially Synthesized Probe
  source 1..80: mol_type = other DNA
atcttccagattctatgtatatccaaagtcttctaattttcagcatcaaaaaaagctacaaaaagggccaggcatggtgg

SEQ ID NO: 119635 - DNA, 80 bp, synthetic construct
  misc_feature 1..80: note = Artificially Synthesized Probe
  source 1..80: mol_type = other DNA
tgggaagtcaaggcatgtaatgagccctgatggcaccactgcattcccacctcgatgacacagcaagaccctgactcaaa

SEQ ID NO: 119636 - DNA, 80 bp, synthetic construct
  misc_feature 1..80: note = Artificially Synthesized Probe
  source 1..80: mol_type = other DNA
ctaaatatagattgaaaacacaatattcgtgtgaaataaaacctgcatatacagagggctgacttcacatacacaggttc

SEQ ID NO: 119637 - DNA, 80 bp, synthetic construct; identical to SEQ ID NO: 38981
  misc_feature 1..80: note = Artificially Synthesized Probe
  source 1..80: mol_type = other DNA

SEQ ID NO: 119638 - DNA, 80 bp, synthetic construct
  misc_feature 1..80: note = Artificially Synthesized Probe
  source 1..80: mol_type = other DNA
gacttaaagaagctatacatacagcaaatgagcacacaaagagatgcctaatcatcatccccagaaaaatgcaaattaca

SEQ ID NO: 119639 - DNA, 80 bp, synthetic construct
  misc_feature 1..80: note = Artificially Synthesized Probe
  source 1..80: mol_type = other DNA
aaaatgggacagcactttggagaactgtgtggtagtttcttataaaatgaaaatgttatcatacaacccagcagttttct

SEQ ID NO: 119640 - DNA, 80 bp, synthetic construct
  misc_feature 1..80: note = Artificially Synthesized Probe
  source 1..80: mol_type = other DNA
caaactgtggtgtaaatacaccataaaacactagccagcaataaacatttataaactgctgtctgggcatggtggatcat

SEQ ID NO: 119641 - DNA, 80 bp, synthetic construct
  misc_feature 1..80: note = Artificially Synthesized Probe
  source 1..80: mol_type = other DNA
ggtgtggtggtgggagcctgtaatcccagctactagggaggctgaggcatgagaatcacttgaactctggagtgggagtt

SEQ ID NO: 119642 - DNA, 80 bp, synthetic construct; identical to SEQ ID NO: 38982
  misc_feature 1..80: note = Artificially Synthesized Probe
  source 1..80: mol_type = other DNA

SEQ ID NO: 119643 - DNA, 80 bp, synthetic construct
  misc_feature 1..80: note = Artificially Synthesized Probe
  source 1..80: mol_type = other DNA
gcgaccttggctcactgcaacctccacctcccaggttcaagtgattcttatgcctcggcctcccaagtagctgggattac

SEQ ID NO: 119644 - DNA, 80 bp, synthetic construct
  misc_feature 1..80: note = Artificially Synthesized Probe
  source 1..80: mol_type = other DNA
ggggctgagacagacactgggcctcccttacccttcttcttccggaccgaggcttgcaaacagaaaggggaccgccatga

SEQ ID NO: 119645 - DNA, 80 bp, synthetic construct
  misc_feature 1..80: note = Artificially Synthesized Probe
  source 1..80: mol_type = other DNA
gaaggaagggtttaatatcttatttgcagttggagacgtgggtatatacatttgtcaaaatgcactgaactagatttttc

SEQ ID NO: 119646 - DNA, 80 bp, synthetic construct; identical to SEQ ID NO: 38983
  misc_feature 1..80: note = Artificially Synthesized Probe
  source 1..80: mol_type = other DNA

SEQ ID NO: 119647 - DNA, 80 bp, synthetic construct
  misc_feature 1..80: note = Artificially Synthesized Probe
  source 1..80: mol_type = other DNA
gttctgatgttcatttttgccatctgtgttagggagaaagatggctcctccctaggatgcccaggtcctaatccctagaa

SEQ ID NO: 119648 - DNA, 80 bp, synthetic construct
  misc_feature 1..80: note = Artificially Synthesized Probe
  source 1..80: mol_type = other DNA
cctgtgaatatgctcccttaaggcaaaagggaattaaggttgcaggcagaattaaggcggcccatcagtttacttgacct

SEQ ID NO: 119649 - DNA, 80 bp, synthetic construct
  misc_feature 1..80: note = Artificially Synthesized Probe
  source 1..80: mol_type = other DNA
aggttcaagcaattttcctgcctcagcctcccgaggagctgggactacaggtgcatggcaccatgtccggctaatttttg

SEQ ID NO: 119650 - DNA, 80 bp, synthetic construct
  misc_feature 1..80: note = Artificially Synthesized Probe
  source 1..80: mol_type = other DNA
cctggccataatcacacaggttcttaaaagtggaagaagaggaggcagaagggagggttggagagatgcaatggaagaag

SEQ ID NO: 119651 - DNA, 80 bp, synthetic construct; identical to SEQ ID NO: 38984
  misc_feature 1..80: note = Artificially Synthesized Probe
  source 1..80: mol_type = other DNA

SEQ ID NO: 119652 - DNA, 80 bp, synthetic construct
  misc_feature 1..80: note = Artificially Synthesized Probe
  source 1..80: mol_type = other DNA
ttctcatctagggcacacagggtgatgctggcaggtggacgggaaaagcccacaggagagaggaggaagacaggttgctc

SEQ ID NO: 119653 - DNA, 80 bp, synthetic construct
  misc_feature 1..80: note = Artificially Synthesized Probe
  source 1..80: mol_type = other DNA
tccttccaacaaaagagtagagggagggcagccagtgtggctctgaaggtgagtgccaggagagggaggagtggtggctg

SEQ ID NO: 119654 - DNA, 80 bp, synthetic construct
  misc_feature 1..80: note = Artificially Synthesized Probe
  source 1..80: mol_type = other DNA
agggcttggaggtctggcctgtgccagtgctcagtgtgattgctgcccagtgtaaatcccgtgtggtctacctggttcaa

SEQ ID NO: 119655 - DNA, 80 bp, synthetic construct; identical to SEQ ID NO: 38985
  misc_feature 1..80: note = Artificially Synthesized Probe
  source 1..80: mol_type = other DNA

SEQ ID NO: 119656 - DNA, 80 bp, synthetic construct
  misc_feature 1..80: note = Artificially Synthesized Probe
  source 1..80: mol_type = other DNA
tggctgcccgcacaactctgtcctgtctgccctgctcgttaacctactgcctggcagtggaaaggggctttccttcttcc

SEQ ID NO: 119657 - DNA, 80 bp, synthetic construct
  misc_feature 1..80: note = Artificially Synthesized Probe
  source 1..80: mol_type = other DNA
aaatggatctgtgagccaagctcccgcttctcggttccatggccaacaaataaagcctgtgctgcttgaagctcactttt

SEQ ID NO: 119658 - DNA, 80 bp, synthetic construct
  misc_feature 1..80: note = Artificially Synthesized Probe
  source 1..80: mol_type = other DNA
ttccgagtggagcacattcccagcttctccttcatagttaagtttgggacatgtcttaactcaataccccacaataccgt

SEQ ID NO: 119659 - DNA, 80 bp, synthetic construct
  misc_feature 1..80: note = Artificially Synthesized Probe
  source 1..80: mol_type = other DNA
gccagccaggtccaggacagactcctccttgctttccagaacacacgtttgtagggcctggctggccctggcagatctga

SEQ ID NO: 119660 - DNA, 80 bp, synthetic construct; identical to SEQ ID NO: 38986
  misc_feature 1..80: note = Artificially Synthesized Probe
  source 1..80: mol_type = other DNA

SEQ ID NO: 119661 - DNA, 80 bp, synthetic construct
  misc_feature 1..80: note = Artificially Synthesized Probe
  source 1..80: mol_type = other DNA
acacacacacactcggtaccattttatataagtggtctcctcttcacattttaatcagttcaatctctcggcaatcaatt

SEQ ID NO: 119662 - DNA, 80 bp, synthetic construct
  misc_feature 1..80: note = Artificially Synthesized Probe
  source 1..80: mol_type = other DNA
gcctgttttatgccatcgatagaagagatcgaaaaagaaatctaatcaacccccaaaagtctctctctgatggctagaac

SEQ ID NO: 119663 - DNA, 80 bp, synthetic construct
  misc_feature 1..80: note = Artificially Synthesized Probe
  source 1..80: mol_type = other DNA
ttccaaagatctagaaagtcctgaattcgcaactcagcctccctctacgacgcaacggccgaatcttgccacggacaaca

SEQ ID NO: 119664 - DNA, 80 bp, synthetic construct
  misc_feature 1..80: note = Artificially Synthesized Probe
  source 1..80: mol_type = other DNA
cttcaccgatgctcagaactagagacgacaaaaagggagaggtgttagcaggggggacgtggagggcctgaggttgaaca

SEQ ID NO: 119665 - DNA, 80 bp, synthetic construct; identical to SEQ ID NO: 38987
  misc_feature 1..80: note = Artificially Synthesized Probe
  source 1..80: mol_type = other DNA

SEQ ID NO: 119666 - DNA, 80 bp, synthetic construct
  misc_feature 1..80: note = Artificially Synthesized Probe
  source 1..80: mol_type = other DNA
gaaatgatgaggtcgtaccttcccctcctaagctgggcaagaaccggaggcagatggcctggaggaaagaaaatccacct

SEQ ID NO: 119667 - DNA, 80 bp, synthetic construct; identical to SEQ ID NO: 38660
  misc_feature 1..80: note = Artificially Synthesized Probe
  source 1..80: mol_type = other DNA

SEQ ID NO: 119668 - DNA, 80 bp, synthetic construct
  misc_feature 1..80: note = Artificially Synthesized Probe
  source 1..80: mol_type = other DNA
caaaccgcgtctctactaaaaatacaaaaattagctgggcatggtggcccatgcctgtaatctcagctactcgctcagga

SEQ ID NO: 119669 - DNA, 80 bp, synthetic construct
  misc_feature 1..80: note = Artificially Synthesized Probe
  source 1..80: mol_type = other DNA
tcatctgacaatggtgtggacgtggaattatcttcacttaaaatggaagaaactgcactaaaaacctcacacagtcagca

SEQ ID NO: 119670 - DNA, 80 bp, synthetic construct; identical to SEQ ID NO: 38988
  misc_feature 1..80: note = Artificially Synthesized Probe
  source 1..80: mol_type = other DNA

SEQ ID NO: 119671 - DNA, 80 bp, synthetic construct
  misc_feature 1..80: note = Artificially Synthesized Probe
  source 1..80: mol_type = other DNA
caatgaacatccgctggaagaataaagcatgtttgtttttaaactcaactgctgagcatgggtgagggacataagcccaa

SEQ ID NO: 119672 - DNA, 80 bp, synthetic construct
  misc_feature 1..80: note = Artificially Synthesized Probe
  source 1..80: mol_type = other DNA
ggtccccatggccctactgtgataactatttctgtcataaagcttgcagtggcaaagtgaggaaggaaaatctttatatc

SEQ ID NO: 119673 - DNA, 80 bp, synthetic construct
  misc_feature 1..80: note = Artificially Synthesized Probe
  source 1..80: mol_type = other DNA
cacctcattattattataattactttttttagagacagggtctcactatgttgcccaggctggtttcaaaaccctaagct

SEQ ID NO: 119674 - DNA, 80 bp, synthetic construct
  misc_feature 1..80: note = Artificially Synthesized Probe
  source 1..80: mol_type = other DNA
tccctcctaatgtgtctaagcaaggaggaaaacaatctgatttctccacatctttaccttcttttaaattactcaggatc

SEQ ID NO: 119675 - DNA, 80 bp, synthetic construct; identical to SEQ ID NO: 38989
  misc_feature 1..80: note = Artificially Synthesized Probe
  source 1..80: mol_type = other DNA

SEQ ID NO: 119676 - DNA, 80 bp, synthetic construct
  misc_feature 1..80: note = Artificially Synthesized Probe
  source 1..80: mol_type = other DNA
tgagagggtcatctcagagcagtaaccccgggctgcaaagggaggccaaggacttgctgctgcgccaccaggagccagtg

SEQ ID NO: 119677 - DNA, 80 bp, synthetic construct
  misc_feature 1..80: note = Artificially Synthesized Probe
  source 1..80: mol_type = other DNA
ctctgtacctcggtttcctcatttatcagagcatgacaatactatctagctcataagtgtttctatgcgtgaatcggagg

SEQ ID NO: 119678 - DNA, 80 bp, synthetic construct; identical to SEQ ID NO: 38990
  misc_feature 1..80: note = Artificially Synthesized Probe
  source 1..80: mol_type = other DNA

SEQ ID NO: 119679 - DNA, 80 bp, synthetic construct
  misc_feature 1..80: note = Artificially Synthesized Probe
  source 1..80: mol_type = other DNA
agcaagagaggggtttgtgccttgagtgcctccctgacagaacatctgcgtccaggtaggaatgagtgttcctcatatgg

SEQ ID NO: 119680 - DNA, 80 bp, synthetic construct
  misc_feature 1..80: note = Artificially Synthesized Probe
  source 1..80: mol_type = other DNA
gccccagaacctcgtgagaagcggcctggccggcctcagcgccctgggccgaggaaggatgacatcactgctgtggcagc

SEQ ID NO: 119681 - DNA, 80 bp, synthetic construct
  misc_feature 1..80: note = Artificially Synthesized Probe
  source 1..80: mol_type = other DNA
gccccatcactgggatgctgagggatcccggggactcctgttctctctgtggccccacctactccatgtggaacactagg

SEQ ID NO: 119682 - DNA, 80 bp, synthetic construct
  misc_feature 1..80: note = Artificially Synthesized Probe
  source 1..80: mol_type = other DNA
gacttgcaggggaatacggtgtgataggactgactctaccacagaggatcagatgagaatcgtcccagccaaaccgaggg

SEQ ID NO: 119683 - DNA, 80 bp, synthetic construct; identical to SEQ ID NO: 38991
  misc_feature 1..80: note = Artificially Synthesized Probe
  source 1..80: mol_type = other DNA

SEQ ID NO: 119684 - DNA, 80 bp, synthetic construct
  misc_feature 1..80: note = Artificially Synthesized Probe
  source 1..80: mol_type = other DNA
cctgcctcagcagctctcttgcaaactggaaagcagcggtgattccctgtactggatgggtcaggggtggctccgacccc

SEQ ID NO: 119685 - DNA, 80 bp, synthetic construct
  misc_feature 1..80: note = Artificially Synthesized Probe
  source 1..80: mol_type = other DNA
gtttctaatgtacctctaggccatcttcaatttcaaaccatgcatggtgttcttgaatccacatatccttctgcttaaat

SEQ ID NO: 119686 - DNA, 80 bp, synthetic construct
  misc_feature 1..80: note = Artificially Synthesized Probe
  source 1..80: mol_type = other DNA
ggaggagcttcagaaaaggaggatggccttactgtccacctacctaatgtcacagagcaaaaacgctggcgccccctgtg

SEQ ID NO: 119687 - DNA, 80 bp, synthetic construct
  misc_feature 1..80: note = Artificially Synthesized Probe
  source 1..80: mol_type = other DNA
gaaccctcaggggttcactgtgtgtctgttaaataaatgaacccctaaaatgaccacgctcactgtgctacgtgctgcat

SEQ ID NO: 119688 - DNA, 80 bp, synthetic construct; identical to SEQ ID NO: 38992
  misc_feature 1..80: note = Artificially Synthesized Probe
  source 1..80: mol_type = other DNA

SEQ ID NO: 119689 - DNA, 80 bp, synthetic construct
  misc_feature 1..80: note = Artificially Synthesized Probe
  source 1..80: mol_type = other DNA
cacccagccatccagccatttcatccatccatcatctatcccattccaagcactgtgtcacatgcttgggaaacaaacaa

SEQ ID NO: 119690 - DNA, 80 bp, synthetic construct
  misc_feature 1..80: note = Artificially Synthesized Probe
  source 1..80: mol_type = other DNA
ttctgcagatgtagggatggatggccaggagatctgcacatttaacaaactcctctcatgtctcagatgcagggacttcg

SEQ ID NO: 119691 - DNA, 80 bp, synthetic construct
  misc_feature 1..80: note = Artificially Synthesized Probe
  source 1..80: mol_type = other DNA
cacagtgaaggacaaagaagagcccttgaattaaaaaaaaaaaaaaaaggagcgtcagtgggggaatcggaacatgtaca

SEQ ID NO: 119692 - DNA, 80 bp, synthetic construct
  misc_feature 1..80: note = Artificially Synthesized Probe
  source 1..80: mol_type = other DNA
tgtaagctgccttcaccagctccaatttgtgctccagtggagcaagcgtttccacctacatgccatctctgtgtgtttca

SEQ ID NO: 119693 - DNA, 80 bp, synthetic construct
  misc_feature 1..80: note = Artificially Synthesized Probe
  source 1..80: mol_type = other DNA
gagatgtaaattaaccttctgaaagagccaggagcagcagtgttatcagcaggaccccagggccaccctggggcccgtca

SEQ ID NO: 119694 - DNA, 80 bp, synthetic construct; identical to SEQ ID NO: 38993
  misc_feature 1..80: note = Artificially Synthesized Probe
  source 1..80: mol_type = other DNA

SEQ ID NO: 119695 - DNA, 80 bp, synthetic construct
  misc_feature 1..80: note = Artificially Synthesized Probe
  source 1..80: mol_type = other DNA
atctcttttcagaacagcagtcctttgccatcgatcctttgaagtgtgagttttggaaccgagctctgtcatttctgttc

SEQ ID NO: 119696 - DNA, 80 bp, synthetic construct
  misc_feature 1..80: note = Artificially Synthesized Probe
  source 1..80: mol_type = other DNA
gacctcccttctttcctttgttgaatcattctatcaaacccagggagttggacaggggaaggcccccccagagcttctgg

SEQ ID NO: 119697 - DNA, 80 bp, synthetic construct; identical to SEQ ID NO: 38994
  misc_feature 1..80: note = Artificially Synthesized Probe
  source 1..80: mol_type = other DNA

SEQ ID NO: 119698 - DNA, 80 bp, synthetic construct
  misc_feature 1..80: note = Artificially Synthesized Probe
  source 1..80: mol_type = other DNA
cctggctgccctacaggaactgccagccgcaccccagccttctccttgggcatcagtgagctccaaagcaggactcacag

SEQ ID NO: 119699 - DNA, 80 bp, synthetic construct
  misc_feature 1..80: note = Artificially Synthesized Probe
  source 1..80: mol_type = other DNA
ccggtcagaaaacactctctaactaggaacttcagctctcacttcctagaacggggttgctaacaaggccggcatcggcc

SEQ ID NO: 119700 - DNA, 80 bp, synthetic construct
  misc_feature 1..80: note = Artificially Synthesized Probe
  source 1..80: mol_type = other DNA
ctcagagagacagccaagttgatggggtaagtgtgaaggattttaaagtggcaattacaccaacctacagtgttgtaaaa

SEQ ID NO: 119701 - DNA, 80 bp, synthetic construct
  misc_feature 1..80: note = Artificially Synthesized Probe
  source 1..80: mol_type = other DNA
tgaaattataaaactcaaaagacggacttaacagctacagggacatttcaaaggaaagggtaagtgaacttaaacaataa

SEQ ID NO: 119702 - DNA, 80 bp, synthetic construct; identical to SEQ ID NO: 38995
  misc_feature 1..80: note = Artificially Synthesized Probe
  source 1..80: mol_type = other DNA

SEQ ID NO: 119703 - DNA, 80 bp, synthetic construct
  misc_feature 1..80: note = Artificially Synthesized Probe
  source 1..80: mol_type = other DNA
cagctggggaaggcgggatttgaaccgggcctactgacctctaagggccgcaccttccacccatgccactccaatggcaa

SEQ ID NO: 119704 - DNA, 80 bp, synthetic construct
  misc_feature 1..80: note = Artificially Synthesized Probe
  source 1..80: mol_type = other DNA
ttacacaaaggtgccgggcgttccctaagcctgctgtgcagaccagactgctctgccaagcccacgctatctacacacag

SEQ ID NO: 119705 - DNA, 80 bp, synthetic construct
  misc_feature 1..80: note = Artificially Synthesized Probe
  source 1..80: mol_type = other DNA
gcttctgctgtgtgcctcagatgacaccactgccaacttccctccaaccctacttttatcttcctgcagtgcttcacaca

SEQ ID NO: 119706 - DNA, 80 bp, synthetic construct
  misc_feature 1..80: note = Artificially Synthesized Probe
  source 1..80: mol_type = other DNA
caggattctgctttgagaatctttccttccaacctggtagaattccttcctttgaacactgcaggccccgggcctcaggt

SEQ ID NO: 119707 - DNA, 80 bp, synthetic construct; identical to SEQ ID NO: 38996
  misc_feature 1..80: note = Artificially Synthesized Probe
  source 1..80: mol_type = other DNA

SEQ ID NO: 119708 - DNA, 80 bp, synthetic construct
  misc_feature 1..80: note = Artificially Synthesized Probe
  source 1..80: mol_type = other DNA
cggtgaagggggatctcgccgtccacttggggttggtatggcttgacagcgacgaagagcctcccgggcacggcactgta

SEQ ID NO: 119709 - DNA, 80 bp, synthetic construct
  misc_feature 1..80: note = Artificially Synthesized Probe
  source 1..80: mol_type = other DNA
cgcatgctgcgcctcggctggccgcatcagaactcctgatgccagacaggaagatgggaacaggccggggcagcactgtg

SEQ ID NO: 119710 - DNA, 80 bp, synthetic construct
  misc_feature 1..80: note = Artificially Synthesized Probe
  source 1..80: mol_type = other DNA
aaacatacaatggaacgctgtttagcctccatcaggaattaaactctgggccaggcgtggtgggatcacatctgtaatcc

SEQ ID NO: 119711 - DNA, 80 bp, synthetic construct
  misc_feature 1..80: note = Artificially Synthesized Probe
  source 1..80: mol_type = other DNA
gagcacctgtaatccgggctactggagaggctgaggcaggagaattgcttaaacctgggaggcggaggttgcggtgagcc

SEQ ID NO: 119712 - DNA, 80 bp, synthetic construct; identical to SEQ ID NO: 38997
  misc_feature 1..80: note = Artificially Synthesized Probe
  source 1..80: mol_type = other DNA

SEQ ID NO: 119713 - DNA, 80 bp, synthetic construct
  misc_feature 1..80: note = Artificially Synthesized Probe
  source 1..80: mol_type = other DNA
cagcactcgaatgtattccactgaacgccactgaactgtgcacttcaaaatggttctaaggtgataaatttgatgttaca

SEQ ID NO: 119714 - DNA, 80 bp, synthetic construct; identical to SEQ ID NO: 38661
  misc_feature 1..80: note = Artificially Synthesized Probe
  source 1..80: mol_type = other DNA

SEQ ID NO: 119715 - DNA, 80 bp, synthetic construct
  misc_feature 1..80: note = Artificially Synthesized Probe
  source 1..80: mol_type = other DNA
ttacaggtgcccgccaccatgcctggctactttttgtatttttagtagagatgcggtttcaccatgttcaccaggatggt

SEQ ID NO: 119716 - DNA, 80 bp, synthetic construct
  misc_feature 1..80: note = Artificially Synthesized Probe
  source 1..80: mol_type = other DNA
acatgatgaaaccctatttctacaaaaaaaaaaaaaaaaaaaaaaaattggccaggcatggtgctgtgcatttgtggttc

SEQ ID NO: 119717 - DNA, 80 bp, synthetic construct; identical to SEQ ID NO: 38998
  misc_feature 1..80: note = Artificially Synthesized Probe
  source 1..80: mol_type = other DNA

SEQ ID NO: 119718 - DNA, 80 bp, synthetic construct
  misc_feature 1..80: note = Artificially Synthesized Probe
  source 1..80: mol_type = other DNA
gaactcatatccgttcttgctgtatgtcattgattttgcacagagctatgttttcaacctgacttctacacccgacagta

SEQ ID NO: 119719 - DNA, 80 bp, synthetic construct
  misc_feature 1..80: note = Artificially Synthesized Probe
  source 1..80: mol_type = other DNA
gacagggaaagtgtccacctgcggctggcatcctccaacagggcgcctggctgcagggaagcgagtggtctctgaccatg

SEQ ID NO: 119720 - DNA, 80 bp, synthetic construct
  misc_feature 1..80: note = Artificially Synthesized Probe
  source 1..80: mol_type = other DNA
atttaacataagcctccccctgatcacctgccttcactactgtaatcacccgactcatgtgtccctgataattgccttat

SEQ ID NO: 119721 - DNA, 80 bp, synthetic construct; identical to SEQ ID NO: 38999
  misc_feature 1..80: note = Artificially Synthesized Probe
  source 1..80: mol_type = other DNA

SEQ ID NO: 119722 - DNA, 80 bp, synthetic construct
  misc_feature 1..80: note = Artificially Synthesized Probe
  source 1..80: mol_type = other DNA
agtttgctctgtgcttgtataaagttacagaagggcaatggggctgtatttagttctgattcttactccttctctcagca

SEQ ID NO: 119723 - DNA, 80 bp, synthetic construct
  misc_feature 1..80: note = Artificially Synthesized Probe
  source 1..80: mol_type = other DNA
gagcagagacagggcaggacagtggcctcttctggaacaggtgggcgtcttggatgcttacctgggctctgaggacattg

SEQ ID NO: 119724 - DNA, 80 bp, synthetic construct
  misc_feature 1..80: note = Artificially Synthesized Probe
  source 1..80: mol_type = other DNA
agcccaccgggcacggtgtggcacagcagtgcatcgatgtgcacagccaggagaattccaaaggaccactgttccccatc

SEQ ID NO: 119725 - DNA, 80 bp, synthetic construct
  misc_feature 1..80: note = Artificially Synthesized Probe
  source 1..80: mol_type = other DNA
ctgatgaacgcaacagcagcgctgggccaggcccccacctgagaggcttccctgccagcctgcccagccatctgcacgtg

SEQ ID NO: 119726 - DNA, 80 bp, synthetic construct; identical to SEQ ID NO: 39000
  misc_feature 1..80: note = Artificially Synthesized Probe
  source 1..80: mol_type = other DNA

SEQ ID NO: 119727 - DNA, 80 bp, synthetic construct
  misc_feature 1..80: note = Artificially Synthesized Probe
  source 1..80: mol_type = other DNA
ctttgcaaagggcagctcagggaccggcatggtgactgtacagggctgggccgggtgtgcgacttaccgagctcctccag

SEQ ID NO: 119728 - DNA, 80 bp, synthetic construct
  misc_feature 1..80: note = Artificially Synthesized Probe
  source 1..80: mol_type = other DNA
gtaaaataggtggtagagggtgggggtagggcgaatccccaccacctgtggttgctgggagactaatgagaaaatgcaga

SEQ ID NO: 119729 - DNA, 80 bp, synthetic construct
  misc_feature 1..80: note = Artificially Synthesized Probe
  source 1..80: mol_type = other DNA
gagctggatgcattaggccccatcaggactgaaggttagtcctagtgatgaggtcacaggtggccccagtgtcccctggg

SEQ ID NO: 119730 - DNA, 80 bp, synthetic construct
  misc_feature 1..80: note = Artificially Synthesized Probe
  source 1..80: mol_type = other DNA
aatcagatgaacaaggctgacagtagctggggcagggcagagggtgagccacagagcaggagtcacagggtctgttcaca

SEQ ID NO: 119731 - DNA, 80 bp, synthetic construct; identical to SEQ ID NO: 39001
  misc_feature 1..80: note = Artificially Synthesized Probe
  source 1..80: mol_type = other DNA

SEQ ID NO: 119732 - DNA, 80 bp, synthetic construct
  misc_feature 1..80: note = Artificially Synthesized Probe
  source 1..80: mol_type = other DNA
atcatctattcatccatccattcatccaacatccatctacccatccatccaccattcatttatccatccatctacccatc

SEQ ID NO: 119733 - DNA, 80 bp, synthetic construct
  misc_feature 1..80: note = Artificially Synthesized Probe
  source 1..80: mol_type = other DNA
tccatcttatcatttttctgaacatctattcactcatctacccaaagttcagaaagatcttgcctgaagcccagctgaac

SEQ ID NO: 119734 - DNA, 80 bp, synthetic construct
  misc_feature 1..80: note = Artificially Synthesized Probe
  source 1..80: mol_type = other DNA
agatgggctgagctagttctgaaataataataaaaccaaaaacctgacattcgagtatcctccaaatgggggagaatgtg

SEQ ID NO: 119735 - DNA, 80 bp, synthetic construct
  misc_feature 1..80: note = Artificially Synthesized Probe
  source 1..80: mol_type = other DNA
cccaaagttcagaaagatcttgcctgaagcccagctgaacacttactatccatcattggacaagttagctacctctcaaa

SEQ ID NO: 119736 - DNA, 80 bp, synthetic construct
  misc_feature 1..80: note = Artificially Synthesized Probe
  source 1..80: mol_type = other DNA
agtgcgtgtcacttgacagagaagtcaaagtgaacacagctccaaccttgaagctctgtttcttgattctctttgcagga

SEQ ID NO: 119737 - DNA, 80 bp, synthetic construct
  misc_feature 1..80: note = Artificially Synthesized Probe
  source 1..80: mol_type = other DNA
acatacggttccagccaaatgctcacatgtcttcttattcactgttaatttgaacctcaaaaagtcccacaaaggcagaa

SEQ ID NO: 119738 - DNA, 80 bp, synthetic construct; identical to SEQ ID NO: 39002
  misc_feature 1..80: note = Artificially Synthesized Probe
  source 1..80: mol_type = other DNA

SEQ ID NO: 119739 - DNA, 80 bp, synthetic construct
  misc_feature 1..80: note = Artificially Synthesized Probe
  source 1..80: mol_type = other DNA
agttcctgcatcccaaactgtccatgttttccttatgttctggccaagaacagccaggagggattctaaccaacttgttt

SEQ ID NO: 119740 - DNA, 80 bp, synthetic construct
  misc_feature 1..80: note = Artificially Synthesized Probe
  source 1..80: mol_type = other DNA
cgacatactgacctttctccattcattcattcaccagtcagttacacattcattcattcatccagcaagtactctgcggg

SEQ ID NO: 119741 - DNA, 80 bp, synthetic construct
  misc_feature 1..80: note = Artificially Synthesized Probe
  source 1..80: mol_type = other DNA
gtctcaggctgtttggctgcggtggtcagggattgtgcaggtgtgcttatgatgggaaaggacaggtgctcaggaggatc

SEQ ID NO: 119742 - DNA, 80 bp, synthetic construct
  misc_feature 1..80: note = Artificially Synthesized Probe
  source 1..80: mol_type = other DNA
gaggtcagggttagagtccacagggcctacccacaaaaggctacaagaggggacagctgggtagtgcagagagaagggca

SEQ ID NO: 119743 - DNA, 80 bp, synthetic construct; identical to SEQ ID NO: 39003
  misc_feature 1..80: note = Artificially Synthesized Probe
  source 1..80: mol_type = other DNA

SEQ ID NO: 119744 - DNA, 80 bp, synthetic construct
  misc_feature 1..80: note = Artificially Synthesized Probe
  source 1..80: mol_type = other DNA
cacagcaaacgcaggagttcccaagcccttagcgtctgtcaaatgttactaaatgctattggctgacagttgttttaaag

SEQ ID NO: 119745 - DNA, 80 bp, synthetic construct
  misc_feature 1..80: note = Artificially Synthesized Probe
  source 1..80: mol_type = other DNA
acgctgcctctgtgattctggtgacggcatctctgaggatgcacgacagggacttaggattattcacaatgtctcacctt

SEQ ID NO: 119746 - DNA, 80 bp, synthetic construct
  misc_feature 1..80: note = Artificially Synthesized Probe
  source 1..80: mol_type = other DNA
ggatcacctgacatcaggagttggagaccagcctggccaacatggcgcaaccccatctctactaaaaatacaaaacttag

SEQ ID NO: 119747 - DNA, 80 bp, synthetic construct; identical to SEQ ID NO: 39004
  misc_feature 1..80: note = Artificially Synthesized Probe
  source 1..80: mol_type = other DNA

SEQ ID NO: 119748 - DNA, 80 bp, synthetic construct
  misc_feature 1..80: note = Artificially Synthesized Probe
  source 1..80: mol_type = other DNA
catttcatccgcctgaaaccctgaacgcagctgcacctcagttcccatgccagtttcaggaaaacagaggccactgggcc

SEQ ID NO: 119749 - DNA, 80 bp, synthetic construct
  misc_feature 1..80: note = Artificially Synthesized Probe
  source 1..80: mol_type = other DNA
tcatctccaccaactgaactcaaaagcatgagtccttctttcctgctgagctgaccccacccaagcaacgttcttgaagg

SEQ ID NO: 119750 - DNA, 80 bp, synthetic construct; identical to SEQ ID NO: 39005
  misc_feature 1..80: note = Artificially Synthesized Probe
  source 1..80: mol_type = other DNA

SEQ ID NO: 119751 - DNA, 80 bp, synthetic construct
  misc_feature 1..80: note = Artificially Synthesized Probe
  source 1..80: mol_type = other DNA
cacacacacacacacacacacacacacacacacacacacacacacacacacacacacacgaaaatgagaaggaggaggca

SEQ ID NO: 119752 - DNA, 80 bp, synthetic construct
  misc_feature 1..80: note = Artificially Synthesized Probe
  source 1..80: mol_type = other DNA
gcagtgatgggcagcgagggaccctgtggtgtctccactaacagccctcacctcccagcggacactcaccatccacagat

SEQ ID NO: 119753 - DNA, 80 bp, synthetic construct
  misc_feature 1..80: note = Artificially Synthesized Probe
  source 1..80: mol_type = other DNA
cccaagtcattgtcgtgggctctggcggtaaattccagcctcacccctgtgcctgggctctcagaagtgtgggatcagct

SEQ ID NO: 119754 - DNA, 80 bp, synthetic construct
  misc_feature 1..80: note = Artificially Synthesized Probe
  source 1..80: mol_type = other DNA
gcttcgaaccagggttggcacctccatgcaggaagcagaccctgcctacagctctgagcccaggccaggaggcactgggt

SEQ ID NO: 119755 - DNA, 80 bp, synthetic construct
  misc_feature 1..80: note = Artificially Synthesized Probe
  source 1..80: mol_type = other DNA
gcgtttaggcaaataggtctggcccaagaggggtgctgagcatgtgcagagggacaggggacctggccagtcgcctccct

SEQ ID NO: 119756 - DNA, 80 bp, synthetic construct; identical to SEQ ID NO: 39006
  misc_feature 1..80: note = Artificially Synthesized Probe
  source 1..80: mol_type = other DNA

SEQ ID NO: 119757 - DNA, 80 bp, synthetic construct
  misc_feature 1..80: note = Artificially Synthesized Probe
  source 1..80: mol_type = other DNA
actgcttgggggatgttcagcaccggttgctcagcatgggctgatgggcagctgctccacccttcagacaggaggaagtg

SEQ ID NO: 119758 - DNA, 80 bp, synthetic construct
  misc_feature 1..80: note = Artificially Synthesized Probe
  source 1..80: mol_type = other DNA
taggaaagagctggtttttcaggaatagtaaggcaggcgcacaaggcatggggctgagctttgagcttcgaggatgaaca

SEQ ID NO: 119759 - DNA, 80 bp, synthetic construct
  misc_feature 1..80: note = Artificially Synthesized Probe
  source 1..80: mol_type = other DNA
aggaagcagacagctctagccaggcccccctcccctggctgtaccttgtttgcaggacattcagaccaagtgtgctcagg

SEQ ID NO: 119760 - DNA, 80 bp, synthetic construct; identical to SEQ ID NO: 39007
  misc_feature 1..80: note = Artificially Synthesized Probe
  source 1..80: mol_type = other DNA

SEQ ID NO: 119761 - DNA, 80 bp, synthetic construct
  misc_feature 1..80: note = Artificially Synthesized Probe
  source 1..80: mol_type = other DNA
cctcctacagcacagctattgctaccattgaggatgctgaatcctggacagatggatatggacagggaggctgtgaaggg

SEQ ID NO: 119762 - DNA, 80 bp, synthetic construct
  misc_feature 1..80: note = Artificially Synthesized Probe
  source 1..80: mol_type = other DNA
acctgaatggttggtcactctaccaacggttctaggtgacaaaggggacagtcttggccgagctctgggtcttgggttgg

SEQ ID NO: 119763 - DNA, 80 bp, synthetic construct
  misc_feature 1..80: note = Artificially Synthesized Probe
  source 1..80: mol_type = other DNA
ggccggagtgcagtggtgccatctcagctcactgcaacctccgcctcccaggttagagcgattctcctgtctcagtctcc

SEQ ID NO: 119764 - DNA, 80 bp, synthetic construct; identical to SEQ ID NO: 38662
  misc_feature 1..80: note = Artificially Synthesized Probe
  source 1..80: mol_type = other DNA

SEQ ID NO: 119765 - DNA, 80 bp, synthetic construct; identical to SEQ ID NO: 39008
  misc_feature 1..80: note = Artificially Synthesized Probe
  source 1..80: mol_type = other DNA

SEQ ID NO: 119766 - DNA, 80 bp, synthetic construct
  misc_feature 1..80: note = Artificially Synthesized Probe
  source 1..80: mol_type = other DNA
cgcgcatgtctacacaccagcatgcacacaggcaaatgcacacagaccaaaaaaacacaaaaatgcatgcacatacatac

SEQ ID NO: 119767 - DNA, 80 bp, synthetic construct
  misc_feature 1..80: note = Artificially Synthesized Probe
  source 1..80: mol_type = other DNA
gccagctcaagtccctggccacgctgcctttgctgtcttattagattttgtactgggtgaaggggacacactctttttaa

SEQ ID NO: 119768 - DNA, 80 bp, synthetic construct
  misc_feature 1..80: note = Artificially Synthesized Probe
  source 1..80: mol_type = other DNA
ttagattttgtactgggtgaaggggacacactctttttaaaactgtagtcagaagtcttgctaagtgtgtgaagtggaat

SEQ ID NO: 119769 - DNA, 80 bp, synthetic construct
  misc_feature 1..80: note = Artificially Synthesized Probe
  source 1..80: mol_type = other DNA
aactgtagtcagaagtcttgctaagtgtgtgaagtggaattggctgcctcgggggagccctttaatttagcttcccattg

SEQ ID NO: 119770 - DNA, 80 bp, synthetic construct; identical to SEQ ID NO: 39009
  misc_feature 1..80: note = Artificially Synthesized Probe
  source 1..80: mol_type = other DNA

SEQ ID NO: 119771 - DNA, 80 bp, synthetic construct
  misc_feature 1..80: note = Artificially Synthesized Probe
  source 1..80: mol_type = other DNA
gcatgacccaggcctgcaagactccccgcagccaggctctggaccccgagtggctttgaggccagggaggaaacaggaag

SEQ ID NO: 119772 - DNA, 80 bp, synthetic construct
  misc_feature 1..80: note = Artificially Synthesized Probe
  source 1..80: mol_type = other DNA
ctacgttctggctgtgtgacctcgggctcctcatagaggcgtctgcagcaaagaagccagcacagtgaactcctggagca

SEQ ID NO: 119773 - DNA, 80 bp, synthetic construct
  misc_feature 1..80: note = Artificially Synthesized Probe
  source 1..80: mol_type = other DNA
cgtgagaaaggcagagacctgcttgggagttggagctctgagtgcaaatccagctcccctggctgcttgggaggcaggag

SEQ ID NO: 119774 - DNA, 80 bp, synthetic construct
  misc_feature 1..80: note = Artificially Synthesized Probe
  source 1..80: mol_type = other DNA
gacatgccctctgtgctcctgccatgctggacccaggcctgcaagtgctcccctgagggttagcgctacctgagaccatc

SEQ ID NO: 119775 - DNA, 80 bp, synthetic construct
  misc_feature 1..80: note = Artificially Synthesized Probe
  source 1..80: mol_type = other DNA
accgtcatctttttggaagcaaaggtgcttttggggaaaccagaatgaatgctgctgtgactgtggaggtcacttaactg

SEQ ID NO: 119776 - DNA, 80 bp, synthetic construct; identical to SEQ ID NO: 39010
  misc_feature 1..80: note = Artificially Synthesized Probe
  source 1..80: mol_type = other DNA

SEQ ID NO: 119777 - DNA, 80 bp, synthetic construct
  misc_feature 1..80: note = Artificially Synthesized Probe
  source 1..80: mol_type = other DNA
caaaactcaggcatgaaagtttcctcaacatctgggttggaataaaatgggcttcctgctcaacttctgggccaccccaa

SEQ ID NO: 119778 - DNA, 80 bp, synthetic construct
  misc_feature 1..80: note = Artificially Synthesized Probe
  source 1..80: mol_type = other DNA
gctcccaatggtcttcgcggccccctcgggcttgctgggcatctgctgcagcagctggggtgacaggctgcggtgcgagg

SEQ ID NO: 119779 - DNA, 80 bp, synthetic construct
  misc_feature 1..80: note = Artificially Synthesized Probe
  source 1..80: mol_type = other DNA
acgccggggcctctcggaagggcactggggagaaggacatggagagaggccggtgagtgcatctgtgtcgtggtcagctg

SEQ ID NO: 119780 - DNA, 80 bp, synthetic construct; identical to SEQ ID NO: 39011
  misc_feature 1..80: note = Artificially Synthesized Probe
  source 1..80: mol_type = other DNA

SEQ ID NO: 119781 - DNA, 80 bp, synthetic construct
  misc_feature 1..80: note = Artificially Synthesized Probe
  source 1..80: mol_type = other DNA
aaccccagttttcaaaatgtgccaatatttgcaggtaaggtctttacagagatcatctgggtggagggccattagtgggg

SEQ ID NO: 119782 - DNA, 80 bp, synthetic construct
  misc_feature 1..80: note = Artificially Synthesized Probe
  source 1..80: mol_type = other DNA
gcctcaggaggaaccagccctgcgatgccctgatctcagacttgtagtccccaggactgggaggtgtaaatatctggttg

SEQ ID NO: 119783 - DNA, 80 bp, synthetic construct
  misc_feature 1..80: note = Artificially Synthesized Probe
  source 1..80: mol_type = other DNA
ctgatttctatttaacctgagcatccttaggtgcttacttttacaggcctggggcaattttcagggccaccaagagactg

SEQ ID NO: 119784 - DNA, 80 bp, synthetic construct
  misc_feature 1..80: note = Artificially Synthesized Probe
  source 1..80: mol_type = other DNA
ccacgcctgctaatttttgtatttttagtagagatgaggtttcaccatgttggccaggctggtctcgaactcccgatctt

SEQ ID NO: 119785 - DNA, 80 bp, synthetic construct; identical to SEQ ID NO: 39012
  misc_feature 1..80: note = Artificially Synthesized Probe
  source 1..80: mol_type = other DNA

SEQ ID NO: 119786 - DNA, 80 bp, synthetic construct
  misc_feature 1..80: note = Artificially Synthesized Probe
  source 1..80: mol_type = other DNA
gccttggtttacccagagctccagagcctaagacagcgagtgccctttccaagaaagaagacctcctgaaaggcagccct

SEQ ID NO: 119787 - DNA, 80 bp, synthetic construct
  misc_feature 1..80: note = Artificially Synthesized Probe
  source 1..80: mol_type = other DNA
taggctgaagccacgcttggctccgaagtttccactgcacaggaccagggctaccatctgacaaactgcaaggcaagaga

SEQ ID NO: 119788 - DNA, 80 bp, synthetic construct; identical to SEQ ID NO: 39013
  misc_feature 1..80: note = Artificially Synthesized Probe
  source 1..80: mol_type = other DNA

SEQ ID NO: 119789 - DNA, 80 bp, synthetic construct
  misc_feature 1..80: note = Artificially Synthesized Probe
  source 1..80: mol_type = other DNA
ggcagaggtcatgggggacagaggtggcgctggcagaggtcatgggggacagaggtggcgctggcagaggtcatggggga

SEQ ID NO: 119790 - DNA, 80 bp, synthetic construct
  misc_feature 1..80: note = Artificially Synthesized Probe
  source 1..80: mol_type = other DNA
gtggcactggcagaggtcacgggggacagaggtggcgctggcagagcccatgggggacagaggtgatgttggcagagttc

SEQ ID NO: 119791 - DNA, 80 bp, synthetic construct
  misc_feature 1..80: note = Artificially Synthesized Probe
  source 1..80: mol_type = other DNA
acagaggtggcgctggcagagctcacgggggacagaggtggcgctggcagagttcacgggggacagaggtggcgctggca

SEQ ID NO: 119792 - DNA, 80 bp, synthetic construct
  misc_feature 1..80: note = Artificially Synthesized Probe
  source 1..80: mol_type = other DNA
cgggggacagaggtgtcattggcagaggtcataggggacagaggtggcgttggcagagttcacgggggacagaggtggca

SEQ ID NO: 119793 - DNA, 80 bp, synthetic construct; identical to SEQ ID NO: 39014
  misc_feature 1..80: note = Artificially Synthesized Probe
  source 1..80: mol_type = other DNA

SEQ ID NO: 119794 - DNA, 80 bp, synthetic construct
  misc_feature 1..80: note = Artificially Synthesized Probe
  source 1..80: mol_type = other DNA
ctctcccgctccagaggcctgggaaggcagaaaagcctggcccagcagggtgcttacaagagtgggggccctgtccctgt

SEQ ID NO: 119795 - DNA, 80 bp, synthetic construct
  misc_feature 1..80: note = Artificially Synthesized Probe
  source 1..80: mol_type = other DNA
tgctggtagatttcactgaggacaaaggtggcactagcagagctcacaggtacagaggtggtattgacagctcccaagga

SEQ ID NO: 119796 - DNA, 80 bp, synthetic construct
  misc_feature 1..80: note = Artificially Synthesized Probe
  source 1..80: mol_type = other DNA
gcagaggaggtgctggcagagctcatgggggatggagggtgctggcagagctcacgggagacagttgtgacccggcgcac

SEQ ID NO: 119797 - DNA, 80 bp, synthetic construct; identical to SEQ ID NO: 39015
  misc_feature 1..80: note = Artificially Synthesized Probe
  source 1..80: mol_type = other DNA

SEQ ID NO: 119798 - DNA, 80 bp, synthetic construct
  misc_feature 1..80: note = Artificially Synthesized Probe
  source 1..80: mol_type = other DNA
ttggcctgggatccacagccaccacccacgagaaaaacctcatccctgggacaggtcaccgagtctgttttgttggtctt

SEQ ID NO: 119799 - DNA, 80 bp, synthetic construct
  misc_feature 1..80: note = Artificially Synthesized Probe
  source 1..80: mol_type = other DNA
tggattaaaagaccttgcaaagggctgatgagcccacagtctcagagagcgattatctttcatttacagagattacgtgt

SEQ ID NO: 119800 - DNA, 80 bp, synthetic construct
  misc_feature 1..80: note = Artificially Synthesized Probe
  source 1..80: mol_type = other DNA
ctcagagagcgattatctttcatttacagagattacgtgttggaagactgtattggtgtgagagccaaaatctcaaacag

SEQ ID NO: 119801 - DNA, 80 bp, synthetic construct
  misc_feature 1..80: note = Artificially Synthesized Probe
  source 1..80: mol_type = other DNA
cgacaatgcagccaattctctttttctgacccttgtaactgggggaggtatgcatactcttcatagcaagtgatggcatt

SEQ ID NO: 119802 - DNA, 80 bp, synthetic construct
  misc_feature 1..80: note = Artificially Synthesized Probe
  source 1..80: mol_type = other DNA
gtgaataatgtcagaaaatgggcacagacaaaggttgttatttatatacattcctaagactctgtcagaagagtatggac

SEQ ID NO: 119803 - DNA, 80 bp, synthetic construct; identical to SEQ ID NO: 39016
  misc_feature 1..80: note = Artificially Synthesized Probe
  source 1..80: mol_type = other DNA

SEQ ID NO: 119804 - DNA, 80 bp, synthetic construct
  misc_feature 1..80: note = Artificially Synthesized Probe
  source 1..80: mol_type = other DNA
agtactgaaatttctttggtgtttattttgcaacgagctggggctgggaagtaccttcctcatttctctaaagtcatacc

SEQ ID NO: 119805 - DNA, 80 bp, synthetic construct
  misc_feature 1..80: note = Artificially Synthesized Probe
  source 1..80: mol_type = other DNA
gggctgggaagtaccttcctcatttctctaaagtcatacctttttatgatatctgatttcctaaaatgagagctctctga

SEQ ID NO: 119806 - DNA, 80 bp, synthetic construct
  misc_feature 1..80: note = Artificially Synthesized Probe
  source 1..80: mol_type = other DNA
ggcaatctgcactctaaataggtggatattttcttagctggcttacatgcatttatttatacatttttttccccacaata

SEQ ID NO: 119807 - DNA, 80 bp, synthetic construct
  misc_feature 1..80: note = Artificially Synthesized Probe
  source 1..80: mol_type = other DNA
ctcggccagtgcctagcagccctctggtcactgaggactatagtcaaaacttcctttattttccctaggacttagttcct

SEQ ID NO: 119808 - DNA, 80 bp, synthetic construct; identical to SEQ ID NO: 38663
  misc_feature 1..80: note = Artificially Synthesized Probe
  source 1..80: mol_type = other DNA

SEQ ID NO: 119809 - DNA, 80 bp, synthetic construct; identical to SEQ ID NO: 39017
  misc_feature 1..80: note = Artificially Synthesized Probe
  source 1..80: mol_type = other DNA

SEQ ID NO: 119810 - DNA, 80 bp, synthetic construct
  misc_feature 1..80: note = Artificially Synthesized Probe
  source 1..80: mol_type = other DNA
ttccttaccttccttcttggtgaaggcatttaacaaagacttcattttccctctgactttggcagcggtccgctcattat

SEQ ID NO: 119811 - DNA, 80 bp, synthetic construct
  misc_feature 1..80: note = Artificially Synthesized Probe
  source 1..80: mol_type = other DNA
gcatgccagacccagcgtgctggtgacaaagcccaccccatattctgtctgtcagctgggaaccaactgcacgtagacgg

SEQ ID NO: 119812 - DNA, 80 bp, synthetic construct
  misc_feature 1..80: note = Artificially Synthesized Probe
  source 1..80: mol_type = other DNA
tcgagccccagttatccaaggaaactcgggctggtgctgggcgctccatgcgcctgtgcctaaatatactgcactgtgct

SEQ ID NO: 119813 - DNA, 80 bp, synthetic construct; identical to SEQ ID NO: 39018
  misc_feature 1..80: note = Artificially Synthesized Probe
  source 1..80: mol_type = other DNA

SEQ ID NO: 119814 - DNA, 80 bp, synthetic construct
  misc_feature 1..80: note = Artificially Synthesized Probe
  source 1..80: mol_type = other DNA
gcagctgataaaagcgagctcttcagggtcactttaggcatttcctcagcatttccaacccaacagaagaagagaaaaga

SEQ ID NO: 119815 - DNA, 80 bp, synthetic construct
  misc_feature 1..80: note = Artificially Synthesized Probe
  source 1..80: mol_type = other DNA
gaaggagcttcctgaagctacgtggagcatccaggggcaaggttctgttgccggatgcctctgctgggctgtaatttagt

SEQ ID NO: 119816 - DNA, 80 bp, synthetic construct
  misc_feature 1..80: note = Artificially Synthesized Probe
  source 1..80: mol_type = other DNA
agacgagacaagacgaggaaaaagcaaccagagcactaaagtttaattccatatggttgacacactttgtgtcaataaaa

SEQ ID NO: 119817 - DNA, 80 bp, synthetic construct
  misc_feature 1..80: note = Artificially Synthesized Probe
  source 1..80: mol_type = other DNA
gccacagaatcactgagtgtacgccctatatcagctgagcacccgaacagcatctcttggccgggtgcggtggctcacgc

SEQ ID NO: 119818 - DNA, 80 bp, synthetic construct; identical to SEQ ID NO: 39019
  misc_feature 1..80: note = Artificially Synthesized Probe
  source 1..80: mol_type = other DNA

SEQ ID NO: 119819 - DNA, 80 bp, synthetic construct
  misc_feature 1..80: note = Artificially Synthesized Probe
  source 1..80: mol_type = other DNA
ggtgacattctcaccctaccatgcatcaccgactcataaaactgagtcaaagccatttctaagacttgcattaagaaacg

SEQ ID NO: 119820 - DNA, 80 bp, synthetic construct
  misc_feature 1..80: note = Artificially Synthesized Probe
  source 1..80: mol_type = other DNA
ggggggccagaagctttccagatggtgagtgtctagttcattgccatgtgctggcctggctgcctgccctggctggcgag

SEQ ID NO: 119821 - DNA, 80 bp, synthetic construct
  misc_feature 1..80: note = Artificially Synthesized Probe
  source 1..80: mol_type = other DNA
ccggcctcacccctgcccatggaactgagctccacagggggcctctggcaccttcatcccagcagctcctgaatgggagc

SEQ ID NO: 119822 - DNA, 80 bp, synthetic construct; identical to SEQ ID NO: 39020
  misc_feature 1..80: note = Artificially Synthesized Probe
  source 1..80: mol_type = other DNA

SEQ ID NO: 119823 - DNA, 80 bp, synthetic construct
  misc_feature 1..80: note = Artificially Synthesized Probe
  source 1..80: mol_type = other DNA
aagaagccacctccctgggaccatgtgacaatcctgcatctgttctgactggtggaccaggcaggggacaaaatggagcc

SEQ ID NO: 119824 - DNA, 80 bp, synthetic construct
  misc_feature 1..80: note = Artificially Synthesized Probe
  source 1..80: mol_type = other DNA
cagctggcccagaaaggaccctcagcggccaccgtccggtgcgtgtgcagcagctgctcctggaggtgcatttgcccaca

SEQ ID NO: 119825 - DNA, 80 bp, synthetic construct
  misc_feature 1..80: note = Artificially Synthesized Probe
  source 1..80: mol_type = other DNA
tgccccgcccacccccacccctgcaccccatgtcccatctggtttgggggcatgcgcagaagacagccagccagatctga

SEQ ID NO: 119826 - DNA, 80 bp, synthetic construct; identical to SEQ ID NO: 39021
  misc_feature 1..80: note = Artificially Synthesized Probe
  source 1..80: mol_type = other DNA

SEQ ID NO: 119827 - DNA, 80 bp, synthetic construct
  misc_feature 1..80: note = Artificially Synthesized Probe
  source 1..80: mol_type = other DNA
gccattcttgacaccactgtcctggccatgtggtaggctctccgtggataattccagcgacgggggactcactacctttg

SEQ ID NO: 119828 - DNA, 80 bp, synthetic construct
  misc_feature 1..80: note = Artificially Synthesized Probe
  source 1..80: mol_type = other DNA
ttgtgcagcctccagggcagttttcatctggtgtccccatccctgcctttctgggggaatatttatcttccagccctggg

SEQ ID NO: 119829 - DNA, 80 bp, synthetic construct
  misc_feature 1..80: note = Artificially Synthesized Probe
  source 1..80: mol_type = other DNA
tgagtgtttggggtccgggccctcccagaaatccacacttggggttattgcaggagacgagctcacccctgagccccagg

SEQ ID NO: 119830 - DNA, 80 bp, synthetic construct; identical to SEQ ID NO: 39022
  misc_feature 1..80: note = Artificially Synthesized Probe
  source 1..80: mol_type = other DNA

SEQ ID NO: 119831 - DNA, 80 bp, synthetic construct
  misc_feature 1..80: note = Artificially Synthesized Probe
  source 1..80: mol_type = other DNA
gcgctagtggttgagatgaaaattaagacaaagataaaagatgaaacttaaaaacccattttccctggaggcttccagag

SEQ ID NO: 119832 - DNA, 80 bp, synthetic construct
  misc_feature 1..80: note = Artificially Synthesized Probe
  source 1..80: mol_type = other DNA
cgctaagctgcccagggcctgggaagggtcagacatccctgctgcacccacataggtttccacgcattggagcccaaatg

SEQ ID NO: 119833 - DNA, 80 bp, synthetic construct
  misc_feature 1..80: note = Artificially Synthesized Probe
  source 1..80: mol_type = other DNA
gcagatgaggttttatttcaaatggatttcattctggaagagggagagattggaggggaagaacttccaggtgtgagttg

SEQ ID NO: 119834 - DNA, 80 bp, synthetic construct
  misc_feature 1..80: note = Artificially Synthesized Probe
  source 1..80: mol_type = other DNA
acgcatatcctcctgctatagattcttcaaaaactaaacatctggtatacccacaaacagaaaacttaaagcctgtgtgc

SEQ ID NO: 119835 - DNA, 80 bp, synthetic construct
  misc_feature 1..80: note = Artificially Synthesized Probe
  source 1..80: mol_type = other DNA
gcaggcgagcaccttttgagtctgtttgttgtccatggacagatgaaaaaccaggaggaaagaggagagggaggctctga

SEQ ID NO: 119836 - DNA, 80 bp, synthetic construct
  misc_feature 1..80: note = Artificially Synthesized Probe
  source 1..80: mol_type = other DNA
ttggtgcttcgtgagccagtgacatccaaagccccgtgcccccttgcctccctccctgcagcccctgcccacaggcatcc

SEQ ID NO: 119837 - DNA, 80 bp, synthetic construct
  misc_feature 1..80: note = Artificially Synthesized Probe
  source 1..80: mol_type = other DNA
tctggtatacccacaaacagaaaacttaaagcctgtgtgctgcttggtggattttcacaaatccaacatccctgtaagag

SEQ ID NO: 119838 - DNA, 80 bp, synthetic construct; identical to SEQ ID NO: 39023
  misc_feature 1..80: note = Artificially Synthesized Probe
  source 1..80: mol_type = other DNA

SEQ ID NO: 119839 - DNA, 80 bp, synthetic construct
  misc_feature 1..80: note = Artificially Synthesized Probe
  source 1..80: mol_type = other DNA
ccttgccagagaggctgacctggcagcccaggagacctccctgctttcctctcctcacgcctctgctttcactctgatcc

SEQ ID NO: 119840 - DNA, 80 bp, synthetic construct
  misc_feature 1..80: note = Artificially Synthesized Probe
  source 1..80: mol_type = other DNA
catgccccctgcagccatgggccggttggacaccccctgaccctcagtttccccatctgtaaagtaggaatagcacaact

SEQ ID NO: 119841 - DNA, 80 bp, synthetic construct
  misc_feature 1..80: note = Artificially Synthesized Probe
  source 1..80: mol_type = other DNA
atggggatattaatggtgccacttcacaggagagtcataaggataaagtaagttaatatttgtaacagtagtacctggag

SEQ ID NO: 119842 - DNA, 80 bp, synthetic construct
  misc_feature 1..80: note = Artificially Synthesized Probe
  source 1..80: mol_type = other DNA
cgatgcattcacattatccttctgggtgctgcctcctccaggaagtctccctgactgatccaggcagcagacagaccact

SEQ ID NO: 119843 - DNA, 80 bp, synthetic construct; identical to SEQ ID NO: 39024
  misc_feature 1..80: note = Artificially Synthesized Probe
  source 1..80: mol_type = other DNA

SEQ ID NO: 119844 - DNA, 80 bp, synthetic construct
  misc_feature 1..80: note = Artificially Synthesized Probe
  source 1..80: mol_type = other DNA
aggcctgtactgccccgccttgccccacgagcaggtgcagccaggacagcatccttagcgtcctcactgcatctgcagag

SEQ ID NO: 119845 - DNA, 80 bp, synthetic construct
  misc_feature 1..80: note = Artificially Synthesized Probe
  source 1..80: mol_type = other DNA
gagggctcatccctcagcttccccagctgctgtggtttcgagttcgagcccatcagacacatgggccaggaaggcactga

SEQ ID NO: 119846 - DNA, 80 bp, synthetic construct
  misc_feature 1..80: note = Artificially Synthesized Probe
  source 1..80: mol_type = other DNA
ccaggcctggctctccagccctcttggagcacagtgaccgcctgacatctgtcagagtcttctgcctcctgcatcaacaa

SEQ ID NO: 119847 - DNA, 80 bp, synthetic construct; identical to SEQ ID NO: 39025
  misc_feature 1..80: note = Artificially Synthesized Probe
  source 1..80: mol_type = other DNA

SEQ ID NO: 119848 - DNA, 80 bp, synthetic construct
  misc_feature 1..80: note = Artificially Synthesized Probe
  source 1..80: mol_type = other DNA
agaggttagctgttgccatcacgaccacgactgaagtttgtttattattgctgactgttcattattgtgattattacaac

SEQ ID NO: 119849 - DNA, 80 bp, synthetic construct
  misc_feature 1..80: note = Artificially Synthesized Probe
  source 1..80: mol_type = other DNA
tttattattgctgactgttcattattgtgattattacaacagcttgttgacgagggaggtcctgacaggcattctcagtc

SEQ ID NO: 119850 - DNA, 80 bp, synthetic construct; identical to SEQ ID NO: 38664
  misc_feature 1..80: note = Artificially Synthesized Probe
  source 1..80: mol_type = other DNA

SEQ ID NO: 119851 - DNA, 80 bp, synthetic construct
  misc_feature 1..80: note = Artificially Synthesized Probe
  source 1..80: mol_type = other DNA
gcacaagggccagctttgagcgtcaccttcaacttaaaccctgggcaaaaccctgagtgtgatcacaaccaaaccagaag

SEQ ID NO: 119852 - DNA, 80 bp, synthetic construct
  misc_feature 1..80: note = Artificially Synthesized Probe
  source 1..80: mol_type = other DNA
ctgggcaaaaccctgagtgtgatcacaaccaaaccagaagggaagaaaataaaatgttgggatgtaggaagcaatgccaa

SEQ ID NO: 119853 - DNA, 80 bp, synthetic construct
  misc_feature 1..80: note = Artificially Synthesized Probe
  source 1..80: mol_type = other DNA
ggaagaaaataaaatgttgggatgtaggaagcaatgccaagaaaattcccagggttctggggcaggggatgccctgatat

SEQ ID NO: 119854 - DNA, 80 bp, synthetic construct; identical to SEQ ID NO: 39026
  misc_feature 1..80: note = Artificially Synthesized Probe
  source 1..80: mol_type = other DNA

SEQ ID NO: 119855 - DNA, 80 bp, synthetic construct
  misc_feature 1..80: note = Artificially Synthesized Probe
  source 1..80: mol_type = other DNA
gattcttcctgcccatcccccaccagatccaaaatagcatctcttgtttctttccctcgtagctttagataactgcaatt

SEQ ID NO: 119856 - DNA, 80 bp, synthetic construct
  misc_feature 1..80: note = Artificially Synthesized Probe
  source 1..80: mol_type = other DNA
aaaggcatctcagcaataatgcggggttatctttgcacaaagaggtaggagtctgtggtgtttgtaacgttcccgtcact

SEQ ID NO: 119857 - DNA, 80 bp, synthetic construct
  misc_feature 1..80: note = Artificially Synthesized Probe
  source 1..80: mol_type = other DNA
caccggttttctgaccctgaattgagctttagggccaagaacatggctattttggggggcagcggggaggagctctggag

SEQ ID NO: 119858 - DNA, 80 bp, synthetic construct; identical to SEQ ID NO: 39027
  misc_feature 1..80: note = Artificially Synthesized Probe
  source 1..80: mol_type = other DNA

SEQ ID NO: 119859 - DNA, 80 bp, synthetic construct
  misc_feature 1..80: note = Artificially Synthesized Probe
  source 1..80: mol_type = other DNA
gacacaggacgctcagtcaagaggctcatgtgctgagatgtgctccaccagttcttggggacatggtccgctcagtcagg

SEQ ID NO: 119860 - DNA, 80 bp, synthetic construct
  misc_feature 1..80: note = Artificially Synthesized Probe
  source 1..80: mol_type = other DNA
caggacctgatggggtcctttgttccagcttcttataaaaagaatgaaatctgagcttggtggtggaagatgtgagtcct

SEQ ID NO: 119861 - DNA, 80 bp, synthetic construct
  misc_feature 1..80: note = Artificially Synthesized Probe
  source 1..80: mol_type = other DNA
ggctccctctcggacctcagtggaggctgggggagtgggcaccccgagcccactgcaccccgagcagggcagcagctctc

SEQ ID NO: 119862 - DNA, 80 bp, synthetic construct
  misc_feature 1..80: note = Artificially Synthesized Probe
  source 1..80: mol_type = other DNA
gccaggggaaggcccagctctcagtccttaagggagcgtgcctgctgcctcctctttctgagcggctgcacactcagaag

SEQ ID NO: 119863 - DNA, 80 bp, synthetic construct
  misc_feature 1..80: note = Artificially Synthesized Probe
  source 1..80: mol_type = other DNA
ggggctgttcctttcactgaggttctcagaatgtaattaggaaagcagatggatttaggaagtaaaggagccggatcgag

SEQ ID NO: 119864 - DNA, 80 bp, synthetic construct; identical to SEQ ID NO: 39028
  misc_feature 1..80: note = Artificially Synthesized Probe
  source 1..80: mol_type = other DNA

SEQ ID NO: 119865 - DNA, 80 bp, synthetic construct
  misc_feature 1..80: note = Artificially Synthesized Probe
  source 1..80: mol_type = other DNA
cacagcctctgctcactgttcataggctcctcaccgcctgggcatttggtgccagactgcagatgccaggaccacacaga

SEQ ID NO: 119866 - DNA, 80 bp, synthetic construct
  misc_feature 1..80: note = Artificially Synthesized Probe
  source 1..80: mol_type = other DNA
gactgactttcgtaaagcagcacctgagaccatctgaggctgactacagtcaccaagtcctgtggcctgaaggtttacat

SEQ ID NO: 119867 - DNA, 80 bp, synthetic construct
  misc_feature 1..80: note = Artificially Synthesized Probe
  source 1..80: mol_type = other DNA
gtgtccttgtaagaagagacttgagagttggtcgctgtctgtctctctgtctctccaccatgggagggctcaaccagaag

SEQ ID NO: 119868 - DNA, 80 bp, synthetic construct; identical to SEQ ID NO: 39029
  misc_feature 1..80: note = Artificially Synthesized Probe
  source 1..80: mol_type = other DNA

SEQ ID NO: 119869 - DNA, 80 bp, synthetic construct
  misc_feature 1..80: note = Artificially Synthesized Probe
  source 1..80: mol_type = other DNA
attcctctgcctgctctccccatgtctggctgcttccaactccaggccttgtgcattcacgctcatggtcaacgcatgag

SEQ ID NO: 119870 - DNA, 80 bp, synthetic construct
  misc_feature 1..80: note = Artificially Synthesized Probe
  source 1..80: mol_type = other DNA
cttatatggtctttctcccccaagtaaactgtaaactgctgacaagtgcagtctgtcttaatcaccactgcatcaccagc

SEQ ID NO: 119871 - DNA, 80 bp, synthetic construct
  misc_feature 1..80: note = Artificially Synthesized Probe
  source 1..80: mol_type = other DNA
agcctggccaacatagcgaaaccctgtttctactaaaaacacaaaaaatgagccaggcatggtggtgtgcctgtcatccc

SEQ ID NO: 119872 - DNA, 80 bp, synthetic construct; identical to SEQ ID NO: 39030
  misc_feature 1..80: note = Artificially Synthesized Probe
  source 1..80: mol_type = other DNA

SEQ ID NO: 119873 - DNA, 80 bp, synthetic construct
  misc_feature 1..80: note = Artificially Synthesized Probe
  source 1..80: mol_type = other DNA
tggttatcttaggtccttgtgtgcctgcttcaacacttgggttgtttgatgctgcttctaacaattgtggcttcctttgg

SEQ ID NO: 119874 - DNA, 80 bp, synthetic construct
  misc_feature 1..80: note = Artificially Synthesized Probe
  source 1..80: mol_type = other DNA
gttgtttgatgctgcttctaacaattgtggcttcctttggttgcacattgcattttccttctcttcctagctagtaattt

SEQ ID NO: 119875 - DNA, 80 bp, synthetic construct
  misc_feature 1..80: note = Artificially Synthesized Probe
  source 1..80: mol_type = other DNA
ttgcacattgcattttccttctcttcctagctagtaatttctgattctatgctggtcattgtgtttgttatgtcggagag

SEQ ID NO: 119876 - DNA, 80 bp, synthetic construct
  misc_feature 1..80: note = Artificially Synthesized Probe
  source 1..80: mol_type = other DNA
ctgattctatgctggtcattgtgtttgttatgtcggagagactctaggttctgttatcttcctctgaggtgtgtttagtt

SEQ ID NO: 119877 - DNA, 80 bp, synthetic construct
  misc_feature 1..80: note = Artificially Synthesized Probe
  source 1..80: mol_type = other DNA
actctaggttctgttatcttcctctgaggtgtgtttagtttttcaagtaggtagtaaaactatcagtgcaatgccttgcc

SEQ ID NO: 119878 - DNA, 80 bp, synthetic construct; identical to SEQ ID NO: 39031
  misc_feature 1..80: note = Artificially Synthesized Probe
  source 1..80: mol_type = other DNA

SEQ ID NO: 119879 - DNA, 80 bp, synthetic construct
  misc_feature 1..80: note = Artificially Synthesized Probe
  source 1..80: mol_type = other DNA
cactcattccagtgtttctgttccccgtaccactaaaagccatgaggcacaggcagttcagctgtctctgcctccatctg

SEQ ID NO: 119880 - DNA, 80 bp, synthetic construct
  misc_feature 1..80: note = Artificially Synthesized Probe
  source 1..80: mol_type = other DNA
atccacaacacagtaagactccagtttatgtcaggggaaatctaattaatgtgggccttacaagggtggggggcccctct

SEQ ID NO: 119881 - DNA, 80 bp, synthetic construct
  misc_feature 1..80: note = Artificially Synthesized Probe
  source 1..80: mol_type = other DNA
gagggttagtctgacatgagctgctccatcactatgggaaagcagaagtcatgggctcatcaatacatttataattatat

SEQ ID NO: 119882 - DNA, 80 bp, synthetic construct
  misc_feature 1..80: note = Artificially Synthesized Probe
  source 1..80: mol_type = other DNA
ttaatacaacacacttgcggatattcagtaaagtgggggagaagtcatccaataggctccttcaaattactttttcattc

SEQ ID NO: 119883 - DNA, 80 bp, synthetic construct
  misc_feature 1..80: note = Artificially Synthesized Probe
  source 1..80: mol_type = other DNA
tggtatccggcagccagcgcagtctccccaggtctggaggcaacacacacccccctggtagagagggcgggtacgtcaaa

SEQ ID NO: 119884 - DNA, 80 bp, synthetic construct
  misc_feature 1..80: note = Artificially Synthesized Probe
  source 1..80: mol_type = other DNA
catcaggaaaggaccacagccttggagggggtttatttcaatacaagaatccaacttttgtaaggtttgagtacctccag

SEQ ID NO: 119885 - DNA, 80 bp, synthetic construct
  misc_feature 1..80: note = Artificially Synthesized Probe
  source 1..80: mol_type = other DNA
tctccacctcagttcttcacctagttagcgaatccaaatgcacatttatattttgggaactaattaaggctcagtgactg

SEQ ID NO: 119886 - DNA, 80 bp, synthetic construct; identical to SEQ ID NO: 39032
  misc_feature 1..80: note = Artificially Synthesized Probe
  source 1..80: mol_type = other DNA

SEQ ID NO: 119887 - DNA, 80 bp, synthetic construct
  misc_feature 1..80: note = Artificially Synthesized Probe
  source 1..80: mol_type = other DNA
atttaaccttcaaataaattcctcccagggccgagctggcagcatagtgaatatcaggcaccacatctgcatcaagaaaa

SEQ ID NO: 119888 - DNA, 80 bp, synthetic construct
  misc_feature 1..80: note = Artificially Synthesized Probe
  source 1..80: mol_type = other DNA
acaaagaagtgaacacataacttcaggtggctgagtaccacctaagaaggcagaaccaagtaaaaggagactgaacagag

SEQ ID NO: 119889 - DNA, 80 bp, synthetic construct
  misc_feature 1..80: note = Artificially Synthesized Probe
  source 1..80: mol_type = other DNA
agcatagtgaatatcaggcaccacatctgcatcaagaaaacctcaaagtctaggaagaaccaaaacccaaagggaaggga

SEQ ID NO: 119890 - DNA, 80 bp, synthetic construct
  misc_feature 1..80: note = Artificially Synthesized Probe
  source 1..80: mol_type = other DNA
ggcattgtcacggtcacagcttcccaggcagtgaaagcctcactgtgatcgccacctcaatgtcaaagccaaccagaggt

SEQ ID NO: 119891 - DNA, 80 bp, synthetic construct; identical to SEQ ID NO: 39033
  misc_feature 1..80: note = Artificially Synthesized Probe
  source 1..80: mol_type = other DNA

SEQ ID NO: 119892 - DNA, 80 bp, synthetic construct
  misc_feature 1..80: note = Artificially Synthesized Probe
  source 1..80: mol_type = other DNA
cacacagcggcagccacatactgtagctcagtggccaaggagagttcttgggacctcagctatcagggcagggctcttcc

SEQ ID NO: 119893 - DNA, 80 bp, synthetic construct
  misc_feature 1..80: note = Artificially Synthesized Probe
  source 1..80: mol_type = other DNA
atgaggccacccccagccatcaagacttgactgtgtttcactggagcttgataagacttcacctgagaaacactctggct

SEQ ID NO: 119894 - DNA, 80 bp, synthetic construct
  misc_feature 1..80: note = Artificially Synthesized Probe
  source 1..80: mol_type = other DNA
tcaagaccagcctggccaacatggtgaaaccctgtctctaccaaaaatacaaaaaaaacaaaattagccaggcatggtag

SEQ ID NO: 119895 - DNA, 80 bp, synthetic construct; identical to SEQ ID NO: 39034
  misc_feature 1..80: note = Artificially Synthesized Probe
  source 1..80: mol_type = other DNA

SEQ ID NO: 119896 - DNA, 80 bp, synthetic construct
  misc_feature 1..80: note = Artificially Synthesized Probe
  source 1..80: mol_type = other DNA
agcctgtggagtctgcctttggccccatcgctgacccagctgctgagagtgaaactcaagccctgtggtgccacattcca

SEQ ID NO: 119897 - DNA, 80 bp, synthetic construct
  misc_feature 1..80: note = Artificially Synthesized Probe
  source 1..80: mol_type = other DNA
acgtgactgctcctcctgcctggcttcttgcttctcttcaggacccaagcatgcagtgccacttctgatctacagacctt

SEQ ID NO: 119898 - DNA, 80 bp, synthetic construct
  misc_feature 1..80: note = Artificially Synthesized Probe
  source 1..80: mol_type = other DNA
ttcctgggacctaactgcccttctcccttaaccctgggctcctccaggacaagagaccttgtctctctctactccacacg

SEQ ID NO: 119899 - DNA, 80 bp, synthetic construct; identical to SEQ ID NO: 39035
  misc_feature 1..80: note = Artificially Synthesized Probe
  source 1..80: mol_type = other DNA

SEQ ID NO: 119900 - DNA, 80 bp, synthetic construct; identical to SEQ ID NO: 38665
  misc_feature 1..80: note = Artificially Synthesized Probe
  source 1..80: mol_type = other DNA

SEQ ID NO: 119901 - DNA, 80 bp, synthetic construct
  misc_feature 1..80: note = Artificially Synthesized Probe
  source 1..80: mol_type = other DNA
cctgtctgagccactgtctctccatgtgcaaatggtgttctagggccctctctgcacttgtccctttcaggagctccttt

SEQ ID NO: 119902 - DNA, 80 bp, synthetic construct
  misc_feature 1..80: note = Artificially Synthesized Probe
  source 1..80: mol_type = other DNA
tccctgctgtgccacctgggattctcgtgcagcttaaatggaactcggcaaggaagctgagccctgtcctgaagctaaag

SEQ ID NO: 119903 - DNA, 80 bp, synthetic construct
  misc_feature 1..80: note = Artificially Synthesized Probe
  source 1..80: mol_type = other DNA
ttccactccacaggctcagggggccgggctgggcggccattccctcgtgtcatctgactaccctgacgcagtgtcatacc

SEQ ID NO: 119904 - DNA, 80 bp, synthetic construct
  misc_feature 1..80: note = Artificially Synthesized Probe
  source 1..80: mol_type = other DNA
ggggtcagggagcagaggctgcagtggagatgctcaggtggtgactgtgactgggaggttgcaaagacagctattagggt

SEQ ID NO: 119905 - DNA, 80 bp, synthetic construct; identical to SEQ ID NO: 39036
  misc_feature 1..80: note = Artificially Synthesized Probe
  source 1..80: mol_type = other DNA

SEQ ID NO: 119906 - DNA, 80 bp, synthetic construct
  misc_feature 1..80: note = Artificially Synthesized Probe
  source 1..80: mol_type = other DNA
acagagagacgaccctgtgaggtcacaaggagaaggcggcacctacaagccgcagagacaggctgcaggaggccccagcc

SEQ ID NO: 119907 - DNA, 80 bp, synthetic construct
  misc_feature 1..80: note = Artificially Synthesized Probe
  source 1..80: mol_type = other DNA
aaccgattcttagaggacacacgagtcaacttccctaaaacagaactgctccagccctcccaatttggtgctcagggacc

SEQ ID NO: 119908 - DNA, 80 bp, synthetic construct
  misc_feature 1..80: note = Artificially Synthesized Probe
  source 1..80: mol_type = other DNA
gattctccagtgagccctcagttttcctagggtaggaccacactgtgctgcgtgcaccatcccctgtcccatctgagtcc

SEQ ID NO: 119909 - DNA, 80 bp, synthetic construct; identical to SEQ ID NO: 39037
  misc_feature 1..80: note = Artificially Synthesized Probe
  source 1..80: mol_type = other DNA

SEQ ID NO: 119910 - DNA, 80 bp, synthetic construct
  misc_feature 1..80: note = Artificially Synthesized Probe
  source 1..80: mol_type = other DNA
tccccctaaatccttactccagccttcacagccagcattctcgacaaggggatcatctaaaacgctgggcacgtttctcg

SEQ ID NO: 119911 - DNA, 80 bp, synthetic construct
  misc_feature 1..80: note = Artificially Synthesized Probe
  source 1..80: mol_type = other DNA
cagccctttgagtaatctcgtgggatgttacgtaatattcctggaggatacatgctgttcttttacatgacaaattcctc

SEQ ID NO: 119912 - DNA, 80 bp, synthetic construct
  misc_feature 1..80: note = Artificially Synthesized Probe
  source 1..80: mol_type = other DNA
ggccccaccttgagatgggctgggaccagctttcctgctctgggcgggcccccagtgccgggccttgagggggctccaac

SEQ ID NO: 119913 - DNA, 80 bp, synthetic construct; identical to SEQ ID NO: 39038
  misc_feature 1..80: note = Artificially Synthesized Probe
  source 1..80: mol_type = other DNA

SEQ ID NO: 119914 - DNA, 80 bp, synthetic construct
  misc_feature 1..80: note = Artificially Synthesized Probe
  source 1..80: mol_type = other DNA
tgaaaccccgtctctactaaaaatacaaaaattagccaggtgtggtggcacacacctgtaatcccagctactcaggaagc

SEQ ID NO: 119915 - DNA, 80 bp, synthetic construct
  misc_feature 1..80: note = Artificially Synthesized Probe
  source 1..80: mol_type = other DNA
aaatgaggtatagagaaaatgggtttcaaccagaggacaataaacttcaaagatgagaggactttccactggagtggatt

SEQ ID NO: 119916 - DNA, 80 bp, synthetic construct
  misc_feature 1..80: note = Artificially Synthesized Probe
  source 1..80: mol_type = other DNA
taaacttcaaagatgagaggactttccactggagtggattaggggagacataatttcacgctgaaggactcatcagaaca

SEQ ID NO: 119917 - DNA, 80 bp, synthetic construct
  misc_feature 1..80: note = Artificially Synthesized Probe
  source 1..80: mol_type = other DNA
aggggagacataatttcacgctgaaggactcatcagaacagaatagtttctccttctcacagagaaatggactctgataa

SEQ ID NO: 119918 - DNA, 80 bp, synthetic construct
  misc_feature 1..80: note = Artificially Synthesized Probe
  source 1..80: mol_type = other DNA
gaatagtttctccttctcacagagaaatggactctgataacatcaggcctattccaaatctccaagtccatggcattttt

SEQ ID NO: 119919 - DNA, 80 bp, synthetic construct
  misc_feature 1..80: note = Artificially Synthesized Probe
  source 1..80: mol_type = other DNA
aatggcagacaacctggtgacactgagatgccaataaaacccaggattgattgatggaaagacgagccaagccagggaaa

SEQ ID NO: 119920 - DNA, 80 bp, synthetic construct
  misc_feature 1..80: note = Artificially Synthesized Probe
  source 1..80: mol_type = other DNA
atcagaatgaaacagacggccccgggtgaatgaatgcacatttcccataattacatagagatggaaataagcagcacaga

SEQ ID NO: 119921 - DNA, 80 bp, synthetic construct; identical to SEQ ID NO: 39039
  misc_feature 1..80: note = Artificially Synthesized Probe
  source 1..80: mol_type = other DNA

SEQ ID NO: 119922 - DNA, 80 bp, synthetic construct
  misc_feature 1..80: note = Artificially Synthesized Probe
  source 1..80: mol_type = other DNA
aggaaagcaccccagagacgctgttccccgtctcccgacactggagaaacaggtggccaagggcagccgccaaggtttcc

SEQ ID NO: 119923 - DNA, 80 bp, synthetic construct
  misc_feature 1..80: note = Artificially Synthesized Probe
  source 1..80: mol_type = other DNA
cagaaaacggaggcacccctcttcttaggggttcctaggaggacaactgagccttcaatgcctcaggttatttttctgta

SEQ ID NO: 119924 - DNA, 80 bp, synthetic construct
  misc_feature 1..80: note = Artificially Synthesized Probe
  source 1..80: mol_type = other DNA
atgcccggctaatttttagtttttcattttttgtagagatggggccttgctatgttgcccaggctggcctcaagcgatcc

SEQ ID NO: 119925 - DNA, 80 bp, synthetic construct
  misc_feature 1..80: note = Artificially Synthesized Probe
  source 1..80: mol_type = other DNA
ccacctcatctcagcacagaaggcagcgtcatcatccccatgacacagatagtccagtcacctgctcccggccacacagc

SEQ ID NO: 119926 - DNA, 80 bp, synthetic construct; identical to SEQ ID NO: 39040
  misc_feature 1..80: note = Artificially Synthesized Probe
  source 1..80: mol_type = other DNA

SEQ ID NO: 119927 - DNA, 80 bp, synthetic construct
  misc_feature 1..80: note = Artificially Synthesized Probe
  source 1..80: mol_type = other DNA
atggggactttaacagcctggccacttaggcagggaggggctggggatgtggcctctgactgcagcctgctaaccatcac

SEQ ID NO: 119928 - DNA, 80 bp, synthetic construct
  misc_feature 1..80: note = Artificially Synthesized Probe
  source 1..80: mol_type = other DNA
tgctgcgacccacaccccagtacagggtcctgggagtgtgctagggagacagagacacaggtctacgttccaggcctcag

SEQ ID NO: 119929 - DNA, 80 bp, synthetic construct
  misc_feature 1..80: note = Artificially Synthesized Probe
  source 1..80: mol_type = other DNA
caaatgcagccttgtctcacagggtggtgacggggttggcagcagcagggcctcctctctgagattctcagcaagaaagt

SEQ ID NO: 119930 - DNA, 80 bp, synthetic construct; identical to SEQ ID NO: 39041
  misc_feature 1..80: note = Artificially Synthesized Probe
  source 1..80: mol_type = other DNA

SEQ ID NO: 119931 - DNA, 80 bp, synthetic construct
  misc_feature 1..80: note = Artificially Synthesized Probe
  source 1..80: mol_type = other DNA
acccagtcctcatcatctggctgcaggggtgggccaagagccagtccagggcctgcccagcaaggcctggaccaaagagg

SEQ ID NO: 119932 - DNA, 80 bp, synthetic construct
  misc_feature 1..80: note = Artificially Synthesized Probe
  source 1..80: mol_type = other DNA
atggcaatgcctgcggtaggaagggcggccccacacctattcccagttcccaaaaggagtctgaggtccgctgggcttca

SEQ ID NO: 119933 - DNA, 80 bp, synthetic construct
  misc_feature 1..80: note = Artificially Synthesized Probe
  source 1..80: mol_type = other DNA
tatgtgaaatctcctgattttaaataccagcaacgagttcctattttatcaaaatgtgccttacagcatgggctaaaaga

SEQ ID NO: 119934 - DNA, 80 bp, synthetic construct; identical to SEQ ID NO: 39042
  misc_feature 1..80: note = Artificially Synthesized Probe
  source 1..80: mol_type = other DNA

SEQ ID NO: 119935 - DNA, 80 bp, synthetic construct
  misc_feature 1..80: note = Artificially Synthesized Probe
  source 1..80: mol_type = other DNA
gtagcgcttccaatgcgatttgaccacagacctgtgctttgcagagcagccacggcactcactagaatccagcaccttta

SEQ ID NO: 119936 - DNA, 80 bp, synthetic construct
  misc_feature 1..80: note = Artificially Synthesized Probe
  source 1..80: mol_type = other DNA
tgccagcttgtttcaggaccaccaggaatgtcaacaagtgcatgatgctgggagacaaattgagcaccatacagacagct

SEQ ID NO: 119937 - DNA, 80 bp, synthetic construct
  misc_feature 1..80: note = Artificially Synthesized Probe
  source 1..80: mol_type = other DNA
ataggggcacacaccccctccccaccaggacacaaggcacaattaccaacaagatacatacacccataggcagggtgtga

SEQ ID NO: 119938 - DNA, 80 bp, synthetic construct
  misc_feature 1..80: note = Artificially Synthesized Probe
  source 1..80: mol_type = other DNA
acatgcatgcatgccaatggctggtctaaaaaggtgaggtagagaaaaagacaccaatccacaatctattctccctagat

SEQ ID NO: 119939 - DNA, 80 bp, synthetic construct
  misc_feature 1..80: note = Artificially Synthesized Probe
  source 1..80: mol_type = other DNA
agggcccttttcctcagaagtgtcagagacagacattactcttttctgggcaggggaggcaaaggaccaaagaaaggcct

SEQ ID NO: 119940 - DNA, 80 bp, synthetic construct; identical to SEQ ID NO: 39043
  misc_feature 1..80: note = Artificially Synthesized Probe
  source 1..80: mol_type = other DNA

SEQ ID NO: 119941 - DNA, 80 bp, synthetic construct
  misc_feature 1..80: note = Artificially Synthesized Probe
  source 1..80: mol_type = other DNA
tctgttaatagctgccatttatcaagtctcctggatggtgatctggggtccatgatctccctacgttatctcttttttta

SEQ ID NO: 119942 - DNA, 80 bp, synthetic construct
  misc_feature 1..80: note = Artificially Synthesized Probe
  source 1..80: mol_type = other DNA
ccccatgaaacacacatgccctattccctctcccctagcccctggccctcatcatcctaccctctgtttctatgaatctg

SEQ ID NO: 119943 - DNA, 80 bp, synthetic construct; identical to SEQ ID NO: 39044
  misc_feature 1..80: note = Artificially Synthesized Probe
  source 1..80: mol_type = other DNA

SEQ ID NO: 119944 - DNA, 80 bp, synthetic construct
  misc_feature 1..80: note = Artificially Synthesized Probe
  source 1..80: mol_type = other DNA
tctccctcctgcccatcagacagtccctaaagcacctgtgaggaactctctgggacagtgtgtagaaaccataccaagga

SEQ ID NO: 119945 - DNA, 80 bp, synthetic construct
  misc_feature 1..80: note = Artificially Synthesized Probe
  source 1..80: mol_type = other DNA
ctctgaggcacccggaccttctagtcagttctgaatcccatcagactgctggcgaatggggagaagctgggaaaggtgac

SEQ ID NO: 119946 - DNA, 80 bp, synthetic construct
  misc_feature 1..80: note = Artificially Synthesized Probe
  source 1..80: mol_type = other DNA
tcgccctccaagccacacattttccacttttaaaatgggctcacggccactcttcatgcttgctgcaggggtagagtgag

SEQ ID NO: 119947 - DNA, 80 bp, synthetic construct
  misc_feature 1..80: note = Artificially Synthesized Probe
  source 1..80: mol_type = other DNA
tcatggagcccttaactctcagatccaaataccagagccttgcagaacaagaacagactttccttcagaaaagatcttct

SEQ ID NO: 119948 - DNA, 80 bp, synthetic construct
  misc_feature 1..80: note = Artificially Synthesized Probe
  source 1..80: mol_type = other DNA
acaaagaagaaggtttaagaacatggctgtccacttaagaagggagctgtgtgataagatcctgaccactgggacataaa

SEQ ID NO: 119949 - DNA, 80 bp, synthetic construct; identical to SEQ ID NO: 39045
  misc_feature 1..80: note = Artificially Synthesized Probe
  source 1..80: mol_type = other DNA

SEQ ID NO: 119950 - DNA, 80 bp, synthetic construct
  misc_feature 1..80: note = Artificially Synthesized Probe
  source 1..80: mol_type = other DNA
taaaagaaacaggtccacttaaggaaagtgtccttataggaaaagggaataatgcctttctcctgcccctttctcctttc

SEQ ID NO: 119951 - DNA, 80 bp, synthetic construct
  misc_feature 1..80: note = Artificially Synthesized Probe
  source 1..80: mol_type = other DNA
caccacagaaccctgcctcagttatggaccacctagctggacttttatggaaaagacaaactttttaaaaaacttaggat

SEQ ID NO: 119952 - DNA, 80 bp, synthetic construct
  misc_feature 1..80: note = Artificially Synthesized Probe
  source 1..80: mol_type = other DNA
ttttagttactcacagccaaatctcaccatgactattagaggctagcaatgccaatttagaaatacttgagagagcagta

SEQ ID NO: 119953 - DNA, 80 bp, synthetic construct
  misc_feature 1..80: note = Artificially Synthesized Probe
  source 1..80: mol_type = other DNA
gcacagggccaggctggctgcccagatttgatgtctcatatctgagtctgcagaagctgctgttcccacccaactcctaa

SEQ ID NO: 119954 - DNA, 80 bp, synthetic construct; identical to SEQ ID NO: 38628
  misc_feature 1..80: note = Artificially Synthesized Probe
  source 1..80: mol_type = other DNA

SEQ ID NO: 119955 - DNA, 80 bp, synthetic construct
  misc_feature 1..80: note = Artificially Synthesized Probe
  source 1..80: mol_type = other DNA
agtgaggcagactcataaacgactgtgatagaatgtgatcaattaataagaatcactgccccatgaaactctgccaggca

SEQ ID NO: 119956 - DNA, 80 bp, synthetic construct
  misc_feature 1..80: note = Artificially Synthesized Probe
  source 1..80: mol_type = other DNA
gtctgttcccattcccacctactcctgaaagccgtgaaaataaaacacagtcccttttaaaaccaagaccttctgggcca

SEQ ID NO: 119957 - DNA, 80 bp, synthetic construct; identical to SEQ ID NO: 39046
  misc_feature 1..80: note = Artificially Synthesized Probe
  source 1..80: mol_type = other DNA

SEQ ID NO: 119958 - DNA, 80 bp, synthetic construct
  misc_feature 1..80: note = Artificially Synthesized Probe
  source 1..80: mol_type = other DNA
agaacgggctggctgtccatttccagcaggacactgccacagtctgcactccacgaaggtccccaggtttctgggggact

SEQ ID NO: 119959 - DNA, 80 bp, synthetic construct
  misc_feature 1..80: note = Artificially Synthesized Probe
  source 1..80: mol_type = other DNA
caggcatgatggtgcatgcctgtagtcccagctacttgggaagttgaggcaggagaatcgcttgaacccaggaggcggag

SEQ ID NO: 119960 - DNA, 80 bp, synthetic construct
  misc_feature 1..80: note = Artificially Synthesized Probe
  source 1..80: mol_type = other DNA
acatcactgtcagccagaggaaggcaacgttccctgaaccagtgggccacgtgggaagttctgcagagccccacaaccct

SEQ ID NO: 119961 - DNA, 80 bp, synthetic construct; identical to SEQ ID NO: 39047
  misc_feature 1..80: note = Artificially Synthesized Probe
  source 1..80: mol_type = other DNA

SEQ ID NO: 119962 - DNA, 80 bp, synthetic construct
  misc_feature 1..80: note = Artificially Synthesized Probe
  source 1..80: mol_type = other DNA
ttgtcacccagtgaccgagagaggtttgaagcggactggtgctcagttctgggtgcagccttaagcgtctttctcagtct

SEQ ID NO: 119963 - DNA, 80 bp, synthetic construct
  misc_feature 1..80: note = Artificially Synthesized Probe
  source 1..80: mol_type = other DNA
gcgtcccatgttcctggagctgccgtgaccgcttaatacacaatgggtgacttcagacaacagaaattcattctctcaca

SEQ ID NO: 119964 - DNA, 80 bp, synthetic construct
  misc_feature 1..80: note = Artificially Synthesized Probe
  source 1..80: mol_type = other DNA
tcccccctccttcttcttataaagacatcagccattggtcatactaatacagcatgacctcatgttaaccaaaccaatta

SEQ ID NO: 119965 - DNA, 80 bp, synthetic construct
  misc_feature 1..80: note = Artificially Synthesized Probe
  source 1..80: mol_type = other DNA
ggggagtgggggagaagaaggtttggatgattttcatatgtacacgcatttaccccttgcttttgtgtaatttctacgaa

SEQ ID NO: 119966 - DNA, 80 bp, synthetic construct; identical to SEQ ID NO: 39048
  misc_feature 1..80: note = Artificially Synthesized Probe
  source 1..80: mol_type = other DNA

SEQ ID NO: 119967 - DNA, 80 bp, synthetic construct; identical to SEQ ID NO: 38666
  misc_feature 1..80: note = Artificially Synthesized Probe
  source 1..80: mol_type = other DNA

SEQ ID NO: 119968 - DNA, 80 bp, synthetic construct
  misc_feature 1..80: note = Artificially Synthesized Probe
  source 1..80: mol_type = other DNA
aggtgcctcagattccacccccagtggcccacattcagccctgtagcttgaaatccaactgagcgcatgcatggctggat

SEQ ID NO: 119969 - DNA, 80 bp, synthetic construct
  misc_feature 1..80: note = Artificially Synthesized Probe
  source 1..80: mol_type = other DNA
ccacacagtgaaaggtcccgccaaagctgacaagcacatgaaggccagtgaaatgtccctctctgttctcaatggggagc

SEQ ID NO: 119970 - DNA, 80 bp, synthetic construct; identical to SEQ ID NO: 39049
  misc_feature 1..80: note = Artificially Synthesized Probe
  source 1..80: mol_type = other DNA

SEQ ID NO: 119971 - DNA, 80 bp, synthetic construct
  misc_feature 1..80: note = Artificially Synthesized Probe
  source 1..80: mol_type = other DNA
ctcggctgcccctcaatgacttcatgatgagggataattaaaacagcttccctgcacgttctcctccctcatccaatttg

SEQ ID NO: 119972 - DNA, 80 bp, synthetic construct
  misc_feature 1..80: note = Artificially Synthesized Probe
  source 1..80: mol_type = other DNA
tctaagccctacaggacagacattctagcaggtgaggagtaagccaggtttctggaagcttcccatatctagaatgttgg

SEQ ID NO: 119973 - DNA, 80 bp, synthetic construct
  misc_feature 1..80: note = Artificially Synthesized Probe
  source 1..80: mol_type = other DNA
ttgaaccccaatgttatagctctgaccagggcatctgctttaaaaatcttcaacagctcccatggttagaacaaaagtga

SEQ ID NO: 119974 - DNA, 80 bp, synthetic construct
  misc_feature 1..80: note = Artificially Synthesized Probe
  source 1..80: mol_type = other DNA
taaaaatcttcaacagctcccatggttagaacaaaagtgaaggaataggaattcctacattcaaatcctggtctccaact

SEQ ID NO: 119975 - DNA, 80 bp, synthetic construct; identical to SEQ ID NO: 39050
  misc_feature 1..80: note = Artificially Synthesized Probe
  source 1..80: mol_type = other DNA

SEQ ID NO: 119976 - DNA, 80 bp, synthetic construct
  misc_feature 1..80: note = Artificially Synthesized Probe
  source 1..80: mol_type = other DNA
atggaaggatggatggctgaatgaagaaatggatagatgaatagatgaatggatagatggatggatggaaagacagatga

SEQ ID NO: 119977 - DNA, 80 bp, synthetic construct
  misc_feature 1..80: note = Artificially Synthesized Probe
  source 1..80: mol_type = other DNA
tggatgaatgaatagatgaatgaatgggtagatggatgaatgaatggatgaataaatggacagatggatggatgggtgga

SEQ ID NO: 119978 - DNA, 80 bp, synthetic construct
  misc_feature 1..80: note = Artificially Synthesized Probe
  source 1..80: mol_type = other DNA
tggatggatggataaattaacagatggatatttggatggatgaatgggtgagcagataggtgggtgggtgaatggataat

SEQ ID NO: 119979 - DNA, 80 bp, synthetic construct
  misc_feature 1..80: note = Artificially Synthesized Probe
  source 1..80: mol_type = other DNA
tcttggactgttttgcccatctattatatttccttgcctctagggggtgtgagtttaaaccatgtttgatacattatttc

SEQ ID NO: 119980 - DNA, 80 bp, synthetic construct
  misc_feature 1..80: note = Artificially Synthesized Probe
  source 1..80: mol_type = other DNA
tagggggtgtgagtttaaaccatgtttgatacattatttcattaaaaacaccaacagccttatgagggaggcatctgatt

SEQ ID NO: 119981 - DNA, 80 bp, synthetic construct
  misc_feature 1..80: note = Artificially Synthesized Probe
  source 1..80: mol_type = other DNA
cctccagaatcagcatattattgggtccggagcctgtgggggccctgctgcttgctgggtgcccgtgggcaggacacctg

SEQ ID NO: 119982 - DNA, 80 bp, synthetic construct
  misc_feature 1..80: note = Artificially Synthesized Probe
  source 1..80: mol_type = other DNA
attaaaaacaccaacagccttatgagggaggcatctgattcctgctttattgaatcagagaatttcaaggatcttacaca

SEQ ID NO: 119983 - DNA, 80 bp, synthetic construct; identical to SEQ ID NO: 39051
  misc_feature 1..80: note = Artificially Synthesized Probe
  source 1..80: mol_type = other DNA

SEQ ID NO: 119984 - DNA, 80 bp, synthetic construct
  misc_feature 1..80: note = Artificially Synthesized Probe
  source 1..80: mol_type = other DNA
cttaacttctgtctacctcgtctctatccttagtctgacagggttggtgatacctgttttggacttacatctcttcctgc

SEQ ID NO: 119985 - DNA, 80 bp, synthetic construct
  misc_feature 1..80: note = Artificially Synthesized Probe
  source 1..80: mol_type = other DNA
taacttatgctctctgcaacagcctgcctctgcgtgcaaatgttcctgcaagagggattaagcaaacatttccctgacga

SEQ ID NO: 119986 - DNA, 80 bp, synthetic construct
  misc_feature 1..80: note = Artificially Synthesized Probe
  source 1..80: mol_type = other DNA
taatgcaagtagcacccacaaagggttgttttaggaatcaaattggataatgcacaggacttagcacccagtaaatactc

SEQ ID NO: 119987 - DNA, 80 bp, synthetic construct
  misc_feature 1..80: note = Artificially Synthesized Probe
  source 1..80: mol_type = other DNA
cctatttccttttcctcaagtggcctcacttcctgataaagaccttggtgcctttctcaggacttgggagggccaagccc

SEQ ID NO: 119988 - DNA, 80 bp, synthetic construct; identical to SEQ ID NO: 39052
  misc_feature 1..80: note = Artificially Synthesized Probe
  source 1..80: mol_type = other DNA

SEQ ID NO: 119989 - DNA, 80 bp, synthetic construct
  misc_feature 1..80: note = Artificially Synthesized Probe
  source 1..80: mol_type = other DNA
agcatgatggattatctgggcctgtggcaagttgcaagacaccatttggagagggaattattcagatcatagcacaccca

SEQ ID NO: 119990 - DNA, 80 bp, synthetic construct
  misc_feature 1..80: note = Artificially Synthesized Probe
  source 1..80: mol_type = other DNA
cagagcatctgcttcctgtcccctgttcataatccattttaaatgaagtcatcaaaattcactgccatgttcatataaaa

SEQ ID NO: 119991 - DNA, 80 bp, synthetic construct
  misc_feature 1..80: note = Artificially Synthesized Probe
  source 1..80: mol_type = other DNA
tggcagtgtgccatgcaaaagcccatggcctcctgtagtctttgccatccactcagtgggctagactggaaacccaggca

SEQ ID NO: 119992 - DNA, 80 bp, synthetic construct; identical to SEQ ID NO: 39053
  misc_feature 1..80: note = Artificially Synthesized Probe
  source 1..80: mol_type = other DNA

SEQ ID NO: 119993 - DNA, 80 bp, synthetic construct
  misc_feature 1..80: note = Artificially Synthesized Probe
  source 1..80: mol_type = other DNA
gcatctgggagaacccaagcaagttctttcctactgcagggtcttggccaaagctgttttcaggaatgtgctgtccacac

SEQ ID NO: 119994 - DNA, 80 bp, synthetic construct
  misc_feature 1..80: note = Artificially Synthesized Probe
  source 1..80: mol_type = other DNA
tagagtcataaaatgtttacatacagcactgctctggatgggtgggtagatgaatggagaggtgagtggataaacagaat

SEQ ID NO: 119995 - DNA, 80 bp, synthetic construct
  misc_feature 1..80: note = Artificially Synthesized Probe
  source 1..80: mol_type = other DNA
cacacagtgcctcagtcagttttaacttagctgtcacaatttaaagagtataagacctttgcatagaaagtctagaattt

SEQ ID NO: 119996 - DNA, 80 bp, synthetic construct
  misc_feature 1..80: note = Artificially Synthesized Probe
  source 1..80: mol_type = other DNA
gcaagtgggtgaatagatgtgtagataagtagatggatagtggatgaatgaataaatggatatacagatgggcagatgga

SEQ ID NO: 119997 - DNA, 80 bp, synthetic construct
  misc_feature 1..80: note = Artificially Synthesized Probe
  source 1..80: mol_type = other DNA
tggatgaatgaataaatggatatacagatgggcagatggatgggtaggtgagtggagggatagatgaatggactgatgaa

SEQ ID NO: 119998 - DNA, 80 bp, synthetic construct
  misc_feature 1..80: note = Artificially Synthesized Probe
  source 1..80: mol_type = other DNA
caaatggatgaagtgggtaggcaggtgaatggatgcatggaaagatgggtaggatggatgggtgagtggatggatgaatg

SEQ ID NO: 119999 - DNA, 80 bp, synthetic construct; identical to SEQ ID NO: 39054
  misc_feature 1..80: note = Artificially Synthesized Probe
  source 1..80: mol_type = other DNA

SEQ ID NO: 120000 - DNA, 80 bp, synthetic construct
  misc_feature 1..80: note = Artificially Synthesized Probe
  source 1..80: mol_type = other DNA
aaccatgacccggggtccagctcacagttgggattgatcaatgggatgccaatgacttctaaattcagctttggcaacaa

SEQ ID NO: 120001 - DNA, 80 bp, synthetic construct
  misc_feature 1..80: note = Artificially Synthesized Probe
  source 1..80: mol_type = other DNA
cctctttgctccagaccaaggtgaacacagcccacctgatcccgccacctccataccctatcacacctggtcaaaccttc

SEQ ID NO: 120002 - DNA, 80 bp, synthetic construct; identical to SEQ ID NO: 39055
  misc_feature 1..80: note = Artificially Synthesized Probe
  source 1..80: mol_type = other DNA

SEQ ID NO: 120003 - DNA, 80 bp, synthetic construct
  misc_feature 1..80: note = Artificially Synthesized Probe
  source 1..80: mol_type = other DNA
ttgaaggtggaaattgtctgtggaatgcaggaaggaataagggaataagaattagaccaacagagtgtgtatttcgtctg

SEQ ID NO: 120004 - DNA, 80 bp, synthetic construct
  misc_feature 1..80: note = Artificially Synthesized Probe
  source 1..80: mol_type = other DNA
ttgacctctcaaagtcataaaagtataaaatgaaatgcgagcatgcatttatagttttagaaatacacgcaaggggcctg

SEQ ID NO: 120005 - DNA, 80 bp, synthetic construct
  misc_feature 1..80: note = Artificially Synthesized Probe
  source 1..80: mol_type = other DNA
gtgaatcataccacaaagccccttcattccaaattctttctgcaggagccgcgtgcatctcaggggatactctcttccca

SEQ ID NO: 120006 - DNA, 80 bp, synthetic construct
  misc_feature 1..80: note = Artificially Synthesized Probe
  source 1..80: mol_type = other DNA
gttagtaaatcctgccacttccctgagggttttaaccctgcagttggaaggtcatgtttaacagcaagacctactattat

SEQ ID NO: 120007 - DNA, 80 bp, synthetic construct
  misc_feature 1..80: note = Artificially Synthesized Probe
  source 1..80: mol_type = other DNA
cagttggaaggtcatgtttaacagcaagacctactattatgcctctgtttccatgtgaaaataaatgagtcccacaccta

SEQ ID NO: 120008 - DNA, 80 bp, synthetic construct; identical to SEQ ID NO: 39056
  misc_feature 1..80: note = Artificially Synthesized Probe
  source 1..80: mol_type = other DNA

SEQ ID NO: 120009 - DNA, 80 bp, synthetic construct
  misc_feature 1..80: note = Artificially Synthesized Probe
  source 1..80: mol_type = other DNA
agctctaaaataagaggcagaattattgtgtgttctgacaaaaaatccccagccctacctgcacctgaacttgcatcaaa

SEQ ID NO: 120010 - DNA, 80 bp, synthetic construct
  misc_feature 1..80: note = Artificially Synthesized Probe
  source 1..80: mol_type = other DNA
aaaaatccccagccctacctgcacctgaacttgcatcaaaacatgatttccatcaaaattcccatcaaaagtcttatttg

SEQ ID NO: 120011 - DNA, 80 bp, synthetic construct; identical to SEQ ID NO: 38667
  misc_feature 1..80: note = Artificially Synthesized Probe
  source 1..80: mol_type = other DNA

SEQ ID NO: 120012 - DNA, 80 bp, synthetic construct
  misc_feature 1..80: note = Artificially Synthesized Probe
  source 1..80: mol_type = other DNA
gtataaagcagtctttttgggttaattttttttttaaaccatgcaaacatccatgtcagagttaattgcactgagttggc

SEQ ID NO: 120013 - DNA, 80 bp, synthetic construct
  misc_feature 1..80: note = Artificially Synthesized Probe
  source 1..80: mol_type = other DNA
aaaggcagggaataagccagacctcagggagctcagagctagacaataaataagcacaggaataaatgagtgatccaact

SEQ ID NO: 120014 - DNA, 80 bp, synthetic construct
  misc_feature 1..80: note = Artificially Synthesized Probe
  source 1..80: mol_type = other DNA
agacaataaataagcacaggaataaatgagtgatccaactgggaggagaaccaaaagaacaaagcagagatgtgatcagt

SEQ ID NO: 120015 - DNA, 80 bp, synthetic construct
  misc_feature 1..80: note = Artificially Synthesized Probe
  source 1..80: mol_type = other DNA
atcctgtcgcactgggtctcccaggccagggggaatctggtgtggagcccaacctggatggactccatgaggtgacacct

SEQ ID NO: 120016 - DNA, 80 bp, synthetic construct
  misc_feature 1..80: note = Artificially Synthesized Probe
  source 1..80: mol_type = other DNA
catccagattcctgctgcaaacctgctgcgattaagtgtctcagggggagggtgtgtgacacaatctgatttatggtctt

SEQ ID NO: 120017 - DNA, 80 bp, synthetic construct; identical to SEQ ID NO: 39057
  misc_feature 1..80: note = Artificially Synthesized Probe
  source 1..80: mol_type = other DNA

SEQ ID NO: 120018 - DNA, 80 bp, synthetic construct
  misc_feature 1..80: note = Artificially Synthesized Probe
  source 1..80: mol_type = other DNA
atggactggactggactggctgatggactggactggctgatagactggactggctgatggacaggactgtggatgatact

SEQ ID NO: 120019 - DNA, 80 bp, synthetic construct
  misc_feature 1..80: note = Artificially Synthesized Probe
  source 1..80: mol_type = other DNA
agtagtcaactgggcagcaggacacagtctagagtctagtaaactggaggtaagaatttgggaggaggagacatgggtgt

SEQ ID NO: 120020 - DNA, 80 bp, synthetic construct; identical to SEQ ID NO: 39058
  misc_feature 1..80: note = Artificially Synthesized Probe
  source 1..80: mol_type = other DNA

SEQ ID NO: 120021 - DNA, 80 bp, synthetic construct
  misc_feature 1..80: note = Artificially Synthesized Probe
  source 1..80: mol_type = other DNA
agaacctgagctgatggcacaactgcccagtgcccagatgccggctccccgaacacagcccgacctcatcctggttcatc

SEQ ID NO: 120022 - DNA, 80 bp, synthetic construct
  misc_feature 1..80: note = Artificially Synthesized Probe
  source 1..80: mol_type = other DNA
tttaactctggatcccagtgaaggtacaatttagagtctaaaataactcaggctggtgcaaacggagctttgctaggcct

SEQ ID NO: 120023 - DNA, 80 bp, synthetic construct
  misc_feature 1..80: note = Artificially Synthesized Probe
  source 1..80: mol_type = other DNA
acagagagtctttaaagtggagtcactcaggtaggtcctcatccaacaggagaggtgtgttgtaagaagaggaaacctgg

SEQ ID NO: 120024 - DNA, 80 bp, synthetic construct
  misc_feature 1..80: note = Artificially Synthesized Probe
  source 1..80: mol_type = other DNA
tctcaaaacacattgaccttctgcccagaatctttcccctgcagagggagagggatgtctgtgaggggcctgcaacagcc

SEQ ID NO: 120025 - DNA, 80 bp, synthetic construct
  misc_feature 1..80: note = Artificially Synthesized Probe
  source 1..80: mol_type = other DNA
ttatggcagccccagcaaacaaaaactggctccatggcctcccctgtcctggcccctcagtctctacgacctgggcacct

SEQ ID NO: 120026 - DNA, 80 bp, synthetic construct; identical to SEQ ID NO: 39059
  misc_feature 1..80: note = Artificially Synthesized Probe
  source 1..80: mol_type = other DNA

SEQ ID NO: 120027 - DNA, 80 bp, synthetic construct
  misc_feature 1..80: note = Artificially Synthesized Probe
  source 1..80: mol_type = other DNA
agtgagaagggaaaaaggaaagaaaaattgagggagatgagagtatccagggcaaaagaaaggagagaaaagcaaatgaa

SEQ ID NO: 120028 - DNA, 80 bp, synthetic construct
  misc_feature 1..80: note = Artificially Synthesized Probe
  source 1..80: mol_type = other DNA
gagtatccagggcaaaagaaaggagagaaaagcaaatgaagtttaggaaaaatccagcttcggacaggtgaccctgacag

SEQ ID NO: 120029 - DNA, 80 bp, synthetic construct
  misc_feature 1..80: note = Artificially Synthesized Probe
  source 1..80: mol_type = other DNA
tctccaggtaaaagcagccgtattgggggaaggcctctattcttgtaatgaaccaaacgtttgtgccaaccccccaaatt

SEQ ID NO: 120030 - DNA, 80 bp, synthetic construct
  misc_feature 1..80: note = Artificially Synthesized Probe
  source 1..80: mol_type = other DNA
gctttgggaggctgaggtgggaggatcccttgaggccacaagtttgagaccagcctgggcaacatggcaagaccccatct

SEQ ID NO: 120031 - DNA, 80 bp, synthetic construct
  misc_feature 1..80: note = Artificially Synthesized Probe
  source 1..80: mol_type = other DNA
gtcttaaagaaaaaggggccctagagagttctctggtaccctggtttcagacttctagcctccagaatggtgagaaataa

SEQ ID NO: 120032 - DNA, 80 bp, synthetic construct
  misc_feature 1..80: note = Artificially Synthesized Probe
  source 1..80: mol_type = other DNA
taaggagagactcaacttctagggtctggctggcagacttctctcactggacaaaccattctagagaaaagcaaagatgc

SEQ ID NO: 120033 - DNA, 80 bp, synthetic construct; identical to SEQ ID NO: 39060
  misc_feature 1..80: note = Artificially Synthesized Probe
  source 1..80: mol_type = other DNA

SEQ ID NO: 120034 - DNA, 80 bp, synthetic construct
  misc_feature 1..80: note = Artificially Synthesized Probe
  source 1..80: mol_type = other DNA
agtcaggtgccggaatggccaggctgagatgcagctgcgcgtgcctcattccccaaccgcccattggatggaggtgtgcc

SEQ ID NO: 120035 - DNA, 80 bp, synthetic construct
  misc_feature 1..80: note = Artificially Synthesized Probe
  source 1..80: mol_type = other DNA
cttctgatgtagctggacaagaagtgtgttcttcttccagcattgaatcagatcctgtctctcaaaatgagcctcagata

SEQ ID NO: 120036 - DNA, 80 bp, synthetic construct; identical to SEQ ID NO: 39061
  misc_feature 1..80: note = Artificially Synthesized Probe
  source 1..80: mol_type = other DNA

SEQ ID NO: 120037 - DNA, 80 bp, synthetic construct
  misc_feature 1..80: note = Artificially Synthesized Probe
  source 1..80: mol_type = other DNA
tcggaaaggcctagggtggtctccactttctggattagactctcacccccaggccaccagggagcggtctgctgcagtct

SEQ ID NO: 120038 - DNA, 80 bp, synthetic construct
  misc_feature 1..80: note = Artificially Synthesized Probe
  source 1..80: mol_type = other DNA
accccaactcaaacttgggcttgcaaaagccaggaaagtggccccgaatcttgcacttaatatagaaaccacatcgtttc

SEQ ID NO: 120039 - DNA, 80 bp, synthetic construct
  misc_feature 1..80: note = Artificially Synthesized Probe
  source 1..80: mol_type = other DNA
gaaaatggaagttgggaaccgagactcatttttgagagaaatggtcaaaagagccacacccggctaattaggattctgag

SEQ ID NO: 120040 - DNA, 80 bp, synthetic construct
  misc_feature 1..80: note = Artificially Synthesized Probe
  source 1..80: mol_type = other DNA
ggttcacggagcttgcatttgggaatccgaggagagcaatttacaaggagtaaggataaaatctaaagtcctatctcagt

SEQ ID NO: 120041 - DNA, 80 bp, synthetic construct
  misc_feature 1..80: note = Artificially Synthesized Probe
  source 1..80: mol_type = other DNA
ttacaaggagtaaggataaaatctaaagtcctatctcagtaggaatgacttttcttatcagttcacgcaggggcccggag

SEQ ID NO: 120042 - DNA, 80 bp, synthetic construct; identical to SEQ ID NO: 39062
  misc_feature 1..80: note = Artificially Synthesized Probe
  source 1..80: mol_type = other DNA

SEQ ID NO: 120043 - DNA, 80 bp, synthetic construct
  misc_feature 1..80: note = Artificially Synthesized Probe
  source 1..80: mol_type = other DNA
acacacaagtcaacaaataggagatttttgtgatttctaaaggtccacttttgctggagttttcctatgtctacccggca

SEQ ID NO: 120044 - DNA, 80 bp, synthetic construct
  misc_feature 1..80: note = Artificially Synthesized Probe
  source 1..80: mol_type = other DNA
aggtccacttttgctggagttttcctatgtctacccggcaaattttcatctccccatttccctaaggaaacatttcttaa

SEQ ID NO: 120045 - DNA, 80 bp, synthetic construct
  misc_feature 1..80: note = Artificially Synthesized Probe
  source 1..80: mol_type = other DNA
ccagcctctgccttcactccctcgctgtggctctcaccccagcagacaaggcctggggctgacattccatgaagccagga

SEQ ID NO: 120046 - DNA, 80 bp, synthetic construct
  misc_feature 1..80: note = Artificially Synthesized Probe
  source 1..80: mol_type = other DNA
gagagaatgaggtcccttggggtagtggatccccactctgactctctcaagttctagaatacgaaggtgccatcctgagg

SEQ ID NO: 120047 - DNA, 80 bp, synthetic construct
  misc_feature 1..80: note = Artificially Synthesized Probe
  source 1..80: mol_type = other DNA
ccaaggatcaggccaggactccaccaacggaggacgagaggcaagagccgctgttaacagcaaacagctatgtccactgc

SEQ ID NO: 120048 - DNA, 80 bp, synthetic construct
  misc_feature 1..80: note = Artificially Synthesized Probe
  source 1..80: mol_type = other DNA
agaatcgacgctatagatttgtattcattacccactgaattcagagccagccagacatccacgtctcaccccaataaaag

SEQ ID NO: 120049 - DNA, 80 bp, synthetic construct; identical to SEQ ID NO: 39063
  misc_feature 1..80: note = Artificially Synthesized Probe
  source 1..80: mol_type = other DNA

SEQ ID NO: 120050 - DNA, 80 bp, synthetic construct
  misc_feature 1..80: note = Artificially Synthesized Probe
  source 1..80: mol_type = other DNA
tgtctggacttcatgtactgacagtgtgtttgctaccacttaattccatcactgactgtgcctccctctaaattgatcag

SEQ ID NO: 120051 - DNA, 80 bp, synthetic construct
  misc_feature 1..80: note = Artificially Synthesized Probe
  source 1..80: mol_type = other DNA
catttgacagcataattgaagacacaaatatgaagcctaatgaagagtttcttttctcgaggaagactccctcgttctca

SEQ ID NO: 120052 - DNA, 80 bp, synthetic construct
  misc_feature 1..80: note = Artificially Synthesized Probe
  source 1..80: mol_type = other DNA
tgaagagtttcttttctcgaggaagactccctcgttctcactttcaatggcttggcccagagggtgcaggtgaagaaggt

SEQ ID NO: 120053 - DNA, 80 bp, synthetic construct
  misc_feature 1..80: note = Artificially Synthesized Probe
  source 1..80: mol_type = other DNA
tgtgtaaaatggaaataatactataataaacaatgacaacagtcaagagtccctctaccaccactgctactagctgggca

SEQ ID NO: 120054 - DNA, 80 bp, synthetic construct
  misc_feature 1..80: note = Artificially Synthesized Probe
  source 1..80: mol_type = other DNA
gaaggtgggttccagagtccaggctcagcctatggactgagctgggccatgtccacatcttacacagtcagcctcacacc

SEQ ID NO: 120055 - DNA, 80 bp, synthetic construct
  misc_feature 1..80: note = Artificially Synthesized Probe
  source 1..80: mol_type = other DNA
gtttagaggctctgcaaatgaactcagaccggtagtaactcctgcaacgcacatttgctttgcacccctccagggtatgg

SEQ ID NO: 120056 - DNA, 80 bp, synthetic construct; identical to SEQ ID NO: 39064
  misc_feature 1..80: note = Artificially Synthesized Probe
  source 1..80: mol_type = other DNA

SEQ ID NO: 120057 - DNA, 80 bp, synthetic construct
  misc_feature 1..80: note = Artificially Synthesized Probe
  source 1..80: mol_type = other DNA
gtgcgactgtatagggagatgggctttaaagaggcaactaaattaaagtgaggccagatggggcaggtcctaaatccaat

SEQ ID NO: 120058 - DNA, 80 bp, synthetic construct
  misc_feature 1..80: note = Artificially Synthesized Probe
  source 1..80: mol_type = other DNA
cacagtcttatgatgagaaaggctccagaatcacgtgtaggtgtcctcaacatttcatagctcgaaccgtcctttcttta

SEQ ID NO: 120059 - DNA, 80 bp, synthetic construct
  misc_feature 1..80: note = Artificially Synthesized Probe
  source 1..80: mol_type = other DNA
gtgagacgataaatgacttgtgtaagcctccctgtctgtggtgctttatgacggcagctggagcaaactcatacaccata

SEQ ID NO: 120060 - DNA, 80 bp, synthetic construct; identical to SEQ ID NO: 39065
  misc_feature 1..80: note = Artificially Synthesized Probe
  source 1..80: mol_type = other DNA

SEQ ID NO: 120061 - DNA, 80 bp, synthetic construct
  misc_feature 1..80: note = Artificially Synthesized Probe
  source 1..80: mol_type = other DNA
caccgtgtcatcttggcatgtccccatcatctccttgattgtcctcccccagacagggggctcgacggggagtccatggt

SEQ ID NO: 120062 - DNA, 80 bp, synthetic construct
  misc_feature 1..80: note = Artificially Synthesized Probe
  source 1..80: mol_type = other DNA
aaaccctcacaaaagtccacaagagtgtccccccaaatccatgtccacccagaacctacgaatggggccttaactggaaa

SEQ ID NO: 120063 - DNA, 80 bp, synthetic construct
  misc_feature 1..80: note = Artificially Synthesized Probe
  source 1..80: mol_type = other DNA
tgctggaggctcacccaggcagagtgtgctccacttcgttccaggggactgagagaaatgaacccggggtgagacccaga

SEQ ID NO: 120064 - DNA, 80 bp, synthetic construct
  misc_feature 1..80: note = Artificially Synthesized Probe
  source 1..80: mol_type = other DNA
tcagttcctgggccataactgagatggggtgcccaggaggaagggccagctggccaggaaagatggggtatgttcactgg

SEQ ID NO: 120065 - DNA, 80 bp, synthetic construct; identical to SEQ ID NO: 39066
  misc_feature 1..80: note = Artificially Synthesized Probe
  source 1..80: mol_type = other DNA

SEQ ID NO: 120066 - DNA, 80 bp, synthetic construct
  misc_feature 1..80: note = Artificially Synthesized Probe
  source 1..80: mol_type = other DNA
acccaagtagctgggactacaggcacccgccaccacgcccggctaatctttgtatttttagtagagacggggtttcacca

SEQ ID NO: 120067 - DNA, 80 bp, synthetic construct
  misc_feature 1..80: note = Artificially Synthesized Probe
  source 1..80: mol_type = other DNA
cacagggcaccagggctcatgggggtggatggtgcccacgtgctgctgggcacacacctgccctgtccccctcagctgag

SEQ ID NO: 120068 - DNA, 80 bp, synthetic construct
  misc_feature 1..80: note = Artificially Synthesized Probe
  source 1..80: mol_type = other DNA
attttcagctgatgacttctgtaaagaccctacctctaaacaaggtcacactctgagatcctcagggtgatacttcaaca

SEQ ID NO: 120069 - DNA, 80 bp, synthetic construct
  misc_feature 1..80: note = Artificially Synthesized Probe
  source 1..80: mol_type = other DNA
gatgggcgggggtggggagcagagagcagagcaagggcaaccacagaacctggggccacaccaccttctgagatgagcca

SEQ ID NO: 120070 - DNA, 80 bp, synthetic construct; identical to SEQ ID NO: 39067
  misc_feature 1..80: note = Artificially Synthesized Probe
  source 1..80: mol_type = other DNA

SEQ ID NO: 120071 - DNA, 80 bp, synthetic construct
  misc_feature 1..80: note = Artificially Synthesized Probe
  source 1..80: mol_type = other DNA
aagaggcacagtccccatctgaatttgactgagagactctttgaagccgtctgagatttccatatacgatttctattaat

SEQ ID NO: 120072 - DNA, 80 bp, synthetic construct
  misc_feature 1..80: note = Artificially Synthesized Probe
  source 1..80: mol_type = other DNA
ttgaagccgtctgagatttccatatacgatttctattaatatttaaggcaagacgcatcccatcctccataacaacaccg

SEQ ID NO: 120073 - DNA, 80 bp, synthetic construct
  misc_feature 1..80: note = Artificially Synthesized Probe
  source 1..80: mol_type = other DNA
atttaaggcaagacgcatcccatcctccataacaacaccgtcttgaaagaagcctttgaactacttgaaaggtaaaccca

SEQ ID NO: 120074 - DNA, 80 bp, synthetic construct
  misc_feature 1..80: note = Artificially Synthesized Probe
  source 1..80: mol_type = other DNA
ctcacctgctctgatctttgcagagctcaagacatcttcaattaaaaagaattctgagaggcagagaagcccttattctc

SEQ ID NO: 120075 - DNA, 80 bp, synthetic construct
  misc_feature 1..80: note = Artificially Synthesized Probe
  source 1..80: mol_type = other DNA
gcattattcttggattaagaactcttgttcattcaacaaatacagccccacgacgacatccctgaacaccagagccagag

SEQ ID NO: 120076 - DNA, 80 bp, synthetic construct; identical to SEQ ID NO: 39068
  misc_feature 1..80: note = Artificially Synthesized Probe
  source 1..80: mol_type = other DNA

SEQ ID NO: 120077 - DNA, 80 bp, synthetic construct
  misc_feature 1..80: note = Artificially Synthesized Probe
  source 1..80: mol_type = other DNA
tctttttgcagatccacattgaaggtagggaactctgtctttactcctgagagctcgtgttggaaggtactcatgagtga

SEQ ID NO: 120078 - DNA, 80 bp, synthetic construct
  misc_feature 1..80: note = Artificially Synthesized Probe
  source 1..80: mol_type = other DNA
tagaagcgcttggtggacacagtgggtgcaaacgaccaagtggctggatggagggaagagagaccctcagatggagggaa

SEQ ID NO: 120079 - DNA, 80 bp, synthetic construct
  misc_feature 1..80: note = Artificially Synthesized Probe
  source 1..80: mol_type = other DNA
ccacactgaccacttgaaaactgatgggtggcaattttcacccctcattgtcctaagggtcgtgggggctgctttgcttg

SEQ ID NO: 120080 - DNA, 80 bp, synthetic construct
  misc_feature 1..80: note = Artificially Synthesized Probe
  source 1..80: mol_type = other DNA
attacaaaagctaaagacatcctgggcacctgtgagaaaggaagagcggaggtagttcccacgtccatcctggtgcctct

SEQ ID NO: 120081 - DNA, 80 bp, synthetic construct
  misc_feature 1..80: note = Artificially Synthesized Probe
  source 1..80: mol_type = other DNA
cagcactcagaggctattctcagacactaaacaatgagttttgcctttcaaatgcatttgatacaatttgcttggaaggc

SEQ ID NO: 120082 - DNA, 80 bp, synthetic construct; identical to SEQ ID NO: 39069
  misc_feature 1..80: note = Artificially Synthesized Probe
  source 1..80: mol_type = other DNA

SEQ ID NO: 120083 - DNA, 80 bp, synthetic construct
  misc_feature 1..80: note = Artificially Synthesized Probe
  source 1..80: mol_type = other DNA
tccgtggaggaggaggggctgcccagaggtgaggcagttgggatccctaaccttctagcagtggtcccatgaaggaggag

SEQ ID NO: 120084 - DNA, 80 bp, synthetic construct; identical to SEQ ID NO: 38668
  misc_feature 1..80: note = Artificially Synthesized Probe
  source 1..80: mol_type = other DNA

SEQ ID NO: 120085 - DNA, 80 bp, synthetic construct
  misc_feature 1..80: note = Artificially Synthesized Probe
  source 1..80: mol_type = other DNA
gcgtcccctgctcacagccagccattgcttcctccatttaccattttttttttttttgccagttcatgaacaactttgct

SEQ ID NO: 120086 - DNA, 80 bp, synthetic construct
  misc_feature 1..80: note = Artificially Synthesized Probe
  source 1..80: mol_type = other DNA
attgtttacaacgatctcatgggattagaataccaaacagtgatgccagtgagaagaccaaataaccttcattcctagca

SEQ ID NO: 120087 - DNA, 80 bp, synthetic construct
  misc_feature 1..80: note = Artificially Synthesized Probe
  source 1..80: mol_type = other DNA
gaactgtgtcctgcccaaatttatatgctggagtcctaatccctagtatctcaaaatatgaccttactttgcagatacag

SEQ ID NO: 120088 - DNA, 80 bp, synthetic construct; identical to SEQ ID NO: 39070
  misc_feature 1..80: note = Artificially Synthesized Probe
  source 1..80: mol_type = other DNA

SEQ ID NO: 120089 - DNA, 80 bp, synthetic construct
  misc_feature 1..80: note = Artificially Synthesized Probe
  source 1..80: mol_type = other DNA
tctatctatccattcacccatccagctatccctctaatctaatctaatccaatctaatctaatctaatctatctaatcta

SEQ ID NO: 120090 - DNA, 80 bp, synthetic construct
  misc_feature 1..80: note = Artificially Synthesized Probe
  source 1..80: mol_type = other DNA
cagcctcctgagaagctggaactacaggcacatgcccttcctctgtatggcaaaattattttcattaacagtcatgtaat

SEQ ID NO: 120091 - DNA, 80 bp, synthetic construct
  misc_feature 1..80: note = Artificially Synthesized Probe
  source 1..80: mol_type = other DNA
ttccaccttgtagttcacatccactgccgtttcaaattttaaacacagatgaaaactccgagtggctacctagaatgaca

SEQ ID NO: 120092 - DNA, 80 bp, synthetic construct
  misc_feature 1..80: note = Artificially Synthesized Probe
  source 1..80: mol_type = other DNA
aaacacagatgaaaactccgagtggctacctagaatgacagcactgaaggaacacgagttcactttgtctttatagttac

SEQ ID NO: 120093 - DNA, 80 bp, synthetic construct
  misc_feature 1..80: note = Artificially Synthesized Probe
  source 1..80: mol_type = other DNA
cccactcatgcctgagaaccacatgtaactataacaggcttccccaagttaatgttcatacagaatatggtattcactaa

SEQ ID NO: 120094 - DNA, 80 bp, synthetic construct; identical to SEQ ID NO: 39071
  misc_feature 1..80: note = Artificially Synthesized Probe
  source 1..80: mol_type = other DNA

SEQ ID NO: 120095 - DNA, 80 bp, synthetic construct
  misc_feature 1..80: note = Artificially Synthesized Probe
  source 1..80: mol_type = other DNA
acatttagctggctttattgttatttggaattctctccagatgaagcaatagaagtgccctcctgttgcgtgtacctggg

SEQ ID NO: 120096 - DNA, 80 bp, synthetic construct
  misc_feature 1..80: note = Artificially Synthesized Probe
  source 1..80: mol_type = other DNA
ggaggctgaggcaggagaaaggcgtgaacccgggagtggaggttgcagtgagccgagattgcgccactgcactccagcct

SEQ ID NO: 120097 - DNA, 80 bp, synthetic construct
  misc_feature 1..80: note = Artificially Synthesized Probe
  source 1..80: mol_type = other DNA
agcctgggaaacacagtgaaagccccgtctctacaaaaatataaaaattagctgggtgtggtgacgcatacctgtggtcc

SEQ ID NO: 120098 - DNA, 80 bp, synthetic construct
  misc_feature 1..80: note = Artificially Synthesized Probe
  source 1..80: mol_type = other DNA
gtaatccaagcactttgggagcccgaggtgggcagatcacctgaggttgggagtttgagaccagcctgaccaacatggag

SEQ ID NO: 120099 - DNA, 80 bp, synthetic construct
  misc_feature 1..80: note = Artificially Synthesized Probe
  source 1..80: mol_type = other DNA
agagtgaaactccatctcaaaaaaaaattatatatacatatatacacacacgtatatacataatatacacacatgtatat

SEQ ID NO: 120100 - DNA, 80 bp, synthetic construct
  misc_feature 1..80: note = Artificially Synthesized Probe
  source 1..80: mol_type = other DNA
tgggcaacatagtgagaccccatttctacaaaaaatacaagttagccaggtgtactggtgtgtgcctgtggtcccagcta

SEQ ID NO: 120101 - DNA, 80 bp, synthetic construct
  misc_feature 1..80: note = Artificially Synthesized Probe
  source 1..80: mol_type = other DNA
tgaaacctcatctctactaaaaatacaaaaaattagctgggcgtggtatcgggcacctatagtcccagctactcgggagg

SEQ ID NO: 120102 - DNA, 80 bp, synthetic construct
  misc_feature 1..80: note = Artificially Synthesized Probe
  source 1..80: mol_type = other DNA
acacatgcatacacatgcatatattgcatgttgattcattaacggggaagctgaggttcagaggagtgtttcatccatgt

SEQ ID NO: 120103 - DNA, 80 bp, synthetic construct
  misc_feature 1..80: note = Artificially Synthesized Probe
  source 1..80: mol_type = other DNA
atgttccatcagaaggggccagcatgctgaggcagagcgccctgtctagtggccactccaatactctggtcccgtgactg

SEQ ID NO: 120104 - DNA, 80 bp, synthetic construct; identical to SEQ ID NO: 39073
  misc_feature 1..80: note = Artificially Synthesized Probe
  source 1..80: mol_type = other DNA

SEQ ID NO: 120105 - DNA, 80 bp, synthetic construct
  misc_feature 1..80: note = Artificially Synthesized Probe
  source 1..80: mol_type = other DNA
ctaaaggagcaacaatggtgttctgaattattttcccctctttttggaacgcatcaacatgtaatttgtgccccgctcgc

SEQ ID NO: 120106 - DNA, 80 bp, synthetic construct
  misc_feature 1..80: note = Artificially Synthesized Probe
  source 1..80: mol_type = other DNA
tctgccggcatacgtcgcctgactttctgctgttctattctttggcagaacacccttcccctgcctgctggctgcctgga

SEQ ID NO: 120107 - DNA, 80 bp, synthetic construct
  misc_feature 1..80: note = Artificially Synthesized Probe
  source 1..80: mol_type = other DNA
gatagaggggatagaacatgaacacctttggccactgtgattggttcaaggatggttgatacccaaagccatgtcattgg

SEQ ID NO: 120108 - DNA, 80 bp, synthetic construct; identical to SEQ ID NO: 39074
  misc_feature 1..80: note = Artificially Synthesized Probe
  source 1..80: mol_type = other DNA

SEQ ID NO: 120109 - DNA, 80 bp, synthetic construct
  misc_feature 1..80: note = Artificially Synthesized Probe
  source 1..80: mol_type = other DNA
acaaatatttgtcaagcacctaccaggtggcagaagccatattggttgggtgtgctggggaaaagagaagacgttaacac

SEQ ID NO: 120110 - DNA, 80 bp, synthetic construct
  misc_feature 1..80: note = Artificially Synthesized Probe
  source 1..80: mol_type = other DNA
tgtggatgaagtcagcactgcagaaggctgccccatccacatctctcttacaaaaccaagccgcagctccctcctgctga

SEQ ID NO: 120111 - DNA, 80 bp, synthetic construct
  misc_feature 1..80: note = Artificially Synthesized Probe
  source 1..80: mol_type = other DNA
gaaaattcggaacaaacatacagggcatcatcacacgggaattccccatcctgctttctggagcaatttaccatattaat

SEQ ID NO: 120112 - DNA, 80 bp, synthetic construct
  misc_feature 1..80: note = Artificially Synthesized Probe
  source 1..80: mol_type = other DNA
attccccatcctgctttctggagcaatttaccatattaattggctgtggctgatgctcagaaatcatggaaagccacgtt

SEQ ID NO: 120113 - DNA, 80 bp, synthetic construct; identical to SEQ ID NO: 39075
  misc_feature 1..80: note = Artificially Synthesized Probe
  source 1..80: mol_type = other DNA

SEQ ID NO: 120114 - DNA, 80 bp, synthetic construct
  misc_feature 1..80: note = Artificially Synthesized Probe
  source 1..80: mol_type = other DNA
gaaggcgccatgaagggtgagatcagggtgatgctttgagatgctaaaggttgccaggaaaccgtcagctcctatgggag

SEQ ID NO: 120115 - DNA, 80 bp, synthetic construct
  misc_feature 1..80: note = Artificially Synthesized Probe
  source 1..80: mol_type = other DNA
cagctccagccagactctctgcccctccaggtcatgtgacttctcctttaccatctctcccccaggggacatcctgaagt

SEQ ID NO: 120116 - DNA, 80 bp, synthetic construct
  misc_feature 1..80: note = Artificially Synthesized Probe
  source 1..80: mol_type = other DNA
gggaccagaatcccatgaactgctgctgcttcattagctgtttaatgtgtcccttctggcttggctaaaagcaacagcac

SEQ ID NO: 120117 - DNA, 80 bp, synthetic construct
  misc_feature 1..80: note = Artificially Synthesized Probe
  source 1..80: mol_type = other DNA
gcatattcttatgaggctccgatatttgaaatcccaaaaggcacttcaagaaaggactctcgattctctgtctgaattcg

SEQ ID NO: 120118 - DNA, 80 bp, synthetic construct
  misc_feature 1..80: note = Artificially Synthesized Probe
  source 1..80: mol_type = other DNA
tttttcttcagctccaatacccaggtgcttttgcatattaacaaaaattaagatctctgtgactatttcctgactccaat

SEQ ID NO: 120119 - DNA, 80 bp, synthetic construct; identical to SEQ ID NO: 39076
  misc_feature 1..80: note = Artificially Synthesized Probe
  source 1..80: mol_type = other DNA

SEQ ID NO: 120120 - DNA, 80 bp, synthetic construct
  misc_feature 1..80: note = Artificially Synthesized Probe
  source 1..80: mol_type = other DNA
aagggcacaagcaaggagtcagggaaagcggagtccacagggatcccaggcctctcccaggaatggtgacagagcttcct

SEQ ID NO: 120121 - DNA, 80 bp, synthetic construct
  misc_feature 1..80: note = Artificially Synthesized Probe
  source 1..80: mol_type = other DNA
cttgggatagttagcccaggcaccccaatgtctatcccgagctcacctgctagcctgggcatagataacctgggcagcct

SEQ ID NO: 120122 - DNA, 80 bp, synthetic construct
  misc_feature 1..80: note = Artificially Synthesized Probe
  source 1..80: mol_type = other DNA
tcgggggctgctggaagagtctacgaagaaagttggggagatggatggaggtgcgctgagaaaaggaacaccctgaacag

SEQ ID NO: 120123 - DNA, 80 bp, synthetic construct
  misc_feature 1..80: note = Artificially Synthesized Probe
  source 1..80: mol_type = other DNA
ttcaagtcacctggaagcgggcatgccccctctgtgaggccaggggcatgtgcccatggaacacagaagtcaagactctt

SEQ ID NO: 120124 - DNA, 80 bp, synthetic construct; identical to SEQ ID NO: 39077
  misc_feature 1..80: note = Artificially Synthesized Probe
  source 1..80: mol_type = other DNA

SEQ ID NO: 120125 - DNA, 80 bp, synthetic construct
  misc_feature 1..80: note = Artificially Synthesized Probe
  source 1..80: mol_type = other DNA
caccaacttttgggcatcccaaccctgaacgacaattacttctggaagcaccttgagagtctttctttttgttaatagaa

SEQ ID NO: 120126 - DNA, 80 bp, synthetic construct; identical to SEQ ID NO: 38669
  misc_feature 1..80: note = Artificially Synthesized Probe
  source 1..80: mol_type = other DNA

SEQ ID NO: 120127 - DNA, 80 bp, synthetic construct
  misc_feature 1..80: note = Artificially Synthesized Probe
  source 1..80: mol_type = other DNA
aggcctgcaccaccacgcttggctaattattttattttctaaaatttttgtagagatgaagtctcaccatctcacccagg

SEQ ID NO: 120128 - DNA, 80 bp, synthetic construct; identical to SEQ ID NO: 39078
  misc_feature 1..80: note = Artificially Synthesized Probe
  source 1..80: mol_type = other DNA

SEQ ID NO: 120129 - DNA, 80 bp, synthetic construct
  misc_feature 1..80: note = Artificially Synthesized Probe
  source 1..80: mol_type = other DNA
ggattgtcctcttctgggtagatcccaataatctttctccccaggtggatgggtgagcacagagttctagaattccagag

SEQ ID NO: 120130 - DNA, 80 bp, synthetic construct
  misc_feature 1..80: note = Artificially Synthesized Probe
  source 1..80: mol_type = other DNA
ccaggtggatgggtgagcacagagttctagaattccagagctcttttgagtatactagatcctttggctttaattttatt

SEQ ID NO: 120131 - DNA, 80 bp, synthetic construct
  misc_feature 1..80: note = Artificially Synthesized Probe
  source 1..80: mol_type = other DNA
atagggtcttgctaagttgcccaggctggtctcaaactcctggcctcaaaggatcctcccagcccagcctcccaaagtct

SEQ ID NO: 120132 - DNA, 80 bp, synthetic construct
  misc_feature 1..80: note = Artificially Synthesized Probe
  source 1..80: mol_type = other DNA
tgctggcaggtgagacaaacagcatggaggaggaggaggagggagggagtggggaaagggaaggaatgagcaagggagaa

SEQ ID NO: 120133 - DNA, 80 bp, synthetic construct
  misc_feature 1..80: note = Artificially Synthesized Probe
  source 1..80: mol_type = other DNA
gttctatagcctacaagcaagggatttaatacatatctcagagtgatggggaaattgattttccttgataaaatggccca

SEQ ID NO: 120134 - DNA, 80 bp, synthetic construct; identical to SEQ ID NO: 39079
  misc_feature 1..80: note = Artificially Synthesized Probe
  source 1..80: mol_type = other DNA

SEQ ID NO: 120135 - DNA, 80 bp, synthetic construct
  misc_feature 1..80: note = Artificially Synthesized Probe
  source 1..80: mol_type = other DNA
caggggtgaggggtggcggtgcagggagaggacggtgatccccacggctttgctaaaaggcggcagtggcttatcctcat

SEQ ID NO: 120136 - DNA, 80 bp, synthetic construct
  misc_feature 1..80: note = Artificially Synthesized Probe
  source 1..80: mol_type = other DNA
aaactgcagggcaggcaggaggcaggtggaggtgagggcgggcttgcctgcggcctgtgggaggggagggcaggagccag

SEQ ID NO: 120137 - DNA, 80 bp, synthetic construct
  misc_feature 1..80: note = Artificially Synthesized Probe
  source 1..80: mol_type = other DNA
cctgcgccgaaaacggggcagtgaaggcgcctccctaacagggctgtcattaggattgagcactgagcactgagcccagg

SEQ ID NO: 120138 - DNA, 80 bp, synthetic construct; identical to SEQ ID NO: 39080
  misc_feature 1..80: note = Artificially Synthesized Probe
  source 1..80: mol_type = other DNA

SEQ ID NO: 120139 - DNA, 80 bp, synthetic construct
  misc_feature 1..80: note = Artificially Synthesized Probe
  source 1..80: mol_type = other DNA
cctcaagtcccatttatcccattgagggggggctcccagcatggagctctgcactcttccttgcaggagctcagagcacg

SEQ ID NO: 120140 - DNA, 80 bp, synthetic construct
  misc_feature 1..80: note = Artificially Synthesized Probe
  source 1..80: mol_type = other DNA
agggtgtgctgcggtgtggagcaggacagagcaaaactagggggcccgggaaagcccccagggtgcacctcaccaccctc

SEQ ID NO: 120141 - DNA, 80 bp, synthetic construct
  misc_feature 1..80: note = Artificially Synthesized Probe
  source 1..80: mol_type = other DNA
gaacaccttacaagaggggaccaggaaggaggaatctgccttggtcatgaccttggtggtcttcagccctctgcaggagt

SEQ ID NO: 120142 - DNA, 80 bp, synthetic construct
  misc_feature 1..80: note = Artificially Synthesized Probe
  source 1..80: mol_type = other DNA
actttctgggagaatggatgcagagagcaagaggagaatgcaccagcccatgcttggctcaggccagtgcaccagggcac

SEQ ID NO: 120143 - DNA, 80 bp, synthetic construct; identical to SEQ ID NO: 39081
  misc_feature 1..80: note = Artificially Synthesized Probe
  source 1..80: mol_type = other DNA

SEQ ID NO: 120144 - DNA, 80 bp, synthetic construct
  misc_feature 1..80: note = Artificially Synthesized Probe
  source 1..80: mol_type = other DNA
aatctgtttatctgcacaacctcctgcgtgttacttagaaacaccacacaaatctgcacagctttaatactccccgaatt

SEQ ID NO: 120145 - DNA, 80 bp, synthetic construct
  misc_feature 1..80: note = Artificially Synthesized Probe
  source 1..80: mol_type = other DNA
tcccagctgctggaggagctctggggttcatggtgaccggattggaagggaatgaccattgaaactgcactgggtcttct

SEQ ID NO: 120146 - DNA, 80 bp, synthetic construct
  misc_feature 1..80: note = Artificially Synthesized Probe
  source 1..80: mol_type = other DNA
ggcgcgatttcggctcactgcaacctccgcctcccaggttcaagcgattctcctgcctcaccctcccgagtagctgggat

SEQ ID NO: 120147 - DNA, 80 bp, synthetic construct
  misc_feature 1..80: note = Artificially Synthesized Probe
  source 1..80: mol_type = other DNA
ccaggggtcttttctaaattccacgtgtatgtcagggtatgttatctaagagtttcatttgaggataatgaaggagatgt

SEQ ID NO: 120148 - DNA, 80 bp, synthetic construct
  misc_feature 1..80: note = Artificially Synthesized Probe
  source 1..80: mol_type = other DNA
gttatctaagagtttcatttgaggataatgaaggagatgttatacaacactttttctaagagaactggggtctcgtgtgg

SEQ ID NO: 120149 - DNA, 80 bp, synthetic construct; identical to SEQ ID NO: 39082
  misc_feature 1..80: note = Artificially Synthesized Probe
  source 1..80: mol_type = other DNA

SEQ ID NO: 120150 - DNA, 80 bp, synthetic construct
  misc_feature 1..80: note = Artificially Synthesized Probe
  source 1..80: mol_type = other DNA
ccgcagggcgggctccagtgagtaaaggggctgcgcaggaggcatggggcaagggtgtggacagaacgtggtaacgaaca

SEQ ID NO: 120151 - DNA, 80 bp, synthetic construct
  misc_feature 1..80: note = Artificially Synthesized Probe
  source 1..80: mol_type = other DNA
ctccctgggcgtcggtgctggaaatcggccaaatgtaaaaataccctcccaacccaacacgctggccacctgtggccctt

SEQ ID NO: 120152 - DNA, 80 bp, synthetic construct
  misc_feature 1..80: note = Artificially Synthesized Probe
  source 1..80: mol_type = other DNA
ccccccagtctatgtgttgaaaccctcaccgccagtgtgatggggttgggaggcggggactctgggaagtgattacatca

SEQ ID NO: 120153 - DNA, 80 bp, synthetic construct
  misc_feature 1..80: note = Artificially Synthesized Probe
  source 1..80: mol_type = other DNA
cgaccccttcagctgacatgaaaatgacaccaagcaagactccagagtggcagacgaacaacagagctggttatgtccgg

SEQ ID NO: 120154 - DNA, 80 bp, synthetic construct; identical to SEQ ID NO: 39083
  misc_feature 1..80: note = Artificially Synthesized Probe
  source 1..80: mol_type = other DNA

SEQ ID NO: 120155 - DNA, 80 bp, synthetic construct
  misc_feature 1..80: note = Artificially Synthesized Probe
  source 1..80: mol_type = other DNA
tctgatctaatgaaatgaaataggtgaggatttggggttttccttggaagctgctggttctacttgcaaacacaaaggct

SEQ ID NO: 120156 - DNA, 80 bp, synthetic construct
  misc_feature 1..80: note = Artificially Synthesized Probe
  source 1..80: mol_type = other DNA
tccttggaagctgctggttctacttgcaaacacaaaggctattgtgattactgcagatcatcatttgtgtctcattggaa

SEQ ID NO: 120157 - DNA, 80 bp, synthetic construct
  misc_feature 1..80: note = Artificially Synthesized Probe
  source 1..80: mol_type = other DNA
attgtgattactgcagatcatcatttgtgtctcattggaaggagcacatttcacagtcaaaatgccaggtaaactgaaat

SEQ ID NO: 120158 - DNA, 80 bp, synthetic construct
  misc_feature 1..80: note = Artificially Synthesized Probe
  source 1..80: mol_type = other DNA
taagcaatctgtttgaaaacaccaccctctattcatcatctatacatatctaaagcataattatacaggcacccggtctt

SEQ ID NO: 120159 - DNA, 80 bp, synthetic construct
  misc_feature 1..80: note = Artificially Synthesized Probe
  source 1..80: mol_type = other DNA
tatacatatctaaagcataattatacaggcacccggtcttgaaacctagcaacagtatccaagtattccttcgtcggcta

SEQ ID NO: 120160 - DNA, 80 bp, synthetic construct; identical to SEQ ID NO: 39084
  misc_feature 1..80: note = Artificially Synthesized Probe
  source 1..80: mol_type = other DNA

SEQ ID NO: 120161 - DNA, 80 bp, synthetic construct
  misc_feature 1..80: note = Artificially Synthesized Probe
  source 1..80: mol_type = other DNA
ctggacgacaacaagcaaggattaactgtggtattcacgtccacatttaaaccatcactttcttcgagttggcaaataaa

SEQ ID NO: 120162 - DNA, 80 bp, synthetic construct
  misc_feature 1..80: note = Artificially Synthesized Probe
  source 1..80: mol_type = other DNA
aatccatttctgggttctacagacctcagagcacccattcatcacctcacagtgttcattgtcttctcccctaaagccac

SEQ ID NO: 120163 - DNA, 80 bp, synthetic construct
  misc_feature 1..80: note = Artificially Synthesized Probe
  source 1..80: mol_type = other DNA
aaacatcccattgaccaggctgtacacggcaagtcagaaaaatgtgtggtattttaatttacccactttgaagcaccaac

SEQ ID NO: 120164 - DNA, 80 bp, synthetic construct
  misc_feature 1..80: note = Artificially Synthesized Probe
  source 1..80: mol_type = other DNA
aatgtgtggtattttaatttacccactttgaagcaccaacatccaccccacacccacctctagcttggaatttgcttcca

SEQ ID NO: 120165 - DNA, 80 bp, synthetic construct; identical to SEQ ID NO: 39085
  misc_feature 1..80: note = Artificially Synthesized Probe
  source 1..80: mol_type = other DNA

SEQ ID NO: 120166 - DNA, 80 bp, synthetic construct
  misc_feature 1..80: note = Artificially Synthesized Probe
  source 1..80: mol_type = other DNA
aggaagccaagccacagaacctagaatcaggaagccacatggccacccacgatctaaagcagaaatccagaaatccctgg

SEQ ID NO: 120167 - DNA, 80 bp, synthetic construct
  misc_feature 1..80: note = Artificially Synthesized Probe
  source 1..80: mol_type = other DNA
taagtgctgtttaagccacctgatctgtgtattctgtcgcggcagcccaaacggactaagaactcaagtgacaaaccata

SEQ ID NO: 120168 - DNA, 80 bp, synthetic construct
  misc_feature 1..80: note = Artificially Synthesized Probe
  source 1..80: mol_type = other DNA
aatatgtgtcccacccttgacactcaagaccgggtaccagggaaggcaggtttgaggtcaagaacagagagtagggccga

SEQ ID NO: 120169 - DNA, 80 bp, synthetic construct
  misc_feature 1..80: note = Artificially Synthesized Probe
  source 1..80: mol_type = other DNA
cccagctactcgggaggctgaggcagcagaatcgcttgaacctgggaggtggaggttgaagtgaactgaaaccgctccac

SEQ ID NO: 120170 - DNA, 80 bp, synthetic construct; identical to SEQ ID NO: 39086
  misc_feature 1..80: note = Artificially Synthesized Probe
  source 1..80: mol_type = other DNA

SEQ ID NO: 120171 - DNA, 80 bp, synthetic construct
  misc_feature 1..80: note = Artificially Synthesized Probe
  source 1..80: mol_type = other DNA
taaattcagagactggagtccgtataagggaaaggagtaggacctctgagatatacacaggggaagccatgtgaagacag

SEQ ID NO: 120172 - DNA, 80 bp, synthetic construct
  misc_feature 1..80: note = Artificially Synthesized Probe
  source 1..80: mol_type = other DNA
acacagttggtggtcatttgttgtggcagccccgggaaccgggtacacagcccatccctgggtcctgagcaggcccacga

SEQ ID NO: 120173 - DNA, 80 bp, synthetic construct
  misc_feature 1..80: note = Artificially Synthesized Probe
  source 1..80: mol_type = other DNA
cattccacacaagttccccaagggactcagatgcaccccaaatcatacaggccgctgggcagcgggggcctcagtgggta

SEQ ID NO: 120174 - DNA, 80 bp, synthetic construct
  misc_feature 1..80: note = Artificially Synthesized Probe
  source 1..80: mol_type = other DNA
agactggggccaggacatgggggagtaggagctgcaacagccagagaagcaacgtgtgtggaaaagcctgttttcctgag

SEQ ID NO: 120175 - DNA, 80 bp, synthetic construct; identical to SEQ ID NO: 39087
  misc_feature 1..80: note = Artificially Synthesized Probe
  source 1..80: mol_type = other DNA

SEQ ID NO: 120176 - DNA, 80 bp, synthetic construct
  misc_feature 1..80: note = Artificially Synthesized Probe
  source 1..80: mol_type = other DNA
ccaggagtgactggtcttaaagggaagctgggaggcagggactggaggagcagaccctggggccgcagttcacccagacc

SEQ ID NO: 120177 - DNA, 80 bp, synthetic construct
  misc_feature 1..80: note = Artificially Synthesized Probe
  source 1..80: mol_type = other DNA
gcctgtaatcccagcactttgggaggctgaggcatgtggatgatgaagtcaagagattgagatcaaactggcgaacatgg

SEQ ID NO: 120178 - DNA, 80 bp, synthetic construct
  misc_feature 1..80: note = Artificially Synthesized Probe
  source 1..80: mol_type = other DNA
gagaaaccccatctctactaaaaacacaaaactagccgggtatggtagcgcgtgcctgtaatcctacctactcgggaggc

SEQ ID NO: 120179 - DNA, 80 bp, synthetic construct
  misc_feature 1..80: note = Artificially Synthesized Probe
  source 1..80: mol_type = other DNA
ggggctgaggcaggagaatcgcttgaacccgggaggcggaggttgcaatgagccaagatcgtgccactgcactccagcct

SEQ ID NO: 120180 - DNA, 80 bp, synthetic construct; identical to SEQ ID NO: 39088
  misc_feature 1..80: note = Artificially Synthesized Probe
  source 1..80: mol_type = other DNA

SEQ ID NO: 120181 - DNA, 80 bp, synthetic construct
  misc_feature 1..80: note = Artificially Synthesized Probe
  source 1..80: mol_type = other DNA
aaagatacaaaaaagtagccgggggtggtggcgggcgcccgtagtcccagctactccggaggctgaggcaagagaatggc

SEQ ID NO: 120182 - DNA, 80 bp, synthetic construct
  misc_feature 1..80: note = Artificially Synthesized Probe
  source 1..80: mol_type = other DNA
gtgttggcagggctggttccttctgctggtgctctgggtggacagcctccaaggtctcatagttggaattctttcattct

SEQ ID NO: 120183 - DNA, 80 bp, synthetic construct; identical to SEQ ID NO: 39089
  misc_feature 1..80: note = Artificially Synthesized Probe
  source 1..80: mol_type = other DNA

SEQ ID NO: 120184 - DNA, 80 bp, synthetic construct
  misc_feature 1..80: note = Artificially Synthesized Probe
  source 1..80: mol_type = other DNA
tgtgctttgactaactccatgtgacatctgcttggccaccttggaattatgctaacagatttgcagaaataaagaaagct

SEQ ID NO: 120185 - DNA, 80 bp, synthetic construct
  misc_feature 1..80: note = Artificially Synthesized Probe
  source 1..80: mol_type = other DNA
gatgtctctcgaaagctcagaagatgagcacctcaagccaccctcgtgagagaccactgtgagctacaaaggcttccctc

SEQ ID NO: 120186 - DNA, 80 bp, synthetic construct
  misc_feature 1..80: note = Artificially Synthesized Probe
  source 1..80: mol_type = other DNA
ggagctggctaggagctgacaaatgcttagctctagtaatcctagagcgagggagcctggatgaggaagcagagaggaga

SEQ ID NO: 120187 - DNA, 80 bp, synthetic construct; identical to SEQ ID NO: 38670
  misc_feature 1..80: note = Artificially Synthesized Probe
  source 1..80: mol_type = other DNA

SEQ ID NO: 120188 - DNA, 80 bp, synthetic construct
  misc_feature 1..80: note = Artificially Synthesized Probe
  source 1..80: mol_type = other DNA
cttgtatggtggaaggtttttctcagcttcaacaaggaggcagcagcatgtggtggttgaaaggacaggttctcaaggta

SEQ ID NO: 120189 - DNA, 80 bp, synthetic construct
  misc_feature 1..80: note = Artificially Synthesized Probe
  source 1..80: mol_type = other DNA
ggcccctgcaattccccaaatccctgatgggggtcttggtacccagagggagcacgcataggagctggaactggtgggta

SEQ ID NO: 120190 - DNA, 80 bp, synthetic construct; identical to SEQ ID NO: 39090
  misc_feature 1..80: note = Artificially Synthesized Probe
  source 1..80: mol_type = other DNA

SEQ ID NO: 120191 - DNA, 80 bp, synthetic construct
  misc_feature 1..80: note = Artificially Synthesized Probe
  source 1..80: mol_type = other DNA
ctaactgttttcactgtggttactcattcattcacccagaagttgggcagctttcttaaacaatgggcaaagacccgcat

SEQ ID NO: 120192 - DNA, 80 bp, synthetic construct
  misc_feature 1..80: note = Artificially Synthesized Probe
  source 1..80: mol_type = other DNA
cctacaggtttagttaagaaggcattagttcaggatttcacaacagattcactgtgcttggatcaatcaacacattgaga

SEQ ID NO: 120193 - DNA, 80 bp, synthetic construct; identical to SEQ ID NO: 39091
  misc_feature 1..80: note = Artificially Synthesized Probe
  source 1..80: mol_type = other DNA

SEQ ID NO: 120194 - DNA, 80 bp, synthetic construct
  misc_feature 1..80: note = Artificially Synthesized Probe
  source 1..80: mol_type = other DNA
cctgcaggactggggattttacaaacatacggacatgagagactcaaacctcgatcctggcacttcaaaatatgttagtc

SEQ ID NO: 120195 - DNA, 80 bp, synthetic construct
  misc_feature 1..80: note = Artificially Synthesized Probe
  source 1..80: mol_type = other DNA
ctgcatcataaataagaaaggtattcataattatatcccaaaactgaaaagacaacaagtgtctcccaaggtggattgtg

SEQ ID NO: 120196 - DNA, 80 bp, synthetic construct
  misc_feature 1..80: note = Artificially Synthesized Probe
  source 1..80: mol_type = other DNA
aaactgaaaagacaacaagtgtctcccaaggtggattgtgaaatcaactcggtgcttcaacgtacttggaaagtcagcct

SEQ ID NO: 120197 - DNA, 80 bp, synthetic construct
  misc_feature 1..80: note = Artificially Synthesized Probe
  source 1..80: mol_type = other DNA
cctgagaagagattgtctttcctgcctctgccagcgccaccacccccaagtttctgccactggacccagctgtctgtgag

SEQ ID NO: 120198 - DNA, 80 bp, synthetic construct
  misc_feature 1..80: note = Artificially Synthesized Probe
  source 1..80: mol_type = other DNA
caccacacccagctaatttttgtatttttagtagagacagggtttcctatgttggccaggctggtttcaaactcctgacc

SEQ ID NO: 120199 - DNA, 80 bp, synthetic construct
  misc_feature 1..80: note = Artificially Synthesized Probe
  source 1..80: mol_type = other DNA
ggtcaggggtagcagccccaatatctctcagctccatgtggagagctgggataaggaagccacttcaccccttcctcttt

SEQ ID NO: 120200 - DNA, 80 bp, synthetic construct; identical to SEQ ID NO: 39092
  misc_feature 1..80: note = Artificially Synthesized Probe
  source 1..80: mol_type = other DNA

SEQ ID NO: 120201 - DNA, 80 bp, synthetic construct
  misc_feature 1..80: note = Artificially Synthesized Probe
  source 1..80: mol_type = other DNA
tggatctcagagcaattaagtgatttgccctggctcacaggagggatgtgcaagtcagtgtcaggcgcagcctttgggag

SEQ ID NO: 120202 - DNA, 80 bp, synthetic construct
  misc_feature 1..80: note = Artificially Synthesized Probe
  source 1..80: mol_type = other DNA
acggtaaagcctcgacagccaaacacagttctgctttccctgatgccaaaaatgaggtgacgggcacaggcaataaacga

SEQ ID NO: 120203 - DNA, 80 bp, synthetic construct
  misc_feature 1..80: note = Artificially Synthesized Probe
  source 1..80: mol_type = other DNA
agccgatggcagggcgatgggagagaggaggagccccaaagactctcctcctggttggcacaaggggtactaaaaagggg

SEQ ID NO: 120204 - DNA, 80 bp, synthetic construct; identical to SEQ ID NO: 39093
  misc_feature 1..80: note = Artificially Synthesized Probe
  source 1..80: mol_type = other DNA

SEQ ID NO: 120205 - DNA, 80 bp, synthetic construct
  misc_feature 1..80: note = Artificially Synthesized Probe
  source 1..80: mol_type = other DNA
ttggaattatgctaacagatttgcagaaataaagaaagctaagcaaagctgggcacgatcccatccaaactcccagcact

SEQ ID NO: 120206 - DNA, 80 bp, synthetic construct
  misc_feature 1..80: note = Artificially Synthesized Probe
  source 1..80: mol_type = other DNA
gtctccccagtcatcaacacccccctggagtgggccatttgttacaactgagagcctacagtgtcactcgaagtccatag

SEQ ID NO: 120207 - DNA, 80 bp, synthetic construct
  misc_feature 1..80: note = Artificially Synthesized Probe
  source 1..80: mol_type = other DNA
ctagagccaacccttagcataaattaaacacttcctgttcctctccccattttactaaatcaatgatgttcacatggaaa

SEQ ID NO: 120208 - DNA, 80 bp, synthetic construct
  misc_feature 1..80: note = Artificially Synthesized Probe
  source 1..80: mol_type = other DNA
ttagaggaagtgtctctgccttgtgcgagtcatagcacagtgagtcctaggggttcctggagtcctccctaggctgggca

SEQ ID NO: 120209 - DNA, 80 bp, synthetic construct
  misc_feature 1..80: note = Artificially Synthesized Probe
  source 1..80: mol_type = other DNA
agttaagaccagagacagaaaatgggctaatactatgttaagttttgctaaaagcaggctctaaaccaatcttaggagaa

SEQ ID NO: 120210 - DNA, 80 bp, synthetic construct; identical to SEQ ID NO: 39094
  misc_feature 1..80: note = Artificially Synthesized Probe
  source 1..80: mol_type = other DNA

SEQ ID NO: 120211 - DNA, 80 bp, synthetic construct
  misc_feature 1..80: note = Artificially Synthesized Probe
  source 1..80: mol_type = other DNA
tctctcaaagcagttggctgttctatgatgataaggttgtcgttgctctacaacctatatgagtgggggcctctgtccag

SEQ ID NO: 120212 - DNA, 80 bp, synthetic construct
  misc_feature 1..80: note = Artificially Synthesized Probe
  source 1..80: mol_type = other DNA
accccggagccctgtttatctgattagatgcatgccaatctacataactggaaagaaggggaaacctcaaaaaaagcatt

SEQ ID NO: 120213 - DNA, 80 bp, synthetic construct
  misc_feature 1..80: note = Artificially Synthesized Probe
  source 1..80: mol_type = other DNA
ctgttgcctaaagatgcatgatctttgatatgggagagcagtcaggcaggtaaagccaagtatcctaggatggccatgga

SEQ ID NO: 120214 - DNA, 80 bp, synthetic construct; identical to SEQ ID NO: 39095
  misc_feature 1..80: note = Artificially Synthesized Probe
  source 1..80: mol_type = other DNA

SEQ ID NO: 120215 - DNA, 80 bp, synthetic construct
  misc_feature 1..80: note = Artificially Synthesized Probe
  source 1..80: mol_type = other DNA
cagactttagtgccaggagtggggtgtggctataacaaatatctataacatcttcccaacatgggcttacttcatttgtt

SEQ ID NO: 120216 - DNA, 80 bp, synthetic construct
  misc_feature 1..80: note = Artificially Synthesized Probe
  source 1..80: mol_type = other DNA
taatttaaatcaacctttcttcttgtgtgtatgaggtgatctggtaaggtagggtgggtgatttttggttttgtgttttt

SEQ ID NO: 120217 - DNA, 80 bp, synthetic construct
  misc_feature 1..80: note = Artificially Synthesized Probe
  source 1..80: mol_type = other DNA
tgtgtaataatttgggactttatttagaattattggctgctggcagcagcaggctattctgaaatgtctcataatataca

SEQ ID NO: 120218 - DNA, 80 bp, synthetic construct; identical to SEQ ID NO: 39096
  misc_feature 1..80: note = Artificially Synthesized Probe
  source 1..80: mol_type = other DNA

SEQ ID NO: 120219 - DNA, 80 bp, synthetic construct
  misc_feature 1..80: note = Artificially Synthesized Probe
  source 1..80: mol_type = other DNA
tatacatttaataaatatggtgttggtgaaaaaaaccaaatatctaaaaatattatggaaatgctttggaactgggtaat

SEQ ID NO: 120220 - DNA, 80 bp, synthetic construct
  misc_feature 1..80: note = Artificially Synthesized Probe
  source 1..80: mol_type = other DNA
cgttctaaagtggcaaagaacttggctcaactgtgttctagtatttttgtggaaggtagactgtgtgagcgataaaatca

SEQ ID NO: 120221 - DNA, 80 bp, synthetic construct; identical to SEQ ID NO: 38671
  misc_feature 1..80: note = Artificially Synthesized Probe
  source 1..80: mol_type = other DNA

SEQ ID NO: 120222 - DNA, 80 bp, synthetic construct
  misc_feature 1..80: note = Artificially Synthesized Probe
  source 1..80: mol_type = other DNA
ggaagcagagcttgaagatttggaagattctcagtctatccatacggcaaaaagtgaaaaagcctaaccacattgcaaca

SEQ ID NO: 120223 - DNA, 80 bp, synthetic construct
  misc_feature 1..80: note = Artificially Synthesized Probe
  source 1..80: mol_type = other DNA
catacggcaaaaagtgaaaaagcctaaccacattgcaacaaaacgaacactgagggtatggctggaacatcacttgataa

SEQ ID NO: 120224 - DNA, 80 bp, synthetic construct
  misc_feature 1..80: note = Artificially Synthesized Probe
  source 1..80: mol_type = other DNA
aaacgaacactgagggtatggctggaacatcacttgataatgtatgggattataaaagcaggaactctgccagtttgaat

SEQ ID NO: 120225 - DNA, 80 bp, synthetic construct; identical to SEQ ID NO: 39097
  misc_feature 1..80: note = Artificially Synthesized Probe
  source 1..80: mol_type = other DNA

SEQ ID NO: 120226 - DNA, 80 bp, synthetic construct
  misc_feature 1..80: note = Artificially Synthesized Probe
  source 1..80: mol_type = other DNA
tagtgagtgagttctcatgagatctgacggttttataagtgtctggcatttcccctgctgacactcattctctctcctgc

SEQ ID NO: 120227 - DNA, 80 bp, synthetic construct
  misc_feature 1..80: note = Artificially Synthesized Probe
  source 1..80: mol_type = other DNA
ctcctgagtggcggcttcccttgggcatgaaggtagaaaaggtggctttagagataagcatgtctccaggccacattcag

SEQ ID NO: 120228 - DNA, 80 bp, synthetic construct
  misc_feature 1..80: note = Artificially Synthesized Probe
  source 1..80: mol_type = other DNA
gctgagccagacatgtccttctccaggtccctgatggttgtgctggctcaggatggcactaggcctccctgcccacaggc

SEQ ID NO: 120229 - DNA, 80 bp, synthetic construct; identical to SEQ ID NO: 39098
  misc_feature 1..80: note = Artificially Synthesized Probe
  source 1..80: mol_type = other DNA

SEQ ID NO: 120230 - DNA, 80 bp, synthetic construct
  misc_feature 1..80: note = Artificially Synthesized Probe
  source 1..80: mol_type = other DNA
aggtcaagagatggagaccatcctggccaacatggtgaaatcccatctctactaaaaatacaaaaattagctgggcgtgg

SEQ ID NO: 120231 - DNA, 80 bp, synthetic construct
  misc_feature 1..80: note = Artificially Synthesized Probe
  source 1..80: mol_type = other DNA
tagaaaaatgatgactatgtcttcaaacactgcagactgctctttgtaaaggtaatccacccccaggtcacccagcgccc

SEQ ID NO: 120232 - DNA, 80 bp, synthetic construct
  misc_feature 1..80: note = Artificially Synthesized Probe
  source 1..80: mol_type = other DNA
tccctgctggtctaaaggactcaactcacagtgcaaatgagaacaatgcaaacatttacttgtgataattgcctgactgt

SEQ ID NO: 120233 - DNA, 80 bp, synthetic construct
  misc_feature 1..80: note = Artificially Synthesized Probe
  source 1..80: mol_type = other DNA
gaacaatgcaaacatttacttgtgataattgcctgactgtttctccccttgatgatttcaaggcctagaaattcctcttg

SEQ ID NO: 120234 - DNA, 80 bp, synthetic construct
  misc_feature 1..80: note = Artificially Synthesized Probe
  source 1..80: mol_type = other DNA
ctggtgtcaggctgctggtctgggtgcatgaggaaggcagagtgtggggtctgtctctgtggctgcaggtgtgcacagca

SEQ ID NO: 120235 - DNA, 80 bp, synthetic construct
  misc_feature 1..80: note = Artificially Synthesized Probe
  source 1..80: mol_type = other DNA
gcacatggctggcaactcaactcaacgtgaaattaattgacaagaccagcacgcaacaaggcaggactggatacttcagt

SEQ ID NO: 120236 - DNA, 80 bp, synthetic construct; identical to SEQ ID NO: 39099
  misc_feature 1..80: note = Artificially Synthesized Probe
  source 1..80: mol_type = other DNA

SEQ ID NO: 120237 - DNA, 80 bp, synthetic construct
  misc_feature 1..80: note = Artificially Synthesized Probe
  source 1..80: mol_type = other DNA
acctttgtaaaaaatagaagcataagaaacaacaaatgacaaattattctcgagggttatgacaagccacactcaggctg

SEQ ID NO: 120238 - DNA, 80 bp, synthetic construct
  misc_feature 1..80: note = Artificially Synthesized Probe
  source 1..80: mol_type = other DNA
ttcccccattaattcaactgtcctcctccttccttgtttcaaataacatttcggtaatacagacagatgcctacctgcag

SEQ ID NO: 120239 - DNA, 80 bp, synthetic construct; identical to SEQ ID NO: 39100
  misc_feature 1..80: note = Artificially Synthesized Probe
  source 1..80: mol_type = other DNA

SEQ ID NO: 120240 - DNA, 80 bp, synthetic construct
  misc_feature 1..80: note = Artificially Synthesized Probe
  source 1..80: mol_type = other DNA
tggccttgggaggcatctggggacagaccatacgagggagccctgaaaaacagcaacaggcaagatgtctccatggcccg

SEQ ID NO: 120241 - DNA, 80 bp, synthetic construct
  misc_feature 1..80: note = Artificially Synthesized Probe
  source 1..80: mol_type = other DNA
ctaaatcatcctaattctcacttccgtatctgctggctgggaaggaggaaggccttttatggacatttaaacaagagtta

SEQ ID NO: 120242 - DNA, 80 bp, synthetic construct
  misc_feature 1..80: note = Artificially Synthesized Probe
  source 1..80: mol_type = other DNA
gaaggaggaaggccttttatggacatttaaacaagagttatgtaacacaaagcaacagtctgtgtttctcttctgtggat

SEQ ID NO: 120243 - DNA, 80 bp, synthetic construct
  misc_feature 1..80: note = Artificially Synthesized Probe
  source 1..80: mol_type = other DNA
ctcagagctgggatttctcgctgtgcccttgggggctgcctctcagggggctccccttagctcttgccccaagacagagc

SEQ ID NO: 120244 - DNA, 80 bp, synthetic construct; identical to SEQ ID NO: 39101
  misc_feature 1..80: note = Artificially Synthesized Probe
  source 1..80: mol_type = other DNA

SEQ ID NO: 120245 - DNA, 80 bp, synthetic construct
  misc_feature 1..80: note = Artificially Synthesized Probe
  source 1..80: mol_type = other DNA
actcagagccacagggtcccctacagatgcaggaatgtcaggagggagcccacattttttttcaacagcagtcactctgc

SEQ ID NO: 120246 - DNA, 80 bp, synthetic construct
  misc_feature 1..80: note = Artificially Synthesized Probe
  source 1..80: mol_type = other DNA
tattctcccaactcaagaattgacaaccatctcctccttagcacctcaagtgcttacacctaacattaagttagccggct

SEQ ID NO: 120247 - DNA, 80 bp, synthetic construct
  misc_feature 1..80: note = Artificially Synthesized Probe
  source 1..80: mol_type = other DNA
tacagtccttaaaacagatgccagaaattgctcatgtggtgacagaaactgcagaataggtgaaatgcttgctgtttcct

SEQ ID NO: 120248 - DNA, 80 bp, synthetic construct
  misc_feature 1..80: note = Artificially Synthesized Probe
  source 1..80: mol_type = other DNA
atacaaaaattagctgtgcgtggtggctggcacctgtaatcccagctactcgggagtccgaggcaaaagaattgcttgaa

SEQ ID NO: 120249 - DNA, 80 bp, synthetic construct; identical to SEQ ID NO: 39102
  misc_feature 1..80: note = Artificially Synthesized Probe
  source 1..80: mol_type = other DNA

SEQ ID NO: 120250 - DNA, 80 bp, synthetic construct
  misc_feature 1..80: note = Artificially Synthesized Probe
  source 1..80: mol_type = other DNA
gccccgacttgtgaagccctgttgtctcttctgccacatgcattgcaacaccgcagagacttcctgtcccctctcttctt

SEQ ID NO: 120251 - DNA, 80 bp, synthetic construct
  misc_feature 1..80: note = Artificially Synthesized Probe
  source 1..80: mol_type = other DNA
caaaccctccttctccccgaaatgccccactttgatgctgtgtaagcaggtaaggcccattccaggagcagcaccccaaa

SEQ ID NO: 120252 - DNA, 80 bp, synthetic construct
  misc_feature 1..80: note = Artificially Synthesized Probe
  source 1..80: mol_type = other DNA
aaactcagaaacaaaccactcaagtagtaagtggtgagaaggatcagactgccacaaggtgggtgcctggaaattatctg

SEQ ID NO: 120253 - DNA, 80 bp, synthetic construct; identical to SEQ ID NO: 39103
  misc_feature 1..80: note = Artificially Synthesized Probe
  source 1..80: mol_type = other DNA

SEQ ID NO: 120254 - DNA, 80 bp, synthetic construct
  misc_feature 1..80: note = Artificially Synthesized Probe
  source 1..80: mol_type = other DNA
tgcctcagcctcctgagtagctgggattacaggtgcctgccaccacacctggctaatttttctagttttagtagagatgg

SEQ ID NO: 120255 - DNA, 80 bp, synthetic construct
  misc_feature 1..80: note = Artificially Synthesized Probe
  source 1..80: mol_type = other DNA
gccgccatccatgtaagatgtgacttgcccctccttgccttccaccagtattgtgaggcctccccagccatgtagaactg

SEQ ID NO: 120256 - DNA, 80 bp, synthetic construct
  misc_feature 1..80: note = Artificially Synthesized Probe
  source 1..80: mol_type = other DNA
aaggacagccccacagggactcagtacctggacaggcttgatggtgggaaatgagccagccagacaggcaggtgaggagg

SEQ ID NO: 120257 - DNA, 80 bp, synthetic construct; identical to SEQ ID NO: 39104
  misc_feature 1..80: note = Artificially Synthesized Probe
  source 1..80: mol_type = other DNA

SEQ ID NO: 120258 - DNA, 80 bp, synthetic construct
  misc_feature 1..80: note = Artificially Synthesized Probe
  source 1..80: mol_type = other DNA
ctgccttggagtagagagaaactgttgagaaatcatggatccagataactccaaaaaaagagtaatgtgcctgtccatgc

SEQ ID NO: 120259 - DNA, 80 bp, synthetic construct
  misc_feature 1..80: note = Artificially Synthesized Probe
  source 1..80: mol_type = other DNA
tgtgagggtgttaggagctggggcctttgggaggtaatgaggtcatgagggtggagccctcataaatgagattagtgccc

SEQ ID NO: 120260 - DNA, 80 bp, synthetic construct
  misc_feature 1..80: note = Artificially Synthesized Probe
  source 1..80: mol_type = other DNA
actcacagcctctggagctataacagatccatgcctattgtttataagccaccacccagtttatgttttttttttttttt

SEQ ID NO: 120261 - DNA, 80 bp, synthetic construct
  misc_feature 1..80: note = Artificially Synthesized Probe
  source 1..80: mol_type = other DNA
ccagataactccaaaaaaagagtaatgtgcctgtccatgcatcacccttacatacagacatggagacatttacagagtga

SEQ ID NO: 120262 - DNA, 80 bp, synthetic construct
  misc_feature 1..80: note = Artificially Synthesized Probe
  source 1..80: mol_type = other DNA
ttttttgtatttttagtagagacagggtttcaccatgctggccaggctgatctcaaactcctgacctcaagtgatctgcc

SEQ ID NO: 120263 - DNA, 80 bp, synthetic construct
  misc_feature 1..80: note = Artificially Synthesized Probe
  source 1..80: mol_type = other DNA
cttcctgctcagggctgggacatgggcagcacatgcgaatgctcttcacagtggtgagggcgccatggagcgggactgtc

SEQ ID NO: 120264 - DNA, 80 bp, synthetic construct; identical to SEQ ID NO: 39105
  misc_feature 1..80: note = Artificially Synthesized Probe
  source 1..80: mol_type = other DNA

SEQ ID NO: 120265 - DNA, 80 bp, synthetic construct
  misc_feature 1..80: note = Artificially Synthesized Probe
  source 1..80: mol_type = other DNA
cgagagaaaccgagcacttgggatgtccccgtctttgtttccttccagataatggtgcttcatttatttcagactcctgt

SEQ ID NO: 120266 - DNA, 80 bp, synthetic construct
  misc_feature 1..80: note = Artificially Synthesized Probe
  source 1..80: mol_type = other DNA
ggtcgccgagttcccctgcaaacttcaagggaatctctgcccatccccaggctaaaacccagaatctggagaggcagttg

SEQ ID NO: 120267 - DNA, 80 bp, synthetic construct; identical to SEQ ID NO: 39106
  misc_feature 1..80: note = Artificially Synthesized Probe
  source 1..80: mol_type = other DNA

SEQ ID NO: 120268 - DNA, 80 bp, synthetic construct
  misc_feature 1..80: note = Artificially Synthesized Probe
  source 1..80: mol_type = other DNA
agtaagacttgcctgggtctcgtctgccagtatccccagaggctggggatgaaacagcccctcagtcccacagaaggtgg

SEQ ID NO: 120269 - DNA, 80 bp, synthetic construct
  misc_feature 1..80: note = Artificially Synthesized Probe
  source 1..80: mol_type = other DNA
cctccccccttctcaggctcctgaaactgagaataagaataaaagtatgattcttctatgactatcatgagaattaaaat

SEQ ID NO: 120270 - DNA, 80 bp, synthetic construct
  misc_feature 1..80: note = Artificially Synthesized Probe
  source 1..80: mol_type = other DNA
gataagcaggggaaatctacataatcatctttgacagttgcaggatcggattttggataaatattttatcaagacacatc

SEQ ID NO: 120271 - DNA, 80 bp, synthetic construct
  misc_feature 1..80: note = Artificially Synthesized Probe
  source 1..80: mol_type = other DNA
cgagaccagtctggccaacatagcaaaacccatctccaccaaaaatacaaaaactagccaggcatggtggcacgaacctg

SEQ ID NO: 120272 - DNA, 80 bp, synthetic construct; identical to SEQ ID NO: 39107
  misc_feature 1..80: note = Artificially Synthesized Probe
  source 1..80: mol_type = other DNA

SEQ ID NO: 120273 - DNA, 80 bp, synthetic construct
  misc_feature 1..80: note = Artificially Synthesized Probe
  source 1..80: mol_type = other DNA
acatacacagagtttacagaaacaaagagttccacaaggattgtcatgatgaaaccccaccaacccagccttacttctca

SEQ ID NO: 120274 - DNA, 80 bp, synthetic construct
  misc_feature 1..80: note = Artificially Synthesized Probe
  source 1..80: mol_type = other DNA
ttacacggtgtcctcaggacagtgctccacatagacagcatgtcaagctgccaaggagggaaacagactccgcctgtgca

SEQ ID NO: 120275 - DNA, 80 bp, synthetic construct
  misc_feature 1..80: note = Artificially Synthesized Probe
  source 1..80: mol_type = other DNA
ccttttggtcctgggatcgagcagaagctccgaaggctgcacagcaacctgggattcggaccaggcctccagagctgcac

SEQ ID NO: 120276 - DNA, 80 bp, synthetic construct; identical to SEQ ID NO: 39108
  misc_feature 1..80: note = Artificially Synthesized Probe
  source 1..80: mol_type = other DNA

SEQ ID NO: 120277 - DNA, 80 bp, synthetic construct
  misc_feature 1..80: note = Artificially Synthesized Probe
  source 1..80: mol_type = other DNA
tgtcctgtgaaatacgtatggcagtcaagggaataaaaacctcgaaaaacatcagcgtgtaagtttaacaaacacacaaa

SEQ ID NO: 120278 - DNA, 80 bp, synthetic construct
  misc_feature 1..80: note = Artificially Synthesized Probe
  source 1..80: mol_type = other DNA
cccagaaatcttgatagaaaagcaacagttctttgatgtttgcagaggaatgattttcaagagtgactctggtgggaccc

SEQ ID NO: 120279 - DNA, 80 bp, synthetic construct
  misc_feature 1..80: note = Artificially Synthesized Probe
  source 1..80: mol_type = other DNA
ggattacagatgttgctaggctggctttcctgtgctgtaatgatgaggagagtgatcaagctgatcataatgataactac

SEQ ID NO: 120280 - DNA, 80 bp, synthetic construct
  misc_feature 1..80: note = Artificially Synthesized Probe
  source 1..80: mol_type = other DNA
ggtttcgagagctcaaatgagtgagatttcttcattgcataaaggaaggccctgtccattcgattccaaagcctaggaga

SEQ ID NO: 120281 - DNA, 80 bp, synthetic construct; identical to SEQ ID NO: 39109
  misc_feature 1..80: note = Artificially Synthesized Probe
  source 1..80: mol_type = other DNA

SEQ ID NO: 120282 - DNA, 80 bp, synthetic construct; identical to SEQ ID NO: 38672
  misc_feature 1..80: note = Artificially Synthesized Probe
  source 1..80: mol_type = other DNA

SEQ ID NO: 120283 - DNA, 80 bp, synthetic construct
  misc_feature 1..80: note = Artificially Synthesized Probe
  source 1..80: mol_type = other DNA
cgccttctctctgtgtcctcacaccgtggtccctctctgtgtgtctgtgtcctcatctcctcttcctatagggacactgg

SEQ ID NO: 120284 - DNA, 80 bp, synthetic construct
  misc_feature 1..80: note = Artificially Synthesized Probe
  source 1..80: mol_type = other DNA
tttagggggacaccactcaacccagaacaacttgcttagcacaagagtacgcagaatctctttgccttcctcagggacac

SEQ ID NO: 120285 - DNA, 80 bp, synthetic construct; identical to SEQ ID NO: 39110
  misc_feature 1..80: note = Artificially Synthesized Probe
  source 1..80: mol_type = other DNA

SEQ ID NO: 120286 - DNA, 80 bp, synthetic construct
  misc_feature 1..80: note = Artificially Synthesized Probe
  source 1..80: mol_type = other DNA
tgggaggctgaggaagcaaaatcacttgaacccgggaggcagaggttgcagtgagctgagatcgcacaactgcactccag

SEQ ID NO: 120287 - DNA, 80 bp, synthetic construct
  misc_feature 1..80: note = Artificially Synthesized Probe
  source 1..80: mol_type = other DNA
gcacatgtgcacataattcgatttttgctaagccatgatgatgcatccctctctaaacacctcagcatttgcagaaacga

SEQ ID NO: 120288 - DNA, 80 bp, synthetic construct
  misc_feature 1..80: note = Artificially Synthesized Probe
  source 1..80: mol_type = other DNA
gttttaattcagctaaaagtacatgccacgaaacacacaggccttaagcacagagttggatgagtttttttgttgttgtt

SEQ ID NO: 120289 - DNA, 80 bp, synthetic construct; identical to SEQ ID NO: 39111
  misc_feature 1..80: note = Artificially Synthesized Probe
  source 1..80: mol_type = other DNA

SEQ ID NO: 120290 - DNA, 80 bp, synthetic construct
  misc_feature 1..80: note = Artificially Synthesized Probe
  source 1..80: mol_type = other DNA
gggttagcattccatgccctagttactccacattctcacagacaacacttggcactgtccatcttcttaattttggctat

SEQ ID NO: 120291 - DNA, 80 bp, synthetic construct
  misc_feature 1..80: note = Artificially Synthesized Probe
  source 1..80: mol_type = other DNA
gacaacacttggcactgtccatcttcttaattttggctatttgtgtgtgtgtgaagtaggtggttttaaactttatttgc

SEQ ID NO: 120292 - DNA, 80 bp, synthetic construct
  misc_feature 1..80: note = Artificially Synthesized Probe
  source 1..80: mol_type = other DNA
ttgtgtgtgtgtgaagtaggtggttttaaactttatttgccccccaacttctccttttttgcaacctcaccattgctatc

SEQ ID NO: 120293 - DNA, 80 bp, synthetic construct
  misc_feature 1..80: note = Artificially Synthesized Probe
  source 1..80: mol_type = other DNA
atgggccagggagtacaactcatggctattgttgtttgctcaggaacatcatctcctaccccaaaatgacaagagtgaga

SEQ ID NO: 120294 - DNA, 80 bp, synthetic construct
  misc_feature 1..80: note = Artificially Synthesized Probe
  source 1..80: mol_type = other DNA
ccagatactgccaaatgtcctatggaaggtcaagacaccatcagttgagaaccactaatttggctctttttaaaaaatcc

SEQ ID NO: 120295 - DNA, 80 bp, synthetic construct
  misc_feature 1..80: note = Artificially Synthesized Probe
  source 1..80: mol_type = other DNA
tggtaaaatcccgtctctactaaaaatacaaaaatcagctgggcatggtggcaggcacctgtaatcccagctacttggga

SEQ ID NO: 120296 - DNA, 80 bp, synthetic construct
  misc_feature 1..80: note = Artificially Synthesized Probe
  source 1..80: mol_type = other DNA
gaagagaagagaagtcagcttatgaaggtggtggtggtgacacttaccacgtgaccttatgcaagcagaaaatattttac

SEQ ID NO: 120297 - DNA, 80 bp, synthetic construct; identical to SEQ ID NO: 39112
  misc_feature 1..80: note = Artificially Synthesized Probe
  source 1..80: mol_type = other DNA

SEQ ID NO: 120298 - DNA, 80 bp, synthetic construct
  misc_feature 1..80: note = Artificially Synthesized Probe
  source 1..80: mol_type = other DNA
tgatgatgcatcgtgcaccacgatgatacatctctaaacacctcagcatttgcagaaatgaagggggcgctcctgcaaga

SEQ ID NO: 120299 - DNA, 80 bp, synthetic construct
  misc_feature 1..80: note = Artificially Synthesized Probe
  source 1..80: mol_type = other DNA
aaattaacaatttcattaaagtcactatcatgtgtcacatcggggaacaatttctgagacaggaacaaaaattgaccaca

SEQ ID NO: 120300 - DNA, 80 bp, synthetic construct
  misc_feature 1..80: note = Artificially Synthesized Probe
  source 1..80: mol_type = other DNA
cggggaacaatttctgagacaggaacaaaaattgaccacaaaaagatctcccgggaaaactgtcttatttccttcagttc

SEQ ID NO: 120301 - DNA, 80 bp, synthetic construct
  misc_feature 1..80: note = Artificially Synthesized Probe
  source 1..80: mol_type = other DNA
aacctaccctcccatcctctcacagcctcctggtatgtttataaataaattcaggttaggtcatgtcgtttagaaaaaaa

SEQ ID NO: 120302 - DNA, 80 bp, synthetic construct; identical to SEQ ID NO: 39113
  misc_feature 1..80: note = Artificially Synthesized Probe
  source 1..80: mol_type = other DNA

SEQ ID NO: 120303 - DNA, 80 bp, synthetic construct
  misc_feature 1..80: note = Artificially Synthesized Probe
  source 1..80: mol_type = other DNA
gaccaagagggaaagaaacagcaaagaaccagggatggttttcctcaatgttgtttttaagatccttgcaaataatttaa

SEQ ID NO: 120304 - DNA, 80 bp, synthetic construct
  misc_feature 1..80: note = Artificially Synthesized Probe
  source 1..80: mol_type = other DNA
aaaccactaaaaatataagctaaggcctcagagttcccactttgggatctgggggctaaaagagaagattctgagtttag

SEQ ID NO: 120305 - DNA, 80 bp, synthetic construct
  misc_feature 1..80: note = Artificially Synthesized Probe
  source 1..80: mol_type = other DNA
atttccatttggaaaacaacactcacgtttaaccacacaatcatctcattgttcaggtaatgctgccacacttcattagg

SEQ ID NO: 120306 - DNA, 80 bp, synthetic construct
  misc_feature 1..80: note = Artificially Synthesized Probe
  source 1..80: mol_type = other DNA
ctatagtatactatggttacttcatcttttcctgtacattttgttctccctagagcaaaataattttgtttgttggtcgg

SEQ ID NO: 120307 - DNA, 80 bp, synthetic construct
  misc_feature 1..80: note = Artificially Synthesized Probe
  source 1..80: mol_type = other DNA
gaaagcagctggcatcagggtgttctcgttagagcagtgctgtgagtgtttattgcttttcaattaatccacttttggat

SEQ ID NO: 120308 - DNA, 80 bp, synthetic construct
  misc_feature 1..80: note = Artificially Synthesized Probe
  source 1..80: mol_type = other DNA
tgtgagtgtttattgcttttcaattaatccacttttggatttagcatatttacactggggcggcaagcagagaacagggc

SEQ ID NO: 120309 - DNA, 80 bp, synthetic construct
  misc_feature 1..80: note = Artificially Synthesized Probe
  source 1..80: mol_type = other DNA
ctcatacagagccacaggaacaagtgtgcaatggggttccgctgagacacagagtccctcccccgaccctctcggtcttc

SEQ ID NO: 120310 - DNA, 80 bp, synthetic construct; identical to SEQ ID NO: 39114
  misc_feature 1..80: note = Artificially Synthesized Probe
  source 1..80: mol_type = other DNA

SEQ ID NO: 120311 - DNA, 80 bp, synthetic construct
  misc_feature 1..80: note = Artificially Synthesized Probe
  source 1..80: mol_type = other DNA
aaataaaataaaataaaataaaacaaaacaaaacaaagtaaaattagcccagcgtggtagcgcacacctgtaaccccagc

SEQ ID NO: 120312 - DNA, 80 bp, synthetic construct
  misc_feature 1..80: note = Artificially Synthesized Probe
  source 1..80: mol_type = other DNA
attcagttgttaaagtatttaactggaaacagcaggaatcttgtaggctacaacaccattcactttggaaatgcactttc

SEQ ID NO: 120313 - DNA, 80 bp, synthetic construct
  misc_feature 1..80: note = Artificially Synthesized Probe
  source 1..80: mol_type = other DNA
aaatacggatgccttctttaaacacagacgttgggccctcggagacactttgctgccactgggaatctcatctcaaatgt

SEQ ID NO: 120314 - DNA, 80 bp, synthetic construct; identical to SEQ ID NO: 39115
  misc_feature 1..80: note = Artificially Synthesized Probe
  source 1..80: mol_type = other DNA

SEQ ID NO: 120315 - DNA, 80 bp, synthetic construct
  misc_feature 1..80: note = Artificially Synthesized Probe
  source 1..80: mol_type = other DNA
gacatcatgccctcaactgtgctcaaactcctgagaataccgagagcatggctgcaaggtccaggagggagttaaaggca

SEQ ID NO: 120316 - DNA, 80 bp, synthetic construct
  misc_feature 1..80: note = Artificially Synthesized Probe
  source 1..80: mol_type = other DNA
gcttgccaaggagaaagatgcgttgctcagtcataaaatcaaggccatgctttaaagacttctggatgacttgacttatg

SEQ ID NO: 120317 - DNA, 80 bp, synthetic construct
  misc_feature 1..80: note = Artificially Synthesized Probe
  source 1..80: mol_type = other DNA
aaggccatgctttaaagacttctggatgacttgacttatgacactcaggcacaacatcatttttttctcattctaaacac

SEQ ID NO: 120318 - DNA, 80 bp, synthetic construct
  misc_feature 1..80: note = Artificially Synthesized Probe
  source 1..80: mol_type = other DNA
gaagacttttgatctgcactgaacaaccaggattaagtgttttctagcagctgtccccattactctaatcctcaggattc

SEQ ID NO: 120319 - DNA, 80 bp, synthetic construct
  misc_feature 1..80: note = Artificially Synthesized Probe
  source 1..80: mol_type = other DNA
catctgggagcatctcactgcaagccaagtgcaggagaaagaggggcaggtgagcatcaggtgtcctctgagaggccaca

SEQ ID NO: 120320 - DNA, 80 bp, synthetic construct; identical to SEQ ID NO: 39116
  misc_feature 1..80: note = Artificially Synthesized Probe
  source 1..80: mol_type = other DNA

SEQ ID NO: 120321 - DNA, 80 bp, synthetic construct
  misc_feature 1..80: note = Artificially Synthesized Probe
  source 1..80: mol_type = other DNA
cctacatattttctgcagaaaagaattagagaagaatgaagggcaattaccaccttctttcagtggtttgcccaaagcca

SEQ ID NO: 120322 - DNA, 80 bp, synthetic construct
  misc_feature 1..80: note = Artificially Synthesized Probe
  source 1..80: mol_type = other DNA
gaaaggttgggggacatggaaatggcctagttgcagcagagtgggaggcagcatagaacagtacccctcgccaacccggc

SEQ ID NO: 120323 - DNA, 80 bp, synthetic construct
  misc_feature 1..80: note = Artificially Synthesized Probe
  source 1..80: mol_type = other DNA
acacagtagcacagcaagcttcaggaattatttccagaattctaatggagcatgattcaccggcaagaggatgatgacct

SEQ ID NO: 120324 - DNA, 80 bp, synthetic construct
  misc_feature 1..80: note = Artificially Synthesized Probe
  source 1..80: mol_type = other DNA
tctaatggagcatgattcaccggcaagaggatgatgacctaattatccacctgtgtcagttaaatggcaagaagccccct

SEQ ID NO: 120325 - DNA, 80 bp, synthetic construct; identical to SEQ ID NO: 39117
  misc_feature 1..80: note = Artificially Synthesized Probe
  source 1..80: mol_type = other DNA

SEQ ID NO: 120326 - DNA, 80 bp, synthetic construct
  misc_feature 1..80: note = Artificially Synthesized Probe
  source 1..80: mol_type = other DNA
gtatggagggaggttaggaaaccattgcttttggatgctttgcttaatttttattaggacacagaaaatgaaaagtcagc

SEQ ID NO: 120327 - DNA, 80 bp, synthetic construct
  misc_feature 1..80: note = Artificially Synthesized Probe
  source 1..80: mol_type = other DNA
tcttggccccgatgtcagctgaacatcccagcctactccaaacatcacaggaagttaaggatgcaagaaaaaaacaaaca

SEQ ID NO: 120328 - DNA, 80 bp, synthetic construct
  misc_feature 1..80: note = Artificially Synthesized Probe
  source 1..80: mol_type = other DNA
tattattaaaaagtcaaaagacaacagatgctggtgaggagaaaaaggaactcttttacaccgttggtgggagtgtaaat

SEQ ID NO: 120329 - DNA, 80 bp, synthetic construct
  misc_feature 1..80: note = Artificially Synthesized Probe
  source 1..80: mol_type = other DNA
aggacatcctccagtatcttctccccaaatagagttaggacataatttttttgagacattgactatttgaaaatggcttt

SEQ ID NO: 120330 - DNA, 80 bp, synthetic construct
  misc_feature 1..80: note = Artificially Synthesized Probe
  source 1..80: mol_type = other DNA
caatagcaatgacatggagtcatcctaaatgcccatcagtgacagactggatcaagaaaatgtggtacatatacaccatg

SEQ ID NO: 120331 - DNA, 80 bp, synthetic construct; identical to SEQ ID NO: 39118
  misc_feature 1..80: note = Artificially Synthesized Probe
  source 1..80: mol_type = other DNA

SEQ ID NO: 120332 - DNA, 80 bp, synthetic construct
  misc_feature 1..80: note = Artificially Synthesized Probe
  source 1..80: mol_type = other DNA
gatgaacatctcaaggcaacccatattttaagtcattttactgtgaggaccctgacccaggaaagaaaagcaattgctat

SEQ ID NO: 120333 - DNA, 80 bp, synthetic construct
  misc_feature 1..80: note = Artificially Synthesized Probe
  source 1..80: mol_type = other DNA
tcaagtcagacgtgtaccctctccacggagagaggccgattggtatcaattttattgatacaatttatgtcctagaatca

SEQ ID NO: 120334 - DNA, 80 bp, synthetic construct
  misc_feature 1..80: note = Artificially Synthesized Probe
  source 1..80: mol_type = other DNA
tggtatcaattttattgatacaatttatgtcctagaatcacaaggtcacccagcacccacttgtagtttcatcatccatg

SEQ ID NO: 120335 - DNA, 80 bp, synthetic construct
  misc_feature 1..80: note = Artificially Synthesized Probe
  source 1..80: mol_type = other DNA
cactgcaacctccacctcctgggttcaagtgattctccggcctcagcctcctgagtagctgggactacaggcgcccacaa

SEQ ID NO: 120336 - DNA, 80 bp, synthetic construct; identical to SEQ ID NO: 39119
  misc_feature 1..80: note = Artificially Synthesized Probe
  source 1..80: mol_type = other DNA

SEQ ID NO: 120337 - DNA, 80 bp, synthetic construct
  misc_feature 1..80: note = Artificially Synthesized Probe
  source 1..80: mol_type = other DNA
gaggctgaggtgagaggattactggatcccaggagatcgaggctgcagtgagccgtgatcaccccactatactccagccc

SEQ ID NO: 120338 - DNA, 80 bp, synthetic construct
  misc_feature 1..80: note = Artificially Synthesized Probe
  source 1..80: mol_type = other DNA
agctattcaagtatacaatgcattgttaactgtggccacaatgttgtaccacagatctcagaacttactacttctttttt

SEQ ID NO: 120339 - DNA, 80 bp, synthetic construct; identical to SEQ ID NO: 38673
  misc_feature 1..80: note = Artificially Synthesized Probe
  source 1..80: mol_type = other DNA

SEQ ID NO: 120340 - DNA, 80 bp, synthetic construct
  misc_feature 1..80: note = Artificially Synthesized Probe
  source 1..80: mol_type = other DNA
cagcctcccgaatagctgggactaaaggcgtgtaccactacacctggctaattttgtatttttagtagagtcagagtttc

SEQ ID NO: 120341 - DNA, 80 bp, synthetic construct
  misc_feature 1..80: note = Artificially Synthesized Probe
  source 1..80: mol_type = other DNA
tcctatctcagcgaaattgtgtatcctttgaccaacaccaccccagccctctccccaacctcccagcttctggtagccac

SEQ ID NO: 120342 - DNA, 80 bp, synthetic construct; identical to SEQ ID NO: 39120
  misc_feature 1..80: note = Artificially Synthesized Probe
  source 1..80: mol_type = other DNA

SEQ ID NO: 120343 - DNA, 80 bp, synthetic construct
  misc_feature 1..80: note = Artificially Synthesized Probe
  source 1..80: mol_type = other DNA
accctacctcatagggcattttgtcaattaaagtgagatagtgcatacagcataattatcagtactacccaatacacaag

SEQ ID NO: 120344 - DNA, 80 bp, synthetic construct
  misc_feature 1..80: note = Artificially Synthesized Probe
  source 1..80: mol_type = other DNA
gtgcatacagcataattatcagtactacccaatacacaagcacttaataaatagtagctactagtataatcataattatt

SEQ ID NO: 120345 - DNA, 80 bp, synthetic construct
  misc_feature 1..80: note = Artificially Synthesized Probe
  source 1..80: mol_type = other DNA
tgccacacccagtctattttaaaaaatgattacctatgatgaaggaagagacaagagtggaaaggagaggcggagggtgg

SEQ ID NO: 120346 - DNA, 80 bp, synthetic construct
  misc_feature 1..80: note = Artificially Synthesized Probe
  source 1..80: mol_type = other DNA
catagctgctggcaaaaacaaatagagagaaattattccaaatgtctctcaagcacaatagtttaattgcatgtccctaa

SEQ ID NO: 120347 - DNA, 80 bp, synthetic construct; identical to SEQ ID NO: 39121
  misc_feature 1..80: note = Artificially Synthesized Probe
  source 1..80: mol_type = other DNA

SEQ ID NO: 120348 - DNA, 80 bp, synthetic construct
  misc_feature 1..80: note = Artificially Synthesized Probe
  source 1..80: mol_type = other DNA
gtctgagacaagaaatctgaaatgtctcgccataccagaaaatcaggaagctatcaatgactatgaggtcatgtccaaaa

SEQ ID NO: 120349 - DNA, 80 bp, synthetic construct
  misc_feature 1..80: note = Artificially Synthesized Probe
  source 1..80: mol_type = other DNA
atctttcaaagcatcagggatctactgaagctacaaagaccacaggtgccaaggtttggaaagaggacagctgttgagag

SEQ ID NO: 120350 - DNA, 80 bp, synthetic construct
  misc_feature 1..80: note = Artificially Synthesized Probe
  source 1..80: mol_type = other DNA
aactgcagacccgaaggggagttgtctgggctagaggaaggagtagaaaaatgaatgaggcattcggctgcttttccttt

SEQ ID NO: 120351 - DNA, 80 bp, synthetic construct; identical to SEQ ID NO: 39122
  misc_feature 1..80: note = Artificially Synthesized Probe
  source 1..80: mol_type = other DNA

SEQ ID NO: 120352 - DNA, 80 bp, synthetic construct
  misc_feature 1..80: note = Artificially Synthesized Probe
  source 1..80: mol_type = other DNA
atatatgcaatgcctgacattctataaacaattactagtcattcccacagacagtaccatgtgttggaaaacaaagagaa

SEQ ID NO: 120353 - DNA, 80 bp, synthetic construct
  misc_feature 1..80: note = Artificially Synthesized Probe
  source 1..80: mol_type = other DNA
gagaactccagaaaagagagagccagagaagggtagtttcatattctgtgtgtaaacttctcataggtctttggttgatg

SEQ ID NO: 120354 - DNA, 80 bp, synthetic construct
  misc_feature 1..80: note = Artificially Synthesized Probe
  source 1..80: mol_type = other DNA
gatggagaatttcaagaaacaattgaatgcagaagggaatcaatcgtaaactctagaccttaaaatccaacgtctacaat

SEQ ID NO: 120355 - DNA, 80 bp, synthetic construct
  misc_feature 1..80: note = Artificially Synthesized Probe
  source 1..80: mol_type = other DNA
agaacggacacatataagacacactgaaaggctctgacatatatgtgaatcaaatcctagaaggagagatgaaaaataga

SEQ ID NO: 120356 - DNA, 80 bp, synthetic construct
  misc_feature 1..80: note = Artificially Synthesized Probe
  source 1..80: mol_type = other DNA
atattctgtgtgtaaacttctcataggtctttggttgatgtctgagctgagctgtgtgtgtaaggaagactcaaataggc

SEQ ID NO: 120357 - DNA, 80 bp, synthetic construct; identical to SEQ ID NO: 39123
  misc_feature 1..80: note = Artificially Synthesized Probe
  source 1..80: mol_type = other DNA

SEQ ID NO: 120358 - DNA, 80 bp, synthetic construct
  misc_feature 1..80: note = Artificially Synthesized Probe
  source 1..80: mol_type = other DNA
agcaaatggccattatctacaatcacaccgacagcagtctttcaaaagaaactagataagggatgtgacaaagaaaaaag

SEQ ID NO: 120359 - DNA, 80 bp, synthetic construct
  misc_feature 1..80: note = Artificially Synthesized Probe
  source 1..80: mol_type = other DNA
tcagaaaggaataaaaagcaaatggaaaataagtgagcaagtaataaagaacaggaagatgtaggagtggtgagtttcta

SEQ ID NO: 120360 - DNA, 80 bp, synthetic construct
  misc_feature 1..80: note = Artificially Synthesized Probe
  source 1..80: mol_type = other DNA
aacgtgttaccacagctaggagatgcaggggaggaagctgacctggtgacataaacaaaatacaacatcccctatacttt

SEQ ID NO: 120361 - DNA, 80 bp, synthetic construct
  misc_feature 1..80: note = Artificially Synthesized Probe
  source 1..80: mol_type = other DNA
actataaatctacaacacagaaatccaaacccaaaacccaaacaggcacaatccaactgacactttttatgacagggagt

SEQ ID NO: 120362 - DNA, 80 bp, synthetic construct
  misc_feature 1..80: note = Artificially Synthesized Probe
  source 1..80: mol_type = other DNA
aacaggcacaatccaactgacactttttatgacagggagtcattgatggtaaaaacccatcaactgtaaggaagaagaaa

SEQ ID NO: 120363 - DNA, 80 bp, synthetic construct
  misc_feature 1..80: note = Artificially Synthesized Probe
  source 1..80: mol_type = other DNA
cattgatggtaaaaacccatcaactgtaaggaagaagaaagaaatttgcagttgcatggtcaggagggggtgataataga

SEQ ID NO: 120364 - DNA, 80 bp, synthetic construct
  misc_feature 1..80: note = Artificially Synthesized Probe
  source 1..80: mol_type = other DNA
gaaatttgcagttgcatggtcaggagggggtgataatagatgatgggtccccactgtttccctccaatatgactgccctg

SEQ ID NO: 120365 - DNA, 80 bp, synthetic construct
  misc_feature 1..80: note = Artificially Synthesized Probe
  source 1..80: mol_type = other DNA
attacaggcatgagctactatggccagataatttttgtatctttagtagagatggagtttcaccatgttgccaggctggt

SEQ ID NO: 120366 - DNA, 80 bp, synthetic construct; identical to SEQ ID NO: 39124
  misc_feature 1..80: note = Artificially Synthesized Probe
  source 1..80: mol_type = other DNA

SEQ ID NO: 120367 - DNA, 80 bp, synthetic construct
  misc_feature 1..80: note = Artificially Synthesized Probe
  source 1..80: mol_type = other DNA
caatgtcttaaccctgattagcctaattgggcagctcctcttctcttccagccagtgacatccagcctataagaatgcag

SEQ ID NO: 120368 - DNA, 80 bp, synthetic construct
  misc_feature 1..80: note = Artificially Synthesized Probe
  source 1..80: mol_type = other DNA
acacagaaaccaataccatcacagggaaagccttgccgggccctaggtgccatcataaaacctttgctttcaaatgcaca

SEQ ID NO: 120369 - DNA, 80 bp, synthetic construct
  misc_feature 1..80: note = Artificially Synthesized Probe
  source 1..80: mol_type = other DNA
gtaatataatccagagttgccaaagcataacattcacgaaatttgggatacaactcaaacttatttagcaaacccagaga

SEQ ID NO: 120370 - DNA, 80 bp, synthetic construct; identical to SEQ ID NO: 39125
  misc_feature 1..80: note = Artificially Synthesized Probe
  source 1..80: mol_type = other DNA

SEQ ID NO: 120371 - DNA, 80 bp, synthetic construct
  misc_feature 1..80: note = Artificially Synthesized Probe
  source 1..80: mol_type = other DNA
ctctgcctcctgggttcaagtggttctcctgcctcagcctcccgagtagctgggattacaggcacccgtgaccatgcccg

SEQ ID NO: 120372 - DNA, 80 bp, synthetic construct
  misc_feature 1..80: note = Artificially Synthesized Probe
  source 1..80: mol_type = other DNA
gttttacacttttattatctcattaggcaccacaaaaccttataagagaaatggggcttatttcagagaacagataaagg

SEQ ID NO: 120373 - DNA, 80 bp, synthetic construct
  misc_feature 1..80: note = Artificially Synthesized Probe
  source 1..80: mol_type = other DNA
cactctaagcttccctccaccaagcggtcaggaaatagacaaagccagatacaactctccatggcggtcgacactgcaga

SEQ ID NO: 120374 - DNA, 80 bp, synthetic construct
  misc_feature 1..80: note = Artificially Synthesized Probe
  source 1..80: mol_type = other DNA
tcaacgataccctgctatgttgactctgtgctaagaaaaaaacaagcatttttattaaagatgacccgccaaagtgaaga

SEQ ID NO: 120375 - DNA, 80 bp, synthetic construct
  misc_feature 1..80: note = Artificially Synthesized Probe
  source 1..80: mol_type = other DNA
aacaagcatttttattaaagatgacccgccaaagtgaagaaagccctgttaattcttgcagattaggtgcccaataggag

SEQ ID NO: 120376 - DNA, 80 bp, synthetic construct; identical to SEQ ID NO: 39126
  misc_feature 1..80: note = Artificially Synthesized Probe
  source 1..80: mol_type = other DNA

SEQ ID NO: 120377 - DNA, 80 bp, synthetic construct
  misc_feature 1..80: note = Artificially Synthesized Probe
  source 1..80: mol_type = other DNA
tgttaggttaaaatataaaagcaaatccactacaaatgactggtaggagcaccctagtgggaagaaaagccggatttgca

SEQ ID NO: 120378 - DNA, 80 bp, synthetic construct
  misc_feature 1..80: note = Artificially Synthesized Probe
  source 1..80: mol_type = other DNA
tctcatggtctgcggtgctaacatcctataaacctgccacaaatacaaaattagcaatactgagctgttgctcctaggag

SEQ ID NO: 120379 - DNA, 80 bp, synthetic construct
  misc_feature 1..80: note = Artificially Synthesized Probe
  source 1..80: mol_type = other DNA
ttaacattgtatcggctgggtgtggtggctcccatctgtaatccaccaatttgaaaggttgaggcaggtggattgcttga

SEQ ID NO: 120380 - DNA, 80 bp, synthetic construct
  misc_feature 1..80: note = Artificially Synthesized Probe
  source 1..80: mol_type = other DNA
gcaacagagtgagactccatctctacaaaataccaaacaaaaattagctgaacatggtgatacgtgcctgtagtcccagc

SEQ ID NO: 120381 - DNA, 80 bp, synthetic construct; identical to SEQ ID NO: 39127
  misc_feature 1..80: note = Artificially Synthesized Probe
  source 1..80: mol_type = other DNA

SEQ ID NO: 120382 - DNA, 80 bp, synthetic construct
  misc_feature 1..80: note = Artificially Synthesized Probe
  source 1..80: mol_type = other DNA
cacacaatttcaaaaaccatagcactaaagagatggcaaaaaggacacttgtttagggtacaagagctgagaccagaagg

SEQ ID NO: 120383 - DNA, 80 bp, synthetic construct; identical to SEQ ID NO: 38674
  misc_feature 1..80: note = Artificially Synthesized Probe
  source 1..80: mol_type = other DNA

SEQ ID NO: 120384 - DNA, 80 bp, synthetic construct
  misc_feature 1..80: note = Artificially Synthesized Probe
  source 1..80: mol_type = other DNA
aatctgtggataaggaggacgaactgtgcagaagtgtgaggcgtccatggtctgacccactcgagctggaggaggcatct

SEQ ID NO: 120385 - DNA, 80 bp, synthetic construct
  misc_feature 1..80: note = Artificially Synthesized Probe
  source 1..80: mol_type = other DNA
aaaagaataccaggcaggcacacatcatgtgcttgccaaggcatctcaatatgttaatttctttgttttaaaaaaataag

SEQ ID NO: 120386 - DNA, 80 bp, synthetic construct; identical to SEQ ID NO: 39128
  misc_feature 1..80: note = Artificially Synthesized Probe
  source 1..80: mol_type = other DNA

SEQ ID NO: 120387 - DNA, 80 bp, synthetic construct
  misc_feature 1..80: note = Artificially Synthesized Probe
  source 1..80: mol_type = other DNA
acaagcagtgagttccccatctctgcaggggttcaagcaaaggcaggcaagatcttaaggagatggaaattcccattaag

SEQ ID NO: 120388 - DNA, 80 bp, synthetic construct
  misc_feature 1..80: note = Artificially Synthesized Probe
  source 1..80: mol_type = other DNA
agagtaaactgttatttctgggtctatttgggaggctgttcctggatatatctgggagaatgttcctggatcagcatttg

SEQ ID NO: 120389 - DNA, 80 bp, synthetic construct
  misc_feature 1..80: note = Artificially Synthesized Probe
  source 1..80: mol_type = other DNA
gctggagctgaacacaaatcgttttctgcccttgtcctggcatttacaccaccagctttcccaggtctttggtttgcaga

SEQ ID NO: 120390 - DNA, 80 bp, synthetic construct; identical to SEQ ID NO: 39129
  misc_feature 1..80: note = Artificially Synthesized Probe
  source 1..80: mol_type = other DNA

SEQ ID NO: 120391 - DNA, 80 bp, synthetic construct
  misc_feature 1..80: note = Artificially Synthesized Probe
  source 1..80: mol_type = other DNA
attccaaaggtgtctagaagggaaagaaaggcttgtatgcttgaagggggaaaactggaaggcagagatctgagacagct

SEQ ID NO: 120392 - DNA, 80 bp, synthetic construct
  misc_feature 1..80: note = Artificially Synthesized Probe
  source 1..80: mol_type = other DNA
ctcagaaggggggaaaattagagtcaaagaagacagagaaaatgagtcataaaaaatacttgaaaaaatggtacccaagg

SEQ ID NO: 120393 - DNA, 80 bp, synthetic construct
  misc_feature 1..80: note = Artificially Synthesized Probe
  source 1..80: mol_type = other DNA
ggtttactgcttgcttttatgtggaacacgagatgggatcacagggcctcagaatggaggaaaagcctgtggtaacagaa

SEQ ID NO: 120394 - DNA, 80 bp, synthetic construct
  misc_feature 1..80: note = Artificially Synthesized Probe
  source 1..80: mol_type = other DNA
cactgataaaggtgcctagggctggaagttaggagcccacctacgaccgtgaacccggacaggtggtagagctgccttca

SEQ ID NO: 120395 - DNA, 80 bp, synthetic construct
  misc_feature 1..80: note = Artificially Synthesized Probe
  source 1..80: mol_type = other DNA
tgcagacctgtggaggtgcacacgtgtcttgtggagagagaagctgggagggcactactttttcagcaaaagaagcaaca

SEQ ID NO: 120396 - DNA, 80 bp, synthetic construct; identical to SEQ ID NO: 39130
  misc_feature 1..80: note = Artificially Synthesized Probe
  source 1..80: mol_type = other DNA

SEQ ID NO: 120397 - DNA, 80 bp, synthetic construct
  misc_feature 1..80: note = Artificially Synthesized Probe
  source 1..80: mol_type = other DNA
ggaggtcagaatcctgaaataaaggtgtgctgtcagcagggcagcattcctcctggaggcagtaaggaagaatccatttc

SEQ ID NO: 120398 - DNA, 80 bp, synthetic construct
  misc_feature 1..80: note = Artificially Synthesized Probe
  source 1..80: mol_type = other DNA
acccttgtgataacatgggcctgactcagatagtccaaaactatctccccaactcaagatctcaaacttcatcacatctg

SEQ ID NO: 120399 - DNA, 80 bp, synthetic construct
  misc_feature 1..80: note = Artificially Synthesized Probe
  source 1..80: mol_type = other DNA
actacagaaacgtgagctttaagtgccacagaccgtcactgaaatgacagtggtgagtaggatgctgatgaggatacaca

SEQ ID NO: 120400 - DNA, 80 bp, synthetic construct
  misc_feature 1..80: note = Artificially Synthesized Probe
  source 1..80: mol_type = other DNA
catttcaatgaacagacatgactatgctccagaaaatttttatttacaaagataaggctacgggccaagtgcaggaccta

SEQ ID NO: 120401 - DNA, 80 bp, synthetic construct
  misc_feature 1..80: note = Artificially Synthesized Probe
  source 1..80: mol_type = other DNA
tatttacaaagataaggctacgggccaagtgcaggacctactgtgtaaacctcaatgcagaatattttcttggttccaat

SEQ ID NO: 120402 - DNA, 80 bp, synthetic construct; identical to SEQ ID NO: 39131
  misc_feature 1..80: note = Artificially Synthesized Probe
  source 1..80: mol_type = other DNA

SEQ ID NO: 120403 - DNA, 80 bp, synthetic construct
  misc_feature 1..80: note = Artificially Synthesized Probe
  source 1..80: mol_type = other DNA
cagaagaaactggggcaaattgatagtcaacctttagacgcagttaccagatggcttgaagccactgggaatgtggggat

SEQ ID NO: 120404 - DNA, 80 bp, synthetic construct
  misc_feature 1..80: note = Artificially Synthesized Probe
  source 1..80: mol_type = other DNA
cacatctgggtagaggtcattggtctcagaggttgatcttgcaaacataaatgccttttctcttgtttttatttctttgt

SEQ ID NO: 120405 - DNA, 80 bp, synthetic construct
  misc_feature 1..80: note = Artificially Synthesized Probe
  source 1..80: mol_type = other DNA
cattattcacactctaaataaaaatgactgaatgattgcagactttgcatcagaaaccatggagaagaacctcttgtaga

SEQ ID NO: 120406 - DNA, 80 bp, synthetic construct
  misc_feature 1..80: note = Artificially Synthesized Probe
  source 1..80: mol_type = other DNA
tcctgcctcaccctcccatgcagctgagactacagacatgccccaccacacccagcggtttttttttttttagagatggg

SEQ ID NO: 120407 - DNA, 80 bp, synthetic construct; identical to SEQ ID NO: 39132
  misc_feature 1..80: note = Artificially Synthesized Probe
  source 1..80: mol_type = other DNA

SEQ ID NO: 120408 - DNA, 80 bp, synthetic construct
  misc_feature 1..80: note = Artificially Synthesized Probe
  source 1..80: mol_type = other DNA
gactttgcatcagaaaccatggagaagaacctcttgtagaagacggcggaacaacatctttaacaggtgaaagtaaaaaa

SEQ ID NO: 120409 - DNA, 80 bp, synthetic construct
  misc_feature 1..80: note = Artificially Synthesized Probe
  source 1..80: mol_type = other DNA
acagaaagtagactcgtggtgccaggggctgcagggagggaggttaaggggaggctagtgatagggtttctttttgaggt

SEQ ID NO: 120410 - DNA, 80 bp, synthetic construct
  misc_feature 1..80: note = Artificially Synthesized Probe
  source 1..80: mol_type = other DNA
agcagtcttttaaaagaatagcacaaagcactgggaaaccagcaccagagatgtctgtctacccctccgaacagccctca

SEQ ID NO: 120411 - DNA, 80 bp, synthetic construct
  misc_feature 1..80: note = Artificially Synthesized Probe
  source 1..80: mol_type = other DNA
ggtggcggcactgtccaccggtcaccagggccagcccttcgtaggtcatctctaagccctcacccgcccctctgaaaggg

SEQ ID NO: 120412 - DNA, 80 bp, synthetic construct; identical to SEQ ID NO: 39133
  misc_feature 1..80: note = Artificially Synthesized Probe
  source 1..80: mol_type = other DNA

SEQ ID NO: 120413 - DNA, 80 bp, synthetic construct
  misc_feature 1..80: note = Artificially Synthesized Probe
  source 1..80: mol_type = other DNA
cctctacgtgcagtatttattaccaatttccataagcccactctaaacttcttagaattaccataatctctatgatacgg

SEQ ID NO: 120414 - DNA, 80 bp, synthetic construct
  misc_feature 1..80: note = Artificially Synthesized Probe
  source 1..80: mol_type = other DNA
acaaagttccgtggaggaaacaaaggcagtgtctctgataacagccacgggaaatattaatttccagatgcactcatttt

SEQ ID NO: 120415 - DNA, 80 bp, synthetic construct
  misc_feature 1..80: note = Artificially Synthesized Probe
  source 1..80: mol_type = other DNA
tatcttaaaatcttgtcctatataaagcaagccctcatcttagacactccgggagctagaaggaataaggggtcttcaga

SEQ ID NO: 120416 - DNA, 80 bp, synthetic construct
  misc_feature 1..80: note = Artificially Synthesized Probe
  source 1..80: mol_type = other DNA
gaccaattcccaggaaactacctctgtttacaaagattaaagccaatttccaagtcaggcatctgggccacaccttccca

SEQ ID NO: 120417 - DNA, 80 bp, synthetic construct; identical to SEQ ID NO: 39134
  misc_feature 1..80: note = Artificially Synthesized Probe
  source 1..80: mol_type = other DNA

SEQ ID NO: 120418 - DNA, 80 bp, synthetic construct
  misc_feature 1..80: note = Artificially Synthesized Probe
  source 1..80: mol_type = other DNA
acagaaactattgaaaagcacagcataccacttcacgtgaattagcatggctactacatagaaaaaaaaaggaaaaagaa

SEQ ID NO: 120419 - DNA, 80 bp, synthetic construct
  misc_feature 1..80: note = Artificially Synthesized Probe
  source 1..80: mol_type = other DNA
acccaaaagaattcaacccagagactccaacaggtatttgcacactcatgtccacagcagcatgattcacactagccaga

SEQ ID NO: 120420 - DNA, 80 bp, synthetic construct
  misc_feature 1..80: note = Artificially Synthesized Probe
  source 1..80: mol_type = other DNA
cagtcacaaaaagatgaatactgtaggattaaacttaaatgagctccctaaagttctgagattcatagagatggaaagta

SEQ ID NO: 120421 - DNA, 80 bp, synthetic construct
  misc_feature 1..80: note = Artificially Synthesized Probe
  source 1..80: mol_type = other DNA
tgacaaaattctggtagtcatggctacaccaccccatgaatgcacttaatgccactgaagggcatgctgagaaatgatca

SEQ ID NO: 120422 - DNA, 80 bp, synthetic construct
  misc_feature 1..80: note = Artificially Synthesized Probe
  source 1..80: mol_type = other DNA
cacaaagggtgccacaaatggtgaacacctggatacaaaataaaagatgattctccctcttaattttaaaagcagatatc

SEQ ID NO: 120423 - DNA, 80 bp, synthetic construct
  misc_feature 1..80: note = Artificially Synthesized Probe
  source 1..80: mol_type = other DNA
cctgtaatcccagcactttgggaggccgaggcggatggatcacatgaggtcaggagttcaagaccagcctggccaacatg

SEQ ID NO: 120424 - DNA, 80 bp, synthetic construct; identical to SEQ ID NO: 39135
  misc_feature 1..80: note = Artificially Synthesized Probe
  source 1..80: mol_type = other DNA

SEQ ID NO: 120425 - DNA, 80 bp, synthetic construct
  misc_feature 1..80: note = Artificially Synthesized Probe
  source 1..80: mol_type = other DNA
ggaggatcacttaagcctgggagttggagggtgcagtgaaccatgagtgtaccactgcactccagcctgggcaacagagc

SEQ ID NO: 120426 - DNA, 80 bp, synthetic construct
  misc_feature 1..80: note = Artificially Synthesized Probe
  source 1..80: mol_type = other DNA
tgcttctcaggccgcctctgcttcctaaacagcccagccccgcccagggtgcagcctcaaacacaggggctctgcctggg

SEQ ID NO: 120427 - DNA, 80 bp, synthetic construct; identical to SEQ ID NO: 39136
  misc_feature 1..80: note = Artificially Synthesized Probe
  source 1..80: mol_type = other DNA

SEQ ID NO: 120428 - DNA, 80 bp, synthetic construct
  misc_feature 1..80: note = Artificially Synthesized Probe
  source 1..80: mol_type = other DNA
gaggaggacctccttgctggggaatgtcctgtccccaggttttcaataaatgggagttgaactgcctgcattttgccggg

SEQ ID NO: 120429 - DNA, 80 bp, synthetic construct
  misc_feature 1..80: note = Artificially Synthesized Probe
  source 1..80: mol_type = other DNA
tatgacaggagccctccttacctgcggtttcagttacctgcagtccaatgcaatccgaaaatatgaaacaaaaaaaaatt

SEQ ID NO: 120430 - DNA, 80 bp, synthetic construct
  misc_feature 1..80: note = Artificially Synthesized Probe
  source 1..80: mol_type = other DNA
ccagaaataaacaattcacctgttttcaattgtgtgccattctgggcaatgtgatgaaatcttgcctcctgttgctccgt

SEQ ID NO: 120431 - DNA, 80 bp, synthetic construct
  misc_feature 1..80: note = Artificially Synthesized Probe
  source 1..80: mol_type = other DNA
ctgaaacacagcccacacaggtaagaggggtctgctacagtctcattttgcagattgaagaaccgagtcctcagtttgta

SEQ ID NO: 120432 - DNA, 80 bp, synthetic construct; identical to SEQ ID NO: 39137
  misc_feature 1..80: note = Artificially Synthesized Probe
  source 1..80: mol_type = other DNA

SEQ ID NO: 120433 - DNA, 80 bp, synthetic construct
  misc_feature 1..80: note = Artificially Synthesized Probe
  source 1..80: mol_type = other DNA
cactttccaagatctgaaaggcctactccaagagacagcaacttgggaatgttttaaaactccatgttctgaaaagcata

SEQ ID NO: 120434 - DNA, 80 bp, synthetic construct
  misc_feature 1..80: note = Artificially Synthesized Probe
  source 1..80: mol_type = other DNA
acttgggaatgttttaaaactccatgttctgaaaagcatagcgactctttgccctgagttcctcgtcatgtgagcgggcc

SEQ ID NO: 120435 - DNA, 80 bp, synthetic construct
  misc_feature 1..80: note = Artificially Synthesized Probe
  source 1..80: mol_type = other DNA
gtagactatggaaagctaagaatgtatactgtaatccttgatccactgctaaaagaatgtgaagagctacagtgtaacgc

SEQ ID NO: 120436 - DNA, 80 bp, synthetic construct
  misc_feature 1..80: note = Artificially Synthesized Probe
  source 1..80: mol_type = other DNA
ggctgaggtctcacacggattgaaatcaatttggccacattaatgtctcagctgactgagatttctctttctcaagtaaa

SEQ ID NO: 120437 - DNA, 80 bp, synthetic construct
  misc_feature 1..80: note = Artificially Synthesized Probe
  source 1..80: mol_type = other DNA
taatgtctcagctgactgagatttctctttctcaagtaaacaccattccttaaatgccagctctgtggagcttattctca

SEQ ID NO: 120438 - DNA, 80 bp, synthetic construct
  misc_feature 1..80: note = Artificially Synthesized Probe
  source 1..80: mol_type = other DNA
caccattccttaaatgccagctctgtggagcttattctcaaaatgttcagaaaaaggaaaaacccatgaagaagaatcat

SEQ ID NO: 120439 - DNA, 80 bp, synthetic construct
  misc_feature 1..80: note = Artificially Synthesized Probe
  source 1..80: mol_type = other DNA
ccatctctactaaaaatataaaaattagccaggcatggtggcacgtgcctgtagtcccagctactggggaggctgaggca

SEQ ID NO: 120440 - DNA, 80 bp, synthetic construct; identical to SEQ ID NO: 39138
  misc_feature 1..80: note = Artificially Synthesized Probe
  source 1..80: mol_type = other DNA

SEQ ID NO: 120441 - DNA, 80 bp, synthetic construct
  misc_feature 1..80: note = Artificially Synthesized Probe
  source 1..80: mol_type = other DNA
tcagggttcccaacagccctccctaaagaacagccagagactgtgagcaggaaaacacctccaatgaagggtaacgcaca

SEQ ID NO: 120442 - DNA, 80 bp, synthetic construct
  misc_feature 1..80: note = Artificially Synthesized Probe
  source 1..80: mol_type = other DNA
gattggcctgaccttttttgaaatgtcactgttagctgtcgcttttaagttggaagaccgagatttgtagcatcagtcac

SEQ ID NO: 120443 - DNA, 80 bp, synthetic construct; identical to SEQ ID NO: 39139
  misc_feature 1..80: note = Artificially Synthesized Probe
  source 1..80: mol_type = other DNA

SEQ ID NO: 120444 - DNA, 80 bp, synthetic construct
  misc_feature 1..80: note = Artificially Synthesized Probe
  source 1..80: mol_type = other DNA
gtgaggcccctcctatgtgaccttcggatgatggacaagtgacatcgtcagccccctggggtctcccagatcctacaact

SEQ ID NO: 120445 - DNA, 80 bp, synthetic construct
  misc_feature 1..80: note = Artificially Synthesized Probe
  source 1..80: mol_type = other DNA
atcaaagatcacggtcacagtggctactcccatcttttgagtactttatagtgtgtgtgcgtgcatcttttttttttttc

SEQ ID NO: 120446 - DNA, 80 bp, synthetic construct
  misc_feature 1..80: note = Artificially Synthesized Probe
  source 1..80: mol_type = other DNA
ttgaggggcaatagaacattttttaaaaggcaaagcttggagaaaaaaggtctaggtcaagtcctggtgttgtccctgtt

SEQ ID NO: 120447 - DNA, 80 bp, synthetic construct
  misc_feature 1..80: note = Artificially Synthesized Probe
  source 1..80: mol_type = other DNA
agaaaaaaggtctaggtcaagtcctggtgttgtccctgtttactcaggaaccgcttattgttgaggaacacaaatccact

SEQ ID NO: 120448 - DNA, 80 bp, synthetic construct; identical to SEQ ID NO: 39140
  misc_feature 1..80: note = Artificially Synthesized Probe
  source 1..80: mol_type = other DNA

SEQ ID NO: 120449 - DNA, 80 bp, synthetic construct
  misc_feature 1..80: note = Artificially Synthesized Probe
  source 1..80: mol_type = other DNA
tatttttttctggcatgtccttctccagcttctgcctccctaggagcagagggctcttcataattacagcaggaatgagt

SEQ ID NO: 120450 - DNA, 80 bp, synthetic construct
  misc_feature 1..80: note = Artificially Synthesized Probe
  source 1..80: mol_type = other DNA
ctgggcacaactttaacccctttgagcctagaggagatgtgctgaggataaaataacacagaaggagcaaacgaaggtag

SEQ ID NO: 120451 - DNA, 80 bp, synthetic construct
  misc_feature 1..80: note = Artificially Synthesized Probe
  source 1..80: mol_type = other DNA
ccaactaaacatcaggccttataaaatggtttaaaaagaagacctaattatgctgtccgtacactttcaatacaaagaca

SEQ ID NO: 120452 - DNA, 80 bp, synthetic construct
  misc_feature 1..80: note = Artificially Synthesized Probe
  source 1..80: mol_type = other DNA
ttactgaaacaaaagacgggaggcacagaggctatcaggggacttataaaaatacatatatgtgtcattttgctcactaa

SEQ ID NO: 120453 - DNA, 80 bp, synthetic construct; identical to SEQ ID NO: 38675
  misc_feature 1..80: note = Artificially Synthesized Probe
  source 1..80: mol_type = other DNA

SEQ ID NO: 120454 - DNA, 80 bp, synthetic construct
  misc_feature 1..80: note = Artificially Synthesized Probe
  source 1..80: mol_type = other DNA
agagggaagcccaggagctgaggaggaggaggagagttccaggcagaggaacagcatatgcaaaatgccagaggtcagag

SEQ ID NO: 120455 - DNA, 80 bp, synthetic construct
  misc_feature 1..80: note = Artificially Synthesized Probe
  source 1..80: mol_type = other DNA
gggagtgacacgaccccatgtgtaatctagaaaggtgaggagagggtctgggccaccagcagtgggagagaagctggtgg

SEQ ID NO: 120456 - DNA, 80 bp, synthetic construct
  misc_feature 1..80: note = Artificially Synthesized Probe
  source 1..80: mol_type = other DNA
ctgagaggctgagagttaataaatgagaaaagacagttcctgggcagaatggctgttaatatcagacaaaataaattttt

SEQ ID NO: 120457 - DNA, 80 bp, synthetic construct; identical to SEQ ID NO: 39141
  misc_feature 1..80: note = Artificially Synthesized Probe
  source 1..80: mol_type = other DNA

SEQ ID NO: 120458 - DNA, 80 bp, synthetic construct
  misc_feature 1..80: note = Artificially Synthesized Probe
  source 1..80: mol_type = other DNA
gaggaaggagaatcacttgaacctgggtggcggaggttgcagtgagccgagattgtgccattgcactccagcctgggcaa

SEQ ID NO: 120459 - DNA, 80 bp, synthetic construct
  misc_feature 1..80: note = Artificially Synthesized Probe
  source 1..80: mol_type = other DNA
ctctcctgagcttcgttctccatccaacagctcaacaactttgggatttgctgacctgggccctcctggtccaccctggt

SEQ ID NO: 120460 - DNA, 80 bp, synthetic construct; identical to SEQ ID NO: 39142
  misc_feature 1..80: note = Artificially Synthesized Probe
  source 1..80: mol_type = other DNA

SEQ ID NO: 120461 - DNA, 80 bp, synthetic construct; identical to SEQ ID NO: 38629
  misc_feature 1..80: note = Artificially Synthesized Probe
  source 1..80: mol_type = other DNA

SEQ ID NO: 120462 - DNA, 80 bp, synthetic construct
  misc_feature 1..80: note = Artificially Synthesized Probe
  source 1..80: mol_type = other DNA
agcaccaagactgcccatcaccacccagagctggaggagatgaagaatggtttttccccagggcttccagaaggaaggca

SEQ ID NO: 120463 - DNA, 80 bp, synthetic construct
  misc_feature 1..80: note = Artificially Synthesized Probe
  source 1..80: mol_type = other DNA
ctcttttgagacagagtctcgctgtgtcaccaggctggagtgcagtggcgcgatctcggcttactgcaacctctgcctcc

SEQ ID NO: 120464 - DNA, 80 bp, synthetic construct
  misc_feature 1..80: note = Artificially Synthesized Probe
  source 1..80: mol_type = other DNA
caccttggcctcccaaagaatttcttctgtttctacccacccaggcagtggtcacttatcacagcaggcccaggacacaa

SEQ ID NO: 120465 - DNA, 80 bp, synthetic construct; identical to SEQ ID NO: 39143
  misc_feature 1..80: note = Artificially Synthesized Probe
  source 1..80: mol_type = other DNA

SEQ ID NO: 120466 - DNA, 80 bp, synthetic construct
  misc_feature 1..80: note = Artificially Synthesized Probe
  source 1..80: mol_type = other DNA
cagcctatgtggggcattaaaacttcatggagggtgcaagaaaaaaggaaaaaatggctgaaaaagcaccagcttaaatg

SEQ ID NO: 120467 - DNA, 80 bp, synthetic construct
  misc_feature 1..80: note = Artificially Synthesized Probe
  source 1..80: mol_type = other DNA
gaaggattctttctggtgggagacaaagatagagatttatgggtttgaatcccaggaggcagaggggctgatggaaaaca

SEQ ID NO: 120468 - DNA, 80 bp, synthetic construct
  misc_feature 1..80: note = Artificially Synthesized Probe
  source 1..80: mol_type = other DNA
cagaacattcaaggaccatgtcacaccaataaagtatctggcccctatgtgtatacagtggatactcaatacacgtagtc

SEQ ID NO: 120469 - DNA, 80 bp, synthetic construct
  misc_feature 1..80: note = Artificially Synthesized Probe
  source 1..80: mol_type = other DNA
aaggatgacagcaggccgtgtgttgaaagcaaaatattgcagaactacagataacagaagcattacggtaaactgagaaa

SEQ ID NO: 120470 - DNA, 80 bp, synthetic construct
  misc_feature 1..80: note = Artificially Synthesized Probe
  source 1..80: mol_type = other DNA
tgtagaaatgtggtttcaccatgttgcccaggctggtcttgaactcctgggttcaagtgatctgcccaccttggcctccc

SEQ ID NO: 120471 - DNA, 80 bp, synthetic construct
  misc_feature 1..80: note = Artificially Synthesized Probe
  source 1..80: mol_type = other DNA
aggggatggcatttggattgggaccttttaggggtgtttaggtttaggtgaggtcatgagggtggggccccacgatagga

SEQ ID NO: 120472 - DNA, 80 bp, synthetic construct; identical to SEQ ID NO: 39144
  misc_feature 1..80: note = Artificially Synthesized Probe
  source 1..80: mol_type = other DNA

SEQ ID NO: 120473 - DNA, 80 bp, synthetic construct
  misc_feature 1..80: note = Artificially Synthesized Probe
  source 1..80: mol_type = other DNA
gtcaggagtttgagacctggccaacatagtgaaaccccatctctactaaaaatacaaaattagccgggtgtggtggtggg

SEQ ID NO: 120474 - DNA, 80 bp, synthetic construct
  misc_feature 1..80: note = Artificially Synthesized Probe
  source 1..80: mol_type = other DNA
tctgtctcgaaaaaaaaggaaaaggaaagaaaagaggtttatttagctcaaggttctgtggtgtgggaagttcaagggca

SEQ ID NO: 120475 - DNA, 80 bp, synthetic construct; identical to SEQ ID NO: 39145
  misc_feature 1..80: note = Artificially Synthesized Probe
  source 1..80: mol_type = other DNA

SEQ ID NO: 120476 - DNA, 80 bp, synthetic construct
  misc_feature 1..80: note = Artificially Synthesized Probe
  source 1..80: mol_type = other DNA
agagtgtcatttccacttcacttctaacagatgaacttgaggatttacattcagggacagatacttcttcaggatagaaa

SEQ ID NO: 120477 - DNA, 80 bp, synthetic construct
  misc_feature 1..80: note = Artificially Synthesized Probe
  source 1..80: mol_type = other DNA
ggatttacattcagggacagatacttcttcaggatagaaacagtggattataagtatctcaccaagcatcagttgcactc

SEQ ID NO: 120478 - DNA, 80 bp, synthetic construct
  misc_feature 1..80: note = Artificially Synthesized Probe
  source 1..80: mol_type = other DNA
cagtggattataagtatctcaccaagcatcagttgcactctgccctcaccttttgcatttcacaagcccttcctccttaa

SEQ ID NO: 120479 - DNA, 80 bp, synthetic construct
  misc_feature 1..80: note = Artificially Synthesized Probe
  source 1..80: mol_type = other DNA
gaaagtgcatccctctcaaagcactttaaagtttagcttgggagacttatgcatgaaccattcattgtaatacaatacag

SEQ ID NO: 120480 - DNA, 80 bp, synthetic construct
  misc_feature 1..80: note = Artificially Synthesized Probe
  source 1..80: mol_type = other DNA
ggagacttatgcatgaaccattcattgtaatacaatacagaaaaggtacccagcaagtactgtgggaatcaaaataaaag

SEQ ID NO: 120481 - DNA, 80 bp, synthetic construct
  misc_feature 1..80: note = Artificially Synthesized Probe
  source 1..80: mol_type = other DNA
ctggaggagattatgtcccctgttggaggtggctcagcagcagagagggtggctaaggcacttcttagataaactcaaca

SEQ ID NO: 120482 - DNA, 80 bp, synthetic construct; identical to SEQ ID NO: 39146
  misc_feature 1..80: note = Artificially Synthesized Probe
  source 1..80: mol_type = other DNA

SEQ ID NO: 120483 - DNA, 80 bp, synthetic construct
  misc_feature 1..80: note = Artificially Synthesized Probe
  source 1..80: mol_type = other DNA
gtcttgtttgcaacacccagtgccagatcaggagacggagaagaggtaatattaaagattttctctaaacaaatgaaatt

SEQ ID NO: 120484 - DNA, 80 bp, synthetic construct; identical to SEQ ID NO: 38676
  misc_feature 1..80: note = Artificially Synthesized Probe
  source 1..80: mol_type = other DNA

SEQ ID NO: 120485 - DNA, 80 bp, synthetic construct
  misc_feature 1..80: note = Artificially Synthesized Probe
  source 1..80: mol_type = other DNA
catctgatcatccgtcttgatttccttctgtttaaatattacttgttgacttcctgccagggaagatgagagtttcactc

SEQ ID NO: 120486 - DNA, 80 bp, synthetic construct; identical to SEQ ID NO: 39147
  misc_feature 1..80: note = Artificially Synthesized Probe
  source 1..80: mol_type = other DNA

SEQ ID NO: 120487 - DNA, 80 bp, synthetic construct
  misc_feature 1..80: note = Artificially Synthesized Probe
  source 1..80: mol_type = other DNA
cctgtcccctggctcactccctctctgggtgaagctcctctccagcagcttcctgagaaagcagcataggaggggccgat

SEQ ID NO: 120488 - DNA, 80 bp, synthetic construct
  misc_feature 1..80: note = Artificially Synthesized Probe
  source 1..80: mol_type = other DNA
cctctatgcgcaacttgatttttctctcttgaaacttttaagattgcgtttctgtttctattccctgagttctgagcttt

SEQ ID NO: 120489 - DNA, 80 bp, synthetic construct
  misc_feature 1..80: note = Artificially Synthesized Probe
  source 1..80: mol_type = other DNA
ctgattccagggctctcttccgcctccttgtgttcatctccaacattactgctatgccatttttttgcaatcattattga

SEQ ID NO: 120490 - DNA, 80 bp, synthetic construct; identical to SEQ ID NO: 39148
  misc_feature 1..80: note = Artificially Synthesized Probe
  source 1..80: mol_type = other DNA

SEQ ID NO: 120491 - DNA, 80 bp, synthetic construct
  misc_feature 1..80: note = Artificially Synthesized Probe
  source 1..80: mol_type = other DNA
taagatccttggaggaagcattctagtcagagtccacagcagtgcaaaggccctggggtgagcatgtgtttcctgtgctt

SEQ ID NO: 120492 - DNA, 80 bp, synthetic construct
  misc_feature 1..80: note = Artificially Synthesized Probe
  source 1..80: mol_type = other DNA
caatacgctgagctccgacggcttccagcccttcctgctgccatcagggatggttttctccagactgccacctcaccaca

SEQ ID NO: 120493 - DNA, 80 bp, synthetic construct
  misc_feature 1..80: note = Artificially Synthesized Probe
  source 1..80: mol_type = other DNA
cagggcatgtgggcagggttgacctcaggtggctttgcttagagagacaacagaatgactttagactcctgagacactag

SEQ ID NO: 120494 - DNA, 80 bp, synthetic construct; identical to SEQ ID NO: 39149
  misc_feature 1..80: note = Artificially Synthesized Probe
  source 1..80: mol_type = other DNA

SEQ ID NO: 120495 - DNA, 80 bp, synthetic construct
  misc_feature 1..80: note = Artificially Synthesized Probe
  source 1..80: mol_type = other DNA
ctaaccaacccttcccagacacaacctgcctctccgctaactaacccttcccaggctcaacctccctctccactaaccaa

SEQ ID NO: 120496 - DNA, 80 bp, synthetic construct
  misc_feature 1..80: note = Artificially Synthesized Probe
  source 1..80: mol_type = other DNA
ggttccagctattcaggaggctgaggtgggaggatcccttgaggctgaggctgcagcaagtcctgatcacaccactgcac

SEQ ID NO: 120497 - DNA, 80 bp, synthetic construct
  misc_feature 1..80: note = Artificially Synthesized Probe
  source 1..80: mol_type = other DNA
gcctccctctccactaaccaacacttcccaggatcagcctccctctctactaaccaacccttccccaggttcaccctccc

SEQ ID NO: 120498 - DNA, 80 bp, synthetic construct
  misc_feature 1..80: note = Artificially Synthesized Probe
  source 1..80: mol_type = other DNA
acacttcccaggatcagcctccctctccactaaccaacccttccccaggctcaccctccctctctgctaaccaactcttc

SEQ ID NO: 120499 - DNA, 80 bp, synthetic construct
  misc_feature 1..80: note = Artificially Synthesized Probe
  source 1..80: mol_type = other DNA
cctctccactaaccaacccttcccaggctcatcctccctctccactaactaacccttcccaggctcaacctccctctcca

SEQ ID NO: 120500 - DNA, 80 bp, synthetic construct; identical to SEQ ID NO: 39150
  misc_feature 1..80: note = Artificially Synthesized Probe
  source 1..80: mol_type = other DNA

SEQ ID NO: 120501 - DNA, 80 bp, synthetic construct
  misc_feature 1..80: note = Artificially Synthesized Probe
  source 1..80: mol_type = other DNA
ctaagaacccatcaacttccagaacattgtgcagtagggtctggctgcagagcacctgaaacatgggaaatgtgcttaag

SEQ ID NO: 120502 - DNA, 80 bp, synthetic construct
  misc_feature 1..80: note = Artificially Synthesized Probe
  source 1..80: mol_type = other DNA
tgtgccaccaccatgcctggctaatcctgggtaatttttgtatttttaatagagacggggtttcaccatgttggccagga

SEQ ID NO: 120503 - DNA, 80 bp, synthetic construct; identical to SEQ ID NO: 39151
  misc_feature 1..80: note = Artificially Synthesized Probe
  source 1..80: mol_type = other DNA

SEQ ID NO: 120504 - DNA, 80 bp, synthetic construct
  misc_feature 1..80: note = Artificially Synthesized Probe
  source 1..80: mol_type = other DNA
acccccacctctgcagctagccagtctcctggctgcttcccacacaccccaggcatgcactgaccccagggcctttgcac

SEQ ID NO: 120505 - DNA, 80 bp, synthetic construct
  misc_feature 1..80: note = Artificially Synthesized Probe
  source 1..80: mol_type = other DNA
accctcaccctgctgtatttttcttcctgtcatttaccaaccccgacatgttgcacgtttctctgcttacttgttaatta

SEQ ID NO: 120506 - DNA, 80 bp, synthetic construct
  misc_feature 1..80: note = Artificially Synthesized Probe
  source 1..80: mol_type = other DNA
gcatggattagaaatcaaagtgatgagatctgcggaagtctgagaaacaagtttggaaattctctgattccccacaaagc

SEQ ID NO: 120507 - DNA, 80 bp, synthetic construct
  misc_feature 1..80: note = Artificially Synthesized Probe
  source 1..80: mol_type = other DNA
agccacactttgggttacccaggtttctacgccctaatctagaaatacaacttccacttccctgtttctatgggaacaca

SEQ ID NO: 120508 - DNA, 80 bp, synthetic construct
  misc_feature 1..80: note = Artificially Synthesized Probe
  source 1..80: mol_type = other DNA
agaaatacaacttccacttccctgtttctatgggaacacagagtctgaatcccaaataagactcagaggaacttttaaaa

SEQ ID NO: 120509 - DNA, 80 bp, synthetic construct; identical to SEQ ID NO: 39152
  misc_feature 1..80: note = Artificially Synthesized Probe
  source 1..80: mol_type = other DNA

SEQ ID NO: 120510 - DNA, 80 bp, synthetic construct
  misc_feature 1..80: note = Artificially Synthesized Probe
  source 1..80: mol_type = other DNA
acatttcttaatcttactcttcctgcatactggtttcttcagttgttttcagtgtgtttgttttgggccgtatttcatat

SEQ ID NO: 120511 - DNA, 80 bp, synthetic construct
  misc_feature 1..80: note = Artificially Synthesized Probe
  source 1..80: mol_type = other DNA
gccacgtttcctaatttttcaagagaagctggaaagctgaattttttaatgaaattcctggaagtttaaataccagcaac

SEQ ID NO: 120512 - DNA, 80 bp, synthetic construct
  misc_feature 1..80: note = Artificially Synthesized Probe
  source 1..80: mol_type = other DNA
atctgggcaggttacaatcaagctctcttgggtcagatccaacctccagacggccgacggtgaactttacactacggctc

SEQ ID NO: 120513 - DNA, 80 bp, synthetic construct
  misc_feature 1..80: note = Artificially Synthesized Probe
  source 1..80: mol_type = other DNA
agttgttttcagtgtgtttgttttgggccgtatttcatattagttcatcaaatgtctgatgttccttggaaggcagctca

SEQ ID NO: 120514 - DNA, 80 bp, synthetic construct
  misc_feature 1..80: note = Artificially Synthesized Probe
  source 1..80: mol_type = other DNA
agggaaaagaaataaaaataatgatttgcttggtcactcacatgtggaagagaaaaggctaaaatcgaagctgatactcc

SEQ ID NO: 120515 - DNA, 80 bp, synthetic construct
  misc_feature 1..80: note = Artificially Synthesized Probe
  source 1..80: mol_type = other DNA
aaactctcccaggaccctgggctgcacaagctcagagactccgcccgtcatgtggggagacgtcctcactctcaggctcc

SEQ ID NO: 120516 - DNA, 80 bp, synthetic construct; identical to SEQ ID NO: 39153
  misc_feature 1..80: note = Artificially Synthesized Probe
  source 1..80: mol_type = other DNA

SEQ ID NO: 120517 - DNA, 80 bp, synthetic construct
  misc_feature 1..80: note = Artificially Synthesized Probe
  source 1..80: mol_type = other DNA
ttagtgagtcggggcctctatgccaaaacacctgaggctgggtcgattataaatggcagaaatctatggctcacagcgct

SEQ ID NO: 120518 - DNA, 80 bp, synthetic construct
  misc_feature 1..80: note = Artificially Synthesized Probe
  source 1..80: mol_type = other DNA
ctagactggaatgcaatggcgctgacctcagctcactgcaacctctgtctcccgggttcaagtgattctcctgcctcagc

SEQ ID NO: 120519 - DNA, 80 bp, synthetic construct
  misc_feature 1..80: note = Artificially Synthesized Probe
  source 1..80: mol_type = other DNA
gcccatcacacccagctaacttttgtatttttagtagcgacagggtatcaccatattggccaggctggtctcgaactcct

SEQ ID NO: 120520 - DNA, 80 bp, synthetic construct; identical to SEQ ID NO: 39154
  misc_feature 1..80: note = Artificially Synthesized Probe
  source 1..80: mol_type = other DNA

SEQ ID NO: 120521 - DNA, 80 bp, synthetic construct
  misc_feature 1..80: note = Artificially Synthesized Probe
  source 1..80: mol_type = other DNA
ctgggattacaggtgcatgccaccatgcccagctaattttgtgtgtgtgtgtgtatgtgtgggtgtgtatgtatgtgttt

SEQ ID NO: 120522 - DNA, 80 bp, synthetic construct
  misc_feature 1..80: note = Artificially Synthesized Probe
  source 1..80: mol_type = other DNA
tttgaaggcacattaagactacagcacctatatgtgatgctatgcaaacttctggacactcccttaactgcagtgattag

SEQ ID NO: 120523 - DNA, 80 bp, synthetic construct
  misc_feature 1..80: note = Artificially Synthesized Probe
  source 1..80: mol_type = other DNA
tcgaaggaggacaaagtcacagggctgacactccccaacttcaagagttactatacagctacagtaatcaaggcagcggg

SEQ ID NO: 120524 - DNA, 80 bp, synthetic construct
  misc_feature 1..80: note = Artificially Synthesized Probe
  source 1..80: mol_type = other DNA
tgctgtgccgtgacatcataaattcatttcccctggctgctgcaccgtgacgtcataaattcatttcccctggctgctgc

SEQ ID NO: 120525 - DNA, 80 bp, synthetic construct
  misc_feature 1..80: note = Artificially Synthesized Probe
  source 1..80: mol_type = other DNA
tcataaattcatttcccctggctgttgcattgtgacatcataaattcatttcccctggctgctgtgtggtgatgtcataa

SEQ ID NO: 120526 - DNA, 80 bp, synthetic construct; identical to SEQ ID NO: 39155
  misc_feature 1..80: note = Artificially Synthesized Probe
  source 1..80: mol_type = other DNA

SEQ ID NO: 120527 - DNA, 80 bp, synthetic construct
  misc_feature 1..80: note = Artificially Synthesized Probe
  source 1..80: mol_type = other DNA
tggctgctgcactgtgacatcataaattcatttcccctggctgctgtgccgtgacatcataaagtgggtggcttaaacaa

SEQ ID NO: 120528 - DNA, 80 bp, synthetic construct
  misc_feature 1..80: note = Artificially Synthesized Probe
  source 1..80: mol_type = other DNA
cctccatcttcacgtggcgttctaacccttgtgtgtctgtctcttttcgcttttcttaagaggacatctttcaagattag

SEQ ID NO: 120529 - DNA, 80 bp, synthetic construct
  misc_feature 1..80: note = Artificially Synthesized Probe
  source 1..80: mol_type = other DNA
aggttctagatagacatgaatttacggggcaaacgctttgactcagtaagggagcatttggagacttttaagtaaatcct

SEQ ID NO: 120530 - DNA, 80 bp, synthetic construct; identical to SEQ ID NO: 39156
  misc_feature 1..80: note = Artificially Synthesized Probe
  source 1..80: mol_type = other DNA

SEQ ID NO: 120531 - DNA, 80 bp, synthetic construct
  misc_feature 1..80: note = Artificially Synthesized Probe
  source 1..80: mol_type = other DNA
agacacaagctgtctagctacttggctgtcttgttcaaataaatgggattttatcaaatcacccagtaagtgcaaaatgc

SEQ ID NO: 120532 - DNA, 80 bp, synthetic construct
  misc_feature 1..80: note = Artificially Synthesized Probe
  source 1..80: mol_type = other DNA
tgtgtggctttcgttggtggcaaacagcagagacgcacccaagctgctgacgattttcatgcaaaggtgaggctgcttca

SEQ ID NO: 120533 - DNA, 80 bp, synthetic construct
  misc_feature 1..80: note = Artificially Synthesized Probe
  source 1..80: mol_type = other DNA
tggctgtgggaacaaatgatcacaaacaaggtggcttcaagcaacaaaccttccatgcagtcctgtaagccagtgtccaa

SEQ ID NO: 120534 - DNA, 80 bp, synthetic construct
  misc_feature 1..80: note = Artificially Synthesized Probe
  source 1..80: mol_type = other DNA
tgtgtgtgccctacgaggaccttggtgattacgctggcttacccagtgctacactttgaacactggccctttccaatcct

SEQ ID NO: 120535 - DNA, 80 bp, synthetic construct; identical to SEQ ID NO: 38677
  misc_feature 1..80: note = Artificially Synthesized Probe
  source 1..80: mol_type = other DNA

SEQ ID NO: 120536 - DNA, 80 bp, synthetic construct; identical to SEQ ID NO: 39157
  misc_feature 1..80: note = Artificially Synthesized Probe
  source 1..80: mol_type = other DNA

SEQ ID NO: 120537 - DNA, 80 bp, synthetic construct
  misc_feature 1..80: note = Artificially Synthesized Probe
  source 1..80: mol_type = other DNA
gagtctgctgttccaggtcagcagtggaaggaagcatccagcatgggaggaagaaggaagccaggagacccagcaggcaa

SEQ ID NO: 120538 - DNA, 80 bp, synthetic construct
  misc_feature 1..80: note = Artificially Synthesized Probe
  source 1..80: mol_type = other DNA
accatccctgcgggcatccctcaatcaagttgatgtgtaacattaaccatcacagtgagtgggttcttgctctgccagtt

SEQ ID NO: 120539 - DNA, 80 bp, synthetic construct; identical to SEQ ID NO: 39158
  misc_feature 1..80: note = Artificially Synthesized Probe
  source 1..80: mol_type = other DNA

SEQ ID NO: 120540 - DNA, 80 bp, synthetic construct
  misc_feature 1..80: note = Artificially Synthesized Probe
  source 1..80: mol_type = other DNA
aaccaaacagtcttgttggggctcatttaacaaggaaagaaactcagaaagccacctggagggaagagaagggtccgctg

SEQ ID NO: 120541 - DNA, 80 bp, synthetic construct
  misc_feature 1..80: note = Artificially Synthesized Probe
  source 1..80: mol_type = other DNA
ggcagccactaccatgcgtggcatgagaaaatgtactcatccccctctggctaaattgctaaatgtgggaactcagtttg

SEQ ID NO: 120542 - DNA, 80 bp, synthetic construct
  misc_feature 1..80: note = Artificially Synthesized Probe
  source 1..80: mol_type = other DNA
acaggccacatccaaaaacgccttgcccgggatccttgagtgaagagcgcaatacaacacagaaccattgccaacggcat

SEQ ID NO: 120543 - DNA, 80 bp, synthetic construct
  misc_feature 1..80: note = Artificially Synthesized Probe
  source 1..80: mol_type = other DNA
tgcagtgttaagggttaaggaagaacacggggtctggcatgcagcagcctatgccctgttcattgtccctttaggagctg

SEQ ID NO: 120544 - DNA, 80 bp, synthetic construct; identical to SEQ ID NO: 39159
  misc_feature 1..80: note = Artificially Synthesized Probe
  source 1..80: mol_type = other DNA

SEQ ID NO: 120545 - DNA, 80 bp, synthetic construct
  misc_feature 1..80: note = Artificially Synthesized Probe
  source 1..80: mol_type = other DNA
atattaaatttgggccttattaaaatggagccattctgaacgtctctcattgccactgcctttttttcctgattttctcc

SEQ ID NO: 120546 - DNA, 80 bp, synthetic construct
  misc_feature 1..80: note = Artificially Synthesized Probe
  source 1..80: mol_type = other DNA
cgtctctcattgccactgcctttttttcctgattttctccaccctttctttgcttctggatgtctggttaaaaactgttg

SEQ ID NO: 120547 - DNA, 80 bp, synthetic construct
  misc_feature 1..80: note = Artificially Synthesized Probe
  source 1..80: mol_type = other DNA
ccctatgcttcagccagggttctccagagacacagacccacggggtgtgtgtgtgtgtgtgtgtgtgtgtgtgtgtgtgt

SEQ ID NO: 120548 - DNA, 80 bp, synthetic construct
  misc_feature 1..80: note = Artificially Synthesized Probe
  source 1..80: mol_type = other DNA
aaattaactctgcaaaatgcactctgaagagaataaaaagataaaccacagactgggggaaaatctttgcaaaacaaaca

SEQ ID NO: 120549 - DNA, 80 bp, synthetic construct
  misc_feature 1..80: note = Artificially Synthesized Probe
  source 1..80: mol_type = other DNA
ttattttaagggattggtttaaatgattgtggaggctgacaagtccaaaatccataggacagggcagcaggctggaaact

SEQ ID NO: 120550 - DNA, 80 bp, synthetic construct
  misc_feature 1..80: note = Artificially Synthesized Probe
  source 1..80: mol_type = other DNA
ggtcaggagttcaagaccagcctggccaacatggtgaaaccccgtctcttataaaagtacaaaaatcagccgggcatggt

SEQ ID NO: 120551 - DNA, 80 bp, synthetic construct
  misc_feature 1..80: note = Artificially Synthesized Probe
  source 1..80: mol_type = other DNA
tcacagacttcgcttggcattcagatgtttcagcacgagcccatctctacttataacaagagcagtctgcgaggtggaga

SEQ ID NO: 120552 - DNA, 80 bp, synthetic construct
  misc_feature 1..80: note = Artificially Synthesized Probe
  source 1..80: mol_type = other DNA
agaagatacacagatggcaaataaatgctccacatcatgtggaattagcaaatcaagccaacagtgagacaccactacac

SEQ ID NO: 120553 - DNA, 80 bp, synthetic construct
  misc_feature 1..80: note = Artificially Synthesized Probe
  source 1..80: mol_type = other DNA
cagtttggcagtttcttacaaaacaacacacttttaccctatgatccagcaattgtgctcctttgtatttacccaaatga

SEQ ID NO: 120554 - DNA, 80 bp, synthetic construct; identical to SEQ ID NO: 38678
  misc_feature 1..80: note = Artificially Synthesized Probe
  source 1..80: mol_type = other DNA

SEQ ID NO: 120555 - DNA, 80 bp, synthetic construct
  misc_feature 1..80: note = Artificially Synthesized Probe
  source 1..80: mol_type = other DNA
gctcagggggagggaaggaaggtggaacagaagcacagagaatttttgaggcagtgaggctgttctgtttgatactataa

SEQ ID NO: 120556 - DNA, 80 bp, synthetic construct
  misc_feature 1..80: note = Artificially Synthesized Probe
  source 1..80: mol_type = other DNA
gtgggacatttgctacaattgacaagccaattgaaaaatagggaaaacagggagagatataagggggtatgtggcaagtc

SEQ ID NO: 120557 - DNA, 80 bp, synthetic construct
  misc_feature 1..80: note = Artificially Synthesized Probe
  source 1..80: mol_type = other DNA
gggaaaacagggagagatataagggggtatgtggcaagtcggtacttttcactcatttttccccataaactcctcaaaat

SEQ ID NO: 120558 - DNA, 80 bp, synthetic construct; identical to SEQ ID NO: 38679
  misc_feature 1..80: note = Artificially Synthesized Probe
  source 1..80: mol_type = other DNA

SEQ ID NO: 120559 - DNA, 80 bp, synthetic construct
  misc_feature 1..80: note = Artificially Synthesized Probe
  source 1..80: mol_type = other DNA
aaaccacaatgccattctcatgcctaaaaagcgactgcattcctggtatcatgaggcaccgcgtcatggctcaggctccc

SEQ ID NO: 120560 - DNA, 80 bp, synthetic construct
  misc_feature 1..80: note = Artificially Synthesized Probe
  source 1..80: mol_type = other DNA
cattgcttctattagtggtggtcagaggcgggattgcatccaggagccctttgcaggcggtgccgggcatacccacgcca

SEQ ID NO: 120561 - DNA, 80 bp, synthetic construct
  misc_feature 1..80: note = Artificially Synthesized Probe
  source 1..80: mol_type = other DNA
acgctgatgttcaacttctgttgctccttctccacttactagttggaataatttttattttaacttcttgagacagggtc

SEQ ID NO: 120562 - DNA, 80 bp, synthetic construct
  misc_feature 1..80: note = Artificially Synthesized Probe
  source 1..80: mol_type = other DNA
gccaccacactgggctaatttttgtatttttttgtagagatggggtcttcctgtgttggccaggctggtcttgaactcct

SEQ ID NO: 120563 - DNA, 80 bp, synthetic construct; identical to SEQ ID NO: 38680
  misc_feature 1..80: note = Artificially Synthesized Probe
  source 1..80: mol_type = other DNA

SEQ ID NO: 120564 - DNA, 80 bp, synthetic construct
  misc_feature 1..80: note = Artificially Synthesized Probe
  source 1..80: mol_type = other DNA
caagtttagactttccagccaatcggccacatctggtttagtccacaggtggacaggtttagttgtaaaaggcttatttg

SEQ ID NO: 120565 - DNA, 80 bp, synthetic construct
  misc_feature 1..80: note = Artificially Synthesized Probe
  source 1..80: mol_type = other DNA
tagctcgacgtggtagtgcatgcctgtaaacccagctactcgggaggctgaggcaggagaatcgcttgaacccaggaggc

SEQ ID NO: 120566 - DNA, 80 bp, synthetic construct
  misc_feature 1..80: note = Artificially Synthesized Probe
  source 1..80: mol_type = other DNA
ttattttattttattgaaacggggtcttattctgttacctgggctggagtgcagtggcatgatctcagctcactgcagcc

SEQ ID NO: 120567 - DNA, 80 bp, synthetic construct
  misc_feature 1..80: note = Artificially Synthesized Probe
  source 1..80: mol_type = other DNA
ctcaagcaatctgcctgcctcagcctcccaaagtgttgggatgacaggcgtaagccaccacgcctggtctagtctttgtt

SEQ ID NO: 120568 - DNA, 80 bp, synthetic construct; identical to SEQ ID NO: 38681
  misc_feature 1..80: note = Artificially Synthesized Probe
  source 1..80: mol_type = other DNA

SEQ ID NO: 120569 - DNA, 80 bp, synthetic construct
  misc_feature 1..80: note = Artificially Synthesized Probe
  source 1..80: mol_type = other DNA
attaagattttttttcctcattattagactgaggtatatatgggtgttcaggaggtaaagagccattcctgtcacatagt

SEQ ID NO: 120570 - DNA, 80 bp, synthetic construct
  misc_feature 1..80: note = Artificially Synthesized Probe
  source 1..80: mol_type = other DNA
cctaaggggtggggagttacacaccacctccttgaggacagagtatctttgcacatgttagggaagatttgtctattcct

SEQ ID NO: 120571 - DNA, 80 bp, synthetic construct
  misc_feature 1..80: note = Artificially Synthesized Probe
  source 1..80: mol_type = other DNA
gagtatctttgcacatgttagggaagatttgtctattcctccctttatctttcagttgtttatttatcagtgtggaccca

SEQ ID NO: 120572 - DNA, 80 bp, synthetic construct
  misc_feature 1..80: note = Artificially Synthesized Probe
  source 1..80: mol_type = other DNA
tgaatactcatgttgtactttgaatgataaccaaatgtgactttattttctagctcaaattgtcccggccgtggtctttg

SEQ ID NO: 120573 - DNA, 80 bp, synthetic construct; identical to SEQ ID NO: 38682
  misc_feature 1..80: note = Artificially Synthesized Probe
  source 1..80: mol_type = other DNA

SEQ ID NO: 120574 - DNA, 80 bp, synthetic construct
  misc_feature 1..80: note = Artificially Synthesized Probe
  source 1..80: mol_type = other DNA
catctatcattactttcagactaacaccaccaatgtcattactcataacaggattaccgaaaagaggttatgatttcttt

SEQ ID NO: 120575 - DNA, 80 bp, synthetic construct
  misc_feature 1..80: note = Artificially Synthesized Probe
  source 1..80: mol_type = other DNA
ttgaacctgctactctctctcttctacttcctcttcttgtattctcccccttgaggcaatgctaaattaaaacaagttat

SEQ ID NO: 120576 - DNA, 80 bp, synthetic construct
  misc_feature 1..80: note = Artificially Synthesized Probe
  source 1..80: mol_type = other DNA
tgggtaaacagcagcacgctggtcacattcttctcgccttgcctttcccacgtaacaacaccccctggagacggtgccac

SEQ ID NO: 120577 - DNA, 80 bp, synthetic construct; identical to SEQ ID NO: 38630
  misc_feature 1..80: note = Artificially Synthesized Probe
  source 1..80: mol_type = other DNA

SEQ ID NO: 120578 - DNA, 80 bp, synthetic construct; identical to SEQ ID NO: 38683
  misc_feature 1..80: note = Artificially Synthesized Probe
  source 1..80: mol_type = other DNA

SEQ ID NO: 120579 - DNA, 80 bp, synthetic construct
  misc_feature 1..80: note = Artificially Synthesized Probe
  source 1..80: mol_type = other DNA
ctctgtccttgttggtctctgcctctttaaggatggcttatcctgctgcgtgcatggctgaatgcacggcttaacctcta

SEQ ID NO: 120580 - DNA, 80 bp, synthetic construct
  misc_feature 1..80: note = Artificially Synthesized Probe
  source 1..80: mol_type = other DNA
tgcacgtgcagggttctcattaattcttagcttgtctccagccatggcttattcaaaccccgatcttatttcctcctttg

SEQ ID NO: 120581 - DNA, 80 bp, synthetic construct; identical to SEQ ID NO: 38684
  misc_feature 1..80: note = Artificially Synthesized Probe
  source 1..80: mol_type = other DNA

SEQ ID NO: 120582 - DNA, 80 bp, synthetic construct
  misc_feature 1..80: note = Artificially Synthesized Probe
  source 1..80: mol_type = other DNA
catttgggcccctaaatgccacagctcctctcttagcggccacagttgccccggcaacgtgcggccgcgggcaggctacc

SEQ ID NO: 120583 - DNA, 80 bp, synthetic construct
  misc_feature 1..80: note = Artificially Synthesized Probe
  source 1..80: mol_type = other DNA
cacacctgcaatgctggtgtgggtgtggaggggcagctgcttgtctcctgctcctccccgagcatcaaagcacgcgggtg

SEQ ID NO: 120584 - DNA, 80 bp, synthetic construct
  misc_feature 1..80: note = Artificially Synthesized Probe
  source 1..80: mol_type = other DNA
caaatacagattcccagccctcacagcagcaggtgctctataaatactattgagcagttctctttgggactgtggtaaaa

SEQ ID NO: 120585 - DNA, 80 bp, synthetic construct
  misc_feature 1..80: note = Artificially Synthesized Probe
  source 1..80: mol_type = other DNA
gactggaaggggggatgcagaggccctgctctgctggggaggatccccggtgctgccccgaagccctgtactgcagcccg

SEQ ID NO: 120586 - DNA, 80 bp, synthetic construct; identical to SEQ ID NO: 38685
  misc_feature 1..80: note = Artificially Synthesized Probe
  source 1..80: mol_type = other DNA

SEQ ID NO: 120587 - DNA, 80 bp, synthetic construct
  misc_feature 1..80: note = Artificially Synthesized Probe
  source 1..80: mol_type = other DNA
acatgagggggcctggccatatttgcagcgtgactagcaagggaatattaacagccagtgtcaactgagcactgacgaca

SEQ ID NO: 120588 - DNA, 80 bp, synthetic construct
  misc_feature 1..80: note = Artificially Synthesized Probe
  source 1..80: mol_type = other DNA
agtcccaccccctggggggcagtgcagctgtgaatgccaccatcggagatgggaaagcaccaggggcagctgtgtcgctc

SEQ ID NO: 120589 - DNA, 80 bp, synthetic construct
  misc_feature 1..80: note = Artificially Synthesized Probe
  source 1..80: mol_type = other DNA
ctgcagatcacccaggaaggcgagggagacgcccaaaccatgccagagtgtctagtggcagatccactggcagtgaacga

SEQ ID NO: 120590 - DNA, 80 bp, synthetic construct
  misc_feature 1..80: note = Artificially Synthesized Probe
  source 1..80: mol_type = other DNA
ggatgcagctaagaccttgtgaattcctttgctccacattgatctgcaaggagtactagtaggagtctgctttcacctga

SEQ ID NO: 120591 - DNA, 80 bp, synthetic construct; identical to SEQ ID NO: 38686
  misc_feature 1..80: note = Artificially Synthesized Probe
  source 1..80: mol_type = other DNA

SEQ ID NO: 120592 - DNA, 80 bp, synthetic construct
  misc_feature 1..80: note = Artificially Synthesized Probe
  source 1..80: mol_type = other DNA
caggcacgaggcttggcaggtctttgtggagtgtggaggcaacacaggccacatttgaacattttctccagcccatctac

SEQ ID NO: 120593 - DNA, 80 bp, synthetic construct
  misc_feature 1..80: note = Artificially Synthesized Probe
  source 1..80: mol_type = other DNA
agcgacacttacagtacccatggcaaacagggacgcgtgtggaggctctggccagcaccagcaacagaatcccagtgcag

SEQ ID NO: 120594 - DNA, 80 bp, synthetic construct
  misc_feature 1..80: note = Artificially Synthesized Probe
  source 1..80: mol_type = other DNA
gtcacttctgttagctttgtgtaccagtccccaggctcacccaaggaacagactctgtgggtggcagcccctctccaaga

SEQ ID NO: 120595 - DNA, 80 bp, synthetic construct; identical to SEQ ID NO: 38687
  misc_feature 1..80: note = Artificially Synthesized Probe
  source 1..80: mol_type = other DNA

SEQ ID NO: 120596 - DNA, 80 bp, synthetic construct
  misc_feature 1..80: note = Artificially Synthesized Probe
  source 1..80: mol_type = other DNA
ccctcctagcccccagggatgtggctcctttagttttgtggaggtgatggcgggaaagtcctgttctcagaagcttcctt

SEQ ID NO: 120597 - DNA, 80 bp, synthetic construct
  misc_feature 1..80: note = Artificially Synthesized Probe
  source 1..80: mol_type = other DNA
tcagacacaactggccagcactcacattaaaacagagatccggagagtaatggaatgaactcctggtagcaataagacac

SEQ ID NO: 120598 - DNA, 80 bp, synthetic construct; identical to SEQ ID NO: 38688
  misc_feature 1..80: note = Artificially Synthesized Probe
  source 1..80: mol_type = other DNA

SEQ ID NO: 120599 - DNA, 80 bp, synthetic construct
  misc_feature 1..80: note = Artificially Synthesized Probe
  source 1..80: mol_type = other DNA
ccctgcttcacctttccacatgcagggcctgattgccatgcctttcaatgttaagtctctaccccgaggtgaacatggga

SEQ ID NO: 120600 - DNA, 80 bp, synthetic construct
  misc_feature 1..80: note = Artificially Synthesized Probe
  source 1..80: mol_type = other DNA
tatgatctcattcatttcacatgttcagaataggcaaattcatggagatgcaaagtcatgagtggttttctaggggctgg

SEQ ID NO: 120601 - DNA, 80 bp, synthetic construct
  misc_feature 1..80: note = Artificially Synthesized Probe
  source 1..80: mol_type = other DNA
gttcttagctagacaatggggatggttttgcacagcatcatgaatattcttaatgccaccaaagtgtacactttaaaatg

SEQ ID NO: 120602 - DNA, 80 bp, synthetic construct
  misc_feature 1..80: note = Artificially Synthesized Probe
  source 1..80: mol_type = other DNA
cccagctggtcacaatgccacctcgcaggcgtaaccctttacaaaataaagtctcctttcgaaattttatgattttgtga

SEQ ID NO: 120603 - DNA, 80 bp, synthetic construct
  misc_feature 1..80: note = Artificially Synthesized Probe
  source 1..80: mol_type = other DNA
aactgggacagaggggctgggggacctgcctgtgctggggggcagggccgggggaccctcgggagggtggccactgaggc

SEQ ID NO: 120604 - DNA, 80 bp, synthetic construct; identical to SEQ ID NO: 39160
  misc_feature 1..80: note = Artificially Synthesized Probe
  source 1..80: mol_type = other DNA

SEQ ID NO: 120605 - DNA, 80 bp, synthetic construct
  misc_feature 1..80: note = Artificially Synthesized Probe
  source 1..80: mol_type = other DNA
cggcgctgactgctgcatgcatttccacattatttgtgccatttgctctaataggaaggagccagtgtgagcaagcacac

SEQ ID NO: 120606 - DNA, 80 bp, synthetic construct
  misc_feature 1..80: note = Artificially Synthesized Probe
  source 1..80: mol_type = other DNA
ctgatgctgagatctcttttacctgaaatggagtctggctgttgtagttttttaactccttatttccgcctcgaaacaga

SEQ ID NO: 120607 - DNA, 80 bp, synthetic construct
  misc_feature 1..80: note = Artificially Synthesized Probe
  source 1..80: mol_type = other DNA
gttgtagttttttaactccttatttccgcctcgaaacagaagcactcttgcacagctgtcctgcaaatagaaaaggagaa

SEQ ID NO: 120608 - DNA, 80 bp, synthetic construct
  misc_feature 1..80: note = Artificially Synthesized Probe
  source 1..80: mol_type = other DNA
tggctcctgtatgctgtcaggtgaggctcacctgctgccaactatggccaaacaatttcactttttaagactatatccta

SEQ ID NO: 120609 - DNA, 80 bp, synthetic construct; identical to SEQ ID NO: 39161
  misc_feature 1..80: note = Artificially Synthesized Probe
  source 1..80: mol_type = other DNA

SEQ ID NO: 120610 - DNA, 80 bp, synthetic construct
  misc_feature 1..80: note = Artificially Synthesized Probe
  source 1..80: mol_type = other DNA
gaacattcttcacctaggcagtctcaggacaaaacaaggcagatgactatgaactgagaaaaacatatccaggaacttct

SEQ ID NO: 120611 - DNA, 80 bp, synthetic construct
  misc_feature 1..80: note = Artificially Synthesized Probe
  source 1..80: mol_type = other DNA
caaaaattagccgggcatggaggcatgcgcctgtaatcccagctactcaggaggctgaggcaggagaatcacttgaaccc

SEQ ID NO: 120612 - DNA, 80 bp, synthetic construct
  misc_feature 1..80: note = Artificially Synthesized Probe
  source 1..80: mol_type = other DNA
aactaataaaggcttaaagtctatattatagaaaagcagggactatgtctggaaggatatgcaccagttaacggtattta

SEQ ID NO: 120613 - DNA, 80 bp, synthetic construct
  misc_feature 1..80: note = Artificially Synthesized Probe
  source 1..80: mol_type = other DNA
gactatgtctggaaggatatgcaccagttaacggtatttactttcatggaaaggaaaaggattagggagagaacagaagg

SEQ ID NO: 120614 - DNA, 80 bp, synthetic construct
  misc_feature 1..80: note = Artificially Synthesized Probe
  source 1..80: mol_type = other DNA
tgccaccatgcccagctaattttttttttttggagagccagggtctcaatatattgcccaggctagtctcgaactcctgg

SEQ ID NO: 120615 - DNA, 80 bp, synthetic construct
  misc_feature 1..80: note = Artificially Synthesized Probe
  source 1..80: mol_type = other DNA
tcacatcccgggggagcccctctgagcccactctcctccctgtaccggccccatctggccaccaccctgggagcatccct

SEQ ID NO: 120616 - DNA, 80 bp, synthetic construct; identical to SEQ ID NO: 39162
  misc_feature 1..80: note = Artificially Synthesized Probe
  source 1..80: mol_type = other DNA

SEQ ID NO: 120617 - DNA, 80 bp, synthetic construct
  misc_feature 1..80: note = Artificially Synthesized Probe
  source 1..80: mol_type = other DNA
gccactgcacccagcctcttatgcattttcataacaaaaatgaatctgcatccatccattgattgggcagctaccatttg

SEQ ID NO: 120618 - DNA, 80 bp, synthetic construct
  misc_feature 1..80: note = Artificially Synthesized Probe
  source 1..80: mol_type = other DNA
agcagcagaatgttgatgtaaccagtggggactgcagcggcaaataactactaataaaaaggcagcagtagaatactgat

SEQ ID NO: 120619 - DNA, 80 bp, synthetic construct
  misc_feature 1..80: note = Artificially Synthesized Probe
  source 1..80: mol_type = other DNA
gtagccgtaccgactattagaataattttgcctagcaaatgcagttggctgtttagaataagcaaactctgtttttggaa

SEQ ID NO: 120620 - DNA, 80 bp, synthetic construct; identical to SEQ ID NO: 39163
  misc_feature 1..80: note = Artificially Synthesized Probe
  source 1..80: mol_type = other DNA

SEQ ID NO: 120621 - DNA, 80 bp, synthetic construct
  misc_feature 1..80: note = Artificially Synthesized Probe
  source 1..80: mol_type = other DNA
ctggcagatcagcagatttgaaagagagctgattggttgggcgcggtggctcacgtctgtaatcccagcactttgggagg

SEQ ID NO: 120622 - DNA, 80 bp, synthetic construct
  misc_feature 1..80: note = Artificially Synthesized Probe
  source 1..80: mol_type = other DNA
cccagctactcgggaggctgaggcaggagaatcacttgaacctgggaggtggaggttgcagagagccaagactgtgccat

SEQ ID NO: 120623 - DNA, 80 bp, synthetic construct
  misc_feature 1..80: note = Artificially Synthesized Probe
  source 1..80: mol_type = other DNA
ctgggtttcagtctgggtgaaaaaaaatgttctaaggttgacggttgtgatggttgttggtggtgatggtcgatggtggt

SEQ ID NO: 120624 - DNA, 80 bp, synthetic construct
  misc_feature 1..80: note = Artificially Synthesized Probe
  source 1..80: mol_type = other DNA
gaaggcaggccaccctggcagagagtcttcatccctggctgggtgggtcgggcaggccaggagcacactgagctctcagg

SEQ ID NO: 120625 - DNA, 80 bp, synthetic construct; identical to SEQ ID NO: 39164
  misc_feature 1..80: note = Artificially Synthesized Probe
  source 1..80: mol_type = other DNA

SEQ ID NO: 120626 - DNA, 80 bp, synthetic construct; identical to SEQ ID NO: 38689
  misc_feature 1..80: note = Artificially Synthesized Probe
  source 1..80: mol_type = other DNA

SEQ ID NO: 120627 - DNA, 80 bp, synthetic construct
  misc_feature 1..80: note = Artificially Synthesized Probe
  source 1..80: mol_type = other DNA
ggttggttagagggggatccccagagcccctgcaccccgattccaattagaagcaaaaccaccatggtttccccaccctc

SEQ ID NO: 120628 - DNA, 80 bp, synthetic construct
  misc_feature 1..80: note = Artificially Synthesized Probe
  source 1..80: mol_type = other DNA
catggcaaaaaaccatccagccccaaacctcaataaagctgaggtcaacaacccctgtcttcatggctccaaatgttact

SEQ ID NO: 120629 - DNA, 80 bp, synthetic construct
  misc_feature 1..80: note = Artificially Synthesized Probe
  source 1..80: mol_type = other DNA
ccctggaacgtgtcctcagactcagggacagcccagcaggtttcacagaagatgttcacccactcctggggagcaggaag

SEQ ID NO: 120630 - DNA, 80 bp, synthetic construct; identical to SEQ ID NO: 39165
  misc_feature 1..80: note = Artificially Synthesized Probe
  source 1..80: mol_type = other DNA

SEQ ID NO: 120631 - DNA, 80 bp, synthetic construct
  misc_feature 1..80: note = Artificially Synthesized Probe
  source 1..80: mol_type = other DNA
gtaagggaattttcagacataactatgttcagcaaacgaatctttcatttctggggtacaattaaatccagagtttcaaa

SEQ ID NO: 120632 - DNA, 80 bp, synthetic construct
  misc_feature 1..80: note = Artificially Synthesized Probe
  source 1..80: mol_type = other DNA
tcctgcacatctaattttgtaaataaagttttactgggatgcgaccacatctactcacctgcatattttctgtggctgca

SEQ ID NO: 120633 - DNA, 80 bp, synthetic construct; identical to SEQ ID NO: 39166
  misc_feature 1..80: note = Artificially Synthesized Probe
  source 1..80: mol_type = other DNA

SEQ ID NO: 120634 - DNA, 80 bp, synthetic construct
  misc_feature 1..80: note = Artificially Synthesized Probe
  source 1..80: mol_type = other DNA
catattagtacagcccctccaagtcccaggcacatgggcccatcggggtgtcaccgggaacctgggaatggtgagtttct

SEQ ID NO: 120635 - DNA, 80 bp, synthetic construct
  misc_feature 1..80: note = Artificially Synthesized Probe
  source 1..80: mol_type = other DNA
aaagcctcctggggagggtgtggtgccggcctggctgtggacttgtgctgaccccttctggggccgggctggactcaccc

SEQ ID NO: 120636 - DNA, 80 bp, synthetic construct
  misc_feature 1..80: note = Artificially Synthesized Probe
  source 1..80: mol_type = other DNA
tgagcccaaaatttcccgtcaaatcacccccagtgggatcctgttatttccaactccaaaaagtctttctttcttttttt

SEQ ID NO: 120637 - DNA, 80 bp, synthetic construct
  misc_feature 1..80: note = Artificially Synthesized Probe
  source 1..80: mol_type = other DNA
gcgcacgccaccatgccgggctaatttttgtattttctgtagagacagggtttcaccatgttgcccaggctggtctccat

SEQ ID NO: 120638 - DNA, 80 bp, synthetic construct; identical to SEQ ID NO: 39167
  misc_feature 1..80: note = Artificially Synthesized Probe
  source 1..80: mol_type = other DNA

SEQ ID NO: 120639 - DNA, 80 bp, synthetic construct
  misc_feature 1..80: note = Artificially Synthesized Probe
  source 1..80: mol_type = other DNA
ctggcccagtggcctagaagaatcacccagcaccagcaaaacccagatggctgagagtggcctggcgaattggaatacag

SEQ ID NO: 120640 - DNA, 80 bp, synthetic construct
  misc_feature 1..80: note = Artificially Synthesized Probe
  source 1..80: mol_type = other DNA
taatctcaacactttgggaggctgaggtgggaggattgcttgagtctaggagtttcagaccagcctgggcaatatagcaa

SEQ ID NO: 120641 - DNA, 80 bp, synthetic construct
  misc_feature 1..80: note = Artificially Synthesized Probe
  source 1..80: mol_type = other DNA
gtgagctgtgatcgtgccactgcattccagcctgggtgacacagcaagaccctgtctcaaaaaaaaaaaaaaaaaaaaag

SEQ ID NO: 120642 - DNA, 80 bp, synthetic construct; identical to SEQ ID NO: 39168
  misc_feature 1..80: note = Artificially Synthesized Probe
  source 1..80: mol_type = other DNA

SEQ ID NO: 120643 - DNA, 80 bp, synthetic construct
  misc_feature 1..80: note = Artificially Synthesized Probe
  source 1..80: mol_type = other DNA
ttaataacaatgatacctccatgtatgtatgcatatcacacatgtgtctgtgtacacgtgtgtgaacatgtgtgtttgca

SEQ ID NO: 120644 - DNA, 80 bp, synthetic construct
  misc_feature 1..80: note = Artificially Synthesized Probe
  source 1..80: mol_type = other DNA
cccattttacagagaaggttaatgtgaaaaactgcaacaacttgcggcttcagaaaggaggagaaaggaaaaactgtgat

SEQ ID NO: 120645 - DNA, 80 bp, synthetic construct
  misc_feature 1..80: note = Artificially Synthesized Probe
  source 1..80: mol_type = other DNA
atcaagaagaatatcattttcactgccactttttctcttggcatgaattttccgagacacttcccttaataaatgtacct

SEQ ID NO: 120646 - DNA, 80 bp, synthetic construct
  misc_feature 1..80: note = Artificially Synthesized Probe
  source 1..80: mol_type = other DNA
caagttggggaatcctaaagtggcatggcttcctggtgtgtttaaaatactcatttgctcctcactcagaagggcagttg

SEQ ID NO: 120647 - DNA, 80 bp, synthetic construct; identical to SEQ ID NO: 39169
  misc_feature 1..80: note = Artificially Synthesized Probe
  source 1..80: mol_type = other DNA

SEQ ID NO: 120648 - DNA, 80 bp, synthetic construct
  misc_feature 1..80: note = Artificially Synthesized Probe
  source 1..80: mol_type = other DNA
gattccccagaccccatcatttccatttacagatgaagagacagacagagaaagccactcatcgatgcatgcagtgagtc

SEQ ID NO: 120649 - DNA, 80 bp, synthetic construct
  misc_feature 1..80: note = Artificially Synthesized Probe
  source 1..80: mol_type = other DNA
gctgggcaagctgagtcctgggatgggaggagagagagcctggggacagctgggcggaggcagaggccaccccagcagag

SEQ ID NO: 120650 - DNA, 80 bp, synthetic construct
  misc_feature 1..80: note = Artificially Synthesized Probe
  source 1..80: mol_type = other DNA
gaagaacttgggtgacagaaagtggatttgagggaagacagactggaaggaaagaggctggatggtgaatacatagtccc

SEQ ID NO: 120651 - DNA, 80 bp, synthetic construct
  misc_feature 1..80: note = Artificially Synthesized Probe
  source 1..80: mol_type = other DNA
ggcctgagctccaggggaagggcgttatttacagagtggggagcagctgccacactggagtctcctaagaggtcggcacg

SEQ ID NO: 120652 - DNA, 80 bp, synthetic construct; identical to SEQ ID NO: 39170
  misc_feature 1..80: note = Artificially Synthesized Probe
  source 1..80: mol_type = other DNA

SEQ ID NO: 120653 - DNA, 80 bp, synthetic construct
  misc_feature 1..80: note = Artificially Synthesized Probe
  source 1..80: mol_type = other DNA
tcttccagggagataaacagtgagtggggaagttggtgggaggtgtgtgcagaactctcccagggagatgagcagtgagt

SEQ ID NO: 120654 - DNA, 80 bp, synthetic construct
  misc_feature 1..80: note = Artificially Synthesized Probe
  source 1..80: mol_type = other DNA
gtggggaagttggggtgtatgtgcagaactctcccagggagatgagcagtgagtggggaagttgaggggtgtgtgcagaa

SEQ ID NO: 120655 - DNA, 80 bp, synthetic construct
  misc_feature 1..80: note = Artificially Synthesized Probe
  source 1..80: mol_type = other DNA
ctcccagggagatgagcagtgagtggcgaagttggggaggaggggtacagaactctcccagggagatgagtggtgagtgg

SEQ ID NO: 120656 - DNA, 80 bp, synthetic construct
  misc_feature 1..80: note = Artificially Synthesized Probe
  source 1..80: mol_type = other DNA
gaagttgggaggggagtacagaactctcccagggagatgagtggtgagtggggaagttgggggagggtacagaactctcc

SEQ ID NO: 120657 - DNA, 80 bp, synthetic construct; identical to SEQ ID NO: 39171
  misc_feature 1..80: note = Artificially Synthesized Probe
  source 1..80: mol_type = other DNA

SEQ ID NO: 120658 - DNA, 80 bp, synthetic construct
  misc_feature 1..80: note = Artificially Synthesized Probe
  source 1..80: mol_type = other DNA
ggggatgtggtggtgactcagactccgaggtcatggagaaggcccctctgataagctgagctacgaatgtgcctgactct

SEQ ID NO: 120659 - DNA, 80 bp, synthetic construct
  misc_feature 1..80: note = Artificially Synthesized Probe
  source 1..80: mol_type = other DNA
tcataagcaaatgggcatgacgtaagagaaggcagaggtcaaaagtagaaacactggtggcagacatgcccacaggcaca

SEQ ID NO: 120660 - DNA, 80 bp, synthetic construct
  misc_feature 1..80: note = Artificially Synthesized Probe
  source 1..80: mol_type = other DNA
ttgaaataaggccttttgggcagccataaatgtaaaaacaactaagatgtctgcataagtaaaacggggaagtggctggg

SEQ ID NO: 120661 - DNA, 80 bp, synthetic construct; identical to SEQ ID NO: 39172
  misc_feature 1..80: note = Artificially Synthesized Probe
  source 1..80: mol_type = other DNA

SEQ ID NO: 120662 - DNA, 80 bp, synthetic construct
  misc_feature 1..80: note = Artificially Synthesized Probe
  source 1..80: mol_type = other DNA
ccacacccacaacgcccaatgctcagggggccatcaccccatgatggccccatgggagctgccacagctcggacaggttc

SEQ ID NO: 120663 - DNA, 80 bp, synthetic construct
  misc_feature 1..80: note = Artificially Synthesized Probe
  source 1..80: mol_type = other DNA
ttggcctagcctagtaacctttgatatttaaaacttgcttcgctccttcatcatccagggcagaaaaatgaaccccaggc

SEQ ID NO: 120664 - DNA, 80 bp, synthetic construct
  misc_feature 1..80: note = Artificially Synthesized Probe
  source 1..80: mol_type = other DNA
gtaaggcctgcctaaaactgataaagcacatgtaacaatccatacacctgggtgcttttagatctaacaaggagaggctt

SEQ ID NO: 120665 - DNA, 80 bp, synthetic construct
  misc_feature 1..80: note = Artificially Synthesized Probe
  source 1..80: mol_type = other DNA
catacacctgggtgcttttagatctaacaaggagaggcttgttacaggaatatcgtcaatagcagcatcaccatcatcat

SEQ ID NO: 120666 - DNA, 80 bp, synthetic construct
  misc_feature 1..80: note = Artificially Synthesized Probe
  source 1..80: mol_type = other DNA
gtcaccatcaccatcaccaccatcatcaccaccaccactaccactatcatcatcaatatcaccagcatcaccaccatcac

SEQ ID NO: 120667 - DNA, 80 bp, synthetic construct
  misc_feature 1..80: note = Artificially Synthesized Probe
  source 1..80: mol_type = other DNA
atcaccatcacctgccgtcactcaccatgaacatgatcaccgtcactatcattaccatcagcactgccatcatcattagt

SEQ ID NO: 120668 - DNA, 80 bp, synthetic construct; identical to SEQ ID NO: 39173
  misc_feature 1..80: note = Artificially Synthesized Probe
  source 1..80: mol_type = other DNA

SEQ ID NO: 120669 - DNA, 80 bp, synthetic construct
  misc_feature 1..80: note = Artificially Synthesized Probe
  source 1..80: mol_type = other DNA
ctgtaagactcatccaaagagactggaagaatctgaatatctagggaaggcaaataaagtgcctttgcttgacaagttcc

SEQ ID NO: 120670 - DNA, 80 bp, synthetic construct
  misc_feature 1..80: note = Artificially Synthesized Probe
  source 1..80: mol_type = other DNA
gtatgctggtcctgtctcacagtggagccagctgctgctctgaagattcttcagcatcactgggattctgggttatgggc

SEQ ID NO: 120671 - DNA, 80 bp, synthetic construct; identical to SEQ ID NO: 38690
  misc_feature 1..80: note = Artificially Synthesized Probe
  source 1..80: mol_type = other DNA

SEQ ID NO: 120672 - DNA, 80 bp, synthetic construct
  misc_feature 1..80: note = Artificially Synthesized Probe
  source 1..80: mol_type = other DNA
tgtcatcaccatcatcatgattaccatcaccatcaccaccaccatcatcaccatcaaccaccaccatcatcaccatcacc

SEQ ID NO: 120673 - DNA, 80 bp, synthetic construct; identical to SEQ ID NO: 39174
  misc_feature 1..80: note = Artificially Synthesized Probe
  source 1..80: mol_type = other DNA

SEQ ID NO: 120674 - DNA, 80 bp, synthetic construct
  misc_feature 1..80: note = Artificially Synthesized Probe
  source 1..80: mol_type = other DNA
accttcatcattgccaccaccaccatcactgccttcatcatcaacaccttcatcattatcaccatcagcctcaccatcac

SEQ ID NO: 120675 - DNA, 80 bp, synthetic construct
  misc_feature 1..80: note = Artificially Synthesized Probe
  source 1..80: mol_type = other DNA
attaccatatatttgttttctatttttagcctcttagcaaccctgtgaattcggtttaattatccccacattacagataa

SEQ ID NO: 120676 - DNA, 80 bp, synthetic construct
  misc_feature 1..80: note = Artificially Synthesized Probe
  source 1..80: mol_type = other DNA
tcagggctgcctcctgactcctttccttgaatcctgtcttgattcaaaggcacctctgtcccatccctgaacagtctgtt

SEQ ID NO: 120677 - DNA, 80 bp, synthetic construct; identical to SEQ ID NO: 39175
  misc_feature 1..80: note = Artificially Synthesized Probe
  source 1..80: mol_type = other DNA

SEQ ID NO: 120678 - DNA, 80 bp, synthetic construct
  misc_feature 1..80: note = Artificially Synthesized Probe
  source 1..80: mol_type = other DNA
ggtttggaccagcttctttaactacatcagtgagacactccaaagagtttggggagggcatgagggaggagattaaagac

SEQ ID NO: 120679 - DNA, 80 bp, synthetic construct
  misc_feature 1..80: note = Artificially Synthesized Probe
  source 1..80: mol_type = other DNA
ccctgcccactggttcttggaggctaggcaaggctggaaatcaaaaccaggggagccagctaatgcatttctacccagac

SEQ ID NO: 120680 - DNA, 80 bp, synthetic construct
  misc_feature 1..80: note = Artificially Synthesized Probe
  source 1..80: mol_type = other DNA
gatccatcaataagacaaatgggggagaggaggagatgcagccttccattccaaggcttagagaagaatggcctgcaggc

SEQ ID NO: 120681 - DNA, 80 bp, synthetic construct
  misc_feature 1..80: note = Artificially Synthesized Probe
  source 1..80: mol_type = other DNA
tccatgcgacacgcaaagcctaaaatgttacccaactggctctttatagcaaaagcagatggctcatgtgctaacctgag

SEQ ID NO: 120682 - DNA, 80 bp, synthetic construct; identical to SEQ ID NO: 39176
  misc_feature 1..80: note = Artificially Synthesized Probe
  source 1..80: mol_type = other DNA

SEQ ID NO: 120683 - DNA, 80 bp, synthetic construct
  misc_feature 1..80: note = Artificially Synthesized Probe
  source 1..80: mol_type = other DNA
caggccgagaggccgagaccccgtccccaggcgtccctgaggtctgagggtcaggttgtccatgtgtgggacgaacgtgg

SEQ ID NO: 120684 - DNA, 80 bp, synthetic construct
  misc_feature 1..80: note = Artificially Synthesized Probe
  source 1..80: mol_type = other DNA
tgttggtgcagatgtgtttaccagccacagccaagcctcatgatgtgtttttctaatgcagctgagtaatgtatctccac

SEQ ID NO: 120685 - DNA, 80 bp, synthetic construct
  misc_feature 1..80: note = Artificially Synthesized Probe
  source 1..80: mol_type = other DNA
cacagctcagctgaaatgccacccaaccgcagctatgaaagatggcggcttatgcctctgatgatatccacacgtgcttc

SEQ ID NO: 120686 - DNA, 80 bp, synthetic construct
  misc_feature 1..80: note = Artificially Synthesized Probe
  source 1..80: mol_type = other DNA
agggtcaggaagtctgaattggatcttgaaggatgcataggagttttccagggcaaagaatccaggaagattgaacagct

SEQ ID NO: 120687 - DNA, 80 bp, synthetic construct
  misc_feature 1..80: note = Artificially Synthesized Probe
  source 1..80: mol_type = other DNA
catgagccaacaggatgggagcactgctttgggatgggaagagaatgctgacagcctgcagaggatggaccctggcacaa

SEQ ID NO: 120688 - DNA, 80 bp, synthetic construct; identical to SEQ ID NO: 39177
  misc_feature 1..80: note = Artificially Synthesized Probe
  source 1..80: mol_type = other DNA

SEQ ID NO: 120689 - DNA, 80 bp, synthetic construct
  misc_feature 1..80: note = Artificially Synthesized Probe
  source 1..80: mol_type = other DNA
caacagccccccacgcccctgcttcacctccccgtgaggccacggtgcacacactgggcggggtgtcacttggccttgtc

SEQ ID NO: 120690 - DNA, 80 bp, synthetic construct
  misc_feature 1..80: note = Artificially Synthesized Probe
  source 1..80: mol_type = other DNA
gatgatttgctttttcacatcaaggttccacttgtgggcatttttccccgaaagaaatgaaaacagggtcttgaacacat

SEQ ID NO: 120691 - DNA, 80 bp, synthetic construct; identical to SEQ ID NO: 39178
  misc_feature 1..80: note = Artificially Synthesized Probe
  source 1..80: mol_type = other DNA

SEQ ID NO: 120692 - DNA, 80 bp, synthetic construct
  misc_feature 1..80: note = Artificially Synthesized Probe
  source 1..80: mol_type = other DNA
ttctactcatatcaagtccctacagcaggaaaatctacagacacagaaagtgaacaggggttgccaggggctgaggagag

SEQ ID NO: 120693 - DNA, 80 bp, synthetic construct
  misc_feature 1..80: note = Artificially Synthesized Probe
  source 1..80: mol_type = other DNA
tttaccacttaatgaaaaagcacattggggcgtatctgtcccatgcagtggtggaaggcttgctttttgttttttttctt

SEQ ID NO: 120694 - DNA, 80 bp, synthetic construct
  misc_feature 1..80: note = Artificially Synthesized Probe
  source 1..80: mol_type = other DNA
caggcacatgccatcacacccggctaatttttgtattttcagtagagatggtgtttcaccacattggccaggctggtctt

SEQ ID NO: 120695 - DNA, 80 bp, synthetic construct
  misc_feature 1..80: note = Artificially Synthesized Probe
  source 1..80: mol_type = other DNA
tccaggtcccacaagaacaccccagttcatggccctttatggcacccatgggaggggctggatggggctctttcccgttt

SEQ ID NO: 120696 - DNA, 80 bp, synthetic construct
  misc_feature 1..80: note = Artificially Synthesized Probe
  source 1..80: mol_type = other DNA
ttgttgtagccttaaacccccagggctcaagtgatcctcccacctcagcctcctgagtagctgggaccacaggcacatgc

SEQ ID NO: 120697 - DNA, 80 bp, synthetic construct; identical to SEQ ID NO: 39179
  misc_feature 1..80: note = Artificially Synthesized Probe
  source 1..80: mol_type = other DNA

SEQ ID NO: 120698 - DNA, 80 bp, synthetic construct
  misc_feature 1..80: note = Artificially Synthesized Probe
  source 1..80: mol_type = other DNA
ggctcctcacgcatcttatggagcatggacagcatggaggcgtggcactgaccagacctgagtcttgagcccagttctgg

SEQ ID NO: 120699 - DNA, 80 bp, synthetic construct
  misc_feature 1..80: note = Artificially Synthesized Probe
  source 1..80: mol_type = other DNA
aaggccttcccggtgccccccagggtcagggctggctggggtgcgtgccactgcagcgtgtgagaaacaaacttacccgt

SEQ ID NO: 120700 - DNA, 80 bp, synthetic construct; identical to SEQ ID NO: 39180
  misc_feature 1..80: note = Artificially Synthesized Probe
  source 1..80: mol_type = other DNA

SEQ ID NO: 120701 - DNA, 80 bp, synthetic construct
  misc_feature 1..80: note = Artificially Synthesized Probe
  source 1..80: mol_type = other DNA
ttggttgttgggttggggctttacgtgtttttttaaggattgttttgctgtgttttgctgcagtccacaatgtgttgcaa

SEQ ID NO: 120702 - DNA, 80 bp, synthetic construct
  misc_feature 1..80: note = Artificially Synthesized Probe
  source 1..80: mol_type = other DNA
tgttttgctgtgttttgctgcagtccacaatgtgttgcaattttaattaacttaggggctttttaagtatttgacttatg

SEQ ID NO: 120703 - DNA, 80 bp, synthetic construct
  misc_feature 1..80: note = Artificially Synthesized Probe
  source 1..80: mol_type = other DNA
ttttgtttcttttgtagtttgctgacctaagccaattttttttttttttttttttttttgagacggagtctcgctctgta

SEQ ID NO: 120704 - DNA, 80 bp, synthetic construct
  misc_feature 1..80: note = Artificially Synthesized Probe
  source 1..80: mol_type = other DNA
ccatgttagcaggatggtctcgatctcctgacctcgtgatccgcccgcctcagcctcccaaagtgctgggattacaggca

SEQ ID NO: 120705 - DNA, 80 bp, synthetic construct
  misc_feature 1..80: note = Artificially Synthesized Probe
  source 1..80: mol_type = other DNA
gtctgccccgtagaacagcaggtgctccaggtgctgcacgtgcccgtacctgcaggcctgaaacacagaacccaggctgt

SEQ ID NO: 120706 - DNA, 80 bp, synthetic construct; identical to SEQ ID NO: 39181
  misc_feature 1..80: note = Artificially Synthesized Probe
  source 1..80: mol_type = other DNA

SEQ ID NO: 120707 - DNA, 80 bp, synthetic construct
  misc_feature 1..80: note = Artificially Synthesized Probe
  source 1..80: mol_type = other DNA
cacaaaatggccaggagaggccttcacagccctgcactgcatccacaggagtgagccctgtccttcgacgtgcgacggac

SEQ ID NO: 120708 - DNA, 80 bp, synthetic construct
  misc_feature 1..80: note = Artificially Synthesized Probe
  source 1..80: mol_type = other DNA
ctcctgggcgattctttactatgccctgacaagcgggtcagctcgccggctccccaggggcatggaaggaaggaagcgtc

SEQ ID NO: 120709 - DNA, 80 bp, synthetic construct
  misc_feature 1..80: note = Artificially Synthesized Probe
  source 1..80: mol_type = other DNA
ttatcagaactttcgcctgagtacctatgtgcaccctcatctgtaggcagaaacaacccttaaccctcacagggttcaga

SEQ ID NO: 120710 - DNA, 80 bp, synthetic construct
  misc_feature 1..80: note = Artificially Synthesized Probe
  source 1..80: mol_type = other DNA
ctcgacatggtggccacaaccttggacctggagaaaagtcggtcctgacctaacacatctcaatcccagggtcgggaggg

SEQ ID NO: 120711 - DNA, 80 bp, synthetic construct; identical to SEQ ID NO: 39182
  misc_feature 1..80: note = Artificially Synthesized Probe
  source 1..80: mol_type = other DNA

SEQ ID NO: 120712 - DNA, 80 bp, synthetic construct
  misc_feature 1..80: note = Artificially Synthesized Probe
  source 1..80: mol_type = other DNA
ttgctgtgtctcccacaaatctcattaatttataaagtagatccctgttgcaggtttccttgctgtcacctgcccggccc

SEQ ID NO: 120713 - DNA, 80 bp, synthetic construct
  misc_feature 1..80: note = Artificially Synthesized Probe
  source 1..80: mol_type = other DNA
acgcccagctgaccttagagaagctaccaagtcccaagctagaacattcatcacaactactggggaaaaagttctttcct

SEQ ID NO: 120714 - DNA, 80 bp, synthetic construct
  misc_feature 1..80: note = Artificially Synthesized Probe
  source 1..80: mol_type = other DNA
agaggagacaggaagagacatgcacaaagccaagatgacactgtctgagcccctctaagctgcaactgaccctggaattt

SEQ ID NO: 120715 - DNA, 80 bp, synthetic construct; identical to SEQ ID NO: 39183
  misc_feature 1..80: note = Artificially Synthesized Probe
  source 1..80: mol_type = other DNA

SEQ ID NO: 120716 - DNA, 80 bp, synthetic construct
  misc_feature 1..80: note = Artificially Synthesized Probe
  source 1..80: mol_type = other DNA
ccacatccattgttttataacacacaaacccgggaaatacagaaaagggctgaacaaaaaccaaaagtcacccagaatcc

SEQ ID NO: 120717 - DNA, 80 bp, synthetic construct
  misc_feature 1..80: note = Artificially Synthesized Probe
  source 1..80: mol_type = other DNA
agaaaagggctgaacaaaaaccaaaagtcacccagaatcccacagtcttagcactagcagtaattttttttttttaagtg

SEQ ID NO: 120718 - DNA, 80 bp, synthetic construct
  misc_feature 1..80: note = Artificially Synthesized Probe
  source 1..80: mol_type = other DNA
cacagtcttagcactagcagtaattttttttttttaagtgtcatttcggctagtctcttctttctgttttaacccctggt

SEQ ID NO: 120719 - DNA, 80 bp, synthetic construct
  misc_feature 1..80: note = Artificially Synthesized Probe
  source 1..80: mol_type = other DNA
ctcactgtcaaggaagttacaaatacagtacaggagaaaactagaatatgccttgtggtgttggcttggaatgggagtat

SEQ ID NO: 120720 - DNA, 80 bp, synthetic construct
  misc_feature 1..80: note = Artificially Synthesized Probe
  source 1..80: mol_type = other DNA
ctagaatatgccttgtggtgttggcttggaatgggagtatcagtagaaactcacggttcctaatatagagactaataaaa

SEQ ID NO: 120721 - DNA, 80 bp, synthetic construct
  misc_feature 1..80: note = Artificially Synthesized Probe
  source 1..80: mol_type = other DNA
cagtagaaactcacggttcctaatatagagactaataaaaatgaaaatgtggatgcctgtgtgtctacccatccctaact

SEQ ID NO: 120722 - DNA, 80 bp, synthetic construct
  misc_feature 1..80: note = Artificially Synthesized Probe
  source 1..80: mol_type = other DNA
agctgattcctgaggcaaggaaagagcaaggtgagcttgaaatatcttgttgtgccagaaataaaggaaatggtaaaaaa

SEQ ID NO: 120723 - DNA, 80 bp, synthetic construct; identical to SEQ ID NO: 39184
  misc_feature 1..80: note = Artificially Synthesized Probe
  source 1..80: mol_type = other DNA

SEQ ID NO: 120724 - DNA, 80 bp, synthetic construct
  misc_feature 1..80: note = Artificially Synthesized Probe
  source 1..80: mol_type = other DNA
cccctgtttgaagaaataaaaggtcctggggaggcccccgtgacgatttccccccactggtggccttgtgggagccttag

SEQ ID NO: 120725 - DNA, 80 bp, synthetic construct
  misc_feature 1..80: note = Artificially Synthesized Probe
  source 1..80: mol_type = other DNA
caaccataatagcattaattctggcaagaaaggccaatggatgccaaaactgtcaggtgaaaggggtatgagaaaacaga

SEQ ID NO: 120726 - DNA, 80 bp, synthetic construct
  misc_feature 1..80: note = Artificially Synthesized Probe
  source 1..80: mol_type = other DNA
atgccaaaactgtcaggtgaaaggggtatgagaaaacagatttttgcatagcctcaaagatcaccaaacaagatctatta

SEQ ID NO: 120727 - DNA, 80 bp, synthetic construct
  misc_feature 1..80: note = Artificially Synthesized Probe
  source 1..80: mol_type = other DNA
tttttgcatagcctcaaagatcaccaaacaagatctattaattacaaaggagcaaagtaaggcaggaggtgggactcagg

SEQ ID NO: 120728 - DNA, 80 bp, synthetic construct; identical to SEQ ID NO: 39185
  misc_feature 1..80: note = Artificially Synthesized Probe
  source 1..80: mol_type = other DNA

SEQ ID NO: 120729 - DNA, 80 bp, synthetic construct
  misc_feature 1..80: note = Artificially Synthesized Probe
  source 1..80: mol_type = other DNA
catcaccatcctgcccttgaattctttcctgggtggagccaagagccctcctgggctaagcccccatttttgggctcacc

SEQ ID NO: 120730 - DNA, 80 bp, synthetic construct
  misc_feature 1..80: note = Artificially Synthesized Probe
  source 1..80: mol_type = other DNA
cagcacagcatcctttctaaggcattcctgccaaatgcatatgctggatcccatcacgagcaaacactgagcaaacccaa

SEQ ID NO: 120731 - DNA, 80 bp, synthetic construct
  misc_feature 1..80: note = Artificially Synthesized Probe
  source 1..80: mol_type = other DNA
ggatgttactgggacaccgtcaccactcaaatgtgctctccgcgtggagggcatatgggagttccttgtactattcttgc

SEQ ID NO: 120732 - DNA, 80 bp, synthetic construct
  misc_feature 1..80: note = Artificially Synthesized Probe
  source 1..80: mol_type = other DNA
tcacgaggtcaggagatcgagaccatcctggctaacacagtgaaaccccgtctctactaaaaatacaaaaaattagccgg

SEQ ID NO: 120733 - DNA, 80 bp, synthetic construct; identical to SEQ ID NO: 39186
  misc_feature 1..80: note = Artificially Synthesized Probe
  source 1..80: mol_type = other DNA

SEQ ID NO: 120734 - DNA, 80 bp, synthetic construct
  misc_feature 1..80: note = Artificially Synthesized Probe
  source 1..80: mol_type = other DNA
gctttttgggtaaatggacaagagcagggcaggatccttcccaggtggcccctttcagtaactggaacccctgtagctac

SEQ ID NO: 120735 - DNA, 80 bp, synthetic construct
  misc_feature 1..80: note = Artificially Synthesized Probe
  source 1..80: mol_type = other DNA
actcgcttgacacaaagatactgaaagctaccaaagtgttaaaagaaggaattcatcctcccacaagagaagcaacacta

SEQ ID NO: 120736 - DNA, 80 bp, synthetic construct
  misc_feature 1..80: note = Artificially Synthesized Probe
  source 1..80: mol_type = other DNA
cccgtacccactctcctgaggtgctttttggaaaatgcatgtgtgggaggctccacccatgtctgctgcctctgaatctc

SEQ ID NO: 120737 - DNA, 80 bp, synthetic construct
  misc_feature 1..80: note = Artificially Synthesized Probe
  source 1..80: mol_type = other DNA
ggtgctccttccttcaagccatttaacgccacctgctggacactggtgatacatctacaggacctaaaactatggcaaga

SEQ ID NO: 120738 - DNA, 80 bp, synthetic construct; identical to SEQ ID NO: 39187
  misc_feature 1..80: note = Artificially Synthesized Probe
  source 1..80: mol_type = other DNA

SEQ ID NO: 120739 - DNA, 80 bp, synthetic construct; identical to SEQ ID NO: 38691
  misc_feature 1..80: note = Artificially Synthesized Probe
  source 1..80: mol_type = other DNA

SEQ ID NO: 120740 - DNA, 80 bp, synthetic construct
  misc_feature 1..80: note = Artificially Synthesized Probe
  source 1..80: mol_type = other DNA
agtcaaggaggccaatgcacctgaatgaatgcaggaacacgggcagcggacgggctgtgatgcaaaccagaaagtggcta

SEQ ID NO: 120741 - DNA, 80 bp, synthetic construct
  misc_feature 1..80: note = Artificially Synthesized Probe
  source 1..80: mol_type = other DNA
ggcctggctggtatccttataagaagaggagctggggacacagacacacagagggacgaccctgtgaagatgcagagaaa

SEQ ID NO: 120742 - DNA, 80 bp, synthetic construct
  misc_feature 1..80: note = Artificially Synthesized Probe
  source 1..80: mol_type = other DNA
ctactaatgtgtgctgttcagcctgaaatgatcacagacaaaagacatcatgctataattccaaaaggagagatgactgg

SEQ ID NO: 120743 - DNA, 80 bp, synthetic construct; identical to SEQ ID NO: 39188
  misc_feature 1..80: note = Artificially Synthesized Probe
  source 1..80: mol_type = other DNA

SEQ ID NO: 120744 - DNA, 80 bp, synthetic construct
  misc_feature 1..80: note = Artificially Synthesized Probe
  source 1..80: mol_type = other DNA
ctcttccttctccaaacagaaccttgccaggccagaggggctcagaatatggaactgacctcccaggtcaattcagagct

SEQ ID NO: 120745 - DNA, 80 bp, synthetic construct
  misc_feature 1..80: note = Artificially Synthesized Probe
  source 1..80: mol_type = other DNA
tcacaccctggaggtgctcatctggaaaggtgcagtacctgccagcacccacgtcccacagtgaggctcggtcccagttc

SEQ ID NO: 120746 - DNA, 80 bp, synthetic construct
  misc_feature 1..80: note = Artificially Synthesized Probe
  source 1..80: mol_type = other DNA
cctggctggcactgtggagctcctgggctctccacctggctgctgttcacgctggcccttcctgtgctacctggcattgt

SEQ ID NO: 120747 - DNA, 80 bp, synthetic construct; identical to SEQ ID NO: 39189
  misc_feature 1..80: note = Artificially Synthesized Probe
  source 1..80: mol_type = other DNA

SEQ ID NO: 120748 - DNA, 80 bp, synthetic construct
  misc_feature 1..80: note = Artificially Synthesized Probe
  source 1..80: mol_type = other DNA
tccagtcaagcattgactcccatctctaccaggcagctcacgctgggctgtacacagtcccaccctggcaggaaggtaac

SEQ ID NO: 120749 - DNA, 80 bp, synthetic construct
  misc_feature 1..80: note = Artificially Synthesized Probe
  source 1..80: mol_type = other DNA
acttggccaaggccacacagctggtaatggtggctggtgcagtggaaccgggcagttggggttcaacacacgggttcccc

SEQ ID NO: 120750 - DNA, 80 bp, synthetic construct
  misc_feature 1..80: note = Artificially Synthesized Probe
  source 1..80: mol_type = other DNA
aggagaggagaagtcactgtggcccgaaactatttctttaaggcggacactcttcatttaaatgcgataaataacaaata

SEQ ID NO: 120751 - DNA, 80 bp, synthetic construct
  misc_feature 1..80: note = Artificially Synthesized Probe
  source 1..80: mol_type = other DNA
aggcggacactcttcatttaaatgcgataaataacaaatagcagccagtaacaacattcagactgatgtcacacccattg

SEQ ID NO: 120752 - DNA, 80 bp, synthetic construct
  misc_feature 1..80: note = Artificially Synthesized Probe
  source 1..80: mol_type = other DNA
cactgcagcctccacctccaggctcagggggtcctcccacctcagcctccaaagtagctgggattacaggaatgtgccac

SEQ ID NO: 120753 - DNA, 80 bp, synthetic construct
  misc_feature 1..80: note = Artificially Synthesized Probe
  source 1..80: mol_type = other DNA
aatgatgacgtcagacgtggccacatgatgatgacaatgatgacaatgaggatgatgatggggggacagatgatgacaat

SEQ ID NO: 120754 - DNA, 80 bp, synthetic construct; identical to SEQ ID NO: 39190
  misc_feature 1..80: note = Artificially Synthesized Probe
  source 1..80: mol_type = other DNA

SEQ ID NO: 120755 - DNA, 80 bp, synthetic construct
  misc_feature 1..80: note = Artificially Synthesized Probe
  source 1..80: mol_type = other DNA
tgcataacacccaggccagaatatggccaacagacagcatgaggagagtccctcatcccgaagatactgagtcaaactca

SEQ ID NO: 120756 - DNA, 80 bp, synthetic construct
  misc_feature 1..80: note = Artificially Synthesized Probe
  source 1..80: mol_type = other DNA
cagggccagcgtgctgtgaagttgcacggtggatgtaaaagtctttagcaattaaaaatacagaatgaatacccccaaat

SEQ ID NO: 120757 - DNA, 80 bp, synthetic construct
  misc_feature 1..80: note = Artificially Synthesized Probe
  source 1..80: mol_type = other DNA
gtctttagcaattaaaaatacagaatgaatacccccaaatctgacccctgatgtccttgggttgtgggaatgcattgggg

SEQ ID NO: 120758 - DNA, 80 bp, synthetic construct
  misc_feature 1..80: note = Artificially Synthesized Probe
  source 1..80: mol_type = other DNA
ctgacccctgatgtccttgggttgtgggaatgcattggggtgtttcttaacttgcttctttatacttctttgtattttcc

SEQ ID NO: 120759 - DNA, 80 bp, synthetic construct
  misc_feature 1..80: note = Artificially Synthesized Probe
  source 1..80: mol_type = other DNA
tcctgggttcatgccattctcctgcctcagcctcccgagtagctgggtctacaggcaccagccatcacttgctgctaatt

SEQ ID NO: 120760 - DNA, 80 bp, synthetic construct; identical to SEQ ID NO: 39191
  misc_feature 1..80: note = Artificially Synthesized Probe
  source 1..80: mol_type = other DNA

SEQ ID NO: 120761 - DNA, 80 bp, synthetic construct
  misc_feature 1..80: note = Artificially Synthesized Probe
  source 1..80: mol_type = other DNA
tacacctgcagcatctgtgagcaggcctggctgtggccgcgcaggctctcccacacgatgaacgcccagaaccctgggac

SEQ ID NO: 120762 - DNA, 80 bp, synthetic construct
  misc_feature 1..80: note = Artificially Synthesized Probe
  source 1..80: mol_type = other DNA
tccaggaaaacccacctgcccctgtaatttcttctgccacaaatgtgctgtgagtggtttggatgtgagaaccctacagg

SEQ ID NO: 120763 - DNA, 80 bp, synthetic construct
  misc_feature 1..80: note = Artificially Synthesized Probe
  source 1..80: mol_type = other DNA
atctatacaccttcgcattgtggtaaaatacacgtggcctaacactgaccattgataacatttagtacagtcatagcact

SEQ ID NO: 120764 - DNA, 80 bp, synthetic construct
  misc_feature 1..80: note = Artificially Synthesized Probe
  source 1..80: mol_type = other DNA
ggaaacagcaatgagaagtaaccagctctgaggatatagaatcatagtgcaattaaagcagctcaggacaatgaatgccc

SEQ ID NO: 120765 - DNA, 80 bp, synthetic construct
  misc_feature 1..80: note = Artificially Synthesized Probe
  source 1..80: mol_type = other DNA
atcatagtgcaattaaagcagctcaggacaatgaatgcccccaaattgctacgggtcctatacacatttgaccattttta

SEQ ID NO: 120766 - DNA, 80 bp, synthetic construct; identical to SEQ ID NO: 39192
  misc_feature 1..80: note = Artificially Synthesized Probe
  source 1..80: mol_type = other DNA

SEQ ID NO: 120767 - DNA, 80 bp, synthetic construct
  misc_feature 1..80: note = Artificially Synthesized Probe
  source 1..80: mol_type = other DNA
atacaaaattagctgggcgtggtggcacacgcctctaatcccaggtacttgggaggctgaggcaagagaattgcttgaac

SEQ ID NO: 120768 - DNA, 80 bp, synthetic construct
  misc_feature 1..80: note = Artificially Synthesized Probe
  source 1..80: mol_type = other DNA
aaaatatataacatattatattatataaaatatatattatataatatattatataatatatatattaaatatatattata

SEQ ID NO: 120769 - DNA, 80 bp, synthetic construct
  misc_feature 1..80: note = Artificially Synthesized Probe
  source 1..80: mol_type = other DNA
tattatataatatatgatacaacataatatattatgttatattatataataatattatacaacaataatatatattgtta

SEQ ID NO: 120770 - DNA, 80 bp, synthetic construct
  misc_feature 1..80: note = Artificially Synthesized Probe
  source 1..80: mol_type = other DNA
tgttatatattatattatgttatatattattatatataacatattatatgttatatatattatataatatgttatataat

SEQ ID NO: 120771 - DNA, 80 bp, synthetic construct
  misc_feature 1..80: note = Artificially Synthesized Probe
  source 1..80: mol_type = other DNA
ataatatattaaattatataatatattatgttatatatgttatatattatatatgttatattatatatgttatataagat

SEQ ID NO: 120772 - DNA, 80 bp, synthetic construct
  misc_feature 1..80: note = Artificially Synthesized Probe
  source 1..80: mol_type = other DNA
tacatattatatatttataatttatatattatattatatataattatgtaatatataatttgttatataattatgtaata

SEQ ID NO: 120773 - DNA, 80 bp, synthetic construct
  misc_feature 1..80: note = Artificially Synthesized Probe
  source 1..80: mol_type = other DNA
tccaatcagttgaaggccttaagactgaggtcccctgagaaggatgagatcctgctagagatggacttgagacccgcact

SEQ ID NO: 120774 - DNA, 80 bp, synthetic construct
  misc_feature 1..80: note = Artificially Synthesized Probe
  source 1..80: mol_type = other DNA
tgcagatgaatgagaggaggctcgcgaaggcaaagttgcttcacattatcactgagaatctttagcaggggagaaaatgg

SEQ ID NO: 120775 - DNA, 80 bp, synthetic construct
  misc_feature 1..80: note = Artificially Synthesized Probe
  source 1..80: mol_type = other DNA
atcagacactatctggcctttcatgcctggcgtctttcacctggcctcatgttttcagggttcacaacgttggaccaggc

SEQ ID NO: 120776 - DNA, 80 bp, synthetic construct
  misc_feature 1..80: note = Artificially Synthesized Probe
  source 1..80: mol_type = other DNA
caggccccgggaccaaggtggccgggtggctctgggacagccaggctctgaatgcaaagcgcagggcctcagggacagaa

SEQ ID NO: 120777 - DNA, 80 bp, synthetic construct; identical to SEQ ID NO: 39193
  misc_feature 1..80: note = Artificially Synthesized Probe
  source 1..80: mol_type = other DNA

SEQ ID NO: 120778 - DNA, 80 bp, synthetic construct
  misc_feature 1..80: note = Artificially Synthesized Probe
  source 1..80: mol_type = other DNA
caggaaaacagcaatgcaaccagagcactgtgatgtctaaagggaagacatgtctggaaaacacaaattcaagcaggcat

SEQ ID NO: 120779 - DNA, 80 bp, synthetic construct
  misc_feature 1..80: note = Artificially Synthesized Probe
  source 1..80: mol_type = other DNA
acgcctcagccgctcaagtagctggaattacaggcgtggtacctccacacttggctaatttttgtatttttagtaagaca

SEQ ID NO: 120780 - DNA, 80 bp, synthetic construct; identical to SEQ ID NO: 39194
  misc_feature 1..80: note = Artificially Synthesized Probe
  source 1..80: mol_type = other DNA

SEQ ID NO: 120781 - DNA, 80 bp, synthetic construct
  misc_feature 1..80: note = Artificially Synthesized Probe
  source 1..80: mol_type = other DNA
gactgaggtcccctgaggaggaagagattctgccagagacaaacaggatccccgcagcggcatcaactcttcctgggtct

SEQ ID NO: 120782 - DNA, 80 bp, synthetic construct
  misc_feature 1..80: note = Artificially Synthesized Probe
  source 1..80: mol_type = other DNA
ttgcacagacagaccacagttggtttttttgcttaccagttacgaccatttatggtttgggttgtggggatgtaggatgg

SEQ ID NO: 120783 - DNA, 80 bp, synthetic construct
  misc_feature 1..80: note = Artificially Synthesized Probe
  source 1..80: mol_type = other DNA
cacacaaacaacattgagtggtttctatggtgtcatccagcgacatcaaatgacagttctgttcacgtgaatcaccgact

SEQ ID NO: 120784 - DNA, 80 bp, synthetic construct
  misc_feature 1..80: note = Artificially Synthesized Probe
  source 1..80: mol_type = other DNA
cgacatcaaatgacagttctgttcacgtgaatcaccgactttgagttgactgagaacaagactcattatccatttggcca

SEQ ID NO: 120785 - DNA, 80 bp, synthetic construct
  misc_feature 1..80: note = Artificially Synthesized Probe
  source 1..80: mol_type = other DNA
agggttccatgactcccgcccctcgcccagccatgtttgctggtagaaatgtctcgtgggtgactgcaccaccccaccag

SEQ ID NO: 120786 - DNA, 80 bp, synthetic construct
  misc_feature 1..80: note = Artificially Synthesized Probe
  source 1..80: mol_type = other DNA
gtcctgaacttgaccttgtgggtgactgcaccaccccaccagaggcctcccctcgtcctgaacttgaccttgtgggtgac

SEQ ID NO: 120787 - DNA, 80 bp, synthetic construct; identical to SEQ ID NO: 39195
  misc_feature 1..80: note = Artificially Synthesized Probe
  source 1..80: mol_type = other DNA

SEQ ID NO: 120788 - DNA, 80 bp, synthetic construct
  misc_feature 1..80: note = Artificially Synthesized Probe
  source 1..80: mol_type = other DNA
gggcagaggaacggggccatgtctcagggcgtgagcgtctgcatggccactgcatgagcaccagtgcccagaaatacaga

SEQ ID NO: 120789 - DNA, 80 bp, synthetic construct
  misc_feature 1..80: note = Artificially Synthesized Probe
  source 1..80: mol_type = other DNA
ttcactgctgcaggctgtgtattcaggacaccgagacacatggctggggctcacacccagtagacgacgtttgtggctga

SEQ ID NO: 120790 - DNA, 80 bp, synthetic construct
  misc_feature 1..80: note = Artificially Synthesized Probe
  source 1..80: mol_type = other DNA
cagggccagatgctgtggagaggctcagaagggccaggcctgacactgacacacagccgagggatggcagggccatctgg

SEQ ID NO: 120791 - DNA, 80 bp, synthetic construct; identical to SEQ ID NO: 38692
  misc_feature 1..80: note = Artificially Synthesized Probe
  source 1..80: mol_type = other DNA

SEQ ID NO: 120792 - DNA, 80 bp, synthetic construct; identical to SEQ ID NO: 39196
  misc_feature 1..80: note = Artificially Synthesized Probe
  source 1..80: mol_type = other DNA

SEQ ID NO: 120793 - DNA, 80 bp, synthetic construct
  misc_feature 1..80: note = Artificially Synthesized Probe
  source 1..80: mol_type = other DNA
acctctgtgtgtgtgtgtgtgtgtgtgtgtgtgtcctgctgcttctacattcagggtgtatcagccagggctctccagag

SEQ ID NO: 120794 - DNA, 80 bp, synthetic construct
  misc_feature 1..80: note = Artificially Synthesized Probe
  source 1..80: mol_type = other DNA
tcagggtgtatcagccagggctctccagagaaacacaacctctgtgtgtgtgtgtgtgtgtgtgtgtgtcctgctgcttc

SEQ ID NO: 120795 - DNA, 80 bp, synthetic construct; identical to SEQ ID NO: 39197
  misc_feature 1..80: note = Artificially Synthesized Probe
  source 1..80: mol_type = other DNA

SEQ ID NO: 120796 - DNA, 80 bp, synthetic construct
  misc_feature 1..80: note = Artificially Synthesized Probe
  source 1..80: mol_type = other DNA
acatcatggagggtcatcggcttaactcaaagtccactgatttaaatgttaatcccatcttaaaaaacaccttctcagca

SEQ ID NO: 120797 - DNA, 80 bp, synthetic construct
  misc_feature 1..80: note = Artificially Synthesized Probe
  source 1..80: mol_type = other DNA
aagaccagtcattactgcttccctgcctgcgggctccagcttgggtgtgggccgggggctgccatgaacagccccacaga

SEQ ID NO: 120798 - DNA, 80 bp, synthetic construct
  misc_feature 1..80: note = Artificially Synthesized Probe
  source 1..80: mol_type = other DNA
caggtgtgtaaggtggtaatggcagaggagaacacaaggtagccagagaaaccatggcagtcactgtgtagagaaccaag

SEQ ID NO: 120799 - DNA, 80 bp, synthetic construct
  misc_feature 1..80: note = Artificially Synthesized Probe
  source 1..80: mol_type = other DNA
tgtcctccaactctggcagggctcagccaagagaagagaggcagatattccttccctgagtcctccctgacatgggcctg

SEQ ID NO: 120800 - DNA, 80 bp, synthetic construct; identical to SEQ ID NO: 39198
  misc_feature 1..80: note = Artificially Synthesized Probe
  source 1..80: mol_type = other DNA

SEQ ID NO: 120801 - DNA, 80 bp, synthetic construct
  misc_feature 1..80: note = Artificially Synthesized Probe
  source 1..80: mol_type = other DNA
ggcactcctgctgtgcagaaactcagcagccttgcctcatcttccagtttctccagagaagtcagaaatgtctatttcta

SEQ ID NO: 120802 - DNA, 80 bp, synthetic construct
  misc_feature 1..80: note = Artificially Synthesized Probe
  source 1..80: mol_type = other DNA
ttccgggctgaaacaatcctcgcacccaggagttcgagatcagcctgggcaacacagtgagacaccatttctacaaaaaa

SEQ ID NO: 120803 - DNA, 80 bp, synthetic construct
  misc_feature 1..80: note = Artificially Synthesized Probe
  source 1..80: mol_type = other DNA
tcagttcgtgggtacaacagagtggagaagcgggcccacgtacctggtggatctcgtgccagccgttctcatctttgcag

SEQ ID NO: 120804 - DNA, 80 bp, synthetic construct; identical to SEQ ID NO: 39199
  misc_feature 1..80: note = Artificially Synthesized Probe
  source 1..80: mol_type = other DNA

SEQ ID NO: 120805 - DNA, 80 bp, synthetic construct
  misc_feature 1..80: note = Artificially Synthesized Probe
  source 1..80: mol_type = other DNA
tcacccggggtcaggagttcaagaccagcctggccaacatggcaaaaccctgtctctatgaaaaatacaaaaaaaatagc

SEQ ID NO: 120806 - DNA, 80 bp, synthetic construct
  misc_feature 1..80: note = Artificially Synthesized Probe
  source 1..80: mol_type = other DNA
gggggcaggtataactttagacaactacatttctagttctgaaatagcaaacagtgcccagaaatgcagggcaggctgac

SEQ ID NO: 120807 - DNA, 80 bp, synthetic construct
  misc_feature 1..80: note = Artificially Synthesized Probe
  source 1..80: mol_type = other DNA
cattccgcacgctgagggtggcgaacctagcaagcatcgcgtcttcaagaatgctcctgatttccgaggaagccaacggg

SEQ ID NO: 120808 - DNA, 80 bp, synthetic construct
  misc_feature 1..80: note = Artificially Synthesized Probe
  source 1..80: mol_type = other DNA
tcatgagatctactgtttaaaagtgtggcatctcctccctctctgtcttcctcccactccggtcacaggaactgcctgct

SEQ ID NO: 120809 - DNA, 80 bp, synthetic construct; identical to SEQ ID NO: 39200
  misc_feature 1..80: note = Artificially Synthesized Probe
  source 1..80: mol_type = other DNA

SEQ ID NO: 120810 - DNA, 80 bp, synthetic construct
  misc_feature 1..80: note = Artificially Synthesized Probe
  source 1..80: mol_type = other DNA
taagacagcagcaggggaaggtgaggcgcggaacccacaacagggcaggctcccacggacccgccacagggtgctggggg

SEQ ID NO: 120811 - DNA, 80 bp, synthetic construct
  misc_feature 1..80: note = Artificially Synthesized Probe
  source 1..80: mol_type = other DNA
gtcttcctgtggatggggttggggttcaccactggccttacgggttgaaaagacaagtcccttgactgaatagaaggtga

SEQ ID NO: 120812 - DNA, 80 bp, synthetic construct
  misc_feature 1..80: note = Artificially Synthesized Probe
  source 1..80: mol_type = other DNA
cgggttgaaaagacaagtcccttgactgaatagaaggtgaaagatgacttcttgggaaccattaattctgaaagcatcga

SEQ ID NO: 120813 - DNA, 80 bp, synthetic construct
  misc_feature 1..80: note = Artificially Synthesized Probe
  source 1..80: mol_type = other DNA
aagatgacttcttgggaaccattaattctgaaagcatcgacaaccaggagagagaacaggaaaatctgaaacctggcttc

SEQ ID NO: 120814 - DNA, 80 bp, synthetic construct
  misc_feature 1..80: note = Artificially Synthesized Probe
  source 1..80: mol_type = other DNA
cacggggtggcacccaagtaagatgggcccgagtttaccttcagggcaacttggttcctcgctcgggcagctttgtgtag

SEQ ID NO: 120815 - DNA, 80 bp, synthetic construct
  misc_feature 1..80: note = Artificially Synthesized Probe
  source 1..80: mol_type = other DNA
aaaatttaaaaacacaaaaggaaggaagtgctgacacatactacaacgtggatgagccttgaggacatcatgctcagcga

SEQ ID NO: 120816 - DNA, 80 bp, synthetic construct; identical to SEQ ID NO: 39201
  misc_feature 1..80: note = Artificially Synthesized Probe
  source 1..80: mol_type = other DNA

SEQ ID NO: 120817 - DNA, 80 bp, synthetic construct
  misc_feature 1..80: note = Artificially Synthesized Probe
  source 1..80: mol_type = other DNA
actgctgtgtgggccacagtccaagaggctcccttgctgcccttccctctgagtacacagaatcctgtggtaccatctgg

SEQ ID NO: 120818 - DNA, 80 bp, synthetic construct
  misc_feature 1..80: note = Artificially Synthesized Probe
  source 1..80: mol_type = other DNA
gctgcagggacacaaacacaaatgagacatgaagtccgtgccccctggagctcccaatctgggtaagtggaaaccttcct

SEQ ID NO: 120819 - DNA, 80 bp, synthetic construct
  misc_feature 1..80: note = Artificially Synthesized Probe
  source 1..80: mol_type = other DNA
ttccgtccactcttcatctttctaatatgcccaccatggccactgctaaacaagaggaactactttgaggtcctcttttg

SEQ ID NO: 120820 - DNA, 80 bp, synthetic construct; identical to SEQ ID NO: 39202
  misc_feature 1..80: note = Artificially Synthesized Probe
  source 1..80: mol_type = other DNA

SEQ ID NO: 120821 - DNA, 80 bp, synthetic construct
  misc_feature 1..80: note = Artificially Synthesized Probe
  source 1..80: mol_type = other DNA
cccagaaagggcacctgccttgtgagtgtgcactgactattcccatctatttttaattgtgatgtttacttatccataca

SEQ ID NO: 120822 - DNA, 80 bp, synthetic construct
  misc_feature 1..80: note = Artificially Synthesized Probe
  source 1..80: mol_type = other DNA
tcccatctatttttaattgtgatgtttacttatccatacatgggtaccctcctgaggacttttaacattcaccctaggaa

SEQ ID NO: 120823 - DNA, 80 bp, synthetic construct
  misc_feature 1..80: note = Artificially Synthesized Probe
  source 1..80: mol_type = other DNA
ccaacatcttcattcatcctgtctccatgtgaaaagcatgcttcctgtcttccccaactagaatgccgtgtgtagacatg

SEQ ID NO: 120824 - DNA, 80 bp, synthetic construct
  misc_feature 1..80: note = Artificially Synthesized Probe
  source 1..80: mol_type = other DNA
gaatgccattgcacatgactctgttgcataccctcctgatgcagaagttttaaagaaaaatagaaattttctgggactaa

SEQ ID NO: 120825 - DNA, 80 bp, synthetic construct; identical to SEQ ID NO: 39203
  misc_feature 1..80: note = Artificially Synthesized Probe
  source 1..80: mol_type = other DNA

SEQ ID NO: 120826 - DNA, 80 bp, synthetic construct
  misc_feature 1..80: note = Artificially Synthesized Probe
  source 1..80: mol_type = other DNA
cagcccctcattctctgtctcttccctggtggcatccaggctgaagcacgagtgtccgagggcatctggggagtttattc

SEQ ID NO: 120827 - DNA, 80 bp, synthetic construct
  misc_feature 1..80: note = Artificially Synthesized Probe
  source 1..80: mol_type = other DNA
tacagcgacttaatgagcgtgtgacactcgttcggggcaaggttagccttcaaaacagttaggattttctttcccatttg

SEQ ID NO: 120828 - DNA, 80 bp, synthetic construct; identical to SEQ ID NO: 38693
  misc_feature 1..80: note = Artificially Synthesized Probe
  source 1..80: mol_type = other DNA

SEQ ID NO: 120829 - DNA, 80 bp, synthetic construct
  misc_feature 1..80: note = Artificially Synthesized Probe
  source 1..80: mol_type = other DNA
tgctgtctcagagagagctggtggcaagtggtaaaatcagatcagaggcttgaatcctgacttttgactcagaattacag

SEQ ID NO: 120830 - DNA, 80 bp, synthetic construct
  misc_feature 1..80: note = Artificially Synthesized Probe
  source 1..80: mol_type = other DNA
gggagctatgtgtggtccttgggtggcttccagggccatccaatgacaagtggcagccttctcaagggttccggaatccc

SEQ ID NO: 120831 - DNA, 80 bp, synthetic construct; identical to SEQ ID NO: 39204
  misc_feature 1..80: note = Artificially Synthesized Probe
  source 1..80: mol_type = other DNA

SEQ ID NO: 120832 - DNA, 80 bp, synthetic construct
  misc_feature 1..80: note = Artificially Synthesized Probe
  source 1..80: mol_type = other DNA
atttctttagttttaaaaatagactggaacctcaacaagcataacctcagagtggccccagtctccctcaacgtgaacaa

SEQ ID NO: 120833 - DNA, 80 bp, synthetic construct
  misc_feature 1..80: note = Artificially Synthesized Probe
  source 1..80: mol_type = other DNA
ggtgagaagcgggggctcccggaagcgcagcaggagggcactagccacggctgtttgtcctgacactgggaggtggcaca

SEQ ID NO: 120834 - DNA, 80 bp, synthetic construct
  misc_feature 1..80: note = Artificially Synthesized Probe
  source 1..80: mol_type = other DNA
cacacctatgtgcatgcctgtgtgcctgtgtgtgcatggctgtgtgtatgcacacctatgtgtgcatgcctgtttgtgtg

SEQ ID NO: 120835 - DNA, 80 bp, synthetic construct; identical to SEQ ID NO: 39205
  misc_feature 1..80: note = Artificially Synthesized Probe
  source 1..80: mol_type = other DNA

SEQ ID NO: 120836 - DNA, 80 bp, synthetic construct
  misc_feature 1..80: note = Artificially Synthesized Probe
  source 1..80: mol_type = other DNA
ctgtgtgcatgtgtgcacacccgtgtgtgtgctcctaggtgcatcctagtgtccaagatcagtgggctgcaaaaatcaaa

SEQ ID NO: 120837 - DNA, 80 bp, synthetic construct
  misc_feature 1..80: note = Artificially Synthesized Probe
  source 1..80: mol_type = other DNA
tggggatgctcagaaggaaaccatgatgtgagagaagaccacagaacatatcacaggtgtaggaatcaacctcgctgaaa

SEQ ID NO: 120838 - DNA, 80 bp, synthetic construct; identical to SEQ ID NO: 39206
  misc_feature 1..80: note = Artificially Synthesized Probe
  source 1..80: mol_type = other DNA

SEQ ID NO: 120839 - DNA, 80 bp, synthetic construct
  misc_feature 1..80: note = Artificially Synthesized Probe
  source 1..80: mol_type = other DNA
ctgtgcacagtggcttccttctgagagcatagtgtgggaaacagaaaaacgggaccatctctccgtggggaaacctgatg

SEQ ID NO: 120840 - DNA, 80 bp, synthetic construct
  misc_feature 1..80: note = Artificially Synthesized Probe
  source 1..80: mol_type = other DNA
gcccctaatcgtgaaaacaccagatggatcccaataaggggcaccctacaagcacctgaccagtcctcctctgaaactgt

SEQ ID NO: 120841 - DNA, 80 bp, synthetic construct
  misc_feature 1..80: note = Artificially Synthesized Probe
  source 1..80: mol_type = other DNA
aacatagtgaaaccccatctctactaaaaatacaaaaataaataaataaataaaacattcgtcgggcttggtggcgcaca

SEQ ID NO: 120842 - DNA, 80 bp, synthetic construct
  misc_feature 1..80: note = Artificially Synthesized Probe
  source 1..80: mol_type = other DNA
caggtaaatgcttatgagagaagaaaaaggtgtggacttcggttaataataatgcatcgatatcggttctctaactgtga

SEQ ID NO: 120843 - DNA, 80 bp, synthetic construct
  misc_feature 1..80: note = Artificially Synthesized Probe
  source 1..80: mol_type = other DNA
ggttaataataatgcatcgatatcggttctctaactgtgagaagcgtaccatacgacttccgctcagaagaatactggag

SEQ ID NO: 120844 - DNA, 80 bp, synthetic construct; identical to SEQ ID NO: 39207
  misc_feature 1..80: note = Artificially Synthesized Probe
  source 1..80: mol_type = other DNA

SEQ ID NO: 120845 - DNA, 80 bp, synthetic construct
  misc_feature 1..80: note = Artificially Synthesized Probe
  source 1..80: mol_type = other DNA
gctgctgctcagagaggcagaaaatgtttgtgaaaagcgtataaagtacttgtagccaaattatacagagaacccttaaa

SEQ ID NO: 120846 - DNA, 80 bp, synthetic construct
  misc_feature 1..80: note = Artificially Synthesized Probe
  source 1..80: mol_type = other DNA
tcagtggctcatgtctgcaattgcagcactttgggagccaaggtaggaggatcatttgagctcaggagttcaagacctgc

SEQ ID NO: 120847 - DNA, 80 bp, synthetic construct; identical to SEQ ID NO: 38631
  misc_feature 1..80: note = Artificially Synthesized Probe
  source 1..80: mol_type = other DNA

SEQ ID NO: 120848 - DNA, 80 bp, synthetic construct
  misc_feature 1..80: note = Artificially Synthesized Probe
  source 1..80: mol_type = other DNA
agcctgggagacagagtaagaccatgtcaaaaaaaaaaaaaaaaagacacctcaacacaatcgtcagaatgatgaaaatc

SEQ ID NO: 120849 - DNA, 80 bp, synthetic construct
  misc_feature 1..80: note = Artificially Synthesized Probe
  source 1..80: mol_type = other DNA
cctaggtgtctccctgaatgagctgaaaacttacgtccacaaggaaatctgaatgttagtgtttacagcagctttattca

SEQ ID NO: 120850 - DNA, 80 bp, synthetic construct; identical to SEQ ID NO: 39208
  misc_feature 1..80: note = Artificially Synthesized Probe
  source 1..80: mol_type = other DNA

SEQ ID NO: 120851 - DNA, 80 bp, synthetic construct
  misc_feature 1..80: note = Artificially Synthesized Probe
  source 1..80: mol_type = other DNA
cgcctgtagtcccagctactcaggaggctgaggcaggagaattgcttgaacccgggagtcagaggttgcagtgagctgag

SEQ ID NO: 120852 - DNA, 80 bp, synthetic construct
  misc_feature 1..80: note = Artificially Synthesized Probe
  source 1..80: mol_type = other DNA
gggtaaggaagctatgctgtgtaattctgtaatggtgggtacaggacaagatgcatctgtccaaacccataacatgagca

SEQ ID NO: 120853 - DNA, 80 bp, synthetic construct
  misc_feature 1..80: note = Artificially Synthesized Probe
  source 1..80: mol_type = other DNA
tggtttttctgtcaacctaaaactgggctctgtccccgaccccaagacaggctcctgtggaccctggcccctgcctccgt

SEQ ID NO: 120854 - DNA, 80 bp, synthetic construct; identical to SEQ ID NO: 39209
  misc_feature 1..80: note = Artificially Synthesized Probe
  source 1..80: mol_type = other DNA

SEQ ID NO: 120855 - DNA, 80 bp, synthetic construct
  misc_feature 1..80: note = Artificially Synthesized Probe
  source 1..80: mol_type = other DNA
ctatgatttaaaataataactttttaaaagggagaggcatggcccaggcccaggcgcctcacctgccagccccatgagtg

SEQ ID NO: 120856 - DNA, 80 bp, synthetic construct
  misc_feature 1..80: note = Artificially Synthesized Probe
  source 1..80: mol_type = other DNA
caacgtgagactgcggagcatgaaccgtcagtcactgcacacatcaaacaagccccttctgctcttcaagacgatgctct

SEQ ID NO: 120857 - DNA, 80 bp, synthetic construct
  misc_feature 1..80: note = Artificially Synthesized Probe
  source 1..80: mol_type = other DNA
tgagtacaccccgaccctggaaacagattcagtaactgaatctcatcagtgaggtccagacacatcacaggtgctctgca

SEQ ID NO: 120858 - DNA, 80 bp, synthetic construct
  misc_feature 1..80: note = Artificially Synthesized Probe
  source 1..80: mol_type = other DNA
aatttggagacaacagtgcaagataaaagggccaacctaaattttgttcaagttgccaggttcgcttcctgtttggggct

SEQ ID NO: 120859 - DNA, 80 bp, synthetic construct; identical to SEQ ID NO: 39210
  misc_feature 1..80: note = Artificially Synthesized Probe
  source 1..80: mol_type = other DNA

SEQ ID NO: 120860 - DNA, 80 bp, synthetic construct
  misc_feature 1..80: note = Artificially Synthesized Probe
  source 1..80: mol_type = other DNA
atcacacaggctgttttgttttcattgacaggtcgttccactgggatttaattatctcaggctagagggctgcttccctc

SEQ ID NO: 120861 - DNA, 80 bp, synthetic construct
  misc_feature 1..80: note = Artificially Synthesized Probe
  source 1..80: mol_type = other DNA
actcactgtggagaggctaaaatatgggatgggaacatgcccaggctgctgccgacaaccaggtggaaagtgggaatgtg

SEQ ID NO: 120862 - DNA, 80 bp, synthetic construct
  misc_feature 1..80: note = Artificially Synthesized Probe
  source 1..80: mol_type = other DNA
ggtgactcagtgactggcccagactgggctgtggtaacaagatcccagaggctaggtggcttaaaagtgacagacatgca

SEQ ID NO: 120863 - DNA, 80 bp, synthetic construct
  misc_feature 1..80: note = Artificially Synthesized Probe
  source 1..80: mol_type = other DNA
ccattcacaagggctctgcccccaggagcccatcacctgctgaaggccccatcctcctaataccatcacctagggggtta

SEQ ID NO: 120864 - DNA, 80 bp, synthetic construct
  misc_feature 1..80: note = Artificially Synthesized Probe
  source 1..80: mol_type = other DNA
gtcaccaatagactgcagctatcactctttaagtgcccttgttactggtagggtgggtaacagtgccagtctccctggga

SEQ ID NO: 120865 - DNA, 80 bp, synthetic construct
  misc_feature 1..80: note = Artificially Synthesized Probe
  source 1..80: mol_type = other DNA
cttggcagaggtgagctggggttttctttgtcccacactagactgactgcctcgcgggtggacgactgttcccaggtcac

SEQ ID NO: 120866 - DNA, 80 bp, synthetic construct; identical to SEQ ID NO: 39211
  misc_feature 1..80: note = Artificially Synthesized Probe
  source 1..80: mol_type = other DNA

SEQ ID NO: 120867 - DNA, 80 bp, synthetic construct
  misc_feature 1..80: note = Artificially Synthesized Probe
  source 1..80: mol_type = other DNA
tttagcaccatccccttccttggtgctgtcctgacaattgtgagtgaattcttgcaagatctgattgtttaaaggtgtgt

SEQ ID NO: 120868 - DNA, 80 bp, synthetic construct
  misc_feature 1..80: note = Artificially Synthesized Probe
  source 1..80: mol_type = other DNA
ctcccttgcttttgccatgcaatgcacctgctctccctttgccttccgccatgcgtaaaagctccctgaggcctccccag

SEQ ID NO: 120869 - DNA, 80 bp, synthetic construct; identical to SEQ ID NO: 39212
  misc_feature 1..80: note = Artificially Synthesized Probe
  source 1..80: mol_type = other DNA

SEQ ID NO: 120870 - DNA, 80 bp, synthetic construct
  misc_feature 1..80: note = Artificially Synthesized Probe
  source 1..80: mol_type = other DNA
ggccaggtagtgtctgcatttcagtcaggaggatgcgtatccgtcccttatgctctgccttgacagaagcaaagtgaagg

SEQ ID NO: 120871 - DNA, 80 bp, synthetic construct
  misc_feature 1..80: note = Artificially Synthesized Probe
  source 1..80: mol_type = other DNA
tcacttttctcttttcccccgtcaccctgggtcctcacttttctcttttcccccatcaccctgggtccccacttccctgc

SEQ ID NO: 120872 - DNA, 80 bp, synthetic construct
  misc_feature 1..80: note = Artificially Synthesized Probe
  source 1..80: mol_type = other DNA
gtttcagaactttctgccttagttaccccttttccctttttatttgccataagtaatgtttttggccttacaaaaaaatg

SEQ ID NO: 120873 - DNA, 80 bp, synthetic construct; identical to SEQ ID NO: 39213
  misc_feature 1..80: note = Artificially Synthesized Probe
  source 1..80: mol_type = other DNA

SEQ ID NO: 120874 - DNA, 80 bp, synthetic construct
  misc_feature 1..80: note = Artificially Synthesized Probe
  source 1..80: mol_type = other DNA
tcccagcactttgggaggctgaggtgggtggatcacttgaggtcaggagtttgagcccagcctagccaacatggtgaaac

SEQ ID NO: 120875 - DNA, 80 bp, synthetic construct
  misc_feature 1..80: note = Artificially Synthesized Probe
  source 1..80: mol_type = other DNA
gagactcagtctaaaaaaaaaaaaaaaaaaaaaaaagaaagggtcagcagctgccaggggctcagggatgaagaggggca

SEQ ID NO: 120876 - DNA, 80 bp, synthetic construct
  misc_feature 1..80: note = Artificially Synthesized Probe
  source 1..80: mol_type = other DNA
tgtaagctccggacttgaggatcactactgggtacagcaccaagcataaaccctcatgtaagctctggacttgaggatca

SEQ ID NO: 120877 - DNA, 80 bp, synthetic construct
  misc_feature 1..80: note = Artificially Synthesized Probe
  source 1..80: mol_type = other DNA
tcctaggagtggggataagcagcacctcggggctggcatggggactgggtaggagcgcagagacactgagcgccttggga

SEQ ID NO: 120878 - DNA, 80 bp, synthetic construct; identical to SEQ ID NO: 39214
  misc_feature 1..80: note = Artificially Synthesized Probe
  source 1..80: mol_type = other DNA

SEQ ID NO: 120879 - DNA, 80 bp, synthetic construct
  misc_feature 1..80: note = Artificially Synthesized Probe
  source 1..80: mol_type = other DNA
actacaagaagcaaagctggttcataaaattgccatttggcaacaaccaggagagaactgattccataattctgccttaa

SEQ ID NO: 120880 - DNA, 80 bp, synthetic construct
  misc_feature 1..80: note = Artificially Synthesized Probe
  source 1..80: mol_type = other DNA
cccagaggcttgtcatcatgagaatatttcagaacattcataaggtaactctgtgctactgtctccatggatcaggctcc

SEQ ID NO: 120881 - DNA, 80 bp, synthetic construct
  misc_feature 1..80: note = Artificially Synthesized Probe
  source 1..80: mol_type = other DNA
tccagcggcagaattccaagtatggtggcacgtgcctgtagtcccagctattcaagaggctgaggtgggaggatcagctg

SEQ ID NO: 120882 - DNA, 80 bp, synthetic construct
  misc_feature 1..80: note = Artificially Synthesized Probe
  source 1..80: mol_type = other DNA
tgatcacttgaactcaggagtttgagacctgcctgggcaacatggcaaaaccccgtctctacaaagaataccttggtgtg

SEQ ID NO: 120883 - DNA, 80 bp, synthetic construct; identical to SEQ ID NO: 39215
  misc_feature 1..80: note = Artificially Synthesized Probe
  source 1..80: mol_type = other DNA

SEQ ID NO: 120884 - DNA, 80 bp, synthetic construct
  misc_feature 1..80: note = Artificially Synthesized Probe
  source 1..80: mol_type = other DNA
tcccaggagccacttatcggggacctgatgacaccaggggttcctctgtcttctctgggtttggtctttgtgatcagtaa

SEQ ID NO: 120885 - DNA, 80 bp, synthetic construct
  misc_feature 1..80: note = Artificially Synthesized Probe
  source 1..80: mol_type = other DNA
aggtctttctcctttaattatgctgctccacaacggctcacaacaactatgaactttttgctctggcaccagcctaatcc

SEQ ID NO: 120886 - DNA, 80 bp, synthetic construct; identical to SEQ ID NO: 39216
  misc_feature 1..80: note = Artificially Synthesized Probe
  source 1..80: mol_type = other DNA

SEQ ID NO: 120887 - DNA, 80 bp, synthetic construct
  misc_feature 1..80: note = Artificially Synthesized Probe
  source 1..80: mol_type = other DNA
gcagcatcagaaatagccctcgacgaggccaagatgaagacataagtggctctgccagggtggtgagagccacggccaaa

SEQ ID NO: 120888 - DNA, 80 bp, synthetic construct
  misc_feature 1..80: note = Artificially Synthesized Probe
  source 1..80: mol_type = other DNA
ggggccatcactgaagagaagctgccacatcagcgcagcacgagacgcatccacgtcagggaaagatggtcggccagggc

SEQ ID NO: 120889 - DNA, 80 bp, synthetic construct; identical to SEQ ID NO: 38694
  misc_feature 1..80: note = Artificially Synthesized Probe
  source 1..80: mol_type = other DNA

SEQ ID NO: 120890 - DNA, 80 bp, synthetic construct
  misc_feature 1..80: note = Artificially Synthesized Probe
  source 1..80: mol_type = other DNA
ccacccctgcccaccacatgcccttgtcccaatcactccctttcccctctccccttctccagatgtccctaccaacacaa

SEQ ID NO: 120891 - DNA, 80 bp, synthetic construct
  misc_feature 1..80: note = Artificially Synthesized Probe
  source 1..80: mol_type = other DNA
cactcaccttccttctttccccctatccccgggggcactctgtcccctctgagcctcgctcatgcagtcctgcctcccaa

SEQ ID NO: 120892 - DNA, 80 bp, synthetic construct; identical to SEQ ID NO: 39217
  misc_feature 1..80: note = Artificially Synthesized Probe
  source 1..80: mol_type = other DNA

SEQ ID NO: 120893 - DNA, 80 bp, synthetic construct
  misc_feature 1..80: note = Artificially Synthesized Probe
  source 1..80: mol_type = other DNA
tcccagcccaggacagcccacctgagggggcatactctgctttgcatggagaccctcacctccacccctcttggttctcc

SEQ ID NO: 120894 - DNA, 80 bp, synthetic construct
  misc_feature 1..80: note = Artificially Synthesized Probe
  source 1..80: mol_type = other DNA
gtcacaactaggggttgctattgatgctgagtggaggcgggtactgccactgaaccctgtgatacataggatggccgcgc

SEQ ID NO: 120895 - DNA, 80 bp, synthetic construct
  misc_feature 1..80: note = Artificially Synthesized Probe
  source 1..80: mol_type = other DNA
cagaaacacacatcctccacctttacaaacatacgtgtctgtaaagatctgtgtgcccaaggctggcacaacacatgcgt

SEQ ID NO: 120896 - DNA, 80 bp, synthetic construct; identical to SEQ ID NO: 39218
  misc_feature 1..80: note = Artificially Synthesized Probe
  source 1..80: mol_type = other DNA

SEQ ID NO: 120897 - DNA, 80 bp, synthetic construct
  misc_feature 1..80: note = Artificially Synthesized Probe
  source 1..80: mol_type = other DNA
cggtccagcatcttggtgatcttctccaccaagcgatgctgaatgtgatccatgcatttcttcagattggtctagaagga

SEQ ID NO: 120898 - DNA, 80 bp, synthetic construct
  misc_feature 1..80: note = Artificially Synthesized Probe
  source 1..80: mol_type = other DNA
acgaggtcaggagatcgagaccatcctggctaacacggtgaaaccctgtctctactaaaaatacaaaaaattagtcaggc

SEQ ID NO: 120899 - DNA, 80 bp, synthetic construct
  misc_feature 1..80: note = Artificially Synthesized Probe
  source 1..80: mol_type = other DNA
ttgattcttttgcttgtcattgagaaactcaatgctgagcatgagttgaaatttcaggcatgctgagctgaaattcctgt

SEQ ID NO: 120900 - DNA, 80 bp, synthetic construct
  misc_feature 1..80: note = Artificially Synthesized Probe
  source 1..80: mol_type = other DNA
attagctagacgtggtggcacatgtgattccagctacttgggaggctgaggcaggaggatcgcctgagccgaggctgcag

SEQ ID NO: 120901 - DNA, 80 bp, synthetic construct; identical to SEQ ID NO: 39219
  misc_feature 1..80: note = Artificially Synthesized Probe
  source 1..80: mol_type = other DNA

SEQ ID NO: 120902 - DNA, 80 bp, synthetic construct
  misc_feature 1..80: note = Artificially Synthesized Probe
  source 1..80: mol_type = other DNA
tgacgaagtcaggaggatgaagccctcgtgaatgggattagtgtccctgcaaaagaggtcccagagagctccctcgcccc

SEQ ID NO: 120903 - DNA, 80 bp, synthetic construct
  misc_feature 1..80: note = Artificially Synthesized Probe
  source 1..80: mol_type = other DNA
cacacttttgttgtttataagttacccaaggtattttgtaaaagcagcgtaaatggcctcagacacttgctgagagctat

SEQ ID NO: 120904 - DNA, 80 bp, synthetic construct; identical to SEQ ID NO: 39220
  misc_feature 1..80: note = Artificially Synthesized Probe
  source 1..80: mol_type = other DNA

SEQ ID NO: 120905 - DNA, 80 bp, synthetic construct
  misc_feature 1..80: note = Artificially Synthesized Probe
  source 1..80: mol_type = other DNA
ttgcccctactccgtacctctctcaaaacacacagaagggggacaaatgcggcttctgacacagcaggttcctgggccct

SEQ ID NO: 120906 - DNA, 80 bp, synthetic construct
  misc_feature 1..80: note = Artificially Synthesized Probe
  source 1..80: mol_type = other DNA
tttatctgcacatcagagggtgataaaaaacaaaagccaaaacccagaagcacccagatcttgccgtctgaataccgctt

SEQ ID NO: 120907 - DNA, 80 bp, synthetic construct
  misc_feature 1..80: note = Artificially Synthesized Probe
  source 1..80: mol_type = other DNA
gaagggcaactgccgcccacatctggacaacttgagcacaaaaatcaataatgataatgacagattagaactcagtgagc

SEQ ID NO: 120908 - DNA, 80 bp, synthetic construct
  misc_feature 1..80: note = Artificially Synthesized Probe
  source 1..80: mol_type = other DNA
ccccatctctactaaaaatacaaaattagccaggcatggtggtgcatgcctgtaatcccagctactcaggaggctgacgc

SEQ ID NO: 120909 - DNA, 80 bp, synthetic construct; identical to SEQ ID NO: 39221
  misc_feature 1..80: note = Artificially Synthesized Probe
  source 1..80: mol_type = other DNA

SEQ ID NO: 120910 - DNA, 80 bp, synthetic construct
  misc_feature 1..80: note = Artificially Synthesized Probe
  source 1..80: mol_type = other DNA
gcaccaggggccaggggccaggacaaaagcctcctgggtattacagattcctcctcctgttggttaagcaaagtgctccg

SEQ ID NO: 120911 - DNA, 80 bp, synthetic construct
  misc_feature 1..80: note = Artificially Synthesized Probe
  source 1..80: mol_type = other DNA
cactctgtgctctgccccccatgctgtgcacagctgctggcatgcctgcctagagtggggggccttctcacatttgcaca

SEQ ID NO: 120912 - DNA, 80 bp, synthetic construct
  misc_feature 1..80: note = Artificially Synthesized Probe
  source 1..80: mol_type = other DNA
cctgctgctcacctgcagtctaacttcagtgcaatttatgtgaacagcactttaacaaggtttttcctgaagcaacaaca

SEQ ID NO: 120913 - DNA, 80 bp, synthetic construct
  misc_feature 1..80: note = Artificially Synthesized Probe
  source 1..80: mol_type = other DNA
ctgctgcctcccgggtgggtctccgcagtgtgcaccgtaagggccagtctgcctgtacatcccagcccagccacacgcca

SEQ ID NO: 120914 - DNA, 80 bp, synthetic construct; identical to SEQ ID NO: 39222
  misc_feature 1..80: note = Artificially Synthesized Probe
  source 1..80: mol_type = other DNA

SEQ ID NO: 120915 - DNA, 80 bp, synthetic construct
  misc_feature 1..80: note = Artificially Synthesized Probe
  source 1..80: mol_type = other DNA
catcacttttgtcaagattctgtagcagtttagctaaaaagccatataaagaaacaggagcaaggggaagggaagatcct

SEQ ID NO: 120916 - DNA, 80 bp, synthetic construct
  misc_feature 1..80: note = Artificially Synthesized Probe
  source 1..80: mol_type = other DNA
gctgcttcaaacaccaggtttttctcctacattgtccacctttgttaaaacacaccctaaaagcctgggctgggaaaggc

SEQ ID NO: 120917 - DNA, 80 bp, synthetic construct
  misc_feature 1..80: note = Artificially Synthesized Probe
  source 1..80: mol_type = other DNA
cttggtgagactctaaaatacctcctccctcctccagccccccgcttggctggagatgctgcagaaggtctgggaaggat

SEQ ID NO: 120918 - DNA, 80 bp, synthetic construct; identical to SEQ ID NO: 39223
  misc_feature 1..80: note = Artificially Synthesized Probe
  source 1..80: mol_type = other DNA

SEQ ID NO: 120919 - DNA, 80 bp, synthetic construct
  misc_feature 1..80: note = Artificially Synthesized Probe
  source 1..80: mol_type = other DNA
acagaaaagcttccaaataaacaaccctagtctcctttctccaccacgccaaacaaaatggctatttgacaaaagacaaa

SEQ ID NO: 120920 - DNA, 80 bp, synthetic construct
  misc_feature 1..80: note = Artificially Synthesized Probe
  source 1..80: mol_type = other DNA
ccaccacgccaaacaaaatggctatttgacaaaagacaaaattcttgtgcacagactgatacttgtggggttttgttttc

SEQ ID NO: 120921 - DNA, 80 bp, synthetic construct
  misc_feature 1..80: note = Artificially Synthesized Probe
  source 1..80: mol_type = other DNA
caggaggagctacaggcccattttagaacttccacttctgattctagatttcaggacagcaggttctgtgcgtccatgcc

SEQ ID NO: 120922 - DNA, 80 bp, synthetic construct
  misc_feature 1..80: note = Artificially Synthesized Probe
  source 1..80: mol_type = other DNA
gcatctctggggcaggagggtaaaggactcaaggagggagtgtttattccagagtcacaaacatttatagcccatagcta

SEQ ID NO: 120923 - DNA, 80 bp, synthetic construct; identical to SEQ ID NO: 38695
  misc_feature 1..80: note = Artificially Synthesized Probe
  source 1..80: mol_type = other DNA

SEQ ID NO: 120924 - DNA, 80 bp, synthetic construct; identical to SEQ ID NO: 39224
  misc_feature 1..80: note = Artificially Synthesized Probe
  source 1..80: mol_type = other DNA

SEQ ID NO: 120925 - DNA, 80 bp, synthetic construct
  misc_feature 1..80: note = Artificially Synthesized Probe
  source 1..80: mol_type = other DNA
tctctactaaaaatgcaaaaattagctgggcgtggtggtgggcacctgtaatcctagctattcaggaggctgaggcacaa

SEQ ID NO: 120926 - DNA, 80 bp, synthetic construct
  misc_feature 1..80: note = Artificially Synthesized Probe
  source 1..80: mol_type = other DNA
atacagtccattgtccatggaaaaaaaaaaaaaagcatttagtgggaatgcagaatggtgcagctgcagtgaaagagttt

SEQ ID NO: 120927 - DNA, 80 bp, synthetic construct
  misc_feature 1..80: note = Artificially Synthesized Probe
  source 1..80: mol_type = other DNA
cagcaacaatttcatgacaatgaaaccagagcagcagctgcaaagtcaatttggggacttgtggatggccaggctcacaa

SEQ ID NO: 120928 - DNA, 80 bp, synthetic construct
  misc_feature 1..80: note = Artificially Synthesized Probe
  source 1..80: mol_type = other DNA
ggagactcccaaattctctggtcttctcgcccagttttcctgccgttatggaaatgatcagcccctgaaatgaactgcat

SEQ ID NO: 120929 - DNA, 80 bp, synthetic construct; identical to SEQ ID NO: 39225
  misc_feature 1..80: note = Artificially Synthesized Probe
  source 1..80: mol_type = other DNA

SEQ ID NO: 120930 - DNA, 80 bp, synthetic construct
  misc_feature 1..80: note = Artificially Synthesized Probe
  source 1..80: mol_type = other DNA
acttaggttgctcaagtgccagctgcaattacacacatgcagcctcttgctgttgactaagctaaaatgagtgcaatcgc

SEQ ID NO: 120931 - DNA, 80 bp, synthetic construct
  misc_feature 1..80: note = Artificially Synthesized Probe
  source 1..80: mol_type = other DNA
agcctcttgctgttgactaagctaaaatgagtgcaatcgctgaatgatgccaacatgttgtgcaggagtagaaatgatcc

SEQ ID NO: 120932 - DNA, 80 bp, synthetic construct
  misc_feature 1..80: note = Artificially Synthesized Probe
  source 1..80: mol_type = other DNA
tgaatgatgccaacatgttgtgcaggagtagaaatgatccgtttctggcttctcttaactgacgtaacccaacacgtata

SEQ ID NO: 120933 - DNA, 80 bp, synthetic construct
  misc_feature 1..80: note = Artificially Synthesized Probe
  source 1..80: mol_type = other DNA
gtttctggcttctcttaactgacgtaacccaacacgtatacactgcaggaaacaatgcctgtaaacttggggcgtagcaa

SEQ ID NO: 120934 - DNA, 80 bp, synthetic construct; identical to SEQ ID NO: 39226
  misc_feature 1..80: note = Artificially Synthesized Probe
  source 1..80: mol_type = other DNA

SEQ ID NO: 120935 - DNA, 80 bp, synthetic construct
  misc_feature 1..80: note = Artificially Synthesized Probe
  source 1..80: mol_type = other DNA
tccccatggtagtcagtcaattctcgctctgttagttcacgggggagccaggaactactcctcccctgctcgctctcaca

SEQ ID NO: 120936 - DNA, 80 bp, synthetic construct
  misc_feature 1..80: note = Artificially Synthesized Probe
  source 1..80: mol_type = other DNA
gggccaattaaacctcctttctcttagccagcctcaggtttttttgttgttgttgttttagatagagtttcagtcttgtc

SEQ ID NO: 120937 - DNA, 80 bp, synthetic construct
  misc_feature 1..80: note = Artificially Synthesized Probe
  source 1..80: mol_type = other DNA
ccagctaatttttgtatttttagtagagacggagtttcaccatgttggccaggctaatcttgaactcctgatctcaggtg

SEQ ID NO: 120938 - DNA, 80 bp, synthetic construct; identical to SEQ ID NO: 39227
  misc_feature 1..80: note = Artificially Synthesized Probe
  source 1..80: mol_type = other DNA

SEQ ID NO: 120939 - DNA, 80 bp, synthetic construct
  misc_feature 1..80: note = Artificially Synthesized Probe
  source 1..80: mol_type = other DNA
ctatgtaatgaaacttccataaaaatacctcaacaatggggcctgggggcttctgagccagcaaacacatccacatactg

SEQ ID NO: 120940 - DNA, 80 bp, synthetic construct
  misc_feature 1..80: note = Artificially Synthesized Probe
  source 1..80: mol_type = other DNA
tcatcagctgtgcgtttgtacactttgtaataagccaggggtagcagttaaaatgccttcttaggttctctgagctgctc

SEQ ID NO: 120941 - DNA, 80 bp, synthetic construct
  misc_feature 1..80: note = Artificially Synthesized Probe
  source 1..80: mol_type = other DNA
gtgtctacggacagagggatgaataacactctgtggtcgagccatacagtgcgacactcacagaaaggaatgaaatgctg

SEQ ID NO: 120942 - DNA, 80 bp, synthetic construct
  misc_feature 1..80: note = Artificially Synthesized Probe
  source 1..80: mol_type = other DNA
tgacatccagctggtgtctggagaggtggagaaggaaaatacaccacccattaggcgctgggaaggaaaaatttaaaacc

SEQ ID NO: 120943 - DNA, 80 bp, synthetic construct; identical to SEQ ID NO: 39228
  misc_feature 1..80: note = Artificially Synthesized Probe
  source 1..80: mol_type = other DNA

SEQ ID NO: 120944 - DNA, 80 bp, synthetic construct
  misc_feature 1..80: note = Artificially Synthesized Probe
  source 1..80: mol_type = other DNA
gccatacagtgcgacactcacagaaaggaatgaaatgctgacacgtgttccaacaaggagagcctcagagacatgatgct

SEQ ID NO: 120945 - DNA, 80 bp, synthetic construct
  misc_feature 1..80: note = Artificially Synthesized Probe
  source 1..80: mol_type = other DNA
gcaggagagagaacagcaaaggaggaacttccagacacttataataaaaccatcagatctcgtgagacctcacttactat

SEQ ID NO: 120946 - DNA, 80 bp, synthetic construct
  misc_feature 1..80: note = Artificially Synthesized Probe
  source 1..80: mol_type = other DNA
acagagccaaatcatatcaaacctcaagaccccagactgatttttaaatgtggggataatttcccaatgcaaatggaatt

SEQ ID NO: 120947 - DNA, 80 bp, synthetic construct
  misc_feature 1..80: note = Artificially Synthesized Probe
  source 1..80: mol_type = other DNA
tttttaaatgtggggataatttcccaatgcaaatggaattggtctcgccccaccaccatgtctcccccacccaccatggc

SEQ ID NO: 120948 - DNA, 80 bp, synthetic construct
  misc_feature 1..80: note = Artificially Synthesized Probe
  source 1..80: mol_type = other DNA
agttcaggacatctttcaaactctgggttaatgtacacaggatccgctgctttgcaacccacactgtggcatccgggtta

SEQ ID NO: 120949 - DNA, 80 bp, synthetic construct; identical to SEQ ID NO: 39229
  misc_feature 1..80: note = Artificially Synthesized Probe
  source 1..80: mol_type = other DNA

SEQ ID NO: 120950 - DNA, 80 bp, synthetic construct
  misc_feature 1..80: note = Artificially Synthesized Probe
  source 1..80: mol_type = other DNA
agaccatcctagccaacatggcgaaaccccatcgctgctaaaaatacaaaaatttgctgggcatggtggtgcgtgtctgt

SEQ ID NO: 120951 - DNA, 80 bp, synthetic construct
  misc_feature 1..80: note = Artificially Synthesized Probe
  source 1..80: mol_type = other DNA
aaaaaaaaaaaaaaaaattctctagccctcatagtgtctttttggtcatcaatgaccacctgtcacctcagggccctctc

SEQ ID NO: 120952 - DNA, 80 bp, synthetic construct
  misc_feature 1..80: note = Artificially Synthesized Probe
  source 1..80: mol_type = other DNA
ggggaacacacattcagagccacagcccgcgcatatttcaatgtgacttaattttgacatggatcgttctttagcatttc

SEQ ID NO: 120953 - DNA, 80 bp, synthetic construct
  misc_feature 1..80: note = Artificially Synthesized Probe
  source 1..80: mol_type = other DNA
atgtgacttaattttgacatggatcgttctttagcatttcagattcggtggaagccttgtcttataaccacactgacgag

SEQ ID NO: 120954 - DNA, 80 bp, synthetic construct
  misc_feature 1..80: note = Artificially Synthesized Probe
  source 1..80: mol_type = other DNA
aagtcagggaggacgacccttctagctccaacctttactggccccagggtggtggccagatgactcccacaggcaggagg

SEQ ID NO: 120955 - DNA, 80 bp, synthetic construct
  misc_feature 1..80: note = Artificially Synthesized Probe
  source 1..80: mol_type = other DNA
atcagttgccatgagagttcatttttgcaaagttaaatagtgtcaacagggcctgcaaaccaatcacaacacttcaaaca

SEQ ID NO: 120956 - DNA, 80 bp, synthetic construct
  misc_feature 1..80: note = Artificially Synthesized Probe
  source 1..80: mol_type = other DNA
tgtcaacagggcctgcaaaccaatcacaacacttcaaacatataatagcacctctgaggactgaaataacaacaacttgg

SEQ ID NO: 120957 - DNA, 80 bp, synthetic construct; identical to SEQ ID NO: 39230
  misc_feature 1..80: note = Artificially Synthesized Probe
  source 1..80: mol_type = other DNA

SEQ ID NO: 120958 - DNA, 80 bp, synthetic construct
  misc_feature 1..80: note = Artificially Synthesized Probe
  source 1..80: mol_type = other DNA
caaagtgttcagaacaaaaggaggtttgattgaatataagactcaaaccaattctctatctgaggattctgtgggtttgt

SEQ ID NO: 120959 - DNA, 80 bp, synthetic construct
  misc_feature 1..80: note = Artificially Synthesized Probe
  source 1..80: mol_type = other DNA
tgtttctcccttccaatgtcaaaggctgagctcacgtgtggctctcaaagctccccacagggctgtgaggctgggtgggg

SEQ ID NO: 120960 - DNA, 80 bp, synthetic construct
  misc_feature 1..80: note = Artificially Synthesized Probe
  source 1..80: mol_type = other DNA
gatggaaatgtccaggaaccggaagaaggtgatggttgcacaccctgtgattgtgtcgaatatcactgtacacttttgaa

SEQ ID NO: 120961 - DNA, 80 bp, synthetic construct
  misc_feature 1..80: note = Artificially Synthesized Probe
  source 1..80: mol_type = other DNA
gcccctccaattcaagctccaacatccacagagcccatggctccctccctgacacctgcagagaagcttcagccaagggg

SEQ ID NO: 120962 - DNA, 80 bp, synthetic construct
  misc_feature 1..80: note = Artificially Synthesized Probe
  source 1..80: mol_type = other DNA
gctccagaaaatgctaagagcaccaccttgagaatcatctagaaggagcaagagctcaaaggtcggaaagcctgggtttg

SEQ ID NO: 120963 - DNA, 80 bp, synthetic construct; identical to SEQ ID NO: 39231
  misc_feature 1..80: note = Artificially Synthesized Probe
  source 1..80: mol_type = other DNA

SEQ ID NO: 120964 - DNA, 80 bp, synthetic construct
  misc_feature 1..80: note = Artificially Synthesized Probe
  source 1..80: mol_type = other DNA
ctcccattctgtagattgcctgttcactctgatggtagtttcttttgctgtgcagaagctcttgagtttaattagatccc

SEQ ID NO: 120965 - DNA, 80 bp, synthetic construct
  misc_feature 1..80: note = Artificially Synthesized Probe
  source 1..80: mol_type = other DNA
tgtataaggtgtaaggaaggcattcagtttcttctgcaaagaacttaaacaaatttataagaaaaaatcaaacaacccca

SEQ ID NO: 120966 - DNA, 80 bp, synthetic construct; identical to SEQ ID NO: 39232
  misc_feature 1..80: note = Artificially Synthesized Probe
  source 1..80: mol_type = other DNA

SEQ ID NO: 120967 - DNA, 80 bp, synthetic construct
  misc_feature 1..80: note = Artificially Synthesized Probe
  source 1..80: mol_type = other DNA
cacaatagcaaagacttggaaccaacccaaatgtccatcaatgatagactggattaagaaaatgtggcacatatacacca

SEQ ID NO: 120968 - DNA, 80 bp, synthetic construct
  misc_feature 1..80: note = Artificially Synthesized Probe
  source 1..80: mol_type = other DNA
acacagggcaggggaacatcacacatgggggcctgtcttagtgtggagggttgggggagggaaagcattacgagaaatac

SEQ ID NO: 120969 - DNA, 80 bp, synthetic construct
  misc_feature 1..80: note = Artificially Synthesized Probe
  source 1..80: mol_type = other DNA
accacgtgaatgggaaggcagagactggtgtgtcccatctgcaaacccagcaatgctaagatttctggtaagcccccaga

SEQ ID NO: 120970 - DNA, 80 bp, synthetic construct; identical to SEQ ID NO: 39233
  misc_feature 1..80: note = Artificially Synthesized Probe
  source 1..80: mol_type = other DNA

SEQ ID NO: 120971 - DNA, 80 bp, synthetic construct
  misc_feature 1..80: note = Artificially Synthesized Probe
  source 1..80: mol_type = other DNA
tgtgcctggacttctttttaaaaagacaatcgattcaaggtctcaaatacagagactcctaggtgcaaattctacatcct

SEQ ID NO: 120972 - DNA, 80 bp, synthetic construct
  misc_feature 1..80: note = Artificially Synthesized Probe
  source 1..80: mol_type = other DNA
cagctcccggcaagcccacgacgtcagaagacactttggatgaatcctacttcaattcttcacctacccatcattgactc

SEQ ID NO: 120973 - DNA, 80 bp, synthetic construct
  misc_feature 1..80: note = Artificially Synthesized Probe
  source 1..80: mol_type = other DNA
tcaccatttgtagtggggaaaaacacctactcaactgtcacacaatatggaaaaggtaaaaatccatgctaacacgagct

SEQ ID NO: 120974 - DNA, 80 bp, synthetic construct; identical to SEQ ID NO: 38696
  misc_feature 1..80: note = Artificially Synthesized Probe
  source 1..80: mol_type = other DNA

SEQ ID NO: 120975 - DNA, 80 bp, synthetic construct
  misc_feature 1..80: note = Artificially Synthesized Probe
  source 1..80: mol_type = other DNA
cccatcataaggagagggagggaggcaaaggtagaacagcgatgagtctagcaggtggatggcccaagacagtttctgcc

SEQ ID NO: 120976 - DNA, 80 bp, synthetic construct
  misc_feature 1..80: note = Artificially Synthesized Probe
  source 1..80: mol_type = other DNA
tataatttgttagagatgttctgagtgagtgagtgatttgttagatgactcacagatagtacagaaaggatggcaaagac

SEQ ID NO: 120977 - DNA, 80 bp, synthetic construct; identical to SEQ ID NO: 39234
  misc_feature 1..80: note = Artificially Synthesized Probe
  source 1..80: mol_type = other DNA

SEQ ID NO: 120978 - DNA, 80 bp, synthetic construct
  misc_feature 1..80: note = Artificially Synthesized Probe
  source 1..80: mol_type = other DNA
gtgatgatggtgatggtgatgatggtggtgatgatgatggtgacaatgatggtatgatgatagtgataatggtgatgatg

SEQ ID NO: 120979 - DNA, 80 bp, synthetic construct
  misc_feature 1..80: note = Artificially Synthesized Probe
  source 1..80: mol_type = other DNA
taaccatgacacagtgatgattaccatgtattgaatcctaataagccagaaattacgctaaccttatcaccttcaccaca

SEQ ID NO: 120980 - DNA, 80 bp, synthetic construct
  misc_feature 1..80: note = Artificially Synthesized Probe
  source 1..80: mol_type = other DNA
aaggtcacacttctagaaagcagtagaggtttggtttaaacccaagtcaaatctccccatctcccgagttcttgctgttc

SEQ ID NO: 120981 - DNA, 80 bp, synthetic construct; identical to SEQ ID NO: 39235
  misc_feature 1..80: note = Artificially Synthesized Probe
  source 1..80: mol_type = other DNA

SEQ ID NO: 120982 - DNA, 80 bp, synthetic construct
  misc_feature 1..80: note = Artificially Synthesized Probe
  source 1..80: mol_type = other DNA
aaagttctgtgtgttctgactgttccactgaccagctattctcccacctctctccctctccttgggcctccctatgcccc

SEQ ID NO: 120983 - DNA, 80 bp, synthetic construct
  misc_feature 1..80: note = Artificially Synthesized Probe
  source 1..80: mol_type = other DNA
tgaggcctccagcaccaaacagtaagccatcgtgtgaatgcaaacaaaatgttcctgaaggaaattagaagggccactcc

SEQ ID NO: 120984 - DNA, 80 bp, synthetic construct
  misc_feature 1..80: note = Artificially Synthesized Probe
  source 1..80: mol_type = other DNA
agtgaacacacaaatggtaagtgaaacaggccttagtgctgacagggagaaggtttgagtcaccaaactttgatgatcaa

SEQ ID NO: 120985 - DNA, 80 bp, synthetic construct; identical to SEQ ID NO: 39236
  misc_feature 1..80: note = Artificially Synthesized Probe
  source 1..80: mol_type = other DNA

SEQ ID NO: 120986 - DNA, 80 bp, synthetic construct
  misc_feature 1..80: note = Artificially Synthesized Probe
  source 1..80: mol_type = other DNA
tgggggacatgcatatttctttaattgagatgagcttatataatgtaaaattcacacttttaaagtgtgcgactccatgg

SEQ ID NO: 120987 - DNA, 80 bp, synthetic construct
  misc_feature 1..80: note = Artificially Synthesized Probe
  source 1..80: mol_type = other DNA
agctgcagcaagttctccagaagatctcgctcagatcattgatgaaggcggctacactaaacaacagattttcaatgtag

SEQ ID NO: 120988 - DNA, 80 bp, synthetic construct
  misc_feature 1..80: note = Artificially Synthesized Probe
  source 1..80: mol_type = other DNA
tggtgactttaagttgaagcctatgctaatatatcattcaaaaaaaccgagggcccttaagaatgatgctaaatcaatcg

SEQ ID NO: 120989 - DNA, 80 bp, synthetic construct
  misc_feature 1..80: note = Artificially Synthesized Probe
  source 1..80: mol_type = other DNA
tcccagctacttgggaggctgaggcaggagaattgctagaacccaggaacaggatgttgcagtgagccgagatcatgcca

SEQ ID NO: 120990 - DNA, 80 bp, synthetic construct
  misc_feature 1..80: note = Artificially Synthesized Probe
  source 1..80: mol_type = other DNA
agcccactgttgagacctaatgctcagaaaaagagattcttttccaaatattgctgctccttgacaatgtacctggtcac

SEQ ID NO: 120991 - DNA, 80 bp, synthetic construct; identical to SEQ ID NO: 39237
  misc_feature 1..80: note = Artificially Synthesized Probe
  source 1..80: mol_type = other DNA

SEQ ID NO: 120992 - DNA, 80 bp, synthetic construct
  misc_feature 1..80: note = Artificially Synthesized Probe
  source 1..80: mol_type = other DNA
cacctcagcctcctgagtggctgggactacaggtgcccaccaccctacccagccaattttttgtatttttagtagagaca

SEQ ID NO: 120993 - DNA, 80 bp, synthetic construct
  misc_feature 1..80: note = Artificially Synthesized Probe
  source 1..80: mol_type = other DNA
gaagttgattccaactctcatggatgactttgagggattcaagccttcggtggaggaaggaactgcagatgtggaaatag

SEQ ID NO: 120994 - DNA, 80 bp, synthetic construct
  misc_feature 1..80: note = Artificially Synthesized Probe
  source 1..80: mol_type = other DNA
gaaatgtccacacaggatctagaatattccataaactcagtggataaagcagtgcagggtttgagaagatttcatccaat

SEQ ID NO: 120995 - DNA, 80 bp, synthetic construct; identical to SEQ ID NO: 39238
  misc_feature 1..80: note = Artificially Synthesized Probe
  source 1..80: mol_type = other DNA

SEQ ID NO: 120996 - DNA, 80 bp, synthetic construct
  misc_feature 1..80: note = Artificially Synthesized Probe
  source 1..80: mol_type = other DNA
tgcagtggtctggaaccagactcactatctctaagatatgcctgttatgtaagtcattgagaatactgaagaagatgttg

SEQ ID NO: 120997 - DNA, 80 bp, synthetic construct
  misc_feature 1..80: note = Artificially Synthesized Probe
  source 1..80: mol_type = other DNA
caccatgtctccttttgtgtctgcttcttttactcagtgtcaccccttccatgctcacccacaaggtggcacgtctcatc

SEQ ID NO: 120998 - DNA, 80 bp, synthetic construct
  misc_feature 1..80: note = Artificially Synthesized Probe
  source 1..80: mol_type = other DNA
agccccactctcctttccaccggggccgaggtctcacgatgtcatctccctggcctcctgcaggctgagctgaccactgg

SEQ ID NO: 120999 - DNA, 80 bp, synthetic construct
  misc_feature 1..80: note = Artificially Synthesized Probe
  source 1..80: mol_type = other DNA
tgtctcccaggaaggtgggagcagtgctgagtttcatattttgccttaggatgtttctcctcactctctcctaactggta

SEQ ID NO: 121000 - DNA, 80 bp, synthetic construct; identical to SEQ ID NO: 39239
  misc_feature 1..80: note = Artificially Synthesized Probe
  source 1..80: mol_type = other DNA

SEQ ID NO: 121001 - DNA, 80 bp, synthetic construct
  misc_feature 1..80: note = Artificially Synthesized Probe
  source 1..80: mol_type = other DNA
cccctcagccacaaaagggagctgtgtcctagcacagatgaaccatccacatcttcccgtccctcctactcctccccatc

SEQ ID NO: 121002 - DNA, 80 bp, synthetic construct
  misc_feature 1..80: note = Artificially Synthesized Probe
  source 1..80: mol_type = other DNA
actgcaacctccacctcctgggttcaagcaattctcttgcctcagcctccagagtagctgggactacaggtgcccaccac

SEQ ID NO: 121003 - DNA, 80 bp, synthetic construct; identical to SEQ ID NO: 39240
  misc_feature 1..80: note = Artificially Synthesized Probe
  source 1..80: mol_type = other DNA

SEQ ID NO: 121004 - DNA, 80 bp, synthetic construct
  misc_feature 1..80: note = Artificially Synthesized Probe
  source 1..80: mol_type = other DNA
gaacagcattggatcaacattccagacatggaacactcctgggtagtatcatccaacagtcaagaaaggtctggacttca

SEQ ID NO: 121005 - DNA, 80 bp, synthetic construct
  misc_feature 1..80: note = Artificially Synthesized Probe
  source 1..80: mol_type = other DNA
gagtgatacatctacacccctcttagtacagttcatggtcaagctcaaatcaaaaccaaagagcaggcgaggcaacatag

SEQ ID NO: 121006 - DNA, 80 bp, synthetic construct
  misc_feature 1..80: note = Artificially Synthesized Probe
  source 1..80: mol_type = other DNA
aagctcaaatcaaaaccaaagagcaggcgaggcaacatagggaaaccgtctctacgaaaaatgaaaatttttaaaaatta

SEQ ID NO: 121007 - DNA, 80 bp, synthetic construct
  misc_feature 1..80: note = Artificially Synthesized Probe
  source 1..80: mol_type = other DNA
aaaaaatggagacagtgagggaaggtcactcacacttggttcacatgagttacaagtattctgcaaggtgagaggctaag

SEQ ID NO: 121008 - DNA, 80 bp, synthetic construct
  misc_feature 1..80: note = Artificially Synthesized Probe
  source 1..80: mol_type = other DNA
aaaggccagtatctgctaggcgctgccctagaggggcagtgtattagtctgttttcctgctgctattaaggacataccca

SEQ ID NO: 121009 - DNA, 80 bp, synthetic construct; identical to SEQ ID NO: 39241
  misc_feature 1..80: note = Artificially Synthesized Probe
  source 1..80: mol_type = other DNA

SEQ ID NO: 121010 - DNA, 80 bp, synthetic construct
  misc_feature 1..80: note = Artificially Synthesized Probe
  source 1..80: mol_type = other DNA
agtctcattctgaggtcctgggctatgacttcattcaatatagaaattttggtgggggagagacttagcccacaacactg

SEQ ID NO: 121011 - DNA, 80 bp, synthetic construct
  misc_feature 1..80: note = Artificially Synthesized Probe
  source 1..80: mol_type = other DNA
ggctgttttgatttacagcaatgtagcaagaagagtttcctgtgagagactaaattgctttccaaatctgttttgggccc

SEQ ID NO: 121012 - DNA, 80 bp, synthetic construct
  misc_feature 1..80: note = Artificially Synthesized Probe
  source 1..80: mol_type = other DNA
tgtgagagactaaattgctttccaaatctgttttgggccctgtaaaatggcgatgatgacgggtgattttggaagattgt

SEQ ID NO: 121013 - DNA, 80 bp, synthetic construct
  misc_feature 1..80: note = Artificially Synthesized Probe
  source 1..80: mol_type = other DNA
tgtaaaatggcgatgatgacgggtgattttggaagattgtagtgagggcaaggaagtgtctagacaaagcttgagaaaat

SEQ ID NO: 121014 - DNA, 80 bp, synthetic construct
  misc_feature 1..80: note = Artificially Synthesized Probe
  source 1..80: mol_type = other DNA
acggcatctgctaactcaccttcctcaggtgagacttacatccaccttcctcttgacttctacccaaggagcccaggaaa

SEQ ID NO: 121015 - DNA, 80 bp, synthetic construct; identical to SEQ ID NO: 39242
  misc_feature 1..80: note = Artificially Synthesized Probe
  source 1..80: mol_type = other DNA

SEQ ID NO: 121016 - DNA, 80 bp, synthetic construct
  misc_feature 1..80: note = Artificially Synthesized Probe
  source 1..80: mol_type = other DNA
ttacaaagaagcgcatttcacattcagaatttcctctgcagctacggtttctgtcatcatcaagttctgcatgatgcatt

SEQ ID NO: 121017 - DNA, 80 bp, synthetic construct
  misc_feature 1..80: note = Artificially Synthesized Probe
  source 1..80: mol_type = other DNA
accaacatcaaggtcaccccaaactacaattggtttattcccaaatgcaattatccaaatgaaataatacttcttactgc

SEQ ID NO: 121018 - DNA, 80 bp, synthetic construct
  misc_feature 1..80: note = Artificially Synthesized Probe
  source 1..80: mol_type = other DNA
tcaggcttagtgcttctgcatgtttaaacgccaataaagggtaacggagctgtggattcgtttttccaatcagaacattt

SEQ ID NO: 121019 - DNA, 80 bp, synthetic construct
  misc_feature 1..80: note = Artificially Synthesized Probe
  source 1..80: mol_type = other DNA
gactccttgggggtgacttaatcttcctcttttcatagccatgatttcaggcagagccattgtaaagcagagatcagatg

SEQ ID NO: 121020 - DNA, 80 bp, synthetic construct
  misc_feature 1..80: note = Artificially Synthesized Probe
  source 1..80: mol_type = other DNA
atgatttcaggcagagccattgtaaagcagagatcagatgctggccagagaagtccctttagaagcaataaattgaagtg

SEQ ID NO: 121021 - DNA, 80 bp, synthetic construct
  misc_feature 1..80: note = Artificially Synthesized Probe
  source 1..80: mol_type = other DNA
ctggccagagaagtccctttagaagcaataaattgaagtgaagtaagtcagccatggaaggggggttataattaaaaagt

SEQ ID NO: 121022 - DNA, 80 bp, synthetic construct; identical to SEQ ID NO: 39243
  misc_feature 1..80: note = Artificially Synthesized Probe
  source 1..80: mol_type = other DNA

SEQ ID NO: 121023 - DNA, 80 bp, synthetic construct
  misc_feature 1..80: note = Artificially Synthesized Probe
  source 1..80: mol_type = other DNA
gcggcaggagagagaaatgctgagtaaaagggggaaaagccccttataaaaccatcagatcttgtgaaaattcactcact

SEQ ID NO: 121024 - DNA, 80 bp, synthetic construct
  misc_feature 1..80: note = Artificially Synthesized Probe
  source 1..80: mol_type = other DNA
gccgagctaatgagtccaactcgatcctggcagcacacagacggagccatgagtcaggaagattaagccagcaggaggtc

SEQ ID NO: 121025 - DNA, 80 bp, synthetic construct
  misc_feature 1..80: note = Artificially Synthesized Probe
  source 1..80: mol_type = other DNA
gaggaatcgcccaggtccaacctcagagcaaagatgctggaaaaaagcctcacccttggatttaacacagaaaagtaaaa

SEQ ID NO: 121026 - DNA, 80 bp, synthetic construct
  misc_feature 1..80: note = Artificially Synthesized Probe
  source 1..80: mol_type = other DNA
acactgtgggatttacagagctttgctacagaacttgtagtaattccagaccaaagtcacttttcccgtacattgttttc

SEQ ID NO: 121027 - DNA, 80 bp, synthetic construct; identical to SEQ ID NO: 39244
  misc_feature 1..80: note = Artificially Synthesized Probe
  source 1..80: mol_type = other DNA

SEQ ID NO: 121028 - DNA, 80 bp, synthetic construct
  misc_feature 1..80: note = Artificially Synthesized Probe
  source 1..80: mol_type = other DNA
aacaatttgtaactcaccagtttcttgactaaaatagtcaagtgtaaaccactcctcttaaggacaggtaggctagtttt

SEQ ID NO: 121029 - DNA, 80 bp, synthetic construct
  misc_feature 1..80: note = Artificially Synthesized Probe
  source 1..80: mol_type = other DNA
cggggctactcaaagtggagaccaaagatcctaaccatgtatttctataatcaagagaatggatagatgggtgaatgagt

SEQ ID NO: 121030 - DNA, 80 bp, synthetic construct
  misc_feature 1..80: note = Artificially Synthesized Probe
  source 1..80: mol_type = other DNA
tggatggatggatggatggatggccggccggacggctggctggctggctggctggctggctgggtaggtgggtggctggg

SEQ ID NO: 121031 - DNA, 80 bp, synthetic construct; identical to SEQ ID NO: 39245
  misc_feature 1..80: note = Artificially Synthesized Probe
  source 1..80: mol_type = other DNA

SEQ ID NO: 121032 - DNA, 80 bp, synthetic construct
  misc_feature 1..80: note = Artificially Synthesized Probe
  source 1..80: mol_type = other DNA
taggctggagtcagtgttgggccacactccatggactcaaagtttttgaataaagaccattatcatgttaccatcttctg

SEQ ID NO: 121033 - DNA, 80 bp, synthetic construct
  misc_feature 1..80: note = Artificially Synthesized Probe
  source 1..80: mol_type = other DNA
aactgggagagaacattctggaacaaaacatctgaaactgaaagggcagcccaaaggaaaactatgtatttttttttttt

SEQ ID NO: 121034 - DNA, 80 bp, synthetic construct; identical to SEQ ID NO: 38697
  misc_feature 1..80: note = Artificially Synthesized Probe
  source 1..80: mol_type = other DNA

SEQ ID NO: 121035 - DNA, 80 bp, synthetic construct
  misc_feature 1..80: note = Artificially Synthesized Probe
  source 1..80: mol_type = other DNA
ctcctccgtggcaggaggcccggagtgggcactggacacagcacaggtgggaggggaggggctcatctccagcaggagag

SEQ ID NO: 121036 - DNA, 80 bp, synthetic construct; identical to SEQ ID NO: 39246
  misc_feature 1..80: note = Artificially Synthesized Probe
  source 1..80: mol_type = other DNA

SEQ ID NO: 121037 - DNA, 80 bp, synthetic construct
  misc_feature 1..80: note = Artificially Synthesized Probe
  source 1..80: mol_type = other DNA
aagcaattctcctgcctcagcctcctgagtagctgggattataggcgtgcatcaccacacctggctaatttttgtatctt

SEQ ID NO: 121038 - DNA, 80 bp, synthetic construct
  misc_feature 1..80: note = Artificially Synthesized Probe
  source 1..80: mol_type = other DNA
agacgcaggcctcacatcttaaaccctctctccaggacagccccactggctttgtcatagggaagcgtctgtgggtctcc

SEQ ID NO: 121039 - DNA, 80 bp, synthetic construct
  misc_feature 1..80: note = Artificially Synthesized Probe
  source 1..80: mol_type = other DNA
tgtcacatgctctgtaccaaacctctgcccatcaaatacaaccatggcctccttgtcatgaccctatacctggacgccca

SEQ ID NO: 121040 - DNA, 80 bp, synthetic construct
  misc_feature 1..80: note = Artificially Synthesized Probe
  source 1..80: mol_type = other DNA
gtacagccattggcgcctcaccccacagaggcaagggtttaaatgaattcactcactccatagccagatacccagcattc

SEQ ID NO: 121041 - DNA, 80 bp, synthetic construct; identical to SEQ ID NO: 39247
  misc_feature 1..80: note = Artificially Synthesized Probe
  source 1..80: mol_type = other DNA

SEQ ID NO: 121042 - DNA, 80 bp, synthetic construct
  misc_feature 1..80: note = Artificially Synthesized Probe
  source 1..80: mol_type = other DNA
ttggccaggctggtctcggactcctgacctcaggtgatccacctgcctcagcctcccaaagtgctgggattacaggcatg

SEQ ID NO: 121043 - DNA, 80 bp, synthetic construct
  misc_feature 1..80: note = Artificially Synthesized Probe
  source 1..80: mol_type = other DNA
aagaatgacagtgtcctaagactgctggggagtccaaactggtggcttcactctagcatgtcacttcttcccataaatga

SEQ ID NO: 121044 - DNA, 80 bp, synthetic construct
  misc_feature 1..80: note = Artificially Synthesized Probe
  source 1..80: mol_type = other DNA
ttgcccaagaggaagatgacaggaaaggtggggtggtgatgaaggctgagggaacaacacaggcttgcgggggtctagaa

SEQ ID NO: 121045 - DNA, 80 bp, synthetic construct
  misc_feature 1..80: note = Artificially Synthesized Probe
  source 1..80: mol_type = other DNA
caagatgtggtccctccatgcaagatgatgagaatcagaacaaggctcaacagggctctgctaaacgccaccctggggat

SEQ ID NO: 121046 - DNA, 80 bp, synthetic construct; identical to SEQ ID NO: 39248
  misc_feature 1..80: note = Artificially Synthesized Probe
  source 1..80: mol_type = other DNA

SEQ ID NO: 121047 - DNA, 80 bp, synthetic construct
  misc_feature 1..80: note = Artificially Synthesized Probe
  source 1..80: mol_type = other DNA
tttatacccaaaaaagctgattatgctgagtcaaagaaatcaggcacagaaggccacatgttgtttgactccatgtctgg

SEQ ID NO: 121048 - DNA, 80 bp, synthetic construct
  misc_feature 1..80: note = Artificially Synthesized Probe
  source 1..80: mol_type = other DNA
tggtattcttttttattttttgagatggagttttgctcttgttgcccaggctacagtgcagtggcgcgatctccactcac

SEQ ID NO: 121049 - DNA, 80 bp, synthetic construct
  misc_feature 1..80: note = Artificially Synthesized Probe
  source 1..80: mol_type = other DNA
gtgatccacccacctcagcctcccacagtgctgggattacaggtgtgagccactgtgcatagccctgaattgtattctta

SEQ ID NO: 121050 - DNA, 80 bp, synthetic construct; identical to SEQ ID NO: 39249
  misc_feature 1..80: note = Artificially Synthesized Probe
  source 1..80: mol_type = other DNA

SEQ ID NO: 121051 - DNA, 80 bp, synthetic construct
  misc_feature 1..80: note = Artificially Synthesized Probe
  source 1..80: mol_type = other DNA
atcggtgccagggtgctggctgcagggagctgggcctggccgagaagccctcccgccacccactccctggaaggcccagg

SEQ ID NO: 121052 - DNA, 80 bp, synthetic construct
  misc_feature 1..80: note = Artificially Synthesized Probe
  source 1..80: mol_type = other DNA
actccatcaactcctagaagacacccagctctcaccttgcagggtccaggagcaaggaatcagacacacacacagcaaag

SEQ ID NO: 121053 - DNA, 80 bp, synthetic construct
  misc_feature 1..80: note = Artificially Synthesized Probe
  source 1..80: mol_type = other DNA
acaatgggtgggcgcacacatacagcaaagcacccgaacacagcttctaacagtaacgaaccacacccctgcaccagccg

SEQ ID NO: 121054 - DNA, 80 bp, synthetic construct
  misc_feature 1..80: note = Artificially Synthesized Probe
  source 1..80: mol_type = other DNA
ggcccaacagagatgaggatagtcaagttcgttagctatgcaggggcaggagatgtggatagtgcctctggctggggaaa

SEQ ID NO: 121055 - DNA, 80 bp, synthetic construct
  misc_feature 1..80: note = Artificially Synthesized Probe
  source 1..80: mol_type = other DNA
tacaggaggggaagataggctcagacgttgccagcacaggtagagtcctcccaatattcaaaagtagaggaatcctcaaa

SEQ ID NO: 121056 - DNA, 80 bp, synthetic construct; identical to SEQ ID NO: 39250
  misc_feature 1..80: note = Artificially Synthesized Probe
  source 1..80: mol_type = other DNA

SEQ ID NO: 121057 - DNA, 80 bp, synthetic construct
  misc_feature 1..80: note = Artificially Synthesized Probe
  source 1..80: mol_type = other DNA
tacaaaatgcaaatgcggtaattatgtgcctgtgaccaaaaagaggggattaaatcctgaaggtggaggaggtgaaacct

SEQ ID NO: 121058 - DNA, 80 bp, synthetic construct
  misc_feature 1..80: note = Artificially Synthesized Probe
  source 1..80: mol_type = other DNA
aagaggggattaaatcctgaaggtggaggaggtgaaacctccttacttttggggttctattttaatccacaataataagc

SEQ ID NO: 121059 - DNA, 80 bp, synthetic construct
  misc_feature 1..80: note = Artificially Synthesized Probe
  source 1..80: mol_type = other DNA
cctctctggacaatatagtgagactctgtctctactaaaaagaaaaaaaaatcccagtgtggtggcgtgcacttgggaag

SEQ ID NO: 121060 - DNA, 80 bp, synthetic construct
  misc_feature 1..80: note = Artificially Synthesized Probe
  source 1..80: mol_type = other DNA
gaaaaagaaaaagaaaaatctgagagtccatttggaagcagcagacagacgagaggacatccccgtcagcagatgcatgc

SEQ ID NO: 121061 - DNA, 80 bp, synthetic construct
  misc_feature 1..80: note = Artificially Synthesized Probe
  source 1..80: mol_type = other DNA
tttcctaaatgaagtaccccactggaagatgcacgtgctttataaatggaagcactgactcaagcacagaatgggacact

SEQ ID NO: 121062 - DNA, 80 bp, synthetic construct
  misc_feature 1..80: note = Artificially Synthesized Probe
  source 1..80: mol_type = other DNA
cgttctattttcttctctgctctccttgcaacatggcattcactgtggattaaaggggtagggggaggggggagggatag

SEQ ID NO: 121063 - DNA, 80 bp, synthetic construct; identical to SEQ ID NO: 39251
  misc_feature 1..80: note = Artificially Synthesized Probe
  source 1..80: mol_type = other DNA

SEQ ID NO: 121064 - DNA, 80 bp, synthetic construct
  misc_feature 1..80: note = Artificially Synthesized Probe
  source 1..80: mol_type = other DNA
tcattcacactcccccagaaataacagagctcaccagtttgtattgattttggcacatgccacttgttttaaaggccatg

SEQ ID NO: 121065 - DNA, 80 bp, synthetic construct
  misc_feature 1..80: note = Artificially Synthesized Probe
  source 1..80: mol_type = other DNA
tgtgagcactgctagaggctctcactcaatgacttaaagcttcagttccactggagggtgaggctcagaaacagcactca

SEQ ID NO: 121066 - DNA, 80 bp, synthetic construct
  misc_feature 1..80: note = Artificially Synthesized Probe
  source 1..80: mol_type = other DNA
agaactgccactctgggccctagtgcatgttttgctgtccccacactgaaagcccattcatcctattgtccctaggaaag

SEQ ID NO: 121067 - DNA, 80 bp, synthetic construct
  misc_feature 1..80: note = Artificially Synthesized Probe
  source 1..80: mol_type = other DNA
gcagactcactcggcagctcctggctggctcctccgggcagggttccaggaactgtctcgtgtccctggctccacagagg

SEQ ID NO: 121068 - DNA, 80 bp, synthetic construct; identical to SEQ ID NO: 39252
  misc_feature 1..80: note = Artificially Synthesized Probe
  source 1..80: mol_type = other DNA

SEQ ID NO: 121069 - DNA, 80 bp, synthetic construct
  misc_feature 1..80: note = Artificially Synthesized Probe
  source 1..80: mol_type = other DNA
aaacaggcagggaggcagggtccggccgggtgtagaaggcccctgatctcccaacacccttgccccagtgccgatggagg

SEQ ID NO: 121070 - DNA, 80 bp, synthetic construct
  misc_feature 1..80: note = Artificially Synthesized Probe
  source 1..80: mol_type = other DNA
atggttcccacgaacaccttcctccctcccaccctctattatccattttccatccatctgctcacctaatccatcttccc

SEQ ID NO: 121071 - DNA, 80 bp, synthetic construct
  misc_feature 1..80: note = Artificially Synthesized Probe
  source 1..80: mol_type = other DNA
ttcacaagtggtgtttgttcccgacaggtggaaccccgaggctcagatcttcagaccctcgcccaaaagtgtagagtgaa

SEQ ID NO: 121072 - DNA, 80 bp, synthetic construct
  misc_feature 1..80: note = Artificially Synthesized Probe
  source 1..80: mol_type = other DNA
ccagtaccaagcagttggtggcacacccaacgccagcctcccagggcttccatccagcaggtttcaaggcccaaggctgg

SEQ ID NO: 121073 - DNA, 80 bp, synthetic construct; identical to SEQ ID NO: 39253
  misc_feature 1..80: note = Artificially Synthesized Probe
  source 1..80: mol_type = other DNA

SEQ ID NO: 121074 - DNA, 80 bp, synthetic construct
  misc_feature 1..80: note = Artificially Synthesized Probe
  source 1..80: mol_type = other DNA
aaaaaaaaaaaaattatctgggtgtcatggtgggtaactgtaatcccagctactcaggaggctgaggcaggagaatttct

SEQ ID NO: 121075 - DNA, 80 bp, synthetic construct
  misc_feature 1..80: note = Artificially Synthesized Probe
  source 1..80: mol_type = other DNA
cccagccatgtggaactgtgagtctattaaacctgttttttattacaaattactcagtctccggtagttagcagcgtcgt

SEQ ID NO: 121076 - DNA, 80 bp, synthetic construct
  misc_feature 1..80: note = Artificially Synthesized Probe
  source 1..80: mol_type = other DNA
ccaaatctaacttcatgatggagccaaacggaattcacccatgcactatgcgaaccaacagaaagcccaaactactgaca

SEQ ID NO: 121077 - DNA, 80 bp, synthetic construct; identical to SEQ ID NO: 39254
  misc_feature 1..80: note = Artificially Synthesized Probe
  source 1..80: mol_type = other DNA

SEQ ID NO: 121078 - DNA, 80 bp, synthetic construct
  misc_feature 1..80: note = Artificially Synthesized Probe
  source 1..80: mol_type = other DNA
cttgatgccagggaggacaaaaataagacagaaaacctaccaaacaaacaactcaagagagtattttcaaaaagaaagag

SEQ ID NO: 121079 - DNA, 80 bp, synthetic construct
  misc_feature 1..80: note = Artificially Synthesized Probe
  source 1..80: mol_type = other DNA
caaacaaacaactcaagagagtattttcaaaaagaaagagtgcagggctatggaaacaaaaactcaaaggagcatgacta

SEQ ID NO: 121080 - DNA, 80 bp, synthetic construct
  misc_feature 1..80: note = Artificially Synthesized Probe
  source 1..80: mol_type = other DNA
tgcagggctatggaaacaaaaactcaaaggagcatgactacagtaaattagaaatcacaaaaattagaacgggtctaact

SEQ ID NO: 121081 - DNA, 80 bp, synthetic construct
  misc_feature 1..80: note = Artificially Synthesized Probe
  source 1..80: mol_type = other DNA
aaaaatacaaaaattagccaggcgtggtggcgcatgcctataatcccagctactcaggaggctgagggagaagaatcact

SEQ ID NO: 121082 - DNA, 80 bp, synthetic construct
  misc_feature 1..80: note = Artificially Synthesized Probe
  source 1..80: mol_type = other DNA
agataacagatatgaacaaggaaaatccagtataggaattattactatccctgaaataaaggatccaaccgataacacag

SEQ ID NO: 121083 - DNA, 80 bp, synthetic construct; identical to SEQ ID NO: 38698
  misc_feature 1..80: note = Artificially Synthesized Probe
  source 1..80: mol_type = other DNA

SEQ ID NO: 121084 - DNA, 80 bp, synthetic construct; identical to SEQ ID NO: 39255
  misc_feature 1..80: note = Artificially Synthesized Probe
  source 1..80: mol_type = other DNA

SEQ ID NO: 121085 - DNA, 80 bp, synthetic construct
  misc_feature 1..80: note = Artificially Synthesized Probe
  source 1..80: mol_type = other DNA
aggtcaggagttcaagaccaggctgggcaacatggtaaaaccccgtctctactaaaaatacaaaaaattagccgggcatg

SEQ ID NO: 121086 - DNA, 80 bp, synthetic construct
  misc_feature 1..80: note = Artificially Synthesized Probe
  source 1..80: mol_type = other DNA
aaaaacccacagaggaaaagagttttcaagctggagggaacaagctgacattttcaaaacacagccaatcctcactattc

SEQ ID NO: 121087 - DNA, 80 bp, synthetic construct
  misc_feature 1..80: note = Artificially Synthesized Probe
  source 1..80: mol_type = other DNA
atcttgtaaacaagcgtctgactgcagcccatggaatgtcattctcacattgcttgtgctttttgttggtgattttgcca

SEQ ID NO: 121088 - DNA, 80 bp, synthetic construct
  misc_feature 1..80: note = Artificially Synthesized Probe
  source 1..80: mol_type = other DNA
catagtaaatatggcatctttaaacagcaacatacataaagtaagattccgtattgacctatggtcaaacatgtgaccag

SEQ ID NO: 121089 - DNA, 80 bp, synthetic construct; identical to SEQ ID NO: 39256
  misc_feature 1..80: note = Artificially Synthesized Probe
  source 1..80: mol_type = other DNA

SEQ ID NO: 121090 - DNA, 80 bp, synthetic construct
  misc_feature 1..80: note = Artificially Synthesized Probe
  source 1..80: mol_type = other DNA
tgggagggacagtgacagtgtgaaacaagtcactgtccacacccaacaaggctcaggaggtgggggagggaaagtgtgcg

SEQ ID NO: 121091 - DNA, 80 bp, synthetic construct
  misc_feature 1..80: note = Artificially Synthesized Probe
  source 1..80: mol_type = other DNA
catgaaaccagggaaggtgatggatgcactttacaagttctgtctcttcctccctcatcttctgggcagatacagaggac

SEQ ID NO: 121092 - DNA, 80 bp, synthetic construct; identical to SEQ ID NO: 39257
  misc_feature 1..80: note = Artificially Synthesized Probe
  source 1..80: mol_type = other DNA

SEQ ID NO: 121093 - DNA, 80 bp, synthetic construct
  misc_feature 1..80: note = Artificially Synthesized Probe
  source 1..80: mol_type = other DNA
ttcaaataaaataacattgatgatgctcatttcttaagagcgtgtgtggtttgagcccacgcttaccaaggtatttctat

SEQ ID NO: 121094 - DNA, 80 bp, synthetic construct
  misc_feature 1..80: note = Artificially Synthesized Probe
  source 1..80: mol_type = other DNA
cattaaataatataggagaaggaactccaaaagaccacgcctatcctcctgaacagcctttgtactaccagggaagcccc

SEQ ID NO: 121095 - DNA, 80 bp, synthetic construct
  misc_feature 1..80: note = Artificially Synthesized Probe
  source 1..80: mol_type = other DNA
tctgctggtgcatctcatgtctgtcaggttgcctctgtgaggtcaagtgttgtgctagacgctggggaatgaataactcc

SEQ ID NO: 121096 - DNA, 80 bp, synthetic construct
  misc_feature 1..80: note = Artificially Synthesized Probe
  source 1..80: mol_type = other DNA
tacacataaaatacactaacactaaagagagataatgagctaaaaagaaaaaaaaagttgcataaaaacccctcagaatg

SEQ ID NO: 121097 - DNA, 80 bp, synthetic construct; identical to SEQ ID NO: 39258
  misc_feature 1..80: note = Artificially Synthesized Probe
  source 1..80: mol_type = other DNA

SEQ ID NO: 121098 - DNA, 80 bp, synthetic construct
  misc_feature 1..80: note = Artificially Synthesized Probe
  source 1..80: mol_type = other DNA
gctcctccacagcaccaggagctgggaccctggatgggcaccaagtgaggcaccagcaacactcagccagtaggcagcat

SEQ ID NO: 121099 - DNA, 80 bp, synthetic construct
  misc_feature 1..80: note = Artificially Synthesized Probe
  source 1..80: mol_type = other DNA
aacccaaagctaaaatgagaagggtcctcccagcccactgagggagacccttctagaaagcacagatggagactgtgacg

SEQ ID NO: 121100 - DNA, 80 bp, synthetic construct
  misc_feature 1..80: note = Artificially Synthesized Probe
  source 1..80: mol_type = other DNA
taggcgcctgtttgcaaccattatgtctgctccacgcttccagctctgtcccacatctccgatttgaggccacatgtggc

SEQ ID NO: 121101 - DNA, 80 bp, synthetic construct
  misc_feature 1..80: note = Artificially Synthesized Probe
  source 1..80: mol_type = other DNA
tcccctttacagacaagatgaagccacaccccttcctctgcacacgaagctcccctttacagacagccccagttcccagg

SEQ ID NO: 121102 - DNA, 80 bp, synthetic construct; identical to SEQ ID NO: 39259
  misc_feature 1..80: note = Artificially Synthesized Probe
  source 1..80: mol_type = other DNA

SEQ ID NO: 121103 - DNA, 80 bp, synthetic construct
  misc_feature 1..80: note = Artificially Synthesized Probe
  source 1..80: mol_type = other DNA
ggtgcccagtcaatgtttgtggatggagttggggacaatgacagcaacagcatgatgtgaggccagcggcagcagggagg

SEQ ID NO: 121104 - DNA, 80 bp, synthetic construct
  misc_feature 1..80: note = Artificially Synthesized Probe
  source 1..80: mol_type = other DNA
agggcagaccacggggctcaccgtctgctgcaggtcatggatgaccacgcggatcaccagcgtgttgccctggctctcct

SEQ ID NO: 121105 - DNA, 80 bp, synthetic construct; identical to SEQ ID NO: 39260
  misc_feature 1..80: note = Artificially Synthesized Probe
  source 1..80: mol_type = other DNA

SEQ ID NO: 121106 - DNA, 80 bp, synthetic construct
  misc_feature 1..80: note = Artificially Synthesized Probe
  source 1..80: mol_type = other DNA
gcccaggcacttgggaagcttgggagcctgagaagaaggtgtcagggcctggtaagctgtgggggaagcagtgactggcc

SEQ ID NO: 121107 - DNA, 80 bp, synthetic construct
  misc_feature 1..80: note = Artificially Synthesized Probe
  source 1..80: mol_type = other DNA
aggaaaaccctgcaaactctggtaccagcgctgtgaaaccccggcactcaaaaggagcctgagctagccacggggatgac

SEQ ID NO: 121108 - DNA, 80 bp, synthetic construct
  misc_feature 1..80: note = Artificially Synthesized Probe
  source 1..80: mol_type = other DNA
cttcaggtcagaatggcagcaagttcacgctataataaccctctctgcttcaaacacagagcaatgataggtaccgtgta

SEQ ID NO: 121109 - DNA, 80 bp, synthetic construct
  misc_feature 1..80: note = Artificially Synthesized Probe
  source 1..80: mol_type = other DNA
aataaaaattaccccacaaagagtcaggccaggttgccaatggccaccttagaccaaggcttcttgtttttttttttttt

SEQ ID NO: 121110 - DNA, 80 bp, synthetic construct
  misc_feature 1..80: note = Artificially Synthesized Probe
  source 1..80: mol_type = other DNA
tctttagtagagacagggtttctccatgttggtcaggctggtctcaaactcccaacctcaggtgatccacccgccttggc

SEQ ID NO: 121111 - DNA, 80 bp, synthetic construct; identical to SEQ ID NO: 39261
  misc_feature 1..80: note = Artificially Synthesized Probe
  source 1..80: mol_type = other DNA

SEQ ID NO: 121112 - DNA, 80 bp, synthetic construct
  misc_feature 1..80: note = Artificially Synthesized Probe
  source 1..80: mol_type = other DNA
atgaacccaagctacatgtggatgatccctgaaacataacactgtgcaaaaggaaggcaattcacggaaggattcaaacc

SEQ ID NO: 121113 - DNA, 80 bp, synthetic construct
  misc_feature 1..80: note = Artificially Synthesized Probe
  source 1..80: mol_type = other DNA
actgtgcaaaaggaaggcaattcacggaaggattcaaaccacatactatcatttccagataaaggctggaaagatgccac

SEQ ID NO: 121114 - DNA, 80 bp, synthetic construct
  misc_feature 1..80: note = Artificially Synthesized Probe
  source 1..80: mol_type = other DNA
agcaactacaggacaaggtcaaacttggtacagttggggacacagatgtttgccgtattattctctttgttagaaatcat

SEQ ID NO: 121115 - DNA, 80 bp, synthetic construct; identical to SEQ ID NO: 39262
  misc_feature 1..80: note = Artificially Synthesized Probe
  source 1..80: mol_type = other DNA

SEQ ID NO: 121116 - DNA, 80 bp, synthetic construct
  misc_feature 1..80: note = Artificially Synthesized Probe
  source 1..80: mol_type = other DNA
taggcactttttcagacactcttcactgacgggtgctctatgtgttcacaaaccatttttctcttgcgactgtcttatgt

SEQ ID NO: 121117 - DNA, 80 bp, synthetic construct
  misc_feature 1..80: note = Artificially Synthesized Probe
  source 1..80: mol_type = other DNA
aaggaagggaggaggggagggaaggaggtagatggatggatggatgaatggatggatggctaactgtgcataggtgagag

SEQ ID NO: 121118 - DNA, 80 bp, synthetic construct
  misc_feature 1..80: note = Artificially Synthesized Probe
  source 1..80: mol_type = other DNA
cctgcacccccaggccccagccaccgacagcaccatgcctgccccctgggggccctcaccctgggctgaagcccacccag

SEQ ID NO: 121119 - DNA, 80 bp, synthetic construct
  misc_feature 1..80: note = Artificially Synthesized Probe
  source 1..80: mol_type = other DNA
ggagagggagaggaatggagaggaagggagaggaagggagggagggagaggaaaggagggagggagaggaaaggagggag

SEQ ID NO: 121120 - DNA, 80 bp, synthetic construct; identical to SEQ ID NO: 39263
  misc_feature 1..80: note = Artificially Synthesized Probe
  source 1..80: mol_type = other DNA

SEQ ID NO: 121121 - DNA, 80 bp, synthetic construct
  misc_feature 1..80: note = Artificially Synthesized Probe
  source 1..80: mol_type = other DNA
aagacttcctaatgcaggacctaagtctgctgccaattattcacattagtggaatgtcagggtaacaatgacattgataa

SEQ ID NO: 121122 - DNA, 80 bp, synthetic construct
  misc_feature 1..80: note = Artificially Synthesized Probe
  source 1..80: mol_type = other DNA
tgttctttctttgtaagaaaggcgccatgccatggtccacagttttcggagcaccctgtgtccaaccacctaacacaatc

SEQ ID NO: 121123 - DNA, 80 bp, synthetic construct
  misc_feature 1..80: note = Artificially Synthesized Probe
  source 1..80: mol_type = other DNA
cctgtttcttaccctcgagttcctaaaatgagaatgggctttataagaatcctgaacttaggagttttcacacaacatct

SEQ ID NO: 121124 - DNA, 80 bp, synthetic construct
  misc_feature 1..80: note = Artificially Synthesized Probe
  source 1..80: mol_type = other DNA
ttataagaatcctgaacttaggagttttcacacaacatctggatttcagtcatctctagaaaaatcacaggctcccgcct

SEQ ID NO: 121125 - DNA, 80 bp, synthetic construct
  misc_feature 1..80: note = Artificially Synthesized Probe
  source 1..80: mol_type = other DNA
tgcactcagctcacccgccccatcagccctgggccctggcagcagaattgtggaccctgtgctagtgttttataactggg

SEQ ID NO: 121126 - DNA, 80 bp, synthetic construct; identical to SEQ ID NO: 39264
  misc_feature 1..80: note = Artificially Synthesized Probe
  source 1..80: mol_type = other DNA

SEQ ID NO: 121127 - DNA, 80 bp, synthetic construct
  misc_feature 1..80: note = Artificially Synthesized Probe
  source 1..80: mol_type = other DNA
ttcttaagtggagccaaagctactcagagctcatgtcactcattaatgcagaaagaagcctagtgtggtagcgaggccag

SEQ ID NO: 121128 - DNA, 80 bp, synthetic construct
  misc_feature 1..80: note = Artificially Synthesized Probe
  source 1..80: mol_type = other DNA
gcaagagcaggcagagaccgtccaggctccaagctgcttccaggggtgcatgtgtaggaagccccccctcagtggacagt

SEQ ID NO: 121129 - DNA, 80 bp, synthetic construct
  misc_feature 1..80: note = Artificially Synthesized Probe
  source 1..80: mol_type = other DNA
gaacgcaggtctggtgttgccaggcctgcagatatcttttagatatgtcagatttgacaaaaaaaacgtgaaatttataa

SEQ ID NO: 121130 - DNA, 80 bp, synthetic construct; identical to SEQ ID NO: 39265
  misc_feature 1..80: note = Artificially Synthesized Probe
  source 1..80: mol_type = other DNA

SEQ ID NO: 121131 - DNA, 80 bp, synthetic construct; identical to SEQ ID NO: 38699
  misc_feature 1..80: note = Artificially Synthesized Probe
  source 1..80: mol_type = other DNA

SEQ ID NO: 121132 - DNA, 80 bp, synthetic construct
  misc_feature 1..80: note = Artificially Synthesized Probe
  source 1..80: mol_type = other DNA
ttcactgtttttaacggattactttgcaggccacatagtacacatctacagctggacctgagtccaggaacaaaaccaac

SEQ ID NO: 121133 - DNA, 80 bp, synthetic construct
  misc_feature 1..80: note = Artificially Synthesized Probe
  source 1..80: mol_type = other DNA
ggtcacaaacaggcacatctgctcccaaaccatggtgcagaagggctccagtgctgggtctgaagaggaaccgggatttc

SEQ ID NO: 121134 - DNA, 80 bp, synthetic construct; identical to SEQ ID NO: 39266
  misc_feature 1..80: note = Artificially Synthesized Probe
  source 1..80: mol_type = other DNA

SEQ ID NO: 121135 - DNA, 80 bp, synthetic construct
  misc_feature 1..80: note = Artificially Synthesized Probe
  source 1..80: mol_type = other DNA
catgtcccaaataattgcgtgggacattcttatactaaaaaactctctgctgttcatctgaaattcaggcagaactggat

SEQ ID NO: 121136 - DNA, 80 bp, synthetic construct
  misc_feature 1..80: note = Artificially Synthesized Probe
  source 1..80: mol_type = other DNA
cgcaatctgaaatcctggcttccccaggaaaagccagtgccagatcagaggaggggaaggttactcaccaccccggggca

SEQ ID NO: 121137 - DNA, 80 bp, synthetic construct
  misc_feature 1..80: note = Artificially Synthesized Probe
  source 1..80: mol_type = other DNA
tagctactaacgaggagaaaagaaaatcatcacagtcaaagcaagttcaacaaaaacagcattttgctgctaacttgctc

SEQ ID NO: 121138 - DNA, 80 bp, synthetic construct
  misc_feature 1..80: note = Artificially Synthesized Probe
  source 1..80: mol_type = other DNA
gcaagttcaacaaaaacagcattttgctgctaacttgctccaagaaaacctaaaatcttcaactggctcattcgtcctcc

SEQ ID NO: 121139 - DNA, 80 bp, synthetic construct
  misc_feature 1..80: note = Artificially Synthesized Probe
  source 1..80: mol_type = other DNA
caagaaaacctaaaatcttcaactggctcattcgtcctccagtacctctgatgaaaaggtagacagacttttccactaat

SEQ ID NO: 121140 - DNA, 80 bp, synthetic construct
  misc_feature 1..80: note = Artificially Synthesized Probe
  source 1..80: mol_type = other DNA
agtacctctgatgaaaaggtagacagacttttccactaattatttcagccactgtgaaaatatgaaagctgacctgggag

SEQ ID NO: 121141 - DNA, 80 bp, synthetic construct
  misc_feature 1..80: note = Artificially Synthesized Probe
  source 1..80: mol_type = other DNA
tatttcagccactgtgaaaatatgaaagctgacctgggagagaagatacataataaaaacaaacaaaaaacctcacggcc

SEQ ID NO: 121142 - DNA, 80 bp, synthetic construct
  misc_feature 1..80: note = Artificially Synthesized Probe
  source 1..80: mol_type = other DNA
agaagatacataataaaaacaaacaaaaaacctcacggccagcgctgactttgtcaaggttagagttgcaaaacctttgt

SEQ ID NO: 121143 - DNA, 80 bp, synthetic construct; identical to SEQ ID NO: 39267
  misc_feature 1..80: note = Artificially Synthesized Probe
  source 1..80: mol_type = other DNA

SEQ ID NO: 121144 - DNA, 80 bp, synthetic construct
  misc_feature 1..80: note = Artificially Synthesized Probe
  source 1..80: mol_type = other DNA
attgatatggaatctctgagagacaccctgtatgtgaatcacatggaaaccgagattttgtgactacacatttcatttat

SEQ ID NO: 121145 - DNA, 80 bp, synthetic construct
  misc_feature 1..80: note = Artificially Synthesized Probe
  source 1..80: mol_type = other DNA
tccattggaacctgtggaactagaacagaatattcaaggaatccaggttccatcggatgttagaaaattgccgttctaag

SEQ ID NO: 121146 - DNA, 80 bp, synthetic construct
  misc_feature 1..80: note = Artificially Synthesized Probe
  source 1..80: mol_type = other DNA
agaggcagaatggccggccgatcctgaggctgtgtctgcacccacatggctgcggtgggcacagggcccactcccaggga

SEQ ID NO: 121147 - DNA, 80 bp, synthetic construct
  misc_feature 1..80: note = Artificially Synthesized Probe
  source 1..80: mol_type = other DNA
agagaaaggcacgctggcttccttctgttcatttaacccactgttctcctccctgcacctgcaaaacacatcagctgaga

SEQ ID NO: 121148 - DNA, 80 bp, synthetic construct
  misc_feature 1..80: note = Artificially Synthesized Probe
  source 1..80: mol_type = other DNA
ccacgctcccagagggatggacctaccccagcccacgctcccagaggagggatggacctacccccacccacgctcccaga

SEQ ID NO: 121149 - DNA, 80 bp, synthetic construct
  misc_feature 1..80: note = Artificially Synthesized Probe
  source 1..80: mol_type = other DNA
cacactcccagagggatggacctacccccgcccacgctcccagaggagggatggacctacccccgcccacgctcccagaa

SEQ ID NO: 121150 - DNA, 80 bp, synthetic construct
  misc_feature 1..80: note = Artificially Synthesized Probe
  source 1..80: mol_type = other DNA
acgctcccggaggaggagtggacctaccccagcccaagctcccagaggggtggacctaccccagcccaagctcccagagg

SEQ ID NO: 121151 - DNA, 80 bp, synthetic construct; identical to SEQ ID NO: 39268
  misc_feature 1..80: note = Artificially Synthesized Probe
  source 1..80: mol_type = other DNA

SEQ ID NO: 121152 - DNA, 80 bp, synthetic construct
  misc_feature 1..80: note = Artificially Synthesized Probe
  source 1..80: mol_type = other DNA
ctgaggatcccaccacaccaatgccgggattcagtctagcaccacctcttccagcagtcttgcctagaagctgtccccca

SEQ ID NO: 121153 - DNA, 80 bp, synthetic construct
  misc_feature 1..80: note = Artificially Synthesized Probe
  source 1..80: mol_type = other DNA
tagacacactgtgagctgaactgtgtcccctgctcaaatccgtatgtggaagtccgaatccccggggcctggaaaagtga

SEQ ID NO: 121154 - DNA, 80 bp, synthetic construct; identical to SEQ ID NO: 39269
  misc_feature 1..80: note = Artificially Synthesized Probe
  source 1..80: mol_type = other DNA

SEQ ID NO: 121155 - DNA, 80 bp, synthetic construct
  misc_feature 1..80: note = Artificially Synthesized Probe
  source 1..80: mol_type = other DNA
gtgaaacagatgcatggaacaaacagatttctgaaaagaacctccatctatccaggtttcctgggatttccctaatcacc

SEQ ID NO: 121156 - DNA, 80 bp, synthetic construct
  misc_feature 1..80: note = Artificially Synthesized Probe
  source 1..80: mol_type = other DNA
ccccgttcagccaaatccttccctttcagactcgctctaccccaggtcagaaccaactgcctatggtacacaagctcccc

SEQ ID NO: 121157 - DNA, 80 bp, synthetic construct
  misc_feature 1..80: note = Artificially Synthesized Probe
  source 1..80: mol_type = other DNA
ctgcttctttcactcagtgtcaccccttccatgctcacccacaaggtggcatgtctcatcactttcttcctttttatggc

SEQ ID NO: 121158 - DNA, 80 bp, synthetic construct; identical to SEQ ID NO: 39270
  misc_feature 1..80: note = Artificially Synthesized Probe
  source 1..80: mol_type = other DNA

SEQ ID NO: 121159 - DNA, 80 bp, synthetic construct
  misc_feature 1..80: note = Artificially Synthesized Probe
  source 1..80: mol_type = other DNA
aagatcttagaagcaaaagccaatcacatacctacaatgcatggcccactgaggccagcaccctgccaagtattatcgcc

SEQ ID NO: 121160 - DNA, 80 bp, synthetic construct
  misc_feature 1..80: note = Artificially Synthesized Probe
  source 1..80: mol_type = other DNA
catatatataaagacactgacagcaggaactctgcaatggttctctatctaaaagaaatgggctctagggaaataacggc

SEQ ID NO: 121161 - DNA, 80 bp, synthetic construct
  misc_feature 1..80: note = Artificially Synthesized Probe
  source 1..80: mol_type = other DNA
ttctctatctaaaagaaatgggctctagggaaataacggctacttcacaccttcctcttaatgccaaaaccaatatcccc

SEQ ID NO: 121162 - DNA, 80 bp, synthetic construct
  misc_feature 1..80: note = Artificially Synthesized Probe
  source 1..80: mol_type = other DNA
gtccaggtcttgagaaggactggtgagatggtacattcattaggtaagtctatttctcttccatgcctcagcattcatgt

SEQ ID NO: 121163 - DNA, 80 bp, synthetic construct; identical to SEQ ID NO: 39271
  misc_feature 1..80: note = Artificially Synthesized Probe
  source 1..80: mol_type = other DNA

SEQ ID NO: 121164 - DNA, 80 bp, synthetic construct
  misc_feature 1..80: note = Artificially Synthesized Probe
  source 1..80: mol_type = other DNA
ggagcgacttgcccaaggtaaaaggcttcctgggagacaacctacagagaaggaaaccaatcaagacaacaggtcaacaa

SEQ ID NO: 121165 - DNA, 80 bp, synthetic construct
  misc_feature 1..80: note = Artificially Synthesized Probe
  source 1..80: mol_type = other DNA
gtcatgaccaaagtcttggaaaactgggaatagaagagaatttcccaaactcgaacagagcacctactcaaatcctgtag

SEQ ID NO: 121166 - DNA, 80 bp, synthetic construct
  misc_feature 1..80: note = Artificially Synthesized Probe
  source 1..80: mol_type = other DNA
tttcccaaactcgaacagagcacctactcaaatcctgtagcaaacatcaaaaataagtaagcgaacagataaccgaatgc

SEQ ID NO: 121167 - DNA, 80 bp, synthetic construct
  misc_feature 1..80: note = Artificially Synthesized Probe
  source 1..80: mol_type = other DNA
caaacatcaaaaataagtaagcgaacagataaccgaatgcattgtttatggactaaaagcagggaaatcattattttcag

SEQ ID NO: 121168 - DNA, 80 bp, synthetic construct
  misc_feature 1..80: note = Artificially Synthesized Probe
  source 1..80: mol_type = other DNA
tcaaaaaacactataataccaccaacaataaccaaagtcaactaaaaaaaaatctaacacaatatgtatgagacctttgt

SEQ ID NO: 121169 - DNA, 80 bp, synthetic construct
  misc_feature 1..80: note = Artificially Synthesized Probe
  source 1..80: mol_type = other DNA
taaaaccctgataggactgttggtagaacttaacactctgatcttaaagctcaaagaagatggagagccacataaaacca

SEQ ID NO: 121170 - DNA, 80 bp, synthetic construct
  misc_feature 1..80: note = Artificially Synthesized Probe
  source 1..80: mol_type = other DNA
atcttaaagctcaaagaagatggagagccacataaaaccaagataactctggagactaagaggagactcattctaccaga

SEQ ID NO: 121171 - DNA, 80 bp, synthetic construct; identical to SEQ ID NO: 38700
  misc_feature 1..80: note = Artificially Synthesized Probe
  source 1..80: mol_type = other DNA

SEQ ID NO: 121172 - DNA, 80 bp, synthetic construct; identical to SEQ ID NO: 39272
  misc_feature 1..80: note = Artificially Synthesized Probe
  source 1..80: mol_type = other DNA

SEQ ID NO: 121173 - DNA, 80 bp, synthetic construct
  misc_feature 1..80: note = Artificially Synthesized Probe
  source 1..80: mol_type = other DNA
ctaagacgggattctggcttctcaataaatgctgctttattgctgtgtaagaagatagcacagacttagtgggttagagc

SEQ ID NO: 121174 - DNA, 80 bp, synthetic construct
  misc_feature 1..80: note = Artificially Synthesized Probe
  source 1..80: mol_type = other DNA
tgctgtgtaagaagatagcacagacttagtgggttagagcaacagaaatgtgcagcaatgtactctcatcacgctgaggt

SEQ ID NO: 121175 - DNA, 80 bp, synthetic construct
  misc_feature 1..80: note = Artificially Synthesized Probe
  source 1..80: mol_type = other DNA
tcactcctatctcagcttccaccttcacatcaccatctcctcttctgcagccaaatctccctcttaaaaataatgaccct

SEQ ID NO: 121176 - DNA, 80 bp, synthetic construct
  misc_feature 1..80: note = Artificially Synthesized Probe
  source 1..80: mol_type = other DNA
gccagccacaaatatgttcaattgttatttgctcaataaaacaaggcgagaaaaaaagtgtttctttctacaaggcatcg

SEQ ID NO: 121177 - DNA, 80 bp, synthetic construct; identical to SEQ ID NO: 39273
  misc_feature 1..80: note = Artificially Synthesized Probe
  source 1..80: mol_type = other DNA

SEQ ID NO: 121178 - DNA, 80 bp, synthetic construct
  misc_feature 1..80: note = Artificially Synthesized Probe
  source 1..80: mol_type = other DNA
ttcgagaccagcctggccaacatggcaaaaccctgtctctactgaaaatacaaaaaaattagctgggcatggtggtggca

SEQ ID NO: 121179 - DNA, 80 bp, synthetic construct
  misc_feature 1..80: note = Artificially Synthesized Probe
  source 1..80: mol_type = other DNA
aaaaaaaaaaaagacacctgaaagggacctttacaacataggacagagcgctgtggaaaatctgggaagaattcctacag

SEQ ID NO: 121180 - DNA, 80 bp, synthetic construct
  misc_feature 1..80: note = Artificially Synthesized Probe
  source 1..80: mol_type = other DNA
ggacagagcgctgtggaaaatctgggaagaattcctacagggcaaaaaagaaacaattccagatgcaaatgggtacagtc

SEQ ID NO: 121181 - DNA, 80 bp, synthetic construct
  misc_feature 1..80: note = Artificially Synthesized Probe
  source 1..80: mol_type = other DNA
tccccccttaaagcagccctcaaattctcactgctacgaactgaactgtctccctctaaaattcatatgctaaggcccta

SEQ ID NO: 121182 - DNA, 80 bp, synthetic construct
  misc_feature 1..80: note = Artificially Synthesized Probe
  source 1..80: mol_type = other DNA
cccataggactagcatccctataaagaaaggaagaaacatcagagagccagcatgcgtgttcacgtgtggtcatgcattc

SEQ ID NO: 121183 - DNA, 80 bp, synthetic construct
  misc_feature 1..80: note = Artificially Synthesized Probe
  source 1..80: mol_type = other DNA
ctattctgttatagcctgagctgcccaagacacccaccttctacaacatcatgtgtaaaacataacagagttgatgggga

SEQ ID NO: 121184 - DNA, 80 bp, synthetic construct
  misc_feature 1..80: note = Artificially Synthesized Probe
  source 1..80: mol_type = other DNA
cctgagcgcccccctctcagagtcccctgcaggggtgtccccaacagcccctccagaatttaggcctgagaagcggagga

SEQ ID NO: 121185 - DNA, 80 bp, synthetic construct; identical to SEQ ID NO: 39274
  misc_feature 1..80: note = Artificially Synthesized Probe
  source 1..80: mol_type = other DNA

SEQ ID NO: 121186 - DNA, 80 bp, synthetic construct
  misc_feature 1..80: note = Artificially Synthesized Probe
  source 1..80: mol_type = other DNA
tgtctgtctccaaagaagatggcttccaatagaaaccagttgcctcaaaactgaaaactaagtttgcagacagccttctt

SEQ ID NO: 121187 - DNA, 80 bp, synthetic construct
  misc_feature 1..80: note = Artificially Synthesized Probe
  source 1..80: mol_type = other DNA
cctccctttggaattcaggcacaactgaccagcattaacattaaaacaagagatctcaagatggacaaaatggactcttt

SEQ ID NO: 121188 - DNA, 80 bp, synthetic construct
  misc_feature 1..80: note = Artificially Synthesized Probe
  source 1..80: mol_type = other DNA
tctatagagaatccccttccctttccaagtctcttcctgatccaggagagattaactaagagcctggcatctttttagat

SEQ ID NO: 121189 - DNA, 80 bp, synthetic construct
  misc_feature 1..80: note = Artificially Synthesized Probe
  source 1..80: mol_type = other DNA
tccaggtctttacataataacaactctttcaaccaattgccaatcagaaaatctctgaatctacctatgacctggaaacc

SEQ ID NO: 121190 - DNA, 80 bp, synthetic construct; identical to SEQ ID NO: 39275
  misc_feature 1..80: note = Artificially Synthesized Probe
  source 1..80: mol_type = other DNA

SEQ ID NO: 121191 - DNA, 80 bp, synthetic construct
  misc_feature 1..80: note = Artificially Synthesized Probe
  source 1..80: mol_type = other DNA
actgaatgagacacccctgtagcattttctgctttttgttctggagcatcacatgatctcaatggacacttggtgaatta

SEQ ID NO: 121192 - DNA, 80 bp, synthetic construct
  misc_feature 1..80: note = Artificially Synthesized Probe
  source 1..80: mol_type = other DNA
ctggagcatcacatgatctcaatggacacttggtgaattaaccaatgaactggaaacagcttaaatgccactgtcttatt

SEQ ID NO: 121193 - DNA, 80 bp, synthetic construct
  misc_feature 1..80: note = Artificially Synthesized Probe
  source 1..80: mol_type = other DNA
ccttcttgctgcatcatgatgtggcaaagggcatcacatggtgagagggtgagatcatgcatgtagctctggtctctctt

SEQ ID NO: 121194 - DNA, 80 bp, synthetic construct; identical to SEQ ID NO: 39276
  misc_feature 1..80: note = Artificially Synthesized Probe
  source 1..80: mol_type = other DNA

SEQ ID NO: 121195 - DNA, 80 bp, synthetic construct
  misc_feature 1..80: note = Artificially Synthesized Probe
  source 1..80: mol_type = other DNA
ttgcaaatgtaattatgtttctcaacagaatatgacccgggatttatggtggtttaaaatccaatgacacgtgttctcgt

SEQ ID NO: 121196 - DNA, 80 bp, synthetic construct
  misc_feature 1..80: note = Artificially Synthesized Probe
  source 1..80: mol_type = other DNA
tatagcccaacttcaaaacagtgattactgcttcaaaacagggaaaactgatgagaacaagtggcagttatctcaaaata

SEQ ID NO: 121197 - DNA, 80 bp, synthetic construct
  misc_feature 1..80: note = Artificially Synthesized Probe
  source 1..80: mol_type = other DNA
cgtctctactaaaaatacaaaaaaattagccaggtgtggtggcggacgcctgtagtcccagccactcgggaggctgaggc

SEQ ID NO: 121198 - DNA, 80 bp, synthetic construct
  misc_feature 1..80: note = Artificially Synthesized Probe
  source 1..80: mol_type = other DNA
ggcaaaatcttaaaatgtttaatactgatggtgggtatagagtcattattgtgtttgtctacttttctgtgtttataatg

SEQ ID NO: 121199 - DNA, 80 bp, synthetic construct
  misc_feature 1..80: note = Artificially Synthesized Probe
  source 1..80: mol_type = other DNA
gcctgtaatggtctttccagtgcaagcccttgataaatcaaatctattcattttggaagctggacagatgtgcttgtggg

SEQ ID NO: 121200 - DNA, 80 bp, synthetic construct; identical to SEQ ID NO: 39277
  misc_feature 1..80: note = Artificially Synthesized Probe
  source 1..80: mol_type = other DNA

SEQ ID NO: 121201 - DNA, 80 bp, synthetic construct
  misc_feature 1..80: note = Artificially Synthesized Probe
  source 1..80: mol_type = other DNA
ggtccatcacagccagaaagagaggcagctcacactcaatccaaattcaagattctccagacgattttcaaaagatagtt

SEQ ID NO: 121202 - DNA, 80 bp, synthetic construct
  misc_feature 1..80: note = Artificially Synthesized Probe
  source 1..80: mol_type = other DNA
caacagggaggctggaggaagacagaaggaagaatgcaaaatatctatacatgcgtgctttttattgtgcacttctaaat

SEQ ID NO: 121203 - DNA, 80 bp, synthetic construct
  misc_feature 1..80: note = Artificially Synthesized Probe
  source 1..80: mol_type = other DNA
ctgtcagatgccagcttgggtgcacttttctcctgtctccacatcttcccacatgaagtgggctcctctccctcctatgt

SEQ ID NO: 121204 - DNA, 80 bp, synthetic construct
  misc_feature 1..80: note = Artificially Synthesized Probe
  source 1..80: mol_type = other DNA
acttaggatctaaaaggaaatgtaaaatcaaaatacaaccctcccagatgccagtggtctccaaattttcaggtaccctg

SEQ ID NO: 121205 - DNA, 80 bp, synthetic construct; identical to SEQ ID NO: 39278
  misc_feature 1..80: note = Artificially Synthesized Probe
  source 1..80: mol_type = other DNA

SEQ ID NO: 121206 - DNA, 80 bp, synthetic construct
  misc_feature 1..80: note = Artificially Synthesized Probe
  source 1..80: mol_type = other DNA
aagacacctccaattcacaatggggcctcatgacagctgccgcaccttctaaactatgggttaccagaaactaagttaaa

SEQ ID NO: 121207 - DNA, 80 bp, synthetic construct
  misc_feature 1..80: note = Artificially Synthesized Probe
  source 1..80: mol_type = other DNA
atagatgttcttgtacactaaacagatttcaaatcaagggtaagaactctcgacagctttctgtgccatacccaattcca

SEQ ID NO: 121208 - DNA, 80 bp, synthetic construct
  misc_feature 1..80: note = Artificially Synthesized Probe
  source 1..80: mol_type = other DNA
atttaagctggaggtgggttcctttaattcctattattccaatgtttgtgggaacccagctgtcctttgcaatccttaac

SEQ ID NO: 121209 - DNA, 80 bp, synthetic construct
  misc_feature 1..80: note = Artificially Synthesized Probe
  source 1..80: mol_type = other DNA
cacctggctgcagccctgtgaggctgctgtctgacttctggctcccaggactgtaggggaacacattccccttgcttgaa

SEQ ID NO: 121210 - DNA, 80 bp, synthetic construct
  misc_feature 1..80: note = Artificially Synthesized Probe
  source 1..80: mol_type = other DNA
ttctcttgtctcagcctcccaagaagctgggattacaggcatgtgccaccacacccagctaattttgtatttttagtaga

SEQ ID NO: 121211 - DNA, 80 bp, synthetic construct; identical to SEQ ID NO: 39279
  misc_feature 1..80: note = Artificially Synthesized Probe
  source 1..80: mol_type = other DNA

SEQ ID NO: 121212 - DNA, 80 bp, synthetic construct
  misc_feature 1..80: note = Artificially Synthesized Probe
  source 1..80: mol_type = other DNA
tgcgaagcctggtcaaaccctacagcgagatcattcatcccagaaatcttcctcctgggaacttctcagcccttgagatt

SEQ ID NO: 121213 - DNA, 80 bp, synthetic construct
  misc_feature 1..80: note = Artificially Synthesized Probe
  source 1..80: mol_type = other DNA
ccctcctggaacgcttcccggctgatctcacagtccagccccaccaactcctcaggacccagtgtagaccatgtccgggg

SEQ ID NO: 121214 - DNA, 80 bp, synthetic construct
  misc_feature 1..80: note = Artificially Synthesized Probe
  source 1..80: mol_type = other DNA
tgctcgcctggtgtcagcccttcccttgaaggaggctcctggcaaaaaggcagggatgacaggacagactgggggttcca

SEQ ID NO: 121215 - DNA, 80 bp, synthetic construct; identical to SEQ ID NO: 39280
  misc_feature 1..80: note = Artificially Synthesized Probe
  source 1..80: mol_type = other DNA

SEQ ID NO: 121216 - DNA, 80 bp, synthetic construct
  misc_feature 1..80: note = Artificially Synthesized Probe
  source 1..80: mol_type = other DNA
ggcatgatctcggctcattgcaacctccacctcccaaggttcaaacgattctcctgcctcagcctcccgagtagctggga

SEQ ID NO: 121217 - DNA, 80 bp, synthetic construct
  misc_feature 1..80: note = Artificially Synthesized Probe
  source 1..80: mol_type = other DNA
ggcccacacttcttttttttttttttttaattgatcattcttgggtgtttctcgcagagggggatttggcagggtcacag

SEQ ID NO: 121218 - DNA, 80 bp, synthetic construct; identical to SEQ ID NO: 39281
  misc_feature 1..80: note = Artificially Synthesized Probe
  source 1..80: mol_type = other DNA

SEQ ID NO: 121219 - DNA, 80 bp, synthetic construct
  misc_feature 1..80: note = Artificially Synthesized Probe
  source 1..80: mol_type = other DNA
ggggaccctcgacattctgctggcaacagggaccgtgtgtgcggggccaggcctggtgtagccgacgtcaaccctgcagc

SEQ ID NO: 121220 - DNA, 80 bp, synthetic construct
  misc_feature 1..80: note = Artificially Synthesized Probe
  source 1..80: mol_type = other DNA
ctcaatcttttccccacctttcccccctttctattctacaaaaccaccattgtcatcatggcccattctcaatgagctgt

SEQ ID NO: 121221 - DNA, 80 bp, synthetic construct
  misc_feature 1..80: note = Artificially Synthesized Probe
  source 1..80: mol_type = other DNA
gaggggctcctcacttcccagtaggggcggccgggcagaggcgcccctcacctcccagacagggcggctggccgggcggg

SEQ ID NO: 121222 - DNA, 80 bp, synthetic construct
  misc_feature 1..80: note = Artificially Synthesized Probe
  source 1..80: mol_type = other DNA
cggctggccgggcagaggggctcctcacttcccagtaggggcggccgggcagaggcgtccctcacctcccggacggggcg

SEQ ID NO: 121223 - DNA, 80 bp, synthetic construct
  misc_feature 1..80: note = Artificially Synthesized Probe
  source 1..80: mol_type = other DNA
cctgccggacgaggtggctgccgggcagagaagctcctcacttcccagacggggtggctgctgggcggaggggctcctca

SEQ ID NO: 121224 - DNA, 80 bp, synthetic construct; identical to SEQ ID NO: 39282
  misc_feature 1..80: note = Artificially Synthesized Probe
  source 1..80: mol_type = other DNA

SEQ ID NO: 121225 - DNA, 80 bp, synthetic construct
  misc_feature 1..80: note = Artificially Synthesized Probe
  source 1..80: mol_type = other DNA
gggtggcggccgggcagaggctgcaatctcggcaccttgggaggccaaggcaggctgctgggaggtgaaggttgtagcga

SEQ ID NO: 121226 - DNA, 80 bp, synthetic construct
  misc_feature 1..80: note = Artificially Synthesized Probe
  source 1..80: mol_type = other DNA
ccaaaaaaatacgaaaaccagtcaggcgtggcggcgcgcgcctgcaatcacaggcagtcagcaggctgaggcaggagaat

SEQ ID NO: 121227 - DNA, 80 bp, synthetic construct; identical to SEQ ID NO: 39283
  misc_feature 1..80: note = Artificially Synthesized Probe
  source 1..80: mol_type = other DNA

SEQ ID NO: 121228 - DNA, 80 bp, synthetic construct
  misc_feature 1..80: note = Artificially Synthesized Probe
  source 1..80: mol_type = other DNA
actgataaaaggtcaactgaggcagaataagatgcataaagagttagtttgagcaaacagtgatttatgaaatcaggaag

SEQ ID NO: 121229 - DNA, 80 bp, synthetic construct; identical to SEQ ID NO: 38701
  misc_feature 1..80: note = Artificially Synthesized Probe
  source 1..80: mol_type = other DNA

SEQ ID NO: 121230 - DNA, 80 bp, synthetic construct
  misc_feature 1..80: note = Artificially Synthesized Probe
  source 1..80: mol_type = other DNA
caaaggagacacttggttggttacaatgatgtggtcgccgtactggcttatcccattggaaagtccctagttgaagttaa

SEQ ID NO: 121231 - DNA, 80 bp, synthetic construct
  misc_feature 1..80: note = Artificially Synthesized Probe
  source 1..80: mol_type = other DNA
atgaagtctgactggctttgcttaggattctttaggcctgttttcctttttaatttaacaatataaaacaattcatgtga

SEQ ID NO: 121232 - DNA, 80 bp, synthetic construct
  misc_feature 1..80: note = Artificially Synthesized Probe
  source 1..80: mol_type = other DNA
tcaggagttcaagatcagcctggccaacatggtgaaaccccatgtctactaaaaatataaaaattagccaggtgttgggg

SEQ ID NO: 121233 - DNA, 80 bp, synthetic construct; identical to SEQ ID NO: 39284
  misc_feature 1..80: note = Artificially Synthesized Probe
  source 1..80: mol_type = other DNA

SEQ ID NO: 121234 - DNA, 80 bp, synthetic construct
  misc_feature 1..80: note = Artificially Synthesized Probe
  source 1..80: mol_type = other DNA
ttaaaaaaagatacaatattcattaattttaacttgtattttgcctttgagcagttaatttggaatattttagcagatat

SEQ ID NO: 121235 - DNA, 80 bp, synthetic construct
  misc_feature 1..80: note = Artificially Synthesized Probe
  source 1..80: mol_type = other DNA
tctcaatggaacacagattgtgcaaaatgctagactagaacaacgtagtggtaattttgctgaacagactagcaggacaa

SEQ ID NO: 121236 - DNA, 80 bp, synthetic construct
  misc_feature 1..80: note = Artificially Synthesized Probe
  source 1..80: mol_type = other DNA
gtgtatcaccagctttcaatctcatgaaatagtcaattcccacatgatttacattttgccatcatgaagggatgtctgtg

SEQ ID NO: 121237 - DNA, 80 bp, synthetic construct
  misc_feature 1..80: note = Artificially Synthesized Probe
  source 1..80: mol_type = other DNA
cacatgatttacattttgccatcatgaagggatgtctgtgaaagcagaagaaactatgatctaatgtgctagctgggtgt

SEQ ID NO: 121238 - DNA, 80 bp, synthetic construct
  misc_feature 1..80: note = Artificially Synthesized Probe
  source 1..80: mol_type = other DNA
aaagcagaagaaactatgatctaatgtgctagctgggtgtgtacctaactttcaaataggaaacacgtcatgtgggcttc

SEQ ID NO: 121239 - DNA, 80 bp, synthetic construct; identical to SEQ ID NO: 39285
  misc_feature 1..80: note = Artificially Synthesized Probe
  source 1..80: mol_type = other DNA

SEQ ID NO: 121240 - DNA, 80 bp, synthetic construct
  misc_feature 1..80: note = Artificially Synthesized Probe
  source 1..80: mol_type = other DNA
tggggactgggcgtccaagatcaaggtgcggtacaatcaggctcccagtgagagttcttcctggctcgtagacggccaac

SEQ ID NO: 121241 - DNA, 80 bp, synthetic construct
  misc_feature 1..80: note = Artificially Synthesized Probe
  source 1..80: mol_type = other DNA
caggaaatgtatacagacacatgcgggtgggcttgtcagggggctgacagagtccccgcgatgacagaggctgaaaagac

SEQ ID NO: 121242 - DNA, 80 bp, synthetic construct
  misc_feature 1..80: note = Artificially Synthesized Probe
  source 1..80: mol_type = other DNA
ttcagcttaaaatgcccccaagtgaaacagggactcagccaaagttgaaaattggtgacatcttttacatcttactggcc

SEQ ID NO: 121243 - DNA, 80 bp, synthetic construct
  misc_feature 1..80: note = Artificially Synthesized Probe
  source 1..80: mol_type = other DNA
gacatagccagcagcccacacggagtccccgggcgctgacctcttccaaacagccttgccagtccttcccccagaattag

SEQ ID NO: 121244 - DNA, 80 bp, synthetic construct
  misc_feature 1..80: note = Artificially Synthesized Probe
  source 1..80: mol_type = other DNA
ctgcctccagtcccctcagacttatgtgctaatcccctccagaaaccccacacagacacgcccacgataacactttaccg

SEQ ID NO: 121245 - DNA, 80 bp, synthetic construct; identical to SEQ ID NO: 39286
  misc_feature 1..80: note = Artificially Synthesized Probe
  source 1..80: mol_type = other DNA

SEQ ID NO: 121246 - DNA, 80 bp, synthetic construct
  misc_feature 1..80: note = Artificially Synthesized Probe
  source 1..80: mol_type = other DNA
tgaacaaggtggcagacttcatcactcagccccatccgtggcacactgaccatgtaaccaaaaggagcaaacaattgcta

SEQ ID NO: 121247 - DNA, 80 bp, synthetic construct
  misc_feature 1..80: note = Artificially Synthesized Probe
  source 1..80: mol_type = other DNA
cctcaagaatgcaggggccacggtgggccacatgctttctcttgttactttatttacttaaaagaaacagccgccgggca

SEQ ID NO: 121248 - DNA, 80 bp, synthetic construct
  misc_feature 1..80: note = Artificially Synthesized Probe
  source 1..80: mol_type = other DNA
atggtggcgggcacctgttttcccacctactctggaggctgaagcaggagaatcgcttgaacccgggaggcagaggttgc

SEQ ID NO: 121249 - DNA, 80 bp, synthetic construct
  misc_feature 1..80: note = Artificially Synthesized Probe
  source 1..80: mol_type = other DNA
tcccgtgtttccaatggcctcttgggaaatgatcctgagaggggaataactctcagggcacatgtaccccctaaaggcac

SEQ ID NO: 121250 - DNA, 80 bp, synthetic construct; identical to SEQ ID NO: 39287
  misc_feature 1..80: note = Artificially Synthesized Probe
  source 1..80: mol_type = other DNA

SEQ ID NO: 121251 - DNA, 80 bp, synthetic construct
  misc_feature 1..80: note = Artificially Synthesized Probe
  source 1..80: mol_type = other DNA
agggaaaggcagaacgccttgtttgatgaagtgtcttataaatcacgccttgtttgatgaagtgtcttataaatctatta

SEQ ID NO: 121252 - DNA, 80 bp, synthetic construct
  misc_feature 1..80: note = Artificially Synthesized Probe
  source 1..80: mol_type = other DNA
atactggactattggagtcaataaccataaaaggaaaatctgtctcacccctcatggaggacaagatgaaacggaagagg

SEQ ID NO: 121253 - DNA, 80 bp, synthetic construct
  misc_feature 1..80: note = Artificially Synthesized Probe
  source 1..80: mol_type = other DNA
atgtggtccaggtgtgagttcaccctgctggaaatatcctgactgtccagcacacaaagctaatactgttttgaaccctc

SEQ ID NO: 121254 - DNA, 80 bp, synthetic construct
  misc_feature 1..80: note = Artificially Synthesized Probe
  source 1..80: mol_type = other DNA
ggcctctgtgccaggctctggatggggcaaaatcacaggtggcacatggctcatatggtattctggggatgcgtcctccc

SEQ ID NO: 121255 - DNA, 80 bp, synthetic construct; identical to SEQ ID NO: 39288
  misc_feature 1..80: note = Artificially Synthesized Probe
  source 1..80: mol_type = other DNA

SEQ ID NO: 121256 - DNA, 80 bp, synthetic construct
  misc_feature 1..80: note = Artificially Synthesized Probe
  source 1..80: mol_type = other DNA
atataaggagtgtgggccctaaatccaatgccaggtgactttataaggaggggaaatgatacagaggcaaagacagggaa

SEQ ID NO: 121257 - DNA, 80 bp, synthetic construct
  misc_feature 1..80: note = Artificially Synthesized Probe
  source 1..80: mol_type = other DNA
gggagtaagtttctgttgctgtgagccactagtttgcttccatctgtttcagcagccatgaaagcccaatacatcgaggc

SEQ ID NO: 121258 - DNA, 80 bp, synthetic construct
  misc_feature 1..80: note = Artificially Synthesized Probe
  source 1..80: mol_type = other DNA
cattgccattaacaaaggtgcttagaagccactgatttaacacagtatctgtgactggaaacagtcattaagaacacagg

SEQ ID NO: 121259 - DNA, 80 bp, synthetic construct
  misc_feature 1..80: note = Artificially Synthesized Probe
  source 1..80: mol_type = other DNA
agcctgtaatcccagcactttgggaggccgaggcaggcggatcacgaggtcaggagtttgagaccagcttggccaacatg

SEQ ID NO: 121260 - DNA, 80 bp, synthetic construct; identical to SEQ ID NO: 39289
  misc_feature 1..80: note = Artificially Synthesized Probe
  source 1..80: mol_type = other DNA

SEQ ID NO: 121261 - DNA, 80 bp, synthetic construct
  misc_feature 1..80: note = Artificially Synthesized Probe
  source 1..80: mol_type = other DNA
aaaaaagaacacaagctttggtgcggggcacacaggattagattccaatgctggggctccctcagggagtagattggata

SEQ ID NO: 121262 - DNA, 80 bp, synthetic construct
  misc_feature 1..80: note = Artificially Synthesized Probe
  source 1..80: mol_type = other DNA
ttctgcagctacaaaacacacacacggtcgcatatgtgcatttaccagagcaagggattttgttaaatctgtgccttatc

SEQ ID NO: 121263 - DNA, 80 bp, synthetic construct
  misc_feature 1..80: note = Artificially Synthesized Probe
  source 1..80: mol_type = other DNA
ttcctggatgggcatgggaacaacacagctgagcatgacaggtcgccccaggaaatgcaaagctgatgaaacctgagcca

SEQ ID NO: 121264 - DNA, 80 bp, synthetic construct; identical to SEQ ID NO: 39290
  misc_feature 1..80: note = Artificially Synthesized Probe
  source 1..80: mol_type = other DNA

SEQ ID NO: 121265 - DNA, 80 bp, synthetic construct
  misc_feature 1..80: note = Artificially Synthesized Probe
  source 1..80: mol_type = other DNA
ggaaatgcatggaggaggaggtggctgtcactcttgctccgtcagtggtggagtctgtgctggttccctggggctctgcc

SEQ ID NO: 121266 - DNA, 80 bp, synthetic construct
  misc_feature 1..80: note = Artificially Synthesized Probe
  source 1..80: mol_type = other DNA
aatatgtaaaaagaaaaataacatatattttcaaagtataggacaggatgcacaggagagaggaaataatgaggtgagcc

SEQ ID NO: 121267 - DNA, 80 bp, synthetic construct
  misc_feature 1..80: note = Artificially Synthesized Probe
  source 1..80: mol_type = other DNA
gaacggagcctagtagagatgtgttcccttattcagaatatgatggatgcaagcatgtaacaaaccaccttaggccggag

SEQ ID NO: 121268 - DNA, 80 bp, synthetic construct
  misc_feature 1..80: note = Artificially Synthesized Probe
  source 1..80: mol_type = other DNA
tgatggatgcaagcatgtaacaaaccaccttaggccggagaaagaaccacccaaaaggactggcaaaaataatacatact

SEQ ID NO: 121269 - DNA, 80 bp, synthetic construct
  misc_feature 1..80: note = Artificially Synthesized Probe
  source 1..80: mol_type = other DNA
aaagaaccacccaaaaggactggcaaaaataatacatactaattacataggccaggaacagtgtctgttcccatctcacc

SEQ ID NO: 121270 - DNA, 80 bp, synthetic construct; identical to SEQ ID NO: 39291
  misc_feature 1..80: note = Artificially Synthesized Probe
  source 1..80: mol_type = other DNA

SEQ ID NO: 121271 - DNA, 80 bp, synthetic construct
  misc_feature 1..80: note = Artificially Synthesized Probe
  source 1..80: mol_type = other DNA
caaagcattcaaatcatattaactgtattctgtatgttcaaaaaggtaagtggcaacatggaaaaaaattaaacttccaa

SEQ ID NO: 121272 - DNA, 80 bp, synthetic construct
  misc_feature 1..80: note = Artificially Synthesized Probe
  source 1..80: mol_type = other DNA
aaaagaagagagtatcagtgaaccatgaaacaatgtcaagcagcctaatatgtacatagttggagtttctaaaaaaaaag

SEQ ID NO: 121273 - DNA, 80 bp, synthetic construct
  misc_feature 1..80: note = Artificially Synthesized Probe
  source 1..80: mol_type = other DNA
agataaagaaaaaatcttaaaagcagactagggaagggagacatgttacatccagaaaacaaacttaagaatgacagcag

SEQ ID NO: 121274 - DNA, 80 bp, synthetic construct
  misc_feature 1..80: note = Artificially Synthesized Probe
  source 1..80: mol_type = other DNA
acatgttacatccagaaaacaaacttaagaatgacagcagatttcttgatggaaatgattcaagtgagcagacagtggac

SEQ ID NO: 121275 - DNA, 80 bp, synthetic construct; identical to SEQ ID NO: 39292
  misc_feature 1..80: note = Artificially Synthesized Probe
  source 1..80: mol_type = other DNA

SEQ ID NO: 121276 - DNA, 80 bp, synthetic construct
  misc_feature 1..80: note = Artificially Synthesized Probe
  source 1..80: mol_type = other DNA
gataaaagtgtagtaagataaagatttatgctatgaaccctaagccaaccattgaaagaacaaaacaaagagtaatcgca

SEQ ID NO: 121277 - DNA, 80 bp, synthetic construct
  misc_feature 1..80: note = Artificially Synthesized Probe
  source 1..80: mol_type = other DNA
tcaaaccattatcaatttttccattaaatgtgacccaactctaagctttctataagaaatgcactttaaaccaataagcc

SEQ ID NO: 121278 - DNA, 80 bp, synthetic construct
  misc_feature 1..80: note = Artificially Synthesized Probe
  source 1..80: mol_type = other DNA
aaataaaatatgcaaatcgcaaataagcacgtgaaaaaaacatccaacagcattaggcatttggggaatgcagatcaaaa

SEQ ID NO: 121279 - DNA, 80 bp, synthetic construct; identical to SEQ ID NO: 38702
  misc_feature 1..80: note = Artificially Synthesized Probe
  source 1..80: mol_type = other DNA

SEQ ID NO: 121280 - DNA, 80 bp, synthetic construct
  misc_feature 1..80: note = Artificially Synthesized Probe
  source 1..80: mol_type = other DNA
agaaatgtaaatggcgtggccactatggaaaataggatagcacttttccagaagtttaaatagagagtaacatctgatcc

SEQ ID NO: 121281 - DNA, 80 bp, synthetic construct
  misc_feature 1..80: note = Artificially Synthesized Probe
  source 1..80: mol_type = other DNA
gtctattcatacagtggaataaaactcagtcttaaaaaggaaggaaattctgactcatgctacaacatgcacaagctttg

SEQ ID NO: 121282 - DNA, 80 bp, synthetic construct; identical to SEQ ID NO: 39293
  misc_feature 1..80: note = Artificially Synthesized Probe
  source 1..80: mol_type = other DNA

SEQ ID NO: 121283 - DNA, 80 bp, synthetic construct
  misc_feature 1..80: note = Artificially Synthesized Probe
  source 1..80: mol_type = other DNA
taccactgagtcgtacactcctgaatggttaagatgatagatattatgctatgcacattttacaacaatttaaaaagtct

SEQ ID NO: 121284 - DNA, 80 bp, synthetic construct
  misc_feature 1..80: note = Artificially Synthesized Probe
  source 1..80: mol_type = other DNA
ttcaagaccagcctggccaacacggtgaaacactgtctctactaaaaatacaaaaattattgggagtggtggtgcacgcc

SEQ ID NO: 121285 - DNA, 80 bp, synthetic construct
  misc_feature 1..80: note = Artificially Synthesized Probe
  source 1..80: mol_type = other DNA
taagttaatattaatcaaaagaaaattggaggattatatttttttccagaaagctggataaaaggaaacatctcaatgcc

SEQ ID NO: 121286 - DNA, 80 bp, synthetic construct
  misc_feature 1..80: note = Artificially Synthesized Probe
  source 1..80: mol_type = other DNA
atatttcataaccaagtgtgattttgatcaggaactgatcaaatttaacatttggttcaacatttgaaattaactgttga

SEQ ID NO: 121287 - DNA, 80 bp, synthetic construct; identical to SEQ ID NO: 39294
  misc_feature 1..80: note = Artificially Synthesized Probe
  source 1..80: mol_type = other DNA

SEQ ID NO: 121288 - DNA, 80 bp, synthetic construct
  misc_feature 1..80: note = Artificially Synthesized Probe
  source 1..80: mol_type = other DNA
ttctcctcagcaagacaagaaaaatacataaaatgcatccagagtgagatggaagaaataaaaccatccttgtttgcaga

SEQ ID NO: 121289 - DNA, 80 bp, synthetic construct
  misc_feature 1..80: note = Artificially Synthesized Probe
  source 1..80: mol_type = other DNA
ctctatttacaaacgccaacagaaaataagacatgcttaggagaaaatcttggcgaaagatgtgaaagatttacacactg

SEQ ID NO: 121290 - DNA, 80 bp, synthetic construct
  misc_feature 1..80: note = Artificially Synthesized Probe
  source 1..80: mol_type = other DNA
ttatgcagagttctaacagggtggctaactggatctgcggcacacagaggatcaggatcaggaaatcagacaaggaagaa

SEQ ID NO: 121291 - DNA, 80 bp, synthetic construct
  misc_feature 1..80: note = Artificially Synthesized Probe
  source 1..80: mol_type = other DNA
gttcacgctgtaacctgcctgccacttgggaatgacaagcatcttgctgaatttcccggggacaaatgtcattatcttca

SEQ ID NO: 121292 - DNA, 80 bp, synthetic construct
  misc_feature 1..80: note = Artificially Synthesized Probe
  source 1..80: mol_type = other DNA
atcttgctgaatttcccggggacaaatgtcattatcttcactttgcacttgcagaaaaacatgactcagaagcaaatagc

SEQ ID NO: 121293 - DNA, 80 bp, synthetic construct; identical to SEQ ID NO: 39295
  misc_feature 1..80: note = Artificially Synthesized Probe
  source 1..80: mol_type = other DNA

SEQ ID NO: 121294 - DNA, 80 bp, synthetic construct
  misc_feature 1..80: note = Artificially Synthesized Probe
  source 1..80: mol_type = other DNA
agaaggaaagagaacagaggaagtggtttccaaagaaaaatgtggaggaggtgacaagctttgttaatttatggtctggg

SEQ ID NO: 121295 - DNA, 80 bp, synthetic construct
  misc_feature 1..80: note = Artificially Synthesized Probe
  source 1..80: mol_type = other DNA
cagtttctaatgaaaatacatacaggcttctagaaaacatctacagatggcatttttttggcgggggcggcgggaatggc

SEQ ID NO: 121296 - DNA, 80 bp, synthetic construct
  misc_feature 1..80: note = Artificially Synthesized Probe
  source 1..80: mol_type = other DNA
aagaaggacggaatttttaccagccaccactcttacatataccactggagaggaagcaaaaattcaggggcaaggtcaga

SEQ ID NO: 121297 - DNA, 80 bp, synthetic construct; identical to SEQ ID NO: 39296
  misc_feature 1..80: note = Artificially Synthesized Probe
  source 1..80: mol_type = other DNA

SEQ ID NO: 121298 - DNA, 80 bp, synthetic construct
  misc_feature 1..80: note = Artificially Synthesized Probe
  source 1..80: mol_type = other DNA
acagccagctcctctttctccactacatcactctcatgtgcaaagaagccactgggtaacaagtggcacatggcctttaa

SEQ ID NO: 121299 - DNA, 80 bp, synthetic construct
  misc_feature 1..80: note = Artificially Synthesized Probe
  source 1..80: mol_type = other DNA
tcatatgacaattcaggatctcagaagaatgaagccaaggtcagaatctcatcttgacaaccccagtgtcaaagaaaacc

SEQ ID NO: 121300 - DNA, 80 bp, synthetic construct
  misc_feature 1..80: note = Artificially Synthesized Probe
  source 1..80: mol_type = other DNA
tggtgaagcactgcaataccctacatccaaggcaaccgtgacaccgcatgcataacggaaccaggacaacaaagagccgc

SEQ ID NO: 121301 - DNA, 80 bp, synthetic construct
  misc_feature 1..80: note = Artificially Synthesized Probe
  source 1..80: mol_type = other DNA
aatctccaggggaacaagtgggaagaagaatttgtattttagcaagaaacctacgattccaaggggccacctggatgaag

SEQ ID NO: 121302 - DNA, 80 bp, synthetic construct; identical to SEQ ID NO: 39297
  misc_feature 1..80: note = Artificially Synthesized Probe
  source 1..80: mol_type = other DNA

SEQ ID NO: 121303 - DNA, 80 bp, synthetic construct
  misc_feature 1..80: note = Artificially Synthesized Probe
  source 1..80: mol_type = other DNA
gacagccttggatggactggagacattaaatgatgttctccatttaaagaaagtagagtaaatgaagaacattttagaac

SEQ ID NO: 121304 - DNA, 80 bp, synthetic construct
  misc_feature 1..80: note = Artificially Synthesized Probe
  source 1..80: mol_type = other DNA
ttcaaatgtgcttgtagatggaacagccttgaagatggatttgtttcttgggactaccacgacaaagtaccacaaactgg

SEQ ID NO: 121305 - DNA, 80 bp, synthetic construct
  misc_feature 1..80: note = Artificially Synthesized Probe
  source 1..80: mol_type = other DNA
ttgtttcttgggactaccacgacaaagtaccacaaactggaattgaagcaaaaacggcagaaatgtattatctgacagct

SEQ ID NO: 121306 - DNA, 80 bp, synthetic construct
  misc_feature 1..80: note = Artificially Synthesized Probe
  source 1..80: mol_type = other DNA
cttccctccatgtctgtgtctgaattcctccttctgataaggatgccagtcattctagatctggacccatctaacatttc

SEQ ID NO: 121307 - DNA, 80 bp, synthetic construct
  misc_feature 1..80: note = Artificially Synthesized Probe
  source 1..80: mol_type = other DNA
gatatggtgtttccctctggtacaaacggcagacaggctcactgtctagcataaaatatttcgcttccctaagctcaatg

SEQ ID NO: 121308 - DNA, 80 bp, synthetic construct; identical to SEQ ID NO: 39298
  misc_feature 1..80: note = Artificially Synthesized Probe
  source 1..80: mol_type = other DNA

SEQ ID NO: 121309 - DNA, 80 bp, synthetic construct
  misc_feature 1..80: note = Artificially Synthesized Probe
  source 1..80: mol_type = other DNA
atgttctcgtccaagtgatggagggacaaggggcaaaggtgctggagtttcgaggctgaggatgagaccctggatggaac

SEQ ID NO: 121310 - DNA, 80 bp, synthetic construct
  misc_feature 1..80: note = Artificially Synthesized Probe
  source 1..80: mol_type = other DNA
cagtgaggaggtgcttgcttttcaatgcaaagctctaagcaaacagaaaacagcagcccttcatctggctgtgccctgag

SEQ ID NO: 121311 - DNA, 80 bp, synthetic construct
  misc_feature 1..80: note = Artificially Synthesized Probe
  source 1..80: mol_type = other DNA
accccaaagaccacccaggcccacccagcatgctgggaaacttcagggaggggaggagctccagcttttagggctctgtt

SEQ ID NO: 121312 - DNA, 80 bp, synthetic construct; identical to SEQ ID NO: 39299
  misc_feature 1..80: note = Artificially Synthesized Probe
  source 1..80: mol_type = other DNA

SEQ ID NO: 121313 - DNA, 80 bp, synthetic construct
  misc_feature 1..80: note = Artificially Synthesized Probe
  source 1..80: mol_type = other DNA
ttttgaaactgagcatctgatccatggagggaggccttgtgattttcaggcttgatattcccatttttgggtgggccagc

SEQ ID NO: 121314 - DNA, 80 bp, synthetic construct
  misc_feature 1..80: note = Artificially Synthesized Probe
  source 1..80: mol_type = other DNA
aatggctctcgcgtccatcacttgaaacaatgtcgctggcttcatggggcccttgattcagagtttgcccctgaatgtcg

SEQ ID NO: 121315 - DNA, 80 bp, synthetic construct
  misc_feature 1..80: note = Artificially Synthesized Probe
  source 1..80: mol_type = other DNA
agcgggcaggactcagggcccttctcaaacctgtggccaactctcctcctgatgaacttggttatgtttttactgaccca

SEQ ID NO: 121316 - DNA, 80 bp, synthetic construct
  misc_feature 1..80: note = Artificially Synthesized Probe
  source 1..80: mol_type = other DNA
acgctcactcaccatactcaccacgctcactcatgagtggatgagcaatcacagacagcaccacaggctggcggcaactc

SEQ ID NO: 121317 - DNA, 80 bp, synthetic construct; identical to SEQ ID NO: 39300
  misc_feature 1..80: note = Artificially Synthesized Probe
  source 1..80: mol_type = other DNA

SEQ ID NO: 121318 - DNA, 80 bp, synthetic construct
  misc_feature 1..80: note = Artificially Synthesized Probe
  source 1..80: mol_type = other DNA
accagacttgtgactcctgcccacagctgtcccgtctgtaccccgtgagggcaggcccattgctcctgcctcctctcagc

SEQ ID NO: 121319 - DNA, 80 bp, synthetic construct
  misc_feature 1..80: note = Artificially Synthesized Probe
  source 1..80: mol_type = other DNA
cacactgttatggttgttgaaactcacctgtggcatgacttcaactttccagaccatctacactcaatgatggtgtacct

SEQ ID NO: 121320 - DNA, 80 bp, synthetic construct
  misc_feature 1..80: note = Artificially Synthesized Probe
  source 1..80: mol_type = other DNA
atcactatatatggctaatccaggaaggaatcatctcctcttggccacattctgagtaatggccaggaagagaaggatgg

SEQ ID NO: 121321 - DNA, 80 bp, synthetic construct; identical to SEQ ID NO: 39301
  misc_feature 1..80: note = Artificially Synthesized Probe
  source 1..80: mol_type = other DNA

SEQ ID NO: 121322 - DNA, 80 bp, synthetic construct
  misc_feature 1..80: note = Artificially Synthesized Probe
  source 1..80: mol_type = other DNA
ctgctgaccatgtccttccacatgggacaaagcagatacaatgggtcctccagctttataaaaatgcctcttgcacgtga

SEQ ID NO: 121323 - DNA, 80 bp, synthetic construct
  misc_feature 1..80: note = Artificially Synthesized Probe
  source 1..80: mol_type = other DNA
cctggagagggagggggacattaacagtcttgcctgtctcccatggcgcattcccaacaatggaaaatacaatggtacgg

SEQ ID NO: 121324 - DNA, 80 bp, synthetic construct
  misc_feature 1..80: note = Artificially Synthesized Probe
  source 1..80: mol_type = other DNA
tgaacccaatttgatgcccattcaccttactgtcactgagaaacctgtcagaaagcacatgggagaacttcagtcctgca

SEQ ID NO: 121325 - DNA, 80 bp, synthetic construct; identical to SEQ ID NO: 39302
  misc_feature 1..80: note = Artificially Synthesized Probe
  source 1..80: mol_type = other DNA

SEQ ID NO: 121326 - DNA, 80 bp, synthetic construct
  misc_feature 1..80: note = Artificially Synthesized Probe
  source 1..80: mol_type = other DNA
ctacttcctgtgtggaagccaagtgtcaccttgcttccctcctgagaacacggacactcgtaccttagaggggtcataag

SEQ ID NO: 121327 - DNA, 80 bp, synthetic construct
  misc_feature 1..80: note = Artificially Synthesized Probe
  source 1..80: mol_type = other DNA
acattatttctgtgaatgctgcagacagctatccataggagacatctaactagaaaaggttgtaggaaacgtgtcccagg

SEQ ID NO: 121328 - DNA, 80 bp, synthetic construct
  misc_feature 1..80: note = Artificially Synthesized Probe
  source 1..80: mol_type = other DNA
gtttattaacacatgccgccaagcggaaaggtcaacagaaacttacagagaaactagcttggtttctaaggggaccctga

SEQ ID NO: 121329 - DNA, 80 bp, synthetic construct; identical to SEQ ID NO: 38703
  misc_feature 1..80: note = Artificially Synthesized Probe
  source 1..80: mol_type = other DNA

SEQ ID NO: 121330 - DNA, 80 bp, synthetic construct; identical to SEQ ID NO: 39303
  misc_feature 1..80: note = Artificially Synthesized Probe
  source 1..80: mol_type = other DNA

SEQ ID NO: 121331 - DNA, 80 bp, synthetic construct
  misc_feature 1..80: note = Artificially Synthesized Probe
  source 1..80: mol_type = other DNA
ttcagggacagttcttcatgggtttctcgtgttttattcaggacacttcatgggtttctcatgttttattcaggacagtt

SEQ ID NO: 121332 - DNA, 80 bp, synthetic construct
  misc_feature 1..80: note = Artificially Synthesized Probe
  source 1..80: mol_type = other DNA
ggacacttcatgggtttctcatgttttattcaggacagttcatgggtttttcatgttttattcaggacagttcatgggtt

SEQ ID NO: 121333 - DNA, 80 bp, synthetic construct
  misc_feature 1..80: note = Artificially Synthesized Probe
  source 1..80: mol_type = other DNA
catgggtttttcatgttttattcaggacagttcatgggtttctcatgttttattcagcacagttcatgggtttctcatgt

SEQ ID NO: 121334 - DNA, 80 bp, synthetic construct
  misc_feature 1..80: note = Artificially Synthesized Probe
  source 1..80: mol_type = other DNA
tctcatgttttattcagcacagttcatgggtttctcatgttttattcagcacagttcaagggtttctcatgtttgcccag

SEQ ID NO: 121335 - DNA, 80 bp, synthetic construct
  misc_feature 1..80: note = Artificially Synthesized Probe
  source 1..80: mol_type = other DNA
tttattcagcacagttcaagggtttctcatgtttgcccaggaaccgttcttcatgggttttcatgtcaggaatgtacaga

SEQ ID NO: 121336 - DNA, 80 bp, synthetic construct
  misc_feature 1..80: note = Artificially Synthesized Probe
  source 1..80: mol_type = other DNA
caaagggcaagtgtgcagaagtcatcctttatcaaggattctatttccctaaactcagcgcttccctcccacaacgcaac

SEQ ID NO: 121337 - DNA, 80 bp, synthetic construct
  misc_feature 1..80: note = Artificially Synthesized Probe
  source 1..80: mol_type = other DNA
ccctggagggcaagactgaagcccctgcccgtctgctgggggccagttcatcgacttgcactggggctgtctttggagct

SEQ ID NO: 121338 - DNA, 80 bp, synthetic construct; identical to SEQ ID NO: 39304
  misc_feature 1..80: note = Artificially Synthesized Probe
  source 1..80: mol_type = other DNA

SEQ ID NO: 121339 - DNA, 80 bp, synthetic construct
  misc_feature 1..80: note = Artificially Synthesized Probe
  source 1..80: mol_type = other DNA
atggaccactggagctgcccactcaccatcctacccccatctgcccagccccttccagcatacgcctgagaaggtcagcc

SEQ ID NO: 121340 - DNA, 80 bp, synthetic construct
  misc_feature 1..80: note = Artificially Synthesized Probe
  source 1..80: mol_type = other DNA
atttacagtggacgtacgaaaaggcacaggaatactgagtaattgaaaggtggaaataaacgaggccccatgaattaccc

SEQ ID NO: 121341 - DNA, 80 bp, synthetic construct
  misc_feature 1..80: note = Artificially Synthesized Probe
  source 1..80: mol_type = other DNA
tggcaaccaggtacagccgtgaagacaatgaaattcactgtgcctataacccaaagtcaagatgaaactgaggtgtgggc

SEQ ID NO: 121342 - DNA, 80 bp, synthetic construct
  misc_feature 1..80: note = Artificially Synthesized Probe
  source 1..80: mol_type = other DNA
ataattttcctagtaaggtaaacgaatatattcatctaggaaaagtggtctggaagaaaccattggaagcaaagtctagg

SEQ ID NO: 121343 - DNA, 80 bp, synthetic construct
  misc_feature 1..80: note = Artificially Synthesized Probe
  source 1..80: mol_type = other DNA
ggtttctcagggaccctgaccttctctctagcaggggtcacccctcacagaggcaagtgatgggtcaaggtgggtggaag

SEQ ID NO: 121344 - DNA, 80 bp, synthetic construct; identical to SEQ ID NO: 39305
  misc_feature 1..80: note = Artificially Synthesized Probe
  source 1..80: mol_type = other DNA

SEQ ID NO: 121345 - DNA, 80 bp, synthetic construct
  misc_feature 1..80: note = Artificially Synthesized Probe
  source 1..80: mol_type = other DNA
tgcctccatcttcgcctggccttcccactgtgtgcctgtctgcgcccaaacctccctcttcttacaaggaagtgggccag

SEQ ID NO: 121346 - DNA, 80 bp, synthetic construct
  misc_feature 1..80: note = Artificially Synthesized Probe
  source 1..80: mol_type = other DNA
tgcctcgctggtgaccaatcagtgcctgtgtaattgacaaactctaccaaacctcagagagtttctcagtagagagagtc

SEQ ID NO: 121347 - DNA, 80 bp, synthetic construct
  misc_feature 1..80: note = Artificially Synthesized Probe
  source 1..80: mol_type = other DNA
ggagcacaacccccacacccagctaagttttttttattttttgtagactcagggtttctccatgttgcccaggctggtct

SEQ ID NO: 121348 - DNA, 80 bp, synthetic construct
  misc_feature 1..80: note = Artificially Synthesized Probe
  source 1..80: mol_type = other DNA
tgtccagagctcccctcccaaagcctgtgctgctgcccttgggggtgaatgaacacgggaaaggccgcagctgaggcctg

SEQ ID NO: 121349 - DNA, 80 bp, synthetic construct
  misc_feature 1..80: note = Artificially Synthesized Probe
  source 1..80: mol_type = other DNA
ctcccagcagcccagcccttatctgcaaggaagccccaagtcatccacacgtaggtcgaccaacagcagagacgtccacc

SEQ ID NO: 121350 - DNA, 80 bp, synthetic construct; identical to SEQ ID NO: 39306
  misc_feature 1..80: note = Artificially Synthesized Probe
  source 1..80: mol_type = other DNA

SEQ ID NO: 121351 - DNA, 80 bp, synthetic construct
  misc_feature 1..80: note = Artificially Synthesized Probe
  source 1..80: mol_type = other DNA
aatgggagaaagggacgtctataccacttctcagaagaagtgtggctcaccattgtctggaaaatgaggccttggaacca

SEQ ID NO: 121352 - DNA, 80 bp, synthetic construct
  misc_feature 1..80: note = Artificially Synthesized Probe
  source 1..80: mol_type = other DNA
acaagggctgcacgcaggcgttgagaggaggcttctgcaggtcaggcagagccgagtcccaatcccacggctccaccctg

SEQ ID NO: 121353 - DNA, 80 bp, synthetic construct
  misc_feature 1..80: note = Artificially Synthesized Probe
  source 1..80: mol_type = other DNA
ctttctcccatgcaatgggagaaagggacgtctacgccacttctcagaggaattggggctcaccaagaaatacctcacac

SEQ ID NO: 121354 - DNA, 80 bp, synthetic construct
  misc_feature 1..80: note = Artificially Synthesized Probe
  source 1..80: mol_type = other DNA
aggggaacacgattcattccacagccgtgagttatgggcatgcttgtctcatctcacatgcctcccccaggccagtgtcc

SEQ ID NO: 121355 - DNA, 80 bp, synthetic construct
  misc_feature 1..80: note = Artificially Synthesized Probe
  source 1..80: mol_type = other DNA
agaaaaaaaaaatgcaaaaatgaacgcagcacactcagctgtatccccatccatgctatgtctttgttcacaatttaata

SEQ ID NO: 121356 - DNA, 80 bp, synthetic construct; identical to SEQ ID NO: 39307
  misc_feature 1..80: note = Artificially Synthesized Probe
  source 1..80: mol_type = other DNA

SEQ ID NO: 121357 - DNA, 80 bp, synthetic construct
  misc_feature 1..80: note = Artificially Synthesized Probe
  source 1..80: mol_type = other DNA
ctgtgtcctcacagggtcatccctccacgcatccctcatagggtcatccctccacgcatccacagggtcatctgtttcct

SEQ ID NO: 121358 - DNA, 80 bp, synthetic construct
  misc_feature 1..80: note = Artificially Synthesized Probe
  source 1..80: mol_type = other DNA
cagacatgcaccactacgcctggctactttttgtatttgtaatagagacggagtttcaccatgttggccaggctggtctc

SEQ ID NO: 121359 - DNA, 80 bp, synthetic construct
  misc_feature 1..80: note = Artificially Synthesized Probe
  source 1..80: mol_type = other DNA
taacctccgcctcctgtgttcaagtgattctcctgcctcagcctcctgaatagctgggactacaggcccacaataccata

SEQ ID NO: 121360 - DNA, 80 bp, synthetic construct; identical to SEQ ID NO: 39308
  misc_feature 1..80: note = Artificially Synthesized Probe
  source 1..80: mol_type = other DNA

SEQ ID NO: 121361 - DNA, 80 bp, synthetic construct
  misc_feature 1..80: note = Artificially Synthesized Probe
  source 1..80: mol_type = other DNA
gttgggctatgactatgagagcccattgaccaatacgtcaaacaaaactgctactttatgtcagaatccacatttgtgat

SEQ ID NO: 121362 - DNA, 80 bp, synthetic construct
  misc_feature 1..80: note = Artificially Synthesized Probe
  source 1..80: mol_type = other DNA
aacaaaactgctactttatgtcagaatccacatttgtgatgcttgtacctcagtcactgcctggaaccctgtttcctgaa

SEQ ID NO: 121363 - DNA, 80 bp, synthetic construct
  misc_feature 1..80: note = Artificially Synthesized Probe
  source 1..80: mol_type = other DNA
ggaaaatgacctaatcaatccaatttcatactctctgtcttcagtcattactggaatattcacttacaaatgcaaattgc

SEQ ID NO: 121364 - DNA, 80 bp, synthetic construct
  misc_feature 1..80: note = Artificially Synthesized Probe
  source 1..80: mol_type = other DNA
gcgccttgtataaaatactgcatccttaatgggggaaccttccttgtcaaaggcaaacatccaattcaaacaagagttgg

SEQ ID NO: 121365 - DNA, 80 bp, synthetic construct
  misc_feature 1..80: note = Artificially Synthesized Probe
  source 1..80: mol_type = other DNA
tccctcctgtggagtcgaggtgatgaaggcaggctggggctcctctctcctgcggagtcggagtgatgaggaccattctc

SEQ ID NO: 121366 - DNA, 80 bp, synthetic construct; identical to SEQ ID NO: 39309
  misc_feature 1..80: note = Artificially Synthesized Probe
  source 1..80: mol_type = other DNA

SEQ ID NO: 121367 - DNA, 80 bp, synthetic construct
  misc_feature 1..80: note = Artificially Synthesized Probe
  source 1..80: mol_type = other DNA
gtgtgtgcatgcacacatacatgtatatgtgtgcacaaacacaccagagatacctcatttcctgggctccactacgatca

SEQ ID NO: 121368 - DNA, 80 bp, synthetic construct
  misc_feature 1..80: note = Artificially Synthesized Probe
  source 1..80: mol_type = other DNA
gaccagagtccccatcccatgtgcccctagccactgcctgctccccgtccagagctctccagcctgctccggccctgggc

SEQ ID NO: 121369 - DNA, 80 bp, synthetic construct
  misc_feature 1..80: note = Artificially Synthesized Probe
  source 1..80: mol_type = other DNA
gcctgggcactgccattttccctgtgtctctatacagctgtcgtcttctaaggacaccagtcacaatagatcaggcccca

SEQ ID NO: 121370 - DNA, 80 bp, synthetic construct; identical to SEQ ID NO: 39310
  misc_feature 1..80: note = Artificially Synthesized Probe
  source 1..80: mol_type = other DNA

SEQ ID NO: 121371 - DNA, 80 bp, synthetic construct
  misc_feature 1..80: note = Artificially Synthesized Probe
  source 1..80: mol_type = other DNA
tactcacggggacaactaagcagtgggtgcccgatggagttgatgtcatgaagagaccccagcatcagtgccgcgtgtga

SEQ ID NO: 121372 - DNA, 80 bp, synthetic construct
  misc_feature 1..80: note = Artificially Synthesized Probe
  source 1..80: mol_type = other DNA
atcacctcacctttgtgtcaactgagaattaagccaccaaacaggatgttaacagctggatccaaagagcaggtgccaat

SEQ ID NO: 121373 - DNA, 80 bp, synthetic construct
  misc_feature 1..80: note = Artificially Synthesized Probe
  source 1..80: mol_type = other DNA
gtaattaaaatgtctaaagaccacaaagaaacgcaaaagagaaccagaccattaaagtgagctccaaacttcctggcaaa

SEQ ID NO: 121374 - DNA, 80 bp, synthetic construct
  misc_feature 1..80: note = Artificially Synthesized Probe
  source 1..80: mol_type = other DNA
gaaccagaccattaaagtgagctccaaacttcctggcaaagtatacttgacagaataattcaggcttccataacttgagc

SEQ ID NO: 121375 - DNA, 80 bp, synthetic construct; identical to SEQ ID NO: 39311
  misc_feature 1..80: note = Artificially Synthesized Probe
  source 1..80: mol_type = other DNA

SEQ ID NO: 121376 - DNA, 80 bp, synthetic construct
  misc_feature 1..80: note = Artificially Synthesized Probe
  source 1..80: mol_type = other DNA
gcttaaacctgagaacagacatgaagaaagaaaccaaagccacctgacgcgtgttgtatgtaaaatccagaaatagagct

SEQ ID NO: 121377 - DNA, 80 bp, synthetic construct
  misc_feature 1..80: note = Artificially Synthesized Probe
  source 1..80: mol_type = other DNA
tcaggagatcgagaccatcctggttaacacagtgaaaccctgtctctactaaaaatacaaaaaattagccaggcgtggtg

SEQ ID NO: 121378 - DNA, 80 bp, synthetic construct
  misc_feature 1..80: note = Artificially Synthesized Probe
  source 1..80: mol_type = other DNA
aatcttgtcatcacagccaaaatatgcaggtgaatgattgatggagacatgaaattttatactgaaagcataattttaag

SEQ ID NO: 121379 - DNA, 80 bp, synthetic construct; identical to SEQ ID NO: 38704
  misc_feature 1..80: note = Artificially Synthesized Probe
  source 1..80: mol_type = other DNA

SEQ ID NO: 121380 - DNA, 80 bp, synthetic construct
  misc_feature 1..80: note = Artificially Synthesized Probe
  source 1..80: mol_type = other DNA
tcaggtttgtaaatgagatcacactgtaatcagaggcccactcttaaaggatcataaaatcaactagacataaacagaga

SEQ ID NO: 121381 - DNA, 80 bp, synthetic construct; identical to SEQ ID NO: 39312
  misc_feature 1..80: note = Artificially Synthesized Probe
  source 1..80: mol_type = other DNA

SEQ ID NO: 121382 - DNA, 80 bp, synthetic construct
  misc_feature 1..80: note = Artificially Synthesized Probe
  source 1..80: mol_type = other DNA
aaaaatatttaaaaattagccaagcatggtggtgtgtgtctggggtcacagctacttgggagtctgaggcaggaggattc

SEQ ID NO: 121383 - DNA, 80 bp, synthetic construct
  misc_feature 1..80: note = Artificially Synthesized Probe
  source 1..80: mol_type = other DNA
ggatggttcttaaattctagctacatgctttaatctacccaaggctctcaacccacctctggttttttgtttttttcttt

SEQ ID NO: 121384 - DNA, 80 bp, synthetic construct
  misc_feature 1..80: note = Artificially Synthesized Probe
  source 1..80: mol_type = other DNA
cggattacaggcgcatgccaccacgtccagctaatttctgtatttttagtagagatggggtttcatcaggttggccagtc

SEQ ID NO: 121385 - DNA, 80 bp, synthetic construct; identical to SEQ ID NO: 39313
  misc_feature 1..80: note = Artificially Synthesized Probe
  source 1..80: mol_type = other DNA

SEQ ID NO: 121386 - DNA, 80 bp, synthetic construct
  misc_feature 1..80: note = Artificially Synthesized Probe
  source 1..80: mol_type = other DNA
atggtggcgggcgcctataatcccagctactcaggaggctgaggcatgagaattgcttgaacctgggaggcagaggttgc

SEQ ID NO: 121387 - DNA, 80 bp, synthetic construct
  misc_feature 1..80: note = Artificially Synthesized Probe
  source 1..80: mol_type = other DNA
ggaacaaaatcaacataaatctctgccctgggagaccatctgttgtcctgggagtcaaagcagaactgaaggtagaagaa

SEQ ID NO: 121388 - DNA, 80 bp, synthetic construct
  misc_feature 1..80: note = Artificially Synthesized Probe
  source 1..80: mol_type = other DNA
tgctacagcctgtgccaacctcagctcacaaacctgctcaggcctgttcaaaaacagattaataaataagcaaataagtg

SEQ ID NO: 121389 - DNA, 80 bp, synthetic construct; identical to SEQ ID NO: 39314
  misc_feature 1..80: note = Artificially Synthesized Probe
  source 1..80: mol_type = other DNA

SEQ ID NO: 121390 - DNA, 80 bp, synthetic construct
  misc_feature 1..80: note = Artificially Synthesized Probe
  source 1..80: mol_type = other DNA
tagctgggactacactggcaggcattttataaaacactgttgattaaccgaaaggccatttctgagccacatcgcttacc

SEQ ID NO: 121391 - DNA, 80 bp, synthetic construct
  misc_feature 1..80: note = Artificially Synthesized Probe
  source 1..80: mol_type = other DNA
aaactcagatataaaactcagcacgctaacctgttagcgcagaattcagtgtcactgaacacacaatgtccagaacattc

SEQ ID NO: 121392 - DNA, 80 bp, synthetic construct
  misc_feature 1..80: note = Artificially Synthesized Probe
  source 1..80: mol_type = other DNA
aacacaggggcagtcactgctaaggatggtgaaagcgcagcagttgccgaagcttcactctgtgtgccgtttccggtcag

SEQ ID NO: 121393 - DNA, 80 bp, synthetic construct
  misc_feature 1..80: note = Artificially Synthesized Probe
  source 1..80: mol_type = other DNA
gactgcagacatgagccactgtactcaggcacttttgcctttgtatgttatgaatgttgtggctggtgctggggcctcct

SEQ ID NO: 121394 - DNA, 80 bp, synthetic construct
  misc_feature 1..80: note = Artificially Synthesized Probe
  source 1..80: mol_type = other DNA
ctccaagaagggtttctgcacccttgagaaacagccccacaggaaacaggccttctcttccccaggaccctgtcaggaac

SEQ ID NO: 121395 - DNA, 80 bp, synthetic construct; identical to SEQ ID NO: 39315
  misc_feature 1..80: note = Artificially Synthesized Probe
  source 1..80: mol_type = other DNA

SEQ ID NO: 121396 - DNA, 80 bp, synthetic construct
  misc_feature 1..80: note = Artificially Synthesized Probe
  source 1..80: mol_type = other DNA
catgaccaggcccatttcctcgaattccatcccgttctgctcagtcacctgccaccatgccgcaatggacacggggcgga

SEQ ID NO: 121397 - DNA, 80 bp, synthetic construct
  misc_feature 1..80: note = Artificially Synthesized Probe
  source 1..80: mol_type = other DNA
cacttgctgtgtcactttgagaaagtcaccagacctctctgaaccttagcccctccaactgtaaaatgggagctttactt

SEQ ID NO: 121398 - DNA, 80 bp, synthetic construct; identical to SEQ ID NO: 39316
  misc_feature 1..80: note = Artificially Synthesized Probe
  source 1..80: mol_type = other DNA

SEQ ID NO: 121399 - DNA, 80 bp, synthetic construct
  misc_feature 1..80: note = Artificially Synthesized Probe
  source 1..80: mol_type = other DNA
catgcagggaagatgtgacaagccggccactgcccctaggacctgagcccagtggatgcccttgaagcagctgggtcgtc

SEQ ID NO: 121400 - DNA, 80 bp, synthetic construct
  misc_feature 1..80: note = Artificially Synthesized Probe
  source 1..80: mol_type = other DNA
agacagcaaaatgccaggcaggaatcccctctggcaaagagaatgaagcttcatttccaaatagattaatctctcaaagg

SEQ ID NO: 121401 - DNA, 80 bp, synthetic construct
  misc_feature 1..80: note = Artificially Synthesized Probe
  source 1..80: mol_type = other DNA
gaatgaagcttcatttccaaatagattaatctctcaaaggcggacatggttttgtcttttagggcatttgtttccttagc

SEQ ID NO: 121402 - DNA, 80 bp, synthetic construct
  misc_feature 1..80: note = Artificially Synthesized Probe
  source 1..80: mol_type = other DNA
ctctggcaactgctagtctattttctgcctctgtggatttgaccaatctggacaatgcggataaatggagtcacatcata

SEQ ID NO: 121403 - DNA, 80 bp, synthetic construct
  misc_feature 1..80: note = Artificially Synthesized Probe
  source 1..80: mol_type = other DNA
tggcttatttcacttggcataatatcctcaagggtcctccataggaggcctttgtagccagtgtcggttttccctcctgc

SEQ ID NO: 121404 - DNA, 80 bp, synthetic construct; identical to SEQ ID NO: 39317
  misc_feature 1..80: note = Artificially Synthesized Probe
  source 1..80: mol_type = other DNA

SEQ ID NO: 121405 - DNA, 80 bp, synthetic construct
  misc_feature 1..80: note = Artificially Synthesized Probe
  source 1..80: mol_type = other DNA
atgtgctaactccacgtttaacttcactctacatttgacttcactctacatttgacttcactctacatttgacttcactc

SEQ ID NO: 121406 - DNA, 80 bp, synthetic construct
  misc_feature 1..80: note = Artificially Synthesized Probe
  source 1..80: mol_type = other DNA
gtaattctcttcccactgctgtcattttgtcttcaagcctttatctgcatgctcagtcaggagcttcacaccatggtcag

SEQ ID NO: 121407 - DNA, 80 bp, synthetic construct
  misc_feature 1..80: note = Artificially Synthesized Probe
  source 1..80: mol_type = other DNA
gaaaaccctatgtgtaaataaaggtatgtgctcaaagctttgttcagtggtgcattcaaccaatattgggcacctgcaat

SEQ ID NO: 121408 - DNA, 80 bp, synthetic construct; identical to SEQ ID NO: 39318
  misc_feature 1..80: note = Artificially Synthesized Probe
  source 1..80: mol_type = other DNA

SEQ ID NO: 121409 - DNA, 80 bp, synthetic construct
  misc_feature 1..80: note = Artificially Synthesized Probe
  source 1..80: mol_type = other DNA
ttgtctcatggatatatgggatccgttgtgatcccgaggacaagcacgtctttccacgcctcaggagagctgtgctgccc

SEQ ID NO: 121410 - DNA, 80 bp, synthetic construct
  misc_feature 1..80: note = Artificially Synthesized Probe
  source 1..80: mol_type = other DNA
aggggctcgtgagtgagggtccctatgagccggttctctttcaagcccagacaccagtgacctcagctttaagataaatc

SEQ ID NO: 121411 - DNA, 80 bp, synthetic construct
  misc_feature 1..80: note = Artificially Synthesized Probe
  source 1..80: mol_type = other DNA
gggtagtggggctggctttgaagtccagaaggagcacgttgtctcccaccaggagacgggggatgaatctgtgggaagga

SEQ ID NO: 121412 - DNA, 80 bp, synthetic construct; identical to SEQ ID NO: 39319
  misc_feature 1..80: note = Artificially Synthesized Probe
  source 1..80: mol_type = other DNA

SEQ ID NO: 121413 - DNA, 80 bp, synthetic construct
  misc_feature 1..80: note = Artificially Synthesized Probe
  source 1..80: mol_type = other DNA
tcaggaactcacctcagaggccactggttccccagccccatcccctcctcattcctcccctcagggcctagacaggtcat

SEQ ID NO: 121414 - DNA, 80 bp, synthetic construct
  misc_feature 1..80: note = Artificially Synthesized Probe
  source 1..80: mol_type = other DNA
actcccagcccctcggcgagacaaggcagagctaggacccaggtcttccaactccacactcaacatcatacccacatctc

SEQ ID NO: 121415 - DNA, 80 bp, synthetic construct
  misc_feature 1..80: note = Artificially Synthesized Probe
  source 1..80: mol_type = other DNA
agtaggaatagccaccggccccccaccaaccatccttggcttcatcaagaaaatggacagctggctgtgctggctgggca

SEQ ID NO: 121416 - DNA, 80 bp, synthetic construct
  misc_feature 1..80: note = Artificially Synthesized Probe
  source 1..80: mol_type = other DNA
catggacaatcctcttgtccatgtgggattcctgaccaggtcccacccaaagggcacagcaaggctgtctccatccacct

SEQ ID NO: 121417 - DNA, 80 bp, synthetic construct
  misc_feature 1..80: note = Artificially Synthesized Probe
  source 1..80: mol_type = other DNA
gctgggtgactttgaccctttttctctgttttccaaattttctgtggagcagcaaaataagaagtaaattgagatatgga

SEQ ID NO: 121418 - DNA, 80 bp, synthetic construct; identical to SEQ ID NO: 39320
  misc_feature 1..80: note = Artificially Synthesized Probe
  source 1..80: mol_type = other DNA

SEQ ID NO: 121419 - DNA, 80 bp, synthetic construct
  misc_feature 1..80: note = Artificially Synthesized Probe
  source 1..80: mol_type = other DNA
aggaggcagcgaacctttgccaagaccttagtggtcagcatttgccaacaagtcaatctcccacatgcctaagagatagg

SEQ ID NO: 121420 - DNA, 80 bp, synthetic construct
  misc_feature 1..80: note = Artificially Synthesized Probe
  source 1..80: mol_type = other DNA
tttgccaacaagtcaatctcccacatgcctaagagataggtgctatgataacccctatttcaacaagaaaacaatgagat

SEQ ID NO: 121421 - DNA, 80 bp, synthetic construct
  misc_feature 1..80: note = Artificially Synthesized Probe
  source 1..80: mol_type = other DNA
ataagaagtatctaaatcagagagctaataaatggtcaaaccaagatttgatcctgtgcagcttggaccagatgccagac

SEQ ID NO: 121422 - DNA, 80 bp, synthetic construct
  misc_feature 1..80: note = Artificially Synthesized Probe
  source 1..80: mol_type = other DNA
ccaagatttgatcctgtgcagcttggaccagatgccagacattttaatactgtagtgcaataaagggttaactcagcagg

SEQ ID NO: 121423 - DNA, 80 bp, synthetic construct
  misc_feature 1..80: note = Artificially Synthesized Probe
  source 1..80: mol_type = other DNA
aagacggggtccttacccagctcatgggagatcccctctgagccctgggaatatcctgtgtggtaagagtgcctgagttc

SEQ ID NO: 121424 - DNA, 80 bp, synthetic construct
  misc_feature 1..80: note = Artificially Synthesized Probe
  source 1..80: mol_type = other DNA
ctgtgtgaagaacccccaggaaaagccctggctccgaggctcaggagcagggtgcaggggtctggactccttgtgtgctg

SEQ ID NO: 121425 - DNA, 80 bp, synthetic construct; identical to SEQ ID NO: 39321
  misc_feature 1..80: note = Artificially Synthesized Probe
  source 1..80: mol_type = other DNA

SEQ ID NO: 121426 - DNA, 80 bp, synthetic construct
  misc_feature 1..80: note = Artificially Synthesized Probe
  source 1..80: mol_type = other DNA
tcaaagatgtaaatccaaaaaaaacccataaactccatggaaatgatctggaaggggcgtgctcacatggtaactgcggc

SEQ ID NO: 121427 - DNA, 80 bp, synthetic construct
  misc_feature 1..80: note = Artificially Synthesized Probe
  source 1..80: mol_type = other DNA
ttctcgggtgacaggctccgacgggaagaggcaccacagggtgccgcttgctcacctcctctcccctgggtgaaggctgc

SEQ ID NO: 121428 - DNA, 80 bp, synthetic construct; identical to SEQ ID NO: 39322
  misc_feature 1..80: note = Artificially Synthesized Probe
  source 1..80: mol_type = other DNA

SEQ ID NO: 121429 - DNA, 80 bp, synthetic construct
  misc_feature 1..80: note = Artificially Synthesized Probe
  source 1..80: mol_type = other DNA
caggtaggagggtccctctgcagatggagatgagggaggcaggggacagctagctcgggtgatgtcagccttgggtgatg

SEQ ID NO: 121430 - DNA, 80 bp, synthetic construct; identical to SEQ ID NO: 38705
  misc_feature 1..80: note = Artificially Synthesized Probe
  source 1..80: mol_type = other DNA

SEQ ID NO: 121431 - DNA, 80 bp, synthetic construct
  misc_feature 1..80: note = Artificially Synthesized Probe
  source 1..80: mol_type = other DNA
cccagccctggattccgtagcacccttgtgtaatgagctactcagacccaagttcccgtggcctttgcagccagaggcct

SEQ ID NO: 121432 - DNA, 80 bp, synthetic construct
  misc_feature 1..80: note = Artificially Synthesized Probe
  source 1..80: mol_type = other DNA
gaccagcaccaccctgaccctcaatcagtggcaaatccagcagtgtcctgtggctctgcctcgtgcccctgctgggcgct

SEQ ID NO: 121433 - DNA, 80 bp, synthetic construct; identical to SEQ ID NO: 39323
  misc_feature 1..80: note = Artificially Synthesized Probe
  source 1..80: mol_type = other DNA

SEQ ID NO: 121434 - DNA, 80 bp, synthetic construct
  misc_feature 1..80: note = Artificially Synthesized Probe
  source 1..80: mol_type = other DNA
tggccaaggatggtctcttggggccatgtcaagagtcgtttctggatggctgctgagatctgggagaaaggaaaggcccc

SEQ ID NO: 121435 - DNA, 80 bp, synthetic construct
  misc_feature 1..80: note = Artificially Synthesized Probe
  source 1..80: mol_type = other DNA
accctccacgtttcctaaagtggctactccatgaacacaaggggaaagaatacgcgaactcactctgcaaagtacacatc

SEQ ID NO: 121436 - DNA, 80 bp, synthetic construct
  misc_feature 1..80: note = Artificially Synthesized Probe
  source 1..80: mol_type = other DNA
tcctctgtgcgtttagttaactattccttagaggttacatcgtgactgttaaacagctgttggaagccaactcttccctc

SEQ ID NO: 121437 - DNA, 80 bp, synthetic construct; identical to SEQ ID NO: 39324
  misc_feature 1..80: note = Artificially Synthesized Probe
  source 1..80: mol_type = other DNA

SEQ ID NO: 121438 - DNA, 80 bp, synthetic construct
  misc_feature 1..80: note = Artificially Synthesized Probe
  source 1..80: mol_type = other DNA
aaaagtaaaaaaactagatggacatggtggcacatacctgtagtcccagctactgaggaggttgaggtgggaggcttgct

SEQ ID NO: 121439 - DNA, 80 bp, synthetic construct
  misc_feature 1..80: note = Artificially Synthesized Probe
  source 1..80: mol_type = other DNA
gagggtgcagcaagctatgactgggccactttactccagcctgggtgacagagtgaggccctgcctcaaaataaaaaaaa

SEQ ID NO: 121440 - DNA, 80 bp, synthetic construct
  misc_feature 1..80: note = Artificially Synthesized Probe
  source 1..80: mol_type = other DNA
aacctctgcctccggggttcaagtgattctctggcctcagcctcccgaatagctgggattataggcttccgctaccacac

SEQ ID NO: 121441 - DNA, 80 bp, synthetic construct
  misc_feature 1..80: note = Artificially Synthesized Probe
  source 1..80: mol_type = other DNA
tgagtcccaggtgccaccaatgccggggctgaccctgccctaaggctgagggcagccatcttggaaggcagcctgcagtt

SEQ ID NO: 121442 - DNA, 80 bp, synthetic construct; identical to SEQ ID NO: 39325
  misc_feature 1..80: note = Artificially Synthesized Probe
  source 1..80: mol_type = other DNA

SEQ ID NO: 121443 - DNA, 80 bp, synthetic construct
  misc_feature 1..80: note = Artificially Synthesized Probe
  source 1..80: mol_type = other DNA
gccaggtcttccagtcctcgcttccagaatccaaacagctctaactagtcctcagtgtgacaccgtcactggaggctgac

SEQ ID NO: 121444 - DNA, 80 bp, synthetic construct
  misc_feature 1..80: note = Artificially Synthesized Probe
  source 1..80: mol_type = other DNA
acctaaatttcaacaaattccactgcaaaaaaaaaagaaagattggtgtccgagaggtatactgggtttggcagtctgag

SEQ ID NO: 121445 - DNA, 80 bp, synthetic construct
  misc_feature 1..80: note = Artificially Synthesized Probe
  source 1..80: mol_type = other DNA
gcacccagtgtggcaggagggtgccctggaggggcatgagctggaagtgggcattgctggttgagtgggatgtgccaggg

SEQ ID NO: 121446 - DNA, 80 bp, synthetic construct
  misc_feature 1..80: note = Artificially Synthesized Probe
  source 1..80: mol_type = other DNA
accccataaaccctagcccgatgctgctttccaaatctcggatagctccaggggacattacgttgccaggacagggctgt

SEQ ID NO: 121447 - DNA, 80 bp, synthetic construct; identical to SEQ ID NO: 39326
  misc_feature 1..80: note = Artificially Synthesized Probe
  source 1..80: mol_type = other DNA

SEQ ID NO: 121448 - DNA, 80 bp, synthetic construct
  misc_feature 1..80: note = Artificially Synthesized Probe
  source 1..80: mol_type = other DNA
cagaggttgctaaactctgggagatcacaggccaggaaacagaagaaaaagaaatttcatgatcctgttgagatgaccaa

SEQ ID NO: 121449 - DNA, 80 bp, synthetic construct
  misc_feature 1..80: note = Artificially Synthesized Probe
  source 1..80: mol_type = other DNA
agtcctctgagtctaagccactgtgcttcaaaagcagaacgtccctctcaggccctggctctgctcatttcaccacagat

SEQ ID NO: 121450 - DNA, 80 bp, synthetic construct; identical to SEQ ID NO: 39327
  misc_feature 1..80: note = Artificially Synthesized Probe
  source 1..80: mol_type = other DNA

SEQ ID NO: 121451 - DNA, 80 bp, synthetic construct
  misc_feature 1..80: note = Artificially Synthesized Probe
  source 1..80: mol_type = other DNA
cctcctctcagaatcaggaacagccatggtgccccctcccaccagcacacacatggtcatacccagacccagctcctcac

SEQ ID NO: 121452 - DNA, 80 bp, synthetic construct
  misc_feature 1..80: note = Artificially Synthesized Probe
  source 1..80: mol_type = other DNA
gaccctccatactgcgtgtccctggactaccaaacagcacatctgctctggaggtgagggtctttgtcccatcccatcaa

SEQ ID NO: 121453 - DNA, 80 bp, synthetic construct
  misc_feature 1..80: note = Artificially Synthesized Probe
  source 1..80: mol_type = other DNA
aatgctgagtggctgctgcatggcatggttgagttattgcagagaagttacaaaaacagactacatagtgagctgaccgg

SEQ ID NO: 121454 - DNA, 80 bp, synthetic construct
  misc_feature 1..80: note = Artificially Synthesized Probe
  source 1..80: mol_type = other DNA
tctgggagtggcaataaaccaccgaggattcgacacaggacgtgggttgtgtgctgaggcatccattcttcacaagactc

SEQ ID NO: 121455 - DNA, 80 bp, synthetic construct; identical to SEQ ID NO: 39328
  misc_feature 1..80: note = Artificially Synthesized Probe
  source 1..80: mol_type = other DNA

SEQ ID NO: 121456 - DNA, 80 bp, synthetic construct
  misc_feature 1..80: note = Artificially Synthesized Probe
  source 1..80: mol_type = other DNA
cccaggttcatgccattctcctgcctcagcctcccgagtagctgggactacagaagcccaccaccacgcccggctaattt

SEQ ID NO: 121457 - DNA, 80 bp, synthetic construct
  misc_feature 1..80: note = Artificially Synthesized Probe
  source 1..80: mol_type = other DNA
catgcccagcccagatacatatttatattcatgtaatgtgcttttgtttctgttcacactcatctcacttcttccctact

SEQ ID NO: 121458 - DNA, 80 bp, synthetic construct
  misc_feature 1..80: note = Artificially Synthesized Probe
  source 1..80: mol_type = other DNA
tgaaggaactggggacagagagcaccattgtcctaaataaaacacactccacacctggacagcactctccctgctccaag

SEQ ID NO: 121459 - DNA, 80 bp, synthetic construct
  misc_feature 1..80: note = Artificially Synthesized Probe
  source 1..80: mol_type = other DNA
gtccatctgcaccgctgacaggatcctgccatttgacccctcagggtcctgtttcaggggggtcccccagggctgctgca

SEQ ID NO: 121460 - DNA, 80 bp, synthetic construct; identical to SEQ ID NO: 39329
  misc_feature 1..80: note = Artificially Synthesized Probe
  source 1..80: mol_type = other DNA

SEQ ID NO: 121461 - DNA, 80 bp, synthetic construct
  misc_feature 1..80: note = Artificially Synthesized Probe
  source 1..80: mol_type = other DNA
gctagggaggtcaaagctgcagtgagccacggttgtgccactgccctccagcctgggcaacaaagcaagatcctgtctca

SEQ ID NO: 121462 - DNA, 80 bp, synthetic construct
  misc_feature 1..80: note = Artificially Synthesized Probe
  source 1..80: mol_type = other DNA
ccatcctctccctcagtctctccccaaccactaattattttctctatatataacttggccactttgaggcatttcatata

SEQ ID NO: 121463 - DNA, 80 bp, synthetic construct; identical to SEQ ID NO: 38632
  misc_feature 1..80: note = Artificially Synthesized Probe
  source 1..80: mol_type = other DNA

SEQ ID NO: 121464 - DNA, 80 bp, synthetic construct
  misc_feature 1..80: note = Artificially Synthesized Probe
  source 1..80: mol_type = other DNA
ctctggcttaacgtccacctcaaagcctattcactgtgttttcagctttcactgaggtcaaagatatttgaaaccatttt

SEQ ID NO: 121465 - DNA, 80 bp, synthetic construct; identical to SEQ ID NO: 39330
  misc_feature 1..80: note = Artificially Synthesized Probe
  source 1..80: mol_type = other DNA

SEQ ID NO: 121466 - DNA, 80 bp, synthetic construct
  misc_feature 1..80: note = Artificially Synthesized Probe
  source 1..80: mol_type = other DNA
agattaaaaaccggatgttaactgtacaaatgctctcttatgctacagttgggtcttagagactcctcatggttcaagca

SEQ ID NO: 121467 - DNA, 80 bp, synthetic construct; identical to SEQ ID NO: 38706
  misc_feature 1..80: note = Artificially Synthesized Probe
  source 1..80: mol_type = other DNA

SEQ ID NO: 121468 - DNA, 80 bp, synthetic construct
  misc_feature 1..80: note = Artificially Synthesized Probe
  source 1..80: mol_type = other DNA
taaaaatgttctcagacctggctttaaagccaaagcaaaatgtcacagcccttttcctaggacttaaaagacattctggg

SEQ ID NO: 121469 - DNA, 80 bp, synthetic construct
  misc_feature 1..80: note = Artificially Synthesized Probe
  source 1..80: mol_type = other DNA
ggccgagatggaaggatttatagaaatgagcatgctgaacacaatcctgttccctggatgaataaactcaatccaagtcc

SEQ ID NO: 121470 - DNA, 80 bp, synthetic construct
  misc_feature 1..80: note = Artificially Synthesized Probe
  source 1..80: mol_type = other DNA
ggaggcacaggaagaggagcagggaccccaggcggaggcacagggagaggagcagggaccccaggcggaggcacagggag

SEQ ID NO: 121471 - DNA, 80 bp, synthetic construct; identical to SEQ ID NO: 39331
  misc_feature 1..80: note = Artificially Synthesized Probe
  source 1..80: mol_type = other DNA

SEQ ID NO: 121472 - DNA, 80 bp, synthetic construct
  misc_feature 1..80: note = Artificially Synthesized Probe
  source 1..80: mol_type = other DNA
tggtattttgtgaggacgccaagattaccatactctttcgtccctctattctggaaaacacagtttgctccaacctttca

SEQ ID NO: 121473 - DNA, 80 bp, synthetic construct
  misc_feature 1..80: note = Artificially Synthesized Probe
  source 1..80: mol_type = other DNA
tccctctattctggaaaacacagtttgctccaacctttcactatcctaaatagtgccaagttggacatctttatgatcac

SEQ ID NO: 121474 - DNA, 80 bp, synthetic construct
  misc_feature 1..80: note = Artificially Synthesized Probe
  source 1..80: mol_type = other DNA
ctgtgctctggaattgtttttaatcactgcacgagccatgtggggcattagacctaaatagcattgttgaactctgaggg

SEQ ID NO: 121475 - DNA, 80 bp, synthetic construct; identical to SEQ ID NO: 39332
  misc_feature 1..80: note = Artificially Synthesized Probe
  source 1..80: mol_type = other DNA

SEQ ID NO: 121476 - DNA, 80 bp, synthetic construct
  misc_feature 1..80: note = Artificially Synthesized Probe
  source 1..80: mol_type = other DNA
cagccaatatgaaccacccctgccctaacgcgccccaggaccaggtgccaggcaagcaaagacctcccctacagccccag

SEQ ID NO: 121477 - DNA, 80 bp, synthetic construct
  misc_feature 1..80: note = Artificially Synthesized Probe
  source 1..80: mol_type = other DNA
ccataaaaccttcttttgggaaatctttttgtcctcactcagccacctccatcagttaaaatcccgcagcacaaatgaga

SEQ ID NO: 121478 - DNA, 80 bp, synthetic construct
  misc_feature 1..80: note = Artificially Synthesized Probe
  source 1..80: mol_type = other DNA
atccatgtgtgtcgtttgcagcacagcccctggaggtgcatgtgggctgtgctcagccctgcttatgggacacggccata

SEQ ID NO: 121479 - DNA, 80 bp, synthetic construct
  misc_feature 1..80: note = Artificially Synthesized Probe
  source 1..80: mol_type = other DNA
tctgtagccaaaagacatcgtgatttagcgccatcagctttgcttgagaaaacgaccttccctaaccacacgtttccgaa

SEQ ID NO: 121480 - DNA, 80 bp, synthetic construct
  misc_feature 1..80: note = Artificially Synthesized Probe
  source 1..80: mol_type = other DNA
cccacacatctgtcgcgtgccaccccgggctgccctgtcctctggggtggggtatcgcgcagttctgactgggacccatg

SEQ ID NO: 121481 - DNA, 80 bp, synthetic construct; identical to SEQ ID NO: 39333
  misc_feature 1..80: note = Artificially Synthesized Probe
  source 1..80: mol_type = other DNA

SEQ ID NO: 121482 - DNA, 80 bp, synthetic construct
  misc_feature 1..80: note = Artificially Synthesized Probe
  source 1..80: mol_type = other DNA
atcaggcaggcatgccccgatgtgcgatgtccttcatcaaaacccctcgtgatagtgcagcttaatgccatccgagtgct

SEQ ID NO: 121483 - DNA, 80 bp, synthetic construct
  misc_feature 1..80: note = Artificially Synthesized Probe
  source 1..80: mol_type = other DNA
tcaccctgtctgaacacgccactctgtcatctcaaggctttgtgtctcccatgaagccttcagcaggttctgccctggtc

SEQ ID NO: 121484 - DNA, 80 bp, synthetic construct
  misc_feature 1..80: note = Artificially Synthesized Probe
  source 1..80: mol_type = other DNA
ggaaggcctgctgaggatgtacctcctttcccaggcaggcacctgcagaaggccacagccccaactgttccccgaggagg

SEQ ID NO: 121485 - DNA, 80 bp, synthetic construct; identical to SEQ ID NO: 39334
  misc_feature 1..80: note = Artificially Synthesized Probe
  source 1..80: mol_type = other DNA

SEQ ID NO: 121486 - DNA, 80 bp, synthetic construct
  misc_feature 1..80: note = Artificially Synthesized Probe
  source 1..80: mol_type = other DNA
gcaggcaagggagtggagcaagtggagccctcatccgacgctggagaggaggtccaacggcgcagccactctctggaaca

SEQ ID NO: 121487 - DNA, 80 bp, synthetic construct
  misc_feature 1..80: note = Artificially Synthesized Probe
  source 1..80: mol_type = other DNA
cagcatgtgataaacataatattggattaaaaagatgctgtatcatatggtgcagtatcactcagcctttaaaaggaagg

SEQ ID NO: 121488 - DNA, 80 bp, synthetic construct; identical to SEQ ID NO: 39335
  misc_feature 1..80: note = Artificially Synthesized Probe
  source 1..80: mol_type = other DNA

SEQ ID NO: 121489 - DNA, 80 bp, synthetic construct
  misc_feature 1..80: note = Artificially Synthesized Probe
  source 1..80: mol_type = other DNA
actcttcacaaatgttaatattgatttgggtgatgactgcgccactctgaaaatacagccacgtgctgctgtcaacattt

SEQ ID NO: 121490 - DNA, 80 bp, synthetic construct
  misc_feature 1..80: note = Artificially Synthesized Probe
  source 1..80: mol_type = other DNA
aaagaagcattttcacaagacaacctgatcacgcagcttcctgcctgtaccctggcggggtttccaatgggcctcctaac

SEQ ID NO: 121491 - DNA, 80 bp, synthetic construct
  misc_feature 1..80: note = Artificially Synthesized Probe
  source 1..80: mol_type = other DNA
gcgtctgtgatgctgctggcctaaacagacctcctgcactgccaatctaattaaagtctagcacatacaattttgtaggt

SEQ ID NO: 121492 - DNA, 80 bp, synthetic construct
  misc_feature 1..80: note = Artificially Synthesized Probe
  source 1..80: mol_type = other DNA
ctgaggtcaggagtttgagaccagtctggccaacatggtgaaaccccgtctctaccaaaaatacaaaattagccaggcat

SEQ ID NO: 121493 - DNA, 80 bp, synthetic construct
  misc_feature 1..80: note = Artificially Synthesized Probe
  source 1..80: mol_type = other DNA
ctaggggccaggtgcagtggctcatgcctgtaatcccagcacttcgggatgccaaggcaggtggatcacttgaggtgagg

SEQ ID NO: 121494 - DNA, 80 bp, synthetic construct
  misc_feature 1..80: note = Artificially Synthesized Probe
  source 1..80: mol_type = other DNA
atgccactgcactccagcctgggcaacagagcaagactccgtctcaaaaaaaaaaaagtaaactgtaaaacagcctcagg

SEQ ID NO: 121495 - DNA, 80 bp, synthetic construct
  misc_feature 1..80: note = Artificially Synthesized Probe
  source 1..80: mol_type = other DNA
gatttgtgtcttagtttttaacaaaaaaattaaaaagtaaaaaagtctttgaatagaaaaaggcttatggaataaggata

SEQ ID NO: 121496 - DNA, 80 bp, synthetic construct
  misc_feature 1..80: note = Artificially Synthesized Probe
  source 1..80: mol_type = other DNA
ctcctgggttcacaccattatcctgcctcagcctcctgagtagctgggactacaggcacccgccaccacgcccggctaat

SEQ ID NO: 121497 - DNA, 80 bp, synthetic construct
  misc_feature 1..80: note = Artificially Synthesized Probe
  source 1..80: mol_type = other DNA
aaattaaaagtttataaaataaaaaagttacagtaagctaaagtcaatttattattgaagaaattcttctaattttcttt

SEQ ID NO: 121498 - DNA, 80 bp, synthetic construct
  misc_feature 1..80: note = Artificially Synthesized Probe
  source 1..80: mol_type = other DNA
acgcccagctaattttgtatgtttcgtagagacggggtttctccttgttggtcaggctggtctcaaactcccgacatcag

SEQ ID NO: 121499 - DNA, 80 bp, synthetic construct; identical to SEQ ID NO: 39337
  misc_feature 1..80: note = Artificially Synthesized Probe
  source 1..80: mol_type = other DNA

SEQ ID NO: 121500 - DNA, 80 bp, synthetic construct
  misc_feature 1..80: note = Artificially Synthesized Probe
  source 1..80: mol_type = other DNA
gcccccagcaggaaggagtcccaagcagccttctctgtagggcacccagagagagtggcatctgtgcaccccacaggtgg

SEQ ID NO: 121501 - DNA, 80 bp, synthetic construct
  misc_feature 1..80: note = Artificially Synthesized Probe
  source 1..80: mol_type = other DNA
aacttgaacagagcaagcaggcgggtagaagggcaggggcggcatgcgctgggtgaggaggcagagccctcaaccggcct

SEQ ID NO: 121502 - DNA, 80 bp, synthetic construct
  misc_feature 1..80: note = Artificially Synthesized Probe
  source 1..80: mol_type = other DNA
gaaaagtggcatggttctaggcaatgcgctgagatcatttagaacaaggcccacaaaattttctgtaaaagtccagctgg

SEQ ID NO: 121503 - DNA, 80 bp, synthetic construct; identical to SEQ ID NO: 39338
  misc_feature 1..80: note = Artificially Synthesized Probe
  source 1..80: mol_type = other DNA

SEQ ID NO: 121504 - DNA, 80 bp, synthetic construct
  misc_feature 1..80: note = Artificially Synthesized Probe
  source 1..80: mol_type = other DNA
cacaatgaaataccacatcaacaccccctagaatggctattttaaaaaacaaaaacaaaaaaaacaaacaggccaggtgt

SEQ ID NO: 121505 - DNA, 80 bp, synthetic construct
  misc_feature 1..80: note = Artificially Synthesized Probe
  source 1..80: mol_type = other DNA
aataaaataattagccaggcatggtggtgggtgcctgtaatctcagctactcgggaggctgaggtaggagaatcacttga

SEQ ID NO: 121506 - DNA, 80 bp, synthetic construct
  misc_feature 1..80: note = Artificially Synthesized Probe
  source 1..80: mol_type = other DNA
acaggccaggtgtggtggctcacacctgtaattctagcacttggggaagctgaggtgggtcaattgcttgagctcaggag

SEQ ID NO: 121507 - DNA, 80 bp, synthetic construct
  misc_feature 1..80: note = Artificially Synthesized Probe
  source 1..80: mol_type = other DNA
taagccttactgtgccactgcaatccagcctgggtgacagagtgagacccagtctcaaaacagaaacaaacaaacaaaca

SEQ ID NO: 121508 - DNA, 80 bp, synthetic construct; identical to SEQ ID NO: 39339
  misc_feature 1..80: note = Artificially Synthesized Probe
  source 1..80: mol_type = other DNA

SEQ ID NO: 121509 - DNA, 80 bp, synthetic construct
  misc_feature 1..80: note = Artificially Synthesized Probe
  source 1..80: mol_type = other DNA
cactggatgaacgcataaacaaggtgtggtccattcacagaaggagtatttcttaggcttaaaaagaaatgaagttccaa

SEQ ID NO: 121510 - DNA, 80 bp, synthetic construct
  misc_feature 1..80: note = Artificially Synthesized Probe
  source 1..80: mol_type = other DNA
ggggagggagggttcaatgcggacagagtttcagtttggaaagacgaaaaagttctggagacggttggtggcgatggttg

SEQ ID NO: 121511 - DNA, 80 bp, synthetic construct
  misc_feature 1..80: note = Artificially Synthesized Probe
  source 1..80: mol_type = other DNA
ggtgaaaccctgtctctactaaaaatacaaaaattagccgggcttggtggcaggcgcctgtagtcccagctacacaggag

SEQ ID NO: 121512 - DNA, 80 bp, synthetic construct
  misc_feature 1..80: note = Artificially Synthesized Probe
  source 1..80: mol_type = other DNA
aagactttaaaaataaaaacaaaatttcatttacaaaaacaaggaatgagcaggattggaccctcacaccacagtctgcc

SEQ ID NO: 121513 - DNA, 80 bp, synthetic construct
  misc_feature 1..80: note = Artificially Synthesized Probe
  source 1..80: mol_type = other DNA
gttttcctctcctctactgacacatggctcctaaaatctcaggaccctccagagtgctgagtgtctttgtatgctagtga

SEQ ID NO: 121514 - DNA, 80 bp, synthetic construct; identical to SEQ ID NO: 39340
  misc_feature 1..80: note = Artificially Synthesized Probe
  source 1..80: mol_type = other DNA

SEQ ID NO: 121515 - DNA, 80 bp, synthetic construct
  misc_feature 1..80: note = Artificially Synthesized Probe
  source 1..80: mol_type = other DNA
ttccagtttttttctgagcagcaaggggaggtgatcggtagacaaggttagaaacccaggatgtctgcaggtgcctaggc

SEQ ID NO: 121516 - DNA, 80 bp, synthetic construct
  misc_feature 1..80: note = Artificially Synthesized Probe
  source 1..80: mol_type = other DNA
cacctgaggaagcaggagaagccgctggagggtgaagcgcccaggtgagcatggccgggttggtgattctggctcaccct

SEQ ID NO: 121517 - DNA, 80 bp, synthetic construct; identical to SEQ ID NO: 39341
  misc_feature 1..80: note = Artificially Synthesized Probe
  source 1..80: mol_type = other DNA

SEQ ID NO: 121518 - DNA, 80 bp, synthetic construct
  misc_feature 1..80: note = Artificially Synthesized Probe
  source 1..80: mol_type = other DNA
acaagcaaaggctcaacccaacagcctgagtgttcctttcttacgaagctcccagaggagctaagaagggagtttcaggg

SEQ ID NO: 121519 - DNA, 80 bp, synthetic construct
  misc_feature 1..80: note = Artificially Synthesized Probe
  source 1..80: mol_type = other DNA
aatagcaagccccaagtccaagctccgaggaagccaaaggcagctgactgctgacaacatcttatggctcaaccccgagc

SEQ ID NO: 121520 - DNA, 80 bp, synthetic construct
  misc_feature 1..80: note = Artificially Synthesized Probe
  source 1..80: mol_type = other DNA
tgggccagtgcttctgcacaagggacaagtatgcagcatcggccacagacgagggggactgtggaggatacagacccagc

SEQ ID NO: 121521 - DNA, 80 bp, synthetic construct
  misc_feature 1..80: note = Artificially Synthesized Probe
  source 1..80: mol_type = other DNA
gcttgaacatggggagggagagagtccgactgcatttcagacgggattggtgagctgtagagctggagacaggaaaacca

SEQ ID NO: 121522 - DNA, 80 bp, synthetic construct; identical to SEQ ID NO: 39342
  misc_feature 1..80: note = Artificially Synthesized Probe
  source 1..80: mol_type = other DNA

SEQ ID NO: 121523 - DNA, 80 bp, synthetic construct
  misc_feature 1..80: note = Artificially Synthesized Probe
  source 1..80: mol_type = other DNA
tccctaaacaatacagtatagcaaacatttacatatcatttacattgtttaggtatcatacacaatctggagatgtttta

SEQ ID NO: 121524 - DNA, 80 bp, synthetic construct
  misc_feature 1..80: note = Artificially Synthesized Probe
  source 1..80: mol_type = other DNA
ccgagggatgactgtacggcccttccacagtattaagatctcatggtgcacacaattaggaaagtatatctgacgcagct

SEQ ID NO: 121525 - DNA, 80 bp, synthetic construct; identical to SEQ ID NO: 38707
  misc_feature 1..80: note = Artificially Synthesized Probe
  source 1..80: mol_type = other DNA

SEQ ID NO: 121526 - DNA, 80 bp, synthetic construct
  misc_feature 1..80: note = Artificially Synthesized Probe
  source 1..80: mol_type = other DNA
gatagctcagaaggattgagaaattgcccacagggctctggaccacacagatctgtctttatggtccctggtatacaagg

SEQ ID NO: 121527 - DNA, 80 bp, synthetic construct; identical to SEQ ID NO: 39343
  misc_feature 1..80: note = Artificially Synthesized Probe
  source 1..80: mol_type = other DNA

SEQ ID NO: 121528 - DNA, 80 bp, synthetic construct
  misc_feature 1..80: note = Artificially Synthesized Probe
  source 1..80: mol_type = other DNA
ggcgcacccccgttcatgtgaaaatgacggagaggagctggaagcacctgcaccactcatctgtctgcagccaccctgac

SEQ ID NO: 121529 - DNA, 80 bp, synthetic construct
  misc_feature 1..80: note = Artificially Synthesized Probe
  source 1..80: mol_type = other DNA
ctgacaacaagaaacttaaagtccctggccacagtgcaaaggtggggaggtggaccaaacccagacagtggccactggct

SEQ ID NO: 121530 - DNA, 80 bp, synthetic construct
  misc_feature 1..80: note = Artificially Synthesized Probe
  source 1..80: mol_type = other DNA
gggcatggtcagacacagactgttgagaggcacatgttaaaacttcatgtagattctgatatttctgtgctaaaaaccag

SEQ ID NO: 121531 - DNA, 80 bp, synthetic construct
  misc_feature 1..80: note = Artificially Synthesized Probe
  source 1..80: mol_type = other DNA
aacttcatgtagattctgatatttctgtgctaaaaaccagggatcgaacttctgcttccgggcaattggagtagacacat

SEQ ID NO: 121532 - DNA, 80 bp, synthetic construct; identical to SEQ ID NO: 39344
  misc_feature 1..80: note = Artificially Synthesized Probe
  source 1..80: mol_type = other DNA

SEQ ID NO: 121533 - DNA, 80 bp, synthetic construct
  misc_feature 1..80: note = Artificially Synthesized Probe
  source 1..80: mol_type = other DNA
gtaccacaacaaaagcatattctctttagtcgaaagactaggaaagcggcagctaacagggcaatatatttagacaacag

SEQ ID NO: 121534 - DNA, 80 bp, synthetic construct
  misc_feature 1..80: note = Artificially Synthesized Probe
  source 1..80: mol_type = other DNA
cattcatccccaccaggcagtaacaaatcctcctttcactccggcattagtataggcagcatggggagcctggatttcta

SEQ ID NO: 121535 - DNA, 80 bp, synthetic construct
  misc_feature 1..80: note = Artificially Synthesized Probe
  source 1..80: mol_type = other DNA
ggatcaggaagatttcaaactgaaaaaaagaaaatcaatggatgccaacatggaggtgacagagatgtcaggatgatctg

SEQ ID NO: 121536 - DNA, 80 bp, synthetic construct; identical to SEQ ID NO: 39345
  misc_feature 1..80: note = Artificially Synthesized Probe
  source 1..80: mol_type = other DNA

SEQ ID NO: 121537 - DNA, 80 bp, synthetic construct
  misc_feature 1..80: note = Artificially Synthesized Probe
  source 1..80: mol_type = other DNA
ggctgaggcaggagaatcacctggacccaggaggtagaggttgcagtgagctgagatcatgccatgcactccagcctggg

SEQ ID NO: 121538 - DNA, 80 bp, synthetic construct
  misc_feature 1..80: note = Artificially Synthesized Probe
  source 1..80: mol_type = other DNA
cccaactgaacaatagagtgaaacagactgaaaataaataaacagagtctcagggagttatgggacaataataaaatacc

SEQ ID NO: 121539 - DNA, 80 bp, synthetic construct
  misc_feature 1..80: note = Artificially Synthesized Probe
  source 1..80: mol_type = other DNA
taattgaaccagagaagggcatcatgggaaccctgattcatagctggtcggtcagaggcacaggtcacaacctggggctt

SEQ ID NO: 121540 - DNA, 80 bp, synthetic construct
  misc_feature 1..80: note = Artificially Synthesized Probe
  source 1..80: mol_type = other DNA
aacagagtctcagggagttatgggacaataataaaatacctaactttaaatgtttgaaatcccagaaggagagagaagag

SEQ ID NO: 121541 - DNA, 80 bp, synthetic construct
  misc_feature 1..80: note = Artificially Synthesized Probe
  source 1..80: mol_type = other DNA
taactttaaatgtttgaaatcccagaaggagagagaagagagggagggtctgaaaaagtactcaaaatgtcccaaatttg

SEQ ID NO: 121542 - DNA, 80 bp, synthetic construct
  misc_feature 1..80: note = Artificially Synthesized Probe
  source 1..80: mol_type = other DNA
agggagggtctgaaaaagtactcaaaatgtcccaaatttgctgagagatataaacctacagattccagaagctgaacgaa

SEQ ID NO: 121543 - DNA, 80 bp, synthetic construct; identical to SEQ ID NO: 39346
  misc_feature 1..80: note = Artificially Synthesized Probe
  source 1..80: mol_type = other DNA

SEQ ID NO: 121544 - DNA, 80 bp, synthetic construct
  misc_feature 1..80: note = Artificially Synthesized Probe
  source 1..80: mol_type = other DNA
gaaggaaaaaagtatggtaagcaaaatgtttggcaaatataataggctttccttctcaagttttatagattatatttgat

SEQ ID NO: 121545 - DNA, 80 bp, synthetic construct
  misc_feature 1..80: note = Artificially Synthesized Probe
  source 1..80: mol_type = other DNA
gcctagagcaaccacttaaaaagctatacaaagagatatactcataaacactacagatgaatcaaaatggaaccctaaaa

SEQ ID NO: 121546 - DNA, 80 bp, synthetic construct
  misc_feature 1..80: note = Artificially Synthesized Probe
  source 1..80: mol_type = other DNA
tataccagttaaaagacagagattggcagagtagattttaaaagatacaattaaatgaggtctataaaaatttgcttcaa

SEQ ID NO: 121547 - DNA, 80 bp, synthetic construct
  misc_feature 1..80: note = Artificially Synthesized Probe
  source 1..80: mol_type = other DNA
gaaaataccacaaagagaacattacataatgtaagagaggactccaccaagaagacatagttattctaaacgtgtaccaa

SEQ ID NO: 121548 - DNA, 80 bp, synthetic construct; identical to SEQ ID NO: 39347
  misc_feature 1..80: note = Artificially Synthesized Probe
  source 1..80: mol_type = other DNA

SEQ ID NO: 121549 - DNA, 80 bp, synthetic construct
  misc_feature 1..80: note = Artificially Synthesized Probe
  source 1..80: mol_type = other DNA
ggagacccaaacaaacccaaagcaagcagaaggaagaaaataataaacatatgagtgggaaaaaatgaacaggaaacaga

SEQ ID NO: 121550 - DNA, 80 bp, synthetic construct
  misc_feature 1..80: note = Artificially Synthesized Probe
  source 1..80: mol_type = other DNA
attaaataggagacaccattaaagaccctgcagacatgaaaaagatactaagggaatactaaatcagctctacacacata

SEQ ID NO: 121551 - DNA, 80 bp, synthetic construct
  misc_feature 1..80: note = Artificially Synthesized Probe
  source 1..80: mol_type = other DNA
atacaaactacttcaccttgcccaatttgaaaaaggtaatttgaatcatttcctacaactattaagggaagtgaattcat

SEQ ID NO: 121552 - DNA, 80 bp, synthetic construct; identical to SEQ ID NO: 39348
  misc_feature 1..80: note = Artificially Synthesized Probe
  source 1..80: mol_type = other DNA

SEQ ID NO: 121553 - DNA, 80 bp, synthetic construct
  misc_feature 1..80: note = Artificially Synthesized Probe
  source 1..80: mol_type = other DNA
gaaaccctgtctctactaaaaatacaaaaattagctgggccttgtagtgggtgcctgtaatcccagctattcgggaggct

SEQ ID NO: 121554 - DNA, 80 bp, synthetic construct
  misc_feature 1..80: note = Artificially Synthesized Probe
  source 1..80: mol_type = other DNA
ccccactcatctggccactgagggctctgtgtggattgcgttgagagagtatagtgggaagaaactgagtttgctttttc

SEQ ID NO: 121555 - DNA, 80 bp, synthetic construct
  misc_feature 1..80: note = Artificially Synthesized Probe
  source 1..80: mol_type = other DNA
ttaaaaaagaagataccttatacaaacgtaaatcaaaggtcttcatgaatatagacacagaaatctttaacaaaggagta

SEQ ID NO: 121556 - DNA, 80 bp, synthetic construct
  misc_feature 1..80: note = Artificially Synthesized Probe
  source 1..80: mol_type = other DNA
gcatttaacaaaattcagcatctttctttgagaaaaactctccccaaaacaagatgggaatttcccccacttgataaaga

SEQ ID NO: 121557 - DNA, 80 bp, synthetic construct
  misc_feature 1..80: note = Artificially Synthesized Probe
  source 1..80: mol_type = other DNA
tccccaaaacaagatgggaatttcccccacttgataaagaacatctgcgaagaaacatgagccaagattcaccaaataaa

SEQ ID NO: 121558 - DNA, 80 bp, synthetic construct
  misc_feature 1..80: note = Artificially Synthesized Probe
  source 1..80: mol_type = other DNA
acatctgcgaagaaacatgagccaagattcaccaaataaaaacaaaatgctttccccatatgatcaggaccaaggcaaag

SEQ ID NO: 121559 - DNA, 80 bp, synthetic construct; identical to SEQ ID NO: 39349
  misc_feature 1..80: note = Artificially Synthesized Probe
  source 1..80: mol_type = other DNA

SEQ ID NO: 121560 - DNA, 80 bp, synthetic construct
  misc_feature 1..80: note = Artificially Synthesized Probe
  source 1..80: mol_type = other DNA
gtgggtcatgcctgtaatcccagcacttctgggaggccgaggtgggtggatcacgaggtcagtagatagagaccatcctg

SEQ ID NO: 121561 - DNA, 80 bp, synthetic construct
  misc_feature 1..80: note = Artificially Synthesized Probe
  source 1..80: mol_type = other DNA
gcagtgagccaagactgcaccactgcactctagcctggcaacagagtgagactccatctcaaaaaagaaaaaaaaaaaaa

SEQ ID NO: 121562 - DNA, 80 bp, synthetic construct
  misc_feature 1..80: note = Artificially Synthesized Probe
  source 1..80: mol_type = other DNA
ggtcaatttttcccaaactgatgtgcaggtgatgatgatgaacacaattccagtcaaaatctcagcaaaatttttttgta

SEQ ID NO: 121563 - DNA, 80 bp, synthetic construct
  misc_feature 1..80: note = Artificially Synthesized Probe
  source 1..80: mol_type = other DNA
acttgggaggcggaggcaggagaatcacttgaacctgggaagcagaggttgcagtgagttgagatgccactgcactccag

SEQ ID NO: 121564 - DNA, 80 bp, synthetic construct; identical to SEQ ID NO: 39350
  misc_feature 1..80: note = Artificially Synthesized Probe
  source 1..80: mol_type = other DNA

SEQ ID NO: 121565 - DNA, 80 bp, synthetic construct
  misc_feature 1..80: note = Artificially Synthesized Probe
  source 1..80: mol_type = other DNA
tactcagcttcaagatttattatacagtatagtaatcaaagctgtgtggttctggtggagggacaggcacatagcaatag

SEQ ID NO: 121566 - DNA, 80 bp, synthetic construct
  misc_feature 1..80: note = Artificially Synthesized Probe
  source 1..80: mol_type = other DNA
ggacatccatcagcaaaacaatgaacatcaacctaagggtcatgccttatacaaaaattaattcaaaatgaatcatgaac

SEQ ID NO: 121567 - DNA, 80 bp, synthetic construct; identical to SEQ ID NO: 38708
  misc_feature 1..80: note = Artificially Synthesized Probe
  source 1..80: mol_type = other DNA

SEQ ID NO: 121568 - DNA, 80 bp, synthetic construct; identical to SEQ ID NO: 39351
  misc_feature 1..80: note = Artificially Synthesized Probe
  source 1..80: mol_type = other DNA

SEQ ID NO: 121569 - DNA, 80 bp, synthetic construct
  misc_feature 1..80: note = Artificially Synthesized Probe
  source 1..80: mol_type = other DNA
ataagcacatgaaagatgttcaacacaccagctattaaagaaatgcaaataaaacaaatatgaccatacacctatcaaaa

SEQ ID NO: 121570 - DNA, 80 bp, synthetic construct
  misc_feature 1..80: note = Artificially Synthesized Probe
  source 1..80: mol_type = other DNA
gaaaacagtgtagcagttccttaaaaacctaaatatgtaactcccatgtgacccaaaaaccacactcctaggcattcgtc

SEQ ID NO: 121571 - DNA, 80 bp, synthetic construct
  misc_feature 1..80: note = Artificially Synthesized Probe
  source 1..80: mol_type = other DNA
gtcaaggtagcgaaatccagtctctactaaaaatacataaattagctgggcatggtggcatgtgcctgtagtctcagcta

SEQ ID NO: 121572 - DNA, 80 bp, synthetic construct; identical to SEQ ID NO: 39352
  misc_feature 1..80: note = Artificially Synthesized Probe
  source 1..80: mol_type = other DNA

SEQ ID NO: 121573 - DNA, 80 bp, synthetic construct
  misc_feature 1..80: note = Artificially Synthesized Probe
  source 1..80: mol_type = other DNA
tgtgattccatttctgtataattactgaaacgacaaaattacagagatggagaacagatgagtggttaccagggcttata

SEQ ID NO: 121574 - DNA, 80 bp, synthetic construct
  misc_feature 1..80: note = Artificially Synthesized Probe
  source 1..80: mol_type = other DNA
cgtactgacccaggacgagactatgggggtaaactgggtatatctctgaactatttcttacaactgcaatcatcttaaaa

SEQ ID NO: 121575 - DNA, 80 bp, synthetic construct
  misc_feature 1..80: note = Artificially Synthesized Probe
  source 1..80: mol_type = other DNA
cactcaacatgaagacaatgcagatgaaacctttactacgatccacttccactcagtgaggagtgaatgtattttctctt

SEQ ID NO: 121576 - DNA, 80 bp, synthetic construct
  misc_feature 1..80: note = Artificially Synthesized Probe
  source 1..80: mol_type = other DNA
caagttatacctggacttttgactgtgtgggagttggaacccaacctctccattgttcaaaggttaactgtaaaaatttt

SEQ ID NO: 121577 - DNA, 80 bp, synthetic construct
  misc_feature 1..80: note = Artificially Synthesized Probe
  source 1..80: mol_type = other DNA
aagtctttttaaaagcacactgtggaaaacaaaagaacaaaactttcacacagcttcaatgagaggcagcaatttcactc

SEQ ID NO: 121578 - DNA, 80 bp, synthetic construct; identical to SEQ ID NO: 39353
  misc_feature 1..80: note = Artificially Synthesized Probe
  source 1..80: mol_type = other DNA

SEQ ID NO: 121579 - DNA, 80 bp, synthetic construct
  misc_feature 1..80: note = Artificially Synthesized Probe
  source 1..80: mol_type = other DNA
acatccctaagctgaggaatgcataaacatcttgtggtccagccttaaaatggaacgtgattcagccatcaaaaagaata

SEQ ID NO: 121580 - DNA, 80 bp, synthetic construct
  misc_feature 1..80: note = Artificially Synthesized Probe
  source 1..80: mol_type = other DNA
agccttaaaatggaacgtgattcagccatcaaaaagaataaaggcctgacccaggctacaacacggatgaacctcggtaa

SEQ ID NO: 121581 - DNA, 80 bp, synthetic construct
  misc_feature 1..80: note = Artificially Synthesized Probe
  source 1..80: mol_type = other DNA
ggcaaggctactgcccctgtctgtccctgtgagacccggagcagctgcccgtgggagagtgactgacggatctcactgtg

SEQ ID NO: 121582 - DNA, 80 bp, synthetic construct
  misc_feature 1..80: note = Artificially Synthesized Probe
  source 1..80: mol_type = other DNA
gatggttttggcgtctttattgggggaataaacatgttcctaaatcgactccgatggttgcacaatctccctaatttact

SEQ ID NO: 121583 - DNA, 80 bp, synthetic construct; identical to SEQ ID NO: 39354
  misc_feature 1..80: note = Artificially Synthesized Probe
  source 1..80: mol_type = other DNA

SEQ ID NO: 121584 - DNA, 80 bp, synthetic construct
  misc_feature 1..80: note = Artificially Synthesized Probe
  source 1..80: mol_type = other DNA
cgggaggctgaggcaggaaaattgcttgaacccgggaggcagaggctgcagtgaaccaagatcatgccactgtactccag

SEQ ID NO: 121585 - DNA, 80 bp, synthetic construct
  misc_feature 1..80: note = Artificially Synthesized Probe
  source 1..80: mol_type = other DNA
ctactaaaaaaaaaaaaaaaaaaaaaaaaaaatatcagctgggtgtggtggtgcgtgcctgtaatcccagctactcagaa

SEQ ID NO: 121586 - DNA, 80 bp, synthetic construct
  misc_feature 1..80: note = Artificially Synthesized Probe
  source 1..80: mol_type = other DNA
cctgcagatgcacctctatttttggaggtgctcatcactcttacagaggtggaaaccatcattgtgaggagttctgaaac

SEQ ID NO: 121587 - DNA, 80 bp, synthetic construct
  misc_feature 1..80: note = Artificially Synthesized Probe
  source 1..80: mol_type = other DNA
cagcccaccttgcctgaccccagccccttccatgccttccccactgcccgcattcgagctaagtctgcgtcctcttctgt

SEQ ID NO: 121588 - DNA, 80 bp, synthetic construct; identical to SEQ ID NO: 39355
  misc_feature 1..80: note = Artificially Synthesized Probe
  source 1..80: mol_type = other DNA

SEQ ID NO: 121589 - DNA, 80 bp, synthetic construct
  misc_feature 1..80: note = Artificially Synthesized Probe
  source 1..80: mol_type = other DNA
ctaatacccttagaatttcctgagtagcagaagtgagtcccttttgaccccactggagcttatgctaatgaggtgactta

SEQ ID NO: 121590 - DNA, 80 bp, synthetic construct
  misc_feature 1..80: note = Artificially Synthesized Probe
  source 1..80: mol_type = other DNA
atcccagcactttgggaggccgaggcaggtggatcacctgaggtcaggaatttgagaccagcctggccaacatggtgaaa

SEQ ID NO: 121591 - DNA, 80 bp, synthetic construct
  misc_feature 1..80: note = Artificially Synthesized Probe
  source 1..80: mol_type = other DNA
agccaagaccatccaatgcactccagcctgggcaacaagagtgaaactctctctcggggaaaaaaaaaaaaacgttaact

SEQ ID NO: 121592 - DNA, 80 bp, synthetic construct; identical to SEQ ID NO: 39356
  misc_feature 1..80: note = Artificially Synthesized Probe
  source 1..80: mol_type = other DNA

SEQ ID NO: 121593 - DNA, 80 bp, synthetic construct
  misc_feature 1..80: note = Artificially Synthesized Probe
  source 1..80: mol_type = other DNA
gagcggggtggccacctctgcagggacacaggtctttcatccggtaggcgacaaaaggggaggcccctgctgctgctgtg

SEQ ID NO: 121594 - DNA, 80 bp, synthetic construct
  misc_feature 1..80: note = Artificially Synthesized Probe
  source 1..80: mol_type = other DNA
ctaagctgtgggtcagtttcctacttgatgttagtcactgttgcttaaagtgtggactagtccatagtgagaaaggaggg

SEQ ID NO: 121595 - DNA, 80 bp, synthetic construct
  misc_feature 1..80: note = Artificially Synthesized Probe
  source 1..80: mol_type = other DNA
ctttatcagatgcacccattctcctgctgagaaaactgaggccagaccagcaggtgctggcggcagagccaggaccagga

SEQ ID NO: 121596 - DNA, 80 bp, synthetic construct
  misc_feature 1..80: note = Artificially Synthesized Probe
  source 1..80: mol_type = other DNA
ggccagagaaggcaacggggcagactgaaattagcttatcaacacacaccatgcaaaattattcaggaacaaaatttaaa

SEQ ID NO: 121597 - DNA, 80 bp, synthetic construct
  misc_feature 1..80: note = Artificially Synthesized Probe
  source 1..80: mol_type = other DNA
aacacacaccatgcaaaattattcaggaacaaaatttaaaaatgcattatgcctcctggttgaaccacaaaatgctgtga

SEQ ID NO: 121598 - DNA, 80 bp, synthetic construct
  misc_feature 1..80: note = Artificially Synthesized Probe
  source 1..80: mol_type = other DNA
aaaattagccatgtgtggtggcatgcacctatagtccctgctgctccagagactgaggcaggagaattgcctgaacctgg

SEQ ID NO: 121599 - DNA, 80 bp, synthetic construct; identical to SEQ ID NO: 39357
  misc_feature 1..80: note = Artificially Synthesized Probe
  source 1..80: mol_type = other DNA

SEQ ID NO: 121600 - DNA, 80 bp, synthetic construct
  misc_feature 1..80: note = Artificially Synthesized Probe
  source 1..80: mol_type = other DNA
atgaggtctttctgtgcccagagggcaacactgcaggcagcggccgggagggacttggcgcaggtgggactgcgctgcgg

SEQ ID NO: 121601 - DNA, 80 bp, synthetic construct
  misc_feature 1..80: note = Artificially Synthesized Probe
  source 1..80: mol_type = other DNA
gaccctggaaatggtcaccgttcgctctggccacatcaataaacccgaggggactgcagcaaatgtgatgcaagcaaata

SEQ ID NO: 121602 - DNA, 80 bp, synthetic construct
  misc_feature 1..80: note = Artificially Synthesized Probe
  source 1..80: mol_type = other DNA
ttgcagaaccatgagctaaataaatcagggttggcaagcgactgcccaggggccaattctagccccagcctgtttttata

SEQ ID NO: 121603 - DNA, 80 bp, synthetic construct; identical to SEQ ID NO: 39358
  misc_feature 1..80: note = Artificially Synthesized Probe
  source 1..80: mol_type = other DNA

SEQ ID NO: 121604 - DNA, 80 bp, synthetic construct
  misc_feature 1..80: note = Artificially Synthesized Probe
  source 1..80: mol_type = other DNA
cttattagatagctgtcgttatctccaacctaaagatcacaaagccgagggctgcagcgaaggatccagtcacttgccca

SEQ ID NO: 121605 - DNA, 80 bp, synthetic construct
  misc_feature 1..80: note = Artificially Synthesized Probe
  source 1..80: mol_type = other DNA
ccccacctcctctctctctctttggtaaaagacggcaggatgagatttctgatgaacaaaggttcatccatgttaggaaa

SEQ ID NO: 121606 - DNA, 80 bp, synthetic construct
  misc_feature 1..80: note = Artificially Synthesized Probe
  source 1..80: mol_type = other DNA
cctgcatacatgcacacacggactgagggtgggactcagggggcccccaatgttgccgatgtcccttgcaagagctggga

SEQ ID NO: 121607 - DNA, 80 bp, synthetic construct
  misc_feature 1..80: note = Artificially Synthesized Probe
  source 1..80: mol_type = other DNA
cagccctgacaagacaggcactttatagacccaacaatccaacacagataatgcaaacatcaccactaatgacagtaaga

SEQ ID NO: 121608 - DNA, 80 bp, synthetic construct
  misc_feature 1..80: note = Artificially Synthesized Probe
  source 1..80: mol_type = other DNA
tgagcaccaaggacaccgtcgcgggaccacgtggggctgcggcctctggggatgggccagctgctgtgtctcctgctggg

SEQ ID NO: 121609 - DNA, 80 bp, synthetic construct; identical to SEQ ID NO: 39359
  misc_feature 1..80: note = Artificially Synthesized Probe
  source 1..80: mol_type = other DNA

SEQ ID NO: 121610 - DNA, 80 bp, synthetic construct
  misc_feature 1..80: note = Artificially Synthesized Probe
  source 1..80: mol_type = other DNA
acagttggcggtacgtggatgcttaccatagtctcagctttacataaattaccttatttaatgctcacagctacctgaga

SEQ ID NO: 121611 - DNA, 80 bp, synthetic construct
  misc_feature 1..80: note = Artificially Synthesized Probe
  source 1..80: mol_type = other DNA
tatgttagtaccctcatttcaaggataagaaaaccaaggcccagagaggccaactggcctgtccaaggtcacacagcaac

SEQ ID NO: 121612 - DNA, 80 bp, synthetic construct
  misc_feature 1..80: note = Artificially Synthesized Probe
  source 1..80: mol_type = other DNA
atcacccatcaccacagcctagagaacagtgtgctgaaacacagtgacactcaactctgctgggcaaatgcactgtctgt

SEQ ID NO: 121613 - DNA, 80 bp, synthetic construct
  misc_feature 1..80: note = Artificially Synthesized Probe
  source 1..80: mol_type = other DNA
atgtaggggtgggttgcccctacacacctgtgggtgtttctcgtaaggtgggacgagagatttggaaaagaaaaagacac

SEQ ID NO: 121614 - DNA, 80 bp, synthetic construct; identical to SEQ ID NO: 39360
  misc_feature 1..80: note = Artificially Synthesized Probe
  source 1..80: mol_type = other DNA

SEQ ID NO: 121615 - DNA, 80 bp, synthetic construct
  misc_feature 1..80: note = Artificially Synthesized Probe
  source 1..80: mol_type = other DNA
gtactgaaatgtcctccaacaatgtctgcagataatacgttaataatgataatgatgatgactgactaagctacctacaa

SEQ ID NO: 121616 - DNA, 80 bp, synthetic construct
  misc_feature 1..80: note = Artificially Synthesized Probe
  source 1..80: mol_type = other DNA
gcctcccgagaagctgggactacaggcacacaccaccatgcccagctaatacttgttttttgttttgtcttgttttctag

SEQ ID NO: 121617 - DNA, 80 bp, synthetic construct
  misc_feature 1..80: note = Artificially Synthesized Probe
  source 1..80: mol_type = other DNA
agtcatttttgcctctacatgtggagtgtcctgcagctggctggatggtctgtgacctcagaggcatttcctttcgttca

SEQ ID NO: 121618 - DNA, 80 bp, synthetic construct; identical to SEQ ID NO: 39361
  misc_feature 1..80: note = Artificially Synthesized Probe
  source 1..80: mol_type = other DNA

SEQ ID NO: 121619 - DNA, 80 bp, synthetic construct
  misc_feature 1..80: note = Artificially Synthesized Probe
  source 1..80: mol_type = other DNA
atgttcaatagtaatatgatactaattctagactgcttctggtaagaacctcgttcttcgggagaatgaactccagaagc

SEQ ID NO: 121620 - DNA, 80 bp, synthetic construct
  misc_feature 1..80: note = Artificially Synthesized Probe
  source 1..80: mol_type = other DNA
ggtaagaacctcgttcttcgggagaatgaactccagaagctatttaaccaggcttggtctacaaagagcctgccacgggg

SEQ ID NO: 121621 - DNA, 80 bp, synthetic construct
  misc_feature 1..80: note = Artificially Synthesized Probe
  source 1..80: mol_type = other DNA
aattctcaatgagctctggggtcctgcccacactcgggtctctctgagtgacaagccgtgacaagctgtcctagtccatc

SEQ ID NO: 121622 - DNA, 80 bp, synthetic construct
  misc_feature 1..80: note = Artificially Synthesized Probe
  source 1..80: mol_type = other DNA
agcccctagagaatgaaggttacaaatccaggctgccccatagcaatataattggagtcacaaatgtaattttaaatttc

SEQ ID NO: 121623 - DNA, 80 bp, synthetic construct; identical to SEQ ID NO: 38709
  misc_feature 1..80: note = Artificially Synthesized Probe
  source 1..80: mol_type = other DNA

SEQ ID NO: 121624 - DNA, 80 bp, synthetic construct
  misc_feature 1..80: note = Artificially Synthesized Probe
  source 1..80: mol_type = other DNA
gggcaacacagggagacccctctaaaaaaacaattagccaggtgtggtggtgtgcacctgtagtctgtgtgtctgtggtc

SEQ ID NO: 121625 - DNA, 80 bp, synthetic construct; identical to SEQ ID NO: 39362
  misc_feature 1..80: note = Artificially Synthesized Probe
  source 1..80: mol_type = other DNA

SEQ ID NO: 121626 - DNA, 80 bp, synthetic construct
  misc_feature 1..80: note = Artificially Synthesized Probe
  source 1..80: mol_type = other DNA
ccctgcatagaagaatgttccctgcagcacagtctgaaagaacaagatcctgaaaacaacccaaatgtcaacaggaagag

SEQ ID NO: 121627 - DNA, 80 bp, synthetic construct
  misc_feature 1..80: note = Artificially Synthesized Probe
  source 1..80: mol_type = other DNA
actgagctacatgatcaactcagggtggatttttttaagtgactattaaggaaacatcaaggcaaagcttccagcgagcg

SEQ ID NO: 121628 - DNA, 80 bp, synthetic construct
  misc_feature 1..80: note = Artificially Synthesized Probe
  source 1..80: mol_type = other DNA
aatcagcctgcgtttaagatcatgaggcaaccggaaagcatctaatcagttaatcagctacattttgcaggagacactct

SEQ ID NO: 121629 - DNA, 80 bp, synthetic construct
  misc_feature 1..80: note = Artificially Synthesized Probe
  source 1..80: mol_type = other DNA
tctaatcagttaatcagctacattttgcaggagacactctcccccctgctactgtctctggtccctgtttttcttgggat

SEQ ID NO: 121630 - DNA, 80 bp, synthetic construct; identical to SEQ ID NO: 39363
  misc_feature 1..80: note = Artificially Synthesized Probe
  source 1..80: mol_type = other DNA

SEQ ID NO: 121631 - DNA, 80 bp, synthetic construct
  misc_feature 1..80: note = Artificially Synthesized Probe
  source 1..80: mol_type = other DNA
atgtggcccatccacacaatggaatattactcagccacaaaaaggaaggaaattctgacacacgctacaacatggatgag

SEQ ID NO: 121632 - DNA, 80 bp, synthetic construct
  misc_feature 1..80: note = Artificially Synthesized Probe
  source 1..80: mol_type = other DNA
ggggctgggagaagggggctggtttgctagtgtttagtggggacgtagtttcagttctgcaagctgaagagttctacaga

SEQ ID NO: 121633 - DNA, 80 bp, synthetic construct
  misc_feature 1..80: note = Artificially Synthesized Probe
  source 1..80: mol_type = other DNA
gtgcattgggaaaaaaagtgctctcaatttccactgaactcttcctgtatcacacaccgcttcctttacctcctttaagt

SEQ ID NO: 121634 - DNA, 80 bp, synthetic construct; identical to SEQ ID NO: 39364
  misc_feature 1..80: note = Artificially Synthesized Probe
  source 1..80: mol_type = other DNA

SEQ ID NO: 121635 - DNA, 80 bp, synthetic construct
  misc_feature 1..80: note = Artificially Synthesized Probe
  source 1..80: mol_type = other DNA
ctcatgcccggctataaaacagcctcattaaacatcagcaggactgaaattatacaaataatgttctccaaccacaatag

SEQ ID NO: 121636 - DNA, 80 bp, synthetic construct
  misc_feature 1..80: note = Artificially Synthesized Probe
  source 1..80: mol_type = other DNA
ataaaccacggggaaattggaaaacactttgaaacgagtgaaaaagaagacaaaacacatcaaaacttatggaatacaac

SEQ ID NO: 121637 - DNA, 80 bp, synthetic construct
  misc_feature 1..80: note = Artificially Synthesized Probe
  source 1..80: mol_type = other DNA
ggctcccagggaggggctggccaagcaggggagtcagggcagctctgggaggccccgagccaccgcacgctctctcctgg

SEQ ID NO: 121638 - DNA, 80 bp, synthetic construct
  misc_feature 1..80: note = Artificially Synthesized Probe
  source 1..80: mol_type = other DNA
ctgaagttaatgaaatctaagctagaaaagcaataaagaaaatcaatgaaactacaagttggttatttgaaaagatcaac

SEQ ID NO: 121639 - DNA, 80 bp, synthetic construct
  misc_feature 1..80: note = Artificially Synthesized Probe
  source 1..80: mol_type = other DNA
ctgaggcgggcggatcacgaggtcaggagatcaagaccatcctggctagcacggtgaaaccccgtctctactaaaaatac

SEQ ID NO: 121640 - DNA, 80 bp, synthetic construct
  misc_feature 1..80: note = Artificially Synthesized Probe
  source 1..80: mol_type = other DNA
aaataataacaataataataatgagacggtgctacaaacaactacatagcaaccacattagagaaactcacatgaagtgg

SEQ ID NO: 121641 - DNA, 80 bp, synthetic construct; identical to SEQ ID NO: 39365
  misc_feature 1..80: note = Artificially Synthesized Probe
  source 1..80: mol_type = other DNA

SEQ ID NO: 121642 - DNA, 80 bp, synthetic construct
  misc_feature 1..80: note = Artificially Synthesized Probe
  source 1..80: mol_type = other DNA
ttaaagaagaatgaaggccaattttgcataaacttttcagaaaaaaatggaagacaatgcttcccaagtcatcttatgag

SEQ ID NO: 121643 - DNA, 80 bp, synthetic construct
  misc_feature 1..80: note = Artificially Synthesized Probe
  source 1..80: mol_type = other DNA
ctctccactctcctgtctacacttgcaagcctgcctcactctataaattggccaggctgctctctcagagtctcctaaac

SEQ ID NO: 121644 - DNA, 80 bp, synthetic construct
  misc_feature 1..80: note = Artificially Synthesized Probe
  source 1..80: mol_type = other DNA
gtctgaagcccctgactaaactccacagacatatcctgaacgacaagaaaaggtacatgcatcattcaaagcaccctttg

SEQ ID NO: 121645 - DNA, 80 bp, synthetic construct; identical to SEQ ID NO: 39366
  misc_feature 1..80: note = Artificially Synthesized Probe
  source 1..80: mol_type = other DNA

SEQ ID NO: 121646 - DNA, 80 bp, synthetic construct
  misc_feature 1..80: note = Artificially Synthesized Probe
  source 1..80: mol_type = other DNA
tgcaacctccgcctgccgggttcaagtgatctcttgtgccttagccttctgagtagctgggactacaagtgtgccccact

SEQ ID NO: 121647 - DNA, 80 bp, synthetic construct
  misc_feature 1..80: note = Artificially Synthesized Probe
  source 1..80: mol_type = other DNA
cacccaggctagagtacagtggcgtgatcacggctcactgcaacatcgacctctcaggctcaggtaatcctcccacctca

SEQ ID NO: 121648 - DNA, 80 bp, synthetic construct
  misc_feature 1..80: note = Artificially Synthesized Probe
  source 1..80: mol_type = other DNA
cctgagccacctcgaccggcctcaccaagtgtttttcttattttgaaaatagttgttatccataaaaacacattatttat

SEQ ID NO: 121649 - DNA, 80 bp, synthetic construct; identical to SEQ ID NO: 39367
  misc_feature 1..80: note = Artificially Synthesized Probe
  source 1..80: mol_type = other DNA

SEQ ID NO: 121650 - DNA, 80 bp, synthetic construct
  misc_feature 1..80: note = Artificially Synthesized Probe
  source 1..80: mol_type = other DNA
gctcattaaacagctggtgttgtatttttttctgacaccaaatacatcattccaacatcaaccaattctctaatccctgc

SEQ ID NO: 121651 - DNA, 80 bp, synthetic construct
  misc_feature 1..80: note = Artificially Synthesized Probe
  source 1..80: mol_type = other DNA
tctgacaaccactgtgctacctcatctgctttacctgaaagtgaacagaaaaataaactggtgtgccacccaggaggcaa

SEQ ID NO: 121652 - DNA, 80 bp, synthetic construct
  misc_feature 1..80: note = Artificially Synthesized Probe
  source 1..80: mol_type = other DNA
tagcgacgccatcgggtcagtatcttcccctgccaaagtcccctggtccatgcttggggccactgtaggaccttgaaatg

SEQ ID NO: 121653 - DNA, 80 bp, synthetic construct
  misc_feature 1..80: note = Artificially Synthesized Probe
  source 1..80: mol_type = other DNA
ttgtgcggggtggcaggaaaaacatggacaggaacggctgagccctatgctctcaggggtacaaatgaggccacagaagc

SEQ ID NO: 121654 - DNA, 80 bp, synthetic construct
  misc_feature 1..80: note = Artificially Synthesized Probe
  source 1..80: mol_type = other DNA
ttccttgggccctaagcctcccaggacccaccccagtggaccagggagcagactgccagctgtccagactcttggccatt

SEQ ID NO: 121655 - DNA, 80 bp, synthetic construct; identical to SEQ ID NO: 39368
  misc_feature 1..80: note = Artificially Synthesized Probe
  source 1..80: mol_type = other DNA

SEQ ID NO: 121656 - DNA, 80 bp, synthetic construct
  misc_feature 1..80: note = Artificially Synthesized Probe
  source 1..80: mol_type = other DNA
ccttggatcccctgcccacctcccctccctaacatccctgaggctcttttacataagaaaggcatagctatcccccggaa

SEQ ID NO: 121657 - DNA, 80 bp, synthetic construct
  misc_feature 1..80: note = Artificially Synthesized Probe
  source 1..80: mol_type = other DNA
aggcagctccagtaacagctccccttttccatttctaaaaatctgtaatatatttatagtttttgaccaactgcgcccca

SEQ ID NO: 121658 - DNA, 80 bp, synthetic construct
  misc_feature 1..80: note = Artificially Synthesized Probe
  source 1..80: mol_type = other DNA
acattaggataaaattctttggggaagtggctgtataaattcaagaaaagaacgatgaaaatgtcctaaagctcacttac

SEQ ID NO: 121659 - DNA, 80 bp, synthetic construct
  misc_feature 1..80: note = Artificially Synthesized Probe
  source 1..80: mol_type = other DNA
tcaagaaaagaacgatgaaaatgtcctaaagctcacttacgtatccgtcaagaaaaagtggctgtgagtcacgatgggtt

SEQ ID NO: 121660 - DNA, 80 bp, synthetic construct; identical to SEQ ID NO: 39369
  misc_feature 1..80: note = Artificially Synthesized Probe
  source 1..80: mol_type = other DNA

SEQ ID NO: 121661 - DNA, 80 bp, synthetic construct
  misc_feature 1..80: note = Artificially Synthesized Probe
  source 1..80: mol_type = other DNA
gacctctaatgcacgcctcctggggggtctctggtgaggcctttctaagtccagcaactcagggctgctccagctgatct

SEQ ID NO: 121662 - DNA, 80 bp, synthetic construct
  misc_feature 1..80: note = Artificially Synthesized Probe
  source 1..80: mol_type = other DNA
tgtggcctaattccattcacacgcccctcactgagctaaccccagagtcgctaccatacccagcaaggacaattttaaaa

SEQ ID NO: 121663 - DNA, 80 bp, synthetic construct
  misc_feature 1..80: note = Artificially Synthesized Probe
  source 1..80: mol_type = other DNA
tacgagtcagagctcccataacccttgctcaggtctgatatttgctagaaccattcacaatactcgggaacatgcatcac

SEQ ID NO: 121664 - DNA, 80 bp, synthetic construct
  misc_feature 1..80: note = Artificially Synthesized Probe
  source 1..80: mol_type = other DNA
agtccctccctgaaggcccatccccggcatatgtgcatccagagagacccaggctatggtccctaaacccagggcaggct

SEQ ID NO: 121665 - DNA, 80 bp, synthetic construct
  misc_feature 1..80: note = Artificially Synthesized Probe
  source 1..80: mol_type = other DNA
tccttgaatctgccttcaacaatggaaaacgtggggcacatcaagaagtatgatgagaaactggttttcacctgctgacc

SEQ ID NO: 121666 - DNA, 80 bp, synthetic construct
  misc_feature 1..80: note = Artificially Synthesized Probe
  source 1..80: mol_type = other DNA
tctgagcttcaagcttctgatctgtgaaatgggaatcgtaatgaatcggagctggctcattggacttctgagatttactg

SEQ ID NO: 121667 - DNA, 80 bp, synthetic construct; identical to SEQ ID NO: 39370
  misc_feature 1..80: note = Artificially Synthesized Probe
  source 1..80: mol_type = other DNA

SEQ ID NO: 121668 - DNA, 80 bp, synthetic construct
  misc_feature 1..80: note = Artificially Synthesized Probe
  source 1..80: mol_type = other DNA
cctcttccaagggtttgtatccccccaccccaccccacgctgggttggggaccctttctatgccctgcagcactcgatgc

SEQ ID NO: 121669 - DNA, 80 bp, synthetic construct
  misc_feature 1..80: note = Artificially Synthesized Probe
  source 1..80: mol_type = other DNA
acaaatacaccctagatatcctctgaccatgagagaatgacaggcctctcattttgggtgggaggttaggtgcagtggcc

SEQ ID NO: 121670 - DNA, 80 bp, synthetic construct
  misc_feature 1..80: note = Artificially Synthesized Probe
  source 1..80: mol_type = other DNA
gatcctcccttctcccctctccttccctttcttccacaaattccccagtctatagaaacggacagggtcaagaactttgc

SEQ ID NO: 121671 - DNA, 80 bp, synthetic construct
  misc_feature 1..80: note = Artificially Synthesized Probe
  source 1..80: mol_type = other DNA
agagcttccacacccccttgggtaccaccagcttggaacctcccaagcctggttgttttttataaatttatttatttaat

SEQ ID NO: 121672 - DNA, 80 bp, synthetic construct
  misc_feature 1..80: note = Artificially Synthesized Probe
  source 1..80: mol_type = other DNA
gactccaggtacaacagccccaggtgaaagctccggcttgagtttacaaagcaggaggctggaattgcaggcaggtaaga

SEQ ID NO: 121673 - DNA, 80 bp, synthetic construct; identical to SEQ ID NO: 39371
  misc_feature 1..80: note = Artificially Synthesized Probe
  source 1..80: mol_type = other DNA

SEQ ID NO: 121674 - DNA, 80 bp, synthetic construct
  misc_feature 1..80: note = Artificially Synthesized Probe
  source 1..80: mol_type = other DNA
ggcaagtatgctaaagcactgccttcctataaagagccatttttaggagtgtgtttctgtatactggttaattcccggcc

SEQ ID NO: 121675 - DNA, 80 bp, synthetic construct
  misc_feature 1..80: note = Artificially Synthesized Probe
  source 1..80: mol_type = other DNA
ttttaggagtgtgtttctgtatactggttaattcccggcccgtttttctctcccatccttttcctcgtcactaatgaaat

SEQ ID NO: 121676 - DNA, 80 bp, synthetic construct
  misc_feature 1..80: note = Artificially Synthesized Probe
  source 1..80: mol_type = other DNA
cgtttttctctcccatccttttcctcgtcactaatgaaatataaaatgcaatgcggtctcagaatccctttaccttcctc

SEQ ID NO: 121677 - DNA, 80 bp, synthetic construct
  misc_feature 1..80: note = Artificially Synthesized Probe
  source 1..80: mol_type = other DNA
gaaaatcttgaaactcacccaaataggaatacggttttctatagcagactgtacttggagacagtacacagaaagatccc

SEQ ID NO: 121678 - DNA, 80 bp, synthetic construct
  misc_feature 1..80: note = Artificially Synthesized Probe
  source 1..80: mol_type = other DNA
gacccaaagaagcaccaagctttccacccaattcttccttccaggaaaacaaggaattcctgggtgtaataatggaatca

SEQ ID NO: 121679 - DNA, 80 bp, synthetic construct; identical to SEQ ID NO: 39372
  misc_feature 1..80: note = Artificially Synthesized Probe
  source 1..80: mol_type = other DNA

SEQ ID NO: 121680 - DNA, 80 bp, synthetic construct
  misc_feature 1..80: note = Artificially Synthesized Probe
  source 1..80: mol_type = other DNA
gttcctagtgcacagaagggcgtcactaactatgtgatgcggaccgcagggcaccggggttaaggctgaatctgccaggt

SEQ ID NO: 121681 - DNA, 80 bp, synthetic construct
  misc_feature 1..80: note = Artificially Synthesized Probe
  source 1..80: mol_type = other DNA
ctggaagcttaattagctgattggcctcattaacgttcgaacttgagtttcaaacgaaaaagaggtcactcaactatcca

SEQ ID NO: 121682 - DNA, 80 bp, synthetic construct
  misc_feature 1..80: note = Artificially Synthesized Probe
  source 1..80: mol_type = other DNA
tcagttccaggcgccccgagcccctttaaaagatcggctgcgaaaacccacggtcacctgcaccaccctttctccctctg

SEQ ID NO: 121683 - DNA, 80 bp, synthetic construct
  misc_feature 1..80: note = Artificially Synthesized Probe
  source 1..80: mol_type = other DNA
aacccgggcggcgaggcccgctgcggtggtcgcacctgctggctcagtccggcggctccagcccaagtgacgagtgcgct

SEQ ID NO: 121684 - DNA, 80 bp, synthetic construct; identical to SEQ ID NO: 38710
  misc_feature 1..80: note = Artificially Synthesized Probe
  source 1..80: mol_type = other DNA

SEQ ID NO: 121685 - DNA, 80 bp, synthetic construct; identical to SEQ ID NO: 39373
  misc_feature 1..80: note = Artificially Synthesized Probe
  source 1..80: mol_type = other DNA

SEQ ID NO: 121686 - DNA, 80 bp, synthetic construct
  misc_feature 1..80: note = Artificially Synthesized Probe
  source 1..80: mol_type = other DNA
ctgctgctgccgccgcgcgcgcctggatgggagctctgcgtgcagggccagggtgaccgcagcggggtctcgggggacct

SEQ ID NO: 121687 - DNA, 80 bp, synthetic construct
  misc_feature 1..80: note = Artificially Synthesized Probe
  source 1..80: mol_type = other DNA
agaggaaggggcaggacgcgccagagactacgtggtccatgcgcgcaggagataaagcgggggctccttcctgcgctctg

SEQ ID NO: 121688 - DNA, 80 bp, synthetic construct; identical to SEQ ID NO: 39374
  misc_feature 1..80: note = Artificially Synthesized Probe
  source 1..80: mol_type = other DNA

SEQ ID NO: 121689 - DNA, 80 bp, synthetic construct
  misc_feature 1..80: note = Artificially Synthesized Probe
  source 1..80: mol_type = other DNA
ccgggagcgccagcgtccgcgcacacctggatcggccgcgggaacccgagcggcgccgcgcccagccccgccggagctca

SEQ ID NO: 121690 - DNA, 80 bp, synthetic construct
  misc_feature 1..80: note = Artificially Synthesized Probe
  source 1..80: mol_type = other DNA
catcctgaagctatctagcctccgcctcccctaagtatcatctcattaacatataaaagacaggaaattcaagaggtttt

SEQ ID NO: 121691 - DNA, 80 bp, synthetic construct
  misc_feature 1..80: note = Artificially Synthesized Probe
  source 1..80: mol_type = other DNA
catgcttttttattattccaagttgtcaagttgtcgagagtccagacaccttgcctcattggtcagtctttcctcaagat

SEQ ID NO: 121692 - DNA, 80 bp, synthetic construct
  misc_feature 1..80: note = Artificially Synthesized Probe
  source 1..80: mol_type = other DNA
tgggaacaagggggaacaatgcatacacctccctgctggctctgggtgtctccagcgtgtcaggccctcgaggttcctcc

SEQ ID NO: 121693 - DNA, 80 bp, synthetic construct
  misc_feature 1..80: note = Artificially Synthesized Probe
  source 1..80: mol_type = other DNA
cgtatcaaatccaactttagcaagaactcccgaccctggatacctgatcaggccgctcacctcccacccccacctgggat

SEQ ID NO: 121694 - DNA, 80 bp, synthetic construct
  misc_feature 1..80: note = Artificially Synthesized Probe
  source 1..80: mol_type = other DNA
tgttacaaaccaggcatccccatctagaacctgcccccaccctcaatggtggcttgctggtcattggttatactgctcac

SEQ ID NO: 121695 - DNA, 80 bp, synthetic construct; identical to SEQ ID NO: 38711
  misc_feature 1..80: note = Artificially Synthesized Probe
  source 1..80: mol_type = other DNA

SEQ ID NO: 121696 - DNA, 80 bp, synthetic construct
  misc_feature 1..80: note = Artificially Synthesized Probe
  source 1..80: mol_type = other DNA
gccttctgagtagctgggattacaggcacctgtcaccacacctggctaatttttgtgtttttagtagagatgccgtttca

SEQ ID NO: 121697 - DNA, 80 bp, synthetic construct
  misc_feature 1..80: note = Artificially Synthesized Probe
  source 1..80: mol_type = other DNA
ctgtaatcccagctggacagcgtgtctgagtatcaaacagctattcctcagtcttgaggaaggtacagatctgatttgaa

SEQ ID NO: 121698 - DNA, 80 bp, synthetic construct; identical to SEQ ID NO: 38712
  misc_feature 1..80: note = Artificially Synthesized Probe
  source 1..80: mol_type = other DNA

SEQ ID NO: 121699 - DNA, 80 bp, synthetic construct; identical to SEQ ID NO: 38624
  misc_feature 1..80: note = Artificially Synthesized Probe
  source 1..80: mol_type = other DNA

SEQ ID NO: 121700 - DNA, 80 bp, synthetic construct
  misc_feature 1..80: note = Artificially Synthesized Probe
  source 1..80: mol_type = other DNA
atcctggcctggcctggtgcagccttctgggcaaaggaggcgctgacatatgtggcttgtactggacagatgtgggagcc

SEQ ID NO: 121701 - DNA, 80 bp, synthetic construct
  misc_feature 1..80: note = Artificially Synthesized Probe
  source 1..80: mol_type = other DNA
attttgatctttctgaaaagagcctctgacacagacgtgcacacacagccatctctaacaatcgatggatggctggattt

SEQ ID NO: 121702 - DNA, 80 bp, synthetic construct
  misc_feature 1..80: note = Artificially Synthesized Probe
  source 1..80: mol_type = other DNA
acacacagccatctctaacaatcgatggatggctggatttcccttcctactgggactgccctgatcccaggtggggagac

SEQ ID NO: 121703 - DNA, 80 bp, synthetic construct
  misc_feature 1..80: note = Artificially Synthesized Probe
  source 1..80: mol_type = other DNA
ctgtccttccccttccagagtccccaaggatgagaacagaggctgtcactttctcccctaggaggcaggtgtggtctatg

SEQ ID NO: 121704 - DNA, 80 bp, synthetic construct; identical to SEQ ID NO: 38713
  misc_feature 1..80: note = Artificially Synthesized Probe
  source 1..80: mol_type = other DNA

SEQ ID NO: 121705 - DNA, 80 bp, synthetic construct
  misc_feature 1..80: note = Artificially Synthesized Probe
  source 1..80: mol_type = other DNA
ccgacttcagactgctagcccccaaactgtcagagaccacgcctctgttgttctagccacagggtctgtgggacgctgtg

SEQ ID NO: 121706 - DNA, 80 bp, synthetic construct
  misc_feature 1..80: note = Artificially Synthesized Probe
  source 1..80: mol_type = other DNA
ggaacaaaggattccacgccgactgagccaaaggcatcccttccagacatggatgaggtgcgggtcatttcaagtttctt

SEQ ID NO: 121707 - DNA, 80 bp, synthetic construct
  misc_feature 1..80: note = Artificially Synthesized Probe
  source 1..80: mol_type = other DNA
tcctctttggtgatgggacatcgactaggacggcctcatgacatttgcgaagcgaggttgcttccgctgtcctctccttt

SEQ ID NO: 121708 - DNA, 80 bp, synthetic construct
  misc_feature 1..80: note = Artificially Synthesized Probe
  source 1..80: mol_type = other DNA
cgagaccagcctggtcaatatggtgaaaccccatctctactaaaaattaaaaaaaaaaaaattagctgagtgtggtggtg

SEQ ID NO: 121709 - DNA, 80 bp, synthetic construct; identical to SEQ ID NO: 38714
  misc_feature 1..80: note = Artificially Synthesized Probe
  source 1..80: mol_type = other DNA

SEQ ID NO: 121710 - DNA, 80 bp, synthetic construct
  misc_feature 1..80: note = Artificially Synthesized Probe
  source 1..80: mol_type = other DNA
tgctgggctctgtcagggctctgtccagtgctggccgaggcctccccatgtgcagggcactgccctgtagcctccccggt

SEQ ID NO: 121711 - DNA, 80 bp, synthetic construct
  misc_feature 1..80: note = Artificially Synthesized Probe
  source 1..80: mol_type = other DNA
ccacccagcagcccaggtgttctgctgcagacccactcccggtagcacctctggaaggggacacatccctgccatgaacg

SEQ ID NO: 121712 - DNA, 80 bp, synthetic construct
  misc_feature 1..80: note = Artificially Synthesized Probe
  source 1..80: mol_type = other DNA
tgctcttcggtttttggcaaatgctgcgttctacaccctggaccctgcttctcactataccagggtctttctattcaaga

SEQ ID NO: 121713 - DNA, 80 bp, synthetic construct
  misc_feature 1..80: note = Artificially Synthesized Probe
  source 1..80: mol_type = other DNA
tagcgaaggtcccacgtgaaggagaaccctggggaggggcccggtggtgaagggggtataccctgtaggctcagcgccca

SEQ ID NO: 121714 - DNA, 80 bp, synthetic construct; identical to SEQ ID NO: 38715
  misc_feature 1..80: note = Artificially Synthesized Probe
  source 1..80: mol_type = other DNA

SEQ ID NO: 121715 - DNA, 80 bp, synthetic construct
  misc_feature 1..80: note = Artificially Synthesized Probe
  source 1..80: mol_type = other DNA
actctgcctgtgtctgctgcagcaaatgttctttttgagggagaaaacacatacagaaacttcccctggtgttgcctatg

SEQ ID NO: 121716 - DNA, 80 bp, synthetic construct
  misc_feature 1..80: note = Artificially Synthesized Probe
  source 1..80: mol_type = other DNA
cggggagtggagctctacctcttaatttgtgggcagaattctcaaaacattcctaccacatgcagaatgtcacacctgac

SEQ ID NO: 121717 - DNA, 80 bp, synthetic construct; identical to SEQ ID NO: 38716
  misc_feature 1..80: note = Artificially Synthesized Probe
  source 1..80: mol_type = other DNA

SEQ ID NO: 121718 - DNA, 80 bp, synthetic construct
  misc_feature 1..80: note = Artificially Synthesized Probe
  source 1..80: mol_type = other DNA
gcgctagttacgtctttgtactaagacactaaaataaatatgctccatcaacatgaagcatagccctatatcccacttag

SEQ ID NO: 121719 - DNA, 80 bp, synthetic construct; identical to SEQ ID NO: 38633
  misc_feature 1..80: note = Artificially Synthesized Probe
  source 1..80: mol_type = other DNA

SEQ ID NO: 121720 - DNA, 80 bp, synthetic construct
  misc_feature 1..80: note = Artificially Synthesized Probe
  source 1..80: mol_type = other DNA
gagggctggggagcgagactctctatgcgccaagcctgtgctgccagcttcccagcccgaggcacgggggagcccgtggg

SEQ ID NO: 121721 - DNA, 80 bp, synthetic construct
  misc_feature 1..80: note = Artificially Synthesized Probe
  source 1..80: mol_type = other DNA
ctttgacctcggctttgaagaataatatgagtaggtgaggtgacagttggaaggggcaaccggcatttcccaggtacagc

SEQ ID NO: 121722 - DNA, 80 bp, synthetic construct; identical to SEQ ID NO: 38717
  misc_feature 1..80: note = Artificially Synthesized Probe
  source 1..80: mol_type = other DNA

SEQ ID NO: 121723 - DNA, 80 bp, synthetic construct
  misc_feature 1..80: note = Artificially Synthesized Probe
  source 1..80: mol_type = other DNA
cccatgtcacagcgagtcatttatcgagtgcttcaacttgacaacaactgaaaaattaatcccaacagcaagcgattaac

SEQ ID NO: 121724 - DNA, 80 bp, synthetic construct
  misc_feature 1..80: note = Artificially Synthesized Probe
  source 1..80: mol_type = other DNA
gggccaccatgggctgcctctggggctcgtcgctgggcgtcattaaacctgtggctcgagggttctccgtggcgcagggg

SEQ ID NO: 121725 - DNA, 80 bp, synthetic construct
  misc_feature 1..80: note = Artificially Synthesized Probe
  source 1..80: mol_type = other DNA
ctggacccagttccggaagcctctagtcgtcagcttgggctgccctaacagagcacagacagggcagcctaaaccacaga

SEQ ID NO: 121726 - DNA, 80 bp, synthetic construct
  misc_feature 1..80: note = Artificially Synthesized Probe
  source 1..80: mol_type = other DNA
tgtccaaatcccctcttaaggacacagtgatatcggattaaggccccctctaatggcctcatttgactttaataatctcc

SEQ ID NO: 121727 - DNA, 80 bp, synthetic construct
  misc_feature 1..80: note = Artificially Synthesized Probe
  source 1..80: mol_type = other DNA
ttttttgtaattttagtagagaaggggtttcaccatgttggtcaggctggtcttgaactcctgacctcaaatgcttcgcc

SEQ ID NO: 121728 - DNA, 80 bp, synthetic construct; identical to SEQ ID NO: 38718
  misc_feature 1..80: note = Artificially Synthesized Probe
  source 1..80: mol_type = other DNA

SEQ ID NO: 121729 - DNA, 80 bp, synthetic construct
  misc_feature 1..80: note = Artificially Synthesized Probe
  source 1..80: mol_type = other DNA
ctgccctgccacttgagcttccagtgatgatctgcgtgacatagggttgaagtcaggatgtgtgatacatccctatatta

SEQ ID NO: 121730 - DNA, 80 bp, synthetic construct
  misc_feature 1..80: note = Artificially Synthesized Probe
  source 1..80: mol_type = other DNA
gaggctacaggcctggtggacaggaagtcagcagcaatctgaataaagtcatgaaagagaactcgaaatggcctggggtc

SEQ ID NO: 121731 - DNA, 80 bp, synthetic construct
  misc_feature 1..80: note = Artificially Synthesized Probe
  source 1..80: mol_type = other DNA
ctcctgataagaaatcacaggcacctccttgaccctccaaccacttctagaacattccattcccctcctaagagcctggc

SEQ ID NO: 121732 - DNA, 80 bp, synthetic construct
  misc_feature 1..80: note = Artificially Synthesized Probe
  source 1..80: mol_type = other DNA
caagagcacagttttggggaaggcttatttgtccacgttgataaaacaattaagccaagatgattgaaatcaaataatgg

SEQ ID NO: 121733 - DNA, 80 bp, synthetic construct; identical to SEQ ID NO: 38719
  misc_feature 1..80: note = Artificially Synthesized Probe
  source 1..80: mol_type = other DNA

SEQ ID NO: 121734 - DNA, 80 bp, synthetic construct
  misc_feature 1..80: note = Artificially Synthesized Probe
  source 1..80: mol_type = other DNA
gaaccgatactgacacattataattaactaaatccacagtcatcagagggttccttctgggcattgtatattcgttggtt

SEQ ID NO: 121735 - DNA, 80 bp, synthetic construct
  misc_feature 1..80: note = Artificially Synthesized Probe
  source 1..80: mol_type = other DNA
catcagagggttccttctgggcattgtatattcgttggttgtaactatctataacgccccgttcccccactccagtgcca

SEQ ID NO: 121736 - DNA, 80 bp, synthetic construct
  misc_feature 1..80: note = Artificially Synthesized Probe
  source 1..80: mol_type = other DNA
gcattttttttttttttaacaaatcgaaggcctgcagccaccccacagagagtcagcccatcagcaccattttcccaaca

SEQ ID NO: 121737 - DNA, 80 bp, synthetic construct; identical to SEQ ID NO: 38720
  misc_feature 1..80: note = Artificially Synthesized Probe
  source 1..80: mol_type = other DNA

SEQ ID NO: 121738 - DNA, 80 bp, synthetic construct
  misc_feature 1..80: note = Artificially Synthesized Probe
  source 1..80: mol_type = other DNA
tgaaagctaggctttttgtgccaaagctagccaagttgtgaatgtaaaggaaaagatctagaaggaaattaaaagtgcta

SEQ ID NO: 121739 - DNA, 80 bp, synthetic construct
  misc_feature 1..80: note = Artificially Synthesized Probe
  source 1..80: mol_type = other DNA
ccagaggctgaggcagtggatcacttcagtgcaggggtttgaggctgcagtgagctgtgaatatgccactgcattccagc

SEQ ID NO: 121740 - DNA, 80 bp, synthetic construct
  misc_feature 1..80: note = Artificially Synthesized Probe
  source 1..80: mol_type = other DNA
ttaaaccaaagcctaatccacagcaaggccctaactctcttcaagtctatgaaggctgagagaggtgagtaagctgcaga

SEQ ID NO: 121741 - DNA, 80 bp, synthetic construct
  misc_feature 1..80: note = Artificially Synthesized Probe
  source 1..80: mol_type = other DNA
aacaacaggttttcaatgtagcctgtttaggttagcttcttttgcttaatgatacggatttaagtttcctccatatattt

SEQ ID NO: 121742 - DNA, 80 bp, synthetic construct
  misc_feature 1..80: note = Artificially Synthesized Probe
  source 1..80: mol_type = other DNA
acagaggactagaggaggaggggtagctggggtaaagttctggtctccatgtgcttttgctaaagctgactacatggtga

SEQ ID NO: 121743 - DNA, 80 bp, synthetic construct; identical to SEQ ID NO: 38721
  misc_feature 1..80: note = Artificially Synthesized Probe
  source 1..80: mol_type = other DNA

SEQ ID NO: 121744 - DNA, 80 bp, synthetic construct
  misc_feature 1..80: note = Artificially Synthesized Probe
  source 1..80: mol_type = other DNA
ctgactagctgggactacagggacccaccgccatgcccagctaatttttttcttttttttttttttttcttgagacaggg

SEQ ID NO: 121745 - DNA, 80 bp, synthetic construct
  misc_feature 1..80: note = Artificially Synthesized Probe
  source 1..80: mol_type = other DNA
atggggtttctccatgttgaccaggctggtctctaactcctggcctcaagtgatccgcccgccttggcctcctaaagtga

SEQ ID NO: 121746 - DNA, 80 bp, synthetic construct
  misc_feature 1..80: note = Artificially Synthesized Probe
  source 1..80: mol_type = other DNA
taggcgagcctgactgtatttttacaaagccagggccataaatgtagtggcattgctggtgtgactcagaaggacccaac

SEQ ID NO: 121747 - DNA, 80 bp, synthetic construct; identical to SEQ ID NO: 38722
  misc_feature 1..80: note = Artificially Synthesized Probe
  source 1..80: mol_type = other DNA

SEQ ID NO: 121748 - DNA, 80 bp, synthetic construct
  misc_feature 1..80: note = Artificially Synthesized Probe
  source 1..80: mol_type = other DNA
cagcagtgggggaggagcccagatggagttggcagtcctggctctgaggctggatgtgacccttgggaggctcattccag

SEQ ID NO: 121749 - DNA, 80 bp, synthetic construct
  misc_feature 1..80: note = Artificially Synthesized Probe
  source 1..80: mol_type = other DNA
tgtgtcctccaagattcccacagtctggaaggacaagcagaaagccccctgacctgggctttcctgtgcaaaggcccaag

SEQ ID NO: 121750 - DNA, 80 bp, synthetic construct
  misc_feature 1..80: note = Artificially Synthesized Probe
  source 1..80: mol_type = other DNA
ggctgagtcactgctactatttgaacactttccccttcaaaatgacagtctttggcaaatatgttaaataccaattgaga

SEQ ID NO: 121751 - DNA, 80 bp, synthetic construct; identical to SEQ ID NO: 38723
  misc_feature 1..80: note = Artificially Synthesized Probe
  source 1..80: mol_type = other DNA

SEQ ID NO: 121752 - DNA, 80 bp, synthetic construct
  misc_feature 1..80: note = Artificially Synthesized Probe
  source 1..80: mol_type = other DNA
ctggggattctcggagaggttctttctatctggaggtgtgcgagggggagccccctggccccccgactggaggctcattc

SEQ ID NO: 121753 - DNA, 80 bp, synthetic construct
  misc_feature 1..80: note = Artificially Synthesized Probe
  source 1..80: mol_type = other DNA
gcagccggcttccccctgcgtcagcatcgggctcagcccattcggcgtgcacgacccagcccagtcgtgcctgtcaccgc

SEQ ID NO: 121754 - DNA, 80 bp, synthetic construct
  misc_feature 1..80: note = Artificially Synthesized Probe
  source 1..80: mol_type = other DNA
cttacctctctgtgcctcagtttcctcgtctgtaacacagaggcaagatcagtgctcccccatggggatgctagctggga

SEQ ID NO: 121755 - DNA, 80 bp, synthetic construct
  misc_feature 1..80: note = Artificially Synthesized Probe
  source 1..80: mol_type = other DNA
agagggttgccccagtgctgccctcactgggaaaatacccagctgttcccaggtagttgggattgattttggtttttgta

SEQ ID NO: 121756 - DNA, 80 bp, synthetic construct
  misc_feature 1..80: note = Artificially Synthesized Probe
  source 1..80: mol_type = other DNA
cacctgagcgggaggcgaccagaaagacacactgacggcccagagcgcagggatgaggcagctacaggagagcacaggag

SEQ ID NO: 121757 - DNA, 80 bp, synthetic construct; identical to SEQ ID NO: 38724
  misc_feature 1..80: note = Artificially Synthesized Probe
  source 1..80: mol_type = other DNA

SEQ ID NO: 121758 - DNA, 80 bp, synthetic construct
  misc_feature 1..80: note = Artificially Synthesized Probe
  source 1..80: mol_type = other DNA
cggctaattttttgtatttttagtagagatggggtttcaccatgttggccaggctggtcttgaactcctgacctcaagtg

SEQ ID NO: 121759 - DNA, 80 bp, synthetic construct
  misc_feature 1..80: note = Artificially Synthesized Probe
  source 1..80: mol_type = other DNA
cacaaatagcaacacagttaacagtctgtctgctcctggcttttttcacctcaaatcacttactcgggagatcattccct

SEQ ID NO: 121760 - DNA, 80 bp, synthetic construct; identical to SEQ ID NO: 38725
  misc_feature 1..80: note = Artificially Synthesized Probe
  source 1..80: mol_type = other DNA

SEQ ID NO: 121761 - DNA, 80 bp, synthetic construct
  misc_feature 1..80: note = Artificially Synthesized Probe
  source 1..80: mol_type = other DNA
agatgatcagactccaaaaaaagagccctcacacaaaacagccctttcctcttcctgccccagaccacccatattctggg

SEQ ID NO: 121762 - DNA, 80 bp, synthetic construct
  misc_feature 1..80: note = Artificially Synthesized Probe
  source 1..80: mol_type = other DNA
actggggaatgtgccaaagtagaagaaactttaggaactaaagacaacaagttttcactggtgaggccaaagaagaagtt

SEQ ID NO: 121763 - DNA, 80 bp, synthetic construct
  misc_feature 1..80: note = Artificially Synthesized Probe
  source 1..80: mol_type = other DNA
ctcctgcctcaccctcccaagtagctgggattacgggcacacaccaccacgccaagctaatttttggatttttagtagag

SEQ ID NO: 121764 - DNA, 80 bp, synthetic construct
  misc_feature 1..80: note = Artificially Synthesized Probe
  source 1..80: mol_type = other DNA
gtatttcaagtggagcagaatgtcctggatcctctggacaccccggtgagtaattctatatactagcaaaaaatgatcac

SEQ ID NO: 121765 - DNA, 80 bp, synthetic construct
  misc_feature 1..80: note = Artificially Synthesized Probe
  source 1..80: mol_type = other DNA
aagatctcaataaatggagaggttttagatcatgtggcaggagactgaatctctcccaactggatctatggactcaatgt

SEQ ID NO: 121766 - DNA, 80 bp, synthetic construct; identical to SEQ ID NO: 38726
  misc_feature 1..80: note = Artificially Synthesized Probe
  source 1..80: mol_type = other DNA

SEQ ID NO: 121767 - DNA, 80 bp, synthetic construct
  misc_feature 1..80: note = Artificially Synthesized Probe
  source 1..80: mol_type = other DNA
ccaccaccacacccagctagtttttgtatttttagtagagatgggtttcaccatgttgaaccaggctggtctcaaactcc

SEQ ID NO: 121768 - DNA, 80 bp, synthetic construct
  misc_feature 1..80: note = Artificially Synthesized Probe
  source 1..80: mol_type = other DNA
acacacacgaagaacgggtttttgataaagggcaaaggcaattcaacagagtaggaatctgcaggattcttcctctctca

SEQ ID NO: 121769 - DNA, 80 bp, synthetic construct
  misc_feature 1..80: note = Artificially Synthesized Probe
  source 1..80: mol_type = other DNA
attcaacagagtaggaatctgcaggattcttcctctctcatttctgctgttggctatgtgtgtcttctcttttctccttc

SEQ ID NO: 121770 - DNA, 80 bp, synthetic construct; identical to SEQ ID NO: 38634
  misc_feature 1..80: note = Artificially Synthesized Probe
  source 1..80: mol_type = other DNA

SEQ ID NO: 121771 - DNA, 80 bp, synthetic construct
  misc_feature 1..80: note = Artificially Synthesized Probe
  source 1..80: mol_type = other DNA
tcttcctgcctcagcctcttgagtaactgggactacaggcatgtgccaccacgcacagctaatttttgtatttcagtaga

SEQ ID NO: 121772 - DNA, 80 bp, synthetic construct; identical to SEQ ID NO: 38727
  misc_feature 1..80: note = Artificially Synthesized Probe
  source 1..80: mol_type = other DNA

SEQ ID NO: 121773 - DNA, 80 bp, synthetic construct
  misc_feature 1..80: note = Artificially Synthesized Probe
  source 1..80: mol_type = other DNA
gccaggactgcagacgtgcaccgtcacacccagctagtttttaactttttgtagagatggcagggggggtctcactatgt

SEQ ID NO: 121774 - DNA, 80 bp, synthetic construct
  misc_feature 1..80: note = Artificially Synthesized Probe
  source 1..80: mol_type = other DNA
ttccttttagcttctaaaggtagaagctgaagcagtgatctgaggcctttcttcttttctagtatagatattttgtgcca

SEQ ID NO: 121775 - DNA, 80 bp, synthetic construct
  misc_feature 1..80: note = Artificially Synthesized Probe
  source 1..80: mol_type = other DNA
tgaggcctttcttcttttctagtatagatattttgtgccagaaatgttcccttacagacactttagaggcattccacaca

SEQ ID NO: 121776 - DNA, 80 bp, synthetic construct
  misc_feature 1..80: note = Artificially Synthesized Probe
  source 1..80: mol_type = other DNA
gattttctagagatctttctcttactggtttctaatacgattccgttttggttagagctcacatctgtatgacttgaata

SEQ ID NO: 121777 - DNA, 80 bp, synthetic construct; identical to SEQ ID NO: 38728
  misc_feature 1..80: note = Artificially Synthesized Probe
  source 1..80: mol_type = other DNA

SEQ ID NO: 121778 - DNA, 80 bp, synthetic construct
  misc_feature 1..80: note = Artificially Synthesized Probe
  source 1..80: mol_type = other DNA
catcccagttttctttggattagtgttaatgtggtatatgcctttccaccttcttacttttaactcttttgtgtctttat

SEQ ID NO: 121779 - DNA, 80 bp, synthetic construct
  misc_feature 1..80: note = Artificially Synthesized Probe
  source 1..80: mol_type = other DNA
gtcctctttccattttgcttttcatttgtcccttgtatattttgcccacccccgccaattctctcattttctgccttctt

SEQ ID NO: 121780 - DNA, 80 bp, synthetic construct
  misc_feature 1..80: note = Artificially Synthesized Probe
  source 1..80: mol_type = other DNA
ccaccaccgcgcctggctaatttttgtatttttagtagagaggggtttcaccatgttggccagcatggtctcgatctctt

SEQ ID NO: 121781 - DNA, 80 bp, synthetic construct
  misc_feature 1..80: note = Artificially Synthesized Probe
  source 1..80: mol_type = other DNA
caatatggcatcactttcatagggagcgtgggaaactcacaagcttgtcttctccttctttggcttgggataatgtaacc

SEQ ID NO: 121782 - DNA, 80 bp, synthetic construct
  misc_feature 1..80: note = Artificially Synthesized Probe
  source 1..80: mol_type = other DNA
aatttatatttatagtagacacccttaacttatcactgctgatgttctaccacttcgtgtacaatacaagaacttacaac

SEQ ID NO: 121783 - DNA, 80 bp, synthetic construct; identical to SEQ ID NO: 38729
  misc_feature 1..80: note = Artificially Synthesized Probe
  source 1..80: mol_type = other DNA

SEQ ID NO: 121784 - DNA, 80 bp, synthetic construct
  misc_feature 1..80: note = Artificially Synthesized Probe
  source 1..80: mol_type = other DNA
tggctaattttgtatttttagtagagatggggtttctccatgttggccaggctggtcttgaactcccgaccccaggcact

SEQ ID NO: 121785 - DNA, 80 bp, synthetic construct; identical to SEQ ID NO: 38625
  misc_feature 1..80: note = Artificially Synthesized Probe
  source 1..80: mol_type = other DNA

SEQ ID NO: 121786 - DNA, 80 bp, synthetic construct
  misc_feature 1..80: note = Artificially Synthesized Probe
  source 1..80: mol_type = other DNA
tctctttcaatactgtaaaggtatttgtccacgatctgctcactggcattgcttctgacactatgcctgctgtcatcttt

SEQ ID NO: 121787 - DNA, 80 bp, synthetic construct; identical to SEQ ID NO: 38730
  misc_feature 1..80: note = Artificially Synthesized Probe
  source 1..80: mol_type = other DNA

SEQ ID NO: 121788 - DNA, 80 bp, synthetic construct
  misc_feature 1..80: note = Artificially Synthesized Probe
  source 1..80: mol_type = other DNA
ctcccaaatagctgggattacaggcacccaccaccatgcccagccaacttttcatatttttagtagagatggggtttcac

SEQ ID NO: 121789 - DNA, 80 bp, synthetic construct
  misc_feature 1..80: note = Artificially Synthesized Probe
  source 1..80: mol_type = other DNA
atgtatattgggctgttggaagctatcttgcagctcactgactgatgttcttttaaaaagaattctttttttttctctgt

SEQ ID NO: 121790 - DNA, 80 bp, synthetic construct
  misc_feature 1..80: note = Artificially Synthesized Probe
  source 1..80: mol_type = other DNA
cctgtgtatccgtcatctcagacactgtggttttcatcactggaagtttgatttgggttaaaatgtaaagaactgcttta

SEQ ID NO: 121791 - DNA, 80 bp, synthetic construct
  misc_feature 1..80: note = Artificially Synthesized Probe
  source 1..80: mol_type = other DNA
ggtgttaatccccagtcaattttgataatggatttttctcttccttacgggctgtattttcctgcttctttgcaagactg

SEQ ID NO: 121792 - DNA, 80 bp, synthetic construct; identical to SEQ ID NO: 38731
  misc_feature 1..80: note = Artificially Synthesized Probe
  source 1..80: mol_type = other DNA

SEQ ID NO: 121793 - DNA, 80 bp, synthetic construct
  misc_feature 1..80: note = Artificially Synthesized Probe
  source 1..80: mol_type = other DNA
ctgaactgtctttcctgtggcttagggaggataaacgaacattcctggtgggggagggcaccccaacaggacaagtgctt

SEQ ID NO: 121794 - DNA, 80 bp, synthetic construct
  misc_feature 1..80: note = Artificially Synthesized Probe
  source 1..80: mol_type = other DNA
cagtggtgcgatctcggctcaccgcaacctccgcctcccaggttcaagcaattcttcctgcctcagcctcccgaatagct

SEQ ID NO: 121795 - DNA, 80 bp, synthetic construct
  misc_feature 1..80: note = Artificially Synthesized Probe
  source 1..80: mol_type = other DNA
cctggcctcaatgtcttcaatgtggatgttcttccagtctctgcctgagttccctctccctgccccacagcctggaaacg

SEQ ID NO: 121796 - DNA, 80 bp, synthetic construct
  misc_feature 1..80: note = Artificially Synthesized Probe
  source 1..80: mol_type = other DNA
cttttctttcagttgtttcatgaggaaaggtaaatccagtttctgtttctccatcttggccacaagtagaagttggagca

SEQ ID NO: 121797 - DNA, 80 bp, synthetic construct; identical to SEQ ID NO: 38732
  misc_feature 1..80: note = Artificially Synthesized Probe
  source 1..80: mol_type = other DNA

SEQ ID NO: 121798 - DNA, 80 bp, synthetic construct
  misc_feature 1..80: note = Artificially Synthesized Probe
  source 1..80: mol_type = other DNA
tatgagaacagtatgggggagaatgaccccatgattcagttatctcccactgggtccctcccacaacacatgggaatcat

SEQ ID NO: 121799 - DNA, 80 bp, synthetic construct
  misc_feature 1..80: note = Artificially Synthesized Probe
  source 1..80: mol_type = other DNA
taataagacaaagaccacacttccctgactttacaccacctcacttctcagggatgctgttaagagttgaccccaaatgg

SEQ ID NO: 121800 - DNA, 80 bp, synthetic construct
  misc_feature 1..80: note = Artificially Synthesized Probe
  source 1..80: mol_type = other DNA
tctgaagtttgcagtcacaattgacaagatatgggtgacattgatcctgaaaaggaagaaattctggtgtttctaagagt

SEQ ID NO: 121801 - DNA, 80 bp, synthetic construct
  misc_feature 1..80: note = Artificially Synthesized Probe
  source 1..80: mol_type = other DNA
tagtctccatcataaccacttagcaatccatttcctctctatttcctgttcagagacctttggatatgccaatctgaata

SEQ ID NO: 121802 - DNA, 80 bp, synthetic construct
  misc_feature 1..80: note = Artificially Synthesized Probe
  source 1..80: mol_type = other DNA
atttcctgttcagagacctttggatatgccaatctgaataattgattggagcagaaaagcctcatgcctttgaagtccct

SEQ ID NO: 121803 - DNA, 80 bp, synthetic construct; identical to SEQ ID NO: 38733
  misc_feature 1..80: note = Artificially Synthesized Probe
  source 1..80: mol_type = other DNA

SEQ ID NO: 121804 - DNA, 80 bp, synthetic construct
  misc_feature 1..80: note = Artificially Synthesized Probe
  source 1..80: mol_type = other DNA
catctactctaagttaaacacaccgggctatgattgatggagaggtgtctgcagagcatctgttatgaagctgtgattgg

SEQ ID NO: 121805 - DNA, 80 bp, synthetic construct
  misc_feature 1..80: note = Artificially Synthesized Probe
  source 1..80: mol_type = other DNA
cctgtagagaggtaattaagttaaaaggacatcatgaggatgagccttaatcccggctgactggtgtccttataagagct

SEQ ID NO: 121806 - DNA, 80 bp, synthetic construct
  misc_feature 1..80: note = Artificially Synthesized Probe
  source 1..80: mol_type = other DNA
tctactgaaaatacaaaaattagccgggtgtggtggcgggtgcctataatcccagatactcgggaggctgaggcaggaga

SEQ ID NO: 121807 - DNA, 80 bp, synthetic construct; identical to SEQ ID NO: 38635
  misc_feature 1..80: note = Artificially Synthesized Probe
  source 1..80: mol_type = other DNA

SEQ ID NO: 121808 - DNA, 80 bp, synthetic construct
  misc_feature 1..80: note = Artificially Synthesized Probe
  source 1..80: mol_type = other DNA
gaggacacagacacacatagacagacgactacgggaggacccagggagaaggcagcgcctacaagccatggaaggaagac

SEQ ID NO: 121809 - DNA, 80 bp, synthetic construct
  misc_feature 1..80: note = Artificially Synthesized Probe
  source 1..80: mol_type = other DNA
gctgagccgcgccgccgccgccgccgccgccgcccctgcggagcccccggagccgctgtcccccgcgccggccccggccc

SEQ ID NO: 121810 - DNA, 80 bp, synthetic construct; identical to SEQ ID NO: 39385
  misc_feature 1..80: note = Artificially Synthesized Probe
  source 1..80: mol_type = other DNA

SEQ ID NO: 121811 - DNA, 80 bp, synthetic construct
  misc_feature 1..80: note = Artificially Synthesized Probe
  source 1..80: mol_type = other DNA
agggcctgtgttgagtgaacattgtttttggtctgggagaagagcatggtgaggtttgggctgtgggccggggctagcat

SEQ ID NO: 121812 - DNA, 80 bp, synthetic construct
  misc_feature 1..80: note = Artificially Synthesized Probe
  source 1..80: mol_type = other DNA
cagcatggaaagatcatgtaaacgacacataaggaaaacaacagtgatgggaaagcagaatggggctgggaatagtgcca

SEQ ID NO: 121813 - DNA, 80 bp, synthetic construct
  misc_feature 1..80: note = Artificially Synthesized Probe
  source 1..80: mol_type = other DNA
ggccaggctgggaccgtcctgttgtagctgccggagtcccctctgggagagttgtagctgccggagtcccctctgggaga

SEQ ID NO: 121814 - DNA, 80 bp, synthetic construct
  misc_feature 1..80: note = Artificially Synthesized Probe
  source 1..80: mol_type = other DNA
caggctgggaccgtcctgttgtagctgccggagtcccctctgggagagttgtagctgccggagtcccctctgggagagtt

SEQ ID NO: 121815 - DNA, 80 bp, synthetic construct
  misc_feature 1..80: note = Artificially Synthesized Probe
  source 1..80: mol_type = other DNA
tgtgtagtgagcaggcagtgtgtgcagttagcaggcacagtgtgtgcagtgagtgggcagtgtgcacagcatgtacagtg

SEQ ID NO: 121816 - DNA, 80 bp, synthetic construct; identical to SEQ ID NO: 39386
  misc_feature 1..80: note = Artificially Synthesized Probe
  source 1..80: mol_type = other DNA

SEQ ID NO: 121817 - DNA, 80 bp, synthetic construct
  misc_feature 1..80: note = Artificially Synthesized Probe
  source 1..80: mol_type = other DNA
cctctgggagagttgctgttggccaggctgggaccgtcctgttgtagctgccggagtcccctctgggagagttgtagctg

SEQ ID NO: 121818 - DNA, 80 bp, synthetic construct
  misc_feature 1..80: note = Artificially Synthesized Probe
  source 1..80: mol_type = other DNA
ccgtcctgttgtagctgccggagtcccctctgggagagttgctgctggccaggctgggactgtcctgttgtagctgccgg

SEQ ID NO: 121819 - DNA, 80 bp, synthetic construct
  misc_feature 1..80: note = Artificially Synthesized Probe
  source 1..80: mol_type = other DNA
gagagttgctgctggccaggctgggacggtcctgttgtagctgccggagtcccctctgggagagttgctgctggccaggc

SEQ ID NO: 121820 - DNA, 80 bp, synthetic construct
  misc_feature 1..80: note = Artificially Synthesized Probe
  source 1..80: mol_type = other DNA
gttgtagctgccggagtcccctctgggagagttgctgctggccaggctgggaccgtcctgttgtagctgccggagtcccc

SEQ ID NO: 121821 - DNA, 80 bp, synthetic construct; identical to SEQ ID NO: 39387
  misc_feature 1..80: note = Artificially Synthesized Probe
  source 1..80: mol_type = other DNA

SEQ ID NO: 121822 - DNA, 80 bp, synthetic construct
  misc_feature 1..80: note = Artificially Synthesized Probe
  source 1..80: mol_type = other DNA
tctaatgtgaggtcatggtcagggctggagttgaattttggactggggttaagattaaggtcggtttcatgtttaagggc

SEQ ID NO: 121823 - DNA, 80 bp, synthetic construct
  misc_feature 1..80: note = Artificially Synthesized Probe
  source 1..80: mol_type = other DNA
agtaactgggccagtgggatgggtaggatcggagtccagggtcaggtcaggggagaactgtggtaaggtttgggtttgca

SEQ ID NO: 121824 - DNA, 80 bp, synthetic construct
  misc_feature 1..80: note = Artificially Synthesized Probe
  source 1..80: mol_type = other DNA
cgcgatcttggctcactgcaagctccgcctcctgggttctcaccattctcctgcctcagcctcccgagtagctgggatta

SEQ ID NO: 121825 - DNA, 80 bp, synthetic construct; identical to SEQ ID NO: 39388
  misc_feature 1..80: note = Artificially Synthesized Probe
  source 1..80: mol_type = other DNA

SEQ ID NO: 121826 - DNA, 80 bp, synthetic construct
  misc_feature 1..80: note = Artificially Synthesized Probe
  source 1..80: mol_type = other DNA
tgagtacagtgtgagtgttgtgattgtggtaagcaggatgcgcagtatacagtgaacagtgtgcacagtgtgtgcagtgt

SEQ ID NO: 121827 - DNA, 80 bp, synthetic construct
  misc_feature 1..80: note = Artificially Synthesized Probe
  source 1..80: mol_type = other DNA
accccagggctcttggagtcaccatggttgcgacttactggctatccaacctaggtgtgcttgcttggttggagttagac

SEQ ID NO: 121828 - DNA, 80 bp, synthetic construct
  misc_feature 1..80: note = Artificially Synthesized Probe
  source 1..80: mol_type = other DNA
accgccagatttccctgagtacaggcagcatatttgtcaggatttaatacaagccccttatctcaatttgccctctcaac

SEQ ID NO: 121829 - DNA, 80 bp, synthetic construct; identical to SEQ ID NO: 39389
  misc_feature 1..80: note = Artificially Synthesized Probe
  source 1..80: mol_type = other DNA

SEQ ID NO: 121830 - DNA, 80 bp, synthetic construct
  misc_feature 1..80: note = Artificially Synthesized Probe
  source 1..80: mol_type = other DNA
ggcctgggcgtggaatgggcatcccacagtgcttttgatgagtaccttggggaaatgcttctccagggtgctgtcatgcc

SEQ ID NO: 121831 - DNA, 80 bp, synthetic construct
  misc_feature 1..80: note = Artificially Synthesized Probe
  source 1..80: mol_type = other DNA
aatgattcagtagcgttctgtatattcacggtgttgtgcagccgattctattgaattcaaaacattttcatcaccacaaa

SEQ ID NO: 121832 - DNA, 80 bp, synthetic construct
  misc_feature 1..80: note = Artificially Synthesized Probe
  source 1..80: mol_type = other DNA
atgtcaatggaatcatataataagtgacacttagtgtctggctgcttttactcaacatgtttttgagcttcaccttgtag

SEQ ID NO: 121833 - DNA, 80 bp, synthetic construct
  misc_feature 1..80: note = Artificially Synthesized Probe
  source 1..80: mol_type = other DNA
tgaatattgctgctgtcaacatgtgtgtacatgtacttgtttgaatatctattttcaatctcttaggtatatacctaaga

SEQ ID NO: 121834 - DNA, 80 bp, synthetic construct; identical to SEQ ID NO: 39390
  misc_feature 1..80: note = Artificially Synthesized Probe
  source 1..80: mol_type = other DNA

SEQ ID NO: 121835 - DNA, 80 bp, synthetic construct
  misc_feature 1..80: note = Artificially Synthesized Probe
  source 1..80: mol_type = other DNA
actaaacttgtgtggaatatgtgatttgtaaatattttctctgtagaataggagatccttgtcacttttttgataatgtc

SEQ ID NO: 121836 - DNA, 80 bp, synthetic construct
  misc_feature 1..80: note = Artificially Synthesized Probe
  source 1..80: mol_type = other DNA
attttacggttttcactcttaggtcactgatccattttaagttttaacttctgtttatggtgtgaggtagggagccatct

SEQ ID NO: 121837 - DNA, 80 bp, synthetic construct; identical to SEQ ID NO: 39391
  misc_feature 1..80: note = Artificially Synthesized Probe
  source 1..80: mol_type = other DNA

SEQ ID NO: 121838 - DNA, 80 bp, synthetic construct; identical to SEQ ID NO: 35908
  misc_feature 1..80: note = Artificially Synthesized Probe
  source 1..80: mol_type = other DNA

SEQ ID NO: 121839 - DNA, 80 bp, synthetic construct; identical to SEQ ID NO: 39376
  misc_feature 1..80: note = Artificially Synthesized Probe
  source 1..80: mol_type = other DNA

SEQ ID NO: 121840 - DNA, 80 bp, synthetic construct
  misc_feature 1..80: note = Artificially Synthesized Probe
  source 1..80: mol_type = other DNA
cttttgaaatcaggaggtttgagtgcttcaacttgttcttatttgttatcgttttggctaatcagggcccctggcaattc

SEQ ID NO: 121841 - DNA, 80 bp, synthetic construct
  misc_feature 1..80: note = Artificially Synthesized Probe
  source 1..80: mol_type = other DNA
acatgggatgtccttttatttatttaggtcatctctaagcagtgttttgtcattttcagtatatagatttttttacttcc

SEQ ID NO: 121842 - DNA, 80 bp, synthetic construct
  misc_feature 1..80: note = Artificially Synthesized Probe
  source 1..80: mol_type = other DNA
gctgatcttgtgccctacaactttgctgaatttgtttattagctctagtagctcttttggtgtattctttgggattttct

SEQ ID NO: 121843 - DNA, 80 bp, synthetic construct; identical to SEQ ID NO: 39392
  misc_feature 1..80: note = Artificially Synthesized Probe
  source 1..80: mol_type = other DNA

SEQ ID NO: 121844 - DNA, 80 bp, synthetic construct
  misc_feature 1..80: note = Artificially Synthesized Probe
  source 1..80: mol_type = other DNA
ctagtttcctgagtgtttttataatgaaagagtgttggattatggcagatgctttttatgcatcaattgaaatgatcatt

SEQ ID NO: 121845 - DNA, 80 bp, synthetic construct
  misc_feature 1..80: note = Artificially Synthesized Probe
  source 1..80: mol_type = other DNA
gaatttgtgtcaattctttaaatttctagtagagtgcaccagtgatgccatctggtggtggacttttcttcgttgggagg

SEQ ID NO: 121846 - DNA, 80 bp, synthetic construct
  misc_feature 1..80: note = Artificially Synthesized Probe
  source 1..80: mol_type = other DNA
tttttaacttctgtaacactgatagtaagtccccaaatttcatttgtgattttagttatttctgtccatcttctctcctt

SEQ ID NO: 121847 - DNA, 80 bp, synthetic construct; identical to SEQ ID NO: 39393
  misc_feature 1..80: note = Artificially Synthesized Probe
  source 1..80: mol_type = other DNA

SEQ ID NO: 121848 - DNA, 80 bp, synthetic construct
  misc_feature 1..80: note = Artificially Synthesized Probe
  source 1..80: mol_type = other DNA
gcgattctcctgcctcagcctcccgagtagctgggattacagggacccaccaccatgcctggctaattttgtatttttta

SEQ ID NO: 121849 - DNA, 80 bp, synthetic construct
  misc_feature 1..80: note = Artificially Synthesized Probe
  source 1..80: mol_type = other DNA
tgtgagctgagctcaaagttgggcgggcctccgtggtggcacaggaaagtggggtcagttctacctggagagtggagggg

SEQ ID NO: 121850 - DNA, 80 bp, synthetic construct
  misc_feature 1..80: note = Artificially Synthesized Probe
  source 1..80: mol_type = other DNA
ctatgttgctaggctggtcttgagctcctgggctgaagtgatgctcccgctttggcctcccaaagtgctgggattacagg

SEQ ID NO: 121851 - DNA, 80 bp, synthetic construct; identical to SEQ ID NO: 39394
  misc_feature 1..80: note = Artificially Synthesized Probe
  source 1..80: mol_type = other DNA

SEQ ID NO: 121852 - DNA, 80 bp, synthetic construct
  misc_feature 1..80: note = Artificially Synthesized Probe
  source 1..80: mol_type = other DNA
aagtgtttacagcgttgtttccctttaagtactgcttttgctccatatgttgtatttttgttcttgtttgtcttaaagtg

SEQ ID NO: 121853 - DNA, 80 bp, synthetic construct
  misc_feature 1..80: note = Artificially Synthesized Probe
  source 1..80: mol_type = other DNA
cttcctgagtagctgtaactacagggtgcagcaccacacctggctttttctattttttatagagatgggggtgtcactat

SEQ ID NO: 121854 - DNA, 80 bp, synthetic construct
  misc_feature 1..80: note = Artificially Synthesized Probe
  source 1..80: mol_type = other DNA
tttgtgaattttccagttttctttcacttctcgatttctagctttgtttcgttgtggttgaaaaagatactttgtatgat

SEQ ID NO: 121855 - DNA, 80 bp, synthetic construct; identical to SEQ ID NO: 39395
  misc_feature 1..80: note = Artificially Synthesized Probe
  source 1..80: mol_type = other DNA

SEQ ID NO: 121856 - DNA, 80 bp, synthetic construct
  misc_feature 1..80: note = Artificially Synthesized Probe
  source 1..80: mol_type = other DNA
gtttttatcttaaagtttattttgtatgatgttaatataaccacccagctctcttttggttactatttacattagattgc

SEQ ID NO: 121857 - DNA, 80 bp, synthetic construct
  misc_feature 1..80: note = Artificially Synthesized Probe
  source 1..80: mol_type = other DNA
ttggaacacaaacacacctatctgcttgtatgttgtttgtggtggttttcatgctgcggtggcagagttgagtcattgca

SEQ ID NO: 121858 - DNA, 80 bp, synthetic construct
  misc_feature 1..80: note = Artificially Synthesized Probe
  source 1..80: mol_type = other DNA
gaatgtcttttatagtttccctggttatagttaactgcaaatggtcctgttcagcagtagtctggtgagattcgtcacat

SEQ ID NO: 121859 - DNA, 80 bp, synthetic construct
  misc_feature 1..80: note = Artificially Synthesized Probe
  source 1..80: mol_type = other DNA
ccatcgggctgcatcatgcctgagtgtggtgggtgcatggcagctgttagctctgtccactgtggtagtatgactgatgg

SEQ ID NO: 121860 - DNA, 80 bp, synthetic construct; identical to SEQ ID NO: 39396
  misc_feature 1..80: note = Artificially Synthesized Probe
  source 1..80: mol_type = other DNA

SEQ ID NO: 121861 - DNA, 80 bp, synthetic construct
  misc_feature 1..80: note = Artificially Synthesized Probe
  source 1..80: mol_type = other DNA
ctcagccagcgatatcaacctgaagggggaggcacagccagcagcttctcctggaccctcgctgagaagcctcccccacc

SEQ ID NO: 121862 - DNA, 80 bp, synthetic construct
  misc_feature 1..80: note = Artificially Synthesized Probe
  source 1..80: mol_type = other DNA
acctgagccaggaggagccagcaccgggaggcagagagaggcctggtggtgcctagcacctgtgtagtgatgggctaggg

SEQ ID NO: 121863 - DNA, 80 bp, synthetic construct
  misc_feature 1..80: note = Artificially Synthesized Probe
  source 1..80: mol_type = other DNA
ctgcattgtcaggcatggctgggaagagtcagggctggtggcctgtggtaagggggacagggatggagttgccactccag

SEQ ID NO: 121864 - DNA, 80 bp, synthetic construct
  misc_feature 1..80: note = Artificially Synthesized Probe
  source 1..80: mol_type = other DNA
ggcctctctgggctgtgcattgggtgctgaggtgggcgcactggctctcagccactttgtgcctgggcttctcatcagta

SEQ ID NO: 121865 - DNA, 80 bp, synthetic construct; identical to SEQ ID NO: 39397
  misc_feature 1..80: note = Artificially Synthesized Probe
  source 1..80: mol_type = other DNA

SEQ ID NO: 121866 - DNA, 80 bp, synthetic construct
  misc_feature 1..80: note = Artificially Synthesized Probe
  source 1..80: mol_type = other DNA
tccagagtcacagagctacggatcagcttcactgggccccaggtagacccaatccccaactttctaagcctgagtgttca

SEQ ID NO: 121867 - DNA, 80 bp, synthetic construct
  misc_feature 1..80: note = Artificially Synthesized Probe
  source 1..80: mol_type = other DNA
tcgcaaggctggctgtactgccccaaatctcaattctcccctgaagctttcttatagacccgcggattttctaagggctg

SEQ ID NO: 121868 - DNA, 80 bp, synthetic construct
  misc_feature 1..80: note = Artificially Synthesized Probe
  source 1..80: mol_type = other DNA
agtttcgatacaagcggcgagtttatgcccagaacctcatcgatgataagcagtttgcaaagcttcacacaaaggtaaag

SEQ ID NO: 121869 - DNA, 80 bp, synthetic construct; identical to SEQ ID NO: 39398
  misc_feature 1..80: note = Artificially Synthesized Probe
  source 1..80: mol_type = other DNA

SEQ ID NO: 121870 - DNA, 80 bp, synthetic construct
  misc_feature 1..80: note = Artificially Synthesized Probe
  source 1..80: mol_type = other DNA
aggagagaagtcaccccctgggggaggcgaggctgggccctgcaccgcgcgggtcgctgcgccctctgtcggttgagccg

SEQ ID NO: 121871 - DNA, 80 bp, synthetic construct
  misc_feature 1..80: note = Artificially Synthesized Probe
  source 1..80: mol_type = other DNA
agaggtgccccgtgtgactagagcgtagcaaactgccaagcccgagggagcctggctcttggaaaagcgggtggctctgg

SEQ ID NO: 121872 - DNA, 80 bp, synthetic construct
  misc_feature 1..80: note = Artificially Synthesized Probe
  source 1..80: mol_type = other DNA
ctagagggggactgggcacccagcgatccgggccctggacctggaggggtggggggggcgcccctccctcccgttcaccg

SEQ ID NO: 121873 - DNA, 80 bp, synthetic construct
  misc_feature 1..80: note = Artificially Synthesized Probe
  source 1..80: mol_type = other DNA
cgcagagggaggagcccggccgtggaggaggcggggcgcggggcggccgcggcatggagcgagcctggcgcgcccaggag

SEQ ID NO: 121874 - DNA, 80 bp, synthetic construct
  misc_feature 1..80: note = Artificially Synthesized Probe
  source 1..80: mol_type = other DNA
ggcgaggccgtgaagggtgaggggcgcgggggggcgcgggggggcgggcccggcgcggggagggggcggcgccgcgcgcg

SEQ ID NO: 121875 - DNA, 80 bp, synthetic construct
  misc_feature 1..80: note = Artificially Synthesized Probe
  source 1..80: mol_type = other DNA
cacggaggctcctctctcgccacgggcgtttctgtgtccccgggggtctctgcctgaaggaccctgtcccattacagagc

SEQ ID NO: 121876 - DNA, 80 bp, synthetic construct
  misc_feature 1..80: note = Artificially Synthesized Probe
  source 1..80: mol_type = other DNA
tcgcgtgccatgacaaacccctctcattctgggggtctcggggccatcactgggctcctagcctcagggccggctgaggt

SEQ ID NO: 121877 - DNA, 80 bp, synthetic construct
  misc_feature 1..80: note = Artificially Synthesized Probe
  source 1..80: mol_type = other DNA
ggagtgtggcccctgcccctgcctgcgcccctccccgagtgtgtccatctgtgtgtctctctgtcccccacatgcccacc

SEQ ID NO: 121878 - DNA, 80 bp, synthetic construct
  misc_feature 1..80: note = Artificially Synthesized Probe
  source 1..80: mol_type = other DNA
agcgccgtggtcgtgcgcgtcggcatcccggacctgcagcagacggtgagccccgccgccctgggcccggccgtgcccct

SEQ ID NO: 121879 - DNA, 80 bp, synthetic construct; identical to SEQ ID NO: 39399
  misc_feature 1..80: note = Artificially Synthesized Probe
  source 1..80: mol_type = other DNA

SEQ ID NO: 121880 - DNA, 80 bp, synthetic construct
  misc_feature 1..80: note = Artificially Synthesized Probe
  source 1..80: mol_type = other DNA
acagattcctggccccatggttggggtcaggtggtacagtgatgtgttccagttagatcagactcttgccgacccccctg

SEQ ID NO: 121881 - DNA, 80 bp, synthetic construct
  misc_feature 1..80: note = Artificially Synthesized Probe
  source 1..80: mol_type = other DNA
atagagaaaagactagaggtaaactcaaacaaacactcaaagtagatgcaaacttgtgtacatgacacagacacgtgtgc

SEQ ID NO: 121882 - DNA, 80 bp, synthetic construct
  misc_feature 1..80: note = Artificially Synthesized Probe
  source 1..80: mol_type = other DNA
gtgtgtggaacgcatgattcctgcgtagctggcagacatgtaaggaggtcagtgtgagaaaagaggcgtttttccaaagt

SEQ ID NO: 121883 - DNA, 80 bp, synthetic construct
  misc_feature 1..80: note = Artificially Synthesized Probe
  source 1..80: mol_type = other DNA
ggtgaggctgggctggtcctcagcctgcagggaggatgtgaaggtgaaggctgcagctcctgggttggtgagtggctgct

SEQ ID NO: 121884 - DNA, 80 bp, synthetic construct; identical to SEQ ID NO: 39400
  misc_feature 1..80: note = Artificially Synthesized Probe
  source 1..80: mol_type = other DNA

SEQ ID NO: 121885 - DNA, 80 bp, synthetic construct
  misc_feature 1..80: note = Artificially Synthesized Probe
  source 1..80: mol_type = other DNA
cctttcctccttccttggccttgttctgccttgctctgactggtggcttagagtgtggaagggacttggccccctgttct

SEQ ID NO: 121886 - DNA, 80 bp, synthetic construct
  misc_feature 1..80: note = Artificially Synthesized Probe
  source 1..80: mol_type = other DNA
aaggttctggtttgaggactgtgtggagtgaggggcatttggacctacgtctgaagctgacggggagggaggggggttta

SEQ ID NO: 121887 - DNA, 80 bp, synthetic construct
  misc_feature 1..80: note = Artificially Synthesized Probe
  source 1..80: mol_type = other DNA
gacgggggccgtgtgagcgtgggagctccctgggctggcctgaaggagtcagagagggcctcaaaacagaggcattgtct

SEQ ID NO: 121888 - DNA, 80 bp, synthetic construct; identical to SEQ ID NO: 39401
  misc_feature 1..80: note = Artificially Synthesized Probe
  source 1..80: mol_type = other DNA

SEQ ID NO: 121889 - DNA, 80 bp, synthetic construct
  misc_feature 1..80: note = Artificially Synthesized Probe
  source 1..80: mol_type = other DNA
gggaacccagccgcagtgtctgattgtgcaggttgtgtaggatcaaagcccgggctgggcagagcagagcaatggagagg

SEQ ID NO: 121890 - DNA, 80 bp, synthetic construct; identical to SEQ ID NO: 39377
  misc_feature 1..80: note = Artificially Synthesized Probe
  source 1..80: mol_type = other DNA

SEQ ID NO: 121891 - DNA, 80 bp, synthetic construct
  misc_feature 1..80: note = Artificially Synthesized Probe
  source 1..80: mol_type = other DNA
gccctctgaccttggctgcaggccctgctggccacactgcgcagagcctctgctctgggatcccggggccgagttctgcc

SEQ ID NO: 121892 - DNA, 80 bp, synthetic construct
  misc_feature 1..80: note = Artificially Synthesized Probe
  source 1..80: mol_type = other DNA
gcccagagccggtgcctgctgtgggatcgggaggcgagtcctggtcacttacccagcagagagcagtctcccacggcacc

SEQ ID NO: 121893 - DNA, 80 bp, synthetic construct; identical to SEQ ID NO: 39402
  misc_feature 1..80: note = Artificially Synthesized Probe
  source 1..80: mol_type = other DNA

SEQ ID NO: 121894 - DNA, 80 bp, synthetic construct
  misc_feature 1..80: note = Artificially Synthesized Probe
  source 1..80: mol_type = other DNA
gtgatgaggcttggcctgagctggccttaggttcagcgggatgaggggtgcaggtgtggttggggaatgccaggataaga

SEQ ID NO: 121895 - DNA, 80 bp, synthetic construct
  misc_feature 1..80: note = Artificially Synthesized Probe
  source 1..80: mol_type = other DNA
ccagcccgatacttttttgatatctgtgccttctgatagaaataggcactctttcctctttccgtccggccactgctcca

SEQ ID NO: 121896 - DNA, 80 bp, synthetic construct
  misc_feature 1..80: note = Artificially Synthesized Probe
  source 1..80: mol_type = other DNA
cccatgtatctgtctgctctttgacctatctacccatggccctctccttccctccctccatccactggtccagtgccttt

SEQ ID NO: 121897 - DNA, 80 bp, synthetic construct; identical to SEQ ID NO: 39403
  misc_feature 1..80: note = Artificially Synthesized Probe
  source 1..80: mol_type = other DNA

SEQ ID NO: 121898 - DNA, 80 bp, synthetic construct
  misc_feature 1..80: note = Artificially Synthesized Probe
  source 1..80: mol_type = other DNA
acaggctgctccccatcctcagcctctgctcagccctcccgtgggggtgaggcctttgcgtgcctttctctgccctccct

SEQ ID NO: 121899 - DNA, 80 bp, synthetic construct
  misc_feature 1..80: note = Artificially Synthesized Probe
  source 1..80: mol_type = other DNA
ataaatacttgctgaaggaaaacatggatcttgagaaatgctaccaagagaggaaatgaggaaggtgctgagggatgaaa

SEQ ID NO: 121900 - DNA, 80 bp, synthetic construct
  misc_feature 1..80: note = Artificially Synthesized Probe
  source 1..80: mol_type = other DNA
tcttgaggggggcaccttactatttcccgctgaatgtcagaggggcagggtgggtgccacagcccctccccaggggcttc

SEQ ID NO: 121901 - DNA, 80 bp, synthetic construct
  misc_feature 1..80: note = Artificially Synthesized Probe
  source 1..80: mol_type = other DNA
gggtggagtggtgggcagacagctggctagcttggtgctggccatgtgggacttgagatcaagaggacagttggggacca

SEQ ID NO: 121902 - DNA, 80 bp, synthetic construct; identical to SEQ ID NO: 39404
  misc_feature 1..80: note = Artificially Synthesized Probe
  source 1..80: mol_type = other DNA

SEQ ID NO: 121903 - DNA, 80 bp, synthetic construct
  misc_feature 1..80: note = Artificially Synthesized Probe
  source 1..80: mol_type = other DNA
agccttggggctcacttacgctctgtggacggctctggccttgtttggactcctggttcagcagctacttaggaaagaga

SEQ ID NO: 121904 - DNA, 80 bp, synthetic construct
  misc_feature 1..80: note = Artificially Synthesized Probe
  source 1..80: mol_type = other DNA
gtgaccagcatgggtgagggcagttgaggcaggccagctggaggccacgactgtccatcagctcccgatactcccttcag

SEQ ID NO: 121905 - DNA, 80 bp, synthetic construct; identical to SEQ ID NO: 39405
  misc_feature 1..80: note = Artificially Synthesized Probe
  source 1..80: mol_type = other DNA

SEQ ID NO: 121906 - DNA, 80 bp, synthetic construct
  misc_feature 1..80: note = Artificially Synthesized Probe
  source 1..80: mol_type = other DNA
ctttggttttgtgctccggggagccaaaggtaatggggagtgggtgcccgggggtcaggcaggcaggggctgcacaccgc

SEQ ID NO: 121907 - DNA, 80 bp, synthetic construct
  misc_feature 1..80: note = Artificially Synthesized Probe
  source 1..80: mol_type = other DNA
attccttcccttcgttgttttccactgtctttgctctagagtctaaccgagtgggggcttttctggcatgggcaaaggga

SEQ ID NO: 121908 - DNA, 80 bp, synthetic construct
  misc_feature 1..80: note = Artificially Synthesized Probe
  source 1..80: mol_type = other DNA
cctagctggtgaagcgccttcctaattgccccccgcagcagagacccccatcgaggagttcacgcccacgccagccttcc

SEQ ID NO: 121909 - DNA, 80 bp, synthetic construct
  misc_feature 1..80: note = Artificially Synthesized Probe
  source 1..80: mol_type = other DNA
agccctgtgtcctaatggtcccatcagtgactttggagcctcaggcttctgtgccaggcttttctgctgccccagggcag

SEQ ID NO: 121910 - DNA, 80 bp, synthetic construct
  misc_feature 1..80: note = Artificially Synthesized Probe
  source 1..80: mol_type = other DNA
cacccagctgcctgtctatcccaggtgaacggggtgaacgtggtgaaggtcggacacaagcaggtggtggctctgattcg

SEQ ID NO: 121911 - DNA, 80 bp, synthetic construct; identical to SEQ ID NO: 39406
  misc_feature 1..80: note = Artificially Synthesized Probe
  source 1..80: mol_type = other DNA

SEQ ID NO: 121912 - DNA, 80 bp, synthetic construct
  misc_feature 1..80: note = Artificially Synthesized Probe
  source 1..80: mol_type = other DNA
tggcgtggcagagccctccttccctacaccgccagcagctgcctggaggccggggttgccatagcaactgtgaggttgac

SEQ ID NO: 121913 - DNA, 80 bp, synthetic construct
  misc_feature 1..80: note = Artificially Synthesized Probe
  source 1..80: mol_type = other DNA
cacaaggggcagtggccacccgggcctggggggagccctggagcagcaggagccccgcccgcaaggagacccctcccagc

SEQ ID NO: 121914 - DNA, 80 bp, synthetic construct
  misc_feature 1..80: note = Artificially Synthesized Probe
  source 1..80: mol_type = other DNA
cccgcccccccccccccgcactccctgagctccttgagccatgaagaagtttgcgtccagccgtaacctgaacaagatcc

SEQ ID NO: 121915 - DNA, 80 bp, synthetic construct; identical to SEQ ID NO: 39407
  misc_feature 1..80: note = Artificially Synthesized Probe
  source 1..80: mol_type = other DNA

SEQ ID NO: 121916 - DNA, 80 bp, synthetic construct
  misc_feature 1..80: note = Artificially Synthesized Probe
  source 1..80: mol_type = other DNA
gtggggtgaggagagggtggcatgtggaaggggtgagatgtgagaggctggggatggacagtggggtgtccaggacagat

SEQ ID NO: 121917 - DNA, 80 bp, synthetic construct
  misc_feature 1..80: note = Artificially Synthesized Probe
  source 1..80: mol_type = other DNA
ctgccaggcactggctgtgtcagctctgtgtttattttaccctcttggtgactgtgcactcattgacaggtggccctgct

SEQ ID NO: 121918 - DNA, 80 bp, synthetic construct; identical to SEQ ID NO: 39408
  misc_feature 1..80: note = Artificially Synthesized Probe
  source 1..80: mol_type = other DNA

SEQ ID NO: 121919 - DNA, 80 bp, synthetic construct
  misc_feature 1..80: note = Artificially Synthesized Probe
  source 1..80: mol_type = other DNA
tatgtgctatacatgtggccatcaacagcctcgtcatgggcatgtcccactgtacgtgacagttgacaggctctttcttt

SEQ ID NO: 121920 - DNA, 80 bp, synthetic construct
  misc_feature 1..80: note = Artificially Synthesized Probe
  source 1..80: mol_type = other DNA
caccatgcacggctaatttttttttttttttttttgtatttttagtagaggcggggtgtcaccatgttggccgggctggt

SEQ ID NO: 121921 - DNA, 80 bp, synthetic construct; identical to SEQ ID NO: 39378
  misc_feature 1..80: note = Artificially Synthesized Probe
  source 1..80: mol_type = other DNA

SEQ ID NO: 121922 - DNA, 80 bp, synthetic construct
  misc_feature 1..80: note = Artificially Synthesized Probe
  source 1..80: mol_type = other DNA
aaccctgaagtcctggccacaggaagggaccccattctggttctaggctgagccctatccctggcttcagtcttggttct

SEQ ID NO: 121923 - DNA, 80 bp, synthetic construct; identical to SEQ ID NO: 39409
  misc_feature 1..80: note = Artificially Synthesized Probe
  source 1..80: mol_type = other DNA

SEQ ID NO: 121924 - DNA, 80 bp, synthetic construct
  misc_feature 1..80: note = Artificially Synthesized Probe
  source 1..80: mol_type = other DNA
cccaaccactggaattagcttcgaaagaactggaaatcagagaagaatatgaaaaacattaaaataaagtaaattgtcac

SEQ ID NO: 121925 - DNA, 80 bp, synthetic construct
  misc_feature 1..80: note = Artificially Synthesized Probe
  source 1..80: mol_type = other DNA
cactgcatcctccgcctcccgggttcaagtgattctcttggctcagcctcctgagtagctgggattacaggcgcacaaca

SEQ ID NO: 121926 - DNA, 80 bp, synthetic construct
  misc_feature 1..80: note = Artificially Synthesized Probe
  source 1..80: mol_type = other DNA
agaactgttattgaaacaaaaagtgtagtcactgagataaaaaagaaagccatgcctgggataaacagtacactagaccc

SEQ ID NO: 121927 - DNA, 80 bp, synthetic construct; identical to SEQ ID NO: 39410
  misc_feature 1..80: note = Artificially Synthesized Probe
  source 1..80: mol_type = other DNA

SEQ ID NO: 121928 - DNA, 80 bp, synthetic construct
  misc_feature 1..80: note = Artificially Synthesized Probe
  source 1..80: mol_type = other DNA
ataagtctcagcaaggaaataaaaacaaatctgtatccacatctttcatagtaaaactgtagaatgctgtgagcaagcag

SEQ ID NO: 121929 - DNA, 80 bp, synthetic construct
  misc_feature 1..80: note = Artificially Synthesized Probe
  source 1..80: mol_type = other DNA
ctggcatggtggtgtgtgcctgtggtcccagctactcaggaggctgaggtgggaggattgcttaagcctgggacgtggag

SEQ ID NO: 121930 - DNA, 80 bp, synthetic construct
  misc_feature 1..80: note = Artificially Synthesized Probe
  source 1..80: mol_type = other DNA
atcagcagtggcagatgacagtagatgatggaagaagagcttcaaagtgtggagtcaaaattcttttccacctagaattc

SEQ ID NO: 121931 - DNA, 80 bp, synthetic construct
  misc_feature 1..80: note = Artificially Synthesized Probe
  source 1..80: mol_type = other DNA
caaactgatcaataagccagcaccagtaggcagctgggtcccaggattctcctgccagaggctgtcacatagccacagtc

SEQ ID NO: 121932 - DNA, 80 bp, synthetic construct; identical to SEQ ID NO: 39411
  misc_feature 1..80: note = Artificially Synthesized Probe
  source 1..80: mol_type = other DNA

SEQ ID NO: 121933 - DNA, 80 bp, synthetic construct
  misc_feature 1..80: note = Artificially Synthesized Probe
  source 1..80: mol_type = other DNA
cagggcaccttgccttgtgtgtgtggtgtccgtagtgccggctggggaagtgaggccttgtggggtgagtgaataaactg

SEQ ID NO: 121934 - DNA, 80 bp, synthetic construct
  misc_feature 1..80: note = Artificially Synthesized Probe
  source 1..80: mol_type = other DNA
ttctggagctcaggaagccaccctgtccccagaagacagctgtcctgggaagccagcagggcttctggaagtcccctctg

SEQ ID NO: 121935 - DNA, 80 bp, synthetic construct
  misc_feature 1..80: note = Artificially Synthesized Probe
  source 1..80: mol_type = other DNA
tattagagccctttaggatccatagtctatcgagaaggtgcctggacacctaaaaagaaaagaaagtgaggtgtcagaga

SEQ ID NO: 121936 - DNA, 80 bp, synthetic construct
  misc_feature 1..80: note = Artificially Synthesized Probe
  source 1..80: mol_type = other DNA
agcaaaggctggtgcctggaaaatggagggttgcagagctgggagtgagaggaaggggctgggtggggaccctcctgaga

SEQ ID NO: 121937 - DNA, 80 bp, synthetic construct; identical to SEQ ID NO: 39412
  misc_feature 1..80: note = Artificially Synthesized Probe
  source 1..80: mol_type = other DNA

SEQ ID NO: 121938 - DNA, 80 bp, synthetic construct
  misc_feature 1..80: note = Artificially Synthesized Probe
  source 1..80: mol_type = other DNA
tgaccaccttaattttcagcgacacctgaacttgttttctatggggttttgccttttttctgaacaaacgtttgactgag

SEQ ID NO: 121939 - DNA, 80 bp, synthetic construct
  misc_feature 1..80: note = Artificially Synthesized Probe
  source 1..80: mol_type = other DNA
tgcatgggtgagcggatacgcactgtgtgcgcctgcatgcgtgtggcacacatgtctgtgcgtgggtgagcagacgcgct

SEQ ID NO: 121940 - DNA, 80 bp, synthetic construct
  misc_feature 1..80: note = Artificially Synthesized Probe
  source 1..80: mol_type = other DNA
tatgcagtgtgcgcctgcatgcgtgtggcacacgtgtgtgcgtgggtgagcggatacgcgctgtgtgcccctgcgtgcat

SEQ ID NO: 121941 - DNA, 80 bp, synthetic construct; identical to SEQ ID NO: 39413
  misc_feature 1..80: note = Artificially Synthesized Probe
  source 1..80: mol_type = other DNA

SEQ ID NO: 121942 - DNA, 80 bp, synthetic construct
  misc_feature 1..80: note = Artificially Synthesized Probe
  source 1..80: mol_type = other DNA
ctggtgtgtgaggaggttccagcgcaagtcagggtggcctggaagcctgggctgcaccctcctgttggccttctccctgg

SEQ ID NO: 121943 - DNA, 80 bp, synthetic construct
  misc_feature 1..80: note = Artificially Synthesized Probe
  source 1..80: mol_type = other DNA
gagagccccgtggaggccactgcatgcaccatggcccggacagcaggagggaaagggctccgagggtcccagagggggag

SEQ ID NO: 121944 - DNA, 80 bp, synthetic construct
  misc_feature 1..80: note = Artificially Synthesized Probe
  source 1..80: mol_type = other DNA
gtggacctcgggctcttctaggccaggcaggtcggggcagcagggccggagagacggagccagggcagtgactgggcctg

SEQ ID NO: 121945 - DNA, 80 bp, synthetic construct
  misc_feature 1..80: note = Artificially Synthesized Probe
  source 1..80: mol_type = other DNA
ccacagcactggggaaggagcttggagctcccctggccaaagaccccaggctgttgactaccctcctgaacccccgttca

SEQ ID NO: 121946 - DNA, 80 bp, synthetic construct; identical to SEQ ID NO: 39414
  misc_feature 1..80: note = Artificially Synthesized Probe
  source 1..80: mol_type = other DNA

SEQ ID NO: 121947 - DNA, 80 bp, synthetic construct
  misc_feature 1..80: note = Artificially Synthesized Probe
  source 1..80: mol_type = other DNA
taaaaacaggtgacaaggtctcctccagtgaccttttctgcatgcctttggggcagacatacaagctatttctggaatct

SEQ ID NO: 121948 - DNA, 80 bp, synthetic construct
  misc_feature 1..80: note = Artificially Synthesized Probe
  source 1..80: mol_type = other DNA
cccagagggccctgggagtgagcgggtccacttggttcctgatgggctttgtttcccttaattatctaaaattatttatt

SEQ ID NO: 121949 - DNA, 80 bp, synthetic construct; identical to SEQ ID NO: 39415
  misc_feature 1..80: note = Artificially Synthesized Probe
  source 1..80: mol_type = other DNA

SEQ ID NO: 121950 - DNA, 80 bp, synthetic construct
  misc_feature 1..80: note = Artificially Synthesized Probe
  source 1..80: mol_type = other DNA
ttttctctccattcatatctttacttctgcagtttccggggagtatggtgcttaagtctcatctcttacttcctagtcag

SEQ ID NO: 121951 - DNA, 80 bp, synthetic construct
  misc_feature 1..80: note = Artificially Synthesized Probe
  source 1..80: mol_type = other DNA
accaagaacttaacagatggtggcaatggtgacttcaactcccaaaaagaaatcattcacttcatgacaaaagcaaatga

SEQ ID NO: 121952 - DNA, 80 bp, synthetic construct
  misc_feature 1..80: note = Artificially Synthesized Probe
  source 1..80: mol_type = other DNA
agaacagtatttgctctgttctgcagacccggaagctgtctggggagatggggcacacagacatgaattgtactgaattg

SEQ ID NO: 121953 - DNA, 80 bp, synthetic construct; identical to SEQ ID NO: 39416
  misc_feature 1..80: note = Artificially Synthesized Probe
  source 1..80: mol_type = other DNA

SEQ ID NO: 121954 - DNA, 80 bp, synthetic construct
  misc_feature 1..80: note = Artificially Synthesized Probe
  source 1..80: mol_type = other DNA
ccctctagggttggcatagccccaaagagtggagaagggcttggggttgggtgcagcctgagtgatgggtggggtgcagt

SEQ ID NO: 121955 - DNA, 80 bp, synthetic construct
  misc_feature 1..80: note = Artificially Synthesized Probe
  source 1..80: mol_type = other DNA
agatacacgtattagtttaacagtttccaagtcactttgatcttctgtggaaacctgcttgtacatcagggtctgtcctc

SEQ ID NO: 121956 - DNA, 80 bp, synthetic construct
  misc_feature 1..80: note = Artificially Synthesized Probe
  source 1..80: mol_type = other DNA
gagtgcaggaccgtggttgacaattgtgatgtcaggtgacaggtcagactggtagggatgtggcgggggttgcctgaagg

SEQ ID NO: 121957 - DNA, 80 bp, synthetic construct
  misc_feature 1..80: note = Artificially Synthesized Probe
  source 1..80: mol_type = other DNA
tccctcatggtcagagtggcctttccttaagtgaggtccacagggtcacctggagtctccttgaggctagagaggctgcc

SEQ ID NO: 121958 - DNA, 80 bp, synthetic construct
  misc_feature 1..80: note = Artificially Synthesized Probe
  source 1..80: mol_type = other DNA
gcctccttgctgtgcagagaagctggacgagatgctggcagccgccgcagagccaacgctgcggccagacatcgcagacg

SEQ ID NO: 121959 - DNA, 80 bp, synthetic construct; identical to SEQ ID NO: 39417
  misc_feature 1..80: note = Artificially Synthesized Probe
  source 1..80: mol_type = other DNA

SEQ ID NO: 121960 - DNA, 80 bp, synthetic construct
  misc_feature 1..80: note = Artificially Synthesized Probe
  source 1..80: mol_type = other DNA
ctaggctcctcccccaccctcacccagggtcggccagggtctgcacccaccctgcccaacaccgtctacactgtaccacc

SEQ ID NO: 121961 - DNA, 80 bp, synthetic construct
  misc_feature 1..80: note = Artificially Synthesized Probe
  source 1..80: mol_type = other DNA
ggcccccagtgccctggaacctccatattcccctccctgacccccacagtcattgtttgaacgccagggcctcccaggcc

SEQ ID NO: 121962 - DNA, 80 bp, synthetic construct; identical to SEQ ID NO: 39418
  misc_feature 1..80: note = Artificially Synthesized Probe
  source 1..80: mol_type = other DNA

SEQ ID NO: 121963 - DNA, 80 bp, synthetic construct
  misc_feature 1..80: note = Artificially Synthesized Probe
  source 1..80: mol_type = other DNA
tcccatgggcagcctcatccctgtccccagctgccactccctgtccactgggcacccccacctccccatcacctctcatc

SEQ ID NO: 121964 - DNA, 80 bp, synthetic construct
  misc_feature 1..80: note = Artificially Synthesized Probe
  source 1..80: mol_type = other DNA
tacttctccatgtattgctgtctccccccttcacagccagttttccccaaaaagtcacctctactgtccatcttgtctcc

SEQ ID NO: 121965 - DNA, 80 bp, synthetic construct
  misc_feature 1..80: note = Artificially Synthesized Probe
  source 1..80: mol_type = other DNA
cactcctgctgacctcagctggcatttggtttctttgctccttcttccgtgaaacgctcctccccaaagctttaggacaa

SEQ ID NO: 121966 - DNA, 80 bp, synthetic construct
  misc_feature 1..80: note = Artificially Synthesized Probe
  source 1..80: mol_type = other DNA
ccactccccagccaccatcacactccacactcaccgtctcctttcctgacccagatggggacatgtaacaagccctgccc

SEQ ID NO: 121967 - DNA, 80 bp, synthetic construct; identical to SEQ ID NO: 39379
  misc_feature 1..80: note = Artificially Synthesized Probe
  source 1..80: mol_type = other DNA

SEQ ID NO: 121968 - DNA, 80 bp, synthetic construct; identical to SEQ ID NO: 39419
  misc_feature 1..80: note = Artificially Synthesized Probe
  source 1..80: mol_type = other DNA

SEQ ID NO: 121969 - DNA, 80 bp, synthetic construct
  misc_feature 1..80: note = Artificially Synthesized Probe
  source 1..80: mol_type = other DNA
gggcttggttagggaatgtgacgtgtgcagagagctcagcgggcacattgtgggtgccagggctcacggaccaatggagc

SEQ ID NO: 121970 - DNA, 80 bp, synthetic construct
  misc_feature 1..80: note = Artificially Synthesized Probe
  source 1..80: mol_type = other DNA
gtccctcagagactgccaagagttatttctgtaggtgggattgtggggaagaaggctggtgaggctgcagctactttgga

SEQ ID NO: 121971 - DNA, 80 bp, synthetic construct; identical to SEQ ID NO: 39420
  misc_feature 1..80: note = Artificially Synthesized Probe
  source 1..80: mol_type = other DNA

SEQ ID NO: 121972 - DNA, 80 bp, synthetic construct
  misc_feature 1..80: note = Artificially Synthesized Probe
  source 1..80: mol_type = other DNA
gtccatgcacctgccctgcaggccttgagccactctcctaggactgccagttctgcactggtccctcaggcaccctcttg

SEQ ID NO: 121973 - DNA, 80 bp, synthetic construct
  misc_feature 1..80: note = Artificially Synthesized Probe
  source 1..80: mol_type = other DNA
acatcaggattttgatccataaacatggagaccacctattacccacctccaaggaccactctgagtctcccccggtagat

SEQ ID NO: 121974 - DNA, 80 bp, synthetic construct
  misc_feature 1..80: note = Artificially Synthesized Probe
  source 1..80: mol_type = other DNA
tcccacccccgccccagatggtatcagaacagattccccattccatgctgaggcaagtgacttttctttaccctaagtca

SEQ ID NO: 121975 - DNA, 80 bp, synthetic construct
  misc_feature 1..80: note = Artificially Synthesized Probe
  source 1..80: mol_type = other DNA
gtgttcactgcgtgttcatacacagtgcagggaatgcagcaggagacccaggacgaactgggcacaatttctctgtccag

SEQ ID NO: 121976 - DNA, 80 bp, synthetic construct; identical to SEQ ID NO: 39421
  misc_feature 1..80: note = Artificially Synthesized Probe
  source 1..80: mol_type = other DNA

SEQ ID NO: 121977 - DNA, 80 bp, synthetic construct
  misc_feature 1..80: note = Artificially Synthesized Probe
  source 1..80: mol_type = other DNA
gatgcgatcaggaacaggcagtctgtattttagcgagttcataaaaatgttgaccaatctcagagtgaggctgggaacag

SEQ ID NO: 121978 - DNA, 80 bp, synthetic construct
  misc_feature 1..80: note = Artificially Synthesized Probe
  source 1..80: mol_type = other DNA
actccagcccctgcacaggaccctaacaatgatgtctgagcaaggcatgcagaggggggttactgaagctcaaaggggct

SEQ ID NO: 121979 - DNA, 80 bp, synthetic construct
  misc_feature 1..80: note = Artificially Synthesized Probe
  source 1..80: mol_type = other DNA
cggaatgcggcagcactgacggtcagtgagggcggggcctggcctggaggggctcttgcctggtgatggggctgggggca

SEQ ID NO: 121980 - DNA, 80 bp, synthetic construct
  misc_feature 1..80: note = Artificially Synthesized Probe
  source 1..80: mol_type = other DNA
acctccttacctgggtgggcattaggtctttctctgctggaggcctggctccagtggccacagccctgctgcccctcacc

SEQ ID NO: 121981 - DNA, 80 bp, synthetic construct; identical to SEQ ID NO: 39422
  misc_feature 1..80: note = Artificially Synthesized Probe
  source 1..80: mol_type = other DNA

SEQ ID NO: 121982 - DNA, 80 bp, synthetic construct
  misc_feature 1..80: note = Artificially Synthesized Probe
  source 1..80: mol_type = other DNA
agggtcttgctcggagcccgggctctgggctccctgtttctcccctgccctccattccccgcccaccacgggtcccaacc

SEQ ID NO: 121983 - DNA, 80 bp, synthetic construct
  misc_feature 1..80: note = Artificially Synthesized Probe
  source 1..80: mol_type = other DNA
ccgcccagcgccctggctggtctcaccggcccttccgtccgcaggggaggacgagaagctggcgtccctgctggaagggc

SEQ ID NO: 121984 - DNA, 80 bp, synthetic construct
  misc_feature 1..80: note = Artificially Synthesized Probe
  source 1..80: mol_type = other DNA
cacggtgcgctccagcttcaagcccggcctggaggcgcgcctgggcgcgggcgctgccggcctgtacgagccgggcgcgg

SEQ ID NO: 121985 - DNA, 80 bp, synthetic construct; identical to SEQ ID NO: 39423
  misc_feature 1..80: note = Artificially Synthesized Probe
  source 1..80: mol_type = other DNA

SEQ ID NO: 121986 - DNA, 80 bp, synthetic construct
  misc_feature 1..80: note = Artificially Synthesized Probe
  source 1..80: mol_type = other DNA
cggcggcccgggcccggccaaggaccggcggctggaggagcggcgccgctccactgtgttcctgtccgtgggggccatcg

SEQ ID NO: 121987 - DNA, 80 bp, synthetic construct
  misc_feature 1..80: note = Artificially Synthesized Probe
  source 1..80: mol_type = other DNA
gggttccaccttcatccacccactcaccggcaaacccctggaccccagctcacccctggcccttgccctggctgcccgag

SEQ ID NO: 121988 - DNA, 80 bp, synthetic construct
  misc_feature 1..80: note = Artificially Synthesized Probe
  source 1..80: mol_type = other DNA
tcctgtgcctgctcgcagggaggcagagaaggtcccccgggaggagcggaagtcacccgaggacaagaagtccatgatcc

SEQ ID NO: 121989 - DNA, 80 bp, synthetic construct
  misc_feature 1..80: note = Artificially Synthesized Probe
  source 1..80: mol_type = other DNA
gcccctgcccagcccccgggcccagccccctggtggcaccccggcagacgccgggccaggccagggcagctcagaggaag

SEQ ID NO: 121990 - DNA, 80 bp, synthetic construct
  misc_feature 1..80: note = Artificially Synthesized Probe
  source 1..80: mol_type = other DNA
ctcagctggggatcaccgacgagaatggctggcaggagatccaccaggtgtgcagggagccgaggtggggtcccggcctc

SEQ ID NO: 121991 - DNA, 80 bp, synthetic construct; identical to SEQ ID NO: 39424
  misc_feature 1..80: note = Artificially Synthesized Probe
  source 1..80: mol_type = other DNA

SEQ ID NO: 121992 - DNA, 80 bp, synthetic construct
  misc_feature 1..80: note = Artificially Synthesized Probe
  source 1..80: mol_type = other DNA
gccaccagtgcctcccaagcccaagctcaagtccccgctggggaaggggccggtgaccttcagggacccgctgctgaagc

SEQ ID NO: 121993 - DNA, 80 bp, synthetic construct
  misc_feature 1..80: note = Artificially Synthesized Probe
  source 1..80: mol_type = other DNA
caaaccaactgtgatcagtgagctcagctcccgcctgcagcagctgaacaaggacacgcgttccctgggggaggaaccag

SEQ ID NO: 121994 - DNA, 80 bp, synthetic construct
  misc_feature 1..80: note = Artificially Synthesized Probe
  source 1..80: mol_type = other DNA
cgcggttcgcggaggcgcggggtcccgggcgccggcacccgagccccggactccttcggcgggggcccggggctcggcac

SEQ ID NO: 121995 - DNA, 80 bp, synthetic construct
  misc_feature 1..80: note = Artificially Synthesized Probe
  source 1..80: mol_type = other DNA
cattccttctgtggcaacccccaacccgcccccgccatccacctctgaatccggtcttgcttggcctgcccgagagagga

SEQ ID NO: 121996 - DNA, 80 bp, synthetic construct
  misc_feature 1..80: note = Artificially Synthesized Probe
  source 1..80: mol_type = other DNA
ctctccctcccgacacaggctgtctttaccattaagggttgttttgtgttttactttggaggtacgcctccctcctccca

SEQ ID NO: 121997 - DNA, 80 bp, synthetic construct; identical to SEQ ID NO: 39425
  misc_feature 1..80: note = Artificially Synthesized Probe
  source 1..80: mol_type = other DNA

SEQ ID NO: 121998 - DNA, 80 bp, synthetic construct
  misc_feature 1..80: note = Artificially Synthesized Probe
  source 1..80: mol_type = other DNA
acccgactcccaaggctccttccaaagaggagcccttcgggcccgtgggctgcatggatgctggcggcagagctggtcat

SEQ ID NO: 121999 - DNA, 80 bp, synthetic construct
  misc_feature 1..80: note = Artificially Synthesized Probe
  source 1..80: mol_type = other DNA
gtcagccttggaggacagagttcacagcgtagcaacgtgttcagaacttaaggactttgcaggtcttacaaaggcctggc

SEQ ID NO: 122000 - DNA, 80 bp, synthetic construct
  misc_feature 1..80: note = Artificially Synthesized Probe
  source 1..80: mol_type = other DNA
actggaaagccctcttcccagcagtgcagtgttgaaggtgcccgtagaatgggtgttataatcagagtgagcagcctggt

SEQ ID NO: 122001 - DNA, 80 bp, synthetic construct; identical to SEQ ID NO: 39426
  misc_feature 1..80: note = Artificially Synthesized Probe
  source 1..80: mol_type = other DNA

SEQ ID NO: 122002 - DNA, 80 bp, synthetic construct
  misc_feature 1..80: note = Artificially Synthesized Probe
  source 1..80: mol_type = other DNA
gaacgcctcggggaacacagccctgcacatctgtgccctctacaaccaggtgcgactgtgtgtcctgcacatgcctgcac

SEQ ID NO: 122003 - DNA, 80 bp, synthetic construct
  misc_feature 1..80: note = Artificially Synthesized Probe
  source 1..80: mol_type = other DNA
ggtcaggggattcctcagccggaacctctggcacttccccttctctgagttcatcctcccacggtgctctttagcattct

SEQ ID NO: 122004 - DNA, 80 bp, synthetic construct
  misc_feature 1..80: note = Artificially Synthesized Probe
  source 1..80: mol_type = other DNA
gacgtctgttcttttactcagtagttcctgcaaaattctgatctctgattgggttcatgtgggtcctctgcttttccctg

SEQ ID NO: 122005 - DNA, 80 bp, synthetic construct; identical to SEQ ID NO: 39427
  misc_feature 1..80: note = Artificially Synthesized Probe
  source 1..80: mol_type = other DNA

SEQ ID NO: 122006 - DNA, 80 bp, synthetic construct
  misc_feature 1..80: note = Artificially Synthesized Probe
  source 1..80: mol_type = other DNA
aagtgtatttacagcgagccaactgcacaggctatcgcgaggctgcacacggcatcacctgtgaagcacctggtaggccc

SEQ ID NO: 122007 - DNA, 80 bp, synthetic construct
  misc_feature 1..80: note = Artificially Synthesized Probe
  source 1..80: mol_type = other DNA
ctgttagacggacactaacagaatcctcatgttccagacaatgaaactgaggtaccagagagcttccttgcagacagaaa

SEQ ID NO: 122008 - DNA, 80 bp, synthetic construct
  misc_feature 1..80: note = Artificially Synthesized Probe
  source 1..80: mol_type = other DNA
ctggtcatgtttgtcataagtagcacctggtgccacctgagtggcctacccgggcctgcttttccttctcagtttgcctc

SEQ ID NO: 122009 - DNA, 80 bp, synthetic construct; identical to SEQ ID NO: 39428
  misc_feature 1..80: note = Artificially Synthesized Probe
  source 1..80: mol_type = other DNA

SEQ ID NO: 122010 - DNA, 80 bp, synthetic construct
  misc_feature 1..80: note = Artificially Synthesized Probe
  source 1..80: mol_type = other DNA
cctgagctgtgtctccagccccttgtgttccacagtgtttgtctcccaggcccatccttctcctccctgaccgacaccat

SEQ ID NO: 122011 - DNA, 80 bp, synthetic construct
  misc_feature 1..80: note = Artificially Synthesized Probe
  source 1..80: mol_type = other DNA
aaccaaagctcggtaacctgtggaaaaatgatgagctctggggccacctttgattttcaggggaacctggaggatgtggc

SEQ ID NO: 122012 - DNA, 80 bp, synthetic construct
  misc_feature 1..80: note = Artificially Synthesized Probe
  source 1..80: mol_type = other DNA
ctctgaggctacatttgggcatgattcagacctgactccgagccccacaactggccacaggcaccccatctgtctgaggc

SEQ ID NO: 122013 - DNA, 80 bp, synthetic construct; identical to SEQ ID NO: 39383
  misc_feature 1..80: note = Artificially Synthesized Probe
  source 1..80: mol_type = other DNA

SEQ ID NO: 122014 - DNA, 80 bp, synthetic construct; identical to SEQ ID NO: 39429
  misc_feature 1..80: note = Artificially Synthesized Probe
  source 1..80: mol_type = other DNA

SEQ ID NO: 122015 - DNA, 80 bp, synthetic construct
  misc_feature 1..80: note = Artificially Synthesized Probe
  source 1..80: mol_type = other DNA
ggacaaagcactgtgtgcttggtggatcacactggtaagcagggccaaggccagcagggcctgctcttttgaaacccaga

SEQ ID NO: 122016 - DNA, 80 bp, synthetic construct
  misc_feature 1..80: note = Artificially Synthesized Probe
  source 1..80: mol_type = other DNA
ggcggggtgccgaggagcaagacgtgttaccgcagaggatgcactggaagcttccgagcccatgtctggttttgtgctcc

SEQ ID NO: 122017 - DNA, 80 bp, synthetic construct
  misc_feature 1..80: note = Artificially Synthesized Probe
  source 1..80: mol_type = other DNA
cacgcctggcagggacatgtcatacatactatttttgcattttgttagtgcatctcgtattcctggctttgtgctaggta

SEQ ID NO: 122018 - DNA, 80 bp, synthetic construct; identical to SEQ ID NO: 39430
  misc_feature 1..80: note = Artificially Synthesized Probe
  source 1..80: mol_type = other DNA

SEQ ID NO: 122019 - DNA, 80 bp, synthetic construct
  misc_feature 1..80: note = Artificially Synthesized Probe
  source 1..80: mol_type = other DNA
ctcgaagggaaacatgaacaggtcagcagcggggtcttgctgaccgcctggccaactgtggggcagagggcggagtgggg

SEQ ID NO: 122020 - DNA, 80 bp, synthetic construct
  misc_feature 1..80: note = Artificially Synthesized Probe
  source 1..80: mol_type = other DNA
tgacggtgcctggtgaagtatcatgtgttagagggtgggtggcccagaagctctctgggaggctggcaggtgctgtgatg

SEQ ID NO: 122021 - DNA, 80 bp, synthetic construct
  misc_feature 1..80: note = Artificially Synthesized Probe
  source 1..80: mol_type = other DNA
agaggagaagcagacacctgggccatgggtgaccccaggcccctccctcctgtgccctggggcctttggcaggcacagcc

SEQ ID NO: 122022 - DNA, 80 bp, synthetic construct
  misc_feature 1..80: note = Artificially Synthesized Probe
  source 1..80: mol_type = other DNA
ctgccagtactacccagacaggcacaactctgctctgcccagctcggacctcctggagcccagaccctgctctgggctcc

SEQ ID NO: 122023 - DNA, 80 bp, synthetic construct; identical to SEQ ID NO: 39431
  misc_feature 1..80: note = Artificially Synthesized Probe
  source 1..80: mol_type = other DNA

SEQ ID NO: 122024 - DNA, 80 bp, synthetic construct
  misc_feature 1..80: note = Artificially Synthesized Probe
  source 1..80: mol_type = other DNA
gcacacagatgaccctgtacagtgattgcatgcgtgcaccagggagtgtggatatacttgcctgttctgggggtgtacac

SEQ ID NO: 122025 - DNA, 80 bp, synthetic construct
  misc_feature 1..80: note = Artificially Synthesized Probe
  source 1..80: mol_type = other DNA
atccccccaaccttggctgcctccccactttggcccactgtgcaggtggatccatggaggccaggtccaatgggagcaaa

SEQ ID NO: 122026 - DNA, 80 bp, synthetic construct
  misc_feature 1..80: note = Artificially Synthesized Probe
  source 1..80: mol_type = other DNA
gaaatgaggtcccatgggagagacagagctcagatctccacagagggctgacctctcacaggtgggagacaaaagacgaa

SEQ ID NO: 122027 - DNA, 80 bp, synthetic construct
  misc_feature 1..80: note = Artificially Synthesized Probe
  source 1..80: mol_type = other DNA
gggcaggggcagggagagggggtgggagggccactggagaggggcccggccaaagaggatgtcaggggctcagcaccccc

SEQ ID NO: 122028 - DNA, 80 bp, synthetic construct; identical to SEQ ID NO: 39432
  misc_feature 1..80: note = Artificially Synthesized Probe
  source 1..80: mol_type = other DNA

SEQ ID NO: 122029 - DNA, 80 bp, synthetic construct
  misc_feature 1..80: note = Artificially Synthesized Probe
  source 1..80: mol_type = other DNA
aggcttcccctgacacagtggggatagggatgggaatgggaggacatgggagtgggttttctctggagctatcaccccag

SEQ ID NO: 122030 - DNA, 80 bp, synthetic construct
  misc_feature 1..80: note = Artificially Synthesized Probe
  source 1..80: mol_type = other DNA
ctgtaacgcgtgtgggcaccgttgctgctgttgtgtgccgtctgtgcaggaggctgcctttgtgttgagggtgtgcacgg

SEQ ID NO: 122031 - DNA, 80 bp, synthetic construct
  misc_feature 1..80: note = Artificially Synthesized Probe
  source 1..80: mol_type = other DNA
tgagagcagagctgtgtggggggtgggcggtgaagggtactgcccaagtctcagcgtcccgggtatctgtggatcccgcc

SEQ ID NO: 122032 - DNA, 80 bp, synthetic construct; identical to SEQ ID NO: 39433
  misc_feature 1..80: note = Artificially Synthesized Probe
  source 1..80: mol_type = other DNA

SEQ ID NO: 122033 - DNA, 80 bp, synthetic construct
  misc_feature 1..80: note = Artificially Synthesized Probe
  source 1..80: mol_type = other DNA
cgggcggcggggcctcgtactcggtgaggcccagtggccgctaccccgtggcgagacgcgccccgagcccggtgaagccc

SEQ ID NO: 122034 - DNA, 80 bp, synthetic construct
  misc_feature 1..80: note = Artificially Synthesized Probe
  source 1..80: mol_type = other DNA
gctccccctcgccgtcgccgctgccctcgcccgcgtccggccccggccccggcgcccccggcccacgccgacccttccag

SEQ ID NO: 122035 - DNA, 80 bp, synthetic construct
  misc_feature 1..80: note = Artificially Synthesized Probe
  source 1..80: mol_type = other DNA
ttctgggggtgtacacgtgtgtttgcacacagatgaccctgtacagtgattgcatgcgtgcaccagggagtgtggatata

SEQ ID NO: 122036 - DNA, 80 bp, synthetic construct
  misc_feature 1..80: note = Artificially Synthesized Probe
  source 1..80: mol_type = other DNA
tgggccaccgcatgaacatcgagcgcgcgctcaggcagctggacggcagctgacgccccacccccactcccgccccggcc

SEQ ID NO: 122037 - DNA, 80 bp, synthetic construct; identical to SEQ ID NO: 39434
  misc_feature 1..80: note = Artificially Synthesized Probe
  source 1..80: mol_type = other DNA

SEQ ID NO: 122038 - DNA, 80 bp, synthetic construct
  misc_feature 1..80: note = Artificially Synthesized Probe
  source 1..80: mol_type = other DNA
ctatatttggaacgagaaaaggaacaaatatctctgtccgtaatagtttcctctcccctcccttctacttccactggtcc

SEQ ID NO: 122039 - DNA, 80 bp, synthetic construct
  misc_feature 1..80: note = Artificially Synthesized Probe
  source 1..80: mol_type = other DNA
caccgacccttcaggtgctgctcgtggtgggaggggcggcaggccgcgggtcctgctgtgcacccgcgggaccagccggc

SEQ ID NO: 122040 - DNA, 80 bp, synthetic construct; identical to SEQ ID NO: 39435
  misc_feature 1..80: note = Artificially Synthesized Probe
  source 1..80: mol_type = other DNA

SEQ ID NO: 122041 - DNA, 80 bp, synthetic construct
  misc_feature 1..80: note = Artificially Synthesized Probe
  source 1..80: mol_type = other DNA
agcctcacccagcctgagcggggttccctggtgaatccctgctgcttggggaggccccaagggccccttggaggcagcgc

SEQ ID NO: 122042 - DNA, 80 bp, synthetic construct
  misc_feature 1..80: note = Artificially Synthesized Probe
  source 1..80: mol_type = other DNA
taaacctagggtttggagtctggactaagctccatccacgtcactcacaagtttctgtttatatttctagctttttttaa

SEQ ID NO: 122043 - DNA, 80 bp, synthetic construct
  misc_feature 1..80: note = Artificially Synthesized Probe
  source 1..80: mol_type = other DNA
tcactgtaacagactgccacatacacactcggtctcacactcacctgtgggttttggttccgttcaatttgggtttttaa

SEQ ID NO: 122044 - DNA, 80 bp, synthetic construct; identical to SEQ ID NO: 39436
  misc_feature 1..80: note = Artificially Synthesized Probe
  source 1..80: mol_type = other DNA

SEQ ID NO: 122045 - DNA, 80 bp, synthetic construct; identical to SEQ ID NO: 39381
  misc_feature 1..80: note = Artificially Synthesized Probe
  source 1..80: mol_type = other DNA

SEQ ID NO: 122046 - DNA, 80 bp, synthetic construct; identical to SEQ ID NO: 39382
  misc_feature 1..80: note = Artificially Synthesized Probe
  source 1..80: mol_type = other DNA

SEQ ID NO: 122047 - DNA, 80 bp, synthetic construct
  misc_feature 1..80: note = Artificially Synthesized Probe
  source 1..80: mol_type = other DNA
gtgtgcacacagatgaccctgtacactgattgcatgcgtgcaccagggagtgtggatatacttgcctgttctgggggtgt

SEQ ID NO: 122048 - DNA, 80 bp, synthetic construct
  misc_feature 1..80: note = Artificially Synthesized Probe
  source 1..80: mol_type = other DNA
ttctggtgttgtacatgtgtgtgtgtgcacacagatgactctacagtgattgtatgcgtgcagcaggtagtgtggatata

SEQ ID NO: 122049 - DNA, 80 bp, synthetic construct
  misc_feature 1..80: note = Artificially Synthesized Probe
  source 1..80: mol_type = other DNA
tgctctgcgccctcaaccacagcctccaggacgcgctcaactatgggcttttccagccgccctcccggggccgcgccggc

SEQ ID NO: 122050 - DNA, 80 bp, synthetic construct
  misc_feature 1..80: note = Artificially Synthesized Probe
  source 1..80: mol_type = other DNA
gtagtgtggatatacttgcctgttctgggggtgtacacgtgtgtttgcacacagatgaccctgtacagtgattgcatgcg

SEQ ID NO: 122051 - DNA, 80 bp, synthetic construct; identical to SEQ ID NO: 39380
  misc_feature 1..80: note = Artificially Synthesized Probe
  source 1..80: mol_type = other DNA

SEQ ID NO: 122052 - DNA, 80 bp, synthetic construct
  misc_feature 1..80: note = Artificially Synthesized Probe
  source 1..80: mol_type = other DNA
acgtgtgtttgcacacagatgaccctgtacagtgattgtacacgtgtaccagggagtgtggatatacttgcctgttctgg

SEQ ID NO: 122053 - DNA, 80 bp, synthetic construct
  misc_feature 1..80: note = Artificially Synthesized Probe
  source 1..80: mol_type = other DNA
cttgcctgttctgggggtgtacatgtgtgtgcacacagatgaccctgtacagtgattgcatgcgtgcactagggagtgtg

SEQ ID NO: 122054 - DNA, 80 bp, synthetic construct
  misc_feature 1..80: note = Artificially Synthesized Probe
  source 1..80: mol_type = other DNA
tgtaccagggagtgtggatatacttgcctgttctgggggtgtacatgtgtgtgcacacagatgaccctgtacagtgattg

SEQ ID NO: 122055 - DNA, 80 bp, synthetic construct
  misc_feature 1..80: note = Artificially Synthesized Probe
  source 1..80: mol_type = other DNA
tcctgtacagtgattgcatgcgtgcaccagggagtgtggatatacttgcctgttctgggggtgtacacatgtgtttgcac

SEQ ID NO: 122056 - DNA, 80 bp, synthetic construct
  misc_feature 1..80: note = Artificially Synthesized Probe
  source 1..80: mol_type = other DNA
acacgtgtgtgtgcacacaggtgaccctgtacagtgattgcatgcgtgcaccagggagtgtggatatacttgcctgttct

SEQ ID NO: 122057 - DNA, 80 bp, synthetic construct
  misc_feature 1..80: note = Artificially Synthesized Probe
  source 1..80: mol_type = other DNA
atggtatatatatgtgctctgtgtcctgcagtgagttgtggctgcagcacagcctcataggcatatgtgtgcacatttgt

SEQ ID NO: 122058 - DNA, 80 bp, synthetic construct
  misc_feature 1..80: note = Artificially Synthesized Probe
  source 1..80: mol_type = other DNA
tctctgcaactcaggtgtacatggaacaaataggtgtgagtccgtgtgtgtgagcctgtgccctgcgcacgccatgtgtg

SEQ ID NO: 122059 - DNA, 80 bp, synthetic construct; identical to SEQ ID NO: 39375
  misc_feature 1..80: note = Artificially Synthesized Probe
  source 1..80: mol_type = other DNA

SEQ ID NO: 122060 - DNA, 80 bp, synthetic construct; identical to SEQ ID NO: 39384
  misc_feature 1..80: note = Artificially Synthesized Probe
  source 1..80: mol_type = other DNA

SEQ ID NO: 122061 - DNA, 80 bp, synthetic construct
  misc_feature 1..80: note = Artificially Synthesized Probe
  source 1..80: mol_type = other DNA
atggggaaaatgagaagactggggtgacaggtgtgggtctgaccccccaaccccgagagaccagcaggggtgcagaagcc

SEQ ID NO: 122062 - DNA, 80 bp, synthetic construct
  misc_feature 1..80: note = Artificially Synthesized Probe
  source 1..80: mol_type = other DNA
ttcaggggaggtttccgggccctttctctggccaggttggttggcactgatgaccaggtggacgtggtctctgacttgga

SEQ ID NO: 122063 - DNA, 80 bp, synthetic construct
  misc_feature 1..80: note = Artificially Synthesized Probe
  source 1..80: mol_type = other DNA
catagaaggtggaggcagcagtgggctgccagatgggtttgggcacactgggaagcagatacgcccgggcctgttggatg

SEQ ID NO: 122064 - DNA, 80 bp, synthetic construct
  misc_feature 1..80: note = Artificially Synthesized Probe
  source 1..80: mol_type = other DNA
cctcagtcccaggcagacagagggtgggtcactccagttatagggtgtgcctgtggcatcccagttacagacaagagtgt

SEQ ID NO: 122065 - DNA, 80 bp, synthetic construct
  misc_feature 1..80: note = Artificially Synthesized Probe
  source 1..80: mol_type = other DNA
cctgtgagtgtggcctgggagggtggggcgtgcagacagccccggtgggtggggaggtggaggagcccagcaggacagtg

SEQ ID NO: 122066 - DNA, 80 bp, synthetic construct
  misc_feature 1..80: note = Artificially Synthesized Probe
  source 1..80: mol_type = other DNA
tcttttccctgagggagttttttccaggtgtgaggaacaaattgtccctccctgaagccagctcacaatcttgttgcaga

SEQ ID NO: 122067 - DNA, 80 bp, synthetic construct; identical to SEQ ID NO: 39438
  misc_feature 1..80: note = Artificially Synthesized Probe
  source 1..80: mol_type = other DNA

SEQ ID NO: 122068 - DNA, 80 bp, synthetic construct
  misc_feature 1..80: note = Artificially Synthesized Probe
  source 1..80: mol_type = other DNA
cctgccgagcggagaacaggcttggctcccagcagcgagccctggacctctctgtgcagtgtgagtgtgcctagcagggg

SEQ ID NO: 122069 - DNA, 80 bp, synthetic construct
  misc_feature 1..80: note = Artificially Synthesized Probe
  source 1..80: mol_type = other DNA
tctatcccacccacttcccccacctcagtctccaggacgcttccctttgcccagagggaagtccctggtccgtctagagc

SEQ ID NO: 122070 - DNA, 80 bp, synthetic construct
  misc_feature 1..80: note = Artificially Synthesized Probe
  source 1..80: mol_type = other DNA
ccctgagctgcacgtcgattctgcctcttccttccctagtcctggaaaacctgaggaacggcacatccctccgggtcctg

SEQ ID NO: 122071 - DNA, 80 bp, synthetic construct; identical to SEQ ID NO: 39439
  misc_feature 1..80: note = Artificially Synthesized Probe
  source 1..80: mol_type = other DNA

SEQ ID NO: 122072 - DNA, 80 bp, synthetic construct
  misc_feature 1..80: note = Artificially Synthesized Probe
  source 1..80: mol_type = other DNA
ctgcggagggaaacagcagccaggactacttcaaggtcacccccagctcagccgggccctgggccaacagctccctgatc

SEQ ID NO: 122073 - DNA, 80 bp, synthetic construct
  misc_feature 1..80: note = Artificially Synthesized Probe
  source 1..80: mol_type = other DNA
catcgtgtcttgcaacctctcctacccccgggatggctgggacgagtctactgctgcttatggctactggttcaaaggat

SEQ ID NO: 122074 - DNA, 80 bp, synthetic construct
  misc_feature 1..80: note = Artificially Synthesized Probe
  source 1..80: mol_type = other DNA
aaccaagttgcaataagagaggaaggattcggaagtgtggtttagaaggtgaatgggccttatcccacttttccaggcaa

SEQ ID NO: 122075 - DNA, 80 bp, synthetic construct; identical to SEQ ID NO: 39440
  misc_feature 1..80: note = Artificially Synthesized Probe
  source 1..80: mol_type = other DNA

SEQ ID NO: 122076 - DNA, 80 bp, synthetic construct
  misc_feature 1..80: note = Artificially Synthesized Probe
  source 1..80: mol_type = other DNA
ctgctgccctcttcacccccatccagccacactcacaggccctggtctcttcacccagagtgaggtcttgcaggaggaag

SEQ ID NO: 122077 - DNA, 80 bp, synthetic construct
  misc_feature 1..80: note = Artificially Synthesized Probe
  source 1..80: mol_type = other DNA
tgactcatcacctccctttccaagcccacttctcttgttgagagccccatccctctgatgacatggtagccccatctcta

SEQ ID NO: 122078 - DNA, 80 bp, synthetic construct
  misc_feature 1..80: note = Artificially Synthesized Probe
  source 1..80: mol_type = other DNA
tccctggtcgctgaacccacctcacctcttgcctccatctctcccaacagactccagactgcttccagatgcctcctcat

SEQ ID NO: 122079 - DNA, 80 bp, synthetic construct; identical to SEQ ID NO: 39437
  misc_feature 1..80: note = Artificially Synthesized Probe
  source 1..80: mol_type = other DNA

SEQ ID NO: 122080 - DNA, 80 bp, synthetic construct; identical to SEQ ID NO: 39441
  misc_feature 1..80: note = Artificially Synthesized Probe
  source 1..80: mol_type = other DNA

SEQ ID NO: 122081 - DNA, 80 bp, synthetic construct
  misc_feature 1..80: note = Artificially Synthesized Probe
  source 1..80: mol_type = other DNA
tttgtatttttggtagagacagggtttcaccatgtcggccaggctggtcttgaactcccgacttcaggtgatccgccagc

SEQ ID NO: 122082 - DNA, 80 bp, synthetic construct
  misc_feature 1..80: note = Artificially Synthesized Probe
  source 1..80: mol_type = other DNA
cagctgtgtcttctttttgcaggatttacttacaaaattccttgcagctgcagtctgcgttccacccacatcctaatatg

SEQ ID NO: 122083 - DNA, 80 bp, synthetic construct
  misc_feature 1..80: note = Artificially Synthesized Probe
  source 1..80: mol_type = other DNA
gcgcattactgcatctttcatgcagaacttgctttccatgcctcacatctccacatgtgtggggatatgtcctgagaaat

SEQ ID NO: 122084 - DNA, 80 bp, synthetic construct; identical to SEQ ID NO: 39442
  misc_feature 1..80: note = Artificially Synthesized Probe
  source 1..80: mol_type = other DNA

SEQ ID NO: 122085 - DNA, 80 bp, synthetic construct
  misc_feature 1..80: note = Artificially Synthesized Probe
  source 1..80: mol_type = other DNA
actcgggaggctgaggcagaagaatcatttgaaccaggaggtggaggttgcagtgagccgagatcgcatcactgcactcc

SEQ ID NO: 122086 - DNA, 80 bp, synthetic construct
  misc_feature 1..80: note = Artificially Synthesized Probe
  source 1..80: mol_type = other DNA
ctttcgggtggagagaggaagccgtgtgagacatagtttcgtgaacaatttgttctaaaagtaacaggtatggaatgggg

SEQ ID NO: 122087 - DNA, 80 bp, synthetic construct
  misc_feature 1..80: note = Artificially Synthesized Probe
  source 1..80: mol_type = other DNA
acgtcctggtagcacctgagccattcccagtctcctgtgctgggagatcatcatctaatcctgatgatgacgccctcctc

SEQ ID NO: 122088 - DNA, 80 bp, synthetic construct
  misc_feature 1..80: note = Artificially Synthesized Probe
  source 1..80: mol_type = other DNA
gctgtgctggttcaagagatgagggaggaggacacagcggttgccaggaccctgaggcactggactgggcactgccccaa

SEQ ID NO: 122089 - DNA, 80 bp, synthetic construct
  misc_feature 1..80: note = Artificially Synthesized Probe
  source 1..80: mol_type = other DNA
ccattctattcaaagccacccctctgctcactgagatagatgcatgtctgatcacctcagttgggaaaggctaatcagaa

SEQ ID NO: 122090 - DNA, 80 bp, synthetic construct; identical to SEQ ID NO: 39443
  misc_feature 1..80: note = Artificially Synthesized Probe
  source 1..80: mol_type = other DNA

SEQ ID NO: 122091 - DNA, 80 bp, synthetic construct
  misc_feature 1..80: note = Artificially Synthesized Probe
  source 1..80: mol_type = other DNA
agcccgggcagccggtgacggtcatctgtgtgtttaactgggctttcaagaaatgtccagccccttctttctcctggacg

SEQ ID NO: 122092 - DNA, 80 bp, synthetic construct
  misc_feature 1..80: note = Artificially Synthesized Probe
  source 1..80: mol_type = other DNA
atagattgagatttataccacataccacacatagccacagaaacatcatcttgaaataaagaagagttttggacaaaaat

SEQ ID NO: 122093 - DNA, 80 bp, synthetic construct
  misc_feature 1..80: note = Artificially Synthesized Probe
  source 1..80: mol_type = other DNA
aacatggtgaaaccctgtctctactaaaacacaaaaaattagccaggcgtggtgatgcgtgcctgtaatcccagctactt

SEQ ID NO: 122094 - DNA, 80 bp, synthetic construct
  misc_feature 1..80: note = Artificially Synthesized Probe
  source 1..80: mol_type = other DNA
aagatataaaattattaaaaaattatgtaataatgtagcagacttgaaaaataaccaaatagaacttctagaaataaaaa

SEQ ID NO: 122095 - DNA, 80 bp, synthetic construct
  misc_feature 1..80: note = Artificially Synthesized Probe
  source 1..80: mol_type = other DNA
acaagaagcagcaattacaggacagaagagtgatcaggaacagcaggagagagaaggtctaatgtatgttcaatcagagg

SEQ ID NO: 122096 - DNA, 80 bp, synthetic construct; identical to SEQ ID NO: 39455
  misc_feature 1..80: note = Artificially Synthesized Probe
  source 1..80: mol_type = other DNA

SEQ ID NO: 122097 - DNA, 80 bp, synthetic construct
  misc_feature 1..80: note = Artificially Synthesized Probe
  source 1..80: mol_type = other DNA
tcttgtctttaatctgtatctgggaagataaaccagtaatccacattagcagtgtagagtctttgaaaagggctggtttc

SEQ ID NO: 122098 - DNA, 80 bp, synthetic construct
  misc_feature 1..80: note = Artificially Synthesized Probe
  source 1..80: mol_type = other DNA
aatgtatttcatgctggaaagaacagattttctctcattaaaaatagccccactaaaggagaccaacatgctagaagtgc

SEQ ID NO: 122099 - DNA, 80 bp, synthetic construct
  misc_feature 1..80: note = Artificially Synthesized Probe
  source 1..80: mol_type = other DNA
tggttgcagggcttagaattttattttatattttatttttttgagatggcatctcgctctgtcacccaggctggagtgca

SEQ ID NO: 122100 - DNA, 80 bp, synthetic construct
  misc_feature 1..80: note = Artificially Synthesized Probe
  source 1..80: mol_type = other DNA
tctcaaactcctaactcaggtgatccacccgcctcagcttcccaaagtactgggattacaggcaggagccaccgcgccca

SEQ ID NO: 122101 - DNA, 80 bp, synthetic construct; identical to SEQ ID NO: 39456
  misc_feature 1..80: note = Artificially Synthesized Probe
  source 1..80: mol_type = other DNA

SEQ ID NO: 122102 - DNA, 80 bp, synthetic construct
  misc_feature 1..80: note = Artificially Synthesized Probe
  source 1..80: mol_type = other DNA
aaattcatatggaaaaccacagtggagaaaccgcaaaactccaaagacaaaagtcttaaaaaacaggcagagaggccaga

SEQ ID NO: 122103 - DNA, 80 bp, synthetic construct
  misc_feature 1..80: note = Artificially Synthesized Probe
  source 1..80: mol_type = other DNA
gcaatcccagctactcaggaggatgaggcaagagaatcgcttgaacctgagagggggaggttgcaatgagctgagatcat

SEQ ID NO: 122104 - DNA, 80 bp, synthetic construct; identical to SEQ ID NO: 39457
  misc_feature 1..80: note = Artificially Synthesized Probe
  source 1..80: mol_type = other DNA

SEQ ID NO: 122105 - DNA, 80 bp, synthetic construct
  misc_feature 1..80: note = Artificially Synthesized Probe
  source 1..80: mol_type = other DNA
accacacctggctaatttttgtatttttagtagagatgggatttcaccattttggcaggctgctctcaagcttcccacct

SEQ ID NO: 122106 - DNA, 80 bp, synthetic construct
  misc_feature 1..80: note = Artificially Synthesized Probe
  source 1..80: mol_type = other DNA
tacagttcaaaccctaacagagcaagcaggcctcccacactccaggtctctgctgccagaaacagactcttacatccaga

SEQ ID NO: 122107 - DNA, 80 bp, synthetic construct
  misc_feature 1..80: note = Artificially Synthesized Probe
  source 1..80: mol_type = other DNA
agaacccagcaaagggcctggcactgaggagactaaactatttgttgaataaattggtcattcaatgaatgagttgacca

SEQ ID NO: 122108 - DNA, 80 bp, synthetic construct; identical to SEQ ID NO: 39458
  misc_feature 1..80: note = Artificially Synthesized Probe
  source 1..80: mol_type = other DNA

SEQ ID NO: 122109 - DNA, 80 bp, synthetic construct; identical to SEQ ID NO: 39445
  misc_feature 1..80: note = Artificially Synthesized Probe
  source 1..80: mol_type = other DNA

SEQ ID NO: 122110 - DNA, 80 bp, synthetic construct
  misc_feature 1..80: note = Artificially Synthesized Probe
  source 1..80: mol_type = other DNA
gtgagaaaataaatagacaaactagatttcatcaaaatcaaaacttctatgcatcaaaagacatcaacaaagtaaaaaag

SEQ ID NO: 122111 - DNA, 80 bp, synthetic construct
  misc_feature 1..80: note = Artificially Synthesized Probe
  source 1..80: mol_type = other DNA
acatggaaagatgtttgatatcatgaatcattaggaaaatgccaatcagtgctacagtgggttaccacctcccacccact

SEQ ID NO: 122112 - DNA, 80 bp, synthetic construct
  misc_feature 1..80: note = Artificially Synthesized Probe
  source 1..80: mol_type = other DNA
tgtaatcccacactttgggagaaagaggcaggcggatcacgaggtcaagagatcgagacatcctggccaacatggtgaaa

SEQ ID NO: 122113 - DNA, 80 bp, synthetic construct; identical to SEQ ID NO: 39459
  misc_feature 1..80: note = Artificially Synthesized Probe
  source 1..80: mol_type = other DNA

SEQ ID NO: 122114 - DNA, 80 bp, synthetic construct
  misc_feature 1..80: note = Artificially Synthesized Probe
  source 1..80: mol_type = other DNA
cttgaacccgggaggcagaggttgtattgagccgaaatcgcgccattgcactccagcctgggtgacagtgtaagactgtg

SEQ ID NO: 122115 - DNA, 80 bp, synthetic construct
  misc_feature 1..80: note = Artificially Synthesized Probe
  source 1..80: mol_type = other DNA
aacacccatccatgtacaaacaaaccaactgtggtgcatacatcagtggaacatttagccatgaaacaggatgaaatact

SEQ ID NO: 122116 - DNA, 80 bp, synthetic construct
  misc_feature 1..80: note = Artificially Synthesized Probe
  source 1..80: mol_type = other DNA
ggaggttgcagtgagccgagatcgcccactgcactccagcctgggcgacagagtgagactcaatctcaaaaaaaaaaaaa

SEQ ID NO: 122117 - DNA, 80 bp, synthetic construct; identical to SEQ ID NO: 39460
  misc_feature 1..80: note = Artificially Synthesized Probe
  source 1..80: mol_type = other DNA

SEQ ID NO: 122118 - DNA, 80 bp, synthetic construct
  misc_feature 1..80: note = Artificially Synthesized Probe
  source 1..80: mol_type = other DNA
gcacaacttctgggcttggcaggactcctggaaggaggcacagccccttggggttgtgatgtcctcaagcctggttttca

SEQ ID NO: 122119 - DNA, 80 bp, synthetic construct
  misc_feature 1..80: note = Artificially Synthesized Probe
  source 1..80: mol_type = other DNA
cgggcacagtggcccacacctgtaatcccagcactttgggaggccgaggtgggcagatcatttgaggctaggagttcaag

SEQ ID NO: 122120 - DNA, 80 bp, synthetic construct
  misc_feature 1..80: note = Artificially Synthesized Probe
  source 1..80: mol_type = other DNA
catgaggtcttgtcagaattgggatgtggatgtctcctatgttaccatttattgtgtgggggcagccatcatcctatttg

SEQ ID NO: 122121 - DNA, 80 bp, synthetic construct
  misc_feature 1..80: note = Artificially Synthesized Probe
  source 1..80: mol_type = other DNA
aggtcgtgccaccgcactccagtttgggtaagagagcgagattctgtctcaaaaaaaaaaaaaaaaattacacctaatac

SEQ ID NO: 122122 - DNA, 80 bp, synthetic construct
  misc_feature 1..80: note = Artificially Synthesized Probe
  source 1..80: mol_type = other DNA
gcatgcccgtagtcccagctattccagaggctgaggcaaaaggatcacttcggcccaagagttcaggctatagtgagcta

SEQ ID NO: 122123 - DNA, 80 bp, synthetic construct; identical to SEQ ID NO: 39461
  misc_feature 1..80: note = Artificially Synthesized Probe
  source 1..80: mol_type = other DNA

SEQ ID NO: 122124 - DNA, 80 bp, synthetic construct
  misc_feature 1..80: note = Artificially Synthesized Probe
  source 1..80: mol_type = other DNA
tccaagtcaggggatccttctggcaaggaaacacattcctggagccaaggtgccacctctttttaactgacaacacatca

SEQ ID NO: 122125 - DNA, 80 bp, synthetic construct
  misc_feature 1..80: note = Artificially Synthesized Probe
  source 1..80: mol_type = other DNA
tatggatacggtcaagaaatcaccacagactaagtgtgaccatattaaggaattactagtgattcttcagtgtgaatcac

SEQ ID NO: 122126 - DNA, 80 bp, synthetic construct
  misc_feature 1..80: note = Artificially Synthesized Probe
  source 1..80: mol_type = other DNA
gtacctgggattacaggcacacaccaccacgcctggctaattttttgtatttttagtagagacggggttttgccacgttg

SEQ ID NO: 122127 - DNA, 80 bp, synthetic construct; identical to SEQ ID NO: 39462
  misc_feature 1..80: note = Artificially Synthesized Probe
  source 1..80: mol_type = other DNA

SEQ ID NO: 122128 - DNA, 80 bp, synthetic construct
  misc_feature 1..80: note = Artificially Synthesized Probe
  source 1..80: mol_type = other DNA
gcccaaaatacacagctctgcaggtatgcaggagaacaagcagtggcctttaaacacccagaggacattttccttgggaa

SEQ ID NO: 122129 - DNA, 80 bp, synthetic construct
  misc_feature 1..80: note = Artificially Synthesized Probe
  source 1..80: mol_type = other DNA
gggagaaaaagaatgtgtgcgactcacagagggctcacctctctcaagcccatcgatgttctgcgtgtagagccgcagaa

SEQ ID NO: 122130 - DNA, 80 bp, synthetic construct
  misc_feature 1..80: note = Artificially Synthesized Probe
  source 1..80: mol_type = other DNA
cgtactgctggaggttgctgtacaggccactccccggcgatctgcagggagagaagaaaggctctgaggcctttggaaga

SEQ ID NO: 122131 - DNA, 80 bp, synthetic construct
  misc_feature 1..80: note = Artificially Synthesized Probe
  source 1..80: mol_type = other DNA
ctgctgtgctgggctaagaggatcccagcaggcctgggcagaacagggtggctaaatggagagcctcattctatgggtct

SEQ ID NO: 122132 - DNA, 80 bp, synthetic construct; identical to SEQ ID NO: 39463
  misc_feature 1..80: note = Artificially Synthesized Probe
  source 1..80: mol_type = other DNA

SEQ ID NO: 122133 - DNA, 80 bp, synthetic construct
  misc_feature 1..80: note = Artificially Synthesized Probe
  source 1..80: mol_type = other DNA
tgtgtgtctccccaggcctctcaaaataatcacctttcttagacgactattggggtacaacaaaaagcagtcataaatca

SEQ ID NO: 122134 - DNA, 80 bp, synthetic construct
  misc_feature 1..80: note = Artificially Synthesized Probe
  source 1..80: mol_type = other DNA
caaagagggaaaaccctggttctaaaaccatctcaccacctattaagcgccccacttcacacagcatttcagacatctat

SEQ ID NO: 122135 - DNA, 80 bp, synthetic construct; identical to SEQ ID NO: 39464
  misc_feature 1..80: note = Artificially Synthesized Probe
  source 1..80: mol_type = other DNA

SEQ ID NO: 122136 - DNA, 80 bp, synthetic construct
  misc_feature 1..80: note = Artificially Synthesized Probe
  source 1..80: mol_type = other DNA
cccatgcaatggactactcctcacacgcagccctatgcctcctgctttagggccagtggtagcaaggatttttgttttgt

SEQ ID NO: 122137 - DNA, 80 bp, synthetic construct
  misc_feature 1..80: note = Artificially Synthesized Probe
  source 1..80: mol_type = other DNA
ccaccacgcctggctaatttccttgtatttttagtaaagacggggtttcactgtgttagccaggatggtctcgatctcct

SEQ ID NO: 122138 - DNA, 80 bp, synthetic construct
  misc_feature 1..80: note = Artificially Synthesized Probe
  source 1..80: mol_type = other DNA
ctccatccatagcacctagaacagagtctggcacagaataagagctcagtcagggcttcttggatgaacgactgactctt

SEQ ID NO: 122139 - DNA, 80 bp, synthetic construct; identical to SEQ ID NO: 39465
  misc_feature 1..80: note = Artificially Synthesized Probe
  source 1..80: mol_type = other DNA

SEQ ID NO: 122140 - DNA, 80 bp, synthetic construct
  misc_feature 1..80: note = Artificially Synthesized Probe
  source 1..80: mol_type = other DNA
gagtgcagtggctcaatcatagctcactgcagccttgaactcctggactcaagggatcctcttgccttagtctcaggagt

SEQ ID NO: 122141 - DNA, 80 bp, synthetic construct
  misc_feature 1..80: note = Artificially Synthesized Probe
  source 1..80: mol_type = other DNA
gtgagctaccacttcgagactcacttttcaccaacattttcagcagttgtgtcagacagcaagtcaatgtgccattattt

SEQ ID NO: 122142 - DNA, 80 bp, synthetic construct
  misc_feature 1..80: note = Artificially Synthesized Probe
  source 1..80: mol_type = other DNA
gttcaaatcctattaagccacttccaaaactccacaggagctaccagagttacaatctgcttttctatgaaaacaggaag

SEQ ID NO: 122143 - DNA, 80 bp, synthetic construct
  misc_feature 1..80: note = Artificially Synthesized Probe
  source 1..80: mol_type = other DNA
gagggatcattaaagcgttaaatgcatatacttttggacctagcaatcccagtactaggaatttatgcaaacagtgaggt

SEQ ID NO: 122144 - DNA, 80 bp, synthetic construct; identical to SEQ ID NO: 39466
  misc_feature 1..80: note = Artificially Synthesized Probe
  source 1..80: mol_type = other DNA

SEQ ID NO: 122145 - DNA, 80 bp, synthetic construct
  misc_feature 1..80: note = Artificially Synthesized Probe
  source 1..80: mol_type = other DNA
ctctcagccccgcactcacatcgtccctgccgccaagcaccagccgacagccgcaggcctgaaacggccccacgcctccc

SEQ ID NO: 122146 - DNA, 80 bp, synthetic construct
  misc_feature 1..80: note = Artificially Synthesized Probe
  source 1..80: mol_type = other DNA
cgcctccgcctcccacccccgcccccggcgccccagccccgcctccgcctaccgcccccgcccccggcgccccggtcccg

SEQ ID NO: 122147 - DNA, 80 bp, synthetic construct
  misc_feature 1..80: note = Artificially Synthesized Probe
  source 1..80: mol_type = other DNA
cctttttcaacccggatggcggtgatagttaatactttctgagcgcttttactatggtcaggcattatatttacacctaa

SEQ ID NO: 122148 - DNA, 80 bp, synthetic construct; identical to SEQ ID NO: 39467
  misc_feature 1..80: note = Artificially Synthesized Probe
  source 1..80: mol_type = other DNA

SEQ ID NO: 122149 - DNA, 80 bp, synthetic construct
  misc_feature 1..80: note = Artificially Synthesized Probe
  source 1..80: mol_type = other DNA
ctattacaaatatgcccatgtgctaggtgtggtgggacacacctgtaatcccagctacccaggagaatcgcttaaacccg

SEQ ID NO: 122150 - DNA, 80 bp, synthetic construct
  misc_feature 1..80: note = Artificially Synthesized Probe
  source 1..80: mol_type = other DNA
ctgtaatcccagctgctcaggaggctgaggcaggagaatcacttgaacccaggaggcagggctgcagtgagccaaaatcg

SEQ ID NO: 122151 - DNA, 80 bp, synthetic construct; identical to SEQ ID NO: 39446
  misc_feature 1..80: note = Artificially Synthesized Probe
  source 1..80: mol_type = other DNA

SEQ ID NO: 122152 - DNA, 80 bp, synthetic construct
  misc_feature 1..80: note = Artificially Synthesized Probe
  source 1..80: mol_type = other DNA
attgtagttgatatggtttggctgtgtccccacccaaatctcaccttgaattgtaatcatccccatgtgtcaagggtggg

SEQ ID NO: 122153 - DNA, 80 bp, synthetic construct
  misc_feature 1..80: note = Artificially Synthesized Probe
  source 1..80: mol_type = other DNA
tcctgctttgccttccactatgattgtgaggcccccacagccatatggaactgtgagtccattaaacctctttcctttat

SEQ ID NO: 122154 - DNA, 80 bp, synthetic construct
  misc_feature 1..80: note = Artificially Synthesized Probe
  source 1..80: mol_type = other DNA
aatatcaaggctacacatgctacatgattcttatgggaaactgcattttctgtaacttcacttgtttataggcggtttga

SEQ ID NO: 122155 - DNA, 80 bp, synthetic construct; identical to SEQ ID NO: 39447
  misc_feature 1..80: note = Artificially Synthesized Probe
  source 1..80: mol_type = other DNA

SEQ ID NO: 122156 - DNA, 80 bp, synthetic construct
  misc_feature 1..80: note = Artificially Synthesized Probe
  source 1..80: mol_type = other DNA
agcatcatcagctattactgttactgtgttaaccaacggggctccatatcaggtggaccataccctagagcagtgagaag

SEQ ID NO: 122157 - DNA, 80 bp, synthetic construct
  misc_feature 1..80: note = Artificially Synthesized Probe
  source 1..80: mol_type = other DNA
gaggatgccaagccaagggccccaccaagtcccggttgatgagcagtcggggaactgagctccgcacggcctcggtcaag

SEQ ID NO: 122158 - DNA, 80 bp, synthetic construct; identical to SEQ ID NO: 39448
  misc_feature 1..80: note = Artificially Synthesized Probe
  source 1..80: mol_type = other DNA

SEQ ID NO: 122159 - DNA, 80 bp, synthetic construct
  misc_feature 1..80: note = Artificially Synthesized Probe
  source 1..80: mol_type = other DNA
gacaacagcacagactcgtccatctcctctggctagccctgcttgctctgacagccaccaccagcatcgggcacccagac

SEQ ID NO: 122160 - DNA, 80 bp, synthetic construct
  misc_feature 1..80: note = Artificially Synthesized Probe
  source 1..80: mol_type = other DNA
ttccaccttttgttcttattaaggcgcaaagtcacaggacccccttcctgggagtcactgtcattaaatctattgccgtc

SEQ ID NO: 122161 - DNA, 80 bp, synthetic construct
  misc_feature 1..80: note = Artificially Synthesized Probe
  source 1..80: mol_type = other DNA
gcattaaaactggctcattatctgggaggaaaatactccattcctacctcccactgaaaaaaattcaaatggattaaagg

SEQ ID NO: 122162 - DNA, 80 bp, synthetic construct; identical to SEQ ID NO: 39449
  misc_feature 1..80: note = Artificially Synthesized Probe
  source 1..80: mol_type = other DNA

SEQ ID NO: 122163 - DNA, 80 bp, synthetic construct
  misc_feature 1..80: note = Artificially Synthesized Probe
  source 1..80: mol_type = other DNA
aggtcaggagttcaagaccagcctggccaacatagtgaaaccacgtctctactaaaaatacaaaacttagctgggcgtgg

SEQ ID NO: 122164 - DNA, 80 bp, synthetic construct
  misc_feature 1..80: note = Artificially Synthesized Probe
  source 1..80: mol_type = other DNA
gaagtttatattaacattaaaatgtaattatattatttaatttatactaaaattaaaactaatttatattgctaatttat

SEQ ID NO: 122165 - DNA, 80 bp, synthetic construct
  misc_feature 1..80: note = Artificially Synthesized Probe
  source 1..80: mol_type = other DNA
aaccaatttgatttgtgtgattttggttttggtgaggatgtgataaaatggctacataaaaacacagtttgtggcagtgt

SEQ ID NO: 122166 - DNA, 80 bp, synthetic construct
  misc_feature 1..80: note = Artificially Synthesized Probe
  source 1..80: mol_type = other DNA
tattcaccggaaggcaagttctcagtatttatcagcatttacccttccagagtacttgcatgggtagataaggatgatac

SEQ ID NO: 122167 - DNA, 80 bp, synthetic construct
  misc_feature 1..80: note = Artificially Synthesized Probe
  source 1..80: mol_type = other DNA
cacagggatattcactacagcatttacccttcaggagtacttgcatgagtagataaggatgatacacagggatattcact

SEQ ID NO: 122168 - DNA, 80 bp, synthetic construct; identical to SEQ ID NO: 39450
  misc_feature 1..80: note = Artificially Synthesized Probe
  source 1..80: mol_type = other DNA

SEQ ID NO: 122169 - DNA, 80 bp, synthetic construct
  misc_feature 1..80: note = Artificially Synthesized Probe
  source 1..80: mol_type = other DNA
gtttcagaatttttgagattttagaaaagatcatatggtttacatcccacgttatgtcacacctaaaggggatctggagt

SEQ ID NO: 122170 - DNA, 80 bp, synthetic construct
  misc_feature 1..80: note = Artificially Synthesized Probe
  source 1..80: mol_type = other DNA
gttggcattaacaacgcagcacatctccatggactcacattgttacgtgaaaacagcaggctgcagaatagaatgtacag

SEQ ID NO: 122171 - DNA, 80 bp, synthetic construct
  misc_feature 1..80: note = Artificially Synthesized Probe
  source 1..80: mol_type = other DNA
tgggcctgggtacagccccaggagaaggagcctgtgcagaagtagcagttcagtggattccacctcctatgtcacaatcc

SEQ ID NO: 122172 - DNA, 80 bp, synthetic construct; identical to SEQ ID NO: 39451
  misc_feature 1..80: note = Artificially Synthesized Probe
  source 1..80: mol_type = other DNA

SEQ ID NO: 122173 - DNA, 80 bp, synthetic construct
  misc_feature 1..80: note = Artificially Synthesized Probe
  source 1..80: mol_type = other DNA
gctcactccagcaccccagctcctgcctctgggccttcctggactccagactcatgtccacctgctcaacacctccagtc

SEQ ID NO: 122174 - DNA, 80 bp, synthetic construct
  misc_feature 1..80: note = Artificially Synthesized Probe
  source 1..80: mol_type = other DNA
ccatgcactgtgccagcgtacccactctgcgttcacacacacccagactccagcacccctcagcctctgctggctttacc

SEQ ID NO: 122175 - DNA, 80 bp, synthetic construct
  misc_feature 1..80: note = Artificially Synthesized Probe
  source 1..80: mol_type = other DNA
ttcaccttctgaggtggcgccagcctcccatgagatgacacttgtgccccaccttcttctctgctccagccccgtggcca

SEQ ID NO: 122176 - DNA, 80 bp, synthetic construct
  misc_feature 1..80: note = Artificially Synthesized Probe
  source 1..80: mol_type = other DNA
cctacttgttatctttctcataacatcaatcatctcctaacaaactatataacttcttacactgacatctgaccgtgtat

SEQ ID NO: 122177 - DNA, 80 bp, synthetic construct; identical to SEQ ID NO: 39452
  misc_feature 1..80: note = Artificially Synthesized Probe
  source 1..80: mol_type = other DNA

SEQ ID NO: 122178 - DNA, 80 bp, synthetic construct
  misc_feature 1..80: note = Artificially Synthesized Probe
  source 1..80: mol_type = other DNA
tgcgagtccagtccccctcctcgccatccctcaggcgaccacagctccaccttctccaggaccagcctcctggcactgct

SEQ ID NO: 122179 - DNA, 80 bp, synthetic construct
  misc_feature 1..80: note = Artificially Synthesized Probe
  source 1..80: mol_type = other DNA
cacccccatccttctcccttctcctcacacgtggtgccccacccacacctataccacctccaaagcccagcagcttccca

SEQ ID NO: 122180 - DNA, 80 bp, synthetic construct
  misc_feature 1..80: note = Artificially Synthesized Probe
  source 1..80: mol_type = other DNA
caggcctgccgacagcccatgagatgactcctgtacccctcccttcccctgccctccagcctcctccctgcacaggcctg

SEQ ID NO: 122181 - DNA, 80 bp, synthetic construct; identical to SEQ ID NO: 39444
  misc_feature 1..80: note = Artificially Synthesized Probe
  source 1..80: mol_type = other DNA

SEQ ID NO: 122182 - DNA, 80 bp, synthetic construct; identical to SEQ ID NO: 39453
  misc_feature 1..80: note = Artificially Synthesized Probe
  source 1..80: mol_type = other DNA

SEQ ID NO: 122183 - DNA, 80 bp, synthetic construct
  misc_feature 1..80: note = Artificially Synthesized Probe
  source 1..80: mol_type = other DNA
aagttcttattaaagtctcaaacattctcccccaaaaaaggtgagagagggatcatgaacccccatgtacccagcttcag

SEQ ID NO: 122184 - DNA, 80 bp, synthetic construct
  misc_feature 1..80: note = Artificially Synthesized Probe
  source 1..80: mol_type = other DNA
ctgggatggcagccagagacatccaggcgctaaggaaacacctggtagaccacaccagtcctcaaacagtagtctgcagg

SEQ ID NO: 122185 - DNA, 80 bp, synthetic construct; identical to SEQ ID NO: 39454
  misc_feature 1..80: note = Artificially Synthesized Probe
  source 1..80: mol_type = other DNA

SEQ ID NO: 122186 - DNA, 80 bp, synthetic construct
  misc_feature 1..80: note = Artificially Synthesized Probe
  source 1..80: mol_type = other DNA
gatattcttggatacacagtaaaactgtattatatttaaattaaaaagaaaaaactgttatcttggaggcatggggtata

SEQ ID NO: 122187 - DNA, 80 bp, synthetic construct
  misc_feature 1..80: note = Artificially Synthesized Probe
  source 1..80: mol_type = other DNA
tcacaaaggtttattttgatgatttataaaagaaacattgccatagcaatttaaagctatttacaaatttaaaaataaat

SEQ ID NO: 122188 - DNA, 80 bp, synthetic construct
  misc_feature 1..80: note = Artificially Synthesized Probe
  source 1..80: mol_type = other DNA
agactggagtgcaatggtgtgatcttggctcattacaacttccacctccccagttcaagtgattctccttcctcagcctc

SEQ ID NO: 122189 - DNA, 80 bp, synthetic construct
  misc_feature 1..80: note = Artificially Synthesized Probe
  source 1..80: mol_type = other DNA
gccactgcgcctggcctaaaattgctgtccctttactaggatgtttgtcctgtatatattcatgaattctggactttgaa

SEQ ID NO: 122190 - DNA, 80 bp, synthetic construct
  misc_feature 1..80: note = Artificially Synthesized Probe
  source 1..80: mol_type = other DNA
tcctgtatttcctgtacactgatagtttctagactctagatcctagggggttcattagatttaggtttaatgtttttggt

SEQ ID NO: 122191 - DNA, 80 bp, synthetic construct
  misc_feature 1..80: note = Artificially Synthesized Probe
  source 1..80: mol_type = other DNA
gaagtacagatctttttggctcatcccctttaggggtgtatctaaattaaccaagcttggcagagcctctcttttttttt

SEQ ID NO: 122192 - DNA, 80 bp, synthetic construct; identical to SEQ ID NO: 39479
  misc_feature 1..80: note = Artificially Synthesized Probe
  source 1..80: mol_type = other DNA

SEQ ID NO: 122193 - DNA, 80 bp, synthetic construct
  misc_feature 1..80: note = Artificially Synthesized Probe
  source 1..80: mol_type = other DNA
gactagcctgggcaacatggtgaaaccctctctctacaaaaactaaaaaaacacacaaaattagctgggtgtgttggctc

SEQ ID NO: 122194 - DNA, 80 bp, synthetic construct
  misc_feature 1..80: note = Artificially Synthesized Probe
  source 1..80: mol_type = other DNA
tctatttcagtctatagaagtaaaggcctataaaatccaagtacacatttatatgttaataggaatattatttattggaa

SEQ ID NO: 122195 - DNA, 80 bp, synthetic construct
  misc_feature 1..80: note = Artificially Synthesized Probe
  source 1..80: mol_type = other DNA
ttttagaggtacgatcttgctatattgcccaggcaggtcttgaactgctgggcccaaacgatcctcccaccttggccttc

SEQ ID NO: 122196 - DNA, 80 bp, synthetic construct; identical to SEQ ID NO: 39480
  misc_feature 1..80: note = Artificially Synthesized Probe
  source 1..80: mol_type = other DNA

SEQ ID NO: 122197 - DNA, 80 bp, synthetic construct
  misc_feature 1..80: note = Artificially Synthesized Probe
  source 1..80: mol_type = other DNA
actcccctcagtccagttgccaggcgaaattatacagtggatggcagctccacagagatgctaaagtttgaggtctaagt

SEQ ID NO: 122198 - DNA, 80 bp, synthetic construct
  misc_feature 1..80: note = Artificially Synthesized Probe
  source 1..80: mol_type = other DNA
tatgtaatccccaataagatatgtagccaagactcctgcaactagaaataactgatgtgctttgaatgaagaaattccag

SEQ ID NO: 122199 - DNA, 80 bp, synthetic construct
  misc_feature 1..80: note = Artificially Synthesized Probe
  source 1..80: mol_type = other DNA
atggtggctcacgcctgtaatcctagcactttgggaggttgaggctggcggatcacctgaggtcgggagttcgagaccag

SEQ ID NO: 122200 - DNA, 80 bp, synthetic construct; identical to SEQ ID NO: 39481
  misc_feature 1..80: note = Artificially Synthesized Probe
  source 1..80: mol_type = other DNA

SEQ ID NO: 122201 - DNA, 80 bp, synthetic construct
  misc_feature 1..80: note = Artificially Synthesized Probe
  source 1..80: mol_type = other DNA
agtcgcccgccaccacacctggttaatttttgtatttttagtagagatggggtttcaccatgttggtcaggctggtctgg

SEQ ID NO: 122202 - DNA, 80 bp, synthetic construct
  misc_feature 1..80: note = Artificially Synthesized Probe
  source 1..80: mol_type = other DNA
gcttaccatcctcccaactgctacaactatttgctggcatcatttatgttactaaacctgtttagcttcttatgatatct

SEQ ID NO: 122203 - DNA, 80 bp, synthetic construct
  misc_feature 1..80: note = Artificially Synthesized Probe
  source 1..80: mol_type = other DNA
atccaggccagcttaagcttatacagatgccagcaggaatcatgttactttcatgtttgtgtcttcaacatctggtacag

SEQ ID NO: 122204 - DNA, 80 bp, synthetic construct; identical to SEQ ID NO: 39482
  misc_feature 1..80: note = Artificially Synthesized Probe
  source 1..80: mol_type = other DNA

SEQ ID NO: 122205 - DNA, 80 bp, synthetic construct
  misc_feature 1..80: note = Artificially Synthesized Probe
  source 1..80: mol_type = other DNA
agttagccagaaaataattacatctattgcattatatgcaaatacctttattgcattatgagcaaagtgttctgtgcgtg

SEQ ID NO: 122206 - DNA, 80 bp, synthetic construct
  misc_feature 1..80: note = Artificially Synthesized Probe
  source 1..80: mol_type = other DNA
ctgcaacctccacctcccaggttcaagtgattttctgcctcatccttccaagtagctgggattacaggtcctaccacccc

SEQ ID NO: 122207 - DNA, 80 bp, synthetic construct
  misc_feature 1..80: note = Artificially Synthesized Probe
  source 1..80: mol_type = other DNA
tatccgatgatccaattttctttcattgctagttcaagagagcagggggggccctcatcagattccagagattctaataa

SEQ ID NO: 122208 - DNA, 80 bp, synthetic construct; identical to SEQ ID NO: 39469
  misc_feature 1..80: note = Artificially Synthesized Probe
  source 1..80: mol_type = other DNA

SEQ ID NO: 122209 - DNA, 80 bp, synthetic construct
  misc_feature 1..80: note = Artificially Synthesized Probe
  source 1..80: mol_type = other DNA
tggagcacagtggcacaatcttggctcacagcaacctctgcctcccgggttcaagcgattctcctgcctcagcctcctga

SEQ ID NO: 122210 - DNA, 80 bp, synthetic construct; identical to SEQ ID NO: 39483
  misc_feature 1..80: note = Artificially Synthesized Probe
  source 1..80: mol_type = other DNA

SEQ ID NO: 122211 - DNA, 80 bp, synthetic construct
  misc_feature 1..80: note = Artificially Synthesized Probe
  source 1..80: mol_type = other DNA
caaaatgaagcccaggacttatttccatggtggagagaggaaaagatccttttctttctgcttgatgtgaatgaagaagc

SEQ ID NO: 122212 - DNA, 80 bp, synthetic construct
  misc_feature 1..80: note = Artificially Synthesized Probe
  source 1..80: mol_type = other DNA
ttatttctggatacaattaagtgaatcaatagattatgctgtttagcccagtttaaattagaatttctatacttcaacta

SEQ ID NO: 122213 - DNA, 80 bp, synthetic construct
  misc_feature 1..80: note = Artificially Synthesized Probe
  source 1..80: mol_type = other DNA
ggcgggaagattacttgaggccaggagactgagaccaccctgggcaagatagggagaccccatctctacaaaatattttt

SEQ ID NO: 122214 - DNA, 80 bp, synthetic construct; identical to SEQ ID NO: 39484
  misc_feature 1..80: note = Artificially Synthesized Probe
  source 1..80: mol_type = other DNA

SEQ ID NO: 122215 - DNA, 80 bp, synthetic construct
  misc_feature 1..80: note = Artificially Synthesized Probe
  source 1..80: mol_type = other DNA
ccttgtcagctggcacaaaatggttttagaagtatgtggctcaaagaatatttccagagaggtagctgtagaaagaattt

SEQ ID NO: 122216 - DNA, 80 bp, synthetic construct
  misc_feature 1..80: note = Artificially Synthesized Probe
  source 1..80: mol_type = other DNA
aaaatacttacttcaaaggaatgctttaagggtaaaatggatagtgtttatgaaagtgatgtgtaaactatcaagggcta

SEQ ID NO: 122217 - DNA, 80 bp, synthetic construct; identical to SEQ ID NO: 39485
  misc_feature 1..80: note = Artificially Synthesized Probe
  source 1..80: mol_type = other DNA

SEQ ID NO: 122218 - DNA, 80 bp, synthetic construct
  misc_feature 1..80: note = Artificially Synthesized Probe
  source 1..80: mol_type = other DNA
gtacagtttctgttgagaagatgaaattgctctagagattgttggtggtgctagttatgaaacaatgtgaatacttaatg

SEQ ID NO: 122219 - DNA, 80 bp, synthetic construct
  misc_feature 1..80: note = Artificially Synthesized Probe
  source 1..80: mol_type = other DNA
ctgcctcagcctcctaagtagctgggattacaggtgcccgccatcatgcctggctaatttttgtatttttagtagagata

SEQ ID NO: 122220 - DNA, 80 bp, synthetic construct
  misc_feature 1..80: note = Artificially Synthesized Probe
  source 1..80: mol_type = other DNA
tttattggttccttcagtgtctgtgtccatggtgatcattgagagcccagttttgtacttcacctttggcgaatagtgta

SEQ ID NO: 122221 - DNA, 80 bp, synthetic construct
  misc_feature 1..80: note = Artificially Synthesized Probe
  source 1..80: mol_type = other DNA
ttatattagtactcacgaaggagcaatatccagatggttgatgctaaatccagaagagcaaaagcctcccagtgttgttg

SEQ ID NO: 122222 - DNA, 80 bp, synthetic construct
  misc_feature 1..80: note = Artificially Synthesized Probe
  source 1..80: mol_type = other DNA
aaatttgaaattgctgccacctactgtagaaacactatattgcctggaagactaacaaatttcatgagaaaaaaaaaatg

SEQ ID NO: 122223 - DNA, 80 bp, synthetic construct; identical to SEQ ID NO: 39486
  misc_feature 1..80: note = Artificially Synthesized Probe
  source 1..80: mol_type = other DNA

SEQ ID NO: 122224 - DNA, 80 bp, synthetic construct
  misc_feature 1..80: note = Artificially Synthesized Probe
  source 1..80: mol_type = other DNA
aggcatggtggtgcacacctgtagtcctggctgctcaggaggctgaggtgggaggattgcttgagcccagaagttcaagg

SEQ ID NO: 122225 - DNA, 80 bp, synthetic construct
  misc_feature 1..80: note = Artificially Synthesized Probe
  source 1..80: mol_type = other DNA
atctgggctcactgccacctctgcctcctaggttcaagtgattctcctgcctcagcctcctgaatagctggaattacagg

SEQ ID NO: 122226 - DNA, 80 bp, synthetic construct
  misc_feature 1..80: note = Artificially Synthesized Probe
  source 1..80: mol_type = other DNA
tttttttttttctgccccacctaatatgcaggaatcctccctattattaacaactgataagaatacacattggtcattac

SEQ ID NO: 122227 - DNA, 80 bp, synthetic construct; identical to SEQ ID NO: 39487
  misc_feature 1..80: note = Artificially Synthesized Probe
  source 1..80: mol_type = other DNA

SEQ ID NO: 122228 - DNA, 80 bp, synthetic construct
  misc_feature 1..80: note = Artificially Synthesized Probe
  source 1..80: mol_type = other DNA
ttattttgaaatagggtcgcattctgttacccaggctggagtgcagtggcacaatctgagctcactgcaacctctgcctc

SEQ ID NO: 122229 - DNA, 80 bp, synthetic construct
  misc_feature 1..80: note = Artificially Synthesized Probe
  source 1..80: mol_type = other DNA
tcacttcattaaaaagatagtgtcacaagagtgttaaaacagccacattattcataaaagcctcatccttgaaacaaccc

SEQ ID NO: 122230 - DNA, 80 bp, synthetic construct
  misc_feature 1..80: note = Artificially Synthesized Probe
  source 1..80: mol_type = other DNA
gcaattctcctgcctcggcctcctgaatagctgggacagccacacaccaccacgccaagctaatctttgtattagagatg

SEQ ID NO: 122231 - DNA, 80 bp, synthetic construct; identical to SEQ ID NO: 39488
  misc_feature 1..80: note = Artificially Synthesized Probe
  source 1..80: mol_type = other DNA

SEQ ID NO: 122232 - DNA, 80 bp, synthetic construct
  misc_feature 1..80: note = Artificially Synthesized Probe
  source 1..80: mol_type = other DNA
agatagttttaaaagttacctttctaggccaggcacagtggctcacgcctgtaattccagcactttgaaaggctgaggtg

SEQ ID NO: 122233 - DNA, 80 bp, synthetic construct
  misc_feature 1..80: note = Artificially Synthesized Probe
  source 1..80: mol_type = other DNA
ttgaggctgcagtgagccatggttgtccatcctggccaacggagcaagaccctgtctcaaaaaaaaaaaaaattaccttt

SEQ ID NO: 122234 - DNA, 80 bp, synthetic construct
  misc_feature 1..80: note = Artificially Synthesized Probe
  source 1..80: mol_type = other DNA
catcttgtctaaagttgatataaaaatcttcattgcaaagtctgagctgaaagcacagtgatatataaaattgtgaggga

SEQ ID NO: 122235 - DNA, 80 bp, synthetic construct; identical to SEQ ID NO: 39489
  misc_feature 1..80: note = Artificially Synthesized Probe
  source 1..80: mol_type = other DNA

SEQ ID NO: 122236 - DNA, 80 bp, synthetic construct
  misc_feature 1..80: note = Artificially Synthesized Probe
  source 1..80: mol_type = other DNA
aaacatattgtaaagaaatgcacttaaatgcatcatagtgttttgttatgtgaacaaaataaaagactaatattatcatt

SEQ ID NO: 122237 - DNA, 80 bp, synthetic construct
  misc_feature 1..80: note = Artificially Synthesized Probe
  source 1..80: mol_type = other DNA
ccttgtcccattaaagaaagaaattaaacaaaatggctggggctgggtgtggtgcctcactcctgtagtcccagcacttt

SEQ ID NO: 122238 - DNA, 80 bp, synthetic construct
  misc_feature 1..80: note = Artificially Synthesized Probe
  source 1..80: mol_type = other DNA
tgaggctgaggaggttgaggctgcagtgagtcaagatcatgccaccacactccagcctgggctaagagtgagcccctgtc

SEQ ID NO: 122239 - DNA, 80 bp, synthetic construct
  misc_feature 1..80: note = Artificially Synthesized Probe
  source 1..80: mol_type = other DNA
aaaaaagaaatatatatttggtctctgcccccggttttttggcacacagctcctaaaacttttggaatttctggagtggt

SEQ ID NO: 122240 - DNA, 80 bp, synthetic construct; identical to SEQ ID NO: 39470
  misc_feature 1..80: note = Artificially Synthesized Probe
  source 1..80: mol_type = other DNA

SEQ ID NO: 122241 - DNA, 80 bp, synthetic construct; identical to SEQ ID NO: 39490
  misc_feature 1..80: note = Artificially Synthesized Probe
  source 1..80: mol_type = other DNA

SEQ ID NO: 122242 - DNA, 80 bp, synthetic construct
  misc_feature 1..80: note = Artificially Synthesized Probe
  source 1..80: mol_type = other DNA
aataagtgggtaaacataaaataaagtgtttctctgagttctctgagatgctctagcagattaactgaacctgacaagac

SEQ ID NO: 122243 - DNA, 80 bp, synthetic construct
  misc_feature 1..80: note = Artificially Synthesized Probe
  source 1..80: mol_type = other DNA
acaggatacctagctggtgtccgctgcagaactggttatgtgtaggcagaaatccccacaaacattttggtgattagagc

SEQ ID NO: 122244 - DNA, 80 bp, synthetic construct; identical to SEQ ID NO: 39491
  misc_feature 1..80: note = Artificially Synthesized Probe
  source 1..80: mol_type = other DNA

SEQ ID NO: 122245 - DNA, 80 bp, synthetic construct
  misc_feature 1..80: note = Artificially Synthesized Probe
  source 1..80: mol_type = other DNA
gatacaggattaattacggtgagagaaaaaaacaaaacatacacattcatcacagccaatgaccaccacttgaaagcaaa

SEQ ID NO: 122246 - DNA, 80 bp, synthetic construct
  misc_feature 1..80: note = Artificially Synthesized Probe
  source 1..80: mol_type = other DNA
ctgtttctctgggatctgggttgtgagagaagacaaaccttcctgttagcctatggattctccctactgaacattttcat

SEQ ID NO: 122247 - DNA, 80 bp, synthetic construct
  misc_feature 1..80: note = Artificially Synthesized Probe
  source 1..80: mol_type = other DNA
ggtgtgatctcgactcactgcaacctctgcctcctgggttcaagtgattctcctgcctcagcctcccgagtagctggggt

SEQ ID NO: 122248 - DNA, 80 bp, synthetic construct; identical to SEQ ID NO: 39492
  misc_feature 1..80: note = Artificially Synthesized Probe
  source 1..80: mol_type = other DNA

SEQ ID NO: 122249 - DNA, 80 bp, synthetic construct
  misc_feature 1..80: note = Artificially Synthesized Probe
  source 1..80: mol_type = other DNA
tatgtctctttaaatctgtaagttcccttccattcatttttttcttacaatttatctatttcttaaaatttatcggtgcc

SEQ ID NO: 122250 - DNA, 80 bp, synthetic construct
  misc_feature 1..80: note = Artificially Synthesized Probe
  source 1..80: mol_type = other DNA
catttatttatttttgtttttatttttgagacagagtctcactctgtcacccgggctggagtgcagtggcgcaatctcgg

SEQ ID NO: 122251 - DNA, 80 bp, synthetic construct
  misc_feature 1..80: note = Artificially Synthesized Probe
  source 1..80: mol_type = other DNA
agtggcgtgatcttggctcattgcaacctccaccttctgggttccagcaattctcctgcctcagcctcctgagtagctac

SEQ ID NO: 122252 - DNA, 80 bp, synthetic construct
  misc_feature 1..80: note = Artificially Synthesized Probe
  source 1..80: mol_type = other DNA
gcctctgagagtctttcctgatggtttcttttccctcatttttcgcgtccaatcatcaagcattgcctattctacttccc

SEQ ID NO: 122253 - DNA, 80 bp, synthetic construct
  misc_feature 1..80: note = Artificially Synthesized Probe
  source 1..80: mol_type = other DNA
acatggcaaaaccctgtatctactaaaaatacaaaaaattagctgggcatcatgatacatgactgtaatcccagttactt

SEQ ID NO: 122254 - DNA, 80 bp, synthetic construct; identical to SEQ ID NO: 39493
  misc_feature 1..80: note = Artificially Synthesized Probe
  source 1..80: mol_type = other DNA

SEQ ID NO: 122255 - DNA, 80 bp, synthetic construct
  misc_feature 1..80: note = Artificially Synthesized Probe
  source 1..80: mol_type = other DNA
gaaccagaagtaaagatgattaccctagtctcaggtgatgtggcctttaaaagtcactttaactttaaactgcaacacaa

SEQ ID NO: 122256 - DNA, 80 bp, synthetic construct
  misc_feature 1..80: note = Artificially Synthesized Probe
  source 1..80: mol_type = other DNA
ctgtaatcccagcactttgggaggccaaggcaggcagatcacctgaggtcagcagtttgagaccagcttggtgaacatgg

SEQ ID NO: 122257 - DNA, 80 bp, synthetic construct
  misc_feature 1..80: note = Artificially Synthesized Probe
  source 1..80: mol_type = other DNA
cctaaatacactaaagtcttcagcatttatacattccacaggcaccttccacagttgttaagttttctcttcaaggataa

SEQ ID NO: 122258 - DNA, 80 bp, synthetic construct
  misc_feature 1..80: note = Artificially Synthesized Probe
  source 1..80: mol_type = other DNA
tacaaaaataaaaaatttagccaggtgtggtggcacacacctgaaatctcaggtacttgggaggctgacagaggagaatc

SEQ ID NO: 122259 - DNA, 80 bp, synthetic construct; identical to SEQ ID NO: 39494
  misc_feature 1..80: note = Artificially Synthesized Probe
  source 1..80: mol_type = other DNA

SEQ ID NO: 122260 - DNA, 80 bp, synthetic construct
  misc_feature 1..80: note = Artificially Synthesized Probe
  source 1..80: mol_type = other DNA
ggaggaaaagcaaggcttatggaaggatgttccttcaggaggaagcagcactaagagcactctgaatcaagatgagtgga

SEQ ID NO: 122261 - DNA, 80 bp, synthetic construct
  misc_feature 1..80: note = Artificially Synthesized Probe
  source 1..80: mol_type = other DNA
gtgtgatcttggctcactgcaacttctgcctcccaggttcaaggaattctcctgcctcagtctcccgaggtgctgggatt

SEQ ID NO: 122262 - DNA, 80 bp, synthetic construct
  misc_feature 1..80: note = Artificially Synthesized Probe
  source 1..80: mol_type = other DNA
atatacgtatatatatacatatacatatatatatatatttttggtagagatggggtttcgccatgtttcccaggctggtc

SEQ ID NO: 122263 - DNA, 80 bp, synthetic construct
  misc_feature 1..80: note = Artificially Synthesized Probe
  source 1..80: mol_type = other DNA
gtagggttattaaccagcctaatttcaatattgttgtgtctcagggaatagggaagctcaaggagaaggaaagagatggg

SEQ ID NO: 122264 - DNA, 80 bp, synthetic construct; identical to SEQ ID NO: 39495
  misc_feature 1..80: note = Artificially Synthesized Probe
  source 1..80: mol_type = other DNA

SEQ ID NO: 122265 - DNA, 80 bp, synthetic construct
  misc_feature 1..80: note = Artificially Synthesized Probe
  source 1..80: mol_type = other DNA
aatgggaaaccccatctctactatttaaaaaaaacaaaaacaaaaacacctaggccatttcatgaatgtaacacattgat

SEQ ID NO: 122266 - DNA, 80 bp, synthetic construct
  misc_feature 1..80: note = Artificially Synthesized Probe
  source 1..80: mol_type = other DNA
agataaaagatccttgttttaaagtacacaacattaattactggccagctattgatattttatttcttccatatatagtt

SEQ ID NO: 122267 - DNA, 80 bp, synthetic construct
  misc_feature 1..80: note = Artificially Synthesized Probe
  source 1..80: mol_type = other DNA
catggcctcagctcactgcaacctctgcctcctgggttccagtgattctcctgcttcagcctctcgagtagctaggacta

SEQ ID NO: 122268 - DNA, 80 bp, synthetic construct; identical to SEQ ID NO: 39496
  misc_feature 1..80: note = Artificially Synthesized Probe
  source 1..80: mol_type = other DNA

SEQ ID NO: 122269 - DNA, 80 bp, synthetic construct
  misc_feature 1..80: note = Artificially Synthesized Probe
  source 1..80: mol_type = other DNA
gggaaaaataagattgctcacaatgaatccatcccattatgttgccaaagcctagtttcaatttaacttctgtcagtgca

SEQ ID NO: 122270 - DNA, 80 bp, synthetic construct
  misc_feature 1..80: note = Artificially Synthesized Probe
  source 1..80: mol_type = other DNA
gtttttaaagcaggtaagtccatgtagccagtgcagttgtgcagtcagccttgttagcattttttttttttttcctggga

SEQ ID NO: 122271 - DNA, 80 bp, synthetic construct; identical to SEQ ID NO: 39497
  misc_feature 1..80: note = Artificially Synthesized Probe
  source 1..80: mol_type = other DNA

SEQ ID NO: 122272 - DNA, 80 bp, synthetic construct
  misc_feature 1..80: note = Artificially Synthesized Probe
  source 1..80: mol_type = other DNA
aagtttactgaagatagatagatatacttcaataaaaagtgtactggcatgtccctgaatcatgcctaacactaactaac

SEQ ID NO: 122273 - DNA, 80 bp, synthetic construct
  misc_feature 1..80: note = Artificially Synthesized Probe
  source 1..80: mol_type = other DNA
tacaggcatgcactaccacgcctggttaattttgtatttttagtagagatgaggtttctccatatttgtcaggctggtct

SEQ ID NO: 122274 - DNA, 80 bp, synthetic construct
  misc_feature 1..80: note = Artificially Synthesized Probe
  source 1..80: mol_type = other DNA
ctgcctcgacctcccaaagtggtaggattgcaggcgtgagccactacacccggcctgatgtcgggcatccttacatgtgc

SEQ ID NO: 122275 - DNA, 80 bp, synthetic construct
  misc_feature 1..80: note = Artificially Synthesized Probe
  source 1..80: mol_type = other DNA
ccattcagtgggttgtttttcattttcttaatagtcctttgatgtataagaatctctaaaatttaggacagcagagtaaa

SEQ ID NO: 122276 - DNA, 80 bp, synthetic construct; identical to SEQ ID NO: 39498
  misc_feature 1..80: note = Artificially Synthesized Probe
  source 1..80: mol_type = other DNA

SEQ ID NO: 122277 - DNA, 80 bp, synthetic construct
  misc_feature 1..80: note = Artificially Synthesized Probe
  source 1..80: mol_type = other DNA
gaaatattaaatagcaaaatacatgataaatatttagttgtttgattttttaaaaaatatattaactagaaagtccatga

SEQ ID NO: 122278 - DNA, 80 bp, synthetic construct
  misc_feature 1..80: note = Artificially Synthesized Probe
  source 1..80: mol_type = other DNA
caggctggagtgcaatggcacaatctcggctcactgcaacctctgcctcctgagttcaagtgattctcctgcctcagcct

SEQ ID NO: 122279 - DNA, 80 bp, synthetic construct
  misc_feature 1..80: note = Artificially Synthesized Probe
  source 1..80: mol_type = other DNA
ccggcctgaattctctatttctaaaatatagtttcacggtcagattcagaggttgacataaggataaaggaaagagattg

SEQ ID NO: 122280 - DNA, 80 bp, synthetic construct; identical to SEQ ID NO: 39499
  misc_feature 1..80: note = Artificially Synthesized Probe
  source 1..80: mol_type = other DNA

SEQ ID NO: 122281 - DNA, 80 bp, synthetic construct
  misc_feature 1..80: note = Artificially Synthesized Probe
  source 1..80: mol_type = other DNA
tattgcagtttaagtactattttattttattttaagagagtcttgctctgtcacccaggctggagtgcagtggcatgatc

SEQ ID NO: 122282 - DNA, 80 bp, synthetic construct
  misc_feature 1..80: note = Artificially Synthesized Probe
  source 1..80: mol_type = other DNA
cctgacctcaggtgatccacctgccttggcctcccaaagtgttgggattacaggcgtgagccactgcacctggcctatgt

SEQ ID NO: 122283 - DNA, 80 bp, synthetic construct; identical to SEQ ID NO: 39471
  misc_feature 1..80: note = Artificially Synthesized Probe
  source 1..80: mol_type = other DNA

SEQ ID NO: 122284 - DNA, 80 bp, synthetic construct
  misc_feature 1..80: note = Artificially Synthesized Probe
  source 1..80: mol_type = other DNA
tttgtattttagtaaaggcggggtttcatcatgttggccaggctggtttcgaactcctgacctgaagtgatctgcctgcc

SEQ ID NO: 122285 - DNA, 80 bp, synthetic construct
  misc_feature 1..80: note = Artificially Synthesized Probe
  source 1..80: mol_type = other DNA
ctggattgcagtggcgcgatttcggctcactgcaacttctctctcccaggttcaagtgattctcctgcctcagcctcctg

SEQ ID NO: 122286 - DNA, 80 bp, synthetic construct; identical to SEQ ID NO: 39500
  misc_feature 1..80: note = Artificially Synthesized Probe
  source 1..80: mol_type = other DNA

SEQ ID NO: 122287 - DNA, 80 bp, synthetic construct
  misc_feature 1..80: note = Artificially Synthesized Probe
  source 1..80: mol_type = other DNA
tgaaaccctgtctctactaaaaatacaaaaattagccgggtgtggtggtgcgcagcagtaattccagctggttaagagtc

SEQ ID NO: 122288 - DNA, 80 bp, synthetic construct
  misc_feature 1..80: note = Artificially Synthesized Probe
  source 1..80: mol_type = other DNA
attaagatgtaaattttatgtatattctgtttatttcatctatcaatcctttaaaaagtctatttctgtatatattttat

SEQ ID NO: 122289 - DNA, 80 bp, synthetic construct
  misc_feature 1..80: note = Artificially Synthesized Probe
  source 1..80: mol_type = other DNA
aagagatcaagaccatcctggccaacatggtgaaaccccgtctctactaaaaatacaaaaattagctggatgtggtggcg

SEQ ID NO: 122290 - DNA, 80 bp, synthetic construct; identical to SEQ ID NO: 39501
  misc_feature 1..80: note = Artificially Synthesized Probe
  source 1..80: mol_type = other DNA

SEQ ID NO: 122291 - DNA, 80 bp, synthetic construct
  misc_feature 1..80: note = Artificially Synthesized Probe
  source 1..80: mol_type = other DNA
gcaagagcaatctatgtttctgccttcagagttcacagttgctgttattttaaaaagaggaagaaccagtattgcccaac

SEQ ID NO: 122292 - DNA, 80 bp, synthetic construct
  misc_feature 1..80: note = Artificially Synthesized Probe
  source 1..80: mol_type = other DNA
ttgtccaggatggagtgcagtggcgcgatcttggctcactgcaacctctgcctctgaggttcaaacgattctcctgcctc

SEQ ID NO: 122293 - DNA, 80 bp, synthetic construct
  misc_feature 1..80: note = Artificially Synthesized Probe
  source 1..80: mol_type = other DNA
agcgtgagccagtgagccattgcgcttggttgtattttttaatatgatcaaagatgtacagatatagggaaagagaagga

SEQ ID NO: 122294 - DNA, 80 bp, synthetic construct; identical to SEQ ID NO: 39502
  misc_feature 1..80: note = Artificially Synthesized Probe
  source 1..80: mol_type = other DNA

SEQ ID NO: 122295 - DNA, 80 bp, synthetic construct
  misc_feature 1..80: note = Artificially Synthesized Probe
  source 1..80: mol_type = other DNA
aggcgggcggatcatgaggtcaggagatcgagaccatcctggctaacatggtgaaaccccgtctttactaaaaaaataaa

SEQ ID NO: 122296 - DNA, 80 bp, synthetic construct
  misc_feature 1..80: note = Artificially Synthesized Probe
  source 1..80: mol_type = other DNA
gctgtagagatcagattttaaaaagtctgcccttatccttcttgattgaaaagctcagggcagagaggattttagagttt

SEQ ID NO: 122297 - DNA, 80 bp, synthetic construct
  misc_feature 1..80: note = Artificially Synthesized Probe
  source 1..80: mol_type = other DNA
tacaagtgtaaatgtatttgatctctgaaaactgaatgtattctgaagaatgtaccctacctcttggaaacataacctga

SEQ ID NO: 122298 - DNA, 80 bp, synthetic construct
  misc_feature 1..80: note = Artificially Synthesized Probe
  source 1..80: mol_type = other DNA
tatcaaacgaatacaaggctcacagggttagaggcttagaaagaagaatgtgaaatgtatgtattccagcttagtgttca

SEQ ID NO: 122299 - DNA, 80 bp, synthetic construct; identical to SEQ ID NO: 39503
  misc_feature 1..80: note = Artificially Synthesized Probe
  source 1..80: mol_type = other DNA

SEQ ID NO: 122300 - DNA, 80 bp, synthetic construct
  misc_feature 1..80: note = Artificially Synthesized Probe
  source 1..80: mol_type = other DNA
tatttttagatggagtcttgctctgttgcccaggctggagttcagtggagcgatctcggctcactacaacctccgcctcc

SEQ ID NO: 122301 - DNA, 80 bp, synthetic construct
  misc_feature 1..80: note = Artificially Synthesized Probe
  source 1..80: mol_type = other DNA
ggcctcccaaagtgctgggattacaggcgtgagccaccacgcctggccagaactaatttttttttttttcttgagacgga

SEQ ID NO: 122302 - DNA, 80 bp, synthetic construct
  misc_feature 1..80: note = Artificially Synthesized Probe
  source 1..80: mol_type = other DNA
atgggatttcaccatgttggccaggatggtctctatctgttgacctcgtgatctgcgtgcctcagcctcccaaagtactg

SEQ ID NO: 122303 - DNA, 80 bp, synthetic construct; identical to SEQ ID NO: 39504
  misc_feature 1..80: note = Artificially Synthesized Probe
  source 1..80: mol_type = other DNA

SEQ ID NO: 122304 - DNA, 80 bp, synthetic construct
  misc_feature 1..80: note = Artificially Synthesized Probe
  source 1..80: mol_type = other DNA
tcagcctcctgagaagctgggattataggcacctgctaccacacccggctaatttttgtatttttagtagagacagggtt

SEQ ID NO: 122305 - DNA, 80 bp, synthetic construct
  misc_feature 1..80: note = Artificially Synthesized Probe
  source 1..80: mol_type = other DNA
gatcacggctactgcaacctcaacctcctgggctctagtgatcctctcacctcagcctcctgagtagctgagactacagg

SEQ ID NO: 122306 - DNA, 80 bp, synthetic construct
  misc_feature 1..80: note = Artificially Synthesized Probe
  source 1..80: mol_type = other DNA
aaacaaaacaaaactggttgggcgtggtggctcatgcttgtaatcccagcactttgggaggctgaggtgggtggatcacc

SEQ ID NO: 122307 - DNA, 80 bp, synthetic construct; identical to SEQ ID NO: 39505
  misc_feature 1..80: note = Artificially Synthesized Probe
  source 1..80: mol_type = other DNA

SEQ ID NO: 122308 - DNA, 80 bp, synthetic construct
  misc_feature 1..80: note = Artificially Synthesized Probe
  source 1..80: mol_type = other DNA
gggaggctgaggcatgagaatcgcttgaacccgggaagcagaggttgcaatgagctgagatagtgccactgctctccagc

SEQ ID NO: 122309 - DNA, 80 bp, synthetic construct
  misc_feature 1..80: note = Artificially Synthesized Probe
  source 1..80: mol_type = other DNA
aaaaatcaatgagatcctgaatcttgtattcagaatgtatcatcgaatttctaataatagctcaatcaactttttttcca

SEQ ID NO: 122310 - DNA, 80 bp, synthetic construct
  misc_feature 1..80: note = Artificially Synthesized Probe
  source 1..80: mol_type = other DNA
caaagttacatgtaaaaaatgctcttaatttctgtcttaatttgacaactaaatattcaaaccaaggtccccatttgatt

SEQ ID NO: 122311 - DNA, 80 bp, synthetic construct
  misc_feature 1..80: note = Artificially Synthesized Probe
  source 1..80: mol_type = other DNA
tcaagaccagcctgggcaacatggcaaaaccctgtctctacaaaaaatacaaaaattagccaggctttgtggtacacacc

SEQ ID NO: 122312 - DNA, 80 bp, synthetic construct; identical to SEQ ID NO: 39506
  misc_feature 1..80: note = Artificially Synthesized Probe
  source 1..80: mol_type = other DNA

SEQ ID NO: 122313 - DNA, 80 bp, synthetic construct
  misc_feature 1..80: note = Artificially Synthesized Probe
  source 1..80: mol_type = other DNA
acttgggaggctgaggcaggagaatcactagaacccaggaggcggaggttgcagtgagccaggatcgcaccattgcactc

SEQ ID NO: 122314 - DNA, 80 bp, synthetic construct
  misc_feature 1..80: note = Artificially Synthesized Probe
  source 1..80: mol_type = other DNA
gaggagtagctgatgatcttaaagcactcgctagtcatgagatggtccttctgaatttaactgcagcgtgcaatgaagat

SEQ ID NO: 122315 - DNA, 80 bp, synthetic construct; identical to SEQ ID NO: 39507
  misc_feature 1..80: note = Artificially Synthesized Probe
  source 1..80: mol_type = other DNA

SEQ ID NO: 122316 - DNA, 80 bp, synthetic construct
  misc_feature 1..80: note = Artificially Synthesized Probe
  source 1..80: mol_type = other DNA
tttctacctataagtactgactttttcttggttggataactgagaaaacatttgaactgcaactcttgcttgtccagctc

SEQ ID NO: 122317 - DNA, 80 bp, synthetic construct
  misc_feature 1..80: note = Artificially Synthesized Probe
  source 1..80: mol_type = other DNA
tgagctgagatcatgccattgcactccagcctggggaacaagagtgaaactccgtctcaaaaataaataaataaataaac

SEQ ID NO: 122318 - DNA, 80 bp, synthetic construct
  misc_feature 1..80: note = Artificially Synthesized Probe
  source 1..80: mol_type = other DNA
tgttcctcctcctgctgttttttgcctttaccttatgcacgagagcaacacccaacagccacatttcctagaaggtgtca

SEQ ID NO: 122319 - DNA, 80 bp, synthetic construct
  misc_feature 1..80: note = Artificially Synthesized Probe
  source 1..80: mol_type = other DNA
atcacctgaggttgggagttcgagaccagcctgaccaacgtggagaaaccccgtttctactaaaaatacaaaattagctg

SEQ ID NO: 122320 - DNA, 80 bp, synthetic construct
  misc_feature 1..80: note = Artificially Synthesized Probe
  source 1..80: mol_type = other DNA
aaagaaaaaaagcagtcctgggctgcggtaagctaaactgtcctggttctaacatctaggcctggggttgtcctgttgaa

SEQ ID NO: 122321 - DNA, 80 bp, synthetic construct; identical to SEQ ID NO: 39508
  misc_feature 1..80: note = Artificially Synthesized Probe
  source 1..80: mol_type = other DNA

SEQ ID NO: 122322 - DNA, 80 bp, synthetic construct
  misc_feature 1..80: note = Artificially Synthesized Probe
  source 1..80: mol_type = other DNA
tattgattctttaaacccttcccaaagtcacctactgcaagtctaaactgcaacaagttcctctcaactctgcactaaga

SEQ ID NO: 122323 - DNA, 80 bp, synthetic construct
  misc_feature 1..80: note = Artificially Synthesized Probe
  source 1..80: mol_type = other DNA
ccaaagatgtcctgtaccttacagcactgcattatgcaggctatattgtattgaaattctgtccatccatgtctgtctcc

SEQ ID NO: 122324 - DNA, 80 bp, synthetic construct; identical to SEQ ID NO: 39509
  misc_feature 1..80: note = Artificially Synthesized Probe
  source 1..80: mol_type = other DNA

SEQ ID NO: 122325 - DNA, 80 bp, synthetic construct
  misc_feature 1..80: note = Artificially Synthesized Probe
  source 1..80: mol_type = other DNA
gaccagcttgatcatcatagcgagactccgtctctacaaaaaataattagctaggcatggtggtgtgcacctgtagtccc

SEQ ID NO: 122326 - DNA, 80 bp, synthetic construct
  misc_feature 1..80: note = Artificially Synthesized Probe
  source 1..80: mol_type = other DNA
aaaaaaaaaaaggaatgcaatctgggcttctcctcctaactctcttgcctctgaatattcctttttccgaagtgtgtcga

SEQ ID NO: 122327 - DNA, 80 bp, synthetic construct
  misc_feature 1..80: note = Artificially Synthesized Probe
  source 1..80: mol_type = other DNA
tcaatcctcctgctgcagccagccgagtagctgggactacaagtgcataacctcatgcttggctaatttttaaatttttt

SEQ ID NO: 122328 - DNA, 80 bp, synthetic construct
  misc_feature 1..80: note = Artificially Synthesized Probe
  source 1..80: mol_type = other DNA
tatcagttctggaagatcatgataaaaatgaaatattggagaaagcaagctgttacccatcaatgttgagaaaatgacaa

SEQ ID NO: 122329 - DNA, 80 bp, synthetic construct; identical to SEQ ID NO: 39510
  misc_feature 1..80: note = Artificially Synthesized Probe
  source 1..80: mol_type = other DNA

SEQ ID NO: 122330 - DNA, 80 bp, synthetic construct
  misc_feature 1..80: note = Artificially Synthesized Probe
  source 1..80: mol_type = other DNA
gtaatcccagctacttgggaggctgaggcaggagaatggcgtgaacccgggaggcggagtttgcagtgagccaagatcgt

SEQ ID NO: 122331 - DNA, 80 bp, synthetic construct
  misc_feature 1..80: note = Artificially Synthesized Probe
  source 1..80: mol_type = other DNA
tttttttttttttgctgggaagactcagacccaagtaaccttggatatgagctctccacctggttaaaactttattacag

SEQ ID NO: 122332 - DNA, 80 bp, synthetic construct
  misc_feature 1..80: note = Artificially Synthesized Probe
  source 1..80: mol_type = other DNA
gtctcgctatgttgtccaggctggtcttgaactccagggctcaagaaaactgcctgccttagcctcccaaagtgctggga

SEQ ID NO: 122333 - DNA, 80 bp, synthetic construct; identical to SEQ ID NO: 39511
  misc_feature 1..80: note = Artificially Synthesized Probe
  source 1..80: mol_type = other DNA

SEQ ID NO: 122334 - DNA, 80 bp, synthetic construct
  misc_feature 1..80: note = Artificially Synthesized Probe
  source 1..80: mol_type = other DNA
taaaatatcaatcatgacaatttaataggaaaagtcttaaatattttatgttcttaaactaataaagtgactttgaagcc

SEQ ID NO: 122335 - DNA, 80 bp, synthetic construct
  misc_feature 1..80: note = Artificially Synthesized Probe
  source 1..80: mol_type = other DNA
cgattaagtgattgaaatctggttttaataagatataaacttttttctaaagacctactctagaagagcaaacagatgta

SEQ ID NO: 122336 - DNA, 80 bp, synthetic construct
  misc_feature 1..80: note = Artificially Synthesized Probe
  source 1..80: mol_type = other DNA
ttggattctggattttagaatatttgtatcacgtaccttcccaattaagcatcctaaatcttgtttttcttttcgagatg

SEQ ID NO: 122337 - DNA, 80 bp, synthetic construct
  misc_feature 1..80: note = Artificially Synthesized Probe
  source 1..80: mol_type = other DNA
gagatggggttttgtcatgttggccgggctgatctcgaactcctgacctcaggcgatccgcctgcctcagcctcccaaag

SEQ ID NO: 122338 - DNA, 80 bp, synthetic construct; identical to SEQ ID NO: 39512
  misc_feature 1..80: note = Artificially Synthesized Probe
  source 1..80: mol_type = other DNA

SEQ ID NO: 122339 - DNA, 80 bp, synthetic construct
  misc_feature 1..80: note = Artificially Synthesized Probe
  source 1..80: mol_type = other DNA
actttctataaaaaatgaaagaactgaaattcttcagacaatactttgttcatatttatgtatttaaaatttttttttaa

SEQ ID NO: 122340 - DNA, 80 bp, synthetic construct
  misc_feature 1..80: note = Artificially Synthesized Probe
  source 1..80: mol_type = other DNA
gcacccagccagacaatactttggatgttcatttcatttgcctattctactttgtctagagcatgcacaataggaatata

SEQ ID NO: 122341 - DNA, 80 bp, synthetic construct; identical to SEQ ID NO: 39472
  misc_feature 1..80: note = Artificially Synthesized Probe
  source 1..80: mol_type = other DNA

SEQ ID NO: 122342 - DNA, 80 bp, synthetic construct; identical to SEQ ID NO: 39513
  misc_feature 1..80: note = Artificially Synthesized Probe
  source 1..80: mol_type = other DNA

SEQ ID NO: 122343 - DNA, 80 bp, synthetic construct
  misc_feature 1..80: note = Artificially Synthesized Probe
  source 1..80: mol_type = other DNA
aatttcaagtttctctcaattctttaatgggataattgctataactgtattattgcttatacattttgaagaaaacaact

SEQ ID NO: 122344 - DNA, 80 bp, synthetic construct
  misc_feature 1..80: note = Artificially Synthesized Probe
  source 1..80: mol_type = other DNA
ctaatttttgtattttgagtagagatggggttccaccatgttggccaggctggtcttgaactcctgacctcgtgatccac

SEQ ID NO: 122345 - DNA, 80 bp, synthetic construct
  misc_feature 1..80: note = Artificially Synthesized Probe
  source 1..80: mol_type = other DNA
ttttgttagttgagttttaaattttgattgcagatatatttcttgcatgacatgtctatgtgaaaatctaatttattaaa

SEQ ID NO: 122346 - DNA, 80 bp, synthetic construct; identical to SEQ ID NO: 39514
  misc_feature 1..80: note = Artificially Synthesized Probe
  source 1..80: mol_type = other DNA

SEQ ID NO: 122347 - DNA, 80 bp, synthetic construct
  misc_feature 1..80: note = Artificially Synthesized Probe
  source 1..80: mol_type = other DNA
aaaagtagaagacataagtccaattcatatagtagcaaattattccagaaagaggaagagaaattactgtcccaagctgt

SEQ ID NO: 122348 - DNA, 80 bp, synthetic construct
  misc_feature 1..80: note = Artificially Synthesized Probe
  source 1..80: mol_type = other DNA
tgagcctaggagtttgagaccagcctgggcaatatggcaaactcctatctgtactaaaaatacaaaaattatctgggtat

SEQ ID NO: 122349 - DNA, 80 bp, synthetic construct
  misc_feature 1..80: note = Artificially Synthesized Probe
  source 1..80: mol_type = other DNA
ggtcccatagaaacaagattagaaaaaagatatagaggtagtataacaggacaagcaaaggaatggaagtagtaaagcag

SEQ ID NO: 122350 - DNA, 80 bp, synthetic construct; identical to SEQ ID NO: 39515
  misc_feature 1..80: note = Artificially Synthesized Probe
  source 1..80: mol_type = other DNA

SEQ ID NO: 122351 - DNA, 80 bp, synthetic construct
  misc_feature 1..80: note = Artificially Synthesized Probe
  source 1..80: mol_type = other DNA
aaaaacaatctacattttttcctgtagcctgtaagacctgatataacccggctcttatctctttctctaacctcatctta

SEQ ID NO: 122352 - DNA, 80 bp, synthetic construct
  misc_feature 1..80: note = Artificially Synthesized Probe
  source 1..80: mol_type = other DNA
gctcttctccctgcatgaatggtttgttcttatccttcagattttagcttaaaagtaccacagagaggccttttctcaac

SEQ ID NO: 122353 - DNA, 80 bp, synthetic construct
  misc_feature 1..80: note = Artificially Synthesized Probe
  source 1..80: mol_type = other DNA
acaagcagtagaactagcaatgaggaagtgaaagagaaggcactgggaagccagtatgaggtcatttatttgggaaaaaa

SEQ ID NO: 122354 - DNA, 80 bp, synthetic construct
  misc_feature 1..80: note = Artificially Synthesized Probe
  source 1..80: mol_type = other DNA
acctgtagatcaaaatgatggcaaataaagatgcaatagaaaaaagatgcatgaagagaggggttgagaatcatgataca

SEQ ID NO: 122355 - DNA, 80 bp, synthetic construct
  misc_feature 1..80: note = Artificially Synthesized Probe
  source 1..80: mol_type = other DNA
catctctataccaatatctgaaaacacaacatactttgaaatagatgatggcagatggggaaaatgacattagtcaatta

SEQ ID NO: 122356 - DNA, 80 bp, synthetic construct; identical to SEQ ID NO: 39516
  misc_feature 1..80: note = Artificially Synthesized Probe
  source 1..80: mol_type = other DNA

SEQ ID NO: 122357 - DNA, 80 bp, synthetic construct
  misc_feature 1..80: note = Artificially Synthesized Probe
  source 1..80: mol_type = other DNA
gaaatgagaaatttttacagtgttaagtgaaaatatcttataatgaagtactttcagaatttgaggctgggtgtggtggc

SEQ ID NO: 122358 - DNA, 80 bp, synthetic construct
  misc_feature 1..80: note = Artificially Synthesized Probe
  source 1..80: mol_type = other DNA
acaagataagggttacaataaatctaaaataattgtactgagtgaggacataaagggatcttgctcaaggttaattttac

SEQ ID NO: 122359 - DNA, 80 bp, synthetic construct; identical to SEQ ID NO: 39517
  misc_feature 1..80: note = Artificially Synthesized Probe
  source 1..80: mol_type = other DNA

SEQ ID NO: 122360 - DNA, 80 bp, synthetic construct
  misc_feature 1..80: note = Artificially Synthesized Probe
  source 1..80: mol_type = other DNA
ctctgtgtcacttcagaaagattagttaacctccctgaacttcaaggcggttgcataattgttgtaaagataaatggtaa

SEQ ID NO: 122361 - DNA, 80 bp, synthetic construct
  misc_feature 1..80: note = Artificially Synthesized Probe
  source 1..80: mol_type = other DNA
ggagcatccacaggatgagtcattatagaagaaaacttgagatgtttggaaatgcccacagagattatgttgtagaaaac

SEQ ID NO: 122362 - DNA, 80 bp, synthetic construct
  misc_feature 1..80: note = Artificially Synthesized Probe
  source 1..80: mol_type = other DNA
gggatgaagaaggacgagagaacctgagtataaatacaacttaaattctatttagttgttggctggacacggtggctcat

SEQ ID NO: 122363 - DNA, 80 bp, synthetic construct
  misc_feature 1..80: note = Artificially Synthesized Probe
  source 1..80: mol_type = other DNA
acatcttataccagaaagaaatgtttgaaacagcttcttaggattactaagacaaagctgccctgtgtggtctctgggac

SEQ ID NO: 122364 - DNA, 80 bp, synthetic construct
  misc_feature 1..80: note = Artificially Synthesized Probe
  source 1..80: mol_type = other DNA
gctgaggaaggagaattgcttgaactcaggaagcggaggttgcagtgagccgagatcatgccactgcactccagcctggg

SEQ ID NO: 122365 - DNA, 80 bp, synthetic construct; identical to SEQ ID NO: 39518
  misc_feature 1..80: note = Artificially Synthesized Probe
  source 1..80: mol_type = other DNA

SEQ ID NO: 122366 - DNA, 80 bp, synthetic construct
  misc_feature 1..80: note = Artificially Synthesized Probe
  source 1..80: mol_type = other DNA
ctgtgactgaaaacagggaaggtattttagtcccagtttaaaaaatgatgggactgagatctagagattagagcttacct

SEQ ID NO: 122367 - DNA, 80 bp, synthetic construct
  misc_feature 1..80: note = Artificially Synthesized Probe
  source 1..80: mol_type = other DNA
acaccattccctggatttcagaggtagaagttcgaagttataaaggaaaagtgaaaattattaagtatgggggtacacat

SEQ ID NO: 122368 - DNA, 80 bp, synthetic construct
  misc_feature 1..80: note = Artificially Synthesized Probe
  source 1..80: mol_type = other DNA
tcataaaatatttgtctctaagttacaagaccagaaaaaataaaagaataagcgataaaaaagaaattaaatgcaactca

SEQ ID NO: 122369 - DNA, 80 bp, synthetic construct; identical to SEQ ID NO: 39519
  misc_feature 1..80: note = Artificially Synthesized Probe
  source 1..80: mol_type = other DNA

SEQ ID NO: 122370 - DNA, 80 bp, synthetic construct
  misc_feature 1..80: note = Artificially Synthesized Probe
  source 1..80: mol_type = other DNA
taaccatttattaatggtttattttcttctctcctaaagtatgagctatgaagtctcttttggaaaaaagttttctctgg

SEQ ID NO: 122371 - DNA, 80 bp, synthetic construct; identical to SEQ ID NO: 39468
  misc_feature 1..80: note = Artificially Synthesized Probe
  source 1..80: mol_type = other DNA

SEQ ID NO: 122372 - DNA, 80 bp, synthetic construct
  misc_feature 1..80: note = Artificially Synthesized Probe
  source 1..80: mol_type = other DNA
gacatctttaagaagaagagaaggagacacacggtaagaagtaaaacaagagagaaaagaaaattacctctcctagtcct

SEQ ID NO: 122373 - DNA, 80 bp, synthetic construct
  misc_feature 1..80: note = Artificially Synthesized Probe
  source 1..80: mol_type = other DNA
cataaaaaaaggaaccgagaatccatccttgagtttctgcatcccattggtacttcttaccctacaaaaatcagaaaaga

SEQ ID NO: 122374 - DNA, 80 bp, synthetic construct
  misc_feature 1..80: note = Artificially Synthesized Probe
  source 1..80: mol_type = other DNA
gtgaatgaaaaagaactgacagtcgtaaacttcaagaaggcttgcaattttataaaactagactgcaggatgagctgcca

SEQ ID NO: 122375 - DNA, 80 bp, synthetic construct; identical to SEQ ID NO: 39473
  misc_feature 1..80: note = Artificially Synthesized Probe
  source 1..80: mol_type = other DNA

SEQ ID NO: 122376 - DNA, 80 bp, synthetic construct; identical to SEQ ID NO: 39520
  misc_feature 1..80: note = Artificially Synthesized Probe
  source 1..80: mol_type = other DNA

SEQ ID NO: 122377 - DNA, 80 bp, synthetic construct
  misc_feature 1..80: note = Artificially Synthesized Probe
  source 1..80: mol_type = other DNA
acgaagcacttaaacaagcacatggaacaattccaaagagcaagaatttaaatcaagccacaaacttcatgtgaatagaa

SEQ ID NO: 122378 - DNA, 80 bp, synthetic construct
  misc_feature 1..80: note = Artificially Synthesized Probe
  source 1..80: mol_type = other DNA
agataagtagcagggtcaacaaaagcactttgcaaagaaaaagacacaaagcaaactcttacttttccttatttagggta

SEQ ID NO: 122379 - DNA, 80 bp, synthetic construct; identical to SEQ ID NO: 39521
  misc_feature 1..80: note = Artificially Synthesized Probe
  source 1..80: mol_type = other DNA

SEQ ID NO: 122380 - DNA, 80 bp, synthetic construct
  misc_feature 1..80: note = Artificially Synthesized Probe
  source 1..80: mol_type = other DNA
cattcccccgcttcagcctcccgagtagctgggaccacaggcgcccaccacctcgcccgtctaattttttgtattttcag

SEQ ID NO: 122381 - DNA, 80 bp, synthetic construct
  misc_feature 1..80: note = Artificially Synthesized Probe
  source 1..80: mol_type = other DNA
cttgctcttgttgcccaggctggagtggaatggcgtgatctcggctcactgcaaactccacctcccaggttcaagcaatt

SEQ ID NO: 122382 - DNA, 80 bp, synthetic construct
  misc_feature 1..80: note = Artificially Synthesized Probe
  source 1..80: mol_type = other DNA
tgggattacaggcatgagtcactgcacccagcctgcaaatgtacttctaaaaagaatactagcttttctttctgtactat

SEQ ID NO: 122383 - DNA, 80 bp, synthetic construct; identical to SEQ ID NO: 39522
  misc_feature 1..80: note = Artificially Synthesized Probe
  source 1..80: mol_type = other DNA

SEQ ID NO: 122384 - DNA, 80 bp, synthetic construct
  misc_feature 1..80: note = Artificially Synthesized Probe
  source 1..80: mol_type = other DNA
gcagtagtagctatagttacaagttattgcccaatcagttcctgggaaaacacaaaaagaaagtgattcagagtatacac

SEQ ID NO: 122385 - DNA, 80 bp, synthetic construct
  misc_feature 1..80: note = Artificially Synthesized Probe
  source 1..80: mol_type = other DNA
tctattatcttctaaagttgtatttgaatctaccatatccactaacgcaacactcagattcacacgtaatgcatacacaa

SEQ ID NO: 122386 - DNA, 80 bp, synthetic construct
  misc_feature 1..80: note = Artificially Synthesized Probe
  source 1..80: mol_type = other DNA
gcctgtagtcctagctacttgggaggctgaggcaggagaattgtttgaacctgggaggcggaggttgcagtgagctgaga

SEQ ID NO: 122387 - DNA, 80 bp, synthetic construct
  misc_feature 1..80: note = Artificially Synthesized Probe
  source 1..80: mol_type = other DNA
tcaagccatccacccacctcagcctcccaaagtgctgtgattataggcattggccaccatacccggctgctttaattaaa

SEQ ID NO: 122388 - DNA, 80 bp, synthetic construct
  misc_feature 1..80: note = Artificially Synthesized Probe
  source 1..80: mol_type = other DNA
atttcacacatgagagcctgaactataaaaaagttcattaaaacatggaggtagtagttttatcacctttgctgagaaaa

SEQ ID NO: 122389 - DNA, 80 bp, synthetic construct; identical to SEQ ID NO: 39523
  misc_feature 1..80: note = Artificially Synthesized Probe
  source 1..80: mol_type = other DNA

SEQ ID NO: 122390 - DNA, 80 bp, synthetic construct
  misc_feature 1..80: note = Artificially Synthesized Probe
  source 1..80: mol_type = other DNA
tgctcagtagttatcaagcgtaaagggctcacagtaaaaagggaaatcagtgaatgtaccaccatgattaaaaaaaaagg

SEQ ID NO: 122391 - DNA, 80 bp, synthetic construct
  misc_feature 1..80: note = Artificially Synthesized Probe
  source 1..80: mol_type = other DNA
tgtagtcccagctactcgggaggctgaggcaggagaatggcgtgaacccgggaggcggagcttgcagcgagaggagatcg

SEQ ID NO: 122392 - DNA, 80 bp, synthetic construct; identical to SEQ ID NO: 39524
  misc_feature 1..80: note = Artificially Synthesized Probe
  source 1..80: mol_type = other DNA

SEQ ID NO: 122393 - DNA, 80 bp, synthetic construct
  misc_feature 1..80: note = Artificially Synthesized Probe
  source 1..80: mol_type = other DNA
aatgacacatcaacatcatataaatgtgtgtatgtttttcccctacttaagaatcctggtgttttcattaacctagcatc

SEQ ID NO: 122394 - DNA, 80 bp, synthetic construct
  misc_feature 1..80: note = Artificially Synthesized Probe
  source 1..80: mol_type = other DNA
atccaactcacttttctgtatgccctcctatgtttaacaactgctattatttttttttccctgtgtaagattaacttctt

SEQ ID NO: 122395 - DNA, 80 bp, synthetic construct
  misc_feature 1..80: note = Artificially Synthesized Probe
  source 1..80: mol_type = other DNA
ctttctgctgcaaccaaatgggcagttgtccagttaatgacggtttggatattgtgaggcatgttttgtaaaaaaacaca

SEQ ID NO: 122396 - DNA, 80 bp, synthetic construct
  misc_feature 1..80: note = Artificially Synthesized Probe
  source 1..80: mol_type = other DNA
cagcatatctgactaatttttaaatttttacttgtagagtcggggtctcactattttgcccaggctggtcttgaactttt

SEQ ID NO: 122397 - DNA, 80 bp, synthetic construct
  misc_feature 1..80: note = Artificially Synthesized Probe
  source 1..80: mol_type = other DNA
gcactttgggaggccgagatgggcggatcacctgagttccaaaccagcctgaccaacatggagaagctccgtctctatta

SEQ ID NO: 122398 - DNA, 80 bp, synthetic construct; identical to SEQ ID NO: 39525
  misc_feature 1..80: note = Artificially Synthesized Probe
  source 1..80: mol_type = other DNA

SEQ ID NO: 122399 - DNA, 80 bp, synthetic construct
  misc_feature 1..80: note = Artificially Synthesized Probe
  source 1..80: mol_type = other DNA
tcacttaaaggactactgtagctttccagctaagagatgaaggtggcttaaactacagtgaaagcagcagtgaagaaaaa

SEQ ID NO: 122400 - DNA, 80 bp, synthetic construct
  misc_feature 1..80: note = Artificially Synthesized Probe
  source 1..80: mol_type = other DNA
tccttatttgcagttatcttattttactgtacattattagttttccctaagtgatgctttattgggactatgatatacct

SEQ ID NO: 122401 - DNA, 80 bp, synthetic construct
  misc_feature 1..80: note = Artificially Synthesized Probe
  source 1..80: mol_type = other DNA
gcggccaggcacggtggctcacgcctgtaatcccagcactttgggaggacgaagcgggtggatcacctgaggtcaggagt

SEQ ID NO: 122402 - DNA, 80 bp, synthetic construct; identical to SEQ ID NO: 39526
  misc_feature 1..80: note = Artificially Synthesized Probe
  source 1..80: mol_type = other DNA

SEQ ID NO: 122403 - DNA, 80 bp, synthetic construct
  misc_feature 1..80: note = Artificially Synthesized Probe
  source 1..80: mol_type = other DNA
gaaattgatccaacaaaagcatgcttgcatgaccaagagagagaacatccattgagcatcaagttcaaagcaaaatcatg

SEQ ID NO: 122404 - DNA, 80 bp, synthetic construct
  misc_feature 1..80: note = Artificially Synthesized Probe
  source 1..80: mol_type = other DNA
tgtagaaattacttactagttttcattctcaggtttcttagctataatatgtagagaccaccatctacccactgggctgc

SEQ ID NO: 122405 - DNA, 80 bp, synthetic construct; identical to SEQ ID NO: 39527
  misc_feature 1..80: note = Artificially Synthesized Probe
  source 1..80: mol_type = other DNA

SEQ ID NO: 122406 - DNA, 80 bp, synthetic construct
  misc_feature 1..80: note = Artificially Synthesized Probe
  source 1..80: mol_type = other DNA
ctgcagtatctagattatgtattgtagtaactctaagaactaacactattgagtgggatagtgggtattaagtttaataa

SEQ ID NO: 122407 - DNA, 80 bp, synthetic construct
  misc_feature 1..80: note = Artificially Synthesized Probe
  source 1..80: mol_type = other DNA
tgcatcaccacacccagctaatttttgtatttttggtagagacaggatttcaccatgttagccaggctggtctcaaactc

SEQ ID NO: 122408 - DNA, 80 bp, synthetic construct
  misc_feature 1..80: note = Artificially Synthesized Probe
  source 1..80: mol_type = other DNA
tgcttgagcccaggagttcaagaccagcctgggcaacatgatgaaaccccatctctacaaaaaatttcaaaattagctgg

SEQ ID NO: 122409 - DNA, 80 bp, synthetic construct
  misc_feature 1..80: note = Artificially Synthesized Probe
  source 1..80: mol_type = other DNA
caaaaaaaaaaaccaaaaaacacacacacacacaaacaaaaaacaaaaattagcagggcatggtggtgagtgcctgtagt

SEQ ID NO: 122410 - DNA, 80 bp, synthetic construct
  misc_feature 1..80: note = Artificially Synthesized Probe
  source 1..80: mol_type = other DNA
agcattttctatacgcttggcactagtcgaagtattttgcctgaattagggttattataaggattcactgagttagtaat

SEQ ID NO: 122411 - DNA, 80 bp, synthetic construct; identical to SEQ ID NO: 39528
  misc_feature 1..80: note = Artificially Synthesized Probe
  source 1..80: mol_type = other DNA

SEQ ID NO: 122412 - DNA, 80 bp, synthetic construct
  misc_feature 1..80: note = Artificially Synthesized Probe
  source 1..80: mol_type = other DNA
gaaaataaagtgttgggctgggtgctgtggctcacgcctgtaatcctagcactttgggaggctgacgcaggaggatcact

SEQ ID NO: 122413 - DNA, 80 bp, synthetic construct
  misc_feature 1..80: note = Artificially Synthesized Probe
  source 1..80: mol_type = other DNA
tcgagaccatcctggctaacacggtgaaaccccttctgaactaaaaatagaaaaaattagccgggcgtggtggcgggtgc

SEQ ID NO: 122414 - DNA, 80 bp, synthetic construct
  misc_feature 1..80: note = Artificially Synthesized Probe
  source 1..80: mol_type = other DNA
aattagccaggtgtggtggcacatgcctgcagtcccagttcttcaggaagcttaggtaggagggtcacttgagcctggga

SEQ ID NO: 122415 - DNA, 80 bp, synthetic construct; identical to SEQ ID NO: 39529
  misc_feature 1..80: note = Artificially Synthesized Probe
  source 1..80: mol_type = other DNA

SEQ ID NO: 122416 - DNA, 80 bp, synthetic construct
  misc_feature 1..80: note = Artificially Synthesized Probe
  source 1..80: mol_type = other DNA
ttaaaggacaacataaggatataaaattgcagggaaaagaaaaggagcggggcaggggaaacagattaaaagagacaaaa

SEQ ID NO: 122417 - DNA, 80 bp, synthetic construct
  misc_feature 1..80: note = Artificially Synthesized Probe
  source 1..80: mol_type = other DNA
cagccttgccaacatggtgaaactccgtctctactaaaaatacaaaaattagctgggtgtggtggcgtaggcctgtaatc

SEQ ID NO: 122418 - DNA, 80 bp, synthetic construct
  misc_feature 1..80: note = Artificially Synthesized Probe
  source 1..80: mol_type = other DNA
atatgaacactgagtattttgtaagtattattattattttattattattattttttgagacgaagtcttgctcttgtcac

SEQ ID NO: 122419 - DNA, 80 bp, synthetic construct; identical to SEQ ID NO: 39530
  misc_feature 1..80: note = Artificially Synthesized Probe
  source 1..80: mol_type = other DNA

SEQ ID NO: 122420 - DNA, 80 bp, synthetic construct
  misc_feature 1..80: note = Artificially Synthesized Probe
  source 1..80: mol_type = other DNA
ttttttgagacagggtctcccgctctcacccaggctggagtgcagaggcatgatcatagctcactgcagcctcaaaaccc

SEQ ID NO: 122421 - DNA, 80 bp, synthetic construct
  misc_feature 1..80: note = Artificially Synthesized Probe
  source 1..80: mol_type = other DNA
caaaatacacagtatgtatgagcataaggcaagactggccatgaattgataactttaatctgggtgctggttacatgggg

SEQ ID NO: 122422 - DNA, 80 bp, synthetic construct
  misc_feature 1..80: note = Artificially Synthesized Probe
  source 1..80: mol_type = other DNA
tgtaaagagggaaaataaaaaaggaaatggttgtaacaaacgtagccacctaaagccaggaaggacagggccagtaccat

SEQ ID NO: 122423 - DNA, 80 bp, synthetic construct; identical to SEQ ID NO: 39531
  misc_feature 1..80: note = Artificially Synthesized Probe
  source 1..80: mol_type = other DNA

SEQ ID NO: 122424 - DNA, 80 bp, synthetic construct
  misc_feature 1..80: note = Artificially Synthesized Probe
  source 1..80: mol_type = other DNA
caatttgaacactacaagccacagaaaatgatcagtttatggaactaagtccgacttccaggtaaaacgtaactatggta

SEQ ID NO: 122425 - DNA, 80 bp, synthetic construct
  misc_feature 1..80: note = Artificially Synthesized Probe
  source 1..80: mol_type = other DNA
acaattctgggttagccaaagtcaaatttccaacacaactctttctcacgcacagatctttgaaactatagaatgcattc

SEQ ID NO: 122426 - DNA, 80 bp, synthetic construct
  misc_feature 1..80: note = Artificially Synthesized Probe
  source 1..80: mol_type = other DNA
ccataggtatcttgaggataactgaaccttttcctaacttaaatcatagactgccagacggaaaaaaaatgtcctcgatg

SEQ ID NO: 122427 - DNA, 80 bp, synthetic construct; identical to SEQ ID NO: 39532
  misc_feature 1..80: note = Artificially Synthesized Probe
  source 1..80: mol_type = other DNA

SEQ ID NO: 122428 - DNA, 80 bp, synthetic construct
  misc_feature 1..80: note = Artificially Synthesized Probe
  source 1..80: mol_type = other DNA
ttcgttcttccactgggtcccttgctcagcactacccaaaataaccaccagctcagcgccggctgcaccgccgctccccc

SEQ ID NO: 122429 - DNA, 80 bp, synthetic construct
  misc_feature 1..80: note = Artificially Synthesized Probe
  source 1..80: mol_type = other DNA
gtcccctcgcgcctgagcagctccggtcccgccggcgcagggtgcgggtacccgggccatgccggcccagagaccgccgc

SEQ ID NO: 122430 - DNA, 80 bp, synthetic construct
  misc_feature 1..80: note = Artificially Synthesized Probe
  source 1..80: mol_type = other DNA
gtgtactcgccacctggcagagaagggagcgccggcccgacagcccgaagcccccgggccgagctggctggaccgggcgg

SEQ ID NO: 122431 - DNA, 80 bp, synthetic construct; identical to SEQ ID NO: 39474
  misc_feature 1..80: note = Artificially Synthesized Probe
  source 1..80: mol_type = other DNA

SEQ ID NO: 122432 - DNA, 80 bp, synthetic construct
  misc_feature 1..80: note = Artificially Synthesized Probe
  source 1..80: mol_type = other DNA
ggaaatagtaacaggtaccgtgtcacttaaggaattagaaatggtagatgtggagaagaagtaggaacactatctgtcgg

SEQ ID NO: 122433 - DNA, 80 bp, synthetic construct
  misc_feature 1..80: note = Artificially Synthesized Probe
  source 1..80: mol_type = other DNA
cttgtgcctcagcctcctgagtagctgggactacaggcacctgccaccacaccggctaatttttgtatttttagtagaga

SEQ ID NO: 122434 - DNA, 80 bp, synthetic construct
  misc_feature 1..80: note = Artificially Synthesized Probe
  source 1..80: mol_type = other DNA
ttgacttagttcaattgttttgtctaaaatccaaaaactgttctttgaaaatatactttcccatccattaaggcatttag

SEQ ID NO: 122435 - DNA, 80 bp, synthetic construct; identical to SEQ ID NO: 39475
  misc_feature 1..80: note = Artificially Synthesized Probe
  source 1..80: mol_type = other DNA

SEQ ID NO: 122436 - DNA, 80 bp, synthetic construct
  misc_feature 1..80: note = Artificially Synthesized Probe
  source 1..80: mol_type = other DNA
cacctcccaggttcaagtgattctcctacctcagcctcctgagtatctgggattacaggcgcccgtcaccacgcccagct

SEQ ID NO: 122437 - DNA, 80 bp, synthetic construct
  misc_feature 1..80: note = Artificially Synthesized Probe
  source 1..80: mol_type = other DNA
cctgagtagcggggactacaggcatccaccatcatgctgggctagttttgtatttttagtagagccggtgtctcaccatg

SEQ ID NO: 122438 - DNA, 80 bp, synthetic construct
  misc_feature 1..80: note = Artificially Synthesized Probe
  source 1..80: mol_type = other DNA
ctgctccaggttgtgttcttgtgaaattttatgtctaaataaaatgtcttattgcaatgggattttatattcagctggtg

SEQ ID NO: 122439 - DNA, 80 bp, synthetic construct; identical to SEQ ID NO: 39476
  misc_feature 1..80: note = Artificially Synthesized Probe
  source 1..80: mol_type = other DNA

SEQ ID NO: 122440 - DNA, 80 bp, synthetic construct
  misc_feature 1..80: note = Artificially Synthesized Probe
  source 1..80: mol_type = other DNA
cggcagccgccccgtctgagaagtgaggagcccctctgcccggcagccaccccgtctgggaagtgaggagcgtctccgcc

SEQ ID NO: 122441 - DNA, 80 bp, synthetic construct
  misc_feature 1..80: note = Artificially Synthesized Probe
  source 1..80: mol_type = other DNA
gtccgggaggtgaggggagcctctgcccggccgcccctactgggaagtgaggagccctgctgcccggccagccgccccgt

SEQ ID NO: 122442 - DNA, 80 bp, synthetic construct
  misc_feature 1..80: note = Artificially Synthesized Probe
  source 1..80: mol_type = other DNA
cccggccagccgctccgtccgggagggaggtgggggggtcagccccctgcccggccagccgccccgtccgggaggtgagg

SEQ ID NO: 122443 - DNA, 80 bp, synthetic construct; identical to SEQ ID NO: 39477
  misc_feature 1..80: note = Artificially Synthesized Probe
  source 1..80: mol_type = other DNA

SEQ ID NO: 122444 - DNA, 80 bp, synthetic construct
  misc_feature 1..80: note = Artificially Synthesized Probe
  source 1..80: mol_type = other DNA
actccctaatctcaagtacccagggacacaaacactgcggaacgccgcagggtcctctgcctaggaaaaccagagacctt

SEQ ID NO: 122445 - DNA, 80 bp, synthetic construct
  misc_feature 1..80: note = Artificially Synthesized Probe
  source 1..80: mol_type = other DNA
gtggctcacgcttgtaatcccagcactttgggaggccgaggcgggtggatcacgaggtcaggagatcgagaccatgctgg

SEQ ID NO: 122446 - DNA, 80 bp, synthetic construct
  misc_feature 1..80: note = Artificially Synthesized Probe
  source 1..80: mol_type = other DNA
cagcctggccgacagagcgagactccgtctcaaaaaaaaaaaaaaaaaaattacatacaggaacacagccatggaaataa

SEQ ID NO: 122447 - DNA, 80 bp, synthetic construct
  misc_feature 1..80: note = Artificially Synthesized Probe
  source 1..80: mol_type = other DNA
ataatgaagtaaaattacctataattcttccccatagagatgatcaacattaacattttcataaatatcctatttttttc

SEQ ID NO: 122448 - DNA, 80 bp, synthetic construct
  misc_feature 1..80: note = Artificially Synthesized Probe
  source 1..80: mol_type = other DNA
catgccagccaatattcctctgtgctgggaagggaaagtttgaggatgtatcaagaccatagcagtggatctcactgctc

SEQ ID NO: 122449 - DNA, 80 bp, synthetic construct; identical to SEQ ID NO: 39478
  misc_feature 1..80: note = Artificially Synthesized Probe
  source 1..80: mol_type = other DNA

SEQ ID NO: 122450 - DNA, 80 bp, synthetic construct
  misc_feature 1..80: note = Artificially Synthesized Probe
  source 1..80: mol_type = other DNA
gagccatcctggggcctctggtccggctgctgggtgtccatggcccctggctgcccttgctggtgtatgggacggtgcca

SEQ ID NO: 122451 - DNA, 80 bp, synthetic construct
  misc_feature 1..80: note = Artificially Synthesized Probe
  source 1..80: mol_type = other DNA
tcacccatccccatcacttgacagaggcggaagcagaggcccagacagataggattggcccagagtcacacagtacatct

SEQ ID NO: 122452 - DNA, 80 bp, synthetic construct
  misc_feature 1..80: note = Artificially Synthesized Probe
  source 1..80: mol_type = other DNA
agtcctttgtgagagggagatccagccattgttgggggccctcgcaggccccagattctacctctaaagccctgatggct

SEQ ID NO: 122453 - DNA, 80 bp, synthetic construct; identical to SEQ ID NO: 39544
  misc_feature 1..80: note = Artificially Synthesized Probe
  source 1..80: mol_type = other DNA

SEQ ID NO: 122454 - DNA, 80 bp, synthetic construct
  misc_feature 1..80: note = Artificially Synthesized Probe
  source 1..80: mol_type = other DNA
cctgcccctctcacagtccaaggggcccccttcaatactgaaggggaaaaggacagtttgattggcaggaggtgacccag

SEQ ID NO: 122455 - DNA, 80 bp, synthetic construct
  misc_feature 1..80: note = Artificially Synthesized Probe
  source 1..80: mol_type = other DNA
accatccatggtcaagacctctcctagctccacacaagcagtagagtctcagctccacagctttacccagaagccctgta

SEQ ID NO: 122456 - DNA, 80 bp, synthetic construct
  misc_feature 1..80: note = Artificially Synthesized Probe
  source 1..80: mol_type = other DNA
ctgagatgcccgtgaaactcctacccacagttacagccacaagcctgcctcctcccaccctgccagcctatgagttccca

SEQ ID NO: 122457 - DNA, 80 bp, synthetic construct; identical to SEQ ID NO: 39545
  misc_feature 1..80: note = Artificially Synthesized Probe
  source 1..80: mol_type = other DNA

SEQ ID NO: 122458 - DNA, 80 bp, synthetic construct
  misc_feature 1..80: note = Artificially Synthesized Probe
  source 1..80: mol_type = other DNA
acggccaccagctggagcgaggccgacacggagccgtgtgtggatggctgggtctatgaccgcagcatcttcacctccac

SEQ ID NO: 122459 - DNA, 80 bp, synthetic construct
  misc_feature 1..80: note = Artificially Synthesized Probe
  source 1..80: mol_type = other DNA
acacacagggaagtgggcggcagggatcagtctacaaatggggccagcccaggctcttggaggtgcggggggcacctggg

SEQ ID NO: 122460 - DNA, 80 bp, synthetic construct
  misc_feature 1..80: note = Artificially Synthesized Probe
  source 1..80: mol_type = other DNA
ccaggctgcctcccagatggggcgccaggcaaagccaggcaagcagagaggggcagctcatcccaacaagtgggaagaac

SEQ ID NO: 122461 - DNA, 80 bp, synthetic construct
  misc_feature 1..80: note = Artificially Synthesized Probe
  source 1..80: mol_type = other DNA
ggatatactcctcaaaaggccaaactatgcctgtgggtgccctcactgttccacagggtcttgctctaaaaccctagagg

SEQ ID NO: 122462 - DNA, 80 bp, synthetic construct
  misc_feature 1..80: note = Artificially Synthesized Probe
  source 1..80: mol_type = other DNA
ggcatagatttggggaggggacagagatctcagggtggcattgggcacaccgaacctggggagtctgtggggtgtctgtt

SEQ ID NO: 122463 - DNA, 80 bp, synthetic construct
  misc_feature 1..80: note = Artificially Synthesized Probe
  source 1..80: mol_type = other DNA
catctacctggctgggattctggtgggagctgctgcgtgcggccctgcctcagacaggtgagtacccccagtccaggcag

SEQ ID NO: 122464 - DNA, 80 bp, synthetic construct; identical to SEQ ID NO: 39535
  misc_feature 1..80: note = Artificially Synthesized Probe
  source 1..80: mol_type = other DNA

SEQ ID NO: 122465 - DNA, 80 bp, synthetic construct
  misc_feature 1..80: note = Artificially Synthesized Probe
  source 1..80: mol_type = other DNA
cacagagacttgcacagctgccccagccccaaattagggggatcccctggcccaccttctcttggctcagccactctggg

SEQ ID NO: 122466 - DNA, 80 bp, synthetic construct
  misc_feature 1..80: note = Artificially Synthesized Probe
  source 1..80: mol_type = other DNA
tcagcgggcaagcatagggtgggctctaggtgttccagagccccgtggcctgtgccgtggcaagccacagaccctgcctc

SEQ ID NO: 122467 - DNA, 80 bp, synthetic construct
  misc_feature 1..80: note = Artificially Synthesized Probe
  source 1..80: mol_type = other DNA
tcatgatgaacacgggcactctccgtaggtctctgacctggcgccatgcaggggggctccatgcaggctccagggctgaa

SEQ ID NO: 122468 - DNA, 80 bp, synthetic construct
  misc_feature 1..80: note = Artificially Synthesized Probe
  source 1..80: mol_type = other DNA
ccttcttcctctgctttttgtactcctggtgggtgctgtgccccactcccctcctcagaggagatcctgcccactctcca

SEQ ID NO: 122469 - DNA, 80 bp, synthetic construct; identical to SEQ ID NO: 39536
  misc_feature 1..80: note = Artificially Synthesized Probe
  source 1..80: mol_type = other DNA

SEQ ID NO: 122470 - DNA, 80 bp, synthetic construct
  misc_feature 1..80: note = Artificially Synthesized Probe
  source 1..80: mol_type = other DNA
ctgacagaatcaatgcttgtgtctgtctgctggaagacagggaccaggatccactcatcagaggggagtccacagtcccc

SEQ ID NO: 122471 - DNA, 80 bp, synthetic construct
  misc_feature 1..80: note = Artificially Synthesized Probe
  source 1..80: mol_type = other DNA
aggtaggtagatagatagagacagataaataaatgggttgacagatgtgtggattggatgagtggatgggtgagttggtg

SEQ ID NO: 122472 - DNA, 80 bp, synthetic construct; identical to SEQ ID NO: 39537
  misc_feature 1..80: note = Artificially Synthesized Probe
  source 1..80: mol_type = other DNA

SEQ ID NO: 122473 - DNA, 80 bp, synthetic construct
  misc_feature 1..80: note = Artificially Synthesized Probe
  source 1..80: mol_type = other DNA
tggatggatgggtggatggatggatggatggatggatggatggatggttggaatagatggatggatggatgggtggatgg

SEQ ID NO: 122474 - DNA, 80 bp, synthetic construct
  misc_feature 1..80: note = Artificially Synthesized Probe
  source 1..80: mol_type = other DNA
tggaatagatggatggatggatggatggatggatggatggatggatggaatggatggatggatggatggatggttgaatg

SEQ ID NO: 122475 - DNA, 80 bp, synthetic construct
  misc_feature 1..80: note = Artificially Synthesized Probe
  source 1..80: mol_type = other DNA
gatggatggaatggatggatgtttggaatagatggatggatggatggaatggatggatggatggttggaatgaatggatg

SEQ ID NO: 122476 - DNA, 80 bp, synthetic construct; identical to SEQ ID NO: 39533
  misc_feature 1..80: note = Artificially Synthesized Probe
  source 1..80: mol_type = other DNA

SEQ ID NO: 122477 - DNA, 80 bp, synthetic construct; identical to SEQ ID NO: 39538
  misc_feature 1..80: note = Artificially Synthesized Probe
  source 1..80: mol_type = other DNA

SEQ ID NO: 122478 - DNA, 80 bp, synthetic construct
  misc_feature 1..80: note = Artificially Synthesized Probe
  source 1..80: mol_type = other DNA
tggaaaagatggatggatggatggatggatggatggatggatggatggatggaatggatggatggttggaatagatggaa

SEQ ID NO: 122479 - DNA, 80 bp, synthetic construct
  misc_feature 1..80: note = Artificially Synthesized Probe
  source 1..80: mol_type = other DNA
tggatggattgatggatagttggaatagatggaatggatggatggatggatggtcgaatggatagttgaatggatggatg

SEQ ID NO: 122480 - DNA, 80 bp, synthetic construct
  misc_feature 1..80: note = Artificially Synthesized Probe
  source 1..80: mol_type = other DNA
tggatggttggatggatggttgaatggatggataggtggattaattggatgaactggatggatgaatggatagatggatg

SEQ ID NO: 122481 - DNA, 80 bp, synthetic construct; identical to SEQ ID NO: 39539
  misc_feature 1..80: note = Artificially Synthesized Probe
  source 1..80: mol_type = other DNA

SEQ ID NO: 122482 - DNA, 80 bp, synthetic construct
  misc_feature 1..80: note = Artificially Synthesized Probe
  source 1..80: mol_type = other DNA
ccacagagctgcacccccctttccttggtagacgtgctcccacagggctgaagaagtgcccattcattcattcattactt

SEQ ID NO: 122483 - DNA, 80 bp, synthetic construct
  misc_feature 1..80: note = Artificially Synthesized Probe
  source 1..80: mol_type = other DNA
acaacctggggtattgacatctgagaatgggaccccgctttctccctcccagtcacttacaacacattccagtcagcttt

SEQ ID NO: 122484 - DNA, 80 bp, synthetic construct
  misc_feature 1..80: note = Artificially Synthesized Probe
  source 1..80: mol_type = other DNA
cccaaatctccacttggtcctgcctcccccactgacctccagccttacacctccaactgcccacgtgacggttccattat

SEQ ID NO: 122485 - DNA, 80 bp, synthetic construct; identical to SEQ ID NO: 39540
  misc_feature 1..80: note = Artificially Synthesized Probe
  source 1..80: mol_type = other DNA

SEQ ID NO: 122486 - DNA, 80 bp, synthetic construct
  misc_feature 1..80: note = Artificially Synthesized Probe
  source 1..80: mol_type = other DNA
gtgtggcataagctcggtttgacactgagggtagtgggagacaggtcagtgtgaggggctgggtcctgccacaaggaggg

SEQ ID NO: 122487 - DNA, 80 bp, synthetic construct
  misc_feature 1..80: note = Artificially Synthesized Probe
  source 1..80: mol_type = other DNA
gtttgcaggaggaagatgcagccatggggtggacaggaaggccatgtggtatgggaggtgccaggacaggggtggacccc

SEQ ID NO: 122488 - DNA, 80 bp, synthetic construct
  misc_feature 1..80: note = Artificially Synthesized Probe
  source 1..80: mol_type = other DNA
atgaccagagagcctgagcctccggccccgagtctgtgaagcctagccgctgggctggagaagccactgtgggcaccacc

SEQ ID NO: 122489 - DNA, 80 bp, synthetic construct
  misc_feature 1..80: note = Artificially Synthesized Probe
  source 1..80: mol_type = other DNA
tcatccctccctccatcccagcagccagccccaggatgagaacagcatcccaaccacaatccctaggagggagaaaggca

SEQ ID NO: 122490 - DNA, 80 bp, synthetic construct
  misc_feature 1..80: note = Artificially Synthesized Probe
  source 1..80: mol_type = other DNA
gccacaggcaatgacccctcccacgccccctccacttaaggtggctggcagagtcggcacgatggctcctcaccacaggc

SEQ ID NO: 122491 - DNA, 80 bp, synthetic construct; identical to SEQ ID NO: 39541
  misc_feature 1..80: note = Artificially Synthesized Probe
  source 1..80: mol_type = other DNA

SEQ ID NO: 122492 - DNA, 80 bp, synthetic construct
  misc_feature 1..80: note = Artificially Synthesized Probe
  source 1..80: mol_type = other DNA
cccccaaccccacctccacaggggaacctggaatcggggctctcgctggcacacggccccggcctctgctggctccgctt

SEQ ID NO: 122493 - DNA, 80 bp, synthetic construct
  misc_feature 1..80: note = Artificially Synthesized Probe
  source 1..80: mol_type = other DNA
ctgggagggctgggagccaggcatgacgaaggggtgatccaggcaacagcatgggccgcaagcacccctgcctggtgtgg

SEQ ID NO: 122494 - DNA, 80 bp, synthetic construct; identical to SEQ ID NO: 39542
  misc_feature 1..80: note = Artificially Synthesized Probe
  source 1..80: mol_type = other DNA

SEQ ID NO: 122495 - DNA, 80 bp, synthetic construct
  misc_feature 1..80: note = Artificially Synthesized Probe
  source 1..80: mol_type = other DNA
cccccccccaccccccacccccaccctgacttccctgacccctgccccaggttcgcctttggcttcaccttcttcggcct

SEQ ID NO: 122496 - DNA, 80 bp, synthetic construct
  misc_feature 1..80: note = Artificially Synthesized Probe
  source 1..80: mol_type = other DNA
gctctgcattctggccaacacgctggtgccccacggtgagggggcaaagctgtacaccagagacttccctaccttggggg

SEQ ID NO: 122497 - DNA, 80 bp, synthetic construct
  misc_feature 1..80: note = Artificially Synthesized Probe
  source 1..80: mol_type = other DNA
cagggaaaagtgtggagttaaaatgagaactaagtgatggattgcaggaggagggaaacggggtcaagaaggactcctcg

SEQ ID NO: 122498 - DNA, 80 bp, synthetic construct
  misc_feature 1..80: note = Artificially Synthesized Probe
  source 1..80: mol_type = other DNA
atctgatcttgggccccccaccaagctcactaatcccatctctacccacagaaatgggggctctgcgctcagccttggcc

SEQ ID NO: 122499 - DNA, 80 bp, synthetic construct; identical to SEQ ID NO: 39534
  misc_feature 1..80: note = Artificially Synthesized Probe
  source 1..80: mol_type = other DNA

SEQ ID NO: 122500 - DNA, 80 bp, synthetic construct; identical to SEQ ID NO: 39543
  misc_feature 1..80: note = Artificially Synthesized Probe
  source 1..80: mol_type = other DNA

SEQ ID NO: 122501 - DNA, 80 bp, synthetic construct
  misc_feature 1..80: note = Artificially Synthesized Probe
  source 1..80: mol_type = other DNA
tggacagcaaactgatttcaaaccactccttttcaaagatctctgagggagacattgcacctggccactgcagcccagag

SEQ ID NO: 122502 - DNA, 80 bp, synthetic construct; identical to SEQ ID NO: 39547
  misc_feature 1..80: note = Artificially Synthesized Probe
  source 1..80: mol_type = other DNA

SEQ ID NO: 122503 - DNA, 80 bp, synthetic construct
  misc_feature 1..80: note = Artificially Synthesized Probe
  source 1..80: mol_type = other DNA
ctcctcttcagacccggaagggctgcggagcttgttgggacagatgagcaggctgggcggtgcactgggcactgctgtcc

SEQ ID NO: 122504 - DNA, 80 bp, synthetic construct
  misc_feature 1..80: note = Artificially Synthesized Probe
  source 1..80: mol_type = other DNA
actgtgctggtcaacgcggtgtcgggcgtgctcatggccttctcgcccaactacatgtccatgctgctcttccgcctgct

SEQ ID NO: 122505 - DNA, 80 bp, synthetic construct; identical to SEQ ID NO: 39557
  misc_feature 1..80: note = Artificially Synthesized Probe
  source 1..80: mol_type = other DNA

SEQ ID NO: 122506 - DNA, 80 bp, synthetic construct
  misc_feature 1..80: note = Artificially Synthesized Probe
  source 1..80: mol_type = other DNA
ttgacgggcttgaatggcactcaagaattaggaaagaaaacaggagcaaataaaataaggattgtgaaaatcaggatttt

SEQ ID NO: 122507 - DNA, 80 bp, synthetic construct
  misc_feature 1..80: note = Artificially Synthesized Probe
  source 1..80: mol_type = other DNA
gcagtgaggatgagccacacttttactcatttgtgggggagaaaaaagaaatagcctgtcttttcatctttgaaaacaag

SEQ ID NO: 122508 - DNA, 80 bp, synthetic construct
  misc_feature 1..80: note = Artificially Synthesized Probe
  source 1..80: mol_type = other DNA
gtttggggggtctgacccggggccacatccacgctccaacaccacccgcagcccctccacccacgactcccctgacttcc

SEQ ID NO: 122509 - DNA, 80 bp, synthetic construct; identical to SEQ ID NO: 39558
  misc_feature 1..80: note = Artificially Synthesized Probe
  source 1..80: mol_type = other DNA

SEQ ID NO: 122510 - DNA, 80 bp, synthetic construct
  misc_feature 1..80: note = Artificially Synthesized Probe
  source 1..80: mol_type = other DNA
atgggtccggggccccggtttgatgggtccggggccccagagagaaggggaggcgtgagcgcggctgtggtttgcgggaa

SEQ ID NO: 122511 - DNA, 80 bp, synthetic construct
  misc_feature 1..80: note = Artificially Synthesized Probe
  source 1..80: mol_type = other DNA
cacacctcctgtttcagtcacagaatttgttggctcgggctccagaagaacggtggcgatcatgtaccagatggccttca

SEQ ID NO: 122512 - DNA, 80 bp, synthetic construct; identical to SEQ ID NO: 39559
  misc_feature 1..80: note = Artificially Synthesized Probe
  source 1..80: mol_type = other DNA

SEQ ID NO: 122513 - DNA, 80 bp, synthetic construct
  misc_feature 1..80: note = Artificially Synthesized Probe
  source 1..80: mol_type = other DNA
gctttgagaatcctttagtaaaaagtgtcaccacatttttttcccatcatgagcccttttgaaactattgcacggtaaca

SEQ ID NO: 122514 - DNA, 80 bp, synthetic construct
  misc_feature 1..80: note = Artificially Synthesized Probe
  source 1..80: mol_type = other DNA
tttcccacacgcatgacgcatagggatgagctggtcccggggtttcccacacgcatgatgcatagggatgaggggagcct

SEQ ID NO: 122515 - DNA, 80 bp, synthetic construct
  misc_feature 1..80: note = Artificially Synthesized Probe
  source 1..80: mol_type = other DNA
cagagcctggggtttcccacacgcatatcgcatggggctgcgtggagccagcgcttcccaccgcttgtactgttcaggtt

SEQ ID NO: 122516 - DNA, 80 bp, synthetic construct
  misc_feature 1..80: note = Artificially Synthesized Probe
  source 1..80: mol_type = other DNA
ctgaacctcactcccgggtgaaggaggcagctttttgagggttgctcagtggccttgggaaatctgtatcagcgtccagt

SEQ ID NO: 122517 - DNA, 80 bp, synthetic construct
  misc_feature 1..80: note = Artificially Synthesized Probe
  source 1..80: mol_type = other DNA
ctgctcttctcccacttcttcatttttatagtactattggtattattattaagacactgaaatacctctcatctagccat

SEQ ID NO: 122518 - DNA, 80 bp, synthetic construct; identical to SEQ ID NO: 39560
  misc_feature 1..80: note = Artificially Synthesized Probe
  source 1..80: mol_type = other DNA

SEQ ID NO: 122519 - DNA, 80 bp, synthetic construct
  misc_feature 1..80: note = Artificially Synthesized Probe
  source 1..80: mol_type = other DNA
agttctgaggagcctgcccttcccctgcctcgtccttgtgaaacagggatctctccagcagaaaggcaaattctgcatgc

SEQ ID NO: 122520 - DNA, 80 bp, synthetic construct
  misc_feature 1..80: note = Artificially Synthesized Probe
  source 1..80: mol_type = other DNA
aatattttgagaagtgttcaacagcccttgtattgcctggagatgtcctggtgtcatcgggtaatatacatggagcatct

SEQ ID NO: 122521 - DNA, 80 bp, synthetic construct
  misc_feature 1..80: note = Artificially Synthesized Probe
  source 1..80: mol_type = other DNA
ccacatgggctagcgcacagtgaccccaggtcctcatcctcttgagggattacagccccaacgtggggagggcaggctgc

SEQ ID NO: 122522 - DNA, 80 bp, synthetic construct; identical to SEQ ID NO: 39561
  misc_feature 1..80: note = Artificially Synthesized Probe
  source 1..80: mol_type = other DNA

SEQ ID NO: 122523 - DNA, 80 bp, synthetic construct
  misc_feature 1..80: note = Artificially Synthesized Probe
  source 1..80: mol_type = other DNA
ctagatgctttccctcgaagaggatgtcaccgaaaagctgagcccttcatttgcagacctgttccgcacgccgcgcctga

SEQ ID NO: 122524 - DNA, 80 bp, synthetic construct
  misc_feature 1..80: note = Artificially Synthesized Probe
  source 1..80: mol_type = other DNA
ccactaccctcgcccaagctctccggacttcttgggtctctgttcttcctcttttccctttcctgagtggtatcagcggt

SEQ ID NO: 122525 - DNA, 80 bp, synthetic construct
  misc_feature 1..80: note = Artificially Synthesized Probe
  source 1..80: mol_type = other DNA
tgagtggtcaaagagctctttttgtttctcccttggggattgaataataaggaaaaggcttcattttagtgaggagcatt

SEQ ID NO: 122526 - DNA, 80 bp, synthetic construct; identical to SEQ ID NO: 39562
  misc_feature 1..80: note = Artificially Synthesized Probe
  source 1..80: mol_type = other DNA

SEQ ID NO: 122527 - DNA, 80 bp, synthetic construct
  misc_feature 1..80: note = Artificially Synthesized Probe
  source 1..80: mol_type = other DNA
aactgcactctgggcctggccccttcagcgggagcagctccgctacccaggcacacttgtttgctcttctatgtgaggtt

SEQ ID NO: 122528 - DNA, 80 bp, synthetic construct
  misc_feature 1..80: note = Artificially Synthesized Probe
  source 1..80: mol_type = other DNA
ttgccgctggggtcctgcacccagccacatgctgggcccgtgaacctttgcaaatagccccatgtacctggtgggtttcc

SEQ ID NO: 122529 - DNA, 80 bp, synthetic construct
  misc_feature 1..80: note = Artificially Synthesized Probe
  source 1..80: mol_type = other DNA
cctctggcaagttccatcaactggcttggaaatgccttcagaacctgctgcctcccatcttgggcaccctgggttccctt

SEQ ID NO: 122530 - DNA, 80 bp, synthetic construct
  misc_feature 1..80: note = Artificially Synthesized Probe
  source 1..80: mol_type = other DNA
aaggcatcccttagagctcaacagaccttgtctctccctgtttaccctctgctggcttcctaatcactgagaataaagcc

SEQ ID NO: 122531 - DNA, 80 bp, synthetic construct; identical to SEQ ID NO: 39563
  misc_feature 1..80: note = Artificially Synthesized Probe
  source 1..80: mol_type = other DNA

SEQ ID NO: 122532 - DNA, 80 bp, synthetic construct
  misc_feature 1..80: note = Artificially Synthesized Probe
  source 1..80: mol_type = other DNA
ctttctcttaaaccagtttctttatcagtaatatgactgctgtctttaactggctaaatggtacagaggcactcaggcta

SEQ ID NO: 122533 - DNA, 80 bp, synthetic construct
  misc_feature 1..80: note = Artificially Synthesized Probe
  source 1..80: mol_type = other DNA
tatcaaagaaggatacattccttagcaacatgcattttcatctcagttttggagctgataggcaatctgcatgctgggat

SEQ ID NO: 122534 - DNA, 80 bp, synthetic construct
  misc_feature 1..80: note = Artificially Synthesized Probe
  source 1..80: mol_type = other DNA
tgccatatgctgtaatgttgctacattttctcaaatatggacggagggggtgtgcagtgaatggaagagcgtaggtgaat

SEQ ID NO: 122535 - DNA, 80 bp, synthetic construct
  misc_feature 1..80: note = Artificially Synthesized Probe
  source 1..80: mol_type = other DNA
gacaagttaggcagcccaccttccagggatctccaaccatctgacattcccactgggaatctagaagcagaccaggatga

SEQ ID NO: 122536 - DNA, 80 bp, synthetic construct; identical to SEQ ID NO: 39564
  misc_feature 1..80: note = Artificially Synthesized Probe
  source 1..80: mol_type = other DNA

SEQ ID NO: 122537 - DNA, 80 bp, synthetic construct
  misc_feature 1..80: note = Artificially Synthesized Probe
  source 1..80: mol_type = other DNA
aggttagttaacttcctcaaggtgacacagctcataaagcaatccgacacctggccccttacttcctggtctctcctgcc

SEQ ID NO: 122538 - DNA, 80 bp, synthetic construct
  misc_feature 1..80: note = Artificially Synthesized Probe
  source 1..80: mol_type = other DNA
atgaaaaaaatgtatcattggggcccttctaggacactctttctcatttttactcccctcttctcatattgctctagggc

SEQ ID NO: 122539 - DNA, 80 bp, synthetic construct
  misc_feature 1..80: note = Artificially Synthesized Probe
  source 1..80: mol_type = other DNA
ccaccagcgggaacctctacctggatttcctttactccgctctggtcgaaatcccgggggccttcatagccctcatcacc

SEQ ID NO: 122540 - DNA, 80 bp, synthetic construct; identical to SEQ ID NO: 39565
  misc_feature 1..80: note = Artificially Synthesized Probe
  source 1..80: mol_type = other DNA

SEQ ID NO: 122541 - DNA, 80 bp, synthetic construct
  misc_feature 1..80: note = Artificially Synthesized Probe
  source 1..80: mol_type = other DNA
cagctacttgggaggctgcttgaacccaggaggcggaggttgcagtgagccgagatcgcacactccagcttgggagacag

SEQ ID NO: 122542 - DNA, 80 bp, synthetic construct
  misc_feature 1..80: note = Artificially Synthesized Probe
  source 1..80: mol_type = other DNA
gcatgatccacgtaaagatggggaacctttccaacttctccaaagcctccctcaggctccttcacaacaacccctgccac

SEQ ID NO: 122543 - DNA, 80 bp, synthetic construct
  misc_feature 1..80: note = Artificially Synthesized Probe
  source 1..80: mol_type = other DNA
aatcacagctcactgcaaccttgaactcttgggctcaagggatcctcccgcctcagcctcctcagtagctgggactacag

SEQ ID NO: 122544 - DNA, 80 bp, synthetic construct; identical to SEQ ID NO: 39566
  misc_feature 1..80: note = Artificially Synthesized Probe
  source 1..80: mol_type = other DNA

SEQ ID NO: 122545 - DNA, 80 bp, synthetic construct
  misc_feature 1..80: note = Artificially Synthesized Probe
  source 1..80: mol_type = other DNA
tgttgcttccaatgtttgccacttattgggactaaaatcatccttgcacgtatctttgggcaggcacatgctttcatttc

SEQ ID NO: 122546 - DNA, 80 bp, synthetic construct
  misc_feature 1..80: note = Artificially Synthesized Probe
  source 1..80: mol_type = other DNA
gatctggctcatctttttaagagtggccattttggtggatgtatactttagtctgtaattcttacaatcaaagataaacc

SEQ ID NO: 122547 - DNA, 80 bp, synthetic construct; identical to SEQ ID NO: 39548
  misc_feature 1..80: note = Artificially Synthesized Probe
  source 1..80: mol_type = other DNA

SEQ ID NO: 122548 - DNA, 80 bp, synthetic construct; identical to SEQ ID NO: 39567
  misc_feature 1..80: note = Artificially Synthesized Probe
  source 1..80: mol_type = other DNA

SEQ ID NO: 122549 - DNA, 80 bp, synthetic construct
  misc_feature 1..80: note = Artificially Synthesized Probe
  source 1..80: mol_type = other DNA
gattttgctcactttcttcccaatctctctgtttctggaatcctgggtaagatgtgatggatgggcatacttttaaaaag

SEQ ID NO: 122550 - DNA, 80 bp, synthetic construct
  misc_feature 1..80: note = Artificially Synthesized Probe
  source 1..80: mol_type = other DNA
tcattcattcaacccgcaggaaatatctccaggccttctatatggctggcaggtatctaggtcctaggatttcaaccatg

SEQ ID NO: 122551 - DNA, 80 bp, synthetic construct
  misc_feature 1..80: note = Artificially Synthesized Probe
  source 1..80: mol_type = other DNA
ggcccttggggtgagaagaatgtggcattggagggactgctcgggatctagggacaagggtcaggcgagctcgtggggag

SEQ ID NO: 122552 - DNA, 80 bp, synthetic construct
  misc_feature 1..80: note = Artificially Synthesized Probe
  source 1..80: mol_type = other DNA
cagagtggaggcatgttcagttctctgaggccagggatgctgtttacctctggtcaagcatcaccaggctaaagacctgt

SEQ ID NO: 122553 - DNA, 80 bp, synthetic construct; identical to SEQ ID NO: 39568
  misc_feature 1..80: note = Artificially Synthesized Probe
  source 1..80: mol_type = other DNA

SEQ ID NO: 122554 - DNA, 80 bp, synthetic construct
  misc_feature 1..80: note = Artificially Synthesized Probe
  source 1..80: mol_type = other DNA
ttaaggatctgagcttctttccaatgaagccaaattctttgatcattctcaatagggagagggctttctgggccttcagg

SEQ ID NO: 122555 - DNA, 80 bp, synthetic construct
  misc_feature 1..80: note = Artificially Synthesized Probe
  source 1..80: mol_type = other DNA
attgaggattagaaatctgttttgttagtttgagaactactactagagggattatgtttattgagtgctttctgtgtttc

SEQ ID NO: 122556 - DNA, 80 bp, synthetic construct; identical to SEQ ID NO: 39569
  misc_feature 1..80: note = Artificially Synthesized Probe
  source 1..80: mol_type = other DNA

SEQ ID NO: 122557 - DNA, 80 bp, synthetic construct
  misc_feature 1..80: note = Artificially Synthesized Probe
  source 1..80: mol_type = other DNA
gacctgcactggttaaacatcataatcatgtgtgttggccgaatgggaatcaccattgcaatacaaatgatctgcctggt

SEQ ID NO: 122558 - DNA, 80 bp, synthetic construct
  misc_feature 1..80: note = Artificially Synthesized Probe
  source 1..80: mol_type = other DNA
ttaagaaatcacgttcagagagatggggttaagcatcaagagagggtcaacccataattatagcagagaatgtgaaaggg

SEQ ID NO: 122559 - DNA, 80 bp, synthetic construct
  misc_feature 1..80: note = Artificially Synthesized Probe
  source 1..80: mol_type = other DNA
ggagaggggacaggtggagtagaggggaggggaagtagatccccagaccaaggggagagcttgagcctaggctcagggcc

SEQ ID NO: 122560 - DNA, 80 bp, synthetic construct
  misc_feature 1..80: note = Artificially Synthesized Probe
  source 1..80: mol_type = other DNA
tgacacttctgggcatcattttcttaaacagctgacatttgtatagtgatacgcgagtatttccatacatgtgattccct

SEQ ID NO: 122561 - DNA, 80 bp, synthetic construct
  misc_feature 1..80: note = Artificially Synthesized Probe
  source 1..80: mol_type = other DNA
acatcttcctgacctggaaccctgtggtttttccattatggcacattactgttctgtaaactgaggaacttttcaaaatt

SEQ ID NO: 122562 - DNA, 80 bp, synthetic construct; identical to SEQ ID NO: 39570
  misc_feature 1..80: note = Artificially Synthesized Probe
  source 1..80: mol_type = other DNA

SEQ ID NO: 122563 - DNA, 80 bp, synthetic construct
  misc_feature 1..80: note = Artificially Synthesized Probe
  source 1..80: mol_type = other DNA
tggacacttgggatgctccacttcttggctattgtgaataatactgctatggacatgaatgtacaaatatctcttcaaga

SEQ ID NO: 122564 - DNA, 80 bp, synthetic construct
  misc_feature 1..80: note = Artificially Synthesized Probe
  source 1..80: mol_type = other DNA
acatccttgccaacacttgttaatttctgttggtctttttgatagtagccatcctaatgggtttgaagtgttatctcatt

SEQ ID NO: 122565 - DNA, 80 bp, synthetic construct
  misc_feature 1..80: note = Artificially Synthesized Probe
  source 1..80: mol_type = other DNA
gagattaactctttatcaggtacaaaatctgcaaatatttcagcccattccataggttaccttttcattctgttgattgt

SEQ ID NO: 122566 - DNA, 80 bp, synthetic construct; identical to SEQ ID NO: 39571
  misc_feature 1..80: note = Artificially Synthesized Probe
  source 1..80: mol_type = other DNA

SEQ ID NO: 122567 - DNA, 80 bp, synthetic construct
  misc_feature 1..80: note = Artificially Synthesized Probe
  source 1..80: mol_type = other DNA
gcatgatgaaactcacccacttgttggatgtatcagtgttttgcttgttgttgctgtatagtactccagcatgtgaatgt

SEQ ID NO: 122568 - DNA, 80 bp, synthetic construct
  misc_feature 1..80: note = Artificially Synthesized Probe
  source 1..80: mol_type = other DNA
tgggtttcacacctgaccaccactgccagagtcctggggtggctgagctgagccagcgctgtggctggagccctgcggag

SEQ ID NO: 122569 - DNA, 80 bp, synthetic construct
  misc_feature 1..80: note = Artificially Synthesized Probe
  source 1..80: mol_type = other DNA
gggattgttaggtcatatggtaagtgtgtgtttaattctatgagaaactgtcagactgtcagaccgttttccgaagtggc

SEQ ID NO: 122570 - DNA, 80 bp, synthetic construct
  misc_feature 1..80: note = Artificially Synthesized Probe
  source 1..80: mol_type = other DNA
ggctggagtgcagtggcgtgatctcggctcactgcaacctctgcctcccaggttcaaacgattctcttgactcagccttt

SEQ ID NO: 122571 - DNA, 80 bp, synthetic construct
  misc_feature 1..80: note = Artificially Synthesized Probe
  source 1..80: mol_type = other DNA
acatttgaacttcagataatccaactggataggatacttacttcccagatactgcatgatatttggtactgataactgag

SEQ ID NO: 122572 - DNA, 80 bp, synthetic construct; identical to SEQ ID NO: 39572
  misc_feature 1..80: note = Artificially Synthesized Probe
  source 1..80: mol_type = other DNA

SEQ ID NO: 122573 - DNA, 80 bp, synthetic construct
  misc_feature 1..80: note = Artificially Synthesized Probe
  source 1..80: mol_type = other DNA
tctttttcctctgtatacattgtttcttctccttatgtcatcataccagtagtttctaggaaataccccagctccctaat

SEQ ID NO: 122574 - DNA, 80 bp, synthetic construct
  misc_feature 1..80: note = Artificially Synthesized Probe
  source 1..80: mol_type = other DNA
atattaaaaagaaaaccttctatatttggcagttctgagcccagagtctaaaatagccaggccaaacaattccattgtca

SEQ ID NO: 122575 - DNA, 80 bp, synthetic construct; identical to SEQ ID NO: 39573
  misc_feature 1..80: note = Artificially Synthesized Probe
  source 1..80: mol_type = other DNA

SEQ ID NO: 122576 - DNA, 80 bp, synthetic construct
  misc_feature 1..80: note = Artificially Synthesized Probe
  source 1..80: mol_type = other DNA
ttcactttgtgcagcacgtgttgtaagaacattcatttggcattaatacccactgccttgttttgaaaatgatctttcca

SEQ ID NO: 122577 - DNA, 80 bp, synthetic construct
  misc_feature 1..80: note = Artificially Synthesized Probe
  source 1..80: mol_type = other DNA
gggcctagttccctacttcttctagcttctgtgtgcttgccatttttttccttttaacaataattttttaaaaatagtaa

SEQ ID NO: 122578 - DNA, 80 bp, synthetic construct
  misc_feature 1..80: note = Artificially Synthesized Probe
  source 1..80: mol_type = other DNA
ttccaggaaaggacccctgtgacagcaaatcgtaggcgaggccagcagctttccaaagtagacagcgtgacttgaagggt

SEQ ID NO: 122579 - DNA, 80 bp, synthetic construct; identical to SEQ ID NO: 39574
  misc_feature 1..80: note = Artificially Synthesized Probe
  source 1..80: mol_type = other DNA

SEQ ID NO: 122580 - DNA, 80 bp, synthetic construct
  misc_feature 1..80: note = Artificially Synthesized Probe
  source 1..80: mol_type = other DNA
ataaagggggaaaggagcagaaaaagcaaaaggcaaatgaagaacatgtaccagaaaaatgctgtaacaacatagatcaa

SEQ ID NO: 122581 - DNA, 80 bp, synthetic construct
  misc_feature 1..80: note = Artificially Synthesized Probe
  source 1..80: mol_type = other DNA
aagaagtggagaaattcttgcatttgagaaatgaaaaaccaatttgaacacaatgcaaaggagaatagattcagtgaggg

SEQ ID NO: 122582 - DNA, 80 bp, synthetic construct
  misc_feature 1..80: note = Artificially Synthesized Probe
  source 1..80: mol_type = other DNA
aagcaaggtgaccctagctggactcgtgaatgggtgggaaggggcggtggtgggattggaggcttcaggagaggtagaga

SEQ ID NO: 122583 - DNA, 80 bp, synthetic construct
  misc_feature 1..80: note = Artificially Synthesized Probe
  source 1..80: mol_type = other DNA
ggtgaaaccctgtctctactaaaattacaaaaattaactgggcatggtagtgcatgcctatagtccaagctactcagcag

SEQ ID NO: 122584 - DNA, 80 bp, synthetic construct
  misc_feature 1..80: note = Artificially Synthesized Probe
  source 1..80: mol_type = other DNA
gcatgtatgtatgtatatagtccgtaaactttttggttaaaaaaaaaaaagatatatatatatacaccccctgcccacac

SEQ ID NO: 122585 - DNA, 80 bp, synthetic construct; identical to SEQ ID NO: 39575
  misc_feature 1..80: note = Artificially Synthesized Probe
  source 1..80: mol_type = other DNA

SEQ ID NO: 122586 - DNA, 80 bp, synthetic construct
  misc_feature 1..80: note = Artificially Synthesized Probe
  source 1..80: mol_type = other DNA
attctcctgcctcagcctcctgagtagctgggattacaggcgtccaccaccacgcccagctaattttggtatttttagga

SEQ ID NO: 122587 - DNA, 80 bp, synthetic construct
  misc_feature 1..80: note = Artificially Synthesized Probe
  source 1..80: mol_type = other DNA
ccaaccaagctctcatttctatatagaagcaatagccaatcatttaaaaatatctcaaataatatggttcctatgatcct

SEQ ID NO: 122588 - DNA, 80 bp, synthetic construct
  misc_feature 1..80: note = Artificially Synthesized Probe
  source 1..80: mol_type = other DNA
ataactcacaaagactgaaaagagaaaagagaaagaatgttggagatggtgtaatacactgatttcttcaatacacttgt

SEQ ID NO: 122589 - DNA, 80 bp, synthetic construct; identical to SEQ ID NO: 39576
  misc_feature 1..80: note = Artificially Synthesized Probe
  source 1..80: mol_type = other DNA

SEQ ID NO: 122590 - DNA, 80 bp, synthetic construct
  misc_feature 1..80: note = Artificially Synthesized Probe
  source 1..80: mol_type = other DNA
agccctggtgtgaataggtgatagaatatgaatagatgacagcattgatatgacagaactgacatggtagaattaagacg

SEQ ID NO: 122591 - DNA, 80 bp, synthetic construct
  misc_feature 1..80: note = Artificially Synthesized Probe
  source 1..80: mol_type = other DNA
agcatactagggaaatatatagcaagtgtcataatctaattaaagttgaatttatgggaaaaggtgctaaataagataag

SEQ ID NO: 122592 - DNA, 80 bp, synthetic construct; identical to SEQ ID NO: 39577
  misc_feature 1..80: note = Artificially Synthesized Probe
  source 1..80: mol_type = other DNA

SEQ ID NO: 122593 - DNA, 80 bp, synthetic construct
  misc_feature 1..80: note = Artificially Synthesized Probe
  source 1..80: mol_type = other DNA
gatactgaaaggcattcaataaaatttccacctctacgtttgttttaaaaatttctaagagatgatataagcatttttat

SEQ ID NO: 122594 - DNA, 80 bp, synthetic construct
  misc_feature 1..80: note = Artificially Synthesized Probe
  source 1..80: mol_type = other DNA
caaatggagcttctgaacgctgaactgggagccttggagaggcagccatgtgggcaggtagaggggcctggtaagagggg

SEQ ID NO: 122595 - DNA, 80 bp, synthetic construct
  misc_feature 1..80: note = Artificially Synthesized Probe
  source 1..80: mol_type = other DNA
tcctattttaatcatgttttcaaaacaaagctcaagattgtttctaggaatacaaaatcgagcatggaacaaagtgaaat

SEQ ID NO: 122596 - DNA, 80 bp, synthetic construct
  misc_feature 1..80: note = Artificially Synthesized Probe
  source 1..80: mol_type = other DNA
aattagtggacatgaacattagaacagttatgatacctatattctctatgtttaaggtcctagagtaaagattgagcatg

SEQ ID NO: 122597 - DNA, 80 bp, synthetic construct; identical to SEQ ID NO: 39578
  misc_feature 1..80: note = Artificially Synthesized Probe
  source 1..80: mol_type = other DNA

SEQ ID NO: 122598 - DNA, 80 bp, synthetic construct
  misc_feature 1..80: note = Artificially Synthesized Probe
  source 1..80: mol_type = other DNA
cttctttctacaaaatatacaaaaattagctgggtgtggtggtgcatgcatgtagtctcagctactatagaggctgaggt

SEQ ID NO: 122599 - DNA, 80 bp, synthetic construct
  misc_feature 1..80: note = Artificially Synthesized Probe
  source 1..80: mol_type = other DNA
gaacaaagataagaatgacagaaaatttctcattggaaatgatacaaacaagaaggtggtagaacatctttaaagtactg

SEQ ID NO: 122600 - DNA, 80 bp, synthetic construct
  misc_feature 1..80: note = Artificially Synthesized Probe
  source 1..80: mol_type = other DNA
ttttcaaacttacaaagtctgaaagaattaatcaccagcagacttatactacaggaaatattagtcttgaagatctttca

SEQ ID NO: 122601 - DNA, 80 bp, synthetic construct; identical to SEQ ID NO: 39579
  misc_feature 1..80: note = Artificially Synthesized Probe
  source 1..80: mol_type = other DNA

SEQ ID NO: 122602 - DNA, 80 bp, synthetic construct
  misc_feature 1..80: note = Artificially Synthesized Probe
  source 1..80: mol_type = other DNA
cccaggcgggagtgcagtggtgcgatcttggcttactgcaagctctacctcccaggttcacaccattctcctgcctcagc

SEQ ID NO: 122603 - DNA, 80 bp, synthetic construct
  misc_feature 1..80: note = Artificially Synthesized Probe
  source 1..80: mol_type = other DNA
tgctgggattacagccgtgagtcaccgcgcctggcctaaaaaaccttttaatcatgtaaaaaccatttctaactcaaagc

SEQ ID NO: 122604 - DNA, 80 bp, synthetic construct
  misc_feature 1..80: note = Artificially Synthesized Probe
  source 1..80: mol_type = other DNA
tctatgaatgttacaatattacttgaagttactgtgatcaaagagttaggttttctgtaaacctaaatcaaaaattaaaa

SEQ ID NO: 122605 - DNA, 80 bp, synthetic construct
  misc_feature 1..80: note = Artificially Synthesized Probe
  source 1..80: mol_type = other DNA
taatcacaagaaatataaatggtctagacactccagttaaaaggaagagattatcagattggacaaaaaagtgaaacaca

SEQ ID NO: 122606 - DNA, 80 bp, synthetic construct; identical to SEQ ID NO: 39549
  misc_feature 1..80: note = Artificially Synthesized Probe
  source 1..80: mol_type = other DNA

SEQ ID NO: 122607 - DNA, 80 bp, synthetic construct; identical to SEQ ID NO: 39580
  misc_feature 1..80: note = Artificially Synthesized Probe
  source 1..80: mol_type = other DNA

SEQ ID NO: 122608 - DNA, 80 bp, synthetic construct
  misc_feature 1..80: note = Artificially Synthesized Probe
  source 1..80: mol_type = other DNA
gctcatcttagcacagaccaaagcttgcagtcacaggaaaggagctctaagttagaatttcaatgattagtcttctcttt

SEQ ID NO: 122609 - DNA, 80 bp, synthetic construct
  misc_feature 1..80: note = Artificially Synthesized Probe
  source 1..80: mol_type = other DNA
cattcattgacccttaaccaatgaacgccagtggcagatccctcattctgattaggtctcctttcttccccatgtgcctc

SEQ ID NO: 122610 - DNA, 80 bp, synthetic construct
  misc_feature 1..80: note = Artificially Synthesized Probe
  source 1..80: mol_type = other DNA
tttcccacaggtgatgacaggtcatggacctagaacaggagtgaggtaaaattgaagtttagagcagggagcatgtgttc

SEQ ID NO: 122611 - DNA, 80 bp, synthetic construct; identical to SEQ ID NO: 39581
  misc_feature 1..80: note = Artificially Synthesized Probe
  source 1..80: mol_type = other DNA

SEQ ID NO: 122612 - DNA, 80 bp, synthetic construct
  misc_feature 1..80: note = Artificially Synthesized Probe
  source 1..80: mol_type = other DNA
acatttggaaaagtgaatcacagaattatcgtattttttgtcctttgtattttatcaggaacctcggagtgatggtgtgt

SEQ ID NO: 122613 - DNA, 80 bp, synthetic construct
  misc_feature 1..80: note = Artificially Synthesized Probe
  source 1..80: mol_type = other DNA
tgagtgtgagtactcagtcgtatttgttgagtgaagggaatgatatctctcagtgagtttacagaaggcaaggatgatgc

SEQ ID NO: 122614 - DNA, 80 bp, synthetic construct; identical to SEQ ID NO: 39582
  misc_feature 1..80: note = Artificially Synthesized Probe
  source 1..80: mol_type = other DNA

SEQ ID NO: 122615 - DNA, 80 bp, synthetic construct
  misc_feature 1..80: note = Artificially Synthesized Probe
  source 1..80: mol_type = other DNA
ccaaacctaggccagagaacttccaagaccctgcttacccacttgatagaagacaacagttgctggttgtttgcagagcc

SEQ ID NO: 122616 - DNA, 80 bp, synthetic construct
  misc_feature 1..80: note = Artificially Synthesized Probe
  source 1..80: mol_type = other DNA
gctctatagctaattctatgtgtatatgtaccccaacaacaaatccccaaatacttaaacatcagttactatggaacttt

SEQ ID NO: 122617 - DNA, 80 bp, synthetic construct
  misc_feature 1..80: note = Artificially Synthesized Probe
  source 1..80: mol_type = other DNA
ttgttggggaatcaatcttagttattcatttctgcagaactaatttttaacctagcattgccttggacattggaacttgc

SEQ ID NO: 122618 - DNA, 80 bp, synthetic construct
  misc_feature 1..80: note = Artificially Synthesized Probe
  source 1..80: mol_type = other DNA
atagtatctctcccatctgtgttgtctcttcctctctttggctggctgtgattatttctgtaaatgacattggctgtgct

SEQ ID NO: 122619 - DNA, 80 bp, synthetic construct
  misc_feature 1..80: note = Artificially Synthesized Probe
  source 1..80: mol_type = other DNA
cgaggcccatgagtctgacacgccctccaaaaggggcctaatatcactccacattctccatttcctctatcttaaaagtt

SEQ ID NO: 122620 - DNA, 80 bp, synthetic construct; identical to SEQ ID NO: 39583
  misc_feature 1..80: note = Artificially Synthesized Probe
  source 1..80: mol_type = other DNA

SEQ ID NO: 122621 - DNA, 80 bp, synthetic construct
  misc_feature 1..80: note = Artificially Synthesized Probe
  source 1..80: mol_type = other DNA
tgctggagtttcatattctagtcttagagcaataaaaaaggaaaggaaggaacagtgcttgatgaggtgatctctctcaa

SEQ ID NO: 122622 - DNA, 80 bp, synthetic construct
  misc_feature 1..80: note = Artificially Synthesized Probe
  source 1..80: mol_type = other DNA
agtaggccatgtgactttgggaatgtcattgaaccctatggagctttatttttcatttaatttccatgcctgcaaaatag

SEQ ID NO: 122623 - DNA, 80 bp, synthetic construct; identical to SEQ ID NO: 39584
  misc_feature 1..80: note = Artificially Synthesized Probe
  source 1..80: mol_type = other DNA

SEQ ID NO: 122624 - DNA, 80 bp, synthetic construct
  misc_feature 1..80: note = Artificially Synthesized Probe
  source 1..80: mol_type = other DNA
tttccttctttttgatcccaagtgttgtgttatctgatttaaagatatttcattctagtgtgttaacagccacttggttg

SEQ ID NO: 122625 - DNA, 80 bp, synthetic construct
  misc_feature 1..80: note = Artificially Synthesized Probe
  source 1..80: mol_type = other DNA
cctggctaatttattatttttagtacagacaggttttctccatgttggtcaggctggtctcgaactcctgacttcaggtg

SEQ ID NO: 122626 - DNA, 80 bp, synthetic construct
  misc_feature 1..80: note = Artificially Synthesized Probe
  source 1..80: mol_type = other DNA
accccctgtgcatccttggttcttgacagtactcttcacacgttataataattgtttatttcattgtctgtcttctctgc

SEQ ID NO: 122627 - DNA, 80 bp, synthetic construct; identical to SEQ ID NO: 39585
  misc_feature 1..80: note = Artificially Synthesized Probe
  source 1..80: mol_type = other DNA

SEQ ID NO: 122628 - DNA, 80 bp, synthetic construct
  misc_feature 1..80: note = Artificially Synthesized Probe
  source 1..80: mol_type = other DNA
cattggaaaagcagctatagacaatgcatgaaggaatggttgtgtctggataccagtaaaatgctatttatggatgttga

SEQ ID NO: 122629 - DNA, 80 bp, synthetic construct; identical to SEQ ID NO: 39551
  misc_feature 1..80: note = Artificially Synthesized Probe
  source 1..80: mol_type = other DNA

SEQ ID NO: 122630 - DNA, 80 bp, synthetic construct
  misc_feature 1..80: note = Artificially Synthesized Probe
  source 1..80: mol_type = other DNA
gctgtttgccatccttactttctctttgtcttgacacttattcatttctgtgtacaactttgcaacagttccatcatcaa

SEQ ID NO: 122631 - DNA, 80 bp, synthetic construct
  misc_feature 1..80: note = Artificially Synthesized Probe
  source 1..80: mol_type = other DNA
aagatggagttatcctctgcagaaattcctagacgccttcacttctctgtattcttcctcatacttgcctacccccaaat

SEQ ID NO: 122632 - DNA, 80 bp, synthetic construct
  misc_feature 1..80: note = Artificially Synthesized Probe
  source 1..80: mol_type = other DNA
atcatgaggtccactcggggaggatgtgggcattttcctggcttttgactctcccaacaagaggatctcctcttctgcta

SEQ ID NO: 122633 - DNA, 80 bp, synthetic construct
  misc_feature 1..80: note = Artificially Synthesized Probe
  source 1..80: mol_type = other DNA
gctaagatcacgaggtccactcgggggggatgtgggcattttcctggcttttgactctcccaacaagaggatctcctctg

SEQ ID NO: 122634 - DNA, 80 bp, synthetic construct
  misc_feature 1..80: note = Artificially Synthesized Probe
  source 1..80: mol_type = other DNA
tctggtgctaagatcatgaggtccactcgggggggatgtgggcattttcctggcttttgactctcccaacaagaggatct

SEQ ID NO: 122635 - DNA, 80 bp, synthetic construct; identical to SEQ ID NO: 39550
  misc_feature 1..80: note = Artificially Synthesized Probe
  source 1..80: mol_type = other DNA

SEQ ID NO: 122636 - DNA, 80 bp, synthetic construct
  misc_feature 1..80: note = Artificially Synthesized Probe
  source 1..80: mol_type = other DNA
caagaggatctcctctggtgctaagatcatgaggtccactggggagggatgtgggcagtttcctggcttttgactctccc

SEQ ID NO: 122637 - DNA, 80 bp, synthetic construct
  misc_feature 1..80: note = Artificially Synthesized Probe
  source 1..80: mol_type = other DNA
tcccaacaagaggatctcctctggtgctaagatcatgaggtccactcagggagggatgtgggcattttcctggcttttga

SEQ ID NO: 122638 - DNA, 80 bp, synthetic construct; identical to SEQ ID NO: 39546
  misc_feature 1..80: note = Artificially Synthesized Probe
  source 1..80: mol_type = other DNA

SEQ ID NO: 122639 - DNA, 80 bp, synthetic construct
  misc_feature 1..80: note = Artificially Synthesized Probe
  source 1..80: mol_type = other DNA
ttgactctcccaacaagaggatctcctctatcagtcttggtttcagccacagcccccacaccaggccagctgtcttccac

SEQ ID NO: 122640 - DNA, 80 bp, synthetic construct
  misc_feature 1..80: note = Artificially Synthesized Probe
  source 1..80: mol_type = other DNA
ctgaggcagaatacacagggaatctgtggttccaccaggaccctgtgtggttctcgtgatgaagcagtaggttgctttat

SEQ ID NO: 122641 - DNA, 80 bp, synthetic construct
  misc_feature 1..80: note = Artificially Synthesized Probe
  source 1..80: mol_type = other DNA
tactcatggttgggctggtgtttgggagcagaggaagcatggcaggtttacaagctttgcaggtggctctagaaactgat

SEQ ID NO: 122642 - DNA, 80 bp, synthetic construct; identical to SEQ ID NO: 39552
  misc_feature 1..80: note = Artificially Synthesized Probe
  source 1..80: mol_type = other DNA

SEQ ID NO: 122643 - DNA, 80 bp, synthetic construct
  misc_feature 1..80: note = Artificially Synthesized Probe
  source 1..80: mol_type = other DNA
aaaagaaccacagccaaaaagagttatacatcgggtgggtgacctgggaggcgctccatggagaagctgtgttttaagct

SEQ ID NO: 122644 - DNA, 80 bp, synthetic construct
  misc_feature 1..80: note = Artificially Synthesized Probe
  source 1..80: mol_type = other DNA
tcaggtggtaacacagagtttaacctatatttcagggaaaaaaaaaagtgctcatgtcaaggaactagtcagtccatcag

SEQ ID NO: 122645 - DNA, 80 bp, synthetic construct; identical to SEQ ID NO: 39553
  misc_feature 1..80: note = Artificially Synthesized Probe
  source 1..80: mol_type = other DNA

SEQ ID NO: 122646 - DNA, 80 bp, synthetic construct
  misc_feature 1..80: note = Artificially Synthesized Probe
  source 1..80: mol_type = other DNA
agatttgagggttggaagtgggggtaataaaacctgtttctaaaataaaagggtttattatttattaaagctatctgcat

SEQ ID NO: 122647 - DNA, 80 bp, synthetic construct
  misc_feature 1..80: note = Artificially Synthesized Probe
  source 1..80: mol_type = other DNA
acaaagcagtgtggagggacgggggcaggaaggatgtgtcgaccacccaggaggggctgtaccaggaactgaaagggtcg

SEQ ID NO: 122648 - DNA, 80 bp, synthetic construct
  misc_feature 1..80: note = Artificially Synthesized Probe
  source 1..80: mol_type = other DNA
ggatgtccctccactcctggttttcttccccaaggcctctaaacgcagggaatatctgccttctccaaaaacccaaacaa

SEQ ID NO: 122649 - DNA, 80 bp, synthetic construct
  misc_feature 1..80: note = Artificially Synthesized Probe
  source 1..80: mol_type = other DNA
ggggccaggttgccaggttgcttgaatgggagttgactgggagaccaggagcctctctgcctgccccactggcttctccc

SEQ ID NO: 122650 - DNA, 80 bp, synthetic construct; identical to SEQ ID NO: 39554
  misc_feature 1..80: note = Artificially Synthesized Probe
  source 1..80: mol_type = other DNA

SEQ ID NO: 122651 - DNA, 80 bp, synthetic construct
  misc_feature 1..80: note = Artificially Synthesized Probe
  source 1..80: mol_type = other DNA
ggaaaagagggcttggtcttgctgtcctggagggcagaggcagaaaaggtggaagaggtagaagaagagacaggcacact

SEQ ID NO: 122652 - DNA, 80 bp, synthetic construct
  misc_feature 1..80: note = Artificially Synthesized Probe
  source 1..80: mol_type = other DNA
tgtcttatgaaaatgtagtaggagaaaactctgtgaaacagcccagggataccgagtttgatgaactgcatttgctttgc

SEQ ID NO: 122653 - DNA, 80 bp, synthetic construct
  misc_feature 1..80: note = Artificially Synthesized Probe
  source 1..80: mol_type = other DNA
ctctttcagtcctgtttgaatgcgggcttcttgtttggctctctcggtgttggctactttgcagacaggtatgtaaaggc

SEQ ID NO: 122654 - DNA, 80 bp, synthetic construct
  misc_feature 1..80: note = Artificially Synthesized Probe
  source 1..80: mol_type = other DNA
tggtggagagatttgaggtgtgtttcagagtccaagctgcatgcagattgtacagttagtgggctgagagaaagcgggga

SEQ ID NO: 122655 - DNA, 80 bp, synthetic construct; identical to SEQ ID NO: 39555
  misc_feature 1..80: note = Artificially Synthesized Probe
  source 1..80: mol_type = other DNA

SEQ ID NO: 122656 - DNA, 80 bp, synthetic construct
  misc_feature 1..80: note = Artificially Synthesized Probe
  source 1..80: mol_type = other DNA
ctgggaaaggagacaggaaaaatggcagcgagatcgaaggacaactgttctccagggcgcttgtggaaatgcaccaggag

SEQ ID NO: 122657 - DNA, 80 bp, synthetic construct
  misc_feature 1..80: note = Artificially Synthesized Probe
  source 1..80: mol_type = other DNA
gggatgcaggaagaagacaggggccagggaacccaggcctggctgggggtctgaggcccagctcagaggtggagacagag

SEQ ID NO: 122658 - DNA, 80 bp, synthetic construct
  misc_feature 1..80: note = Artificially Synthesized Probe
  source 1..80: mol_type = other DNA
cagagccagtcactgccccaggagacagggagaggggacagagccaggcactgccccaggagacagggagaggagacaga

SEQ ID NO: 122659 - DNA, 80 bp, synthetic construct; identical to SEQ ID NO: 39556
  misc_feature 1..80: note = Artificially Synthesized Probe
  source 1..80: mol_type = other DNA

SEQ ID NO: 122660 - DNA, 80 bp, synthetic construct
  misc_feature 1..80: note = Artificially Synthesized Probe
  source 1..80: mol_type = other DNA
gagaagagaaacagccctgtatggctacactatcagagctgaatatggcactgaaaagcttccatgatggttgataagac

SEQ ID NO: 122661 - DNA, 80 bp, synthetic construct
  misc_feature 1..80: note = Artificially Synthesized Probe
  source 1..80: mol_type = other DNA
tcacaattcaaatccagtttattaccaaaatgaacaaaaggagaatgaggcttaaattaaataaattatgcaaatatctc

SEQ ID NO: 122662 - DNA, 80 bp, synthetic construct
  misc_feature 1..80: note = Artificially Synthesized Probe
  source 1..80: mol_type = other DNA
tcaacagtagggttcctctcaatacctccttgtacatatggaaaacttaacccctattttcatcttcataggagaagatg

SEQ ID NO: 122663 - DNA, 80 bp, synthetic construct
  misc_feature 1..80: note = Artificially Synthesized Probe
  source 1..80: mol_type = other DNA
tctcagctcccaccgcccttctgcttccattttccggccactctctgtccagagcctctggtcgccagggactgagcctt

SEQ ID NO: 122664 - DNA, 80 bp, synthetic construct; identical to SEQ ID NO: 39597
  misc_feature 1..80: note = Artificially Synthesized Probe
  source 1..80: mol_type = other DNA

SEQ ID NO: 122665 - DNA, 80 bp, synthetic construct
  misc_feature 1..80: note = Artificially Synthesized Probe
  source 1..80: mol_type = other DNA
gacttgctgtgtctgtctttttgcactggagacacatgtctggtggcctgtggcctcctataactatgaggatgacaggc

SEQ ID NO: 122666 - DNA, 80 bp, synthetic construct
  misc_feature 1..80: note = Artificially Synthesized Probe
  source 1..80: mol_type = other DNA
ccttctctgtaatactcccagtgtgtagaacacagcttctgtcttccaccctggcgctctcctggggtggggtcccattt

SEQ ID NO: 122667 - DNA, 80 bp, synthetic construct
  misc_feature 1..80: note = Artificially Synthesized Probe
  source 1..80: mol_type = other DNA
tgcccacagtcctggctgggttgggctctctttgggcctggcagcacctccagtgccaggcccagaggtggaaggtacag

SEQ ID NO: 122668 - DNA, 80 bp, synthetic construct
  misc_feature 1..80: note = Artificially Synthesized Probe
  source 1..80: mol_type = other DNA
ggaagaaggaggagaggaagctcactacccagatgcactgtgaaaagagagatgtcaaaagcagacctggggaaaaaaca

SEQ ID NO: 122669 - DNA, 80 bp, synthetic construct; identical to SEQ ID NO: 39598
  misc_feature 1..80: note = Artificially Synthesized Probe
  source 1..80: mol_type = other DNA

SEQ ID NO: 122670 - DNA, 80 bp, synthetic construct
  misc_feature 1..80: note = Artificially Synthesized Probe
  source 1..80: mol_type = other DNA
cccaagttgtgctcccgcctaaccttcctgaatagttaggactataggcacgtgccaccacacccagctaactttttatt

SEQ ID NO: 122671 - DNA, 80 bp, synthetic construct
  misc_feature 1..80: note = Artificially Synthesized Probe
  source 1..80: mol_type = other DNA
aataataatgcctacttcatgaaaggattcaaaagttaaggaatgtgacggtcctagcctagtgatggatgctcagtagg

SEQ ID NO: 122672 - DNA, 80 bp, synthetic construct; identical to SEQ ID NO: 39599
  misc_feature 1..80: note = Artificially Synthesized Probe
  source 1..80: mol_type = other DNA

SEQ ID NO: 122673 - DNA, 80 bp, synthetic construct; identical to SEQ ID NO: 39587
  misc_feature 1..80: note = Artificially Synthesized Probe
  source 1..80: mol_type = other DNA

SEQ ID NO: 122674 - DNA, 80 bp, synthetic construct
  misc_feature 1..80: note = Artificially Synthesized Probe
  source 1..80: mol_type = other DNA
actgaggtataatttttctccctgtcctcatcactgtctctctgggtgaccacagatgagccactcacttctctggcttt

SEQ ID NO: 122675 - DNA, 80 bp, synthetic construct
  misc_feature 1..80: note = Artificially Synthesized Probe
  source 1..80: mol_type = other DNA
tggcctttgacaatttacttaaccattctgagccttggtttcatcaccgttaagaaagtttagtaaatcctctcccatag

SEQ ID NO: 122676 - DNA, 80 bp, synthetic construct
  misc_feature 1..80: note = Artificially Synthesized Probe
  source 1..80: mol_type = other DNA
tcatttaatcctcggaaccagcgtttgacgcaaccatgactgcatgagtctcacccccatttacagatgaggaaatagaa

SEQ ID NO: 122677 - DNA, 80 bp, synthetic construct
  misc_feature 1..80: note = Artificially Synthesized Probe
  source 1..80: mol_type = other DNA
catgtttacttgtattaccttgcttcttcttcatagaaaaccctgggaggcagagagcataaaataaccatttgcccagt

SEQ ID NO: 122678 - DNA, 80 bp, synthetic construct; identical to SEQ ID NO: 39600
  misc_feature 1..80: note = Artificially Synthesized Probe
  source 1..80: mol_type = other DNA

SEQ ID NO: 122679 - DNA, 80 bp, synthetic construct
  misc_feature 1..80: note = Artificially Synthesized Probe
  source 1..80: mol_type = other DNA
cagggctcctagcacagactagagaagcagaacattgctccaggaccccagggtctccccttctttttgccctcctgcgc

SEQ ID NO: 122680 - DNA, 80 bp, synthetic construct
  misc_feature 1..80: note = Artificially Synthesized Probe
  source 1..80: mol_type = other DNA
atctctaaatgacgcatgcctagagccctcctagctgggctatataagagcctggtactcgtgggtaggtgcaaatgttg

SEQ ID NO: 122681 - DNA, 80 bp, synthetic construct
  misc_feature 1..80: note = Artificially Synthesized Probe
  source 1..80: mol_type = other DNA
ggttgagactaagtgtgacaacagtggcactttgtggtccgtaaagtgccacacaactctcagggattgttcttattgga

SEQ ID NO: 122682 - DNA, 80 bp, synthetic construct; identical to SEQ ID NO: 39601
  misc_feature 1..80: note = Artificially Synthesized Probe
  source 1..80: mol_type = other DNA

SEQ ID NO: 122683 - DNA, 80 bp, synthetic construct
  misc_feature 1..80: note = Artificially Synthesized Probe
  source 1..80: mol_type = other DNA
ttttgtgcagaataactggtatctattactaggatgccagatgattctgccagctacccatccccctctttggggtttct

SEQ ID NO: 122684 - DNA, 80 bp, synthetic construct
  misc_feature 1..80: note = Artificially Synthesized Probe
  source 1..80: mol_type = other DNA
aaagcgcacagcaaatgacatgaattttaaagaaggagccaaagaagttgctgcagccgagagcgatcatctcctgcagg

SEQ ID NO: 122685 - DNA, 80 bp, synthetic construct
  misc_feature 1..80: note = Artificially Synthesized Probe
  source 1..80: mol_type = other DNA
gaccccctatcccccacactcgaggcagcctgcctcacctcagcccaatgatctccccacccaagatatgtcatgccagg

SEQ ID NO: 122686 - DNA, 80 bp, synthetic construct
  misc_feature 1..80: note = Artificially Synthesized Probe
  source 1..80: mol_type = other DNA
ccactgtgagaccacaggcgacaccggggtggggaacctgccgaggagccaggaaggaggcagaacccaagggtgtgagt

SEQ ID NO: 122687 - DNA, 80 bp, synthetic construct; identical to SEQ ID NO: 39602
  misc_feature 1..80: note = Artificially Synthesized Probe
  source 1..80: mol_type = other DNA

SEQ ID NO: 122688 - DNA, 80 bp, synthetic construct
  misc_feature 1..80: note = Artificially Synthesized Probe
  source 1..80: mol_type = other DNA
tggcacagagtggatgcttcatgaatctggttgaacctaatagttccctttctacatggacaaagaaccaatgcattaga

SEQ ID NO: 122689 - DNA, 80 bp, synthetic construct
  misc_feature 1..80: note = Artificially Synthesized Probe
  source 1..80: mol_type = other DNA
taattcatacatggtcagtgtcatacagtttcgactgcactttcatagagttcatcttgtctccctctccgagctcaggc

SEQ ID NO: 122690 - DNA, 80 bp, synthetic construct
  misc_feature 1..80: note = Artificially Synthesized Probe
  source 1..80: mol_type = other DNA
ggggattggccctaaggtggggccagggcaggcgtctctctcaagtctcccttttctctggggaccctgaatcccactcc

SEQ ID NO: 122691 - DNA, 80 bp, synthetic construct; identical to SEQ ID NO: 39603
  misc_feature 1..80: note = Artificially Synthesized Probe
  source 1..80: mol_type = other DNA

SEQ ID NO: 122692 - DNA, 80 bp, synthetic construct
  misc_feature 1..80: note = Artificially Synthesized Probe
  source 1..80: mol_type = other DNA
acctttgggtgtctgacccagggaagggatgccatcaaagctaatggaggcacaccaagacagaattaaaaccctgatca

SEQ ID NO: 122693 - DNA, 80 bp, synthetic construct
  misc_feature 1..80: note = Artificially Synthesized Probe
  source 1..80: mol_type = other DNA
cactagaatggggaactggcggagaatgtacagctcttttctgcagggattaactaccaagaacctctgtgagtcatgac

SEQ ID NO: 122694 - DNA, 80 bp, synthetic construct
  misc_feature 1..80: note = Artificially Synthesized Probe
  source 1..80: mol_type = other DNA
gtggtttgggcagccttggggatgatggagggggggcgcatagttaccaaggcctagactcctgggtgtggagagcacat

SEQ ID NO: 122695 - DNA, 80 bp, synthetic construct; identical to SEQ ID NO: 39604
  misc_feature 1..80: note = Artificially Synthesized Probe
  source 1..80: mol_type = other DNA

SEQ ID NO: 122696 - DNA, 80 bp, synthetic construct
  misc_feature 1..80: note = Artificially Synthesized Probe
  source 1..80: mol_type = other DNA
cgcaggtctggagctccgtgcagtcctagcgtagcagtagcttgagggaattggaccatctgtgaccttcacctgccctt

SEQ ID NO: 122697 - DNA, 80 bp, synthetic construct
  misc_feature 1..80: note = Artificially Synthesized Probe
  source 1..80: mol_type = other DNA
caaccaaaaacttgagagtcatcctcccttacctcccacatccagtctatcaccaagctcctggtaaaacattcttttca

SEQ ID NO: 122698 - DNA, 80 bp, synthetic construct
  misc_feature 1..80: note = Artificially Synthesized Probe
  source 1..80: mol_type = other DNA
gtagcccaaacgatccttataaactgccaatcagacccaaagtcgctgttcagagaacagaccccagatctcattgtctg

SEQ ID NO: 122699 - DNA, 80 bp, synthetic construct
  misc_feature 1..80: note = Artificially Synthesized Probe
  source 1..80: mol_type = other DNA
ttctcatcctttaagagaggtggagtgtcacctcctctttgaggtcctccgtgactctgctctgtgtccctacagtcttt

SEQ ID NO: 122700 - DNA, 80 bp, synthetic construct; identical to SEQ ID NO: 39605
  misc_feature 1..80: note = Artificially Synthesized Probe
  source 1..80: mol_type = other DNA

SEQ ID NO: 122701 - DNA, 80 bp, synthetic construct
  misc_feature 1..80: note = Artificially Synthesized Probe
  source 1..80: mol_type = other DNA
atggagagaggctgtgagtcttttacaggtttaaagctcaggacagtttaaccaggtacagctgttgtttttttgtatgg

SEQ ID NO: 122702 - DNA, 80 bp, synthetic construct
  misc_feature 1..80: note = Artificially Synthesized Probe
  source 1..80: mol_type = other DNA
ctcggctcactgcaacctctgcctcccggattcaagtgattctcctgcctcagcctcctgagtaggtgggactacaggcg

SEQ ID NO: 122703 - DNA, 80 bp, synthetic construct
  misc_feature 1..80: note = Artificially Synthesized Probe
  source 1..80: mol_type = other DNA
atcagatttagcatcaaagctaaggctttgagggaggggcagggtggtctgatgcccttctagcagggttgggggctgcc

SEQ ID NO: 122704 - DNA, 80 bp, synthetic construct; identical to SEQ ID NO: 39606
  misc_feature 1..80: note = Artificially Synthesized Probe
  source 1..80: mol_type = other DNA

SEQ ID NO: 122705 - DNA, 80 bp, synthetic construct
  misc_feature 1..80: note = Artificially Synthesized Probe
  source 1..80: mol_type = other DNA
tgagaaaatgaactcagaaataagaaatataagcagagcctgaaccagaaaccagcccttgtgaccaggctttcctccat

SEQ ID NO: 122706 - DNA, 80 bp, synthetic construct; identical to SEQ ID NO: 39588
  misc_feature 1..80: note = Artificially Synthesized Probe
  source 1..80: mol_type = other DNA

SEQ ID NO: 122707 - DNA, 80 bp, synthetic construct
  misc_feature 1..80: note = Artificially Synthesized Probe
  source 1..80: mol_type = other DNA
aggtaatgctaactgaactcaaagaggctcagtggtttctccaaggtcaccgaggacctggaaatgacattcacagtgac

SEQ ID NO: 122708 - DNA, 80 bp, synthetic construct
  misc_feature 1..80: note = Artificially Synthesized Probe
  source 1..80: mol_type = other DNA
gaagtaggtcaggagggggaagaaggaggagtagaggccattgactgcaggaaggttggccagcagagcaaatgccatgc

SEQ ID NO: 122709 - DNA, 80 bp, synthetic construct; identical to SEQ ID NO: 39607
  misc_feature 1..80: note = Artificially Synthesized Probe
  source 1..80: mol_type = other DNA

SEQ ID NO: 122710 - DNA, 80 bp, synthetic construct; identical to SEQ ID NO: 39586
  misc_feature 1..80: note = Artificially Synthesized Probe
  source 1..80: mol_type = other DNA

SEQ ID NO: 122711 - DNA, 80 bp, synthetic construct
  misc_feature 1..80: note = Artificially Synthesized Probe
  source 1..80: mol_type = other DNA
ggatattgagaagaaaaggcaggaactttttcttgagagctcatcaacttgtcctgggcattagctggaggtcttctgac

SEQ ID NO: 122712 - DNA, 80 bp, synthetic construct
  misc_feature 1..80: note = Artificially Synthesized Probe
  source 1..80: mol_type = other DNA
actgcaccttggctcctgccgctgtgtgtgcatcctgtgtgtgcattccttgctttttgtctgtctctcccactaggcag

SEQ ID NO: 122713 - DNA, 80 bp, synthetic construct; identical to SEQ ID NO: 39608
  misc_feature 1..80: note = Artificially Synthesized Probe
  source 1..80: mol_type = other DNA

SEQ ID NO: 122714 - DNA, 80 bp, synthetic construct
  misc_feature 1..80: note = Artificially Synthesized Probe
  source 1..80: mol_type = other DNA
acagccggtggattgatgactggaagtgggtgaggggcatttgctttccttctcccagttgagggaactcaaatacttag

SEQ ID NO: 122715 - DNA, 80 bp, synthetic construct
  misc_feature 1..80: note = Artificially Synthesized Probe
  source 1..80: mol_type = other DNA
gaaagtctgggcagattttctcttccaactaacactccaagaaaaagcatcatcatcaatatcttaccccctgtcctttc

SEQ ID NO: 122716 - DNA, 80 bp, synthetic construct
  misc_feature 1..80: note = Artificially Synthesized Probe
  source 1..80: mol_type = other DNA
catcaggtctgtttgtggcagagaaagccggacttatgaatagagagctggctagggaaagaaaaacaactcatttgagg

SEQ ID NO: 122717 - DNA, 80 bp, synthetic construct; identical to SEQ ID NO: 39609
  misc_feature 1..80: note = Artificially Synthesized Probe
  source 1..80: mol_type = other DNA

SEQ ID NO: 122718 - DNA, 80 bp, synthetic construct
  misc_feature 1..80: note = Artificially Synthesized Probe
  source 1..80: mol_type = other DNA
gagagagggggagaggagagaggaacccaagctctgggggatgcactttcctccgcccgacaccccctgtgaccccaggc

SEQ ID NO: 122719 - DNA, 80 bp, synthetic construct
  misc_feature 1..80: note = Artificially Synthesized Probe
  source 1..80: mol_type = other DNA
gggctggggcttttagtacaaactcaagtgggtgattcccccggcctgaaccagttccacctgcgtctccacttcagcca

SEQ ID NO: 122720 - DNA, 80 bp, synthetic construct
  misc_feature 1..80: note = Artificially Synthesized Probe
  source 1..80: mol_type = other DNA
caccttgtgtagcgcctacttagggacaaggtttcatacccaccatcgcatttccagggagatgagagtggaaagaccct

SEQ ID NO: 122721 - DNA, 80 bp, synthetic construct
  misc_feature 1..80: note = Artificially Synthesized Probe
  source 1..80: mol_type = other DNA
aacctggggtgatggtaacttcaggtattttttgtaaggagggaacagggcatggagtaagggctctgatgctccccacc

SEQ ID NO: 122722 - DNA, 80 bp, synthetic construct; identical to SEQ ID NO: 39610
  misc_feature 1..80: note = Artificially Synthesized Probe
  source 1..80: mol_type = other DNA

SEQ ID NO: 122723 - DNA, 80 bp, synthetic construct
  misc_feature 1..80: note = Artificially Synthesized Probe
  source 1..80: mol_type = other DNA
ggagtatgcggctctgtctaccacgtagcggggcctgggctggctcatatctggggcatttacaagctttgggagaagca

SEQ ID NO: 122724 - DNA, 80 bp, synthetic construct
  misc_feature 1..80: note = Artificially Synthesized Probe
  source 1..80: mol_type = other DNA
agtggccttccttcccaggcactgatgatgcatagactcaccctggctgttttgcttggcgctcagcacgtggctggcac

SEQ ID NO: 122725 - DNA, 80 bp, synthetic construct
  misc_feature 1..80: note = Artificially Synthesized Probe
  source 1..80: mol_type = other DNA
agaaaggctcctaccattcagccagtcagcttggaagaaacagaaaacagcttgcctagaggcagggggatagctgagat

SEQ ID NO: 122726 - DNA, 80 bp, synthetic construct
  misc_feature 1..80: note = Artificially Synthesized Probe
  source 1..80: mol_type = other DNA
cttcctgtgcctaatctttcccccacccttgtgtactgccgctcctctcctcctcactttttgcgcaacctggctgacgt

SEQ ID NO: 122727 - DNA, 80 bp, synthetic construct; identical to SEQ ID NO: 39611
  misc_feature 1..80: note = Artificially Synthesized Probe
  source 1..80: mol_type = other DNA

SEQ ID NO: 122728 - DNA, 80 bp, synthetic construct
  misc_feature 1..80: note = Artificially Synthesized Probe
  source 1..80: mol_type = other DNA
ttgcttaatgccttttgtggaagggtccaggagcctgggttaatcctgcttttattaatgaggcagaatggtcagcatta

SEQ ID NO: 122729 - DNA, 80 bp, synthetic construct
  misc_feature 1..80: note = Artificially Synthesized Probe
  source 1..80: mol_type = other DNA
cagttggggtcacagtggctgcaaccaagaggtgaccctaggaacccctggccagaacaaagcacctgtgtgtgtgtgtg

SEQ ID NO: 122730 - DNA, 80 bp, synthetic construct
  misc_feature 1..80: note = Artificially Synthesized Probe
  source 1..80: mol_type = other DNA
tgcaaatgtgagtttctattatgaataagattgtgctcaagttggtgaaggctgggctggtgcattccattcatttggtc

SEQ ID NO: 122731 - DNA, 80 bp, synthetic construct; identical to SEQ ID NO: 39612
  misc_feature 1..80: note = Artificially Synthesized Probe
  source 1..80: mol_type = other DNA

SEQ ID NO: 122732 - DNA, 80 bp, synthetic construct
  misc_feature 1..80: note = Artificially Synthesized Probe
  source 1..80: mol_type = other DNA
tggccttttataggcacccagtaaatggtagtggcgatgattactatgattaagatgggagggtgctttctacctcctag

SEQ ID NO: 122733 - DNA, 80 bp, synthetic construct
  misc_feature 1..80: note = Artificially Synthesized Probe
  source 1..80: mol_type = other DNA
ccagagctgcagaccttgcttcagaaaaagactcatggtttggggagtctagcccaggccactaaacagaccacttgcaa

SEQ ID NO: 122734 - DNA, 80 bp, synthetic construct
  misc_feature 1..80: note = Artificially Synthesized Probe
  source 1..80: mol_type = other DNA
gttcctaggctgctttcaaagggtctaagttccggtagtgtgtttgcggggaagggagttattagcatctgattccgctg

SEQ ID NO: 122735 - DNA, 80 bp, synthetic construct
  misc_feature 1..80: note = Artificially Synthesized Probe
  source 1..80: mol_type = other DNA
tccttcctccctcgcttccttccttccttccttcatgtccttctgtcctgtccattgcctccatacctccacccaccctg

SEQ ID NO: 122736 - DNA, 80 bp, synthetic construct; identical to SEQ ID NO: 39613
  misc_feature 1..80: note = Artificially Synthesized Probe
  source 1..80: mol_type = other DNA

SEQ ID NO: 122737 - DNA, 80 bp, synthetic construct
  misc_feature 1..80: note = Artificially Synthesized Probe
  source 1..80: mol_type = other DNA
cccttctccttcttgcctatgaagcctttcctgaccaccttgaaaccctgaaggatttctctttctcccaggatctccat

SEQ ID NO: 122738 - DNA, 80 bp, synthetic construct
  misc_feature 1..80: note = Artificially Synthesized Probe
  source 1..80: mol_type = other DNA
ctagggagtcccctctgacacaggctaacagaggaaaagcctcccttgctttactggaataccaaatctgtctctttccc

SEQ ID NO: 122739 - DNA, 80 bp, synthetic construct; identical to SEQ ID NO: 39614
  misc_feature 1..80: note = Artificially Synthesized Probe
  source 1..80: mol_type = other DNA

SEQ ID NO: 122740 - DNA, 80 bp, synthetic construct
  misc_feature 1..80: note = Artificially Synthesized Probe
  source 1..80: mol_type = other DNA
ctgatgggacaggacctctgggttctgttactcctcttgagggctctggttccctcctggccttggtttcccaagaatat

SEQ ID NO: 122741 - DNA, 80 bp, synthetic construct
  misc_feature 1..80: note = Artificially Synthesized Probe
  source 1..80: mol_type = other DNA
cttcactttcctcattgggtaaaatgagggttggcagtagacaagctctgaagtcctttctcacgttgataagctatttt

SEQ ID NO: 122742 - DNA, 80 bp, synthetic construct
  misc_feature 1..80: note = Artificially Synthesized Probe
  source 1..80: mol_type = other DNA
aagggtacttcatccccagccagcccttcaggtgagggcaagaggtggagggaagggggatgggagtggtggaaaagggt

SEQ ID NO: 122743 - DNA, 80 bp, synthetic construct
  misc_feature 1..80: note = Artificially Synthesized Probe
  source 1..80: mol_type = other DNA
tgatccccagttaaacaaacaaacagccatgataagtgatgtcagcatcgctggaaaaaaaagtcaagtgccctattgcc

SEQ ID NO: 122744 - DNA, 80 bp, synthetic construct
  misc_feature 1..80: note = Artificially Synthesized Probe
  source 1..80: mol_type = other DNA
agagctggagggacttagagggggtctgtagggtttaaggggagtagggggtgagccaggagagcagagggcaggagatg

SEQ ID NO: 122745 - DNA, 80 bp, synthetic construct; identical to SEQ ID NO: 39615
  misc_feature 1..80: note = Artificially Synthesized Probe
  source 1..80: mol_type = other DNA

SEQ ID NO: 122746 - DNA, 80 bp, synthetic construct
  misc_feature 1..80: note = Artificially Synthesized Probe
  source 1..80: mol_type = other DNA
agcatgcaataaactccaactatcatcattactgctatgactccagaggagcctctttcttgctctgccatctctagtgg

SEQ ID NO: 122747 - DNA, 80 bp, synthetic construct
  misc_feature 1..80: note = Artificially Synthesized Probe
  source 1..80: mol_type = other DNA
atttgtgggttttggttggatctggaggtgatcctgtcactgtgggccaggctgacttcctccctcagtcctgtcggggg

SEQ ID NO: 122748 - DNA, 80 bp, synthetic construct; identical to SEQ ID NO: 39616
  misc_feature 1..80: note = Artificially Synthesized Probe
  source 1..80: mol_type = other DNA

SEQ ID NO: 122749 - DNA, 80 bp, synthetic construct
  misc_feature 1..80: note = Artificially Synthesized Probe
  source 1..80: mol_type = other DNA
ggctggagtgcagtggcacgatcttggctcaccacagggtgcacttcctgggttcaagcaattctcctgcctcagcctcc

SEQ ID NO: 122750 - DNA, 80 bp, synthetic construct
  misc_feature 1..80: note = Artificially Synthesized Probe
  source 1..80: mol_type = other DNA
gagccactgcgcccagccccccaaggcatttttaaacactccttttccttctactgtccctgtgtttccagggcaaatct

SEQ ID NO: 122751 - DNA, 80 bp, synthetic construct
  misc_feature 1..80: note = Artificially Synthesized Probe
  source 1..80: mol_type = other DNA
cactttccctgctgggaatgggtgctgggctgaggaaataggctccagaaagagggaccaaggctagactttgagaatca

SEQ ID NO: 122752 - DNA, 80 bp, synthetic construct; identical to SEQ ID NO: 39589
  misc_feature 1..80: note = Artificially Synthesized Probe
  source 1..80: mol_type = other DNA

SEQ ID NO: 122753 - DNA, 80 bp, synthetic construct
  misc_feature 1..80: note = Artificially Synthesized Probe
  source 1..80: mol_type = other DNA
caggcgaaagcccagagaggcatccagtgaagatcaactccccttgaaggggtggctctgccccttccatcttccaagta

SEQ ID NO: 122754 - DNA, 80 bp, synthetic construct; identical to SEQ ID NO: 39617
  misc_feature 1..80: note = Artificially Synthesized Probe
  source 1..80: mol_type = other DNA

SEQ ID NO: 122755 - DNA, 80 bp, synthetic construct
  misc_feature 1..80: note = Artificially Synthesized Probe
  source 1..80: mol_type = other DNA
gaaagccctctctcagtctgcccacttggggggctgcgtcactccagggtcttctggtcctcagacccgtggggccaagt

SEQ ID NO: 122756 - DNA, 80 bp, synthetic construct
  misc_feature 1..80: note = Artificially Synthesized Probe
  source 1..80: mol_type = other DNA
gctgcccatccactgtcctggcccaagcccttctgtgttgaagcattcaccattgagtcgggcgtcccaggtccagctac

SEQ ID NO: 122757 - DNA, 80 bp, synthetic construct; identical to SEQ ID NO: 39618
  misc_feature 1..80: note = Artificially Synthesized Probe
  source 1..80: mol_type = other DNA

SEQ ID NO: 122758 - DNA, 80 bp, synthetic construct
  misc_feature 1..80: note = Artificially Synthesized Probe
  source 1..80: mol_type = other DNA
caagcccagccttgcagcccaggtccttacatagacgtgaagacccaaagggctcctcagaggggaagggctgggaggct

SEQ ID NO: 122759 - DNA, 80 bp, synthetic construct
  misc_feature 1..80: note = Artificially Synthesized Probe
  source 1..80: mol_type = other DNA
gagcaaagccggctgggcagggctgcaggtgtgtctggggagcgggcagccgaaaggtgttcctgaggtgtgtgaaaggg

SEQ ID NO: 122760 - DNA, 80 bp, synthetic construct
  misc_feature 1..80: note = Artificially Synthesized Probe
  source 1..80: mol_type = other DNA
tgcaacatctgcctcccaggttcaagtgattctcatgcctcagacttccgagtagctgggactacaggcatgcaccacta

SEQ ID NO: 122761 - DNA, 80 bp, synthetic construct
  misc_feature 1..80: note = Artificially Synthesized Probe
  source 1..80: mol_type = other DNA
ttaaggcttgtccacatgcaataataattcatttgtagacccagaatccatctattctaccataacgtaagtttctaaaa

SEQ ID NO: 122762 - DNA, 80 bp, synthetic construct
  misc_feature 1..80: note = Artificially Synthesized Probe
  source 1..80: mol_type = other DNA
aatttcacagatgataaaaactagggcccagggtgtatgtggcttgctcagggtcacgtgggtgatgtgttggagaataa

SEQ ID NO: 122763 - DNA, 80 bp, synthetic construct
  misc_feature 1..80: note = Artificially Synthesized Probe
  source 1..80: mol_type = other DNA
aagttcgagaccagcccagccaacatggtgaaaagctgtctctactaaaaatacaaaaattagctgggcgcaggcctgaa

SEQ ID NO: 122764 - DNA, 80 bp, synthetic construct
  misc_feature 1..80: note = Artificially Synthesized Probe
  source 1..80: mol_type = other DNA
gggttaatgattacttgggggttaaggatcacttcatcaagtcctcaggggatctagatacttggttcaaaggggactct

SEQ ID NO: 122765 - DNA, 80 bp, synthetic construct; identical to SEQ ID NO: 39590
  misc_feature 1..80: note = Artificially Synthesized Probe
  source 1..80: mol_type = other DNA

SEQ ID NO: 122766 - DNA, 80 bp, synthetic construct
  misc_feature 1..80: note = Artificially Synthesized Probe
  source 1..80: mol_type = other DNA
gtgcagaatgagcttcagtgactgaacagcaaagttggtgcatggtggcaggaaaagggacaggtggccggctctggttg

SEQ ID NO: 122767 - DNA, 80 bp, synthetic construct
  misc_feature 1..80: note = Artificially Synthesized Probe
  source 1..80: mol_type = other DNA
agaaaaactattggctagctgcctgaccttggggaattcctgtcctcctgggaatatattttctaatctgttcaagtctg

SEQ ID NO: 122768 - DNA, 80 bp, synthetic construct
  misc_feature 1..80: note = Artificially Synthesized Probe
  source 1..80: mol_type = other DNA
caactagagtagctgaacatgattagggcactaacaactaatgcagcttcctccagaatctccctctttgctctgcggac

SEQ ID NO: 122769 - DNA, 80 bp, synthetic construct; identical to SEQ ID NO: 39591
  misc_feature 1..80: note = Artificially Synthesized Probe
  source 1..80: mol_type = other DNA

SEQ ID NO: 122770 - DNA, 80 bp, synthetic construct
  misc_feature 1..80: note = Artificially Synthesized Probe
  source 1..80: mol_type = other DNA
gaggtaggctttttctgactccccagtcttctggagttttagatggtgttatttgtatcccatttgtaacttactgagct

SEQ ID NO: 122771 - DNA, 80 bp, synthetic construct
  misc_feature 1..80: note = Artificially Synthesized Probe
  source 1..80: mol_type = other DNA
gggaacgatgccagcagagtgggcctgctctactatgctttgggtgtttgtgcaaccagaaaacttatattgataaagaa

SEQ ID NO: 122772 - DNA, 80 bp, synthetic construct; identical to SEQ ID NO: 39592
  misc_feature 1..80: note = Artificially Synthesized Probe
  source 1..80: mol_type = other DNA

SEQ ID NO: 122773 - DNA, 80 bp, synthetic construct
  misc_feature 1..80: note = Artificially Synthesized Probe
  source 1..80: mol_type = other DNA
tagactcccatcctcaaagacgcctccatggctaatgtcattgtacacctgggctagaaggagaaaagatcaccttcaga

SEQ ID NO: 122774 - DNA, 80 bp, synthetic construct
  misc_feature 1..80: note = Artificially Synthesized Probe
  source 1..80: mol_type = other DNA
ggatgctgaagtttcaacccagagcagaaggaagcagtttgatttagggagtcagtactttgtggtgattcgagtggaaa

SEQ ID NO: 122775 - DNA, 80 bp, synthetic construct
  misc_feature 1..80: note = Artificially Synthesized Probe
  source 1..80: mol_type = other DNA
agtgaggttggggagaatccactgcttctaactccagaacatatcatagcaggtcattgccactgcagattctctccccg

SEQ ID NO: 122776 - DNA, 80 bp, synthetic construct
  misc_feature 1..80: note = Artificially Synthesized Probe
  source 1..80: mol_type = other DNA
acattgtccttcgccttccaagttttgagttccattggcagccagatggcataatgaattcacagaaaagcaatgctcct

SEQ ID NO: 122777 - DNA, 80 bp, synthetic construct
  misc_feature 1..80: note = Artificially Synthesized Probe
  source 1..80: mol_type = other DNA
aatgtctgctgccctgtggccacgtccttgaggctgtgtatatgcaccctttggaggctgtatgcctacaaaactgcata

SEQ ID NO: 122778 - DNA, 80 bp, synthetic construct; identical to SEQ ID NO: 39593
  misc_feature 1..80: note = Artificially Synthesized Probe
  source 1..80: mol_type = other DNA

SEQ ID NO: 122779 - DNA, 80 bp, synthetic construct
  misc_feature 1..80: note = Artificially Synthesized Probe
  source 1..80: mol_type = other DNA
tccttgccagtctttcagtccctaaatgtcctctttctcttaccatggatgttcaccaagaagaccttcacgccgatctt

SEQ ID NO: 122780 - DNA, 80 bp, synthetic construct
  misc_feature 1..80: note = Artificially Synthesized Probe
  source 1..80: mol_type = other DNA
agcaaagcacaccacttctccctggagtgttggctgacggtttctctgggaagtggagcggaaatggacttttgccaacg

SEQ ID NO: 122781 - DNA, 80 bp, synthetic construct
  misc_feature 1..80: note = Artificially Synthesized Probe
  source 1..80: mol_type = other DNA
cctcagcctaccgagtagctgggactacaggggcccgtcaccacacctggctaatttttgtatttttagtagaggcgggg

SEQ ID NO: 122782 - DNA, 80 bp, synthetic construct; identical to SEQ ID NO: 39594
  misc_feature 1..80: note = Artificially Synthesized Probe
  source 1..80: mol_type = other DNA

SEQ ID NO: 122783 - DNA, 80 bp, synthetic construct
  misc_feature 1..80: note = Artificially Synthesized Probe
  source 1..80: mol_type = other DNA
ttatcagatggatacattcattcaaggtgtcccgtgggctctctgtttggcctgatggtgtggggcactggtattattcc

SEQ ID NO: 122784 - DNA, 80 bp, synthetic construct
  misc_feature 1..80: note = Artificially Synthesized Probe
  source 1..80: mol_type = other DNA
aactctggtagacttgtcccgccactcattgtcatgggccgtctgggcctgctctgtggagaatgtctcaacctggtggc

SEQ ID NO: 122785 - DNA, 80 bp, synthetic construct; identical to SEQ ID NO: 39595
  misc_feature 1..80: note = Artificially Synthesized Probe
  source 1..80: mol_type = other DNA

SEQ ID NO: 122786 - DNA, 80 bp, synthetic construct
  misc_feature 1..80: note = Artificially Synthesized Probe
  source 1..80: mol_type = other DNA
tcaaagtcctgctgcagctcctgcagggagacagtctggaagggtggggacagtgggcagagtcagggaccaccagactg

SEQ ID NO: 122787 - DNA, 80 bp, synthetic construct
  misc_feature 1..80: note = Artificially Synthesized Probe
  source 1..80: mol_type = other DNA
gaaggggttgttaagctgaagaagcttgagaaaagcagtgatgagaggccagaagattttctgtgcatttccactgaaat

SEQ ID NO: 122788 - DNA, 80 bp, synthetic construct
  misc_feature 1..80: note = Artificially Synthesized Probe
  source 1..80: mol_type = other DNA
ccagacaaagtcagaggacccagccaagagaggcactgaagcctcaagcccactctctctgggagaaagcccctccgggg

SEQ ID NO: 122789 - DNA, 80 bp, synthetic construct
  misc_feature 1..80: note = Artificially Synthesized Probe
  source 1..80: mol_type = other DNA
cgcctggctaatttttgtgtatttttagtagagacagcgtttcgccacgttgggcaggctggtctcgaactcctgaactc

SEQ ID NO: 122790 - DNA, 80 bp, synthetic construct; identical to SEQ ID NO: 39596
  misc_feature 1..80: note = Artificially Synthesized Probe
  source 1..80: mol_type = other DNA

SEQ ID NO: 122791 - DNA, 80 bp, synthetic construct
  misc_feature 1..80: note = Artificially Synthesized Probe
  source 1..80: mol_type = other DNA
cctgtaatctcagcgacttgggaggctaaggcaggagaatcgcttgaaccccagaggtggaggttgcagtgagccaagat

SEQ ID NO: 122792 - DNA, 80 bp, synthetic construct
  misc_feature 1..80: note = Artificially Synthesized Probe
  source 1..80: mol_type = other DNA
gagtaacagggggcagtatcagaatgggcaggagagcagggcacggggctgcttctggccttcattcaccttggttttca

SEQ ID NO: 122793 - DNA, 80 bp, synthetic construct
  misc_feature 1..80: note = Artificially Synthesized Probe
  source 1..80: mol_type = other DNA
cgctggggctgcgctgcgccgccggctctgtggcttgccggcttcggggaaggtgcggcaggcggtgctgcggcctggca

SEQ ID NO: 122794 - DNA, 80 bp, synthetic construct; identical to SEQ ID NO: 39629
  misc_feature 1..80: note = Artificially Synthesized Probe
  source 1..80: mol_type = other DNA

SEQ ID NO: 122795 - DNA, 80 bp, synthetic construct
  misc_feature 1..80: note = Artificially Synthesized Probe
  source 1..80: mol_type = other DNA
tggctcacacctgtaatcccagcactttgagaggccaaggtgggcggatcacttgaggccaggagttcgagaccatcctg

SEQ ID NO: 122796 - DNA, 80 bp, synthetic construct
  misc_feature 1..80: note = Artificially Synthesized Probe
  source 1..80: mol_type = other DNA
cactgcactccagcctgggcaacagtacaagactctgtctcggaaaaaaaaaaaagaaagaaattatctgggtgtggtgg

SEQ ID NO: 122797 - DNA, 80 bp, synthetic construct
  misc_feature 1..80: note = Artificially Synthesized Probe
  source 1..80: mol_type = other DNA
ctgggtctggtggcgtgtgcctgtaatcccagctacctgtgaggctgaggcatgagaattgcttgaacctgggaggcaaa

SEQ ID NO: 122798 - DNA, 80 bp, synthetic construct
  misc_feature 1..80: note = Artificially Synthesized Probe
  source 1..80: mol_type = other DNA
ttcgagaccagcctggttaacatggtgaaaccctgtctctactaaaagtacaaaaagtagctgggcttggtggcgggtgc

SEQ ID NO: 122799 - DNA, 80 bp, synthetic construct; identical to SEQ ID NO: 39630
  misc_feature 1..80: note = Artificially Synthesized Probe
  source 1..80: mol_type = other DNA

SEQ ID NO: 122800 - DNA, 80 bp, synthetic construct
  misc_feature 1..80: note = Artificially Synthesized Probe
  source 1..80: mol_type = other DNA
cccctttgacttggcctggtcatccacagaacctccctgggttctgggtggggagtcgagccagagactttttttttctt

SEQ ID NO: 122801 - DNA, 80 bp, synthetic construct
  misc_feature 1..80: note = Artificially Synthesized Probe
  source 1..80: mol_type = other DNA
gtcaggagatcaagaccatcctggctaacacgatgaaaccccatctctactaaaaatacaaaaaaaaaaaaaaattagcc

SEQ ID NO: 122802 - DNA, 80 bp, synthetic construct
  misc_feature 1..80: note = Artificially Synthesized Probe
  source 1..80: mol_type = other DNA
aaaaaaaaagttgttttaaattgaaaaaaggatgagcacaccagcctcacagtgtgtgtggcagtgtcccacggggcatc

SEQ ID NO: 122803 - DNA, 80 bp, synthetic construct
  misc_feature 1..80: note = Artificially Synthesized Probe
  source 1..80: mol_type = other DNA
gggcagcaccagggaagagcctggtgatggaagccggggaggcttcttggaggaggtcacccaaggcaggcagatgtgag

SEQ ID NO: 122804 - DNA, 80 bp, synthetic construct; identical to SEQ ID NO: 39631
  misc_feature 1..80: note = Artificially Synthesized Probe
  source 1..80: mol_type = other DNA
